United States Patent Application Publication US 2014/0004565 A1 - sequence listing, part 49

SEQ ID NO: 1149762 - RNA, 19 nt, Artificial Sequence
  Description of Artificial Sequence: Synthetic oligonucleotide
uccccauuucauaauaugc

SEQ ID NO: 1149763 - RNA, 19 nt, Artificial Sequence
  Description of Artificial Sequence: Synthetic oligonucleotide
auuaaaaucgaagggucuc

SEQ ID NO: 1149764 - RNA, 19 nt, Artificial Sequence
  Description of Artificial Sequence: Synthetic oligonucleotide
aauuaugcuuccuguauau

SEQ ID NO: 1149765 - RNA, 19 nt, Artificial Sequence
  Description of Artificial Sequence: Synthetic oligonucleotide
uagaacuuacauauugugu

SEQ ID NO: 1149766 - RNA, 19 nt, Artificial Sequence
  Description of Artificial Sequence: Synthetic oligonucleotide
acaaggcacauauuaacag

SEQ ID NO: 1149767 - RNA, 19 nt, Artificial Sequence
  Description of Artificial Sequence: Synthetic oligonucleotide
uagucuuacaugcaaauuu

SEQ ID NO: 1149768 - RNA, 19 nt, Artificial Sequence
  Description of Artificial Sequence: Synthetic oligonucleotide
aauuuugcaugagucaucu

SEQ ID NO: 1149769 - RNA, 19 nt, Artificial Sequence
  Description of Artificial Sequence: Synthetic oligonucleotide
caacaaagccaauugaaac

SEQ ID NO: 1149770 - RNA, 19 nt, Artificial Sequence
  Description of Artificial Sequence: Synthetic oligonucleotide
uauuauuugcagcaauuau

SEQ ID NO: 1149771 - RNA, 19 nt, Artificial Sequence
  Description of Artificial Sequence: Synthetic oligonucleotide
aacuuucuaauugagaauu

SEQ ID NO: 1149772 - RNA, 19 nt, Artificial Sequence
  Description of Artificial Sequence: Synthetic oligonucleotide
aaaucaaaugguccaccug

SEQ ID NO: 1149773 - RNA, 19 nt, Artificial Sequence
  Description of Artificial Sequence: Synthetic oligonucleotide
aaacucaauuaaguauggc

SEQ ID NO: 1149774 - RNA, 19 nt, Artificial Sequence
  Description of Artificial Sequence: Synthetic oligonucleotide
ugaucgguaacuguuacca

SEQ ID NO: 1149775 - RNA, 19 nt, Artificial Sequence
  Description of Artificial Sequence: Synthetic oligonucleotide
aacuuacauauugugugac

SEQ ID NO: 1149776 - RNA, 19 nt, Artificial Sequence
  Description of Artificial Sequence: Synthetic oligonucleotide
aagauagucuuacaugcaa

SEQ ID NO: 1149777 - RNA, 19 nt, Artificial Sequence
  Description of Artificial Sequence: Synthetic oligonucleotide
cuggugauuauucaauggc

SEQ ID NO: 1149778 - RNA, 19 nt, Artificial Sequence
  Description of Artificial Sequence: Synthetic oligonucleotide
auauccaaggaccaaggcu

SEQ ID NO: 1149779 - RNA, 19 nt, Artificial Sequence
  Description of Artificial Sequence: Synthetic oligonucleotide
ugugacguuuuaaaucuug

SEQ ID NO: 1149780 - RNA, 19 nt, Artificial Sequence
  Description of Artificial Sequence: Synthetic oligonucleotide
aauuguacauuaaaaucga

SEQ ID NO: 1149781 - RNA, 19 nt, Artificial Sequence
  Description of Artificial Sequence: Synthetic oligonucleotide
uauugugugacguuuuaaa

SEQ ID NO: 1149782 - RNA, 19 nt, Artificial Sequence
  Description of Artificial Sequence: Synthetic oligonucleotide
agggaacuuauguacaaag

SEQ ID NO: 1149783 - RNA, 19 nt, Artificial Sequence
  Description of Artificial Sequence: Synthetic oligonucleotide
uagugguuccaucaacagg

SEQ ID NO: 1149784 - RNA, 19 nt, Artificial Sequence
  Description of Artificial Sequence: Synthetic oligonucleotide
aagcaacaaguuuggaaag

SEQ ID NO: 1149785 - RNA, 19 nt, Artificial Sequence
  Description of Artificial Sequence: Synthetic oligonucleotide
aaagccaauugaaacagcu

SEQ ID NO: 1149786 - RNA, 19 nt, Artificial Sequence
  Description of Artificial Sequence: Synthetic oligonucleotide
aauugaaaucagugacauc

SEQ ID NO: 1149787 - RNA, 19 nt, Artificial Sequence
  Description of Artificial Sequence: Synthetic oligonucleotide
aucgguaacuguuaccaag

SEQ ID NO: 1149788 - RNA, 19 nt, Artificial Sequence
  Description of Artificial Sequence: Synthetic oligonucleotide
gucaccaagagugauuugg

SEQ ID NO: 1149789 - RNA, 19 nt, Artificial Sequence
  Description of Artificial Sequence: Synthetic oligonucleotide
auuaaguauggcuuuuaga

SEQ ID NO: 1149790 - RNA, 19 nt, Artificial Sequence
  Description of Artificial Sequence: Synthetic oligonucleotide
aguuagugguuccaucaac

SEQ ID NO: 1149791 - RNA, 19 nt, Artificial Sequence
  Description of Artificial Sequence: Synthetic oligonucleotide
uugugcauauaaauuguac

SEQ ID NO: 1149792 - RNA, 19 nt, Artificial Sequence
  Description of Artificial Sequence: Synthetic oligonucleotide
uaccgcauaauccaugcac

SEQ ID NO: 1149793 - RNA, 19 nt, Artificial Sequence
  Description of Artificial Sequence: Synthetic oligonucleotide
acuuacauauugugugacg

SEQ ID NO: 1149794 - RNA, 19 nt, Artificial Sequence
  Description of Artificial Sequence: Synthetic oligonucleotide
cuauaauauguuuccugcc

SEQ ID NO: 1149795 - RNA, 19 nt, Artificial Sequence
  Description of Artificial Sequence: Synthetic oligonucleotide
uuuagagcuucccgaauca

SEQ ID NO: 1149796 - RNA, 19 nt, Artificial Sequence
  Description of Artificial Sequence: Synthetic oligonucleotide
aauacuccauccaauuuug

SEQ ID NO: 1149797 - RNA, 19 nt, Artificial Sequence
  Description of Artificial Sequence: Synthetic oligonucleotide
aaacuuucuaauugagaau

SEQ ID NO: 1149798 - RNA, 19 nt, Artificial Sequence
  Description of Artificial Sequence: Synthetic oligonucleotide
uccaauuuugcaugaguca

SEQ ID NO: 1149799 - RNA, 19 nt, Artificial Sequence
  Description of Artificial Sequence: Synthetic oligonucleotide
ugaccauuacaaaaggcuc

SEQ ID NO: 1149800 - RNA, 19 nt, Artificial Sequence
  Description of Artificial Sequence: Synthetic oligonucleotide
uguacaaaguuagugguuc

SEQ ID NO: 1149801 - RNA, 19 nt, Artificial Sequence
  Description of Artificial Sequence: Synthetic oligonucleotide
caaacucaauuaaguaugg

SEQ ID NO: 1149802 - RNA, 19 nt, Artificial Sequence
  Description of Artificial Sequence: Synthetic oligonucleotide
uuagugguuccaucaacag

SEQ ID NO: 1149803 - RNA, 19 nt, Artificial Sequence
  Description of Artificial Sequence: Synthetic oligonucleotide
acaaagccaauugaaacag

SEQ ID NO: 1149804 - RNA, 19 nt, Artificial Sequence
  Description of Artificial Sequence: Synthetic oligonucleotide
ugucuugcgaggguuaccg

SEQ ID NO: 1149805 - RNA, 19 nt, Artificial Sequence
  Description of Artificial Sequence: Synthetic oligonucleotide
uuucaacaaucaaauacuc

SEQ ID NO: 1149806 - RNA, 19 nt, Artificial Sequence
  Description of Artificial Sequence: Synthetic oligonucleotide
uuuaaucaugacauucauc

SEQ ID NO: 1149807 - RNA, 19 nt, Artificial Sequence
  Description of Artificial Sequence: Synthetic oligonucleotide
ucggugacgaugaugccag

SEQ ID NO: 1149808 - RNA, 19 nt, Artificial Sequence
  Description of Artificial Sequence: Synthetic oligonucleotide
uauuaacagcagcuguucc

SEQ ID NO: 1149809 - RNA, 19 nt, Artificial Sequence
  Description of Artificial Sequence: Synthetic oligonucleotide
uggugauuauucaauggcu

SEQ ID NO: 1149810 - RNA, 19 nt, Artificial Sequence
  Description of Artificial Sequence: Synthetic oligonucleotide
gugauuauucaauggcuag

SEQ ID NO: 1149811 - RNA, 19 nt, Artificial Sequence
  Description of Artificial Sequence: Synthetic oligonucleotide
cuguuaccaagucagcugg

SEQ ID NO: 1149812 - RNA, 19 nt, Artificial Sequence
  Description of Artificial Sequence: Synthetic oligonucleotide
uguucccauuuucaaauca

SEQ ID NO: 1149813 - RNA, 19 nt, Artificial Sequence
  Description of Artificial Sequence: Synthetic oligonucleotide
aucauagagauuuaaucua

SEQ ID NO: 1149814 - RNA, 19 nt, Artificial Sequence
  Description of Artificial Sequence: Synthetic oligonucleotide
ugagaauugugcauauaaa

SEQ ID NO: 1149815 - RNA, 19 nt, Artificial Sequence
  Description of Artificial Sequence: Synthetic oligonucleotide
caccauuauaaaacaagag

SEQ ID NO: 1149816 - RNA, 19 nt, Artificial Sequence
  Description of Artificial Sequence: Synthetic oligonucleotide
ucaaugauccacgugggcu

SEQ ID NO: 1149817 - RNA, 19 nt, Artificial Sequence
  Description of Artificial Sequence: Synthetic oligonucleotide
aaaucacccacacuauaau

SEQ ID NO: 1149818 - RNA, 19 nt, Artificial Sequence
  Description of Artificial Sequence: Synthetic oligonucleotide
aaagggaacuuauguacaa

SEQ ID NO: 1149819 - RNA, 19 nt, Artificial Sequence
  Description of Artificial Sequence: Synthetic oligonucleotide
auauauagacagcagugau

SEQ ID NO: 1149820 - RNA, 19 nt, Artificial Sequence
  Description of Artificial Sequence: Synthetic oligonucleotide
uuucugaucgguaacuguu

SEQ ID NO: 1149821 - RNA, 19 nt, Artificial Sequence
  Description of Artificial Sequence: Synthetic oligonucleotide
auauuaacagcagcuguuc

SEQ ID NO: 1149822 - RNA, 19 nt, Artificial Sequence
  Description of Artificial Sequence: Synthetic oligonucleotide
aggcccaagauccucacag

SEQ ID NO: 1149823 - RNA, 19 nt, Artificial Sequence
  Description of Artificial Sequence: Synthetic oligonucleotide
aaaaucgaagggucucaug

SEQ ID NO: 1149824 - RNA, 19 nt, Artificial Sequence
  Description of Artificial Sequence: Synthetic oligonucleotide
uaauauguuuccugccuug

SEQ ID NO: 1149825 - RNA, 19 nt, Artificial Sequence
  Description of Artificial Sequence: Synthetic oligonucleotide
cuguugugagaccugaagc

SEQ ID NO: 1149826 - RNA, 19 nt, Artificial Sequence
  Description of Artificial Sequence: Synthetic oligonucleotide
uacaagaacacuucauuuu

SEQ ID NO: 1149827 - RNA, 19 nt, Artificial Sequence
  Description of Artificial Sequence: Synthetic oligonucleotide
ugacgaugaugccagcucc

SEQ ID NO: 1149828 - RNA, 19 nt, Artificial Sequence
  Description of Artificial Sequence: Synthetic oligonucleotide
uaauccaugcacuccugcc

SEQ ID NO: 1149829 - RNA, 19 nt, Artificial Sequence
  Description of Artificial Sequence: Synthetic oligonucleotide
aauugagaauugugcauau

SEQ ID NO: 1149830 - RNA, 19 nt, Artificial Sequence
  Description of Artificial Sequence: Synthetic oligonucleotide
aaggcacauauuaacagca

SEQ ID NO: 1149831 - RNA, 19 nt, Artificial Sequence
  Description of Artificial Sequence: Synthetic oligonucleotide
guuaccgcauaauccaugc

SEQ ID NO: 1149832 - RNA, 19 nt, Artificial Sequence
  Description of Artificial Sequence: Synthetic oligonucleotide
gugaagacggucuuuuccc

SEQ ID NO: 1149833 - RNA, 19 nt, Artificial Sequence
  Description of Artificial Sequence: Synthetic oligonucleotide
uaccaagucagcuggagaa

SEQ ID NO: 1149834 - RNA, 19 nt, Artificial Sequence
  Description of Artificial Sequence: Synthetic oligonucleotide
ugccacaaggcacauauua

SEQ ID NO: 1149835 - RNA, 19 nt, Artificial Sequence
  Description of Artificial Sequence: Synthetic oligonucleotide
ugucacguccaucagcacu

SEQ ID NO: 1149836 - RNA, 19 nt, Artificial Sequence
  Description of Artificial Sequence: Synthetic oligonucleotide
uuuucccuaagauagucuu

SEQ ID NO: 1149837 - RNA, 19 nt, Artificial Sequence
  Description of Artificial Sequence: Synthetic oligonucleotide
auccaauuuugcaugaguc

SEQ ID NO: 1149838 - RNA, 19 nt, Artificial Sequence
  Description of Artificial Sequence: Synthetic oligonucleotide
auagagauuuaaucuauua

SEQ ID NO: 1149839 - RNA, 19 nt, Artificial Sequence
  Description of Artificial Sequence: Synthetic oligonucleotide
aagacggucuuuuccccag

SEQ ID NO: 1149840 - RNA, 19 nt, Artificial Sequence
  Description of Artificial Sequence: Synthetic oligonucleotide
uauucuccgagacaucaaa

SEQ ID NO: 1149841 - RNA, 19 nt, Artificial Sequence
  Description of Artificial Sequence: Synthetic oligonucleotide
uguuacagucucacaaacu

SEQ ID NO: 1149842 - RNA, 19 nt, Artificial Sequence
  Description of Artificial Sequence: Synthetic oligonucleotide
cuuauaauagaacuuacau

SEQ ID NO: 1149843 - RNA, 19 nt, Artificial Sequence
  Description of Artificial Sequence: Synthetic oligonucleotide
accaagagugauuugguaa

SEQ ID NO: 1149844 - RNA, 19 nt, Artificial Sequence
  Description of Artificial Sequence: Synthetic oligonucleotide
aacuguuaccaagucagcu

SEQ ID NO: 1149845 - RNA, 19 nt, Artificial Sequence
  Description of Artificial Sequence: Synthetic oligonucleotide
uuuuacaacaaagccaauu

SEQ ID NO: 1149846 - RNA, 19 nt, Artificial Sequence
  Description of Artificial Sequence: Synthetic oligonucleotide
uaauuaugcuuccuguaua

SEQ ID NO: 1149847 - RNA, 19 nt, Artificial Sequence
  Description of Artificial Sequence: Synthetic oligonucleotide
gaggguuaccgcauaaucc

SEQ ID NO: 1149848 - RNA, 19 nt, Artificial Sequence
  Description of Artificial Sequence: Synthetic oligonucleotide
aacuaacuuucaucaucuc

SEQ ID NO: 1149849 - RNA, 19 nt, Artificial Sequence
  Description of Artificial Sequence: Synthetic oligonucleotide
ugaaacuuacaagaacacu

SEQ ID NO: 1149850 - RNA, 19 nt, Artificial Sequence
  Description of Artificial Sequence: Synthetic oligonucleotide
uguggacuggugauuauuc

SEQ ID NO: 1149851 - RNA, 19 nt, Artificial Sequence
  Description of Artificial Sequence: Synthetic oligonucleotide
ucccgaaucaucucuccag

SEQ ID NO: 1149852 - RNA, 19 nt, Artificial Sequence
  Description of Artificial Sequence: Synthetic oligonucleotide
ucgguaacuguuaccaagu

SEQ ID NO: 1149853 - RNA, 19 nt, Artificial Sequence
  Description of Artificial Sequence: Synthetic oligonucleotide
auugugugacguuuuaaau

SEQ ID NO: 1149854 - RNA, 19 nt, Artificial Sequence
  Description of Artificial Sequence: Synthetic oligonucleotide
uuaaaaucgaagggucuca

SEQ ID NO: 1149855 - RNA, 19 nt, Artificial Sequence
  Description of Artificial Sequence: Synthetic oligonucleotide
gcagcaauuauucuccgag

SEQ ID NO: 1149856 - RNA, 19 nt, Artificial Sequence
  Description of Artificial Sequence: Synthetic oligonucleotide
ucaaaucaaaugguccacc

SEQ ID NO: 1149857 - RNA, 19 nt, Artificial Sequence
  Description of Artificial Sequence: Synthetic oligonucleotide
uacaugcaaauuuucuuuc

SEQ ID NO: 1149858 - RNA, 19 nt, Artificial Sequence
  Description of Artificial Sequence: Synthetic oligonucleotide
ucacccacacuauaauaug

SEQ ID NO: 1149859 - RNA, 19 nt, Artificial Sequence
  Description of Artificial Sequence: Synthetic oligonucleotide
cacagcuguacacaacucc

SEQ ID NO: 1149860 - RNA, 19 nt, Artificial Sequence
  Description of Artificial Sequence: Synthetic oligonucleotide
uuauuauuugcagcaauua

SEQ ID NO: 1149861 - RNA, 19 nt, Artificial Sequence
  Description of Artificial Sequence: Synthetic oligonucleotide
gagaauugugcauauaaau

SEQ ID NO: 1149862 - RNA, 19 nt, Artificial Sequence
  Description of Artificial Sequence: Synthetic oligonucleotide
accugucacguccaucagc

SEQ ID NO: 1149863 - RNA, 19 nt, Artificial Sequence
  Description of Artificial Sequence: Synthetic oligonucleotide
gaacuuacauauuguguga

SEQ ID NO: 1149864 - RNA, 19 nt, Artificial Sequence
  Description of Artificial Sequence: Synthetic oligonucleotide
agaaaacuuucuaauugag

SEQ ID NO: 1149865 - RNA, 19 nt, Artificial Sequence
  Description of Artificial Sequence: Synthetic oligonucleotide
ugagauggguacuuuuccu

SEQ ID NO: 1149866 - RNA, 19 nt, Artificial Sequence
  Description of Artificial Sequence: Synthetic oligonucleotide
acaaccugucuuauaauag

SEQ ID NO: 1149867 - RNA, 19 nt, Artificial Sequence
  Description of Artificial Sequence: Synthetic oligonucleotide
caaaugguccaccugucac

SEQ ID NO: 1149868 - RNA, 19 nt, Artificial Sequence
  Description of Artificial Sequence: Synthetic oligonucleotide
gaaaacuuucuaauugaga

SEQ ID NO: 1149869 - RNA, 19 nt, Artificial Sequence
  Description of Artificial Sequence: Synthetic oligonucleotide
uuaccaagucagcuggaga

SEQ ID NO: 1149870 - RNA, 19 nt, Artificial Sequence
  Description of Artificial Sequence: Synthetic oligonucleotide
gcuaauguuuuauuauuug

SEQ ID NO: 1149871 - RNA, 19 nt, Artificial Sequence
  Description of Artificial Sequence: Synthetic oligonucleotide
cagaauaucauagagauuu

SEQ ID NO: 1149872 - RNA, 19 nt, Artificial Sequence
  Description of Artificial Sequence: Synthetic oligonucleotide
aauauguuuccugccuuga

SEQ ID NO: 1149873 - RNA, 19 nt, Artificial Sequence
  Description of Artificial Sequence: Synthetic oligonucleotide
ugauuauucaauggcuagu

SEQ ID NO: 1149874 - RNA, 19 nt, Artificial Sequence
  Description of Artificial Sequence: Synthetic oligonucleotide
uccguaaagucucuggcuu

SEQ ID NO: 1149875 - RNA, 19 nt, Artificial Sequence
  Description of Artificial Sequence: Synthetic oligonucleotide
aaacaucccagggucagca

SEQ ID NO: 1149876 - RNA, 19 nt, Artificial Sequence
  Description of Artificial Sequence: Synthetic oligonucleotide
gcuaguucauuaauuaugc

SEQ ID NO: 1149877 - RNA, 19 nt, Artificial Sequence
  Description of Artificial Sequence: Synthetic oligonucleotide
ccuaagauagucuuacaug

SEQ ID NO: 1149878 - RNA, 19 nt, Artificial Sequence
  Description of Artificial Sequence: Synthetic oligonucleotide
uccgagacaucaaaucaaa

SEQ ID NO: 1149879 - RNA, 19 nt, Artificial Sequence
  Description of Artificial Sequence: Synthetic oligonucleotide
ugugccaacuaacuuucau

SEQ ID NO: 1149880 - RNA, 19 nt, Artificial Sequence
  Description of Artificial Sequence: Synthetic oligonucleotide
aauuauucuccgagacauc

SEQ ID NO: 1149881 - RNA, 19 nt, Artificial Sequence
  Description of Artificial Sequence: Synthetic oligonucleotide
acucaauuaaguauggcuu

SEQ ID NO: 1149882 - RNA, 19 nt, Artificial Sequence
  Description of Artificial Sequence: Synthetic oligonucleotide
aauggcuaguucauuaauu

SEQ ID NO: 1149883 - RNA, 19 nt, Artificial Sequence
  Description of Artificial Sequence: Synthetic oligonucleotide
uggacuggugauuauucaa

SEQ ID NO: 1149884 - RNA, 19 nt, Artificial Sequence
  Description of Artificial Sequence: Synthetic oligonucleotide
aaugcaagguucaaacaua

SEQ ID NO: 1149885 - RNA, 19 nt, Artificial Sequence
  Description of Artificial Sequence: Synthetic oligonucleotide
auaauauguuuccugccuu

SEQ ID NO: 1149886 - RNA, 19 nt, Artificial Sequence
  Description of Artificial Sequence: Synthetic oligonucleotide
aaacaaccugucuuauaau

SEQ ID NO: 1149887 - RNA, 19 nt, Artificial Sequence
  Description of Artificial Sequence: Synthetic oligonucleotide
aaugguccaccugucacgu

SEQ ID NO: 1149888 - RNA, 19 nt, Artificial Sequence
  Description of Artificial Sequence: Synthetic oligonucleotide
cugaccauuacaaaaggcu

SEQ ID NO: 1149889 - RNA, 19 nt, Artificial Sequence
  Description of Artificial Sequence: Synthetic oligonucleotide
uucaaacaucccaggguca

SEQ ID NO: 1149890 - RNA, 19 nt, Artificial Sequence
  Description of Artificial Sequence: Synthetic oligonucleotide
ugaaaucagugacaucaua

SEQ ID NO: 1149891 - RNA, 19 nt, Artificial Sequence
  Description of Artificial Sequence: Synthetic oligonucleotide
agugauuugguaaugucuu

SEQ ID NO: 1149892 - RNA, 19 nt, Artificial Sequence
  Description of Artificial Sequence: Synthetic oligonucleotide
uaacuguuaccaagucagc

SEQ ID NO: 1149893 - RNA, 19 nt, Artificial Sequence
  Description of Artificial Sequence: Synthetic oligonucleotide
cauauccaaggaccaaggc

SEQ ID NO: 1149894 - RNA, 19 nt, Artificial Sequence
  Description of Artificial Sequence: Synthetic oligonucleotide
caguccguaaagucucugg

SEQ ID NO: 1149895 - RNA, 19 nt, Artificial Sequence
  Description of Artificial Sequence: Synthetic oligonucleotide
gaugggaauggagcaaagc

SEQ ID NO: 1149896 - RNA, 19 nt, Artificial Sequence
  Description of Artificial Sequence: Synthetic oligonucleotide
aagccucugaccauuacaa

SEQ ID NO: 1149897 - RNA, 19 nt, Artificial Sequence
  Description of Artificial Sequence: Synthetic oligonucleotide
ugacguuuuaaaucuugua

SEQ ID NO: 1149898 - RNA, 19 nt, Artificial Sequence
  Description of Artificial Sequence: Synthetic oligonucleotide
cacaaggcacauauuaaca

SEQ ID NO: 1149899 - RNA, 19 nt, Artificial Sequence
  Description of Artificial Sequence: Synthetic oligonucleotide
ugugagaccugaagccucu

SEQ ID NO: 1149900 - RNA, 19 nt, Artificial Sequence
  Description of Artificial Sequence: Synthetic oligonucleotide
agugaauccccauuucaua

SEQ ID NO: 1149901 - RNA, 19 nt, Artificial Sequence
  Description of Artificial Sequence: Synthetic oligonucleotide
uguuuccugccuugaaacu

SEQ ID NO: 1149902 - RNA, 19 nt, Artificial Sequence
  Description of Artificial Sequence: Synthetic oligonucleotide
agcaagugugauggaaugg

SEQ ID NO: 1149903 - RNA, 19 nt, Artificial Sequence
  Description of Artificial Sequence: Synthetic oligonucleotide
caagagggcucucugcaag

SEQ ID NO: 1149904 - RNA, 19 nt, Artificial Sequence
  Description of Artificial Sequence: Synthetic oligonucleotide
ggcuaguucauuaauuaug

SEQ ID NO: 1149905 - RNA, 19 nt, Artificial Sequence
  Description of Artificial Sequence: Synthetic oligonucleotide
guaguuaacagcagaaaua

SEQ ID NO: 1149906 - RNA, 19 nt, Artificial Sequence
  Description of Artificial Sequence: Synthetic oligonucleotide
acagggucaaugauccacg

SEQ ID NO: 1149907 - RNA, 19 nt, Artificial Sequence
  Description of Artificial Sequence: Synthetic oligonucleotide
cucgcgugagcguaccgcg

SEQ ID NO: 1149908 - RNA, 19 nt, Artificial Sequence
  Description of Artificial Sequence: Synthetic oligonucleotide
guacaaaguuagugguucc

SEQ ID NO: 1149909 - RNA, 19 nt, Artificial Sequence
  Description of Artificial Sequence: Synthetic oligonucleotide
ugguaaugucuuccuguug

SEQ ID NO: 1149910 - RNA, 19 nt, Artificial Sequence
  Description of Artificial Sequence: Synthetic oligonucleotide
auguuggagaggacagucc

SEQ ID NO: 1149911 - RNA, 19 nt, Artificial Sequence
  Description of Artificial Sequence: Synthetic oligonucleotide
gcaagguucaaacauacua

SEQ ID NO: 1149912 - RNA, 19 nt, Artificial Sequence
  Description of Artificial Sequence: Synthetic oligonucleotide
cagugaugaaauuaagcaa

SEQ ID NO: 1149913 - RNA, 19 nt, Artificial Sequence
  Description of Artificial Sequence: Synthetic oligonucleotide
uugcagcaauuauucuccg

SEQ ID NO: 1149914 - RNA, 19 nt, Artificial Sequence
  Description of Artificial Sequence: Synthetic oligonucleotide
aaccugucuuauaauagaa

SEQ ID NO: 1149915 - RNA, 19 nt, Artificial Sequence
  Description of Artificial Sequence: Synthetic oligonucleotide
uuggcuauucuuucagcua

SEQ ID NO: 1149916 - RNA, 19 nt, Artificial Sequence
  Description of Artificial Sequence: Synthetic oligonucleotide
aagauccucacagaauaua

SEQ ID NO: 1149917 - RNA, 19 nt, Artificial Sequence
  Description of Artificial Sequence: Synthetic oligonucleotide
aggacaguccguaaagucu

SEQ ID NO: 1149918 - RNA, 19 nt, Artificial Sequence
  Description of Artificial Sequence: Synthetic oligonucleotide
guuaccaagucagcuggag

SEQ ID NO: 1149919 - RNA, 19 nt, Artificial Sequence
  Description of Artificial Sequence: Synthetic oligonucleotide
gugccaacuaacuuucauc

SEQ ID NO: 1149920 - RNA, 19 nt, Artificial Sequence
  Description of Artificial Sequence: Synthetic oligonucleotide
uugugagaccugaagccuc

SEQ ID NO: 1149921 - RNA, 19 nt, Artificial Sequence
  Description of Artificial Sequence: Synthetic oligonucleotide
cauuaauuaugcuuccugu

SEQ ID NO: 1149922 - RNA, 19 nt, Artificial Sequence
  Description of Artificial Sequence: Synthetic oligonucleotide
uucugaucgguaacuguua

SEQ ID NO: 1149923 - RNA, 19 nt, Artificial Sequence
  Description of Artificial Sequence: Synthetic oligonucleotide
ugaauccccauuucauaau

SEQ ID NO: 1149924 - RNA, 19 nt, Artificial Sequence
  Description of Artificial Sequence: Synthetic oligonucleotide
uuacauauugugugacguu

SEQ ID NO: 1149925 - RNA, 19 nt, Artificial Sequence
  Description of Artificial Sequence: Synthetic oligonucleotide
gacgaugaugccagcuccg

SEQ ID NO: 1149926 - RNA, 19 nt, Artificial Sequence
  Description of Artificial Sequence: Synthetic oligonucleotide
aaugauccacgugggcuug

SEQ ID NO: 1149927 - RNA, 19 nt, Artificial Sequence
  Description of Artificial Sequence: Synthetic oligonucleotide
agguauuaucucaauuucu

SEQ ID NO: 1149928 - RNA, 19 nt, Artificial Sequence
  Description of Artificial Sequence: Synthetic oligonucleotide
cuucccgaaucaucucucc

SEQ ID NO: 1149929 - RNA, 19 nt, Artificial Sequence
  Description of Artificial Sequence: Synthetic oligonucleotide
ugcagcaauuauucuccga

SEQ ID NO: 1149930 - RNA, 19 nt, Artificial Sequence
  Description of Artificial Sequence: Synthetic oligonucleotide
agcagcuguuccgacacuc

SEQ ID NO: 1149931 - RNA, 19 nt, Artificial Sequence
  Description of Artificial Sequence: Synthetic oligonucleotide
caacuaacuuucaucaucu

SEQ ID NO: 1149932 - RNA, 19 nt, Artificial Sequence
  Description of Artificial Sequence: Synthetic oligonucleotide
caaaugcaagguucaaaca

SEQ ID NO: 1149933 - RNA, 19 nt, Artificial Sequence
  Description of Artificial Sequence: Synthetic oligonucleotide
cacaucagaauaucauaga

SEQ ID NO: 1149934 - RNA, 19 nt, Artificial Sequence
  Description of Artificial Sequence: Synthetic oligonucleotide
caacuuucugaucgguaac

SEQ ID NO: 1149935 - RNA, 19 nt, Artificial Sequence
  Description of Artificial Sequence: Synthetic oligonucleotide
augcacuccugccaggggu

SEQ ID NO: 1149936 - RNA, 19 nt, Artificial Sequence
  Description of Artificial Sequence: Synthetic oligonucleotide
gaauccccauuucauaaua

SEQ ID NO: 1149937 - RNA, 19 nt, Artificial Sequence
  Description of Artificial Sequence: Synthetic oligonucleotide
ucaauuaaguauggcuuuu

SEQ ID NO: 1149938 - RNA, 19 nt, Artificial Sequence
  Description of Artificial Sequence: Synthetic oligonucleotide
gucuuauaauagaacuuac

SEQ ID NO: 1149939 - RNA, 19 nt, Artificial Sequence
  Description of Artificial Sequence: Synthetic oligonucleotide
agacggucuuuuccccagc

SEQ ID NO: 1149940 - RNA, 19 nt, Artificial Sequence
  Description of Artificial Sequence: Synthetic oligonucleotide
uuaccgcauaauccaugca

SEQ ID NO: 1149941 - RNA, 19 nt, Artificial Sequence
  Description of Artificial Sequence: Synthetic oligonucleotide
uguuaccaagucagcugga

SEQ ID NO: 1149942 - RNA, 19 nt, Artificial Sequence
  Description of Artificial Sequence: Synthetic oligonucleotide
uuuucucgcgugagcguac

SEQ ID NO: 1149943 - RNA, 19 nt, Artificial Sequence
  Description of Artificial Sequence: Synthetic oligonucleotide
gagugauuugguaaugucu

SEQ ID NO: 1149944 - RNA, 19 nt, Artificial Sequence
  Description of Artificial Sequence: Synthetic oligonucleotide
aaacugugagauggguacu

SEQ ID NO: 1149945 - RNA, 19 nt, Artificial Sequence
  Description of Artificial Sequence: Synthetic oligonucleotide
acuuacaagaacacuucau

SEQ ID NO: 1149946 - RNA, 19 nt, Artificial Sequence
  Description of Artificial Sequence: Synthetic oligonucleotide
aucaaaugguccaccuguc

SEQ ID NO: 1149947 - RNA, 19 nt, Artificial Sequence
  Description of Artificial Sequence: Synthetic oligonucleotide
ccacacuauaauauguuuc

SEQ ID NO: 1149948 - RNA, 19 nt, Artificial Sequence
  Description of Artificial Sequence: Synthetic oligonucleotide
cagcuguuccgacacuccg

SEQ ID NO: 1149949 - RNA, 19 nt, Artificial Sequence
  Description of Artificial Sequence: Synthetic oligonucleotide
agcaacaaguuuggaaaga

SEQ ID NO: 1149950 - RNA, 19 nt, Artificial Sequence
  Description of Artificial Sequence: Synthetic oligonucleotide
ucucgcgugagcguaccgc

SEQ ID NO: 1149951 - RNA, 19 nt, Artificial Sequence
  Description of Artificial Sequence: Synthetic oligonucleotide
cuuacaagaacacuucauu

SEQ ID NO: 1149952 - RNA, 19 nt, Artificial Sequence
  Description of Artificial Sequence: Synthetic oligonucleotide
cuuacauauugugugacgu

SEQ ID NO: 1149953 - RNA, 19 nt, Artificial Sequence
  Description of Artificial Sequence: Synthetic oligonucleotide
cuaauugagaauugugcau

SEQ ID NO: 1149954 - RNA, 19 nt, Artificial Sequence
  Description of Artificial Sequence: Synthetic oligonucleotide
aagggaacuuauguacaaa

SEQ ID NO: 1149955 - RNA, 19 nt, Artificial Sequence
  Description of Artificial Sequence: Synthetic oligonucleotide
uaaaaucgaagggucucau

SEQ ID NO: 1149956 - RNA, 19 nt, Artificial Sequence
  Description of Artificial Sequence: Synthetic oligonucleotide
agggucaaugauccacgug

SEQ ID NO: 1149957 - RNA, 19 nt, Artificial Sequence
  Description of Artificial Sequence: Synthetic oligonucleotide
uugaguuugagaggcccaa

SEQ ID NO: 1149958 - RNA, 19 nt, Artificial Sequence
  Description of Artificial Sequence: Synthetic oligonucleotide
aggcuagacaauaaauuaa

SEQ ID NO: 1149959 - RNA, 19 nt, Artificial Sequence
  Description of Artificial Sequence: Synthetic oligonucleotide
acauuacagugcccacauc

SEQ ID NO: 1149960 - RNA, 19 nt, Artificial Sequence
  Description of Artificial Sequence: Synthetic oligonucleotide
agagaaccugcuuguuaca

SEQ ID NO: 1149961 - RNA, 19 nt, Artificial Sequence
  Description of Artificial Sequence: Synthetic oligonucleotide
uuggagaggacaguccgua

SEQ ID NO: 1149962 - RNA, 19 nt, Artificial Sequence
  Description of Artificial Sequence: Synthetic oligonucleotide
cauuaaaaucgaagggucu

SEQ ID NO: 1149963 - RNA, 19 nt, Artificial Sequence
  Description of Artificial Sequence: Synthetic oligonucleotide
cuugaguuugagaggccca

SEQ ID NO: 1149964 - RNA, 19 nt, Artificial Sequence
  Description of Artificial Sequence: Synthetic oligonucleotide
uccaugcacuccugccagg

SEQ ID NO: 1149965 - RNA, 19 nt, Artificial Sequence
  Description of Artificial Sequence: Synthetic oligonucleotide
gauuauucaauggcuaguu

SEQ ID NO: 1149966 - RNA, 19 nt, Artificial Sequence
  Description of Artificial Sequence: Synthetic oligonucleotide
accgcauaauccaugcacu

SEQ ID NO: 1149967 - RNA, 19 nt, Artificial Sequence
  Description of Artificial Sequence: Synthetic oligonucleotide
agcuaauguuuuauuauuu

SEQ ID NO: 1149968 - RNA, 19 nt, Artificial Sequence
  Description of Artificial Sequence: Synthetic oligonucleotide
auagucuuacaugcaaauu

SEQ ID NO: 1149969 - RNA, 19 nt, Artificial Sequence
  Description of Artificial Sequence: Synthetic oligonucleotide
uucucgcgugagcguaccg

SEQ ID NO: 1149970 - RNA, 19 nt, Artificial Sequence
  Description of Artificial Sequence: Synthetic oligonucleotide
gucacguccaucagcacuc

SEQ ID NO: 1149971 - RNA, 19 nt, Artificial Sequence
  Description of Artificial Sequence: Synthetic oligonucleotide
acgaugaugccagcuccgg

SEQ ID NO: 1149972 - RNA, 19 nt, Artificial Sequence
  Description of Artificial Sequence: Synthetic oligonucleotide
cauauuaacagcagcuguu

SEQ ID NO: 1149973 - RNA, 19 nt, Artificial Sequence
  Description of Artificial Sequence: Synthetic oligonucleotide
gauggguacuuuuccuuua

SEQ ID NO: 1149974 - RNA, 19 nt, Artificial Sequence
  Description of Artificial Sequence: Synthetic oligonucleotide
auuaagcaacaaguuugga

SEQ ID NO: 1149975 - RNA, 19 nt, Artificial Sequence
  Description of Artificial Sequence: Synthetic oligonucleotide
auggguacuuuuccuuuau

SEQ ID NO: 1149976 - RNA, 19 nt, Artificial Sequence
  Description of Artificial Sequence: Synthetic oligonucleotide
ugguuccaucaacaggguc

SEQ ID NO: 1149977 - RNA, 19 nt, Artificial Sequence
  Description of Artificial Sequence: Synthetic oligonucleotide
caagagugauuugguaaug

SEQ ID NO: 1149978 - RNA, 19 nt, Artificial Sequence
  Description of Artificial Sequence: Synthetic oligonucleotide
cuauucuuucagcuaaugu

SEQ ID NO: 1149979 - RNA, 19 nt, Artificial Sequence
  Description of Artificial Sequence: Synthetic oligonucleotide
ccugucuuauaauagaacu

SEQ ID NO: 1149980 - RNA, 19 nt, Artificial Sequence
  Description of Artificial Sequence: Synthetic oligonucleotide
auuuucucgcgugagcgua

SEQ ID NO: 1149981 - RNA, 19 nt, Artificial Sequence
  Description of Artificial Sequence: Synthetic oligonucleotide
auauugugugacguuuuaa

SEQ ID NO: 1149982 - RNA, 19 nt, Artificial Sequence
  Description of Artificial Sequence: Synthetic oligonucleotide
cuccgagacaucaaaucaa

SEQ ID NO: 1149983 - RNA, 19 nt, Artificial Sequence
  Description of Artificial Sequence: Synthetic oligonucleotide
cuugucuugcgaggguuac

SEQ ID NO: 1149984 - RNA, 19 nt, Artificial Sequence
  Description of Artificial Sequence: Synthetic oligonucleotide
ggguacuuuuccuuuauua

SEQ ID NO: 1149985 - RNA, 19 nt, Artificial Sequence
  Description of Artificial Sequence: Synthetic oligonucleotide
ugggcuugucugugaagac

SEQ ID NO: 1149986 - RNA, 19 nt, Artificial Sequence
  Description of Artificial Sequence: Synthetic oligonucleotide
aagccaauugaaacagcua

SEQ ID NO: 1149987 - RNA, 19 nt, Artificial Sequence
  Description of Artificial Sequence: Synthetic oligonucleotide
ggagcaaagcuuuccaugu

SEQ ID NO: 1149988 - RNA, 19 nt, Artificial Sequence
  Description of Artificial Sequence: Synthetic oligonucleotide
agguucaaacauacuaaaa

SEQ ID NO: 1149989 - RNA, 19 nt, Artificial Sequence
  Description of Artificial Sequence: Synthetic oligonucleotide
auaauagaacuuacauauu

SEQ ID NO: 1149990 - RNA, 19 nt, Artificial Sequence
  Description of Artificial Sequence: Synthetic oligonucleotide
ugcgaggguuaccgcauaa

SEQ ID NO: 1149991 - RNA, 19 nt, Artificial Sequence
  Description of Artificial Sequence: Synthetic oligonucleotide
uuccugccuugaaacuuac

SEQ ID NO: 1149992 - RNA, 19 nt, Artificial Sequence
  Description of Artificial Sequence: Synthetic oligonucleotide
ugccgguauacaucuuguc

SEQ ID NO: 1149993 - RNA, 19 nt, Artificial Sequence
  Description of Artificial Sequence: Synthetic oligonucleotide
gauccucacagaauauaua

SEQ ID NO: 1149994 - RNA, 19 nt, Artificial Sequence
  Description of Artificial Sequence: Synthetic oligonucleotide
uuagagcuucccgaaucau

SEQ ID NO: 1149995 - RNA, 19 nt, Artificial Sequence
  Description of Artificial Sequence: Synthetic oligonucleotide
gcccaacucagucaccaag

SEQ ID NO: 1149996 - RNA, 19 nt, Artificial Sequence
  Description of Artificial Sequence: Synthetic oligonucleotide
gaucgguaacuguuaccaa

SEQ ID NO: 1149997 - RNA, 19 nt, Artificial Sequence
  Description of Artificial Sequence: Synthetic oligonucleotide
cagcaauuauucuccgaga

SEQ ID NO: 1149998 - RNA, 19 nt, Artificial Sequence
  Description of Artificial Sequence: Synthetic oligonucleotide
agugcccacaucagaauau

SEQ ID NO: 1149999 - RNA, 19 nt, Artificial Sequence
  Description of Artificial Sequence: Synthetic oligonucleotide
uccgacacuccggauucca

SEQ ID NO: 1150000 - RNA, 19 nt, Artificial Sequence
  Description of Artificial Sequence: Synthetic oligonucleotide
ccaagauccucacagaaua

SEQ ID NO: 1150001 - RNA, 19 nt, Artificial Sequence
  Description of Artificial Sequence: Synthetic oligonucleotide
aguauggcuuuuagaacaa

SEQ ID NO: 1150002 - RNA, 19 nt, Artificial Sequence
  Description of Artificial Sequence: Synthetic oligonucleotide
cuucggugacgaugaugcc

SEQ ID NO: 1150003 - RNA, 19 nt, Artificial Sequence
  Description of Artificial Sequence: Synthetic oligonucleotide
agucaccaagagugauuug

SEQ ID NO: 1150004 - RNA, 19 nt, Artificial Sequence
  Description of Artificial Sequence: Synthetic oligonucleotide
cauauugugugacguuuua

SEQ ID NO: 1150005 - RNA, 19 nt, Artificial Sequence
  Description of Artificial Sequence: Synthetic oligonucleotide
uccugccuugaaacuuaca

SEQ ID NO: 1150006 - RNA, 19 nt, Artificial Sequence
  Description of Artificial Sequence: Synthetic oligonucleotide
cuuucugaucgguaacugu

SEQ ID NO: 1150007 - RNA, 19 nt, Artificial Sequence
  Description of Artificial Sequence: Synthetic oligonucleotide
ggugauuauucaauggcua

SEQ ID NO: 1150008 - RNA, 19 nt, Artificial Sequence
  Description of Artificial Sequence: Synthetic oligonucleotide
guauuaucucaauuucuuu

SEQ ID NO: 1150009 - RNA, 19 nt, Artificial Sequence
  Description of Artificial Sequence: Synthetic oligonucleotide
cauuacaaaaggcuccuuu

SEQ ID NO: 1150010 - RNA, 19 nt, Artificial Sequence
  Description of Artificial Sequence: Synthetic oligonucleotide
caaacaucccagggucagc

SEQ ID NO: 1150011 - RNA, 19 nt, Artificial Sequence
  Description of Artificial Sequence: Synthetic oligonucleotide
cauccaauuuugcaugagu

SEQ ID NO: 1150012 - RNA, 19 nt, Artificial Sequence
  Description of Artificial Sequence: Synthetic oligonucleotide
guaaagguauuaucucaau

SEQ ID NO: 1150013 - RNA, 19 nt, Artificial Sequence
  Description of Artificial Sequence: Synthetic oligonucleotide
ccugcuucggugacgauga

SEQ ID NO: 1150014 - RNA, 19 nt, Artificial Sequence
  Description of Artificial Sequence: Synthetic oligonucleotide
auucuccgagacaucaaau

SEQ ID NO: 1150015 - RNA, 19 nt, Artificial Sequence
  Description of Artificial Sequence: Synthetic oligonucleotide
ccugccgguauacaucuug

SEQ ID NO: 1150016 - RNA, 19 nt, Artificial Sequence
  Description of Artificial Sequence: Synthetic oligonucleotide
caacaaucaaauacuccau

SEQ ID NO: 1150017 - RNA, 19 nt, Artificial Sequence
  Description of Artificial Sequence: Synthetic oligonucleotide
gguauuaucucaauuucuu

SEQ ID NO: 1150018 - RNA, 19 nt, Artificial Sequence
  Description of Artificial Sequence: Synthetic oligonucleotide
gguuaccgcauaauccaug

SEQ ID NO: 1150019 - RNA, 19 nt, Artificial Sequence
  Description of Artificial Sequence: Synthetic oligonucleotide
cccgaaucaucucuccagc

SEQ ID NO: 1150020 - RNA, 19 nt, Artificial Sequence
  Description of Artificial Sequence: Synthetic oligonucleotide
ggagaggacaguccguaaa

SEQ ID NO: 1150021 - RNA, 19 nt, Artificial Sequence
  Description of Artificial Sequence: Synthetic oligonucleotide
gcuauucuuucagcuaaug

SEQ ID NO: 1150022 - RNA, 19 nt, Artificial Sequence
  Description of Artificial Sequence: Synthetic oligonucleotide
acauauugugugacguuuu

SEQ ID NO: 1150023 - RNA, 19 nt, Artificial Sequence
  Description of Artificial Sequence: Synthetic oligonucleotide
guccguaaagucucuggcu

SEQ ID NO: 1150024 - RNA, 19 nt, Artificial Sequence
  Description of Artificial Sequence: Synthetic oligonucleotide
ucgcgugagcguaccgcga

SEQ ID NO: 1150025 - RNA, 19 nt, Artificial Sequence
  Description of Artificial Sequence: Synthetic oligonucleotide
agggucucauguggacugg

SEQ ID NO: 1150026 - RNA, 19 nt, Artificial Sequence
  Description of Artificial Sequence: Synthetic oligonucleotide
cuuuccugccgguauacau

SEQ ID NO: 1150027 - RNA, 19 nt, Artificial Sequence
  Description of Artificial Sequence: Synthetic oligonucleotide
acaguccguaaagucucug

SEQ ID NO: 1150028 - RNA, 19 nt, Artificial Sequence
  Description of Artificial Sequence: Synthetic oligonucleotide
ccaaugaaacugugagaug

SEQ ID NO: 1150029 - RNA, 19 nt, Artificial Sequence
  Description of Artificial Sequence: Synthetic oligonucleotide
cacccacacuauaauaugu

SEQ ID NO: 1150030 - RNA, 19 nt, Artificial Sequence
  Description of Artificial Sequence: Synthetic oligonucleotide
ggaauggacacuguucugu

SEQ ID NO: 1150031 - RNA, 19 nt, Artificial Sequence
  Description of Artificial Sequence: Synthetic oligonucleotide
acccacacuauaauauguu

SEQ ID NO: 1150032 - RNA, 19 nt, Artificial Sequence
  Description of Artificial Sequence: Synthetic oligonucleotide
guucauauccaaggaccaa

SEQ ID NO: 1150033 - RNA, 19 nt, Artificial Sequence
  Description of Artificial Sequence: Synthetic oligonucleotide
augguccaccugucacguc

SEQ ID NO: 1150034 - RNA, 19 nt, Artificial Sequence
  Description of Artificial Sequence: Synthetic oligonucleotide
ggagagaaccugcuuguua

SEQ ID NO: 1150035 - RNA, 19 nt, Artificial Sequence
  Description of Artificial Sequence: Synthetic oligonucleotide
gccgguauacaucuugucu

SEQ ID NO: 1150036 - RNA, 19 nt, Artificial Sequence
  Description of Artificial Sequence: Synthetic oligonucleotide
cagugaauccccauuucau

SEQ ID NO: 1150037 - RNA, 19 nt, Artificial Sequence
  Description of Artificial Sequence: Synthetic oligonucleotide
gugacguuuuaaaucuugu

SEQ ID NO: 1150038 - RNA, 19 nt, Artificial Sequence
  Description of Artificial Sequence: Synthetic oligonucleotide
agcuugucuugcgaggguu

SEQ ID NO: 1150039 - RNA, 19 nt, Artificial Sequence
  Description of Artificial Sequence: Synthetic oligonucleotide
auuuugcaugagucaucuu

SEQ ID NO: 1150040 - RNA, 19 nt, Artificial Sequence
  Description of Artificial Sequence: Synthetic oligonucleotide
gccaauugaaacagcuaca

SEQ ID NO: 1150041 - RNA, 19 nt, Artificial Sequence
  Description of Artificial Sequence: Synthetic oligonucleotide
gacggucuuuuccccagcu

SEQ ID NO: 1150042 - RNA, 19 nt, Artificial Sequence
  Description of Artificial Sequence: Synthetic oligonucleotide
caaugauccacgugggcuu

SEQ ID NO: 1150043 - RNA, 19 nt, Artificial Sequence
  Description of Artificial Sequence: Synthetic oligonucleotide
caauuaaguauggcuuuua

SEQ ID NO: 1150044 - RNA, 19 nt, Artificial Sequence
  Description of Artificial Sequence: Synthetic oligonucleotide
caccaagagugauuuggua

SEQ ID NO: 1150045 - RNA, 19 nt, Artificial Sequence
  Description of Artificial Sequence: Synthetic oligonucleotide
cguaaagucucuggcuucc

SEQ ID NO: 1150046 - RNA, 19 nt, Artificial Sequence
  Description of Artificial Sequence: Synthetic oligonucleotide
cccaaugaaacugugagau

SEQ ID NO: 1150047 - RNA, 19 nt, Artificial Sequence
  Description of Artificial Sequence: Synthetic oligonucleotide
cagcuguacacaacuccaa

SEQ ID NO: 1150048 - RNA, 19 nt, Artificial Sequence
  Description of Artificial Sequence: Synthetic oligonucleotide
uugcgaggguuaccgcaua

SEQ ID NO: 1150049 - RNA, 19 nt, Artificial Sequence
  Description of Artificial Sequence: Synthetic oligonucleotide
cgaggguuaccgcauaauc

SEQ ID NO: 1150050 - RNA, 19 nt, Artificial Sequence
  Description of Artificial Sequence: Synthetic oligonucleotide
gcccaagauccucacagaa

SEQ ID NO: 1150051 - RNA, 19 nt, Artificial Sequence
  Description of Artificial Sequence: Synthetic oligonucleotide
cgcauaauccaugcacucc

SEQ ID NO: 1150052 - RNA, 19 nt, Artificial Sequence
  Description of Artificial Sequence: Synthetic oligonucleotide
cccacaucagaauaucaua

SEQ ID NO: 1150053 - RNA, 19 nt, Artificial Sequence
  Description of Artificial Sequence: Synthetic oligonucleotide
cauuuucucgcgugagcgu

SEQ ID NO: 1150054 - RNA, 19 nt, Artificial Sequence
  Description of Artificial Sequence: Synthetic oligonucleotide
cuugcgaggguuaccgcau

SEQ ID NO: 1150055 - RNA, 19 nt, Artificial Sequence
  Description of Artificial Sequence: Synthetic oligonucleotide
ccgcauaauccaugcacuc

SEQ ID NO: 1150056 - RNA, 19 nt, Artificial Sequence
  Description of Artificial Sequence: Synthetic oligonucleotide
uuccgacacuccggauucc

SEQ ID NO: 1150057 - RNA, 19 nt, Artificial Sequence
  Description of Artificial Sequence: Synthetic oligonucleotide
cacuguucugugccaacua

SEQ ID NO: 1150058 - RNA, 19 nt, Artificial Sequence
  Description of Artificial Sequence: Synthetic oligonucleotide
caagauccucacagaauau

SEQ ID NO: 1150059 - RNA, 19 nt, Artificial Sequence
  Description of Artificial Sequence: Synthetic oligonucleotide
ccaagagugauuugguaau

SEQ ID NO: 1150060 - RNA, 19 nt, Artificial Sequence
  Description of Artificial Sequence: Synthetic oligonucleotide
ccguaaagucucuggcuuc

SEQ ID NO: 1150061 - RNA, 19 nt, Artificial Sequence
  Description of Artificial Sequence: Synthetic oligonucleotide
caucaacagggucaaugau

SEQ ID NO: 1150062 - RNA, 19 nt, Artificial Sequence
  Description of Artificial Sequence: Synthetic oligonucleotide
gcuccggccaugucccagc

SEQ ID NO: 1150063 - RNA, 19 nt, Artificial Sequence
  Description of Artificial Sequence: Synthetic oligonucleotide
ccaaggcuagacaauaaau

SEQ ID NO: 1150064 - RNA, 19 nt, Artificial Sequence
  Description of Artificial Sequence: Synthetic oligonucleotide
cgacacuccggauuccaug

SEQ ID NO: 1150065 - RNA, 19 nt, Artificial Sequence
  Description of Artificial Sequence: Synthetic oligonucleotide
cagucaccaagagugauuu

SEQ ID NO: 1150066 - RNA, 19 nt, Artificial Sequence
  Description of Artificial Sequence: Synthetic oligonucleotide
ccauccaauuuugcaugag

SEQ ID NO: 1150067 - RNA, 19 nt, Artificial Sequence
  Description of Artificial Sequence: Synthetic oligonucleotide
cugugccaacuaacuuuca

SEQ ID NO: 1150068 - RNA, 19 nt, Artificial Sequence
  Description of Artificial Sequence: Synthetic oligonucleotide
ggcccaagauccucacaga

SEQ ID NO: 1150069 - RNA, 19 nt, Artificial Sequence
  Description of Artificial Sequence: Synthetic oligonucleotide
guuggagaggacaguccgu

SEQ ID NO: 1150070 - RNA, 19 nt, Artificial Sequence
  Description of Artificial Sequence: Synthetic oligonucleotide
ccccaaugaaacugugaga

SEQ ID NO: 1150071 - RNA, 19 nt, Artificial Sequence
  Description of Artificial Sequence: Synthetic oligonucleotide
augauccacgugggcuugu

SEQ ID NO: 1150072 - RNA, 19 nt, Artificial Sequence
  Description of Artificial Sequence: Synthetic oligonucleotide
gacaguccguaaagucucu

SEQ ID NO: 1150073 - RNA, 19 nt, Artificial Sequence
  Description of Artificial Sequence: Synthetic oligonucleotide
cacuccggauuccauggau

SEQ ID NO: 1150074 - RNA, 19 nt, Artificial Sequence
  Description of Artificial Sequence: Synthetic oligonucleotide
gcccacaucagaauaucau

SEQ ID NO: 1150075 - RNA, 19 nt, Artificial Sequence
  Description of Artificial Sequence: Synthetic oligonucleotide
cgguaacuguuaccaaguc

SEQ ID NO: 1150076 - RNA, 19 nt, Artificial Sequence
  Description of Artificial Sequence: Synthetic oligonucleotide
ccggccaugucccagcagu

SEQ ID NO: 1150077 - RNA, 19 nt, Artificial Sequence
  Description of Artificial Sequence: Synthetic oligonucleotide
gugguuccaucaacagggu

SEQ ID NO: 1150078 - RNA, 19 nt, Artificial Sequence
  Description of Artificial Sequence: Synthetic oligonucleotide
gcuugucuugcgaggguua

SEQ ID NO: 1150079 - RNA, 19 nt, Artificial Sequence
  Description of Artificial Sequence: Synthetic oligonucleotide
cagcuugucuugcgagggu

SEQ ID NO: 1150080 - RNA, 19 nt, Artificial Sequence
  Description of Artificial Sequence: Synthetic oligonucleotide
gugugacguuuuaaaucuu

SEQ ID NO: 1150081 - RNA, 19 nt, Artificial Sequence
  Description of Artificial Sequence: Synthetic oligonucleotide
ggguuaccgcauaauccau

SEQ ID NO: 1150082 - RNA, 19 nt, Artificial Sequence
  Description of Artificial Sequence: Synthetic oligonucleotide
ccuuuccugccgguauaca

SEQ ID NO: 1150083 - RNA, 19 nt, Artificial Sequence
  Description of Artificial Sequence: Synthetic oligonucleotide
gggucucauguggacuggu

SEQ ID NO: 1150084 - RNA, 19 nt, Artificial Sequence
  Description of Artificial Sequence: Synthetic oligonucleotide
gcgaggguuaccgcauaau

SEQ ID NO: 1150085 - RNA, 19 nt, Artificial Sequence
  Description of Artificial Sequence: Synthetic oligonucleotide
cggugacgaugaugccagc

SEQ ID NO: 1150086 - RNA, 19 nt, Artificial Sequence
  Description of Artificial Sequence: Synthetic oligonucleotide
ccgacacuccggauuccau

SEQ ID NO: 1150087 - RNA, 19 nt, Artificial Sequence
  Description of Artificial Sequence: Synthetic oligonucleotide
cugcuucggugacgaugau

SEQ ID NO: 1150088 - RNA, 19 nt, Artificial Sequence
  Description of Artificial Sequence: Synthetic oligonucleotide
gccaggggucuuccauuuu

SEQ ID NO: 1150089 - RNA, 19 nt, Artificial Sequence
  Description of Artificial Sequence: Synthetic oligonucleotide
cgcgugagcguaccgcgau

SEQ ID NO: 1150090 - RNA, 19 nt, Artificial Sequence
  Description of Artificial Sequence: Synthetic oligonucleotide
uucauuaugacgcugagcc

SEQ ID NO: 1150091 - RNA, 19 nt, Artificial Sequence
  Description of Artificial Sequence: Synthetic oligonucleotide
uuuacaagaaggcucaggg

SEQ ID NO: 1150092 - RNA, 19 nt, Artificial Sequence
  Description of Artificial Sequence: Synthetic oligonucleotide
ugagacagggaacagaacg

SEQ ID NO: 1150093 - RNA, 19 nt, Artificial Sequence
  Description of Artificial Sequence: Synthetic oligonucleotide
aaaauauuguugucguugg

SEQ ID NO: 1150094 - RNA, 19 nt, Artificial Sequence
  Description of Artificial Sequence: Synthetic oligonucleotide
caguguuucauuaugacgc

SEQ ID NO: 1150095 - RNA, 19 nt, Artificial Sequence
  Description of Artificial Sequence: Synthetic oligonucleotide
acacacuuuacacaguagc

SEQ ID NO: 1150096 - RNA, 19 nt, Artificial Sequence
  Description of Artificial Sequence: Synthetic oligonucleotide
aaaggugccagccuucaac

SEQ ID NO: 1150097 - RNA, 19 nt, Artificial Sequence
  Description of Artificial Sequence: Synthetic oligonucleotide
aaaacgcaccaucaacacc

SEQ ID NO: 1150098 - RNA, 19 nt, Artificial Sequence
  Description of Artificial Sequence: Synthetic oligonucleotide
aaugaugcaaaacgcacca

SEQ ID NO: 1150099 - RNA, 19 nt, Artificial Sequence
  Description of Artificial Sequence: Synthetic oligonucleotide
ugaacuauuggauuugaga

SEQ ID NO: 1150100 - RNA, 19 nt, Artificial Sequence
  Description of Artificial Sequence: Synthetic oligonucleotide
uucgauucuguacaagggg

SEQ ID NO: 1150101 - RNA, 19 nt, Artificial Sequence
  Description of Artificial Sequence: Synthetic oligonucleotide
aguucgauucuguacaagg

SEQ ID NO: 1150102 - RNA, 19 nt, Artificial Sequence
  Description of Artificial Sequence: Synthetic oligonucleotide
aagauuucucgaugggccc

SEQ ID NO: 1150103 - RNA, 19 nt, Artificial Sequence
  Description of Artificial Sequence: Synthetic oligonucleotide
aucaacaccucaaaggugc

SEQ ID NO: 1150104 - RNA, 19 nt, Artificial Sequence
  Description of Artificial Sequence: Synthetic oligonucleotide
gauaugacauccuccacag

SEQ ID NO: 1150105 - RNA, 19 nt, Artificial Sequence
  Description of Artificial Sequence: Synthetic oligonucleotide
guugccuugccguagaccg

SEQ ID NO: 1150106 - RNA, 19 nt, Artificial Sequence
  Description of Artificial Sequence: Synthetic oligonucleotide
agggaguugagcuucucgc

SEQ ID NO: 1150107 - RNA, 19 nt, Artificial Sequence
  Description of Artificial Sequence: Synthetic oligonucleotide
uguucaugggacaugccag

SEQ ID NO: 1150108 - RNA, 19 nt, Artificial Sequence
  Description of Artificial Sequence: Synthetic oligonucleotide
uaaauaagauucugguuug

SEQ ID NO: 1150109 - RNA, 19 nt, Artificial Sequence
  Description of Artificial Sequence: Synthetic oligonucleotide
aacuauuggauuugagaca

SEQ ID NO: 1150110 - RNA, 19 nt, Artificial Sequence
  Description of Artificial Sequence: Synthetic oligonucleotide
acuauuggauuugagacag

SEQ ID NO: 1150111 - RNA, 19 nt, Artificial Sequence
  Description of Artificial Sequence: Synthetic oligonucleotide
aaacgcaccaucaacaccu

SEQ ID NO: 1150112 - RNA, 19 nt, Artificial Sequence
  Description of Artificial Sequence: Synthetic oligonucleotide
aagagugguuuaaauaggg

SEQ ID NO: 1150113 - RNA, 19 nt, Artificial Sequence
  Description of Artificial Sequence: Synthetic oligonucleotide
uuuucgucucguaaaggag

SEQ ID NO: 1150114 - RNA, 19 nt, Artificial Sequence
  Description of Artificial Sequence: Synthetic oligonucleotide
uucucgaugggcccgagcc

SEQ ID NO: 1150115 - RNA, 19 nt, Artificial Sequence
  Description of Artificial Sequence: Synthetic oligonucleotide
agcggugugggguaguagc

SEQ ID NO: 1150116 - RNA, 19 nt, Artificial Sequence
  Description of Artificial Sequence: Synthetic oligonucleotide
ucguaaaggagagagaagu

SEQ ID NO: 1150117 - RNA, 19 nt, Artificial Sequence
  Description of Artificial Sequence: Synthetic oligonucleotide
uuucgucucguaaaggaga

SEQ ID NO: 1150118 - RNA, 19 nt, Artificial Sequence
  Description of Artificial Sequence: Synthetic oligonucleotide
ugggauaugacauccucca

SEQ ID NO: 1150119 - RNA, 19 nt, Artificial Sequence
  Description of Artificial Sequence: Synthetic oligonucleotide
gucucuagaggacacaggc

SEQ ID NO: 1150120 - RNA, 19 nt, Artificial Sequence
  Description of Artificial Sequence: Synthetic oligonucleotide
ugcgugauuggcauugaag

SEQ ID NO: 1150121 - RNA, 19 nt, Artificial Sequence
  Description of Artificial Sequence: Synthetic oligonucleotide
uccuucacauugaacaaug

SEQ ID NO: 1150122 - RNA, 19 nt, Artificial Sequence
  Description of Artificial Sequence: Synthetic oligonucleotide
aaguugccaggugaggugc

SEQ ID NO: 1150123 - RNA, 19 nt, Artificial Sequence
  Description of Artificial Sequence: Synthetic oligonucleotide
ugcaaaacgcaccaucaac

SEQ ID NO: 1150124 - RNA, 19 nt, Artificial Sequence
  Description of Artificial Sequence: Synthetic oligonucleotide
uuggggaugcgccugcacg

SEQ ID NO: 1150125 - RNA, 19 nt, Artificial Sequence
  Description of Artificial Sequence: Synthetic oligonucleotide
agggaacagaacgaaaucg

SEQ ID NO: 1150126 - RNA, 19 nt, Artificial Sequence
  Description of Artificial Sequence: Synthetic oligonucleotide
cauuaugacgcugagccgc

SEQ ID NO: 1150127 - RNA, 19 nt, Artificial Sequence
  Description of Artificial Sequence: Synthetic oligonucleotide
gaacaaugaugcaaaacgc

SEQ ID NO: 1150128 - RNA, 19 nt, Artificial Sequence
  Description of Artificial Sequence: Synthetic oligonucleotide
aacaaugaugcaaaacgca

SEQ ID NO: 1150129 - RNA, 19 nt, Artificial Sequence
  Description of Artificial Sequence: Synthetic oligonucleotide
ucucguaaaggagagagaa

SEQ ID NO: 1150130 - RNA, 19 nt, Artificial Sequence
  Description of Artificial Sequence: Synthetic oligonucleotide
ugcucaguugguucguugg

SEQ ID NO: 1150131 - RNA, 19 nt, Artificial Sequence
  Description of Artificial Sequence: Synthetic oligonucleotide
uggcauagaccauucagug

SEQ ID NO: 1150132 - RNA, 19 nt, Artificial Sequence
  Description of Artificial Sequence: Synthetic oligonucleotide
ugaugcaaaacgcaccauc

SEQ ID NO: 1150133 - RNA, 19 nt, Artificial Sequence
  Description of Artificial Sequence: Synthetic oligonucleotide
ugagccgccaaaauauugu

SEQ ID NO: 1150134 - RNA, 19 nt, Artificial Sequence
  Description of Artificial Sequence: Synthetic oligonucleotide
ugcauguuguucagggucc

SEQ ID NO: 1150135 - RNA, 19 nt, Artificial Sequence
  Description of Artificial Sequence: Synthetic oligonucleotide
augccauucagcuugguaa

SEQ ID NO: 1150136 - RNA, 19 nt, Artificial Sequence
  Description of Artificial Sequence: Synthetic oligonucleotide
uccuuuucgucucguaaag

SEQ ID NO: 1150137 - RNA, 19 nt, Artificial Sequence
  Description of Artificial Sequence: Synthetic oligonucleotide
guaggugaggucucuagag

SEQ ID NO: 1150138 - RNA, 19 nt, Artificial Sequence
  Description of Artificial Sequence: Synthetic oligonucleotide
gaagccugaggccacgucc

SEQ ID NO: 1150139 - RNA, 19 nt, Artificial Sequence
  Description of Artificial Sequence: Synthetic oligonucleotide
ugaagauuucucgaugggc

SEQ ID NO: 1150140 - RNA, 19 nt, Artificial Sequence
  Description of Artificial Sequence: Synthetic oligonucleotide
uucgucucguaaaggagag

SEQ ID NO: 1150141 - RNA, 19 nt, Artificial Sequence
  Description of Artificial Sequence: Synthetic oligonucleotide
ugggcauaggugaagauuu

SEQ ID NO: 1150142 - RNA, 19 nt, Artificial Sequence
  Description of Artificial Sequence: Synthetic oligonucleotide
aggugugaagcucauugag

SEQ ID NO: 1150143 - RNA, 19 nt, Artificial Sequence
  Description of Artificial Sequence: Synthetic oligonucleotide
cauucaguguuucauuaug

SEQ ID NO: 1150144 - RNA, 19 nt, Artificial Sequence
  Description of Artificial Sequence: Synthetic oligonucleotide
agcgggaagucuccgaggg

SEQ ID NO: 1150145 - RNA, 19 nt, Artificial Sequence
  Description of Artificial Sequence: Synthetic oligonucleotide
aaugcauguuguucagggu

SEQ ID NO: 1150146 - RNA, 19 nt, Artificial Sequence
  Description of Artificial Sequence: Synthetic oligonucleotide
ucauuaugacgcugagccg

SEQ ID NO: 1150147 - RNA, 19 nt, Artificial Sequence
  Description of Artificial Sequence: Synthetic oligonucleotide
gaagcgggaagucuccgag

SEQ ID NO: 1150148 - RNA, 19 nt, Artificial Sequence
  Description of Artificial Sequence: Synthetic oligonucleotide
ugaggccgaguauacgugg

SEQ ID NO: 1150149 - RNA, 19 nt, Artificial Sequence
  Description of Artificial Sequence: Synthetic oligonucleotide
uggauuugagacagggaac

SEQ ID NO: 1150150 - RNA, 19 nt, Artificial Sequence
  Description of Artificial Sequence: Synthetic oligonucleotide
cuuuucgucucguaaagga

SEQ ID NO: 1150151 - RNA, 19 nt, Artificial Sequence
  Description of Artificial Sequence: Synthetic oligonucleotide
gagaagcccaccaaaggag

SEQ ID NO: 1150152 - RNA, 19 nt, Artificial Sequence
  Description of Artificial Sequence: Synthetic oligonucleotide
aaaggagagagaagugcag

SEQ ID NO: 1150153 - RNA, 19 nt, Artificial Sequence
  Description of Artificial Sequence: Synthetic oligonucleotide
  modified_base (2)..(2): a, c, u, g, unknown or other
gngaagagugguuuaaaua

SEQ ID NO: 1150154 - RNA, 19 nt, Artificial Sequence
  Description of Artificial Sequence: Synthetic oligonucleotide
ugaugcgugauuggcauug

SEQ ID NO: 1150155 - RNA, 19 nt, Artificial Sequence
  Description of Artificial Sequence: Synthetic oligonucleotide
guucgauucuguacaaggg

SEQ ID NO: 1150156 - RNA, 19 nt, Artificial Sequence
  Description of Artificial Sequence: Synthetic oligonucleotide
caaaacgcaccaucaacac

SEQ ID NO: 1150157 - RNA, 19 nt, Artificial Sequence
  Description of Artificial Sequence: Synthetic oligonucleotide
uggcauugaaguugccagg

SEQ ID NO: 1150158 - RNA, 19 nt, Artificial Sequence
  Description of Artificial Sequence: Synthetic oligonucleotide
aagccugaggccacguccc

SEQ ID NO: 1150159 - RNA, 19 nt, Artificial Sequence
  Description of Artificial Sequence: Synthetic oligonucleotide
  modified_base (3)..(3): a, c, u, g, unknown or other
agngaagagugguuuaaau

SEQ ID NO: 1150160 - RNA, 19 nt, Artificial Sequence
  Description of Artificial Sequence: Synthetic oligonucleotide
aucccugacuuucccagcg

SEQ ID NO: 1150161 - RNA, 19 nt, Artificial Sequence
  Description of Artificial Sequence: Synthetic oligonucleotide
auugagaagucuucccaga

SEQ ID NO: 1150162 - RNA, 19 nt, Artificial Sequence
  Description of Artificial Sequence: Synthetic oligonucleotide
uucucggaaugcauguugu

SEQ ID NO: 1150163 - RNA, 19 nt, Artificial Sequence
  Description of Artificial Sequence: Synthetic oligonucleotide
cagaguucgauucuguaca

SEQ ID NO: 1150164 - RNA, 19 nt, Artificial Sequence
  Description of Artificial Sequence: Synthetic oligonucleotide
cagacgaugcccauugcug

SEQ ID NO: 1150165 - RNA, 19 nt, Artificial Sequence
  Description of Artificial Sequence: Synthetic oligonucleotide
aagcgggaagucuccgagg

SEQ ID NO: 1150166 - RNA, 19 nt, Artificial Sequence
  Description of Artificial Sequence: Synthetic oligonucleotide
agagugguuuaaauagggg

SEQ ID NO: 1150167 - RNA, 19 nt, Artificial Sequence
  Description of Artificial Sequence: Synthetic oligonucleotide
aggugaagauuucucgaug

SEQ ID NO: 1150168 - RNA, 19 nt, Artificial Sequence
  Description of Artificial Sequence: Synthetic oligonucleotide
ugcugggagacacucggcu

SEQ ID NO: 1150169 - RNA, 19 nt, Artificial Sequence
  Description of Artificial Sequence: Synthetic oligonucleotide
cuucucggaaugcauguug

SEQ ID NO: 1150170 - RNA, 19 nt, Artificial Sequence
  Description of Artificial Sequence: Synthetic oligonucleotide
aguguuucauuaugacgcu

SEQ ID NO: 1150171 - RNA, 19 nt, Artificial Sequence
  Description of Artificial Sequence: Synthetic oligonucleotide
gaguauacguggguggggc

SEQ ID NO: 1150172 - RNA, 19 nt, Artificial Sequence
  Description of Artificial Sequence: Synthetic oligonucleotide
ugguucguuggccaaguuc

SEQ ID NO: 1150173 - RNA, 19 nt, Artificial Sequence
  Description of Artificial Sequence: Synthetic oligonucleotide
uugagaagucuucccagau

SEQ ID NO: 1150174 - RNA, 19 nt, Artificial Sequence
  Description of Artificial Sequence: Synthetic oligonucleotide
gguugugcggcucaggaac

SEQ ID NO: 1150175 - RNA, 19 nt, Artificial Sequence
  Description of Artificial Sequence: Synthetic oligonucleotide
aagagcccgcagcagcguc

SEQ ID NO: 1150176 - RNA, 19 nt, Artificial Sequence
  Description of Artificial Sequence: Synthetic oligonucleotide
auuaugacgcugagccgcc

SEQ ID NO: 1150177 - RNA, 19 nt, Artificial Sequence
  Description of Artificial Sequence: Synthetic oligonucleotide
ucgguaagcgccagggagu

SEQ ID NO: 1150178 - RNA, 19 nt, Artificial Sequence
  Description of Artificial Sequence: Synthetic oligonucleotide
gggaacagaacgaaaucgg

SEQ ID NO: 1150179 - RNA, 19 nt, Artificial Sequence
  Description of Artificial Sequence: Synthetic oligonucleotide
ggugccuaacuugucaugg

SEQ ID NO: 1150180 - RNA, 19 nt, Artificial Sequence
  Description of Artificial Sequence: Synthetic oligonucleotide
ugaggucucuagaggacac

SEQ ID NO: 1150181 - RNA, 19 nt, Artificial Sequence
  Description of Artificial Sequence: Synthetic oligonucleotide
guucaugggacaugccagc

SEQ ID NO: 1150182 - RNA, 19 nt, Artificial Sequence
  Description of Artificial Sequence: Synthetic oligonucleotide
cucguaaaggagagagaag

SEQ ID NO: 1150183 - RNA, 19 nt, Artificial Sequence
  Description of Artificial Sequence: Synthetic oligonucleotide
ugaagcucauugagaaguc

SEQ ID NO: 1150184 - RNA, 19 nt, Artificial Sequence
  Description of Artificial Sequence: Synthetic oligonucleotide
aggugaggugccuaacuug

SEQ ID NO: 1150185 - RNA, 19 nt, Artificial Sequence
  Description of Artificial Sequence: Synthetic oligonucleotide
  modified_base (11)..(11): a, c, u, g, unknown or other
ggugggagagngaagagug

SEQ ID NO: 1150186 - RNA, 19 nt, Artificial Sequence
  Description of Artificial Sequence: Synthetic oligonucleotide
caccgaagcggaauucucc

SEQ ID NO: 1150187 - RNA, 19 nt, Artificial Sequence
  Description of Artificial Sequence: Synthetic oligonucleotide
uucuccauucccgagcggu

SEQ ID NO: 1150188 - RNA, 19 nt, Artificial Sequence
  Description of Artificial Sequence: Synthetic oligonucleotide
  modified_base (9)..(9): a, c, u, g, unknown or other
ugggagagngaagaguggu

SEQ ID NO: 1150189 - RNA, 19 nt, Artificial Sequence
  Description of Artificial Sequence: Synthetic oligonucleotide
acggaagccggggaugugc

SEQ ID NO: 1150190 - RNA, 19 nt, Artificial Sequence
  Description of Artificial Sequence: Synthetic oligonucleotide
ggaacagaacgaaaucggg

SEQ ID NO: 1150191 - RNA, 19 nt, Artificial Sequence
  Description of Artificial Sequence: Synthetic oligonucleotide
agauuucucgaugggcccg

SEQ ID NO: 1150192 - RNA, 19 nt, Artificial Sequence
  Description of Artificial Sequence: Synthetic oligonucleotide
accauucaguguuucauua

SEQ ID NO: 1150193 - RNA, 19 nt, Artificial Sequence
  Description of Artificial Sequence: Synthetic oligonucleotide
auuugagacagggaacaga

SEQ ID NO: 1150194 - RNA, 19 nt, Artificial Sequence
  Description of Artificial Sequence: Synthetic oligonucleotide
acagggaacagaacgaaau

SEQ ID NO: 1150195 - RNA, 19 nt, Artificial Sequence
  Description of Artificial Sequence: Synthetic oligonucleotide
cuaccugaugcgugauugg

SEQ ID NO: 1150196 - RNA, 19 nt, Artificial Sequence
  Description of Artificial Sequence: Synthetic oligonucleotide
accgaagcggaauucucca

SEQ ID NO: 1150197 - RNA, 19 nt, Artificial Sequence
  Description of Artificial Sequence: Synthetic oligonucleotide
guggguggggcacagacga

SEQ ID NO: 1150198 - RNA, 19 nt, Artificial Sequence
  Description of Artificial Sequence: Synthetic oligonucleotide
augggcccgagccaccugg

SEQ ID NO: 1150199 - RNA, 19 nt, Artificial Sequence
  Description of Artificial Sequence: Synthetic oligonucleotide
cagggaguugagcuucucg

SEQ ID NO: 1150200 - RNA, 19 nt, Artificial Sequence
  Description of Artificial Sequence: Synthetic oligonucleotide
uggggaugcgccugcacgc

SEQ ID NO: 1150201 - RNA, 19 nt, Artificial Sequence
  Description of Artificial Sequence: Synthetic oligonucleotide
gauuugagacagggaacag

SEQ ID NO: 1150202 - RNA, 19 nt, Artificial Sequence
  Description of Artificial Sequence: Synthetic oligonucleotide
cuugguaauguugcuggug

SEQ ID NO: 1150203 - RNA, 19 nt, Artificial Sequence
  Description of Artificial Sequence: Synthetic oligonucleotide
ucgaggggccuauggaacc

SEQ ID NO: 1150204 - RNA, 19 nt, Artificial Sequence
  Description of Artificial Sequence: Synthetic oligonucleotide
ucaugggcauaggugaaga

SEQ ID NO: 1150205 - RNA, 19 nt, Artificial Sequence
  Description of Artificial Sequence: Synthetic oligonucleotide
uggggcacagacgaugccc

SEQ ID NO: 1150206 - RNA, 19 nt, Artificial Sequence
  Description of Artificial Sequence: Synthetic oligonucleotide
cugagccgccaaaauauug

SEQ ID NO: 1150207 - RNA, 19 nt, Artificial Sequence
  Description of Artificial Sequence: Synthetic oligonucleotide
ugccguagaccguucgcag

SEQ ID NO: 1150208 - RNA, 19 nt, Artificial Sequence
  Description of Artificial Sequence: Synthetic oligonucleotide
gguucguuggccaaguuca

SEQ ID NO: 1150209 - RNA, 19 nt, Artificial Sequence
  Description of Artificial Sequence: Synthetic oligonucleotide
guagcaccaugccauucag

SEQ ID NO: 1150210 - RNA, 19 nt, Artificial Sequence
  Description of Artificial Sequence: Synthetic oligonucleotide
uacauguucaugggacaug

SEQ ID NO: 1150211 - RNA, 19 nt, Artificial Sequence
  Description of Artificial Sequence: Synthetic oligonucleotide
uagaccguucgcaggcgcc

SEQ ID NO: 1150212 - RNA, 19 nt, Artificial Sequence
  Description of Artificial Sequence: Synthetic oligonucleotide
cuugccguagaccguucgc

SEQ ID NO: 1150213 - RNA, 19 nt, Artificial Sequence
  Description of Artificial Sequence: Synthetic oligonucleotide
gagacagggaacagaacga

SEQ ID NO: 1150214 - RNA, 19 nt, Artificial Sequence
  Description of Artificial Sequence: Synthetic oligonucleotide
agugcagaguucgauucug

SEQ ID NO: 1150215 - RNA, 19 nt, Artificial Sequence
  Description of Artificial Sequence: Synthetic oligonucleotide
gugccuaacuugucauggg

SEQ ID NO: 1150216 - RNA, 19 nt, Artificial Sequence
  Description of Artificial Sequence: Synthetic oligonucleotide
gacuuucccagcggugugg

SEQ ID NO: 1150217 - RNA, 19 nt, Artificial Sequence
  Description of Artificial Sequence: Synthetic oligonucleotide
aggucgcccaugcccaugg

SEQ ID NO: 1150218 - RNA, 19 nt, Artificial Sequence
  Description of Artificial Sequence: Synthetic oligonucleotide
ucccgagcggucugcagag

SEQ ID NO: 1150219 - RNA, 19 nt, Artificial Sequence
  Description of Artificial Sequence: Synthetic oligonucleotide
ugcacaguccggccacugc

SEQ ID NO: 1150220 - RNA, 19 nt, Artificial Sequence
  Description of Artificial Sequence: Synthetic oligonucleotide
uucugaggccgaguauacg

SEQ ID NO: 1150221 - RNA, 19 nt, Artificial Sequence
  Description of Artificial Sequence: Synthetic oligonucleotide
ugcugagaaaggucacgga

SEQ ID NO: 1150222 - RNA, 19 nt, Artificial Sequence
  Description of Artificial Sequence: Synthetic oligonucleotide
uugagacagggaacagaac

SEQ ID NO: 1150223 - RNA, 19 nt, Artificial Sequence
  Description of Artificial Sequence: Synthetic oligonucleotide
cucagcgagcauccguugc

SEQ ID NO: 1150224 - RNA, 19 nt, Artificial Sequence
  Description of Artificial Sequence: Synthetic oligonucleotide
  modified_base (5)..(5): a, c, u, g, unknown or other
agagngaagagugguuuaa

SEQ ID NO: 1150225 - RNA, 19 nt, Artificial Sequence
  Description of Artificial Sequence: Synthetic oligonucleotide
gaggccgaguauacguggg

SEQ ID NO: 1150226 - RNA, 19 nt, Artificial Sequence
  Description of Artificial Sequence: Synthetic oligonucleotide
uugccguagaccguucgca

SEQ ID NO: 1150227 - RNA, 19 nt, Artificial Sequence
  Description of Artificial Sequence: Synthetic oligonucleotide
agcggugaaaaggcccagc

SEQ ID NO: 1150228 - RNA, 19 nt, Artificial Sequence
  Description of Artificial Sequence: Synthetic oligonucleotide
agggcuaccugaugcguga

SEQ ID NO: 1150229 - RNA, 19 nt, Artificial Sequence
  Description of Artificial Sequence: Synthetic oligonucleotide
cugaggccgaguauacgug

SEQ ID NO: 1150230 - RNA, 19 nt, Artificial Sequence
  Description of Artificial Sequence: Synthetic oligonucleotide
ucucgaugggcccgagcca

SEQ ID NO: 1150231 - RNA, 19 nt, Artificial Sequence
  Description of Artificial Sequence: Synthetic oligonucleotide
aacuugucaugggcauagg

SEQ ID NO: 1150232 - RNA, 19 nt, Artificial Sequence
  Description of Artificial Sequence: Synthetic oligonucleotide
gccgaguauacgugggugg

SEQ ID NO: 1150233 - RNA, 19 nt, Artificial Sequence
  Description of Artificial Sequence: Synthetic oligonucleotide
uuucucgaugggcccgagc

SEQ ID NO: 1150234 - RNA, 19 nt, Artificial Sequence
  Description of Artificial Sequence: Synthetic oligonucleotide
augcaaaacgcaccaucaa

SEQ ID NO: 1150235 - RNA, 19 nt, Artificial Sequence
  Description of Artificial Sequence: Synthetic oligonucleotide
cauguucaugggacaugcc

SEQ ID NO: 1150236 - RNA, 19 nt, Artificial Sequence
  Description of Artificial Sequence: Synthetic oligonucleotide
agccaccugggauaugaca

SEQ ID NO: 1150237 - RNA, 19 nt, Artificial Sequence
  Description of Artificial Sequence: Synthetic oligonucleotide
gaguucgauucuguacaag

SEQ ID NO: 1150238 - RNA, 19 nt, Artificial Sequence
  Description of Artificial Sequence: Synthetic oligonucleotide
gcaaaacgcaccaucaaca

SEQ ID NO: 1150239 - RNA, 19 nt, Artificial Sequence
  Description of Artificial Sequence: Synthetic oligonucleotide
aguugguucguuggccaag

SEQ ID NO: 1150240 - RNA, 19 nt, Artificial Sequence
  Description of Artificial Sequence: Synthetic oligonucleotide
gggccuauggaacccgagg

SEQ ID NO: 1150241 - RNA, 19 nt, Artificial Sequence
  Description of Artificial Sequence: Synthetic oligonucleotide
gugaacuauuggauuugag

SEQ ID NO: 1150242 - RNA, 19 nt, Artificial Sequence
  Description of Artificial Sequence: Synthetic oligonucleotide
uccauucccgagcggucug

SEQ ID NO: 1150243 - RNA, 19 nt, Artificial Sequence
  Description of Artificial Sequence: Synthetic oligonucleotide
acgcacagcaggugugaag

SEQ ID NO: 1150244 - RNA, 19 nt, Artificial Sequence
  Description of Artificial Sequence: Synthetic oligonucleotide
gcggaauucuccauucccg

SEQ ID NO: 1150245 - RNA, 19 nt, Artificial Sequence
  Description of Artificial Sequence: Synthetic oligonucleotide
ucucagcgagcauccguug

SEQ ID NO: 1150246 - RNA, 19 nt, Artificial Sequence
  Description of Artificial Sequence: Synthetic oligonucleotide
ugcccauugcuguuggguu

SEQ ID NO: 1150247 - RNA, 19 nt, Artificial Sequence
  Description of Artificial Sequence: Synthetic oligonucleotide
aguauacguggguggggca

SEQ ID NO: 1150248 - RNA, 19 nt, Artificial Sequence
  Description of Artificial Sequence: Synthetic oligonucleotide
agaguucgauucuguacaa

SEQ ID NO: 1150249 - RNA, 19 nt, Artificial Sequence
  Description of Artificial Sequence: Synthetic oligonucleotide
gcugagaaaggucacggaa

SEQ ID NO: 1150250 - RNA, 19 nt, Artificial Sequence
  Description of Artificial Sequence: Synthetic oligonucleotide
uauacguggguggggcaca

SEQ ID NO: 1150251 - RNA, 19 nt, Artificial Sequence
  Description of Artificial Sequence: Synthetic oligonucleotide
  modified_base (6)..(6): a, c, u, g, unknown or other
gagagngaagagugguuua

SEQ ID NO: 1150252 - RNA, 19 nt, Artificial Sequence
  Description of Artificial Sequence: Synthetic oligonucleotide
cuucccagaucuccugcac

SEQ ID NO: 1150253 - RNA, 19 nt, Artificial Sequence
  Description of Artificial Sequence: Synthetic oligonucleotide
aguucauggcgcucugcau

SEQ ID NO: 1150254 - RNA, 19 nt, Artificial Sequence
  Description of Artificial Sequence: Synthetic oligonucleotide
cuggcauagaccauucagu

SEQ ID NO: 1150255 - RNA, 19 nt, Artificial Sequence
  Description of Artificial Sequence: Synthetic oligonucleotide
gugggaacugagagaagcc

SEQ ID NO: 1150256 - RNA, 19 nt, Artificial Sequence
  Description of Artificial Sequence: Synthetic oligonucleotide
guagaccguucgcaggcgc

SEQ ID NO: 1150257 - RNA, 19 nt, Artificial Sequence
  Description of Artificial Sequence: Synthetic oligonucleotide
uccguugcuucucucucuu

SEQ ID NO: 1150258 - RNA, 19 nt, Artificial Sequence
  Description of Artificial Sequence: Synthetic oligonucleotide
uugcugggagacacucggc

SEQ ID NO: 1150259 - RNA, 19 nt, Artificial Sequence
  Description of Artificial Sequence: Synthetic oligonucleotide
ugguguugccuugccguag

SEQ ID NO: 1150260 - RNA, 19 nt, Artificial Sequence
  Description of Artificial Sequence: Synthetic oligonucleotide
gcgugauuggcauugaagu

SEQ ID NO: 1150261 - RNA, 19 nt, Artificial Sequence
  Description of Artificial Sequence: Synthetic oligonucleotide
aacgcaccaucaacaccuc

SEQ ID NO: 1150262 - RNA, 19 nt, Artificial Sequence
  Description of Artificial Sequence: Synthetic oligonucleotide
gagacacucggcugcuguc

SEQ ID NO: 1150263 - RNA, 19 nt, Artificial Sequence
  Description of Artificial Sequence: Synthetic oligonucleotide
  modified_base (4)..(4): a, c, u, g, unknown or other
gagngaagagugguuuaaa

SEQ ID NO: 1150264 - RNA, 19 nt, Artificial Sequence
  Description of Artificial Sequence: Synthetic oligonucleotide
gucaugggcauaggugaag

SEQ ID NO: 1150265 - RNA, 19 nt, Artificial Sequence
  Description of Artificial Sequence: Synthetic oligonucleotide
auucccgagcggucugcag

SEQ ID NO: 1150266 - RNA, 19 nt, Artificial Sequence
  Description of Artificial Sequence: Synthetic oligonucleotide
ucacgcacagcagguguga

SEQ ID NO: 1150267 - RNA, 19 nt, Artificial Sequence
  Description of Artificial Sequence: Synthetic oligonucleotide
agguaggaggguaggagga

SEQ ID NO: 1150268 - RNA, 19 nt, Artificial Sequence
  Description of Artificial Sequence: Synthetic oligonucleotide
cgucucguaaaggagagag

SEQ ID NO: 1150269 - RNA, 19 nt, Artificial Sequence
  Description of Artificial Sequence: Synthetic oligonucleotide
gcauagaccauucaguguu

SEQ ID NO: 1150270 - RNA, 19 nt, Artificial Sequence
  Description of Artificial Sequence: Synthetic oligonucleotide
uggccaaguucauggcgcu

SEQ ID NO: 1150271 - RNA, 19 nt, Artificial Sequence
  Description of Artificial Sequence: Synthetic oligonucleotide
cgccaaaauauuguugucg

SEQ ID NO: 1150272 - RNA, 19 nt, Artificial Sequence
  Description of Artificial Sequence: Synthetic oligonucleotide
aggcgccucgccuucugag

SEQ ID NO: 1150273 - RNA, 19 nt, Artificial Sequence
  Description of Artificial Sequence: Synthetic oligonucleotide
ucacggaagccggggaugu

SEQ ID NO: 1150274 - RNA, 19 nt, Artificial Sequence
  Description of Artificial Sequence: Synthetic oligonucleotide
guaguagcugaagggcuac

SEQ ID NO: 1150275 - RNA, 19 nt, Artificial Sequence
  Description of Artificial Sequence: Synthetic oligonucleotide
gccgccaaaauauuguugu

SEQ ID NO: 1150276 - RNA, 19 nt, Artificial Sequence
  Description of Artificial Sequence: Synthetic oligonucleotide
acgcugagccgccaaaaua

SEQ ID NO: 1150277 - RNA, 19 nt, Artificial Sequence
  Description of Artificial Sequence: Synthetic oligonucleotide
auaugacauccuccacagu

SEQ ID NO: 1150278 - RNA, 19 nt, Artificial Sequence
  Description of Artificial Sequence: Synthetic oligonucleotide
guagguugugcggcucagg

SEQ ID NO: 1150279 - RNA, 19 nt, Artificial Sequence
  Description of Artificial Sequence: Synthetic oligonucleotide
ugcuguuggguugguggca

SEQ ID NO: 1150280 - RNA, 19 nt, Artificial Sequence
  Description of Artificial Sequence: Synthetic oligonucleotide
ucucggaaugcauguuguu

SEQ ID NO: 1150281 - RNA, 19 nt, Artificial Sequence
  Description of Artificial Sequence: Synthetic oligonucleotide
uaauguugcuggugccuuu

SEQ ID NO: 1150282 - RNA, 19 nt, Artificial Sequence
  Description of Artificial Sequence: Synthetic oligonucleotide
cacucggcugcuguccucc

SEQ ID NO: 1150283 - RNA, 19 nt, Artificial Sequence
  Description of Artificial Sequence: Synthetic oligonucleotide
gucgaggggccuauggaac

SEQ ID NO: 1150284 - RNA, 19 nt, Artificial Sequence
  Description of Artificial Sequence: Synthetic oligonucleotide
gaggggccuauggaacccg

SEQ ID NO: 1150285 - RNA, 19 nt, Artificial Sequence
  Description of Artificial Sequence: Synthetic oligonucleotide
agccgccaaaauauuguug

SEQ ID NO: 1150286 - RNA, 19 nt, Artificial Sequence
  Description of Artificial Sequence: Synthetic oligonucleotide
gugaagcgggaagucuccg

SEQ ID NO: 1150287 - RNA, 19 nt, Artificial Sequence
  Description of Artificial Sequence: Synthetic oligonucleotide
ggugugaagcucauugaga

SEQ ID NO: 1150288 - RNA, 19 nt, Artificial Sequence
  Description of Artificial Sequence: Synthetic oligonucleotide
gaucuccugcacaguccgg

SEQ ID NO: 1150289 - RNA, 19 nt, Artificial Sequence
  Description of Artificial Sequence: Synthetic oligonucleotide
caacagggucaccugguca

SEQ ID NO: 1150290 - RNA, 19 nt, Artificial Sequence
  Description of Artificial Sequence: Synthetic oligonucleotide
gccguagaccguucgcagg

SEQ ID NO: 1150291 - RNA, 19 nt, Artificial Sequence
  Description of Artificial Sequence: Synthetic oligonucleotide
gauuucucgaugggcccga

SEQ ID NO: 1150292 - RNA, 19 nt, Artificial Sequence
  Description of Artificial Sequence: Synthetic oligonucleotide
uugccuugccguagaccgu

SEQ ID NO: 1150293 - RNA, 19 nt, Artificial Sequence
  Description of Artificial Sequence: Synthetic oligonucleotide
gucacggaagccggggaug

SEQ ID NO: 1150294 - RNA, 19 nt, Artificial Sequence
  Description of Artificial Sequence: Synthetic oligonucleotide
ggggucgaggggccuaugg

SEQ ID NO: 1150295 - RNA, 19 nt, Artificial Sequence
  Description of Artificial Sequence: Synthetic oligonucleotide
aucucagcgagcauccguu

SEQ ID NO: 1150296 - RNA, 19 nt, Artificial Sequence
  Description of Artificial Sequence: Synthetic oligonucleotide
gaugugggguaggugaggu

SEQ ID NO: 1150297 - RNA, 19 nt, Artificial Sequence
  Description of Artificial Sequence: Synthetic oligonucleotide
aggccgaguauacgugggu

SEQ ID NO: 1150298 - RNA, 19 nt, Artificial Sequence
  Description of Artificial Sequence: Synthetic oligonucleotide
acacucggcugcuguccuc

SEQ ID NO: 1150299 - RNA, 19 nt, Artificial Sequence
  Description of Artificial Sequence: Synthetic oligonucleotide
gguccuucacauugaacaa

SEQ ID NO: 1150300 - RNA, 19 nt, Artificial Sequence
  Description of Artificial Sequence: Synthetic oligonucleotide
gccuauggaacccgaggug

SEQ ID NO: 1150301 - RNA, 19 nt, Artificial Sequence
  Description of Artificial Sequence: Synthetic oligonucleotide
ccguagaccguucgcaggc

SEQ ID NO: 1150302 - RNA, 19 nt, Artificial Sequence
  Description of Artificial Sequence: Synthetic oligonucleotide
ugacgcugagccgccaaaa

SEQ ID NO: 1150303 - RNA, 19 nt, Artificial Sequence
  Description of Artificial Sequence: Synthetic oligonucleotide
caugccauucagcuuggua

SEQ ID NO: 1150304 - RNA, 19 nt, Artificial Sequence
  Description of Artificial Sequence: Synthetic oligonucleotide
accugaugcgugauuggca

SEQ ID NO: 1150305 - RNA, 19 nt, Artificial Sequence
  Description of Artificial Sequence: Synthetic oligonucleotide
gugcggcucaggaacauca

SEQ ID NO: 1150306 - RNA, 19 nt, Artificial Sequence
  Description of Artificial Sequence: Synthetic oligonucleotide
gaagcucauugagaagucu

SEQ ID NO: 1150307 - RNA, 19 nt, Artificial Sequence
  Description of Artificial Sequence: Synthetic oligonucleotide
augacgcugagccgccaaa

SEQ ID NO: 1150308 - RNA, 19 nt, Artificial Sequence
  Description of Artificial Sequence: Synthetic oligonucleotide
gaccauucaguguuucauu

SEQ ID NO: 1150309 - RNA, 19 nt, Artificial Sequence
  Description of Artificial Sequence: Synthetic oligonucleotide
cacagacgaugcccauugc

SEQ ID NO: 1150310 - RNA, 19 nt, Artificial Sequence
  Description of Artificial Sequence: Synthetic oligonucleotide
gucgcccaugcccauggca

SEQ ID NO: 1150311 - RNA, 19 nt, Artificial Sequence
  Description of Artificial Sequence: Synthetic oligonucleotide
gcgccugcacgccauagug

SEQ ID NO: 1150312 - RNA, 19 nt, Artificial Sequence
  Description of Artificial Sequence: Synthetic oligonucleotide
acccgagguggggaugugg

SEQ ID NO: 1150313 - RNA, 19 nt, Artificial Sequence
  Description of Artificial Sequence: Synthetic oligonucleotide
agagaagugcagaguucga

SEQ ID NO: 1150314 - RNA, 19 nt, Artificial Sequence
  Description of Artificial Sequence: Synthetic oligonucleotide
augcgugauuggcauugaa

SEQ ID NO: 1150315 - RNA, 19 nt, Artificial Sequence
  Description of Artificial Sequence: Synthetic oligonucleotide
ccuuuucgucucguaaagg

SEQ ID NO: 1150316 - RNA, 19 nt, Artificial Sequence
  Description of Artificial Sequence: Synthetic oligonucleotide
ccgaguauacguggguggg

SEQ ID NO: 1150317 - RNA, 19 nt, Artificial Sequence
  Description of Artificial Sequence: Synthetic oligonucleotide
ugccuugccguagaccguu

SEQ ID NO: 1150318 - RNA, 19 nt, Artificial Sequence
  Description of Artificial Sequence: Synthetic oligonucleotide
gaugggcccgagccaccug

SEQ ID NO: 1150319 - RNA, 19 nt, Artificial Sequence
  Description of Artificial Sequence: Synthetic oligonucleotide
gggauaugacauccuccac

SEQ ID NO: 1150320 - RNA, 19 nt, Artificial Sequence
  Description of Artificial Sequence: Synthetic oligonucleotide
agaccguucgcaggcgccu

SEQ ID NO: 1150321 - RNA, 19 nt, Artificial Sequence
  Description of Artificial Sequence: Synthetic oligonucleotide
cuguuggguugguggcagc

SEQ ID NO: 1150322 - RNA, 19 nt, Artificial Sequence
  Description of Artificial Sequence: Synthetic oligonucleotide
cuguagguugugcggcuca

SEQ ID NO: 1150323 - RNA, 19 nt, Artificial Sequence
  Description of Artificial Sequence: Synthetic oligonucleotide
acgcaccaucaacaccuca

SEQ ID NO: 1150324 - RNA, 19 nt, Artificial Sequence
  Description of Artificial Sequence: Synthetic oligonucleotide
uuaugacgcugagccgcca

SEQ ID NO: 1150325 - RNA, 19 nt, Artificial Sequence
  Description of Artificial Sequence: Synthetic oligonucleotide
auacguggguggggcacag

SEQ ID NO: 1150326 - RNA, 19 nt, Artificial Sequence
  Description of Artificial Sequence: Synthetic oligonucleotide
gucucguaaaggagagaga

SEQ ID NO: 1150327 - RNA, 19 nt, Artificial Sequence
  Description of Artificial Sequence: Synthetic oligonucleotide
gaugcgugauuggcauuga

SEQ ID NO: 1150328 - RNA, 19 nt, Artificial Sequence
  Description of Artificial Sequence: Synthetic oligonucleotide
ucgucucguaaaggagaga

SEQ ID NO: 1150329 - RNA, 19 nt, Artificial Sequence
  Description of Artificial Sequence: Synthetic oligonucleotide
cagagcccgaagagcccgc

SEQ ID NO: 1150330 - RNA, 19 nt, Artificial Sequence
  Description of Artificial Sequence: Synthetic oligonucleotide
accuggucaugcugagaaa

SEQ ID NO: 1150331 - RNA, 19 nt, Artificial Sequence
  Description of Artificial Sequence: Synthetic oligonucleotide
gguguugccuugccguaga

SEQ ID NO: 1150332 - RNA, 19 nt, Artificial Sequence
  Description of Artificial Sequence: Synthetic oligonucleotide
  modified_base (7)..(7): a, c, u, g, unknown or other
ggagagngaagagugguuu

SEQ ID NO: 1150333 - RNA, 19 nt, Artificial Sequence
  Description of Artificial Sequence: Synthetic oligonucleotide
ggccgggcgggucacuggg

SEQ ID NO: 1150334 - RNA, 19 nt, Artificial Sequence
  Description of Artificial Sequence: Synthetic oligonucleotide
cuccucgguaagcgccagg

SEQ ID NO: 1150335 - RNA, 19 nt, Artificial Sequence
  Description of Artificial Sequence: Synthetic oligonucleotide
guugugcggcucaggaaca

SEQ ID NO: 1150336 - RNA, 19 nt, Artificial Sequence
  Description of Artificial Sequence: Synthetic oligonucleotide
gcaccgagcuccugcagac

SEQ ID NO: 1150337 - RNA, 19 nt, Artificial Sequence
  Description of Artificial Sequence: Synthetic oligonucleotide
ggaagucuccgagggccgg

SEQ ID NO: 1150338 - RNA, 19 nt, Artificial Sequence
  Description of Artificial Sequence: Synthetic oligonucleotide
cacguccccacacacuuua

SEQ ID NO: 1150339 - RNA, 19 nt, Artificial Sequence
  Description of Artificial Sequence: Synthetic oligonucleotide
ggccgaguauacgugggug

SEQ ID NO: 1150340 - RNA, 19 nt, Artificial Sequence
  Description of Artificial Sequence: Synthetic oligonucleotide
ugcguccauggggauacau

SEQ ID NO: 1150341 - RNA, 19 nt, Artificial Sequence
  Description of Artificial Sequence: Synthetic oligonucleotide
ggcaccgagcuccugcaga

SEQ ID NO: 1150342 - RNA, 19 nt, Artificial Sequence
  Description of Artificial Sequence: Synthetic oligonucleotide
gaagggcuaccugaugcgu

SEQ ID NO: 1150343 - RNA, 19 nt, Artificial Sequence
  Description of Artificial Sequence: Synthetic oligonucleotide
augaugcaaaacgcaccau

SEQ ID NO: 1150344 - RNA, 19 nt, Artificial Sequence
  Description of Artificial Sequence: Synthetic oligonucleotide
accucacgcacagcaggug

SEQ ID NO: 1150345 - RNA, 19 nt, Artificial Sequence
  Description of Artificial Sequence: Synthetic oligonucleotide
gggaagucuccgagggccg

SEQ ID NO: 1150346 - RNA, 19 nt, Artificial Sequence
  Description of Artificial Sequence: Synthetic oligonucleotide
ccagagcccgaagagcccg

SEQ ID NO: 1150347 - RNA, 19 nt, Artificial Sequence
  Description of Artificial Sequence: Synthetic oligonucleotide
uugguucguuggccaaguu

SEQ ID NO: 1150348 - RNA, 19 nt, Artificial Sequence
  Description of Artificial Sequence: Synthetic oligonucleotide
gccuaacuugucaugggca

SEQ ID NO: 1150349 - RNA, 19 nt, Artificial Sequence
  Description of Artificial Sequence: Synthetic oligonucleotide
ggguggggcacagacgaug

SEQ ID NO: 1150350 - RNA, 19 nt, Artificial Sequence
  Description of Artificial Sequence: Synthetic oligonucleotide
ggcauagaccauucagugu

SEQ ID NO: 1150351 - RNA, 19 nt, Artificial Sequence
  Description of Artificial Sequence: Synthetic oligonucleotide
auuucucgaugggcccgag

SEQ ID NO: 1150352 - RNA, 19 nt, Artificial Sequence
  Description of Artificial Sequence: Synthetic oligonucleotide
gacgcugagccgccaaaau

SEQ ID NO: 1150353 - RNA, 19 nt, Artificial Sequence
  Description of Artificial Sequence: Synthetic oligonucleotide
ccuugccguagaccguucg

SEQ ID NO: 1150354 - RNA, 19 nt, Artificial Sequence
  Description of Artificial Sequence: Synthetic oligonucleotide
caucucagcgagcauccgu

SEQ ID NO: 1150355 - RNA, 19 nt, Artificial Sequence
  Description of Artificial Sequence: Synthetic oligonucleotide
cucgccuucugaggccgag

SEQ ID NO: 1150356 - RNA, 19 nt, Artificial Sequence
  Description of Artificial Sequence: Synthetic oligonucleotide
augcgccugcacgccauag

SEQ ID NO: 1150357 - RNA, 19 nt, Artificial Sequence
  Description of Artificial Sequence: Synthetic oligonucleotide
gcguccauggggauacaug

SEQ ID NO: 1150358 - RNA, 19 nt, Artificial Sequence
  Description of Artificial Sequence: Synthetic oligonucleotide
gagccgccaaaauauuguu

SEQ ID NO: 1150359 - RNA, 19 nt, Artificial Sequence
  Description of Artificial Sequence: Synthetic oligonucleotide
gaacccgagguggggaugu

SEQ ID NO: 1150360 - RNA, 19 nt, Artificial Sequence
  Description of Artificial Sequence: Synthetic oligonucleotide
guugguucguuggccaagu

SEQ ID NO: 1150361 - RNA, 19 nt, Artificial Sequence
  Description of Artificial Sequence: Synthetic oligonucleotide
ggcauugaaguugccaggu

SEQ ID NO: 1150362 - RNA, 19 nt, Artificial Sequence
  Description of Artificial Sequence: Synthetic oligonucleotide
ccacagcggugaaaaggcc

SEQ ID NO: 1150363 - RNA, 19 nt, Artificial Sequence
  Description of Artificial Sequence: Synthetic oligonucleotide
gacgaugcccauugcuguu

SEQ ID NO: 1150364 - RNA, 19 nt, Artificial Sequence
  Description of Artificial Sequence: Synthetic oligonucleotide
aacccgagguggggaugug

SEQ ID NO: 1150365 - RNA, 19 nt, Artificial Sequence
  Description of Artificial Sequence: Synthetic oligonucleotide
uggguggggcacagacgau

SEQ ID NO: 1150366 - RNA, 19 nt, Artificial Sequence
  Description of Artificial Sequence: Synthetic oligonucleotide
ggcgcaggaggggucgagg

SEQ ID NO: 1150367 - RNA, 19 nt, Artificial Sequence
  Description of Artificial Sequence: Synthetic oligonucleotide
cguggguggggcacagacg

SEQ ID NO: 1150368 - RNA, 19 nt, Artificial Sequence
  Description of Artificial Sequence: Synthetic oligonucleotide
cauggggauacauguucau

SEQ ID NO: 1150369 - RNA, 19 nt, Artificial Sequence
  Description of Artificial Sequence: Synthetic oligonucleotide
ucgccuucugaggccgagu

SEQ ID NO: 1150370 - RNA, 19 nt, Artificial Sequence
  Description of Artificial Sequence: Synthetic oligonucleotide
gcgggcaucccugacuuuc

SEQ ID NO: 1150371 - RNA, 19 nt, Artificial Sequence
  Description of Artificial Sequence: Synthetic oligonucleotide
cagcggugugggguaguag

SEQ ID NO: 1150372 - RNA, 19 nt, Artificial Sequence
  Description of Artificial Sequence: Synthetic oligonucleotide
ucccagcggugugggguag

SEQ ID NO: 1150373 - RNA, 19 nt, Artificial Sequence
  Description of Artificial Sequence: Synthetic oligonucleotide
acucggcugcuguccucca

SEQ ID NO: 1150374 - RNA, 19 nt, Artificial Sequence
  Description of Artificial Sequence: Synthetic oligonucleotide
gccaccugggauaugacau

SEQ ID NO: 1150375 - RNA, 19 nt, Artificial Sequence
  Description of Artificial Sequence: Synthetic oligonucleotide
gcggugaaaaggcccagcu

SEQ ID NO: 1150376 - RNA, 19 nt, Artificial Sequence
  Description of Artificial Sequence: Synthetic oligonucleotide
ccgccaaaauauuguuguc

SEQ ID NO: 1150377 - RNA, 19 nt, Artificial Sequence
  Description of Artificial Sequence: Synthetic oligonucleotide
gagcccgcagcagcgucuc

SEQ ID NO: 1150378 - RNA, 19 nt, Artificial Sequence
  Description of Artificial Sequence: Synthetic oligonucleotide
cguccauggggauacaugu

SEQ ID NO: 1150379 - RNA, 19 nt, Artificial Sequence
  Description of Artificial Sequence: Synthetic oligonucleotide
caccucacgcacagcaggu

SEQ ID NO: 1150380 - RNA, 19 nt, Artificial Sequence
  Description of Artificial Sequence: Synthetic oligonucleotide
ccuaacuugucaugggcau

SEQ ID NO: 1150381 - RNA, 19 nt, Artificial Sequence
  Description of Artificial Sequence: Synthetic oligonucleotide
ccggggaugugcuuggcaa

SEQ ID NO: 1150382 - RNA, 19 nt, Artificial Sequence
  Description of Artificial Sequence: Synthetic oligonucleotide
cgccugcacgccauagugg

SEQ ID NO: 1150383 - RNA, 19 nt, Artificial Sequence
  Description of Artificial Sequence: Synthetic oligonucleotide
caggugaggugccuaacuu

SEQ ID NO: 1150384 - RNA, 19 nt, Artificial Sequence
  Description of Artificial Sequence: Synthetic oligonucleotide
ccugaugcgugauuggcau

SEQ ID NO: 1150385 - RNA, 19 nt, Artificial Sequence
  Description of Artificial Sequence: Synthetic oligonucleotide
cgaguauacgugggugggg

SEQ ID NO: 1150386 - RNA, 19 nt, Artificial Sequence
  Description of Artificial Sequence: Synthetic oligonucleotide
gcugcuccaccgaagcgga

SEQ ID NO: 1150387 - RNA, 19 nt, Artificial Sequence
  Description of Artificial Sequence: Synthetic oligonucleotide
cauagaccauucaguguuu

SEQ ID NO: 1150388 - RNA, 19 nt, Artificial Sequence
  Description of Artificial Sequence: Synthetic oligonucleotide
uacguggguggggcacaga

SEQ ID NO: 1150389 - RNA, 19 nt, Artificial Sequence
  Description of Artificial Sequence: Synthetic oligonucleotide
gaccguucgcaggcgccuc

SEQ ID NO: 1150390 - RNA, 19 nt, Artificial Sequence
  Description of Artificial Sequence: Synthetic oligonucleotide
cacaguccggccacugcgu

SEQ ID NO: 1150391 - RNA, 19 nt, Artificial Sequence
  Description of Artificial Sequence: Synthetic oligonucleotide
gaagagcccgcagcagcgu

SEQ ID NO: 1150392 - RNA, 19 nt, Artificial Sequence
  Description of Artificial Sequence: Synthetic oligonucleotide
gggcagcggcagaaggccg

SEQ ID NO: 1150393 - RNA, 19 nt, Artificial Sequence
  Description of Artificial Sequence: Synthetic oligonucleotide
gaagucuccgagggccggu

SEQ ID NO: 1150394 - RNA, 19 nt, Artificial Sequence
  Description of Artificial Sequence: Synthetic oligonucleotide
gcgagcauccguugcuucu

SEQ ID NO: 1150395 - RNA, 19 nt, Artificial Sequence
  Description of Artificial Sequence: Synthetic oligonucleotide
aggggccuauggaacccga

SEQ ID NO: 1150396 - RNA, 19 nt, Artificial Sequence
  Description of Artificial Sequence: Synthetic oligonucleotide
cgagccaccugggauauga

SEQ ID NO: 1150397 - RNA, 19 nt, Artificial Sequence
  Description of Artificial Sequence: Synthetic oligonucleotide
cacggaagccggggaugug

SEQ ID NO: 1150398 - RNA, 19 nt, Artificial Sequence
  Description of Artificial Sequence: Synthetic oligonucleotide
caggcgggcaucccugacu

SEQ ID NO: 1150399 - RNA, 19 nt, Artificial Sequence
  Description of Artificial Sequence: Synthetic oligonucleotide
cgcugagccgccaaaauau

SEQ ID NO: 1150400 - RNA, 19 nt, Artificial Sequence
  Description of Artificial Sequence: Synthetic oligonucleotide
ggucacggaagccggggau

SEQ ID NO: 1150401 - RNA, 19 nt, Artificial Sequence
  Description of Artificial Sequence: Synthetic oligonucleotide
gguaagcgccagggaguug

SEQ ID NO: 1150402 - RNA, 19 nt, Artificial Sequence
  Description of Artificial Sequence: Synthetic oligonucleotide
gcgugggagggaggguggg

SEQ ID NO: 1150403 - RNA, 19 nt, Artificial Sequence
  Description of Artificial Sequence: Synthetic oligonucleotide
ccauucccgagcggucugc

SEQ ID NO: 1150404 - RNA, 19 nt, Artificial Sequence
  Description of Artificial Sequence: Synthetic oligonucleotide
gcggcucaggaacaucacu

SEQ ID NO: 1150405 - RNA, 19 nt, Artificial Sequence
  Description of Artificial Sequence: Synthetic oligonucleotide
cguagaccguucgcaggcg

SEQ ID NO: 1150406 - RNA, 19 nt, Artificial Sequence
  Description of Artificial Sequence: Synthetic oligonucleotide
cacugcguccauggggaua

SEQ ID NO: 1150407 - RNA, 19 nt, Artificial Sequence
  Description of Artificial Sequence: Synthetic oligonucleotide
ccagcagaacauucuuggu

SEQ ID NO: 1150408 - RNA, 19 nt, Artificial Sequence
  Description of Artificial Sequence: Synthetic oligonucleotide
gggcgggucacugggcguc

SEQ ID NO: 1150409 - RNA, 19 nt, Artificial Sequence
  Description of Artificial Sequence: Synthetic oligonucleotide
cacgcacagcaggugugaa

SEQ ID NO: 1150410 - RNA, 19 nt, Artificial Sequence
  Description of Artificial Sequence: Synthetic oligonucleotide
guucguuggccaaguucau

SEQ ID NO: 1150411 - RNA, 19 nt, Artificial Sequence
  Description of Artificial Sequence: Synthetic oligonucleotide
ccucacgcacagcaggugu

SEQ ID NO: 1150412 - RNA, 19 nt, Artificial Sequence
  Description of Artificial Sequence: Synthetic oligonucleotide
cugaugcgugauuggcauu

SEQ ID NO: 1150413 - RNA, 19 nt, Artificial Sequence
  Description of Artificial Sequence: Synthetic oligonucleotide
ggcgggucacugggcgucc

SEQ ID NO: 1150414 - RNA, 19 nt, Artificial Sequence
  Description of Artificial Sequence: Synthetic oligonucleotide
gaggggucgaggggccuau

SEQ ID NO: 1150415 - RNA, 19 nt, Artificial Sequence
  Description of Artificial Sequence: Synthetic oligonucleotide
  modified_base (8)..(8): a, c, u, g, unknown or other
gggagagngaagagugguu

SEQ ID NO: 1150416 - RNA, 19 nt, Artificial Sequence
  Description of Artificial Sequence: Synthetic oligonucleotide
gcucugcaucucagcgagc

SEQ ID NO: 1150417 - RNA, 19 nt, Artificial Sequence
  Description of Artificial Sequence: Synthetic oligonucleotide
cuggguggugucagcuguu

SEQ ID NO: 1150418 - RNA, 19 nt, Artificial Sequence
  Description of Artificial Sequence: Synthetic oligonucleotide
cugcuccaccgaagcggaa

SEQ ID NO: 1150419 - RNA, 19 nt, Artificial Sequence
  Description of Artificial Sequence: Synthetic oligonucleotide
ccguucgcaggcgccucgc

SEQ ID NO: 1150420 - RNA, 19 nt, Artificial Sequence
  Description of Artificial Sequence: Synthetic oligonucleotide
ccugcacgccauaguggaa

SEQ ID NO: 1150421 - RNA, 19 nt, Artificial Sequence
  Description of Artificial Sequence: Synthetic oligonucleotide
gccuucugaggccgaguau

SEQ ID NO: 1150422 - RNA, 19 nt, Artificial Sequence
  Description of Artificial Sequence: Synthetic oligonucleotide
cccuggcauagaccauuca

SEQ ID NO: 1150423 - RNA, 19 nt, Artificial Sequence
  Description of Artificial Sequence: Synthetic oligonucleotide
ggcacagacgaugcccauu

SEQ ID NO: 1150424 - RNA, 19 nt, Artificial Sequence
  Description of Artificial Sequence: Synthetic oligonucleotide
cucggcugcuguccuccau

SEQ ID NO: 1150425 - RNA, 19 nt, Artificial Sequence
  Description of Artificial Sequence: Synthetic oligonucleotide
ggcuaccugaugcgugauu

SEQ ID NO: 1150426 - RNA, 19 nt, Artificial Sequence
  Description of Artificial Sequence: Synthetic oligonucleotide
gcugagccgccaaaauauu

SEQ ID NO: 1150427 - RNA, 19 nt, Artificial Sequence
  Description of Artificial Sequence: Synthetic oligonucleotide
ggaagccggggaugugcuu

SEQ ID NO: 1150428 - RNA, 19 nt, Artificial Sequence
  Description of Artificial Sequence: Synthetic oligonucleotide
caccgagcuccugcagacu

SEQ ID NO: 1150429 - RNA, 19 nt, Artificial Sequence
  Description of Artificial Sequence: Synthetic oligonucleotide
ccgaagcggaauucuccau

SEQ ID NO: 1150430 - RNA, 19 nt, Artificial Sequence
  Description of Artificial Sequence: Synthetic oligonucleotide
gggcacagacgaugcccau

SEQ ID NO: 1150431 - RNA, 19 nt, Artificial Sequence
  Description of Artificial Sequence: Synthetic oligonucleotide
cugcguccauggggauaca

SEQ ID NO: 1150432 - RNA, 19 nt, Artificial Sequence
  Description of Artificial Sequence: Synthetic oligonucleotide
cggaagccggggaugugcu

SEQ ID NO: 1150433 - RNA, 19 nt, Artificial Sequence
  Description of Artificial Sequence: Synthetic oligonucleotide
ccagcggugugggguagua

SEQ ID NO: 1150434 - RNA, 19 nt, Artificial Sequence
  Description of Artificial Sequence: Synthetic oligonucleotide
ccucgccuucugaggccga

SEQ ID NO: 1150435 - RNA, 19 nt, Artificial Sequence
  Description of Artificial Sequence: Synthetic oligonucleotide
gggcuaccugaugcgugau

SEQ ID NO: 1150436 - RNA, 19 nt, Artificial Sequence
  Description of Artificial Sequence: Synthetic oligonucleotide
cccgagcggucugcagaga

SEQ ID NO: 1150437 - RNA, 19 nt, Artificial Sequence
  Description of Artificial Sequence: Synthetic oligonucleotide
cgguaagcgccagggaguu

SEQ ID NO: 1150438 - RNA, 19 nt, Artificial Sequence
  Description of Artificial Sequence: Synthetic oligonucleotide
ccacugcguccauggggau

SEQ ID NO: 1150439 - RNA, 19 nt, Artificial Sequence
  Description of Artificial Sequence: Synthetic oligonucleotide
cgggcgggucacugggcgu

SEQ ID NO: 1150440 - RNA, 19 nt, Artificial Sequence
  Description of Artificial Sequence: Synthetic oligonucleotide
gccggccgggcgggucacu

SEQ ID NO: 1150441 - RNA, 19 nt, Artificial Sequence
  Description of Artificial Sequence: Synthetic oligonucleotide
  modified_base (1)..(1): a, c, u, g, unknown or other
ngaagagugguuuaaauag

SEQ ID NO: 1150442 - RNA, 19 nt, Artificial Sequence
  Description of Artificial Sequence: Synthetic oligonucleotide
aaaucuaccauuccagucc

SEQ ID NO: 1150443 - RNA, 19 nt, Artificial Sequence
  Description of Artificial Sequence: Synthetic oligonucleotide
  modified_base (12)..(12): a, c, u, g, unknown or other
aaacauuuaacnccaaauc

SEQ ID NO: 1150444 - RNA, 19 nt, Artificial Sequence
  Description of Artificial Sequence: Synthetic oligonucleotide
aauuuacuaaaacccaggc

SEQ ID NO: 1150445 - RNA, 19 nt, Artificial Sequence
  Description of Artificial Sequence: Synthetic oligonucleotide
uuuacuaaaacccaggcaa

SEQ ID NO: 1150446 - RNA, 19 nt, Artificial Sequence
  Description of Artificial Sequence: Synthetic oligonucleotide
uucauuauacuucugggag

SEQ ID NO: 1150447 - RNA, 19 nt, Artificial Sequence
  Description of Artificial Sequence: Synthetic oligonucleotide
aacuucauuauacuucugg

SEQ ID NO: 1150448 - RNA, 19 nt, Artificial Sequence
  Description of Artificial Sequence: Synthetic oligonucleotide
aaaauuauugugcacugug

SEQ ID NO: 1150449 - RNA, 19 nt, Artificial Sequence
  Description of Artificial Sequence: Synthetic oligonucleotide
acucuuguugaccauaucc

SEQ ID NO: 1150450 - RNA, 19 nt, Artificial Sequence
  Description of Artificial Sequence: Synthetic oligonucleotide
uugaaugacgcuaaagggg

SEQ ID NO: 1150451 - RNA, 19 nt, Artificial Sequence
  Description of Artificial Sequence: Synthetic oligonucleotide
  modified_base (7)..(7): a, c, u, g, unknown or other
uuuaacnccaaaucuacca

SEQ ID NO: 1150452 - RNA, 19 nt, Artificial Sequence
  Description of Artificial Sequence: Synthetic oligonucleotide
gagauuaagagucuggaag

SEQ ID NO: 1150453 - RNA, 19 nt, Artificial Sequence
  Description of Artificial Sequence: Synthetic oligonucleotide
aacaaauagcgccucggcc

SEQ ID NO: 1150454 - RNA, 19 nt, Artificial Sequence
  Description of Artificial Sequence: Synthetic oligonucleotide
gaugggaacaacuuucugg

SEQ ID NO: 1150455 - RNA, 19 nt, Artificial Sequence
  Description of Artificial Sequence: Synthetic oligonucleotide
ugcucuagcuaacaaaggg

SEQ ID NO: 1150456 - RNA, 19 nt, Artificial Sequence
  Description of Artificial Sequence: Synthetic oligonucleotide
ugaacgacgauauaguggu

SEQ ID NO: 1150457 - RNA, 19 nt, Artificial Sequence
  Description of Artificial Sequence: Synthetic oligonucleotide
agccaauuuacuaaaaccc

SEQ ID NO: 1150458 - RNA, 19 nt, Artificial Sequence
  Description of Artificial Sequence: Synthetic oligonucleotide
acaaauagcgccucggccg

SEQ ID NO: 1150459 - RNA, 19 nt, Artificial Sequence
  Description of Artificial Sequence: Synthetic oligonucleotide
ucucauuccauuuaauuga

SEQ ID NO: 1150460 - RNA, 19 nt, Artificial Sequence
  Description of Artificial Sequence: Synthetic oligonucleotide
aaagucagaacacaguuuu

SEQ ID NO: 1150461 - RNA, 19 nt, Artificial Sequence
  Description of Artificial Sequence: Synthetic oligonucleotide
aauuauugugcacuguggu

SEQ ID NO: 1150462 - RNA, 19 nt, Artificial Sequence
  Description of Artificial Sequence: Synthetic oligonucleotide
aacgacgauauaguggugc

SEQ ID NO: 1150463 - RNA, 19 nt, Artificial Sequence
  Description of Artificial Sequence: Synthetic oligonucleotide
uuauacuucugggagaggg

SEQ ID NO: 1150464 - RNA, 19 nt, Artificial Sequence
  Description of Artificial Sequence: Synthetic oligonucleotide
agaaauguguaaaccaucc

SEQ ID NO: 1150465 - RNA, 19 nt, Artificial Sequence
  Description of Artificial Sequence: Synthetic oligonucleotide
aucauucacuagcaaaugc

SEQ ID NO: 1150466 - RNA, 19 nt, Artificial Sequence
  Description of Artificial Sequence: Synthetic oligonucleotide
uuuaauugacaaauaaaua

SEQ ID NO: 1150467 - RNA, 19 nt, Artificial Sequence
  Description of Artificial Sequence: Synthetic oligonucleotide
uuaagagucuggaaguccc

SEQ ID NO: 1150468 - RNA, 19 nt, Artificial Sequence
  Description of Artificial Sequence: Synthetic oligonucleotide
aacccauccugcuggagcc

SEQ ID NO: 1150469 - RNA, 19 nt, Artificial Sequence
  Description of Artificial Sequence: Synthetic oligonucleotide
uaacaaagggcucucucgg

SEQ ID NO: 1150470 - RNA, 19 nt, Artificial Sequence
  Description of Artificial Sequence: Synthetic oligonucleotide
ugaaugacgcuaaaggggu

SEQ ID NO: 1150471 - RNA, 19 nt, Artificial Sequence
  Description of Artificial Sequence: Synthetic oligonucleotide
cuaacaaagggcucucucg

SEQ ID NO: 1150472 - RNA, 19 nt, Artificial Sequence
  Description of Artificial Sequence: Synthetic oligonucleotide
  modified_base (7)..(7): a, c, u, g, unknown or other
uuuacgnguggaaacauuu

SEQ ID NO: 1150473 - RNA, 19 nt, Artificial Sequence
  Description of Artificial Sequence: Synthetic oligonucleotide
  modified_base (4)..(4): a, c, u, g, unknown or other
aacnccaaaucuaccauuc

SEQ ID NO: 1150474 - RNA, 19 nt, Artificial Sequence
  Description of Artificial Sequence: Synthetic oligonucleotide
uaucuuauaaaguuuugau

SEQ ID NO: 1150475 - RNA, 19 nt, Artificial Sequence
  Description of Artificial Sequence: Synthetic oligonucleotide
gauaaacacuuguugauca

SEQ ID NO: 1150476 - RNA, 19 nt, Artificial Sequence
  Description of Artificial Sequence: Synthetic oligonucleotide
  modified_base (9)..(9): a, c, u, g, unknown or other
cauuuaacnccaaaucuac

SEQ ID NO: 1150477 - RNA, 19 nt, Artificial Sequence
  Description of Artificial Sequence: Synthetic oligonucleotide
aaauuauugugcacugugg

SEQ ID NO: 1150478 - RNA, 19 nt, Artificial Sequence
  Description of Artificial Sequence: Synthetic oligonucleotide
aaccaggucaagcuguauc

SEQ ID NO: 1150479 - RNA, 19 nt, Artificial Sequence
  Description of Artificial Sequence: Synthetic oligonucleotide
uuuugugccgaggugacgg

SEQ ID NO: 1150480 - RNA, 19 nt, Artificial Sequence
  Description of Artificial Sequence: Synthetic oligonucleotide
aaggcccuaugucauuucc

SEQ ID NO: 1150481 - RNA, 19 nt, Artificial Sequence
  Description of Artificial Sequence: Synthetic oligonucleotide
uaacccaccauccaauucu

SEQ ID NO: 1150482 - RNA, 19 nt, Artificial Sequence
  Description of Artificial Sequence: Synthetic oligonucleotide
aucucguucuccaaaaggc

SEQ ID NO: 1150483 - RNA, 19 nt, Artificial Sequence
  Description of Artificial Sequence: Synthetic oligonucleotide
agauuaagagucuggaagu

SEQ ID NO: 1150484 - RNA, 19 nt, Artificial Sequence
  Description of Artificial Sequence: Synthetic oligonucleotide
uuauugugcacugugguga

SEQ ID NO: 1150485 - RNA, 19 nt, Artificial Sequence
  Description of Artificial Sequence: Synthetic oligonucleotide
aauaaagucagaacacagu

SEQ ID NO: 1150486 - RNA, 19 nt, Artificial Sequence
  Description of Artificial Sequence: Synthetic oligonucleotide
uggccugugaacaaauagc

SEQ ID NO: 1150487 - RNA, 19 nt, Artificial Sequence
  Description of Artificial Sequence: Synthetic oligonucleotide
uuuccaguugacgacagcc

SEQ ID NO: 1150488 - RNA, 19 nt, Artificial Sequence
  Description of Artificial Sequence: Synthetic oligonucleotide
acuagcaaaugcucguggg

SEQ ID NO: 1150489 - RNA, 19 nt, Artificial Sequence
  Description of Artificial Sequence: Synthetic oligonucleotide
aaacucucaguccuccuug

SEQ ID NO: 1150490 - RNA, 19 nt, Artificial Sequence
  Description of Artificial Sequence: Synthetic oligonucleotide
  modified_base (2)..(2): a, c, u, g, unknown or other
  modified_base (18)..(18): a, c, u, g, unknown or other
gnguggaaacauuuaacnc

SEQ ID NO: 1150491 - RNA, 19 nt, Artificial Sequence
  Description of Artificial Sequence: Synthetic oligonucleotide
uguaucuuauaaaguuuug

SEQ ID NO: 1150492 - RNA, 19 nt, Artificial Sequence
  Description of Artificial Sequence: Synthetic oligonucleotide
ucuggaaggacucugucua

SEQ ID NO: 1150493 - RNA, 19 nt, Artificial Sequence
  Description of Artificial Sequence: Synthetic oligonucleotide
aacucucaguccuccuugc

SEQ ID NO: 1150494 - RNA, 19 nt, Artificial Sequence
  Description of Artificial Sequence: Synthetic oligonucleotide
gacaggaucuugaaugacg

SEQ ID NO: 1150495 - RNA, 19 nt, Artificial Sequence
  Description of Artificial Sequence: Synthetic oligonucleotide
ugaaccgugucacugucca

SEQ ID NO: 1150496 - RNA, 19 nt, Artificial Sequence
  Description of Artificial Sequence: Synthetic oligonucleotide
auuauugugcacuguggug

SEQ ID NO: 1150497 - RNA, 19 nt, Artificial Sequence
  Description of Artificial Sequence: Synthetic oligonucleotide
uggucuuaguuggagacgg

SEQ ID NO: 1150498 - RNA, 19 nt, Artificial Sequence
  Description of Artificial Sequence: Synthetic oligonucleotide
agcuguaucuuauaaaguu

SEQ ID NO: 1150499 - RNA, 19 nt, Artificial Sequence
  Description of Artificial Sequence: Synthetic oligonucleotide
acggaguggucuuaguugg

SEQ ID NO: 1150500 - RNA, 19 nt, Artificial Sequence
  Description of Artificial Sequence: Synthetic oligonucleotide
gauauaguggugcagucaa

SEQ ID NO: 1150501 - RNA, 19 nt, Artificial Sequence
  Description of Artificial Sequence: Synthetic oligonucleotide
  modified_base (6)..(6): a, c, u, g, unknown or other
uuaacnccaaaucuaccau

SEQ ID NO: 1150502 - RNA, 19 nt, Artificial Sequence
  Description of Artificial Sequence: Synthetic oligonucleotide
ugacaauauaguuaauuuu

SEQ ID NO: 1150503 - RNA, 19 nt, Artificial Sequence
  Description of Artificial Sequence: Synthetic oligonucleotide
acgcuaaagggguggagcc

SEQ ID NO: 1150504 - RNA, 19 nt, Artificial Sequence
  Description of Artificial Sequence: Synthetic oligonucleotide
agggaauuacacaucauuc

SEQ ID NO: 1150505 - RNA, 19 nt, Artificial Sequence
  Description of Artificial Sequence: Synthetic oligonucleotide
ccugugaacaaauagcgcc

SEQ ID NO: 1150506 - RNA, 19 nt, Artificial Sequence
  Description of Artificial Sequence: Synthetic oligonucleotide
acucugacaacccgucggc

SEQ ID NO: 1150507 - RNA, 19 nt, Artificial Sequence
  Description of Artificial Sequence: Synthetic oligonucleotide
gacggaguggucuuaguug

SEQ ID NO: 1150508 - RNA, 19 nt, Artificial Sequence
  Description of Artificial Sequence: Synthetic oligonucleotide
  modified_base (5)..(5): a, c, u, g, unknown or other
uacgnguggaaacauuuaa

SEQ ID NO: 1150509 - RNA, 19 nt, Artificial Sequence
  Description of Artificial Sequence: Synthetic oligonucleotide
ucuuaguuggagacgggga

SEQ ID NO: 1150510 - RNA, 19 nt, Artificial Sequence
  Description of Artificial Sequence: Synthetic oligonucleotide
uuuggaugcugccauuugu

SEQ ID NO: 1150511 - RNA, 19 nt, Artificial Sequence
  Description of Artificial Sequence: Synthetic oligonucleotide
  modified_base (10)..(10): a, c, u, g, unknown or other
aguuuuacgnguggaaaca

SEQ ID NO: 1150512 - RNA, 19 nt, Artificial Sequence
  Description of Artificial Sequence: Synthetic oligonucleotide
ugaguucacaagcuguacu

SEQ ID NO: 1150513 - RNA, 19 nt, Artificial Sequence
  Description of Artificial Sequence: Synthetic oligonucleotide
caucucguucuccaaaagg

SEQ ID NO: 1150514 - RNA, 19 nt, Artificial Sequence
  Description of Artificial Sequence: Synthetic oligonucleotide
  modified_base (3)..(3): a, c, u, g, unknown or other
acnccaaaucuaccauucc

SEQ ID NO: 1150515 - RNA, 19 nt, Artificial Sequence
  Description of Artificial Sequence: Synthetic oligonucleotide
aaucuaccauuccaguccu

SEQ ID NO: 1150516 - RNA, 19 nt, Artificial Sequence
  Description of Artificial Sequence: Synthetic oligonucleotide
cauagccguggucagaucc

SEQ ID NO: 1150517 - RNA, 19 nt, Artificial Sequence
  Description of Artificial Sequence: Synthetic oligonucleotide
uuagugaugggaacaacuu

SEQ ID NO: 1150518 - RNA, 19 nt, Artificial Sequence
  Description of Artificial Sequence: Synthetic oligonucleotide
gaguuugacucucggaggc

SEQ ID NO: 1150519 - RNA, 19 nt, Artificial Sequence
  Description of Artificial Sequence: Synthetic oligonucleotide
cauuauacuucugggagag

SEQ ID NO: 1150520 - RNA, 19 nt, Artificial Sequence
  Description of Artificial Sequence: Synthetic oligonucleotide
uuuccaacuucauuauacu

SEQ ID NO: 1150521 - RNA, 19 nt, Artificial Sequence
  Description of Artificial Sequence: Synthetic oligonucleotide
ucauuauacuucugggaga

SEQ ID NO: 1150522 - RNA, 19 nt, Artificial Sequence
  Description of Artificial Sequence: Synthetic oligonucleotide
agauuagaugaagaaaaug

SEQ ID NO: 1150523 - RNA, 19 nt, Artificial Sequence
  Description of Artificial Sequence: Synthetic oligonucleotide
  modified_base (8)..(8): a, c, u, g, unknown or other
auuuaacnccaaaucuacc

SEQ ID NO: 1150524 - RNA, 19 nt, Artificial Sequence
  Description of Artificial Sequence: Synthetic oligonucleotide
aggaauagcugccauggcu

SEQ ID NO: 1150525 - RNA, 19 nt, Artificial Sequence
  Description of Artificial Sequence: Synthetic oligonucleotide
ugugaccauuuucuggaag

SEQ ID NO: 1150526 - RNA, 19 nt, Artificial Sequence
  Description of Artificial Sequence: Synthetic oligonucleotide
gugaacgacgauauagugg

SEQ ID NO: 1150527 - RNA, 19 nt, Artificial Sequence
  Description of Artificial Sequence: Synthetic oligonucleotide
acaaacagcuuguuaguga

SEQ ID NO: 1150528 - RNA, 19 nt, Artificial Sequence
  Description of Artificial Sequence: Synthetic oligonucleotide
guugacgacagccugacaa

SEQ ID NO: 1150529 - RNA, 19 nt, Artificial Sequence
  Description of Artificial Sequence: Synthetic oligonucleotide
uguggugaguucacaagcu

SEQ ID NO: 1150530 - RNA, 19 nt, Artificial Sequence
  Description of Artificial Sequence: Synthetic oligonucleotide
acggugaacgacgauauag

SEQ ID NO: 1150531 - RNA, 19 nt, Artificial Sequence
  Description of Artificial Sequence: Synthetic oligonucleotide
ugucggcacacacugacac

SEQ ID NO: 1150532 - RNA, 19 nt, Artificial Sequence
  Description of Artificial Sequence: Synthetic oligonucleotide
uugcucuagcuaacaaagg

SEQ ID NO: 1150533 - RNA, 19 nt, Artificial Sequence
  Description of Artificial Sequence: Synthetic oligonucleotide
cacucucucacggugaacg

SEQ ID NO: 1150534 - RNA, 19 nt, Artificial Sequence
  Description of Artificial Sequence: Synthetic oligonucleotide
ggucagaucccacauuugg

SEQ ID NO: 1150535 - RNA, 19 nt, Artificial Sequence
  Description of Artificial Sequence: Synthetic oligonucleotide
cuggauaaacacuuguuga

SEQ ID NO: 1150536 - RNA, 19 nt, Artificial Sequence
  Description of Artificial Sequence: Synthetic oligonucleotide
uccaguugacgacagccug

SEQ ID NO: 1150537 - RNA, 19 nt, Artificial Sequence
  Description of Artificial Sequence: Synthetic oligonucleotide
ugaguggagaucauuccuc

SEQ ID NO: 1150538 - RNA, 19 nt, Artificial Sequence
  Description of Artificial Sequence: Synthetic oligonucleotide
ugccguaccaggagagucg

SEQ ID NO: 1150539 - RNA, 19 nt, Artificial Sequence
  Description of Artificial Sequence: Synthetic oligonucleotide
cuguggugaguucacaagc

SEQ ID NO: 1150540 - RNA, 19 nt, Artificial Sequence
  Description of Artificial Sequence: Synthetic oligonucleotide
  modified_base (4)..(4): a, c, u, g, unknown or other
acgnguggaaacauuuaac

SEQ ID NO: 1150541 - RNA, 19 nt, Artificial Sequence
  Description of Artificial Sequence: Synthetic oligonucleotide
aaugcucguggguuuaaau

SEQ ID NO: 1150542 - RNA, 19 nt, Artificial Sequence
  Description of Artificial Sequence: Synthetic oligonucleotide
auaguggugcagucaacag

SEQ ID NO: 1150543 - RNA, 19 nt, Artificial Sequence
  Description of Artificial Sequence: Synthetic oligonucleotide
guggccugugaacaaauag

SEQ ID NO: 1150544 - RNA, 19 nt, Artificial Sequence
  Description of Artificial Sequence: Synthetic oligonucleotide
  modified_base (16)..(16): a, c, u, g, unknown or other
guggaaacauuuaacncca

SEQ ID NO: 1150545 - RNA, 19 nt, Artificial Sequence
  Description of Artificial Sequence: Synthetic oligonucleotide
ugaccauauccauagccgu

SEQ ID NO: 1150546 - RNA, 19 nt, Artificial Sequence
  Description of Artificial Sequence: Synthetic oligonucleotide
aaaggcccuaugucauuuc

SEQ ID NO: 1150547 - RNA, 19 nt, Artificial Sequence
  Description of Artificial Sequence: Synthetic oligonucleotide
agaaaacaugaaccagguc

SEQ ID NO: 1150548 - RNA, 19 nt, Artificial Sequence
  Description of Artificial Sequence: Synthetic oligonucleotide
accaggucaagcuguaucu

SEQ ID NO: 1150549 - RNA, 19 nt, Artificial Sequence
  Description of Artificial Sequence: Synthetic oligonucleotide
ugagauuaagagucuggaa

SEQ ID NO: 1150550 - RNA, 19 nt, Artificial Sequence
  Description of Artificial Sequence: Synthetic oligonucleotide
ugacaaacagcuuguuagu

SEQ ID NO: 1150551 - RNA, 19 nt, Artificial Sequence
  Description of Artificial Sequence: Synthetic oligonucleotide
accauauccauagccgugg

SEQ ID NO: 1150552 - RNA, 19 nt, Artificial Sequence
  Description of Artificial Sequence: Synthetic oligonucleotide
accauuccaguccugugag

SEQ ID NO: 1150553 - RNA, 19 nt, Artificial Sequence
  Description of Artificial Sequence: Synthetic oligonucleotide
uuccgaggaauccuccugc

SEQ ID NO: 1150554 - RNA, 19 nt, Artificial Sequence
  Description of Artificial Sequence: Synthetic oligonucleotide
ggucucaugaugcuggagc

SEQ ID NO: 1150555 - RNA, 19 nt, Artificial Sequence
  Description of Artificial Sequence: Synthetic oligonucleotide
ugcucguggguuuaaauuu

SEQ ID NO: 1150556 - RNA, 19 nt, Artificial Sequence
  Description of Artificial Sequence: Synthetic oligonucleotide
acgauauaguggugcaguc

SEQ ID NO: 1150557 - RNA, 19 nt, Artificial Sequence
  Description of Artificial Sequence: Synthetic oligonucleotide
ucccacauuuggaugcugc

SEQ ID NO: 1150558 - RNA, 19 nt, Artificial Sequence
  Description of Artificial Sequence: Synthetic oligonucleotide
aaggcuggaguuugacucu

SEQ ID NO: 1150559 - RNA, 19 nt, Artificial Sequence
  Description of Artificial Sequence: Synthetic oligonucleotide
acugacaauauaguuaauu

SEQ ID NO: 1150560 - RNA, 19 nt, Artificial Sequence
  Description of Artificial Sequence: Synthetic oligonucleotide
gacgcuaaagggguggagc

SEQ ID NO: 1150561 - RNA, 19 nt, Artificial Sequence
  Description of Artificial Sequence: Synthetic oligonucleotide
uguugagauuaagagucug

SEQ ID NO: 1150562 - RNA, 19 nt, Artificial Sequence
  Description of Artificial Sequence: Synthetic oligonucleotide
uccauuuaauugacaaaua

SEQ ID NO: 1150563 - RNA, 19 nt, Artificial Sequence
  Description of Artificial Sequence: Synthetic oligonucleotide
ggcaauuuuguucuucaug

SEQ ID NO: 1150564 - RNA, 19 nt, Artificial Sequence
  Description of Artificial Sequence: Synthetic oligonucleotide
cuuggacucugacaacccg

SEQ ID NO: 1150565 - RNA, 19 nt, Artificial Sequence
  Description of Artificial Sequence: Synthetic oligonucleotide
gacuuccucucagacauag

SEQ ID NO: 1150566 - RNA, 19 nt, Artificial Sequence
  Description of Artificial Sequence: Synthetic oligonucleotide
gaaauguguaaaccaucca

SEQ ID NO: 1150567 - RNA, 19 nt, Artificial Sequence
  Description of Artificial Sequence: Synthetic oligonucleotide
uucuaacccaccauccaau

SEQ ID NO: 1150568 - RNA, 19 nt, Artificial Sequence
  Description of Artificial Sequence: Synthetic oligonucleotide
ccaauuuacuaaaacccag

SEQ ID NO: 1150569 - RNA, 19 nt, Artificial Sequence
  Description of Artificial Sequence: Synthetic oligonucleotide
ucacggugaacgacgauau

SEQ ID NO: 1150570 - RNA, 19 nt, Artificial Sequence
  Description of Artificial Sequence: Synthetic oligonucleotide
ugaugggaacaacuuucug

SEQ ID NO: 1150571 - RNA, 19 nt, Artificial Sequence
  Description of Artificial Sequence: Synthetic oligonucleotide
uuggagacggggaugccgu

SEQ ID NO: 1150572 - RNA, 19 nt, Artificial Sequence
  Description of Artificial Sequence: Synthetic oligonucleotide
ugcguuggacccaugugac

SEQ ID NO: 1150573 - RNA, 19 nt, Artificial Sequence
  Description of Artificial Sequence: Synthetic oligonucleotide
ucuagcuaacaaagggcuc

SEQ ID NO: 1150574 - RNA, 19 nt, Artificial Sequence
  Description of Artificial Sequence: Synthetic oligonucleotide
ucggcacacacugacacca

SEQ ID NO: 1150575 - RNA, 19 nt, Artificial Sequence
  Description of Artificial Sequence: Synthetic oligonucleotide
ggaguuugacucucggagg

SEQ ID NO: 1150576 - RNA, 19 nt, Artificial Sequence
  Description of Artificial Sequence: Synthetic oligonucleotide
gucuuaguuggagacgggg

SEQ ID NO: 1150577 - RNA, 19 nt, Artificial Sequence
  Description of Artificial Sequence: Synthetic oligonucleotide
acggggaugccguaccagg

SEQ ID NO: 1150578 - RNA, 19 nt, Artificial Sequence
  Description of Artificial Sequence: Synthetic oligonucleotide
ggccugugaacaaauagcg

SEQ ID NO: 1150579 - RNA, 19 nt, Artificial Sequence
  Description of Artificial Sequence: Synthetic oligonucleotide
uuccaguugacgacagccu

SEQ ID NO: 1150580 - RNA, 19 nt, Artificial Sequence
  Description of Artificial Sequence: Synthetic oligonucleotide
ccagauuagaugaagaaaa

SEQ ID NO: 1150581 - RNA, 19 nt, Artificial Sequence
  Description of Artificial Sequence: Synthetic oligonucleotide
caucagagguacuugguga

SEQ ID NO: 1150582 - RNA, 19 nt, Artificial Sequence
  Description of Artificial Sequence: Synthetic oligonucleotide
ugcccucagaguuuaaaau

SEQ ID NO: 1150583 - RNA, 19 nt, Artificial Sequence
  Description of Artificial Sequence: Synthetic oligonucleotide
aaacccaggcaauuuuguu

SEQ ID NO: 1150584 - RNA, 19 nt, Artificial Sequence
  Description of Artificial Sequence: Synthetic oligonucleotide
aucuugaaugacgcuaaag

SEQ ID NO: 1150585 - RNA, 19 nt, Artificial Sequence
  Description of Artificial Sequence: Synthetic oligonucleotide
uggggaaccuucuuucuuc

SEQ ID NO: 1150586 - RNA, 19 nt, Artificial Sequence
  Description of Artificial Sequence: Synthetic oligonucleotide
  modified_base (8)..(8): a, c, u, g, unknown or other
uuuuacgnguggaaacauu

SEQ ID NO: 1150587 - RNA, 19 nt, Artificial Sequence
  Description of Artificial Sequence: Synthetic oligonucleotide
cucacacucucucacggug

SEQ ID NO: 1150588 - RNA, 19 nt, Artificial Sequence
  Description of Artificial Sequence: Synthetic oligonucleotide
auagccguggucagauccc

SEQ ID NO: 1150589 - RNA, 19 nt, Artificial Sequence
  Description of Artificial Sequence: Synthetic oligonucleotide
agcgcgaugugcucagguc

SEQ ID NO: 1150590 - RNA, 19 nt, Artificial Sequence
  Description of Artificial Sequence: Synthetic oligonucleotide
uggugcagucaacagccug

SEQ ID NO: 1150591 - RNA, 19 nt, Artificial Sequence
  Description of Artificial Sequence: Synthetic oligonucleotide
  modified_base (6)..(6): a, c, u, g, unknown or other
uuacgnguggaaacauuua

SEQ ID NO: 1150592 - RNA, 19 nt, Artificial Sequence
  Description of Artificial Sequence: Synthetic oligonucleotide
guuugacucucggaggcgg

SEQ ID NO: 1150593 - RNA, 19 nt, Artificial Sequence
  Description of Artificial Sequence: Synthetic oligonucleotide
uuuuccaguugacgacagc

SEQ ID NO: 1150594 - RNA, 19 nt, Artificial Sequence
  Description of Artificial Sequence: Synthetic oligonucleotide
aaacaugaaccaggucaag

SEQ ID NO: 1150595 - RNA, 19 nt, Artificial Sequence
  Description of Artificial Sequence: Synthetic oligonucleotide
auaaacacuuguugaucau

SEQ ID NO: 1150596 - RNA, 19 nt, Artificial Sequence
  Description of Artificial Sequence: Synthetic oligonucleotide
uugcccucagaguuuaaaa

SEQ ID NO: 1150597 - RNA, 19 nt, Artificial Sequence
  Description of Artificial Sequence: Synthetic oligonucleotide
aguggcuccuauagcagcg

SEQ ID NO: 1150598 - RNA, 19 nt, Artificial Sequence
  Description of Artificial Sequence: Synthetic oligonucleotide
cuuguuagugaugggaaca

SEQ ID NO: 1150599 - RNA, 19 nt, Artificial Sequence
  Description of Artificial Sequence: Synthetic oligonucleotide
ggaacaacuuucuggauaa

SEQ ID NO: 1150600 - RNA, 19 nt, Artificial Sequence
  Description of Artificial Sequence: Synthetic oligonucleotide
uucuuccgaggaauccucc

SEQ ID NO: 1150601 - RNA, 19 nt, Artificial Sequence
  Description of Artificial Sequence: Synthetic oligonucleotide
guaacuguggaaacucuca

SEQ ID NO: 1150602 - RNA, 19 nt, Artificial Sequence
  Description of Artificial Sequence: Synthetic oligonucleotide
agggcucucucgguaaggc

SEQ ID NO: 1150603 - RNA, 19 nt, Artificial Sequence
  Description of Artificial Sequence: Synthetic oligonucleotide
uugacgacagccugacaaa

SEQ ID NO: 1150604 - RNA, 19 nt, Artificial Sequence
  Description of Artificial Sequence: Synthetic oligonucleotide
ugacggaguggucuuaguu

SEQ ID NO: 1150605 - RNA, 19 nt, Artificial Sequence
  Description of Artificial Sequence: Synthetic oligonucleotide
uggacucugacaacccguc

SEQ ID NO: 1150606 - RNA, 19 nt, Artificial Sequence
  Description of Artificial Sequence: Synthetic oligonucleotide
aaaaggcccuaugucauuu

SEQ ID NO: 1150607 - RNA, 19 nt, Artificial Sequence
  Description of Artificial Sequence: Synthetic oligonucleotide
aacuccacuuucugcucga

SEQ ID NO: 1150608 - RNA, 19 nt, Artificial Sequence
  Description of Artificial Sequence: Synthetic oligonucleotide
ggugaacgacgauauagug

SEQ ID NO: 1150609 - RNA, 19 nt, Artificial Sequence
  Description of Artificial Sequence: Synthetic oligonucleotide
  modified_base (2)..(2): a, c, u, g, unknown or other
cnccaaaucuaccauucca

SEQ ID NO: 1150610 - RNA, 19 nt, Artificial Sequence
  Description of Artificial Sequence: Synthetic oligonucleotide
cuugcggaacuccacuuuc

SEQ ID NO: 1150611 - RNA, 19 nt, Artificial Sequence
  Description of Artificial Sequence: Synthetic oligonucleotide
augcucguggguuuaaauu

SEQ ID NO: 1150612 - RNA, 19 nt, Artificial Sequence
  Description of Artificial Sequence: Synthetic oligonucleotide
ugugccgaggugacggagu

SEQ ID NO: 1150613 - RNA, 19 nt, Artificial Sequence
  Description of Artificial Sequence: Synthetic oligonucleotide
caauucuuucacacaucug

SEQ ID NO: 1150614 - RNA, 19 nt, Artificial Sequence
  Description of Artificial Sequence: Synthetic oligonucleotide
uccucaguggggccaccgg

SEQ ID NO: 1150615 - RNA, 19 nt, Artificial Sequence
  Description of Artificial Sequence: Synthetic oligonucleotide
acgacgauauaguggugca

SEQ ID NO: 1150616 - RNA, 19 nt, Artificial Sequence
  Description of Artificial Sequence: Synthetic oligonucleotide
gagacggggaugccguacc

SEQ ID NO: 1150617 - RNA, 19 nt, Artificial Sequence
  Description of Artificial Sequence: Synthetic oligonucleotide
  modified_base (14)..(14): a, c, u, g, unknown or other
ggaaacauuuaacnccaaa

SEQ ID NO: 1150618 - RNA, 19 nt, Artificial Sequence
  Description of Artificial Sequence: Synthetic oligonucleotide
uuguuagugaugggaacaa

SEQ ID NO: 1150619 - RNA, 19 nt, Artificial Sequence
  Description of Artificial Sequence: Synthetic oligonucleotide
aaacacaguggcuccuaua

SEQ ID NO: 1150620 - RNA, 19 nt, Artificial Sequence
  Description of Artificial Sequence: Synthetic oligonucleotide
augccguaccaggagaguc

SEQ ID NO: 1150621 - RNA, 19 nt, Artificial Sequence
  Description of Artificial Sequence: Synthetic oligonucleotide
ggcccuaugucauuuccag

SEQ ID NO: 1150622 - RNA, 19 nt, Artificial Sequence
  Description of Artificial Sequence: Synthetic oligonucleotide
ggcucucucgguaaggccg

SEQ ID NO: 1150623 - RNA, 19 nt, Artificial Sequence
  Description of Artificial Sequence: Synthetic oligonucleotide
gagggaauuacacaucauu

SEQ ID NO: 1150624 - RNA, 19 nt, Artificial Sequence
  Description of Artificial Sequence: Synthetic oligonucleotide
cugacaauauaguuaauuu

SEQ ID NO: 1150625 - RNA, 19 nt, Artificial Sequence
  Description of Artificial Sequence: Synthetic oligonucleotide
ugucacuguccacguucgg

SEQ ID NO: 1150626 - RNA, 19 nt, Artificial Sequence
  Description of Artificial Sequence: Synthetic oligonucleotide
guggugaguucacaagcug

SEQ ID NO: 1150627 - RNA, 19 nt, Artificial Sequence
  Description of Artificial Sequence: Synthetic oligonucleotide
uggucagaucccacauuug

SEQ ID NO: 1150628 - RNA, 19 nt, Artificial Sequence
  Description of Artificial Sequence: Synthetic oligonucleotide
cagaggaauagcugccaug

SEQ ID NO: 1150629 - RNA, 19 nt, Artificial Sequence
  Description of Artificial Sequence: Synthetic oligonucleotide
uccuauagcagcggagagu

SEQ ID NO: 1150630 - RNA, 19 nt, Artificial Sequence
  Description of Artificial Sequence: Synthetic oligonucleotide
cuaacccaccauccaauuc

SEQ ID NO: 1150631 - RNA, 19 nt, Artificial Sequence
  Description of Artificial Sequence: Synthetic oligonucleotide
aacccgucggcuguuuucu

SEQ ID NO: 1150632 - RNA, 19 nt, Artificial Sequence
  Description of Artificial Sequence: Synthetic oligonucleotide
ucuugcggaacuccacuuu

SEQ ID NO: 1150633 - RNA, 19 nt, Artificial Sequence
  Description of Artificial Sequence: Synthetic oligonucleotide
cucguggguuuaaauuuac

SEQ ID NO: 1150634 - RNA, 19 nt, Artificial Sequence
  Description of Artificial Sequence: Synthetic oligonucleotide
aguuugacucucggaggcg

SEQ ID NO: 1150635 - RNA, 19 nt, Artificial Sequence
  Description of Artificial Sequence: Synthetic oligonucleotide
agagucggcccagaaaaca

SEQ ID NO: 1150636 - RNA, 19 nt, Artificial Sequence
  Description of Artificial Sequence: Synthetic oligonucleotide
ccuauagcagcggagagug

SEQ ID NO: 1150637 - RNA, 19 nt, Artificial Sequence
  Description of Artificial Sequence: Synthetic oligonucleotide
uugcggaacuccacuuucu

SEQ ID NO: 1150638 - RNA, 19 nt, Artificial Sequence
  Description of Artificial Sequence: Synthetic oligonucleotide
cugcguuggacccauguga

SEQ ID NO: 1150639 - RNA, 19 nt, Artificial Sequence
  Description of Artificial Sequence: Synthetic oligonucleotide
guggucuuaguuggagacg

SEQ ID NO: 1150640 - RNA, 19 nt, Artificial Sequence
  Description of Artificial Sequence: Synthetic oligonucleotide
uagcaaaugcucguggguu

SEQ ID NO: 1150641 - RNA, 19 nt, Artificial Sequence
  Description of Artificial Sequence: Synthetic oligonucleotide
ucggcuguuuucuggacuu

SEQ ID NO: 1150642 - RNA, 19 nt, Artificial Sequence
  Description of Artificial Sequence: Synthetic oligonucleotide
ugugaacaaauagcgccuc

SEQ ID NO: 1150643 - RNA, 19 nt, Artificial Sequence
  Description of Artificial Sequence: Synthetic oligonucleotide
ugccucaggagagucggcc

SEQ ID NO: 1150644 - RNA, 19 nt, Artificial Sequence
  Description of Artificial Sequence: Synthetic oligonucleotide
gacgauauaguggugcagu

SEQ ID NO: 1150645 - RNA, 19 nt, Artificial Sequence
  Description of Artificial Sequence: Synthetic oligonucleotide
cucgguaaggccgcguggc

SEQ ID NO: 1150646 - RNA, 19 nt, Artificial Sequence
  Description of Artificial Sequence: Synthetic oligonucleotide
gacgcggcaggacugaugu

SEQ ID NO: 1150647 - RNA, 19 nt, Artificial Sequence
  Description of Artificial Sequence: Synthetic oligonucleotide
gagucggucccuccaucag

SEQ ID NO: 1150648 - RNA, 19 nt, Artificial Sequence
  Description of Artificial Sequence: Synthetic oligonucleotide
  modified_base (19)..(19): a, c, u, g, unknown or other
accaggugcuucucggacn

SEQ ID NO: 1150649 - RNA, 19 nt, Artificial Sequence
  Description of Artificial Sequence: Synthetic oligonucleotide
cuccuauagcagcggagag

SEQ ID NO: 1150650 - RNA, 19 nt, Artificial Sequence
  Description of Artificial Sequence: Synthetic oligonucleotide
auacuucugggagagggaa

SEQ ID NO: 1150651 - RNA, 19 nt, Artificial Sequence
  Description of Artificial Sequence: Synthetic oligonucleotide
ugacgacagccugacaaac

SEQ ID NO: 1150652 - RNA, 19 nt, Artificial Sequence
  Description of Artificial Sequence: Synthetic oligonucleotide
  modified_base (16)..(16): a, c, u, g, unknown or other
aggugcuucucggacngca

SEQ ID NO: 1150653 - RNA, 19 nt, Artificial Sequence
  Description of Artificial Sequence: Synthetic oligonucleotide
acuguccacguucggacau

SEQ ID NO: 1150654 - RNA, 19 nt, Artificial Sequence
  Description of Artificial Sequence: Synthetic oligonucleotide
agucggucccuccaucaga

SEQ ID NO: 1150655 - RNA, 19 nt, Artificial Sequence
  Description of Artificial Sequence: Synthetic oligonucleotide
ucggaggcggcugugcuga

SEQ ID NO: 1150656 - RNA, 19 nt, Artificial Sequence
  Description of Artificial Sequence: Synthetic oligonucleotide
cugaaccgugucacugucc

SEQ ID NO: 1150657 - RNA, 19 nt, Artificial Sequence
  Description of Artificial Sequence: Synthetic oligonucleotide
gucggucccuccaucagag

SEQ ID NO: 1150658 - RNA, 19 nt, Artificial Sequence
  Description of Artificial Sequence: Synthetic oligonucleotide
agcacagacgcggcaggac

SEQ ID NO: 1150659 - RNA, 19 nt, Artificial Sequence
  Description of Artificial Sequence: Synthetic oligonucleotide
gucuauguuucuguugaga

SEQ ID NO: 1150660 - RNA, 19 nt, Artificial Sequence
  Description of Artificial Sequence: Synthetic oligonucleotide
  modified_base (3)..(3): a, c, u, g, unknown or other
  modified_base (19)..(19): a, c, u, g, unknown or other
cgnguggaaacauuuaacn

SEQ ID NO: 1150661 - RNA, 19 nt, Artificial Sequence
  Description of Artificial Sequence: Synthetic oligonucleotide
guaaaucuaucaaaauuau

SEQ ID NO: 1150662 - RNA, 19 nt, Artificial Sequence
  Description of Artificial Sequence: Synthetic oligonucleotide
ccacugacaauauaguuaa

SEQ ID NO: 1150663 - RNA, 19 nt, Artificial Sequence
  Description of Artificial Sequence: Synthetic oligonucleotide
ccuaugucauuuccagagg

SEQ ID NO: 1150664 - RNA, 19 nt, Artificial Sequence
  Description of Artificial Sequence: Synthetic oligonucleotide
uuugugccgaggugacgga

SEQ ID NO: 1150665 - RNA, 19 nt, Artificial Sequence
  Description of Artificial Sequence: Synthetic oligonucleotide
gugaggaugccaggugggg

SEQ ID NO: 1150666 - RNA, 19 nt, Artificial Sequence
  Description of Artificial Sequence: Synthetic oligonucleotide
cccugcagaaacacagugg

SEQ ID NO: 1150667 - RNA, 19 nt, Artificial Sequence
  Description of Artificial Sequence: Synthetic oligonucleotide
uacuucugggagagggaau

SEQ ID NO: 1150668 - RNA, 19 nt, Artificial Sequence
  Description of Artificial Sequence: Synthetic oligonucleotide
uccgaggaauccuccugcu

SEQ ID NO: 1150669 - RNA, 19 nt, Artificial Sequence
  Description of Artificial Sequence: Synthetic oligonucleotide
gggacuuccucucagacau

SEQ ID NO: 1150670 - RNA, 19 nt, Artificial Sequence
  Description of Artificial Sequence: Synthetic oligonucleotide
gccaauuuacuaaaaccca

SEQ ID NO: 1150671 - RNA, 19 nt, Artificial Sequence
  Description of Artificial Sequence: Synthetic oligonucleotide
aaaugcucguggguuuaaa

SEQ ID NO: 1150672 - RNA, 19 nt, Artificial Sequence
  Description of Artificial Sequence: Synthetic oligonucleotide
gggaacaacuuucuggaua

SEQ ID NO: 1150673 - RNA, 19 nt, Artificial Sequence
  Description of Artificial Sequence: Synthetic oligonucleotide
ugacgcuaaagggguggag

SEQ ID NO: 1150674 - RNA, 19 nt, Artificial Sequence
  Description of Artificial Sequence: Synthetic oligonucleotide
cacagcgcgaugugcucag

SEQ ID NO: 1150675 - RNA, 19 nt, Artificial Sequence
  Description of Artificial Sequence: Synthetic oligonucleotide
agagguacuuggugaggau

SEQ ID NO: 1150676 - RNA, 19 nt, Artificial Sequence
  Description of Artificial Sequence: Synthetic oligonucleotide
gucagaucccacauuugga

SEQ ID NO: 1150677 - RNA, 19 nt, Artificial Sequence
  Description of Artificial Sequence: Synthetic oligonucleotide
gcuuguuagugaugggaac

SEQ ID NO: 1150678 - RNA, 19 nt, Artificial Sequence
  Description of Artificial Sequence: Synthetic oligonucleotide
acucucucacggugaacga

SEQ ID NO: 1150679 - RNA, 19 nt, Artificial Sequence
  Description of Artificial Sequence: Synthetic oligonucleotide
gaaugacgcuaaaggggug

SEQ ID NO: 1150680 - RNA, 19 nt, Artificial Sequence
  Description of Artificial Sequence: Synthetic oligonucleotide
gucggcacacacugacacc

SEQ ID NO: 1150681 - RNA, 19 nt, Artificial Sequence
  Description of Artificial Sequence: Synthetic oligonucleotide
gcccagaaaacaugaacca

SEQ ID NO: 1150682 - RNA, 19 nt, Artificial Sequence
  Description of Artificial Sequence: Synthetic oligonucleotide
ucaggucacacuggucuaa

SEQ ID NO: 1150683 - RNA, 19 nt, Artificial Sequence
  Description of Artificial Sequence: Synthetic oligonucleotide
cugugaacaaauagcgccu

SEQ ID NO: 1150684 - RNA, 19 nt, Artificial Sequence
  Description of Artificial Sequence: Synthetic oligonucleotide
caaauagcgccucggccga

SEQ ID NO: 1150685 - RNA, 19 nt, Artificial Sequence
  Description of Artificial Sequence: Synthetic oligonucleotide
caacccgucggcuguuuuc

SEQ ID NO: 1150686 - RNA, 19 nt, Artificial Sequence
  Description of Artificial Sequence: Synthetic oligonucleotide
gacgacagccugacaaaca

SEQ ID NO: 1150687 - RNA, 19 nt, Artificial Sequence
  Description of Artificial Sequence: Synthetic oligonucleotide
cuggaguuugacucucgga

SEQ ID NO: 1150688 - RNA, 19 nt, Artificial Sequence
  Description of Artificial Sequence: Synthetic oligonucleotide
accggcauccuuguccuca

SEQ ID NO: 1150689 - RNA, 19 nt, Artificial Sequence
  Description of Artificial Sequence: Synthetic oligonucleotide
cucucucacggugaacgac

SEQ ID NO: 1150690 - RNA, 19 nt, Artificial Sequence
  Description of Artificial Sequence: Synthetic oligonucleotide
gacggggaugccguaccag

SEQ ID NO: 1150691 - RNA, 19 nt, Artificial Sequence
  Description of Artificial Sequence: Synthetic oligonucleotide
cuuaguuggagacggggau

SEQ ID NO: 1150692 - RNA, 19 nt, Artificial Sequence
  Description of Artificial Sequence: Synthetic oligonucleotide
cucacggugaacgacgaua

SEQ ID NO: 1150693 - RNA, 19 nt, Artificial Sequence
  Description of Artificial Sequence: Synthetic oligonucleotide
ucggucccuccaucagagg

SEQ ID NO: 1150694 - RNA, 19 nt, Artificial Sequence
  Description of Artificial Sequence: Synthetic oligonucleotide
gaucuugaaugacgcuaaa

SEQ ID NO: 1150695 - RNA, 19 nt, Artificial Sequence
  Description of Artificial Sequence: Synthetic oligonucleotide
ggggaaccuucuuucuucc

SEQ ID NO: 1150696 - RNA, 19 nt, Artificial Sequence
  Description of Artificial Sequence: Synthetic oligonucleotide
ugggaacaacuuucuggau

SEQ ID NO: 1150697 - RNA, 19 nt, Artificial Sequence
  Description of Artificial Sequence: Synthetic oligonucleotide
ggggaugccguaccaggag

SEQ ID NO: 1150698 - RNA, 19 nt, Artificial Sequence
  Description of Artificial Sequence: Synthetic oligonucleotide
guggucagaucccacauuu

SEQ ID NO: 1150699 - RNA, 19 nt, Artificial Sequence
  Description of Artificial Sequence: Synthetic oligonucleotide
gucggcccagaaaacauga

SEQ ID NO: 1150700 - RNA, 19 nt, Artificial Sequence
  Description of Artificial Sequence: Synthetic oligonucleotide
ucggcccagaaaacaugaa

SEQ ID NO: 1150701 - RNA, 19 nt, Artificial Sequence
  Description of Artificial Sequence: Synthetic oligonucleotide
ugacucucggaggcggcug

SEQ ID NO: 1150702 - RNA, 19 nt, Artificial Sequence
  Description of Artificial Sequence: Synthetic oligonucleotide
cagagguacuuggugagga

SEQ ID NO: 1150703 - RNA, 19 nt, Artificial Sequence
  Description of Artificial Sequence: Synthetic oligonucleotide
uugacucucggaggcggcu

SEQ ID NO: 1150704 - RNA, 19 nt, Artificial Sequence
  Description of Artificial Sequence: Synthetic oligonucleotide
gggaaccuucuuucuuccg

SEQ ID NO: 1150705 - RNA, 19 nt, Artificial Sequence
  Description of Artificial Sequence: Synthetic oligonucleotide
agucggcccagaaaacaug

SEQ ID NO: 1150706 - RNA, 19 nt, Artificial Sequence
  Description of Artificial Sequence: Synthetic oligonucleotide
  modified_base (18)..(18): a, c, u, g, unknown or other
ccaggugcuucucggacng

SEQ ID NO: 1150707 - RNA, 19 nt, Artificial Sequence
  Description of Artificial Sequence: Synthetic oligonucleotide
cuagcaaaugcucgugggu

SEQ ID NO: 1150708 - RNA, 19 nt, Artificial Sequence
  Description of Artificial Sequence: Synthetic oligonucleotide
aaauagcgccucggccgag

SEQ ID NO: 1150709 - RNA, 19 nt, Artificial Sequence
  Description of Artificial Sequence: Synthetic oligonucleotide
aaggccgcguggcaccaua

SEQ ID NO: 1150710 - RNA, 19 nt, Artificial Sequence
  Description of Artificial Sequence: Synthetic oligonucleotide
ugccauuuguguggccugu

SEQ ID NO: 1150711 - RNA, 19 nt, Artificial Sequence
  Description of Artificial Sequence: Synthetic oligonucleotide
aagucagaacacaguuuua

SEQ ID NO: 1150712 - RNA, 19 nt, Artificial Sequence
  Description of Artificial Sequence: Synthetic oligonucleotide
cacuggucuaacagcuuga

SEQ ID NO: 1150713 - RNA, 19 nt, Artificial Sequence
  Description of Artificial Sequence: Synthetic oligonucleotide
gaaccgugucacuguccac

SEQ ID NO: 1150714 - RNA, 19 nt, Artificial Sequence
  Description of Artificial Sequence: Synthetic oligonucleotide
gucccuccaucagagguac

SEQ ID NO: 1150715 - RNA, 19 nt, Artificial Sequence
  Description of Artificial Sequence: Synthetic oligonucleotide
caggucaagcuguaucuua

SEQ ID NO: 1150716 - RNA, 19 nt, Artificial Sequence
  Description of Artificial Sequence: Synthetic oligonucleotide
ggaugccguaccaggagag

SEQ ID NO: 1150717 - RNA, 19 nt, Artificial Sequence
  Description of Artificial Sequence: Synthetic oligonucleotide
cuaacagcuugagcagcuc

SEQ ID NO: 1150718 - RNA, 19 nt, Artificial Sequence
  Description of Artificial Sequence: Synthetic oligonucleotide
guacuuggugaggaugcca

SEQ ID NO: 1150719 - RNA, 19 nt, Artificial Sequence
  Description of Artificial Sequence: Synthetic oligonucleotide
uagccguggucagauccca

SEQ ID NO: 1150720 - RNA, 19 nt, Artificial Sequence
  Description of Artificial Sequence: Synthetic oligonucleotide
gcuccuauagcagcggaga

SEQ ID NO: 1150721 - RNA, 19 nt, Artificial Sequence
  Description of Artificial Sequence: Synthetic oligonucleotide
agacggggaugccguacca

SEQ ID NO: 1150722 - RNA, 19 nt, Artificial Sequence
  Description of Artificial Sequence: Synthetic oligonucleotide
ggugacggaguggucuuag

SEQ ID NO: 1150723 - RNA, 19 nt, Artificial Sequence
  Description of Artificial Sequence: Synthetic oligonucleotide
ucucacggugaacgacgau

SEQ ID NO: 1150724 - RNA, 19 nt, Artificial Sequence
  Description of Artificial Sequence: Synthetic oligonucleotide
guggcacagcgcgaugugc

SEQ ID NO: 1150725 - RNA, 19 nt, Artificial Sequence
  Description of Artificial Sequence: Synthetic oligonucleotide
augacgcuaaaggggugga

SEQ ID NO: 1150726 - RNA, 19 nt, Artificial Sequence
  Description of Artificial Sequence: Synthetic oligonucleotide
gaacgacgauauaguggug

SEQ ID NO: 1150727 - RNA, 19 nt, Artificial Sequence
  Description of Artificial Sequence: Synthetic oligonucleotide
cucucacggugaacgacga

SEQ ID NO: 1150728 - RNA, 19 nt, Artificial Sequence
  Description of Artificial Sequence: Synthetic oligonucleotide
gguacuuggugaggaugcc

SEQ ID NO: 1150729 - RNA, 19 nt, Artificial Sequence
  Description of Artificial Sequence: Synthetic oligonucleotide
gcgcgaugugcucagguca

SEQ ID NO: 1150730 - RNA, 19 nt, Artificial Sequence
  Description of Artificial Sequence: Synthetic oligonucleotide
agcuaacaaagggcucucu

SEQ ID NO: 1150731 - RNA, 19 nt, Artificial Sequence
  Description of Artificial Sequence: Synthetic oligonucleotide
cugaagcacagacgcggca

SEQ ID NO: 1150732 - RNA, 19 nt, Artificial Sequence
  Description of Artificial Sequence: Synthetic oligonucleotide
gccugugaacaaauagcgc

SEQ ID NO: 1150733 - RNA, 19 nt, Artificial Sequence
  Description of Artificial Sequence: Synthetic oligonucleotide
cccgucggcuguuuucugg

SEQ ID NO: 1150734 - RNA, 19 nt, Artificial Sequence
  Description of Artificial Sequence: Synthetic oligonucleotide
gaaggacucugucuauguu

SEQ ID NO: 1150735 - RNA, 19 nt, Artificial Sequence
  Description of Artificial Sequence: Synthetic oligonucleotide
aggcccuaugucauuucca

SEQ ID NO: 1150736 - RNA, 19 nt, Artificial Sequence
  Description of Artificial Sequence: Synthetic oligonucleotide
cacuguccacguucggaca

SEQ ID NO: 1150737 - RNA, 19 nt, Artificial Sequence
  Description of Artificial Sequence: Synthetic oligonucleotide
ggcuccuauagcagcggag

SEQ ID NO: 1150738 - RNA, 19 nt, Artificial Sequence
  Description of Artificial Sequence: Synthetic oligonucleotide
ccucugaaccgugucacug

SEQ ID NO: 1150739 - RNA, 19 nt, Artificial Sequence
  Description of Artificial Sequence: Synthetic oligonucleotide
ggugaguucacaagcugua

SEQ ID NO: 1150740 - RNA, 19 nt, Artificial Sequence
  Description of Artificial Sequence: Synthetic oligonucleotide
  modified_base (9)..(9): a, c, u, g, unknown or other
guuuuacgnguggaaacau

SEQ ID NO: 1150741 - RNA, 19 nt, Artificial Sequence
  Description of Artificial Sequence: Synthetic oligonucleotide
guggcaccauaaguagcug

SEQ ID NO: 1150742 - RNA, 19 nt, Artificial Sequence
  Description of Artificial Sequence: Synthetic oligonucleotide
gccguaccaggagagucgg

SEQ ID NO: 1150743 - RNA, 19 nt, Artificial Sequence
  Description of Artificial Sequence: Synthetic oligonucleotide
cugacaacccgucggcugu

SEQ ID NO: 1150744 - RNA, 19 nt, Artificial Sequence
  Description of Artificial Sequence: Synthetic oligonucleotide
gccucaggagagucggccc

SEQ ID NO: 1150745 - RNA, 19 nt, Artificial Sequence
  Description of Artificial Sequence: Synthetic oligonucleotide
cgcguggcaccauaaguag

SEQ ID NO: 1150746 - RNA, 19 nt, Artificial Sequence
  Description of Artificial Sequence: Synthetic oligonucleotide
ccugcguuggacccaugug

SEQ ID NO: 1150747 - RNA, 19 nt, Artificial Sequence
  Description of Artificial Sequence: Synthetic oligonucleotide
gcggcaggacugauguugg

SEQ ID NO: 1150748 - RNA, 19 nt, Artificial Sequence
  Description of Artificial Sequence: Synthetic oligonucleotide
ggucuuaguuggagacggg

SEQ ID NO: 1150749 - RNA, 19 nt, Artificial Sequence
  Description of Artificial Sequence: Synthetic oligonucleotide
ccuuucucauuccauuuaa

SEQ ID NO: 1150750 - RNA, 19 nt, Artificial Sequence
  Description of Artificial Sequence: Synthetic oligonucleotide
gggcucucucgguaaggcc

SEQ ID NO: 1150751 - RNA, 19 nt, Artificial Sequence
  Description of Artificial Sequence: Synthetic oligonucleotide
uggcccgaggaaucacuuu

SEQ ID NO: 1150752 - RNA, 19 nt, Artificial Sequence
  Description of Artificial Sequence: Synthetic oligonucleotide
acaacccgucggcuguuuu

SEQ ID NO: 1150753 - RNA, 19 nt, Artificial Sequence
  Description of Artificial Sequence: Synthetic oligonucleotide
aggcggcugugcugaagca

SEQ ID NO: 1150754 - RNA, 19 nt, Artificial Sequence
  Description of Artificial Sequence: Synthetic oligonucleotide
gcugaagcacagacgcggc

SEQ ID NO: 1150755 - RNA, 19 nt, Artificial Sequence
  Description of Artificial Sequence: Synthetic oligonucleotide
agccguggucagaucccac

SEQ ID NO: 1150756 - RNA, 19 nt, Artificial Sequence
  Description of Artificial Sequence: Synthetic oligonucleotide
ggacaggaucuugaaugac

SEQ ID NO: 1150757 - RNA, 19 nt, Artificial Sequence
  Description of Artificial Sequence: Synthetic oligonucleotide
gagucggcccagaaaacau

SEQ ID NO: 1150758 - RNA, 19 nt, Artificial Sequence
  Description of Artificial Sequence: Synthetic oligonucleotide
agcuguacucuuggcccga

SEQ ID NO: 1150759 - RNA, 19 nt, Artificial Sequence
  Description of Artificial Sequence: Synthetic oligonucleotide
ccgagaacccauccugcug

SEQ ID NO: 1150760 - RNA, 19 nt, Artificial Sequence
  Description of Artificial Sequence: Synthetic oligonucleotide
gccguggucagaucccaca

SEQ ID NO: 1150761 - RNA, 19 nt, Artificial Sequence
  Description of Artificial Sequence: Synthetic oligonucleotide
agacgcggcaggacugaug

SEQ ID NO: 1150762 - RNA, 19 nt, Artificial Sequence
  Description of Artificial Sequence: Synthetic oligonucleotide
ccaguugacgacagccuga

SEQ ID NO: 1150763 - RNA, 19 nt, Artificial Sequence
  Description of Artificial Sequence: Synthetic oligonucleotide
gcguuggacccaugugacc

SEQ ID NO: 1150764 - RNA, 19 nt, Artificial Sequence
  Description of Artificial Sequence: Synthetic oligonucleotide
ggccgagaacccauccugc

SEQ ID NO: 1150765 - RNA, 19 nt, Artificial Sequence
  Description of Artificial Sequence: Synthetic oligonucleotide
agccuggaucucacauauc

SEQ ID NO: 1150766 - RNA, 19 nt, Artificial Sequence
  Description of Artificial Sequence: Synthetic oligonucleotide
gaugccagguggggaaccu

SEQ ID NO: 1150767 - RNA, 19 nt, Artificial Sequence
  Description of Artificial Sequence: Synthetic oligonucleotide
gaggugacggaguggucuu

SEQ ID NO: 1150768 - RNA, 19 nt, Artificial Sequence
  Description of Artificial Sequence: Synthetic oligonucleotide
cgcggcaggacugauguug

SEQ ID NO: 1150769 - RNA, 19 nt, Artificial Sequence
  Description of Artificial Sequence: Synthetic oligonucleotide
ggagacggggaugccguac

SEQ ID NO: 1150770 - RNA, 19 nt, Artificial Sequence
  Description of Artificial Sequence: Synthetic oligonucleotide
cguuggacccaugugacca

SEQ ID NO: 1150771 - RNA, 19 nt, Artificial Sequence
  Description of Artificial Sequence: Synthetic oligonucleotide
ggccgcguggcaccauaag

SEQ ID NO: 1150772 - RNA, 19 nt, Artificial Sequence
  Description of Artificial Sequence: Synthetic oligonucleotide
gacucucggaggcggcugu

SEQ ID NO: 1150773 - RNA, 19 nt, Artificial Sequence
  Description of Artificial Sequence: Synthetic oligonucleotide
gcucucucgguaaggccgc

SEQ ID NO: 1150774 - RNA, 19 nt, Artificial Sequence
  Description of Artificial Sequence: Synthetic oligonucleotide
gcuguaucuuauaaaguuu

SEQ ID NO: 1150775 - RNA, 19 nt, Artificial Sequence
  Description of Artificial Sequence: Synthetic oligonucleotide
ggaucucacauauccuuuu

SEQ ID NO: 1150776 - RNA, 19 nt, Artificial Sequence
  Description of Artificial Sequence: Synthetic oligonucleotide
ggcggcugugcugaagcac

SEQ ID NO: 1150777 - RNA, 19 nt, Artificial Sequence
  Description of Artificial Sequence: Synthetic oligonucleotide
ucccuccaucagagguacu

SEQ ID NO: 1150778 - RNA, 19 nt, Artificial Sequence
  Description of Artificial Sequence: Synthetic oligonucleotide
gcguggcaccauaaguagc

SEQ ID NO: 1150779 - RNA, 19 nt, Artificial Sequence
  Description of Artificial Sequence: Synthetic oligonucleotide
guaaggccgcguggcacca

SEQ ID NO: 1150780 - RNA, 19 nt, Artificial Sequence
  Description of Artificial Sequence: Synthetic oligonucleotide
cggccgagaacccauccug

SEQ ID NO: 1150781 - RNA, 19 nt, Artificial Sequence
  Description of Artificial Sequence: Synthetic oligonucleotide
gcacagacgcggcaggacu

SEQ ID NO: 1150782 - RNA, 19 nt, Artificial Sequence
  Description of Artificial Sequence: Synthetic oligonucleotide
ccgcguggcaccauaagua

SEQ ID NO: 1150783 - RNA, 19 nt, Artificial Sequence
  Description of Artificial Sequence: Synthetic oligonucleotide
cugccauggcuuuccgucu

SEQ ID NO: 1150784 - RNA, 19 nt, Artificial Sequence
  Description of Artificial Sequence: Synthetic oligonucleotide
ggcccgaggaaucacuuuu

SEQ ID NO: 1150785 - RNA, 19 nt, Artificial Sequence
  Description of Artificial Sequence: Synthetic oligonucleotide
ggaaacucucaguccuccu

SEQ ID NO: 1150786 - RNA, 19 nt, Artificial Sequence
  Description of Artificial Sequence: Synthetic oligonucleotide
caggagagucggcccagaa

SEQ ID NO: 1150787 - RNA, 19 nt, Artificial Sequence
  Description of Artificial Sequence: Synthetic oligonucleotide
cacuucagccugcguugga

SEQ ID NO: 1150788 - RNA, 19 nt, Artificial Sequence
  Description of Artificial Sequence: Synthetic oligonucleotide
caaaugcucguggguuuaa

SEQ ID NO: 1150789 - RNA, 19 nt, Artificial Sequence
  Description of Artificial Sequence: Synthetic oligonucleotide
ugacaacccgucggcuguu

SEQ ID NO: 1150790 - RNA, 19 nt, Artificial Sequence
  Description of Artificial Sequence: Synthetic oligonucleotide
gccgcguggcaccauaagu

SEQ ID NO: 1150791 - RNA, 19 nt, Artificial Sequence
  Description of Artificial Sequence: Synthetic oligonucleotide
gcucguggguuuaaauuua

SEQ ID NO: 1150792 - RNA, 19 nt, Artificial Sequence
  Description of Artificial Sequence: Synthetic oligonucleotide
gugacggaguggucuuagu

SEQ ID NO: 1150793 - RNA, 19 nt, Artificial Sequence
  Description of Artificial Sequence: Synthetic oligonucleotide
ggucccuccaucagaggua

SEQ ID NO: 1150794 - RNA, 19 nt, Artificial Sequence
  Description of Artificial Sequence: Synthetic oligonucleotide
gcaaaugcucguggguuua

SEQ ID NO: 1150795 - RNA, 19 nt, Artificial Sequence
  Description of Artificial Sequence: Synthetic oligonucleotide
gcuguacucuuggcccgag

SEQ ID NO: 1150796 - RNA, 19 nt, Artificial Sequence
  Description of Artificial Sequence: Synthetic oligonucleotide
cgacgauauaguggugcag

SEQ ID NO: 1150797 - RNA, 19 nt, Artificial Sequence
  Description of Artificial Sequence: Synthetic oligonucleotide
cagaaacacaguggcuccu

SEQ ID NO: 1150798 - RNA, 19 nt, Artificial Sequence
  Description of Artificial Sequence: Synthetic oligonucleotide
gccgagaacccauccugcu

SEQ ID NO: 1150799 - RNA, 19 nt, Artificial Sequence
  Description of Artificial Sequence: Synthetic oligonucleotide
ggagagucggucccuccau

SEQ ID NO: 1150800 - RNA, 19 nt, Artificial Sequence
  Description of Artificial Sequence: Synthetic oligonucleotide
cacggugaacgacgauaua

SEQ ID NO: 1150801 - RNA, 19 nt, Artificial Sequence
  Description of Artificial Sequence: Synthetic oligonucleotide
gccugcguuggacccaugu

SEQ ID NO: 1150802 - RNA, 19 nt, Artificial Sequence
  Description of Artificial Sequence: Synthetic oligonucleotide
gggguggcacagcgcgaug

SEQ ID NO: 1150803 - RNA, 19 nt, Artificial Sequence
  Description of Artificial Sequence: Synthetic oligonucleotide
cggugaacgacgauauagu

SEQ ID NO: 1150804 - RNA, 19 nt, Artificial Sequence
  Description of Artificial Sequence: Synthetic oligonucleotide
cucugacaacccgucggcu

SEQ ID NO: 1150805 - RNA, 19 nt, Artificial Sequence
  Description of Artificial Sequence: Synthetic oligonucleotide
acgcggcaggacugauguu

SEQ ID NO: 1150806 - RNA, 19 nt, Artificial Sequence
  Description of Artificial Sequence: Synthetic oligonucleotide
cgguaaggccgcguggcac

SEQ ID NO: 1150807 - RNA, 19 nt, Artificial Sequence
  Description of Artificial Sequence: Synthetic oligonucleotide
aggccgcguggcaccauaa

SEQ ID NO: 1150808 - RNA, 19 nt, Artificial Sequence
  Description of Artificial Sequence: Synthetic oligonucleotide
cgaggugacggaguggucu

SEQ ID NO: 1150809 - RNA, 19 nt, Artificial Sequence
  Description of Artificial Sequence: Synthetic oligonucleotide
cccuguaacuguggaaacu

SEQ ID NO: 1150810 - RNA, 19 nt, Artificial Sequence
  Description of Artificial Sequence: Synthetic oligonucleotide
gacaacccgucggcuguuu

SEQ ID NO: 1150811 - RNA, 19 nt, Artificial Sequence
  Description of Artificial Sequence: Synthetic oligonucleotide
guccacguucggacauggu

SEQ ID NO: 1150812 - RNA, 19 nt, Artificial Sequence
  Description of Artificial Sequence: Synthetic oligonucleotide
ccucucagacauagugcau

SEQ ID NO: 1150813 - RNA, 19 nt, Artificial Sequence
  Description of Artificial Sequence: Synthetic oligonucleotide
gcgccucggccgagaaccc

SEQ ID NO: 1150814 - RNA, 19 nt, Artificial Sequence
  Description of Artificial Sequence: Synthetic oligonucleotide
cagccugcguuggacccau

SEQ ID NO: 1150815 - RNA, 19 nt, Artificial Sequence
  Description of Artificial Sequence: Synthetic oligonucleotide
ggacuuccucucagacaua

SEQ ID NO: 1150816 - RNA, 19 nt, Artificial Sequence
  Description of Artificial Sequence: Synthetic oligonucleotide
gcucugucccaggggacuu

SEQ ID NO: 1150817 - RNA, 19 nt, Artificial Sequence
  Description of Artificial Sequence: Synthetic oligonucleotide
cagacgcggcaggacugau

SEQ ID NO: 1150818 - RNA, 19 nt, Artificial Sequence
  Description of Artificial Sequence: Synthetic oligonucleotide
ccgaggaauccuccugcuu

SEQ ID NO: 1150819 - RNA, 19 nt, Artificial Sequence
  Description of Artificial Sequence: Synthetic oligonucleotide
gccugacaaacagcuuguu

SEQ ID NO: 1150820 - RNA, 19 nt, Artificial Sequence
  Description of Artificial Sequence: Synthetic oligonucleotide
cguggucagaucccacauu

SEQ ID NO: 1150821 - RNA, 19 nt, Artificial Sequence
  Description of Artificial Sequence: Synthetic oligonucleotide
ccguaccaggagagucggu

SEQ ID NO: 1150822 - RNA, 19 nt, Artificial Sequence
  Description of Artificial Sequence: Synthetic oligonucleotide
  modified_base (1)..(1): a, c, u, g, unknown or other
nccaaaucuaccauuccag

SEQ ID NO: 1150823 - RNA, 19 nt, Artificial Sequence
  Description of Artificial Sequence: Synthetic oligonucleotide
aaugaauugaaauucuuca

SEQ ID NO: 1150824 - RNA, 19 nt, Artificial Sequence
  Description of Artificial Sequence: Synthetic oligonucleotide
caaaauuugauuaaauccc

SEQ ID NO: 1150825 - RNA, 19 nt, Artificial Sequence
  Description of Artificial Sequence: Synthetic oligonucleotide
ugauuaaaucccaacaacg

SEQ ID NO: 1150826 - RNA, 19 nt, Artificial Sequence
  Description of Artificial Sequence: Synthetic oligonucleotide
aauuugauuaaaucccaac

SEQ ID NO: 1150827 - RNA, 19 nt, Artificial Sequence
  Description of Artificial Sequence: Synthetic oligonucleotide
aaucccaacaacgaagucc

SEQ ID NO: 1150828 - RNA, 19 nt, Artificial Sequence
  Description of Artificial Sequence: Synthetic oligonucleotide
uuaaaucccaacaacgaag

SEQ ID NO: 1150829 - RNA, 19 nt, Artificial Sequence
  Description of Artificial Sequence: Synthetic oligonucleotide
aaguggaaagccucuaacc

SEQ ID NO: 1150830 - RNA, 19 nt, Artificial Sequence
  Description of Artificial Sequence: Synthetic oligonucleotide
uuuucccagauacauaacg

SEQ ID NO: 1150831 - RNA, 19 nt, Artificial Sequence
  Description of Artificial Sequence: Synthetic oligonucleotide
aguggaaagccucuaaccc

SEQ ID NO: 1150832 - RNA, 19 nt, Artificial Sequence
  Description of Artificial Sequence: Synthetic oligonucleotide
gaauugaaauucuucaucc

SEQ ID NO: 1150833 - RNA, 19 nt, Artificial Sequence
  Description of Artificial Sequence: Synthetic oligonucleotide
aaaguggaaagccucuaac

SEQ ID NO: 1150834 - RNA, 19 nt, Artificial Sequence
  Description of Artificial Sequence: Synthetic oligonucleotide
aaucucaccuuucucauug

SEQ ID NO: 1150835 - RNA, 19 nt, Artificial Sequence
  Description of Artificial Sequence: Synthetic oligonucleotide
auugaaauucuucauccuc

SEQ ID NO: 1150836 - RNA, 19 nt, Artificial Sequence
  Description of Artificial Sequence: Synthetic oligonucleotide
uuugauuaaaucccaacaa

SEQ ID NO: 1150837 - RNA, 19 nt, Artificial Sequence
  Description of Artificial Sequence: Synthetic oligonucleotide
ugaaaucucaccuuucuca

SEQ ID NO: 1150838 - RNA, 19 nt, Artificial Sequence
  Description of Artificial Sequence: Synthetic oligonucleotide
uuucuuaaugaauugaaau

SEQ ID NO: 1150839 - RNA, 19 nt, Artificial Sequence
  Description of Artificial Sequence: Synthetic oligonucleotide
uguuuuaaaguggaaagcc

SEQ ID NO: 1150840 - RNA, 19 nt, Artificial Sequence
  Description of Artificial Sequence: Synthetic oligonucleotide
auuugauuaaaucccaaca

SEQ ID NO: 1150841 - RNA, 19 nt, Artificial Sequence
  Description of Artificial Sequence: Synthetic oligonucleotide
ccaaaauuugauuaaaucc

SEQ ID NO: 1150842 - RNA, 19 nt, Artificial Sequence
  Description of Artificial Sequence: Synthetic oligonucleotide
uuagcuuucuuaaugaauu

SEQ ID NO: 1150843 - RNA, 19 nt, Artificial Sequence
  Description of Artificial Sequence: Synthetic oligonucleotide
ucuuaaugaauugaaauuc

SEQ ID NO: 1150844 - RNA, 19 nt, Artificial Sequence
  Description of Artificial Sequence: Synthetic oligonucleotide
ugaauugaaauucuucauc

SEQ ID NO: 1150845 - RNA, 19 nt, Artificial Sequence
  Description of Artificial Sequence: Synthetic oligonucleotide
uugauuaaaucccaacaac

SEQ ID NO: 1150846 - RNA, 19 nt, Artificial Sequence
  Description of Artificial Sequence: Synthetic oligonucleotide
uuuuaaaguggaaagccuc

SEQ ID NO: 1150847 - RNA, 19 nt, Artificial Sequence
  Description of Artificial Sequence: Synthetic oligonucleotide
agauacauaacguuuuacu

SEQ ID NO: 1150848 - RNA, 19 nt, Artificial Sequence
  Description of Artificial Sequence: Synthetic oligonucleotide
uuccauugaaaucucaccu

SEQ ID NO: 1150849 - RNA, 19 nt, Artificial Sequence
  Description of Artificial Sequence: Synthetic oligonucleotide
ucaucugaggacuccauag

SEQ ID NO: 1150850 - RNA, 19 nt, Artificial Sequence
  Description of Artificial Sequence: Synthetic oligonucleotide
uugaaauucuucauccucu

SEQ ID NO: 1150851 - RNA, 19 nt, Artificial Sequence
  Description of Artificial Sequence: Synthetic oligonucleotide
uuuccauugaaaucucacc

SEQ ID NO: 1150852 - RNA, 19 nt, Artificial Sequence
  Description of Artificial Sequence: Synthetic oligonucleotide
cauaaucuggccuuuuccc

SEQ ID NO: 1150853 - RNA, 19 nt, Artificial Sequence
  Description of Artificial Sequence: Synthetic oligonucleotide
uaacguuuuacuuucacuu

SEQ ID NO: 1150854 - RNA, 19 nt, Artificial Sequence
  Description of Artificial Sequence: Synthetic oligonucleotide
uuuaaaguggaaagccucu

SEQ ID NO: 1150855 - RNA, 19 nt, Artificial Sequence
  Description of Artificial Sequence: Synthetic oligonucleotide
uaaaucccaacaacgaagu

SEQ ID NO: 1150856 - RNA, 19 nt, Artificial Sequence
  Description of Artificial Sequence: Synthetic oligonucleotide
acaacgaaguccaaggaac

SEQ ID NO: 1150857 - RNA, 19 nt, Artificial Sequence
  Description of Artificial Sequence: Synthetic oligonucleotide
cucauugcgaacugggacg

SEQ ID NO: 1150858 - RNA, 19 nt, Artificial Sequence
  Description of Artificial Sequence: Synthetic oligonucleotide
uucuuaaugaauugaaauu

SEQ ID NO: 1150859 - RNA, 19 nt, Artificial Sequence
  Description of Artificial Sequence: Synthetic oligonucleotide
aauugaaauucuucauccu

SEQ ID NO: 1150860 - RNA, 19 nt, Artificial Sequence
  Description of Artificial Sequence: Synthetic oligonucleotide
uacauaacguuuuacuuuc

SEQ ID NO: 1150861 - RNA, 19 nt, Artificial Sequence
  Description of Artificial Sequence: Synthetic oligonucleotide
uuccuuagcuuucuuaaug

SEQ ID NO: 1150862 - RNA, 19 nt, Artificial Sequence
  Description of Artificial Sequence: Synthetic oligonucleotide
aaaauuugauuaaauccca

SEQ ID NO: 1150863 - RNA, 19 nt, Artificial Sequence
  Description of Artificial Sequence: Synthetic oligonucleotide
aacugggacggccccagcc

SEQ ID NO: 1150864 - RNA, 19 nt, Artificial Sequence
  Description of Artificial Sequence: Synthetic oligonucleotide
aacaacgaaguccaaggaa

SEQ ID NO: 1150865 - RNA, 19 nt, Artificial Sequence
  Description of Artificial Sequence: Synthetic oligonucleotide
uguuccuuagcuuucuuaa

SEQ ID NO: 1150866 - RNA, 19 nt, Artificial Sequence
  Description of Artificial Sequence: Synthetic oligonucleotide
auugaaaucucaccuuucu

SEQ ID NO: 1150867 - RNA, 19 nt, Artificial Sequence
  Description of Artificial Sequence: Synthetic oligonucleotide
acuccauaggggcauaauc

SEQ ID NO: 1150868 - RNA, 19 nt, Artificial Sequence
  Description of Artificial Sequence: Synthetic oligonucleotide
ucucauugcgaacugggac

SEQ ID NO: 1150869 - RNA, 19 nt, Artificial Sequence
  Description of Artificial Sequence: Synthetic oligonucleotide
gaacacaacaccuccuccc

SEQ ID NO: 1150870 - RNA, 19 nt, Artificial Sequence
  Description of Artificial Sequence: Synthetic oligonucleotide
uccaaggaacacaacaccu

SEQ ID NO: 1150871 - RNA, 19 nt, Artificial Sequence
  Description of Artificial Sequence: Synthetic oligonucleotide
uuucccagauacauaacgu

SEQ ID NO: 1150872 - RNA, 19 nt, Artificial Sequence
  Description of Artificial Sequence: Synthetic oligonucleotide
auacauaacguuuuacuuu

SEQ ID NO: 1150873 - RNA, 19 nt, Artificial Sequence
  Description of Artificial Sequence: Synthetic oligonucleotide
auuaaaucccaacaacgaa

SEQ ID NO: 1150874 - RNA, 19 nt, Artificial Sequence
  Description of Artificial Sequence: Synthetic oligonucleotide
gauuaaaucccaacaacga

SEQ ID NO: 1150875 - RNA, 19 nt, Artificial Sequence
  Description of Artificial Sequence: Synthetic oligonucleotide
auaacguuuuacuuucacu

SEQ ID NO: 1150876 - RNA, 19 nt, Artificial Sequence
  Description of Artificial Sequence: Synthetic oligonucleotide
uaaucuggccuuuucccag

SEQ ID NO: 1150877 - RNA, 19 nt, Artificial Sequence
  Description of Artificial Sequence: Synthetic oligonucleotide
cauaggggcauaaucuggc

SEQ ID NO: 1150878 - RNA, 19 nt, Artificial Sequence
  Description of Artificial Sequence: Synthetic oligonucleotide
aacgaaguccaaggaacac

SEQ ID NO: 1150879 - RNA, 19 nt, Artificial Sequence
  Description of Artificial Sequence: Synthetic oligonucleotide
aggaacacaacaccuccuc

SEQ ID NO: 1150880 - RNA, 19 nt, Artificial Sequence
  Description of Artificial Sequence: Synthetic oligonucleotide
uuaaugaauugaaauucuu

SEQ ID NO: 1150881 - RNA, 19 nt, Artificial Sequence
  Description of Artificial Sequence: Synthetic oligonucleotide
uccuuagcuuucuuaauga

SEQ ID NO: 1150882 - RNA, 19 nt, Artificial Sequence
  Description of Artificial Sequence: Synthetic oligonucleotide
cugaggacuccauaggggc

SEQ ID NO: 1150883 - RNA, 19 nt, Artificial Sequence
  Description of Artificial Sequence: Synthetic oligonucleotide
cuggccuuuucccagauac

SEQ ID NO: 1150884 - RNA, 19 nt, Artificial Sequence
  Description of Artificial Sequence: Synthetic oligonucleotide
ucucaccuuucucauugcg

SEQ ID NO: 1150885 - RNA, 19 nt, Artificial Sequence
  Description of Artificial Sequence: Synthetic oligonucleotide
aaaucccaacaacgaaguc

SEQ ID NO: 1150886 - RNA, 19 nt, Artificial Sequence
  Description of Artificial Sequence: Synthetic oligonucleotide
auaggggcauaaucuggcc

SEQ ID NO: 1150887 - RNA, 19 nt, Artificial Sequence
  Description of Artificial Sequence: Synthetic oligonucleotide
aacacaacaccuccuccca

SEQ ID NO: 1150888 - RNA, 19 nt, Artificial Sequence
  Description of Artificial Sequence: Synthetic oligonucleotide
ucaccuuucucauugcgaa

SEQ ID NO: 1150889 - RNA, 19 nt, Artificial Sequence
  Description of Artificial Sequence: Synthetic oligonucleotide
ucaugagugcgcuugggac

SEQ ID NO: 1150890 - RNA, 19 nt, Artificial Sequence
  Description of Artificial Sequence: Synthetic oligonucleotide
uccauaggggcauaaucug

SEQ ID NO: 1150891 - RNA, 19 nt, Artificial Sequence
  Description of Artificial Sequence: Synthetic oligonucleotide
auugcgaacugggacggcc

SEQ ID NO: 1150892 - RNA, 19 nt, Artificial Sequence
  Description of Artificial Sequence: Synthetic oligonucleotide
ccaacaacgaaguccaagg

SEQ ID NO: 1150893 - RNA, 19 nt, Artificial Sequence
  Description of Artificial Sequence: Synthetic oligonucleotide
augaauugaaauucuucau

SEQ ID NO: 1150894 - RNA, 19 nt, Artificial Sequence
  Description of Artificial Sequence: Synthetic oligonucleotide
auaaucuggccuuuuccca

SEQ ID NO: 1150895 - RNA, 19 nt, Artificial Sequence
  Description of Artificial Sequence: Synthetic oligonucleotide
caugagugcgcuugggacc

SEQ ID NO: 1150896 - RNA, 19 nt, Artificial Sequence
  Description of Artificial Sequence: Synthetic oligonucleotide
aacguuuuacuuucacuuu

SEQ ID NO: 1150897 - RNA, 19 nt, Artificial Sequence
  Description of Artificial Sequence: Synthetic oligonucleotide
gacucccaaaauuugauua

SEQ ID NO: 1150898 - RNA, 19 nt, Artificial Sequence
  Description of Artificial Sequence: Synthetic oligonucleotide
cuugggaccgacaugguga

SEQ ID NO: 1150899 - RNA, 19 nt, Artificial Sequence
  Description of Artificial Sequence: Synthetic oligonucleotide
uggagacucccaaaauuug

SEQ ID NO: 1150900 - RNA, 19 nt, Artificial Sequence
  Description of Artificial Sequence: Synthetic oligonucleotide
uucaugagugcgcuuggga

SEQ ID NO: 1150901 - RNA, 19 nt, Artificial Sequence
  Description of Artificial Sequence: Synthetic oligonucleotide
uaaaguggaaagccucuaa

SEQ ID NO: 1150902 - RNA, 19 nt, Artificial Sequence
  Description of Artificial Sequence: Synthetic oligonucleotide
gauacauaacguuuuacuu

SEQ ID NO: 1150903 - RNA, 19 nt, Artificial Sequence
  Description of Artificial Sequence: Synthetic oligonucleotide
ucauugcgaacugggacgg

SEQ ID NO: 1150904 - RNA, 19 nt, Artificial Sequence
  Description of Artificial Sequence: Synthetic oligonucleotide
ugcuucaugagugcgcuug

SEQ ID NO: 1150905 - RNA, 19 nt, Artificial Sequence
  Description of Artificial Sequence: Synthetic oligonucleotide
uugaaaucucaccuuucuc

SEQ ID NO: 1150906 - RNA, 19 nt, Artificial Sequence
  Description of Artificial Sequence: Synthetic oligonucleotide
caucugaggacuccauagg

SEQ ID NO: 1150907 - RNA, 19 nt, Artificial Sequence
  Description of Artificial Sequence: Synthetic oligonucleotide
cauaacguuuuacuuucac

SEQ ID NO: 1150908 - RNA, 19 nt, Artificial Sequence
  Description of Artificial Sequence: Synthetic oligonucleotide
guccaaggaacacaacacc

SEQ ID NO: 1150909 - RNA, 19 nt, Artificial Sequence
  Description of Artificial Sequence: Synthetic oligonucleotide
agacugaaugggcggcugc

SEQ ID NO: 1150910 - RNA, 19 nt, Artificial Sequence
  Description of Artificial Sequence: Synthetic oligonucleotide
ucccagauacauaacguuu

SEQ ID NO: 1150911 - RNA, 19 nt, Artificial Sequence
  Description of Artificial Sequence: Synthetic oligonucleotide
uucucauugcgaacuggga

SEQ ID NO: 1150912 - RNA, 19 nt, Artificial Sequence
  Description of Artificial Sequence: Synthetic oligonucleotide
acugggacggccccagccg

SEQ ID NO: 1150913 - RNA, 19 nt, Artificial Sequence
  Description of Artificial Sequence: Synthetic oligonucleotide
ucccaaaauuugauuaaau

SEQ ID NO: 1150914 - RNA, 19 nt, Artificial Sequence
  Description of Artificial Sequence: Synthetic oligonucleotide
aaauuugauuaaaucccaa

SEQ ID NO: 1150915 - RNA, 19 nt, Artificial Sequence
  Description of Artificial Sequence: Synthetic oligonucleotide
acucccaaaauuugauuaa

SEQ ID NO: 1150916 - RNA, 19 nt, Artificial Sequence
  Description of Artificial Sequence: Synthetic oligonucleotide
cuuucuuaaugaauugaaa

SEQ ID NO: 1150917 - RNA, 19 nt, Artificial Sequence
  Description of Artificial Sequence: Synthetic oligonucleotide
cuuaaugaauugaaauucu

SEQ ID NO: 1150918 - RNA, 19 nt, Artificial Sequence
  Description of Artificial Sequence: Synthetic oligonucleotide
aucccaacaacgaagucca

SEQ ID NO: 1150919 - RNA, 19 nt, Artificial Sequence
  Description of Artificial Sequence: Synthetic oligonucleotide
aucucaccuuucucauugc

SEQ ID NO: 1150920 - RNA, 19 nt, Artificial Sequence
  Description of Artificial Sequence: Synthetic oligonucleotide
uccauugaaaucucaccuu

SEQ ID NO: 1150921 - RNA, 19 nt, Artificial Sequence
  Description of Artificial Sequence: Synthetic oligonucleotide
augagugcgcuugggaccg

SEQ ID NO: 1150922 - RNA, 19 nt, Artificial Sequence
  Description of Artificial Sequence: Synthetic oligonucleotide
uaggggcauaaucuggccu

SEQ ID NO: 1150923 - RNA, 19 nt, Artificial Sequence
  Description of Artificial Sequence: Synthetic oligonucleotide
aaucuggccuuuucccaga

SEQ ID NO: 1150924 - RNA, 19 nt, Artificial Sequence
  Description of Artificial Sequence: Synthetic oligonucleotide
cccaaaauuugauuaaauc

SEQ ID NO: 1150925 - RNA, 19 nt, Artificial Sequence
  Description of Artificial Sequence: Synthetic oligonucleotide
uucccagauacauaacguu

SEQ ID NO: 1150926 - RNA, 19 nt, Artificial Sequence
  Description of Artificial Sequence: Synthetic oligonucleotide
ugaggacuccauaggggca

SEQ ID NO: 1150927 - RNA, 19 nt, Artificial Sequence
  Description of Artificial Sequence: Synthetic oligonucleotide
accuuucucauugcgaacu

SEQ ID NO: 1150928 - RNA, 19 nt, Artificial Sequence
  Description of Artificial Sequence: Synthetic oligonucleotide
cauugaaaucucaccuuuc

SEQ ID NO: 1150929 - RNA, 19 nt, Artificial Sequence
  Description of Artificial Sequence: Synthetic oligonucleotide
acguuuuacuuucacuuuu

SEQ ID NO: 1150930 - RNA, 19 nt, Artificial Sequence
  Description of Artificial Sequence: Synthetic oligonucleotide
agcuuucuuaaugaauuga

SEQ ID NO: 1150931 - RNA, 19 nt, Artificial Sequence
  Description of Artificial Sequence: Synthetic oligonucleotide
gacauggugacggccgcgg

SEQ ID NO: 1150932 - RNA, 19 nt, Artificial Sequence
  Description of Artificial Sequence: Synthetic oligonucleotide
auggugacggccgcggugg

SEQ ID NO: 1150933 - RNA, 19 nt, Artificial Sequence
  Description of Artificial Sequence: Synthetic oligonucleotide
cuuucucauugcgaacugg

SEQ ID NO: 1150934 - RNA, 19 nt, Artificial Sequence
  Description of Artificial Sequence: Synthetic oligonucleotide
uucuuguuccuuagcuuuc

SEQ ID NO: 1150935 - RNA, 19 nt, Artificial Sequence
  Description of Artificial Sequence: Synthetic oligonucleotide
uucaucugaggacuccaua

SEQ ID NO: 1150936 - RNA, 19 nt, Artificial Sequence
  Description of Artificial Sequence: Synthetic oligonucleotide
acacaacaccuccucccac

SEQ ID NO: 1150937 - RNA, 19 nt, Artificial Sequence
  Description of Artificial Sequence: Synthetic oligonucleotide
cagccguagacugaauggg

SEQ ID NO: 1150938 - RNA, 19 nt, Artificial Sequence
  Description of Artificial Sequence: Synthetic oligonucleotide
agccguagacugaaugggc

SEQ ID NO: 1150939 - RNA, 19 nt, Artificial Sequence
  Description of Artificial Sequence: Synthetic oligonucleotide
aaaucucaccuuucucauu

SEQ ID NO: 1150940 - RNA, 19 nt, Artificial Sequence
  Description of Artificial Sequence: Synthetic oligonucleotide
gaaagccucuaacccuacc

SEQ ID NO: 1150941 - RNA, 19 nt, Artificial Sequence
  Description of Artificial Sequence: Synthetic oligonucleotide
gggaccgacauggugacgg

SEQ ID NO: 1150942 - RNA, 19 nt, Artificial Sequence
  Description of Artificial Sequence: Synthetic oligonucleotide
uuguuccuuagcuuucuua

SEQ ID NO: 1150943 - RNA, 19 nt, Artificial Sequence
  Description of Artificial Sequence: Synthetic oligonucleotide
uugcgaacugggacggccc

SEQ ID NO: 1150944 - RNA, 19 nt, Artificial Sequence
  Description of Artificial Sequence: Synthetic oligonucleotide
accgacauggugacggccg

SEQ ID NO: 1150945 - RNA, 19 nt, Artificial Sequence
  Description of Artificial Sequence: Synthetic oligonucleotide
ccagccguagacugaaugg

SEQ ID NO: 1150946 - RNA, 19 nt, Artificial Sequence
  Description of Artificial Sequence: Synthetic oligonucleotide
gaaaucucaccuuucucau

SEQ ID NO: 1150947 - RNA, 19 nt, Artificial Sequence
  Description of Artificial Sequence: Synthetic oligonucleotide
augggcggcugcuucauga

SEQ ID NO: 1150948 - RNA, 19 nt, Artificial Sequence
  Description of Artificial Sequence: Synthetic oligonucleotide
uuaaaguggaaagccucua

SEQ ID NO: 1150949 - RNA, 19 nt, Artificial Sequence
  Description of Artificial Sequence: Synthetic oligonucleotide
cauccucuucaucugagga

SEQ ID NO: 1150950 - RNA, 19 nt, Artificial Sequence
  Description of Artificial Sequence: Synthetic oligonucleotide
acgaaguccaaggaacaca

SEQ ID NO: 1150951 - RNA, 19 nt, Artificial Sequence
  Description of Artificial Sequence: Synthetic oligonucleotide
ucuuguuccuuagcuuucu

SEQ ID NO: 1150952 - RNA, 19 nt, Artificial Sequence
  Description of Artificial Sequence: Synthetic oligonucleotide
aaggaacacaacaccuccu

SEQ ID NO: 1150953 - RNA, 19 nt, Artificial Sequence
  Description of Artificial Sequence: Synthetic oligonucleotide
aggggcauaaucuggccuu

SEQ ID NO: 1150954 - RNA, 19 nt, Artificial Sequence
  Description of Artificial Sequence: Synthetic oligonucleotide
cucaccuuucucauugcga

SEQ ID NO: 1150955 - RNA, 19 nt, Artificial Sequence
  Description of Artificial Sequence: Synthetic oligonucleotide
uugggaccgacauggugac

SEQ ID NO: 1150956 - RNA, 19 nt, Artificial Sequence
  Description of Artificial Sequence: Synthetic oligonucleotide
ugcgaacugggacggcccc

SEQ ID NO: 1150957 - RNA, 19 nt, Artificial Sequence
  Description of Artificial Sequence: Synthetic oligonucleotide
ugcgcuugggaccgacaug

SEQ ID NO: 1150958 - RNA, 19 nt, Artificial Sequence
  Description of Artificial Sequence: Synthetic oligonucleotide
ccauaggggcauaaucugg

SEQ ID NO: 1150959 - RNA, 19 nt, Artificial Sequence
  Description of Artificial Sequence: Synthetic oligonucleotide
cuuagcuuucuuaaugaau

SEQ ID NO: 1150960 - RNA, 19 nt, Artificial Sequence
  Description of Artificial Sequence: Synthetic oligonucleotide
ggaacacaacaccuccucc

SEQ ID NO: 1150961 - RNA, 19 nt, Artificial Sequence
  Description of Artificial Sequence: Synthetic oligonucleotide
gcgcuugggaccgacaugg

SEQ ID NO: 1150962 - RNA, 19 nt, Artificial Sequence
  Description of Artificial Sequence: Synthetic oligonucleotide
caacgaaguccaaggaaca

SEQ ID NO: 1150963 - RNA, 19 nt, Artificial Sequence
  Description of Artificial Sequence: Synthetic oligonucleotide
agacucccaaaauuugauu

SEQ ID NO: 1150964 - RNA, 19 nt, Artificial Sequence
  Description of Artificial Sequence: Synthetic oligonucleotide
acggccgcgguggagacuc

SEQ ID NO: 1150965 - RNA, 19 nt, Artificial Sequence
  Description of Artificial Sequence: Synthetic oligonucleotide
uggccuuuucccagauaca

SEQ ID NO: 1150966 - RNA, 19 nt, Artificial Sequence
  Description of Artificial Sequence: Synthetic oligonucleotide
guuuuaaaguggaaagccu

SEQ ID NO: 1150967 - RNA, 19 nt, Artificial Sequence
  Description of Artificial Sequence: Synthetic oligonucleotide
ccuuuucccagauacauaa

SEQ ID NO: 1150968 - RNA, 19 nt, Artificial Sequence
  Description of Artificial Sequence: Synthetic oligonucleotide
ugggcggcugcuucaugag

SEQ ID NO: 1150969 - RNA, 19 nt, Artificial Sequence
  Description of Artificial Sequence: Synthetic oligonucleotide
aaugggcggcugcuucaug

SEQ ID NO: 1150970 - RNA, 19 nt, Artificial Sequence
  Description of Artificial Sequence: Synthetic oligonucleotide
cugaaugggcggcugcuuc

SEQ ID NO: 1150971 - RNA, 19 nt, Artificial Sequence
  Description of Artificial Sequence: Synthetic oligonucleotide
cuucaugagugcgcuuggg

SEQ ID NO: 1150972 - RNA, 19 nt, Artificial Sequence
  Description of Artificial Sequence: Synthetic oligonucleotide
uagacugaaugggcggcug

SEQ ID NO: 1150973 - RNA, 19 nt, Artificial Sequence
  Description of Artificial Sequence: Synthetic oligonucleotide
cauggugacggccgcggug

SEQ ID NO: 1150974 - RNA, 19 nt, Artificial Sequence
  Description of Artificial Sequence: Synthetic oligonucleotide
guggaaagccucuaacccu

SEQ ID NO: 1150975 - RNA, 19 nt, Artificial Sequence
  Description of Artificial Sequence: Synthetic oligonucleotide
caacaacgaaguccaagga

SEQ ID NO: 1150976 - RNA, 19 nt, Artificial Sequence
  Description of Artificial Sequence: Synthetic oligonucleotide
gccguagacugaaugggcg

SEQ ID NO: 1150977 - RNA, 19 nt, Artificial Sequence
  Description of Artificial Sequence: Synthetic oligonucleotide
ccaaggaacacaacaccuc

SEQ ID NO: 1150978 - RNA, 19 nt, Artificial Sequence
  Description of Artificial Sequence: Synthetic oligonucleotide
gcuuucuuaaugaauugaa

SEQ ID NO: 1150979 - RNA, 19 nt, Artificial Sequence
  Description of Artificial Sequence: Synthetic oligonucleotide
caccuuucucauugcgaac

SEQ ID NO: 1150980 - RNA, 19 nt, Artificial Sequence
  Description of Artificial Sequence: Synthetic oligonucleotide
gcuucaugagugcgcuugg

SEQ ID NO: 1150981 - RNA, 19 nt, Artificial Sequence
  Description of Artificial Sequence: Synthetic oligonucleotide
gacggccccagccguagac

SEQ ID NO: 1150982 - RNA, 19 nt, Artificial Sequence
  Description of Artificial Sequence: Synthetic oligonucleotide
ccguagacugaaugggcgg

SEQ ID NO: 1150983 - RNA, 19 nt, Artificial Sequence
  Description of Artificial Sequence: Synthetic oligonucleotide
ggagacucccaaaauuuga

SEQ ID NO: 1150984 - RNA, 19 nt, Artificial Sequence
  Description of Artificial Sequence: Synthetic oligonucleotide
ggcauaaucuggccuuuuc

SEQ ID NO: 1150985 - RNA, 19 nt, Artificial Sequence
  Description of Artificial Sequence: Synthetic oligonucleotide
gaccgacauggugacggcc

SEQ ID NO: 1150986 - RNA, 19 nt, Artificial Sequence
  Description of Artificial Sequence: Synthetic oligonucleotide
ggcggcugcuucaugagug

SEQ ID NO: 1150987 - RNA, 19 nt, Artificial Sequence
  Description of Artificial Sequence: Synthetic oligonucleotide
gcuugggaccgacauggug

SEQ ID NO: 1150988 - RNA, 19 nt, Artificial Sequence
  Description of Artificial Sequence: Synthetic oligonucleotide
gagacucccaaaauuugau

SEQ ID NO: 1150989 - RNA, 19 nt, Artificial Sequence
  Description of Artificial Sequence: Synthetic oligonucleotide
cccaacaacgaaguccaag

SEQ ID NO: 1150990 - RNA, 19 nt, Artificial Sequence
  Description of Artificial Sequence: Synthetic oligonucleotide
guggagacucccaaaauuu

SEQ ID NO: 1150991 - RNA, 19 nt, Artificial Sequence
  Description of Artificial Sequence: Synthetic oligonucleotide
gguggagacucccaaaauu

SEQ ID NO: 1150992 - RNA, 19 nt, Artificial Sequence
  Description of Artificial Sequence: Synthetic oligonucleotide
acauaacguuuuacuuuca

SEQ ID NO: 1150993 - RNA, 19 nt, Artificial Sequence
  Description of Artificial Sequence: Synthetic oligonucleotide
acauggugacggccgcggu

SEQ ID NO: 1150994 - RNA, 19 nt, Artificial Sequence
  Description of Artificial Sequence: Synthetic oligonucleotide
guuccuuagcuuucuuaau

SEQ ID NO: 1150995 - RNA, 19 nt, Artificial Sequence
  Description of Artificial Sequence: Synthetic oligonucleotide
cccagccguagacugaaug

SEQ ID NO: 1150996 - RNA, 19 nt, Artificial Sequence
  Description of Artificial Sequence: Synthetic oligonucleotide
gaacugggacggccccagc

SEQ ID NO: 1150997 - RNA, 19 nt, Artificial Sequence
  Description of Artificial Sequence: Synthetic oligonucleotide
ugggaccgacauggugacg

SEQ ID NO: 1150998 - RNA, 19 nt, Artificial Sequence
  Description of Artificial Sequence: Synthetic oligonucleotide
ggcugcuucaugagugcgc

SEQ ID NO: 1150999 - RNA, 19 nt, Artificial Sequence
  Description of Artificial Sequence: Synthetic oligonucleotide
ugacggccgcgguggagac

SEQ ID NO: 1151000 - RNA, 19 nt, Artificial Sequence
  Description of Artificial Sequence: Synthetic oligonucleotide
ccuuucucauugcgaacug

SEQ ID NO: 1151001 - RNA, 19 nt, Artificial Sequence
  Description of Artificial Sequence: Synthetic oligonucleotide
gacugaaugggcggcugcu

SEQ ID NO: 1151002 - RNA, 19 nt, Artificial Sequence
  Description of Artificial Sequence: Synthetic oligonucleotide
acugaaugggcggcugcuu

SEQ ID NO: 1151003 - RNA, 19 nt, Artificial Sequence
  Description of Artificial Sequence: Synthetic oligonucleotide
gcgguggagacucccaaaa

SEQ ID NO: 1151004 - RNA, 19 nt, Artificial Sequence
  Description of Artificial Sequence: Synthetic oligonucleotide
gaggacuccauaggggcau

SEQ ID NO: 1151005 - RNA, 19 nt, Artificial Sequence
  Description of Artificial Sequence: Synthetic oligonucleotide
cauugcgaacugggacggc

SEQ ID NO: 1151006 - RNA, 19 nt, Artificial Sequence
  Description of Artificial Sequence: Synthetic oligonucleotide
cguagacugaaugggcggc

SEQ ID NO: 1151007 - RNA, 19 nt, Artificial Sequence
  Description of Artificial Sequence: Synthetic oligonucleotide
ucccaacaacgaaguccaa

SEQ ID NO: 1151008 - RNA, 19 nt, Artificial Sequence
  Description of Artificial Sequence: Synthetic oligonucleotide
ggaccgacauggugacggc

SEQ ID NO: 1151009 - RNA, 19 nt, Artificial Sequence
  Description of Artificial Sequence: Synthetic oligonucleotide
ccuuagcuuucuuaaugaa

SEQ ID NO: 1151010 - RNA, 19 nt, Artificial Sequence
  Description of Artificial Sequence: Synthetic oligonucleotide
gagugcgcuugggaccgac

SEQ ID NO: 1151011 - RNA, 19 nt, Artificial Sequence
  Description of Artificial Sequence: Synthetic oligonucleotide
ugggacggccccagccgua

SEQ ID NO: 1151012 - RNA, 19 nt, Artificial Sequence
  Description of Artificial Sequence: Synthetic oligonucleotide
gugcgcuugggaccgacau

SEQ ID NO: 1151013 - RNA, 19 nt, Artificial Sequence
  Description of Artificial Sequence: Synthetic oligonucleotide
guagacugaaugggcggcu

SEQ ID NO: 1151014 - RNA, 19 nt, Artificial Sequence
  Description of Artificial Sequence: Synthetic oligonucleotide
acggccccagccguagacu

SEQ ID NO: 1151015 - RNA, 19 nt, Artificial Sequence
  Description of Artificial Sequence: Synthetic oligonucleotide
ggccuuuucccagauacau

SEQ ID NO: 1151016 - RNA, 19 nt, Artificial Sequence
  Description of Artificial Sequence: Synthetic oligonucleotide
gcuucuuguuccuuagcuu

SEQ ID NO: 1151017 - RNA, 19 nt, Artificial Sequence
  Description of Artificial Sequence: Synthetic oligonucleotide
agugcgcuugggaccgaca

SEQ ID NO: 1151018 - RNA, 19 nt, Artificial Sequence
  Description of Artificial Sequence: Synthetic oligonucleotide
ccagauacauaacguuuua

SEQ ID NO: 1151019 - RNA, 19 nt, Artificial Sequence
  Description of Artificial Sequence: Synthetic oligonucleotide
gcugcuucaugagugcgcu

SEQ ID NO: 1151020 - RNA, 19 nt, Artificial Sequence
  Description of Artificial Sequence: Synthetic oligonucleotide
ccgacauggugacggccgc

SEQ ID NO: 1151021 - RNA, 19 nt, Artificial Sequence
  Description of Artificial Sequence: Synthetic oligonucleotide
gacuccauaggggcauaau

SEQ ID NO: 1151022 - RNA, 19 nt, Artificial Sequence
  Description of Artificial Sequence: Synthetic oligonucleotide
ggaaagccucuaacccuac

SEQ ID NO: 1151023 - RNA, 19 nt, Artificial Sequence
  Description of Artificial Sequence: Synthetic oligonucleotide
ccauugaaaucucaccuuu

SEQ ID NO: 1151024 - RNA, 19 nt, Artificial Sequence
  Description of Artificial Sequence: Synthetic oligonucleotide
cccagauacauaacguuuu

SEQ ID NO: 1151025 - RNA, 19 nt, Artificial Sequence
  Description of Artificial Sequence: Synthetic oligonucleotide
gggacggccccagccguag

SEQ ID NO: 1151026 - RNA, 19 nt, Artificial Sequence
  Description of Artificial Sequence: Synthetic oligonucleotide
gaaugggcggcugcuucau

SEQ ID NO: 1151027 - RNA, 19 nt, Artificial Sequence
  Description of Artificial Sequence: Synthetic oligonucleotide
ggugacggccgcgguggag

SEQ ID NO: 1151028 - RNA, 19 nt, Artificial Sequence
  Description of Artificial Sequence: Synthetic oligonucleotide
cgaacugggacggccccag

SEQ ID NO: 1151029 - RNA, 19 nt, Artificial Sequence
  Description of Artificial Sequence: Synthetic oligonucleotide
ugagugcgcuugggaccga

SEQ ID NO: 1151030 - RNA, 19 nt, Artificial Sequence
  Description of Artificial Sequence: Synthetic oligonucleotide
cuuguuccuuagcuuucuu

SEQ ID NO: 1151031 - RNA, 19 nt, Artificial Sequence
  Description of Artificial Sequence: Synthetic oligonucleotide
aggacuccauaggggcaua

SEQ ID NO: 1151032 - RNA, 19 nt, Artificial Sequence
  Description of Artificial Sequence: Synthetic oligonucleotide
gccuuuucccagauacaua

SEQ ID NO: 1151033 - RNA, 19 nt, Artificial Sequence
  Description of Artificial Sequence: Synthetic oligonucleotide
cugggacggccccagccgu

SEQ ID NO: 1151034 - RNA, 19 nt, Artificial Sequence
  Description of Artificial Sequence: Synthetic oligonucleotide
cggccccagccguagacug

SEQ ID NO: 1151035 - RNA, 19 nt, Artificial Sequence
  Description of Artificial Sequence: Synthetic oligonucleotide
cggcugcuucaugagugcg

SEQ ID NO: 1151036 - RNA, 19 nt, Artificial Sequence
  Description of Artificial Sequence: Synthetic oligonucleotide
ggccgcgguggagacuccc

SEQ ID NO: 1151037 - RNA, 19 nt, Artificial Sequence
  Description of Artificial Sequence: Synthetic oligonucleotide
cgacauggugacggccgcg

SEQ ID NO: 1151038 - RNA, 19 nt, Artificial Sequence
  Description of Artificial Sequence: Synthetic oligonucleotide
gccccagccguagacugaa

SEQ ID NO: 1151039 - RNA, 19 nt, Artificial Sequence
  Description of Artificial Sequence: Synthetic oligonucleotide
ggacuccauaggggcauaa

SEQ ID NO: 1151040 - RNA, 19 nt, Artificial Sequence
  Description of Artificial Sequence: Synthetic oligonucleotide
gcgaacugggacggcccca

SEQ ID NO: 1151041 - RNA, 19 nt, Artificial Sequence
  Description of Artificial Sequence: Synthetic oligonucleotide
gggcggcugcuucaugagu

SEQ ID NO: 1151042 - RNA, 19 nt, Artificial Sequence
  Description of Artificial Sequence: Synthetic oligonucleotide
ggccccagccguagacuga

SEQ ID NO: 1151043 - RNA, 19 nt, Artificial Sequence
  Description of Artificial Sequence: Synthetic oligonucleotide
gccgcgguggagacuccca

SEQ ID NO: 1151044 - RNA, 19 nt, Artificial Sequence
  Description of Artificial Sequence: Synthetic oligonucleotide
ggacggccccagccguaga

SEQ ID NO: 1151045 - RNA, 19 nt, Artificial Sequence
  Description of Artificial Sequence: Synthetic oligonucleotide
gacggccgcgguggagacu

SEQ ID NO: 1151046 - RNA, 19 nt, Artificial Sequence
  Description of Artificial Sequence: Synthetic oligonucleotide
ccgcgguggagacucccaa

SEQ ID NO: 1151047 - RNA, 19 nt, Artificial Sequence
  Description of Artificial Sequence: Synthetic oligonucleotide
cugcuucaugagugcgcuu

SEQ ID NO: 1151048 - RNA, 19 nt, Artificial Sequence
  Description of Artificial Sequence: Synthetic oligonucleotide
cgcgguggagacucccaaa

SEQ ID NO: 1151049 - RNA, 19 nt, Artificial Sequence
  Description of Artificial Sequence: Synthetic oligonucleotide
ggggcauaaucuggccuuu

SEQ ID NO: 1151050 - RNA, 19 nt, Artificial Sequence
  Description of Artificial Sequence: Synthetic oligonucleotide
gggcauaaucuggccuuuu

SEQ ID NO: 1151051 - RNA, 19 nt, Artificial Sequence
  Description of Artificial Sequence: Synthetic oligonucleotide
cgguggagacucccaaaau

SEQ ID NO: 1151052 - RNA, 19 nt, Artificial Sequence
  Description of Artificial Sequence: Synthetic oligonucleotide
cggccgcgguggagacucc

SEQ ID NO: 1151053 - RNA, 19 nt, Artificial Sequence
  Description of Artificial Sequence: Synthetic oligonucleotide
cgcuugggaccgacauggu

SEQ ID NO: 1151054 - RNA, 19 nt, Artificial Sequence
  Description of Artificial Sequence: Synthetic oligonucleotide
ccccagccguagacugaau

SEQ ID NO: 1151055 - RNA, 19 nt, Artificial Sequence
  Description of Artificial Sequence: Synthetic oligonucleotide
acaaugaauggacagaagg

SEQ ID NO: 1151056 - RNA, 19 nt, Artificial Sequence
  Description of Artificial Sequence: Synthetic oligonucleotide
agugaaaacggccacaguc

SEQ ID NO: 1151057 - RNA, 19 nt, Artificial Sequence
  Description of Artificial Sequence: Synthetic oligonucleotide
uaaaagcuggcuaucaugc

SEQ ID NO: 1151058 - RNA, 19 nt, Artificial Sequence
  Description of Artificial Sequence: Synthetic oligonucleotide
ugucauaguaggauggagg

SEQ ID NO: 1151059 - RNA, 19 nt, Artificial Sequence
  Description of Artificial Sequence: Synthetic oligonucleotide
aaacgugaaguauuugcgg

SEQ ID NO: 1151060 - RNA, 19 nt, Artificial Sequence
  Description of Artificial Sequence: Synthetic oligonucleotide
aaugaauggacagaaggug

SEQ ID NO: 1151061 - RNA, 19 nt, Artificial Sequence
  Description of Artificial Sequence: Synthetic oligonucleotide
uguacuacuccuuggcacg

SEQ ID NO: 1151062 - RNA, 19 nt, Artificial Sequence
  Description of Artificial Sequence: Synthetic oligonucleotide
acgaggugaagucauagcg

SEQ ID NO: 1151063 - RNA, 19 nt, Artificial Sequence
  Description of Artificial Sequence: Synthetic oligonucleotide
caagaaacucuuuucgugg

SEQ ID NO: 1151064 - RNA, 19 nt, Artificial Sequence
  Description of Artificial Sequence: Synthetic oligonucleotide
caaacgugaaguauuugcg

SEQ ID NO: 1151065 - RNA, 19 nt, Artificial Sequence
  Description of Artificial Sequence: Synthetic oligonucleotide
auggugagaauauauagga

SEQ ID NO: 1151066 - RNA, 19 nt, Artificial Sequence
  Description of Artificial Sequence: Synthetic oligonucleotide
uuugcgguguacauacacg

SEQ ID NO: 1151067 - RNA, 19 nt, Artificial Sequence
  Description of Artificial Sequence: Synthetic oligonucleotide
accaccgugaagcagacag

SEQ ID NO: 1151068 - RNA, 19 nt, Artificial Sequence
  Description of Artificial Sequence: Synthetic oligonucleotide
uccccagacaccaagaaac

SEQ ID NO: 1151069 - RNA, 19 nt, Artificial Sequence
  Description of Artificial Sequence: Synthetic oligonucleotide
aacaagguuccagggaugc

SEQ ID NO: 1151070 - RNA, 19 nt, Artificial Sequence
  Description of Artificial Sequence: Synthetic oligonucleotide
ugucaugccagggacaugg

SEQ ID NO: 1151071 - RNA, 19 nt, Artificial Sequence
  Description of Artificial Sequence: Synthetic oligonucleotide
aguagguccagacauucuc

SEQ ID NO: 1151072 - RNA, 19 nt, Artificial Sequence
  Description of Artificial Sequence: Synthetic oligonucleotide
aacaccuuucugaugaagg

SEQ ID NO: 1151073 - RNA, 19 nt, Artificial Sequence
  Description of Artificial Sequence: Synthetic oligonucleotide
aauggacagaaggugguac

SEQ ID NO: 1151074 - RNA, 19 nt, Artificial Sequence
  Description of Artificial Sequence: Synthetic oligonucleotide
auuugcgguguacauacac

SEQ ID NO: 1151075 - RNA, 19 nt, Artificial Sequence
  Description of Artificial Sequence: Synthetic oligonucleotide
agacauaguagguccagac

SEQ ID NO: 1151076 - RNA, 19 nt, Artificial Sequence
  Description of Artificial Sequence: Synthetic oligonucleotide
cagaguauggcgaagauga

SEQ ID NO: 1151077 - RNA, 19 nt, Artificial Sequence
  Description of Artificial Sequence: Synthetic oligonucleotide
aacgugaaguauuugcggu

SEQ ID NO: 1151078 - RNA, 19 nt, Artificial Sequence
  Description of Artificial Sequence: Synthetic oligonucleotide
aauauauaggaagauguua

SEQ ID NO: 1151079 - RNA, 19 nt, Artificial Sequence
  Description of Artificial Sequence: Synthetic oligonucleotide
aaacgcagccccaucaccc

SEQ ID NO: 1151080 - RNA, 19 nt, Artificial Sequence
  Description of Artificial Sequence: Synthetic oligonucleotide
guauuugcgguguacauac

SEQ ID NO: 1151081 - RNA, 19 nt, Artificial Sequence
  Description of Artificial Sequence: Synthetic oligonucleotide
acauaguagguccagacau

SEQ ID NO: 1151082 - RNA, 19 nt, Artificial Sequence
  Description of Artificial Sequence: Synthetic oligonucleotide
ucgacagggucacugacag

SEQ ID NO: 1151083 - RNA, 19 nt, Artificial Sequence
  Description of Artificial Sequence: Synthetic oligonucleotide
uuuucgugggacauggccu

SEQ ID NO: 1151084 - RNA, 19 nt, Artificial Sequence
  Description of Artificial Sequence: Synthetic oligonucleotide
cuuagaguguuccuucucc

SEQ ID NO: 1151085 - RNA, 19 nt, Artificial Sequence
  Description of Artificial Sequence: Synthetic oligonucleotide
gaagggaagacgugcaccc

SEQ ID NO: 1151086 - RNA, 19 nt, Artificial Sequence
  Description of Artificial Sequence: Synthetic oligonucleotide
gauggcguaggagacauag

SEQ ID NO: 1151087 - RNA, 19 nt, Artificial Sequence
  Description of Artificial Sequence: Synthetic oligonucleotide
gaaggugguacagaaacgc

SEQ ID NO: 1151088 - RNA, 19 nt, Artificial Sequence
  Description of Artificial Sequence: Synthetic oligonucleotide
auacacgagggugagaggg

SEQ ID NO: 1151089 - RNA, 19 nt, Artificial Sequence
  Description of Artificial Sequence: Synthetic oligonucleotide
acccucaccucuuagagug

SEQ ID NO: 1151090 - RNA, 19 nt, Artificial Sequence
  Description of Artificial Sequence: Synthetic oligonucleotide
uuaaugauggcagcaugag

SEQ ID NO: 1151091 - RNA, 19 nt, Artificial Sequence
  Description of Artificial Sequence: Synthetic oligonucleotide
aaaacggccacagucgaca

SEQ ID NO: 1151092 - RNA, 19 nt, Artificial Sequence
  Description of Artificial Sequence: Synthetic oligonucleotide
aagcugacggucaggaucg

SEQ ID NO: 1151093 - RNA, 19 nt, Artificial Sequence
  Description of Artificial Sequence: Synthetic oligonucleotide
caugcuguggccacagagg

SEQ ID NO: 1151094 - RNA, 19 nt, Artificial Sequence
  Description of Artificial Sequence: Synthetic oligonucleotide
cauucucccggacaaagcc

SEQ ID NO: 1151095 - RNA, 19 nt, Artificial Sequence
  Description of Artificial Sequence: Synthetic oligonucleotide
auauauaggaagauguuaa

SEQ ID NO: 1151096 - RNA, 19 nt, Artificial Sequence
  Description of Artificial Sequence: Synthetic oligonucleotide
uccagggaugcuuucgccg

SEQ ID NO: 1151097 - RNA, 19 nt, Artificial Sequence
  Description of Artificial Sequence: Synthetic oligonucleotide
guuaaugaugucuguguac

SEQ ID NO: 1151098 - RNA, 19 nt, Artificial Sequence
  Description of Artificial Sequence: Synthetic oligonucleotide
gaugaaggccugucgaaug

SEQ ID NO: 1151099 - RNA, 19 nt, Artificial Sequence
  Description of Artificial Sequence: Synthetic oligonucleotide
aguauggcgaagaugagga

SEQ ID NO: 1151100 - RNA, 19 nt, Artificial Sequence
  Description of Artificial Sequence: Synthetic oligonucleotide
uuagaguguuccuucuccc

SEQ ID NO: 1151101 - RNA, 19 nt, Artificial Sequence
  Description of Artificial Sequence: Synthetic oligonucleotide
gaagauguuaaugaugucu

SEQ ID NO: 1151102 - RNA, 19 nt, Artificial Sequence
  Description of Artificial Sequence: Synthetic oligonucleotide
agaaacgcagccccaucac

SEQ ID NO: 1151103 - RNA, 19 nt, Artificial Sequence
  Description of Artificial Sequence: Synthetic oligonucleotide
gaguauggcgaagaugagg

SEQ ID NO: 1151104 - RNA, 19 nt, Artificial Sequence
  Description of Artificial Sequence: Synthetic oligonucleotide
acggauggcuuugucaugc

SEQ ID NO: 1151105 - RNA, 19 nt, Artificial Sequence
  Description of Artificial Sequence: Synthetic oligonucleotide
guaaggaggcugaacauag

SEQ ID NO: 1151106 - RNA, 19 nt, Artificial Sequence
  Description of Artificial Sequence: Synthetic oligonucleotide
cugucgaauguucuugucc

SEQ ID NO: 1151107 - RNA, 19 nt, Artificial Sequence
  Description of Artificial Sequence: Synthetic oligonucleotide
ugaaaacggccacagucga

SEQ ID NO: 1151108 - RNA, 19 nt, Artificial Sequence
  Description of Artificial Sequence: Synthetic oligonucleotide
gagcagagcgcccagugag

SEQ ID NO: 1151109 - RNA, 19 nt, Artificial Sequence
  Description of Artificial Sequence: Synthetic oligonucleotide
uugcgguguacauacacga

SEQ ID NO: 1151110 - RNA, 19 nt, Artificial Sequence
  Description of Artificial Sequence: Synthetic oligonucleotide
uguaggacaagcugacggu

SEQ ID NO: 1151111 - RNA, 19 nt, Artificial Sequence
  Description of Artificial Sequence: Synthetic oligonucleotide
cugguaguucccaugcugc

SEQ ID NO: 1151112 - RNA, 19 nt, Artificial Sequence
  Description of Artificial Sequence: Synthetic oligonucleotide
uggcguaggagacauagua

SEQ ID NO: 1151113 - RNA, 19 nt, Artificial Sequence
  Description of Artificial Sequence: Synthetic oligonucleotide
aagagggcucggaaggacc

SEQ ID NO: 1151114 - RNA, 19 nt, Artificial Sequence
  Description of Artificial Sequence: Synthetic oligonucleotide
ccaaacgugaaguauuugc

SEQ ID NO: 1151115 - RNA, 19 nt, Artificial Sequence
  Description of Artificial Sequence: Synthetic oligonucleotide
gacagagcaacaagguucc

SEQ ID NO: 1151116 - RNA, 19 nt, Artificial Sequence
  Description of Artificial Sequence: Synthetic oligonucleotide
ucauagcgggucugcaugg

SEQ ID NO: 1151117 - RNA, 19 nt, Artificial Sequence
  Description of Artificial Sequence: Synthetic oligonucleotide
gggguagccaccuuguggg

SEQ ID NO: 1151118 - RNA, 19 nt, Artificial Sequence
  Description of Artificial Sequence: Synthetic oligonucleotide
acggucaggaucgacagag

SEQ ID NO: 1151119 - RNA, 19 nt, Artificial Sequence
  Description of Artificial Sequence: Synthetic oligonucleotide
gcguaggagacauaguagg

SEQ ID NO: 1151120 - RNA, 19 nt, Artificial Sequence
  Description of Artificial Sequence: Synthetic oligonucleotide
acaugggucucagccaucc

SEQ ID NO: 1151121 - RNA, 19 nt, Artificial Sequence
  Description of Artificial Sequence: Synthetic oligonucleotide
gguacucuaagccagggga

SEQ ID NO: 1151122 - RNA, 19 nt, Artificial Sequence
  Description of Artificial Sequence: Synthetic oligonucleotide
uguacagguucagagccgc

SEQ ID NO: 1151123 - RNA, 19 nt, Artificial Sequence
  Description of Artificial Sequence: Synthetic oligonucleotide
gaugcuuucgccggaaguc

SEQ ID NO: 1151124 - RNA, 19 nt, Artificial Sequence
  Description of Artificial Sequence: Synthetic oligonucleotide
guguacauacacgagggug

SEQ ID NO: 1151125 - RNA, 19 nt, Artificial Sequence
  Description of Artificial Sequence: Synthetic oligonucleotide
gacauaguagguccagaca

SEQ ID NO: 1151126 - RNA, 19 nt, Artificial Sequence
  Description of Artificial Sequence: Synthetic oligonucleotide
guggguauggggcuccagg

SEQ ID NO: 1151127 - RNA, 19 nt, Artificial Sequence
  Description of Artificial Sequence: Synthetic oligonucleotide
gaaacgcagccccaucacc

SEQ ID NO: 1151128 - RNA, 19 nt, Artificial Sequence
  Description of Artificial Sequence: Synthetic oligonucleotide
gaaacucuuuucgugggac

SEQ ID NO: 1151129 - RNA, 19 nt, Artificial Sequence
  Description of Artificial Sequence: Synthetic oligonucleotide
gaacagggguacucuaagc

SEQ ID NO: 1151130 - RNA, 19 nt, Artificial Sequence
  Description of Artificial Sequence: Synthetic oligonucleotide
aggaccaugcuguggccac

SEQ ID NO: 1151131 - RNA, 19 nt, Artificial Sequence
  Description of Artificial Sequence: Synthetic oligonucleotide
ugcgguguacauacacgag

SEQ ID NO: 1151132 - RNA, 19 nt, Artificial Sequence
  Description of Artificial Sequence: Synthetic oligonucleotide
gguccagacauucucccgg

SEQ ID NO: 1151133 - RNA, 19 nt, Artificial Sequence
  Description of Artificial Sequence: Synthetic oligonucleotide
uuguaaaagcuggcuauca

SEQ ID NO: 1151134 - RNA, 19 nt, Artificial Sequence
  Description of Artificial Sequence: Synthetic oligonucleotide
agcacgcccaugcacgagg

SEQ ID NO: 1151135 - RNA, 19 nt, Artificial Sequence
  Description of Artificial Sequence: Synthetic oligonucleotide
ucgaauguucuugucccag

SEQ ID NO: 1151136 - RNA, 19 nt, Artificial Sequence
  Description of Artificial Sequence: Synthetic oligonucleotide
agggaagacgugcacccuc

SEQ ID NO: 1151137 - RNA, 19 nt, Artificial Sequence
  Description of Artificial Sequence: Synthetic oligonucleotide
gacaugccauccuuucugc

SEQ ID NO: 1151138 - RNA, 19 nt, Artificial Sequence
  Description of Artificial Sequence: Synthetic oligonucleotide
guagccaccuuguggguag

SEQ ID NO: 1151139 - RNA, 19 nt, Artificial Sequence
  Description of Artificial Sequence: Synthetic oligonucleotide
uguggguagccuccuugag

SEQ ID NO: 1151140 - RNA, 19 nt, Artificial Sequence
  Description of Artificial Sequence: Synthetic oligonucleotide
uggugagaauauauaggaa

SEQ ID NO: 1151141 - RNA, 19 nt, Artificial Sequence
  Description of Artificial Sequence: Synthetic oligonucleotide
cagagccgcaaacacauac

SEQ ID NO: 1151142 - RNA, 19 nt, Artificial Sequence
  Description of Artificial Sequence: Synthetic oligonucleotide
aaacggccacagucgacag

SEQ ID NO: 1151143 - RNA, 19 nt, Artificial Sequence
  Description of Artificial Sequence: Synthetic oligonucleotide
gaagacgugcacccucacc

SEQ ID NO: 1151144 - RNA, 19 nt, Artificial Sequence
  Description of Artificial Sequence: Synthetic oligonucleotide
guugacagcggggaagucc

SEQ ID NO: 1151145 - RNA, 19 nt, Artificial Sequence
  Description of Artificial Sequence: Synthetic oligonucleotide
ucugggcuuagggagagcu

SEQ ID NO: 1151146 - RNA, 19 nt, Artificial Sequence
  Description of Artificial Sequence: Synthetic oligonucleotide
agcaccagaaacaccuuuc

SEQ ID NO: 1151147 - RNA, 19 nt, Artificial Sequence
  Description of Artificial Sequence: Synthetic oligonucleotide
ucuuagaguguuccuucuc

SEQ ID NO: 1151148 - RNA, 19 nt, Artificial Sequence
  Description of Artificial Sequence: Synthetic oligonucleotide
acauagggaggcauagggg

SEQ ID NO: 1151149 - RNA, 19 nt, Artificial Sequence
  Description of Artificial Sequence: Synthetic oligonucleotide
aacucuuuucgugggacau

SEQ ID NO: 1151150 - RNA, 19 nt, Artificial Sequence
  Description of Artificial Sequence: Synthetic oligonucleotide
aggagcacgcccaugcacg

SEQ ID NO: 1151151 - RNA, 19 nt, Artificial Sequence
  Description of Artificial Sequence: Synthetic oligonucleotide
uuucgugggacauggccuc

SEQ ID NO: 1151152 - RNA, 19 nt, Artificial Sequence
  Description of Artificial Sequence: Synthetic oligonucleotide
aggugguacagaaacgcag

SEQ ID NO: 1151153 - RNA, 19 nt, Artificial Sequence
  Description of Artificial Sequence: Synthetic oligonucleotide
cacgaggugaagucauagc

SEQ ID NO: 1151154 - RNA, 19 nt, Artificial Sequence
  Description of Artificial Sequence: Synthetic oligonucleotide
uacucuaagccaggggagc

SEQ ID NO: 1151155 - RNA, 19 nt, Artificial Sequence
  Description of Artificial Sequence: Synthetic oligonucleotide
auggacagaaggugguaca

SEQ ID NO: 1151156 - RNA, 19 nt, Artificial Sequence
  Description of Artificial Sequence: Synthetic oligonucleotide
gaagucauagcgggucugc

SEQ ID NO: 1151157 - RNA, 19 nt, Artificial Sequence
  Description of Artificial Sequence: Synthetic oligonucleotide
uugauggccggugcguccg

SEQ ID NO: 1151158 - RNA, 19 nt, Artificial Sequence
  Description of Artificial Sequence: Synthetic oligonucleotide
agguccagacauucucccg

SEQ ID NO: 1151159 - RNA, 19 nt, Artificial Sequence
  Description of Artificial Sequence: Synthetic oligonucleotide
ggaucgacagagcaacaag

SEQ ID NO: 1151160 - RNA, 19 nt, Artificial Sequence
  Description of Artificial Sequence: Synthetic oligonucleotide
ugggacauggccucggguu

SEQ ID NO: 1151161 - RNA, 19 nt, Artificial Sequence
  Description of Artificial Sequence: Synthetic oligonucleotide
ucgacagagcaacaagguu

SEQ ID NO: 1151162 - RNA, 19 nt, Artificial Sequence
  Description of Artificial Sequence: Synthetic oligonucleotide
guuccagggaugcuuucgc

SEQ ID NO: 1151163 - RNA, 19 nt, Artificial Sequence
  Description of Artificial Sequence: Synthetic oligonucleotide
auggggauacccuggcuga

SEQ ID NO: 1151164 - RNA, 19 nt, Artificial Sequence
  Description of Artificial Sequence: Synthetic oligonucleotide
caaugaauggacagaaggu

SEQ ID NO: 1151165 - RNA, 19 nt, Artificial Sequence
  Description of Artificial Sequence: Synthetic oligonucleotide
aagugaaaacggccacagu

SEQ ID NO: 1151166 - RNA, 19 nt, Artificial Sequence
  Description of Artificial Sequence: Synthetic oligonucleotide
guaggagacauaguagguc

SEQ ID NO: 1151167 - RNA, 19 nt, Artificial Sequence
  Description of Artificial Sequence: Synthetic oligonucleotide
ugcuuucgccggaaguccc

SEQ ID NO: 1151168 - RNA, 19 nt, Artificial Sequence
  Description of Artificial Sequence: Synthetic oligonucleotide
cugacggucaggaucgaca

SEQ ID NO: 1151169 - RNA, 19 nt, Artificial Sequence
  Description of Artificial Sequence: Synthetic oligonucleotide
ugcgguuccggaugaagau

SEQ ID NO: 1151170 - RNA, 19 nt, Artificial Sequence
  Description of Artificial Sequence: Synthetic oligonucleotide
guacucuaagccaggggag

SEQ ID NO: 1151171 - RNA, 19 nt, Artificial Sequence
  Description of Artificial Sequence: Synthetic oligonucleotide
cauacacgagggugagagg

SEQ ID NO: 1151172 - RNA, 19 nt, Artificial Sequence
  Description of Artificial Sequence: Synthetic oligonucleotide
ucgccggaaguccccacag

SEQ ID NO: 1151173 - RNA, 19 nt, Artificial Sequence
  Description of Artificial Sequence: Synthetic oligonucleotide
agaugcagaguauggcgaa

SEQ ID NO: 1151174 - RNA, 19 nt, Artificial Sequence
  Description of Artificial Sequence: Synthetic oligonucleotide
uaguagguccagacauucu

SEQ ID NO: 1151175 - RNA, 19 nt, Artificial Sequence
  Description of Artificial Sequence: Synthetic oligonucleotide
aguauuugcgguguacaua

SEQ ID NO: 1151176 - RNA, 19 nt, Artificial Sequence
  Description of Artificial Sequence: Synthetic oligonucleotide
aaggaccaugcuguggcca

SEQ ID NO: 1151177 - RNA, 19 nt, Artificial Sequence
  Description of Artificial Sequence: Synthetic oligonucleotide
aucgacagagcaacaaggu

SEQ ID NO: 1151178 - RNA, 19 nt, Artificial Sequence
  Description of Artificial Sequence: Synthetic oligonucleotide
ugaugaaggccugucgaau

SEQ ID NO: 1151179 - RNA, 19 nt, Artificial Sequence
  Description of Artificial Sequence: Synthetic oligonucleotide
uucgccggaaguccccaca

SEQ ID NO: 1151180 - RNA, 19 nt, Artificial Sequence
  Description of Artificial Sequence: Synthetic oligonucleotide
ggugguacagaaacgcagc

SEQ ID NO: 1151181 - RNA, 19 nt, Artificial Sequence
  Description of Artificial Sequence: Synthetic oligonucleotide
guacauacacgagggugag

SEQ ID NO: 1151182 - RNA, 19 nt, Artificial Sequence
  Description of Artificial Sequence: Synthetic oligonucleotide
ucuacggugcccgcugcgc

SEQ ID NO: 1151183 - RNA, 19 nt, Artificial Sequence
  Description of Artificial Sequence: Synthetic oligonucleotide
aaggccugucgaauguucu

SEQ ID NO: 1151184 - RNA, 19 nt, Artificial Sequence
  Description of Artificial Sequence: Synthetic oligonucleotide
cauguaggacaagcugacg

SEQ ID NO: 1151185 - RNA, 19 nt, Artificial Sequence
  Description of Artificial Sequence: Synthetic oligonucleotide
uauuugcgguguacauaca

SEQ ID NO: 1151186 - RNA, 19 nt, Artificial Sequence
  Description of Artificial Sequence: Synthetic oligonucleotide
ucauaguaggauggagguc

SEQ ID NO: 1151187 - RNA, 19 nt, Artificial Sequence
  Description of Artificial Sequence: Synthetic oligonucleotide
caacaagguuccagggaug

SEQ ID NO: 1151188 - RNA, 19 nt, Artificial Sequence
  Description of Artificial Sequence: Synthetic oligonucleotide
aagucauagcgggucugca

SEQ ID NO: 1151189 - RNA, 19 nt, Artificial Sequence
  Description of Artificial Sequence: Synthetic oligonucleotide
cgguguacauacacgaggg

SEQ ID NO: 1151190 - RNA, 19 nt, Artificial Sequence
  Description of Artificial Sequence: Synthetic oligonucleotide
agcgggucugcauggagaa

SEQ ID NO: 1151191 - RNA, 19 nt, Artificial Sequence
  Description of Artificial Sequence: Synthetic oligonucleotide
cgaggugaagucauagcgg

SEQ ID NO: 1151192 - RNA, 19 nt, Artificial Sequence
  Description of Artificial Sequence: Synthetic oligonucleotide
uacggugcccgcugcgcag

SEQ ID NO: 1151193 - RNA, 19 nt, Artificial Sequence
  Description of Artificial Sequence: Synthetic oligonucleotide
acgagggugagaggggcuc

SEQ ID NO: 1151194 - RNA, 19 nt, Artificial Sequence
  Description of Artificial Sequence: Synthetic oligonucleotide
caaagcccuucacuucccc

SEQ ID NO: 1151195 - RNA, 19 nt, Artificial Sequence
  Description of Artificial Sequence: Synthetic oligonucleotide
gugucuacggugcccgcug

SEQ ID NO: 1151196 - RNA, 19 nt, Artificial Sequence
  Description of Artificial Sequence: Synthetic oligonucleotide
cagaaacgcagccccauca

SEQ ID NO: 1151197 - RNA, 19 nt, Artificial Sequence
  Description of Artificial Sequence: Synthetic oligonucleotide
ggucaggaucgacagagca

SEQ ID NO: 1151198 - RNA, 19 nt, Artificial Sequence
  Description of Artificial Sequence: Synthetic oligonucleotide
guacuacuccuuggcacgg

SEQ ID NO: 1151199 - RNA, 19 nt, Artificial Sequence
  Description of Artificial Sequence: Synthetic oligonucleotide
ugucuacggugcccgcugc

SEQ ID NO: 1151200 - RNA, 19 nt, Artificial Sequence
  Description of Artificial Sequence: Synthetic oligonucleotide
cuuugucaugccagggaca

SEQ ID NO: 1151201 - RNA, 19 nt, Artificial Sequence
  Description of Artificial Sequence: Synthetic oligonucleotide
ccagggaugcuuucgccgg

SEQ ID NO: 1151202 - RNA, 19 nt, Artificial Sequence
  Description of Artificial Sequence: Synthetic oligonucleotide
ggcguaggagacauaguag

SEQ ID NO: 1151203 - RNA, 19 nt, Artificial Sequence
  Description of Artificial Sequence: Synthetic oligonucleotide
ucggaaggaccaugcugug

SEQ ID NO: 1151204 - RNA, 19 nt, Artificial Sequence
  Description of Artificial Sequence: Synthetic oligonucleotide
agagccgcaaacacauacu

SEQ ID NO: 1151205 - RNA, 19 nt, Artificial Sequence
  Description of Artificial Sequence: Synthetic oligonucleotide
cuggggaaucagagagagg

SEQ ID NO: 1151206 - RNA, 19 nt, Artificial Sequence
  Description of Artificial Sequence: Synthetic oligonucleotide
caggagcacgcccaugcac

SEQ ID NO: 1151207 - RNA, 19 nt, Artificial Sequence
  Description of Artificial Sequence: Synthetic oligonucleotide
ggguacucuaagccagggg

SEQ ID NO: 1151208 - RNA, 19 nt, Artificial Sequence
  Description of Artificial Sequence: Synthetic oligonucleotide
gaaaacggccacagucgac

SEQ ID NO: 1151209 - RNA, 19 nt, Artificial Sequence
  Description of Artificial Sequence: Synthetic oligonucleotide
aggaucgacagagcaacaa

SEQ ID NO: 1151210 - RNA, 19 nt, Artificial Sequence
  Description of Artificial Sequence: Synthetic oligonucleotide
guaggacaagcugacgguc

SEQ ID NO: 1151211 - RNA, 19 nt, Artificial Sequence
  Description of Artificial Sequence: Synthetic oligonucleotide
accucuuagaguguuccuu

SEQ ID NO: 1151212 - RNA, 19 nt, Artificial Sequence
  Description of Artificial Sequence: Synthetic oligonucleotide
agagcgcccagugaggcau

SEQ ID NO: 1151213 - RNA, 19 nt, Artificial Sequence
  Description of Artificial Sequence: Synthetic oligonucleotide
ccaugcuguggccacagag

SEQ ID NO: 1151214 - RNA, 19 nt, Artificial Sequence
  Description of Artificial Sequence: Synthetic oligonucleotide
uucgugggacauggccucg

SEQ ID NO: 1151215 - RNA, 19 nt, Artificial Sequence
  Description of Artificial Sequence: Synthetic oligonucleotide
gucuacggugcccgcugcg

SEQ ID NO: 1151216 - RNA, 19 nt, Artificial Sequence
  Description of Artificial Sequence: Synthetic oligonucleotide
cugaugaaggccugucgaa

SEQ ID NO: 1151217 - RNA, 19 nt, Artificial Sequence
  Description of Artificial Sequence: Synthetic oligonucleotide
aagggaagacgugcacccu

SEQ ID NO: 1151218 - RNA, 19 nt, Artificial Sequence
  Description of Artificial Sequence: Synthetic oligonucleotide
cacaagaaugaagccccac

SEQ ID NO: 1151219 - RNA, 19 nt, Artificial Sequence
  Description of Artificial Sequence: Synthetic oligonucleotide
acucuuuucgugggacaug

SEQ ID NO: 1151220 - RNA, 19 nt, Artificial Sequence
  Description of Artificial Sequence: Synthetic oligonucleotide
ucuguggguauggcccuug

SEQ ID NO: 1151221 - RNA, 19 nt, Artificial Sequence
  Description of Artificial Sequence: Synthetic oligonucleotide
ggcuaucaugcccaccaug

SEQ ID NO: 1151222 - RNA, 19 nt, Artificial Sequence
  Description of Artificial Sequence: Synthetic oligonucleotide
uuggggccccacaggauau

SEQ ID NO: 1151223 - RNA, 19 nt, Artificial Sequence
  Description of Artificial Sequence: Synthetic oligonucleotide
agaguauggcgaagaugag

SEQ ID NO: 1151224 - RNA, 19 nt, Artificial Sequence
  Description of Artificial Sequence: Synthetic oligonucleotide
agcagagcgcccagugagg

SEQ ID NO: 1151225 - RNA, 19 nt, Artificial Sequence
  Description of Artificial Sequence: Synthetic oligonucleotide
ccucuuagaguguuccuuc

SEQ ID NO: 1151226 - RNA, 19 nt, Artificial Sequence
  Description of Artificial Sequence: Synthetic oligonucleotide
cuaugccuggggaaucaga

SEQ ID NO: 1151227 - RNA, 19 nt, Artificial Sequence
  Description of Artificial Sequence: Synthetic oligonucleotide
gcucucaggggucagcaca

SEQ ID NO: 1151228 - RNA, 19 nt, Artificial Sequence
  Description of Artificial Sequence: Synthetic oligonucleotide
cuugaggguagggucccug

SEQ ID NO: 1151229 - RNA, 19 nt, Artificial Sequence
  Description of Artificial Sequence: Synthetic oligonucleotide
caugcacgaggugaaguca

SEQ ID NO: 1151230 - RNA, 19 nt, Artificial Sequence
  Description of Artificial Sequence: Synthetic oligonucleotide
gucgaauguucuuguccca

SEQ ID NO: 1151231 - RNA, 19 nt, Artificial Sequence
  Description of Artificial Sequence: Synthetic oligonucleotide
agccgcgcgcguugauggc

SEQ ID NO: 1151232 - RNA, 19 nt, Artificial Sequence
  Description of Artificial Sequence: Synthetic oligonucleotide
ugcacgaggugaagucaua

SEQ ID NO: 1151233 - RNA, 19 nt, Artificial Sequence
  Description of Artificial Sequence: Synthetic oligonucleotide
gcagaguauggcgaagaug

SEQ ID NO: 1151234 - RNA, 19 nt, Artificial Sequence
  Description of Artificial Sequence: Synthetic oligonucleotide
gcaacaagguuccagggau

SEQ ID NO: 1151235 - RNA, 19 nt, Artificial Sequence
  Description of Artificial Sequence: Synthetic oligonucleotide
agagggcucggaaggacca

SEQ ID NO: 1151236 - RNA, 19 nt, Artificial Sequence
  Description of Artificial Sequence: Synthetic oligonucleotide
cgguuccggaugaagaugc

SEQ ID NO: 1151237 - RNA, 19 nt, Artificial Sequence
  Description of Artificial Sequence: Synthetic oligonucleotide
cacggauggcuuugucaug

SEQ ID NO: 1151238 - RNA, 19 nt, Artificial Sequence
  Description of Artificial Sequence: Synthetic oligonucleotide
ccaugcacgaggugaaguc

SEQ ID NO: 1151239 - RNA, 19 nt, Artificial Sequence
  Description of Artificial Sequence: Synthetic oligonucleotide
acaagcugacggucaggau

SEQ ID NO: 1151240 - RNA, 19 nt, Artificial Sequence
  Description of Artificial Sequence: Synthetic oligonucleotide
ugcucucaggggucagcac

SEQ ID NO: 1151241 - RNA, 19 nt, Artificial Sequence
  Description of Artificial Sequence: Synthetic oligonucleotide
uacuacuccuuggcacggc

SEQ ID NO: 1151242 - RNA, 19 nt, Artificial Sequence
  Description of Artificial Sequence: Synthetic oligonucleotide
aggguccaaacgugaagua

SEQ ID NO: 1151243 - RNA, 19 nt, Artificial Sequence
  Description of Artificial Sequence: Synthetic oligonucleotide
aggcuaugccuggggaauc

SEQ ID NO: 1151244 - RNA, 19 nt, Artificial Sequence
  Description of Artificial Sequence: Synthetic oligonucleotide
uguggcugccccgcuccag

SEQ ID NO: 1151245 - RNA, 19 nt, Artificial Sequence
  Description of Artificial Sequence: Synthetic oligonucleotide
ggaggauagcuguccccag

SEQ ID NO: 1151246 - RNA, 19 nt, Artificial Sequence
  Description of Artificial Sequence: Synthetic oligonucleotide
gguauggggcuccagggua

SEQ ID NO: 1151247 - RNA, 19 nt, Artificial Sequence
  Description of Artificial Sequence: Synthetic oligonucleotide
ggucucagccauccaugcc

SEQ ID NO: 1151248 - RNA, 19 nt, Artificial Sequence
  Description of Artificial Sequence: Synthetic oligonucleotide
gccggaaguccccacagca

SEQ ID NO: 1151249 - RNA, 19 nt, Artificial Sequence
  Description of Artificial Sequence: Synthetic oligonucleotide
gucgacagggucacugaca

SEQ ID NO: 1151250 - RNA, 19 nt, Artificial Sequence
  Description of Artificial Sequence: Synthetic oligonucleotide
guccagacauucucccgga

SEQ ID NO: 1151251 - RNA, 19 nt, Artificial Sequence
  Description of Artificial Sequence: Synthetic oligonucleotide
cuuagggagagcugcuuau

SEQ ID NO: 1151252 - RNA, 19 nt, Artificial Sequence
  Description of Artificial Sequence: Synthetic oligonucleotide
gugcguccgcaccugcacc

SEQ ID NO: 1151253 - RNA, 19 nt, Artificial Sequence
  Description of Artificial Sequence: Synthetic oligonucleotide
ggccugucgaauguucuug

SEQ ID NO: 1151254 - RNA, 19 nt, Artificial Sequence
  Description of Artificial Sequence: Synthetic oligonucleotide
gugcccgcugcgcagccgc

SEQ ID NO: 1151255 - RNA, 19 nt, Artificial Sequence
  Description of Artificial Sequence: Synthetic oligonucleotide
uuucgccggaaguccccac

SEQ ID NO: 1151256 - RNA, 19 nt, Artificial Sequence
  Description of Artificial Sequence: Synthetic oligonucleotide
ggugcguccgcaccugcac

SEQ ID NO: 1151257 - RNA, 19 nt, Artificial Sequence
  Description of Artificial Sequence: Synthetic oligonucleotide
uggcuaucaugcccaccau

SEQ ID NO: 1151258 - RNA, 19 nt, Artificial Sequence
  Description of Artificial Sequence: Synthetic oligonucleotide
auaguaggauggagguccu

SEQ ID NO: 1151259 - RNA, 19 nt, Artificial Sequence
  Description of Artificial Sequence: Synthetic oligonucleotide
ugaaggccugucgaauguu

SEQ ID NO: 1151260 - RNA, 19 nt, Artificial Sequence
  Description of Artificial Sequence: Synthetic oligonucleotide
aggccugucgaauguucuu

SEQ ID NO: 1151261 - RNA, 19 nt, Artificial Sequence
  Description of Artificial Sequence: Synthetic oligonucleotide
gguaaggaggcugaacaua

SEQ ID NO: 1151262 - RNA, 19 nt, Artificial Sequence
  Description of Artificial Sequence: Synthetic oligonucleotide
gggaggauagcugucccca

SEQ ID NO: 1151263 - RNA, 19 nt, Artificial Sequence
  Description of Artificial Sequence: Synthetic oligonucleotide
cagggugaugagggaacag

SEQ ID NO: 1151264 - RNA, 19 nt, Artificial Sequence
  Description of Artificial Sequence: Synthetic oligonucleotide
gacggucaggaucgacaga

SEQ ID NO: 1151265 - RNA, 19 nt, Artificial Sequence
  Description of Artificial Sequence: Synthetic oligonucleotide
ugacagcggggaaguccug

SEQ ID NO: 1151266 - RNA, 19 nt, Artificial Sequence
  Description of Artificial Sequence: Synthetic oligonucleotide
ggggaggauagcugucccc

SEQ ID NO: 1151267 - RNA, 19 nt, Artificial Sequence
  Description of Artificial Sequence: Synthetic oligonucleotide
ucagagccgcaaacacaua

SEQ ID NO: 1151268 - RNA, 19 nt, Artificial Sequence
  Description of Artificial Sequence: Synthetic oligonucleotide
agaggccggugucuacggu

SEQ ID NO: 1151269 - RNA, 19 nt, Artificial Sequence
  Description of Artificial Sequence: Synthetic oligonucleotide
acaagguuccagggaugcu

SEQ ID NO: 1151270 - RNA, 19 nt, Artificial Sequence
  Description of Artificial Sequence: Synthetic oligonucleotide
gggguacucuaagccaggg

SEQ ID NO: 1151271 - RNA, 19 nt, Artificial Sequence
  Description of Artificial Sequence: Synthetic oligonucleotide
ugauggccggugcguccgc

SEQ ID NO: 1151272 - RNA, 19 nt, Artificial Sequence
  Description of Artificial Sequence: Synthetic oligonucleotide
gacgugcacccucaccucu

SEQ ID NO: 1151273 - RNA, 19 nt, Artificial Sequence
  Description of Artificial Sequence: Synthetic oligonucleotide
agcgcccagugaggcauac

SEQ ID NO: 1151274 - RNA, 19 nt, Artificial Sequence
  Description of Artificial Sequence: Synthetic oligonucleotide
cacaggauauccaggguuu

SEQ ID NO: 1151275 - RNA, 19 nt, Artificial Sequence
  Description of Artificial Sequence: Synthetic oligonucleotide
gggacauggccucggguuc

SEQ ID NO: 1151276 - RNA, 19 nt, Artificial Sequence
  Description of Artificial Sequence: Synthetic oligonucleotide
uauggcccuuguggguagc

SEQ ID NO: 1151277 - RNA, 19 nt, Artificial Sequence
  Description of Artificial Sequence: Synthetic oligonucleotide
gucuguguacagguucaga

SEQ ID NO: 1151278 - RNA, 19 nt, Artificial Sequence
  Description of Artificial Sequence: Synthetic oligonucleotide
uggggauacccuggcugac

SEQ ID NO: 1151279 - RNA, 19 nt, Artificial Sequence
  Description of Artificial Sequence: Synthetic oligonucleotide
uugucaugccagggacaug

SEQ ID NO: 1151280 - RNA, 19 nt, Artificial Sequence
  Description of Artificial Sequence: Synthetic oligonucleotide
ggguuggggccccacagga

SEQ ID NO: 1151281 - RNA, 19 nt, Artificial Sequence
  Description of Artificial Sequence: Synthetic oligonucleotide
ccggaaguccccacagcag

SEQ ID NO: 1151282 - RNA, 19 nt, Artificial Sequence
  Description of Artificial Sequence: Synthetic oligonucleotide
accgugaagcagacagcug

SEQ ID NO: 1151283 - RNA, 19 nt, Artificial Sequence
  Description of Artificial Sequence: Synthetic oligonucleotide
gacagggcucaugcaacaa

SEQ ID NO: 1151284 - RNA, 19 nt, Artificial Sequence
  Description of Artificial Sequence: Synthetic oligonucleotide
gagcacgcccaugcacgag

SEQ ID NO: 1151285 - RNA, 19 nt, Artificial Sequence
  Description of Artificial Sequence: Synthetic oligonucleotide
gcagagcgcccagugaggc

SEQ ID NO: 1151286 - RNA, 19 nt, Artificial Sequence
  Description of Artificial Sequence: Synthetic oligonucleotide
cugccucuguguuguaaaa

SEQ ID NO: 1151287 - RNA, 19 nt, Artificial Sequence
  Description of Artificial Sequence: Synthetic oligonucleotide
cuacggugcccgcugcgca

SEQ ID NO: 1151288 - RNA, 19 nt, Artificial Sequence
  Description of Artificial Sequence: Synthetic oligonucleotide
gguauggcccuugugggua

SEQ ID NO: 1151289 - RNA, 19 nt, Artificial Sequence
  Description of Artificial Sequence: Synthetic oligonucleotide
gugaaguauuugcggugua

SEQ ID NO: 1151290 - RNA, 19 nt, Artificial Sequence
  Description of Artificial Sequence: Synthetic oligonucleotide
ccggugucuacggugcccg

SEQ ID NO: 1151291 - RNA, 19 nt, Artificial Sequence
  Description of Artificial Sequence: Synthetic oligonucleotide
agacauucucccggacaaa

SEQ ID NO: 1151292 - RNA, 19 nt, Artificial Sequence
  Description of Artificial Sequence: Synthetic oligonucleotide
ggaugcuuucgccggaagu

SEQ ID NO: 1151293 - RNA, 19 nt, Artificial Sequence
  Description of Artificial Sequence: Synthetic oligonucleotide
ggacagaaggugguacaga

SEQ ID NO: 1151294 - RNA, 19 nt, Artificial Sequence
  Description of Artificial Sequence: Synthetic oligonucleotide
gcgguuccggaugaagaug

SEQ ID NO: 1151295 - RNA, 19 nt, Artificial Sequence
  Description of Artificial Sequence: Synthetic oligonucleotide
ggauccuuuauuggaauuu

SEQ ID NO: 1151296 - RNA, 19 nt, Artificial Sequence
  Description of Artificial Sequence: Synthetic oligonucleotide
cuuucgccggaagucccca

SEQ ID NO: 1151297 - RNA, 19 nt, Artificial Sequence
  Description of Artificial Sequence: Synthetic oligonucleotide
gguccaaacgugaaguauu

SEQ ID NO: 1151298 - RNA, 19 nt, Artificial Sequence
  Description of Artificial Sequence: Synthetic oligonucleotide
gaaggggcucuguggguau

SEQ ID NO: 1151299 - RNA, 19 nt, Artificial Sequence
  Description of Artificial Sequence: Synthetic oligonucleotide
gggcucggaaggaccaugc

SEQ ID NO: 1151300 - RNA, 19 nt, Artificial Sequence
  Description of Artificial Sequence: Synthetic oligonucleotide
cugccccgcuccaggggag

SEQ ID NO: 1151301 - RNA, 19 nt, Artificial Sequence
  Description of Artificial Sequence: Synthetic oligonucleotide
gcuaugccuggggaaucag

SEQ ID NO: 1151302 - RNA, 19 nt, Artificial Sequence
  Description of Artificial Sequence: Synthetic oligonucleotide
ggagcacgcccaugcacga

SEQ ID NO: 1151303 - RNA, 19 nt, Artificial Sequence
  Description of Artificial Sequence: Synthetic oligonucleotide
cauagcgggucugcaugga

SEQ ID NO: 1151304 - RNA, 19 nt, Artificial Sequence
  Description of Artificial Sequence: Synthetic oligonucleotide
cagcuguggugaugcccac

SEQ ID NO: 1151305 - RNA, 19 nt, Artificial Sequence
  Description of Artificial Sequence: Synthetic oligonucleotide
gguguacauacacgagggu

SEQ ID NO: 1151306 - RNA, 19 nt, Artificial Sequence
  Description of Artificial Sequence: Synthetic oligonucleotide
ggggccccacaggauaucc

SEQ ID NO: 1151307 - RNA, 19 nt, Artificial Sequence
  Description of Artificial Sequence: Synthetic oligonucleotide
gcuuucgccggaagucccc

SEQ ID NO: 1151308 - RNA, 19 nt, Artificial Sequence
  Description of Artificial Sequence: Synthetic oligonucleotide
gaagagcagagcgcccagu

SEQ ID NO: 1151309 - RNA, 19 nt, Artificial Sequence
  Description of Artificial Sequence: Synthetic oligonucleotide
caugggucucagccaucca

SEQ ID NO: 1151310 - RNA, 19 nt, Artificial Sequence
  Description of Artificial Sequence: Synthetic oligonucleotide
gaagcacggauggcuuugu

SEQ ID NO: 1151311 - RNA, 19 nt, Artificial Sequence
  Description of Artificial Sequence: Synthetic oligonucleotide
cagagcgcccagugaggca

SEQ ID NO: 1151312 - RNA, 19 nt, Artificial Sequence
  Description of Artificial Sequence: Synthetic oligonucleotide
ccgcaaacacauacuccuc

SEQ ID NO: 1151313 - RNA, 19 nt, Artificial Sequence
  Description of Artificial Sequence: Synthetic oligonucleotide
gauggccggugcguccgca

SEQ ID NO: 1151314 - RNA, 19 nt, Artificial Sequence
  Description of Artificial Sequence: Synthetic oligonucleotide
guccaaacgugaaguauuu

SEQ ID NO: 1151315 - RNA, 19 nt, Artificial Sequence
  Description of Artificial Sequence: Synthetic oligonucleotide
cagggaugcuuucgccgga

SEQ ID NO: 1151316 - RNA, 19 nt, Artificial Sequence
  Description of Artificial Sequence: Synthetic oligonucleotide
uaguaggauggagguccuu

SEQ ID NO: 1151317 - RNA, 19 nt, Artificial Sequence
  Description of Artificial Sequence: Synthetic oligonucleotide
ggcuaugccuggggaauca

SEQ ID NO: 1151318 - RNA, 19 nt, Artificial Sequence
  Description of Artificial Sequence: Synthetic oligonucleotide
ccgcgcgcguugauggccg

SEQ ID NO: 1151319 - RNA, 19 nt, Artificial Sequence
  Description of Artificial Sequence: Synthetic oligonucleotide
guacagguucagagccgca

SEQ ID NO: 1151320 - RNA, 19 nt, Artificial Sequence
  Description of Artificial Sequence: Synthetic oligonucleotide
gugggacauggccucgggu

SEQ ID NO: 1151321 - RNA, 19 nt, Artificial Sequence
  Description of Artificial Sequence: Synthetic oligonucleotide
gcgcguugauggccggugc

SEQ ID NO: 1151322 - RNA, 19 nt, Artificial Sequence
  Description of Artificial Sequence: Synthetic oligonucleotide
caccucuuagaguguuccu

SEQ ID NO: 1151323 - RNA, 19 nt, Artificial Sequence
  Description of Artificial Sequence: Synthetic oligonucleotide
gccggugucuacggugccc

SEQ ID NO: 1151324 - RNA, 19 nt, Artificial Sequence
  Description of Artificial Sequence: Synthetic oligonucleotide
gccccacccugcaaguccc

SEQ ID NO: 1151325 - RNA, 19 nt, Artificial Sequence
  Description of Artificial Sequence: Synthetic oligonucleotide
ggguauggcccuugugggu

SEQ ID NO: 1151326 - RNA, 19 nt, Artificial Sequence
  Description of Artificial Sequence: Synthetic oligonucleotide
gccugucgaauguucuugu

SEQ ID NO: 1151327 - RNA, 19 nt, Artificial Sequence
  Description of Artificial Sequence: Synthetic oligonucleotide
gcugaacauagggaggcau

SEQ ID NO: 1151328 - RNA, 19 nt, Artificial Sequence
  Description of Artificial Sequence: Synthetic oligonucleotide
gccgcgcgcguugauggcc

SEQ ID NO: 1151329 - RNA, 19 nt, Artificial Sequence
  Description of Artificial Sequence: Synthetic oligonucleotide
gguuccggaugaagaugca

SEQ ID NO: 1151330 - RNA, 19 nt, Artificial Sequence
  Description of Artificial Sequence: Synthetic oligonucleotide
acgugcacccucaccucuu

SEQ ID NO: 1151331 - RNA, 19 nt, Artificial Sequence
  Description of Artificial Sequence: Synthetic oligonucleotide
cacgagggugagaggggcu

SEQ ID NO: 1151332 - RNA, 19 nt, Artificial Sequence
  Description of Artificial Sequence: Synthetic oligonucleotide
gaccaccgugaagcagaca

SEQ ID NO: 1151333 - RNA, 19 nt, Artificial Sequence
  Description of Artificial Sequence: Synthetic oligonucleotide
ccaccauguaggacaagcu

SEQ ID NO: 1151334 - RNA, 19 nt, Artificial Sequence
  Description of Artificial Sequence: Synthetic oligonucleotide
ggccggugucuacggugcc

SEQ ID NO: 1151335 - RNA, 19 nt, Artificial Sequence
  Description of Artificial Sequence: Synthetic oligonucleotide
gcguccgcaccugcacccg

SEQ ID NO: 1151336 - RNA, 19 nt, Artificial Sequence
  Description of Artificial Sequence: Synthetic oligonucleotide
gcacaagaaugaagcccca

SEQ ID NO: 1151337 - RNA, 19 nt, Artificial Sequence
  Description of Artificial Sequence: Synthetic oligonucleotide
ggugucuacggugcccgcu

SEQ ID NO: 1151338 - RNA, 19 nt, Artificial Sequence
  Description of Artificial Sequence: Synthetic oligonucleotide
agcugacggucaggaucga

SEQ ID NO: 1151339 - RNA, 19 nt, Artificial Sequence
  Description of Artificial Sequence: Synthetic oligonucleotide
cuguggguauggcccuugu

SEQ ID NO: 1151340 - RNA, 19 nt, Artificial Sequence
  Description of Artificial Sequence: Synthetic oligonucleotide
ggcucggaaggaccaugcu

SEQ ID NO: 1151341 - RNA, 19 nt, Artificial Sequence
  Description of Artificial Sequence: Synthetic oligonucleotide
cgugaaguauuugcggugu

SEQ ID NO: 1151342 - RNA, 19 nt, Artificial Sequence
  Description of Artificial Sequence: Synthetic oligonucleotide
ggacauggccucggguucu

SEQ ID NO: 1151343 - RNA, 19 nt, Artificial Sequence
  Description of Artificial Sequence: Synthetic oligonucleotide
gggaagcacggauggcuuu

SEQ ID NO: 1151344 - RNA, 19 nt, Artificial Sequence
  Description of Artificial Sequence: Synthetic oligonucleotide
gagggcucggaaggaccau

SEQ ID NO: 1151345 - RNA, 19 nt, Artificial Sequence
  Description of Artificial Sequence: Synthetic oligonucleotide
gccggugcguccgcaccug

SEQ ID NO: 1151346 - RNA, 19 nt, Artificial Sequence
  Description of Artificial Sequence: Synthetic oligonucleotide
guccgcaccugcacccgcu

SEQ ID NO: 1151347 - RNA, 19 nt, Artificial Sequence
  Description of Artificial Sequence: Synthetic oligonucleotide
ccggugcguccgcaccugc

SEQ ID NO: 1151348 - RNA, 19 nt, Artificial Sequence
  Description of Artificial Sequence: Synthetic oligonucleotide
cguccgcaccugcacccgc

SEQ ID NO: 1151349 - RNA, 19 nt, Artificial Sequence
  Description of Artificial Sequence: Synthetic oligonucleotide
gagcgcccagugaggcaua

SEQ ID NO: 1151350 - RNA, 19 nt, Artificial Sequence
  Description of Artificial Sequence: Synthetic oligonucleotide
cagcggggaaguccugguu

SEQ ID NO: 1151351 - RNA, 19 nt, Artificial Sequence
  Description of Artificial Sequence: Synthetic oligonucleotide
ggguagccuccuugagggu

SEQ ID NO: 1151352 - RNA, 19 nt, Artificial Sequence
  Description of Artificial Sequence: Synthetic oligonucleotide
cggugucuacggugcccgc

SEQ ID NO: 1151353 - RNA, 19 nt, Artificial Sequence
  Description of Artificial Sequence: Synthetic oligonucleotide
gcccaccauguaggacaag

SEQ ID NO: 1151354 - RNA, 19 nt, Artificial Sequence
  Description of Artificial Sequence: Synthetic oligonucleotide
gcggugagccaggguccug

SEQ ID NO: 1151355 - RNA, 19 nt, Artificial Sequence
  Description of Artificial Sequence: Synthetic oligonucleotide
cgcgcgcguugauggccgg

SEQ ID NO: 1151356 - RNA, 19 nt, Artificial Sequence
  Description of Artificial Sequence: Synthetic oligonucleotide
gcacgcccaugcacgaggu

SEQ ID NO: 1151357 - RNA, 19 nt, Artificial Sequence
  Description of Artificial Sequence: Synthetic oligonucleotide
ccaggguaaggaggcugaa

SEQ ID NO: 1151358 - RNA, 19 nt, Artificial Sequence
  Description of Artificial Sequence: Synthetic oligonucleotide
cggugcguccgcaccugca

SEQ ID NO: 1151359 - RNA, 19 nt, Artificial Sequence
  Description of Artificial Sequence: Synthetic oligonucleotide
gcgcccagugaggcauaca

SEQ ID NO: 1151360 - RNA, 19 nt, Artificial Sequence
  Description of Artificial Sequence: Synthetic oligonucleotide
ccucaccucuuagaguguu

SEQ ID NO: 1151361 - RNA, 19 nt, Artificial Sequence
  Description of Artificial Sequence: Synthetic oligonucleotide
cacagucgacagggucacu

SEQ ID NO: 1151362 - RNA, 19 nt, Artificial Sequence
  Description of Artificial Sequence: Synthetic oligonucleotide
cgugcacccucaccucuua

SEQ ID NO: 1151363 - RNA, 19 nt, Artificial Sequence
  Description of Artificial Sequence: Synthetic oligonucleotide
cccucaccucuuagagugu

SEQ ID NO: 1151364 - RNA, 19 nt, Artificial Sequence
  Description of Artificial Sequence: Synthetic oligonucleotide
gcgcgcguugauggccggu

SEQ ID NO: 1151365 - RNA, 19 nt, Artificial Sequence
  Description of Artificial Sequence: Synthetic oligonucleotide
cgcagccgcgcgcguugau

SEQ ID NO: 1151366 - RNA, 19 nt, Artificial Sequence
  Description of Artificial Sequence: Synthetic oligonucleotide
auaaguaucagauaugugc

SEQ ID NO: 1151367 - RNA, 19 nt, Artificial Sequence
  Description of Artificial Sequence: Synthetic oligonucleotide
uuugaagugagauagaugg

SEQ ID NO: 1151368 - RNA, 19 nt, Artificial Sequence
  Description of Artificial Sequence: Synthetic oligonucleotide
aaaauauguauucaguagg

SEQ ID NO: 1151369 - RNA, 19 nt, Artificial Sequence
  Description of Artificial Sequence: Synthetic oligonucleotide
uucaauugaagguugauag

SEQ ID NO: 1151370 - RNA, 19 nt, Artificial Sequence
  Description of Artificial Sequence: Synthetic oligonucleotide
aaaacaggugaacuaacac

SEQ ID NO: 1151371 - RNA, 19 nt, Artificial Sequence
  Description of Artificial Sequence: Synthetic oligonucleotide
aaagucgaggguuaaacag

SEQ ID NO: 1151372 - RNA, 19 nt, Artificial Sequence
  Description of Artificial Sequence: Synthetic oligonucleotide
uuauauaugguuaaccauc

SEQ ID NO: 1151373 - RNA, 19 nt, Artificial Sequence
  Description of Artificial Sequence: Synthetic oligonucleotide
aaauauguauucaguaggc

SEQ ID NO: 1151374 - RNA, 19 nt, Artificial Sequence
  Description of Artificial Sequence: Synthetic oligonucleotide
uacuauaaguaucagauau

SEQ ID NO: 1151375 - RNA, 19 nt, Artificial Sequence
  Description of Artificial Sequence: Synthetic oligonucleotide
uuauaaaucacuccacugu

SEQ ID NO: 1151376 - RNA, 19 nt, Artificial Sequence
  Description of Artificial Sequence: Synthetic oligonucleotide
uguuauauaugguuaacca

SEQ ID NO: 1151377 - RNA, 19 nt, Artificial Sequence
  Description of Artificial Sequence: Synthetic oligonucleotide
auggaauuaacucucugac

SEQ ID NO: 1151378 - RNA, 19 nt, Artificial Sequence
  Description of Artificial Sequence: Synthetic oligonucleotide
aauggaauuaacucucuga

SEQ ID NO: 1151379 - RNA, 19 nt, Artificial Sequence
  Description of Artificial Sequence: Synthetic oligonucleotide
agaauugaagcagucaggc

SEQ ID NO: 1151380 - RNA, 19 nt, Artificial Sequence
  Description of Artificial Sequence: Synthetic oligonucleotide
aagugagauagauggaggg

SEQ ID NO: 1151381 - RNA, 19 nt, Artificial Sequence
  Description of Artificial Sequence: Synthetic oligonucleotide
uuaaacagaacuuauccau

SEQ ID NO: 1151382 - RNA, 19 nt, Artificial Sequence
  Description of Artificial Sequence: Synthetic oligonucleotide
agaaauuagaguuucugga

SEQ ID NO: 1151383 - RNA, 19 nt, Artificial Sequence
  Description of Artificial Sequence: Synthetic oligonucleotide
aguuucgucagggugaugc

SEQ ID NO: 1151384 - RNA, 19 nt, Artificial Sequence
  Description of Artificial Sequence: Synthetic oligonucleotide
agaacuuauccauauaaca

SEQ ID NO: 1151385 - RNA, 19 nt, Artificial Sequence
  Description of Artificial Sequence: Synthetic oligonucleotide
cauauaacagaauuacuac

SEQ ID NO: 1151386 - RNA, 19 nt, Artificial Sequence
  Description of Artificial Sequence: Synthetic oligonucleotide
gaacuuauccauauaacag

SEQ ID NO: 1151387 - RNA, 19 nt, Artificial Sequence
  Description of Artificial Sequence: Synthetic oligonucleotide
ucuuaguaacuuaauguug

SEQ ID NO: 1151388 - RNA, 19 nt, Artificial Sequence
  Description of Artificial Sequence: Synthetic oligonucleotide
uaaauugccggucuaguga

SEQ ID NO: 1151389 - RNA, 19 nt, Artificial Sequence
  Description of Artificial Sequence: Synthetic oligonucleotide
uuuaugucuaauaagucuu

SEQ ID NO: 1151390 - RNA, 19 nt, Artificial Sequence
  Description of Artificial Sequence: Synthetic oligonucleotide
aauucuaaauugccggucu

SEQ ID NO: 1151391 - RNA, 19 nt, Artificial Sequence
  Description of Artificial Sequence: Synthetic oligonucleotide
uuaaaguuagaugagcaga

SEQ ID NO: 1151392 - RNA, 19 nt, Artificial Sequence
  Description of Artificial Sequence: Synthetic oligonucleotide
ucgaggguuaaacagaacu

SEQ ID NO: 1151393 - RNA, 19 nt, Artificial Sequence
  Description of Artificial Sequence: Synthetic oligonucleotide
uaccaugauaacuucauca

SEQ ID NO: 1151394 - RNA, 19 nt, Artificial Sequence
  Description of Artificial Sequence: Synthetic oligonucleotide
uauaacagaauuacuacuu

SEQ ID NO: 1151395 - RNA, 19 nt, Artificial Sequence
  Description of Artificial Sequence: Synthetic oligonucleotide
aaauugccggucuagugag

SEQ ID NO: 1151396 - RNA, 19 nt, Artificial Sequence
  Description of Artificial Sequence: Synthetic oligonucleotide
ugaacuaacacuagcuggu

SEQ ID NO: 1151397 - RNA, 19 nt, Artificial Sequence
  Description of Artificial Sequence: Synthetic oligonucleotide
ugagguauagugaaagccu

SEQ ID NO: 1151398 - RNA, 19 nt, Artificial Sequence
  Description of Artificial Sequence: Synthetic oligonucleotide
uauguauucaguaggcccu

SEQ ID NO: 1151399 - RNA, 19 nt, Artificial Sequence
  Description of Artificial Sequence: Synthetic oligonucleotide
auaugguuaaccaucagag

SEQ ID NO: 1151400 - RNA, 19 nt, Artificial Sequence
  Description of Artificial Sequence: Synthetic oligonucleotide
gugaacuaacacuagcugg

SEQ ID NO: 1151401 - RNA, 19 nt, Artificial Sequence
  Description of Artificial Sequence: Synthetic oligonucleotide
uaaguauaauuccauggcu

SEQ ID NO: 1151402 - RNA, 19 nt, Artificial Sequence
  Description of Artificial Sequence: Synthetic oligonucleotide
auaacagaauuacuacuuc

SEQ ID NO: 1151403 - RNA, 19 nt, Artificial Sequence
  Description of Artificial Sequence: Synthetic oligonucleotide
ucaucuuuuguccugccca

SEQ ID NO: 1151404 - RNA, 19 nt, Artificial Sequence
  Description of Artificial Sequence: Synthetic oligonucleotide
uuagaagcaagcugcaaca

SEQ ID NO: 1151405 - RNA, 19 nt, Artificial Sequence
  Description of Artificial Sequence: Synthetic oligonucleotide
uggaauacugaguaaguga

SEQ ID NO: 1151406 - RNA, 19 nt, Artificial Sequence
  Description of Artificial Sequence: Synthetic oligonucleotide
caccaaacgcuuuaaaugc

SEQ ID NO: 1151407 - RNA, 19 nt, Artificial Sequence
  Description of Artificial Sequence: Synthetic oligonucleotide
aguauaauuccauggcuug

SEQ ID NO: 1151408 - RNA, 19 nt, Artificial Sequence
  Description of Artificial Sequence: Synthetic oligonucleotide
uaaaguuagaugagcagaa

SEQ ID NO: 1151409 - RNA, 19 nt, Artificial Sequence
  Description of Artificial Sequence: Synthetic oligonucleotide
aaugccgggagguaggagu

SEQ ID NO: 1151410 - RNA, 19 nt, Artificial Sequence
  Description of Artificial Sequence: Synthetic oligonucleotide
aaaagucgaggguuaaaca

SEQ ID NO: 1151411 - RNA, 19 nt, Artificial Sequence
  Description of Artificial Sequence: Synthetic oligonucleotide
auagugaaagccucuaaca

SEQ ID NO: 1151412 - RNA, 19 nt, Artificial Sequence
  Description of Artificial Sequence: Synthetic oligonucleotide
uuuaaaugccgggagguag

SEQ ID NO: 1151413 - RNA, 19 nt, Artificial Sequence
  Description of Artificial Sequence: Synthetic oligonucleotide
auuagauaggagcagguau

SEQ ID NO: 1151414 - RNA, 19 nt, Artificial Sequence
  Description of Artificial Sequence: Synthetic oligonucleotide
cagauaugugccuaagacg

SEQ ID NO: 1151415 - RNA, 19 nt, Artificial Sequence
  Description of Artificial Sequence: Synthetic oligonucleotide
uuagaugagcagaaucgcc

SEQ ID NO: 1151416 - RNA, 19 nt, Artificial Sequence
  Description of Artificial Sequence: Synthetic oligonucleotide
ugaguaagugaccagcagu

SEQ ID NO: 1151417 - RNA, 19 nt, Artificial Sequence
  Description of Artificial Sequence: Synthetic oligonucleotide
ugauuugucccaagaagug

SEQ ID NO: 1151418 - RNA, 19 nt, Artificial Sequence
  Description of Artificial Sequence: Synthetic oligonucleotide
agauaugugccuaagacgu

SEQ ID NO: 1151419 - RNA, 19 nt, Artificial Sequence
  Description of Artificial Sequence: Synthetic oligonucleotide
ugucuaauaagucuuuauu

SEQ ID NO: 1151420 - RNA, 19 nt, Artificial Sequence
  Description of Artificial Sequence: Synthetic oligonucleotide
acuuauaaaucacuccacu

SEQ ID NO: 1151421 - RNA, 19 nt, Artificial Sequence
  Description of Artificial Sequence: Synthetic oligonucleotide
ucauagugcguccgggugg

SEQ ID NO: 1151422 - RNA, 19 nt, Artificial Sequence
  Description of Artificial Sequence: Synthetic oligonucleotide
ugguuagcgucacaaaggc

SEQ ID NO: 1151423 - RNA, 19 nt, Artificial Sequence
  Description of Artificial Sequence: Synthetic oligonucleotide
aacuaacacuagcugguag

SEQ ID NO: 1151424 - RNA, 19 nt, Artificial Sequence
  Description of Artificial Sequence: Synthetic oligonucleotide
agcagaaucgccacugucc

SEQ ID NO: 1151425 - RNA, 19 nt, Artificial Sequence
  Description of Artificial Sequence: Synthetic oligonucleotide
ugguuauauguuucaauug

SEQ ID NO: 1151426 - RNA, 19 nt, Artificial Sequence
  Description of Artificial Sequence: Synthetic oligonucleotide
uuguuauauaugguuaacc

SEQ ID NO: 1151427 - RNA, 19 nt, Artificial Sequence
  Description of Artificial Sequence: Synthetic oligonucleotide
uccuuugcuguuuuaaaga

SEQ ID NO: 1151428 - RNA, 19 nt, Artificial Sequence
  Description of Artificial Sequence: Synthetic oligonucleotide
uauaaguaucagauaugug

SEQ ID NO: 1151429 - RNA, 19 nt, Artificial Sequence
  Description of Artificial Sequence: Synthetic oligonucleotide
ucccauguaaucagccugg

SEQ ID NO: 1151430 - RNA, 19 nt, Artificial Sequence
  Description of Artificial Sequence: Synthetic oligonucleotide
aucuuaguaacuuaauguu

SEQ ID NO: 1151431 - RNA, 19 nt, Artificial Sequence
  Description of Artificial Sequence: Synthetic oligonucleotide
caauugaagguugauagac

SEQ ID NO: 1151432 - RNA, 19 nt, Artificial Sequence
  Description of Artificial Sequence: Synthetic oligonucleotide
ucuggugagguauagugaa

SEQ ID NO: 1151433 - RNA, 19 nt, Artificial Sequence
  Description of Artificial Sequence: Synthetic oligonucleotide
gugaguacaaccauccucc

SEQ ID NO: 1151434 - RNA, 19 nt, Artificial Sequence
  Description of Artificial Sequence: Synthetic oligonucleotide
agccucuaacaacugaaac

SEQ ID NO: 1151435 - RNA, 19 nt, Artificial Sequence
  Description of Artificial Sequence: Synthetic oligonucleotide
aaucacuccacuguguuaa

SEQ ID NO: 1151436 - RNA, 19 nt, Artificial Sequence
  Description of Artificial Sequence: Synthetic oligonucleotide
uaggaguauauggaaaugc

SEQ ID NO: 1151437 - RNA, 19 nt, Artificial Sequence
  Description of Artificial Sequence: Synthetic oligonucleotide
uagugaaagccucuaacaa

SEQ ID NO: 1151438 - RNA, 19 nt, Artificial Sequence
  Description of Artificial Sequence: Synthetic oligonucleotide
auuuguuauauaugguuaa

SEQ ID NO: 1151439 - RNA, 19 nt, Artificial Sequence
  Description of Artificial Sequence: Synthetic oligonucleotide
acaacugaaacagacuuca

SEQ ID NO: 1151440 - RNA, 19 nt, Artificial Sequence
  Description of Artificial Sequence: Synthetic oligonucleotide
gguauaacaagcaaauaug

SEQ ID NO: 1151441 - RNA, 19 nt, Artificial Sequence
  Description of Artificial Sequence: Synthetic oligonucleotide
gugcauagaaaacagguga

SEQ ID NO: 1151442 - RNA, 19 nt, Artificial Sequence
  Description of Artificial Sequence: Synthetic oligonucleotide
cuugagauucacauuugac

SEQ ID NO: 1151443 - RNA, 19 nt, Artificial Sequence
  Description of Artificial Sequence: Synthetic oligonucleotide
acuaacacuagcugguaga

SEQ ID NO: 1151444 - RNA, 19 nt, Artificial Sequence
  Description of Artificial Sequence: Synthetic oligonucleotide
aagacguggauguguccac

SEQ ID NO: 1151445 - RNA, 19 nt, Artificial Sequence
  Description of Artificial Sequence: Synthetic oligonucleotide
cauuaaaguuagaugagca

SEQ ID NO: 1151446 - RNA, 19 nt, Artificial Sequence
  Description of Artificial Sequence: Synthetic oligonucleotide
uugauagacaaagacucca

SEQ ID NO: 1151447 - RNA, 19 nt, Artificial Sequence
  Description of Artificial Sequence: Synthetic oligonucleotide
gguucagaaacucugggug

SEQ ID NO: 1151448 - RNA, 19 nt, Artificial Sequence
  Description of Artificial Sequence: Synthetic oligonucleotide
ucugucauagugcguccgg

SEQ ID NO: 1151449 - RNA, 19 nt, Artificial Sequence
  Description of Artificial Sequence: Synthetic oligonucleotide
uuguagguaagugucaagu

SEQ ID NO: 1151450 - RNA, 19 nt, Artificial Sequence
  Description of Artificial Sequence: Synthetic oligonucleotide
auaugugccuaagacgugg

SEQ ID NO: 1151451 - RNA, 19 nt, Artificial Sequence
  Description of Artificial Sequence: Synthetic oligonucleotide
uccauauaacagaauuacu

SEQ ID NO: 1151452 - RNA, 19 nt, Artificial Sequence
  Description of Artificial Sequence: Synthetic oligonucleotide
aggacauagacgguugugg

SEQ ID NO: 1151453 - RNA, 19 nt, Artificial Sequence
  Description of Artificial Sequence: Synthetic oligonucleotide
auaucugucguugcccagc

SEQ ID NO: 1151454 - RNA, 19 nt, Artificial Sequence
  Description of Artificial Sequence: Synthetic oligonucleotide
cucguggugaagauguccc

SEQ ID NO: 1151455 - RNA, 19 nt, Artificial Sequence
  Description of Artificial Sequence: Synthetic oligonucleotide
aaguaucagauaugugccu

SEQ ID NO: 1151456 - RNA, 19 nt, Artificial Sequence
  Description of Artificial Sequence: Synthetic oligonucleotide
uaugguuaaccaucagaga

SEQ ID NO: 1151457 - RNA, 19 nt, Artificial Sequence
  Description of Artificial Sequence: Synthetic oligonucleotide
cagaauuacuacuucauaa

SEQ ID NO: 1151458 - RNA, 19 nt, Artificial Sequence
  Description of Artificial Sequence: Synthetic oligonucleotide
uaagacguggaugugucca

SEQ ID NO: 1151459 - RNA, 19 nt, Artificial Sequence
  Description of Artificial Sequence: Synthetic oligonucleotide
uggaauuaacucucugaca

SEQ ID NO: 1151460 - RNA, 19 nt, Artificial Sequence
  Description of Artificial Sequence: Synthetic oligonucleotide
cuaaauugccggucuagug

SEQ ID NO: 1151461 - RNA, 19 nt, Artificial Sequence
  Description of Artificial Sequence: Synthetic oligonucleotide
uuggaauacugaguaagug

SEQ ID NO: 1151462 - RNA, 19 nt, Artificial Sequence
  Description of Artificial Sequence: Synthetic oligonucleotide
cagaacuuauccauauaac

SEQ ID NO: 1151463 - RNA, 19 nt, Artificial Sequence
  Description of Artificial Sequence: Synthetic oligonucleotide
aaucgccacuguccaagac

SEQ ID NO: 1151464 - RNA, 19 nt, Artificial Sequence
  Description of Artificial Sequence: Synthetic oligonucleotide
ugugccuaagacguggaug

SEQ ID NO: 1151465 - RNA, 19 nt, Artificial Sequence
  Description of Artificial Sequence: Synthetic oligonucleotide
uuuguuauauaugguuaac

SEQ ID NO: 1151466 - RNA, 19 nt, Artificial Sequence
  Description of Artificial Sequence: Synthetic oligonucleotide
gcaccaaacgcuuuaaaug

SEQ ID NO: 1151467 - RNA, 19 nt, Artificial Sequence
  Description of Artificial Sequence: Synthetic oligonucleotide
caucuuaguaacuuaaugu

SEQ ID NO: 1151468 - RNA, 19 nt, Artificial Sequence
  Description of Artificial Sequence: Synthetic oligonucleotide
agguuauacacaaauggca

SEQ ID NO: 1151469 - RNA, 19 nt, Artificial Sequence
  Description of Artificial Sequence: Synthetic oligonucleotide
gugguuagcgucacaaagg

SEQ ID NO: 1151470 - RNA, 19 nt, Artificial Sequence
  Description of Artificial Sequence: Synthetic oligonucleotide
aauugaagguugauagaca

SEQ ID NO: 1151471 - RNA, 19 nt, Artificial Sequence
  Description of Artificial Sequence: Synthetic oligonucleotide
aaguauaauuccauggcuu

SEQ ID NO: 1151472 - RNA, 19 nt, Artificial Sequence
  Description of Artificial Sequence: Synthetic oligonucleotide
uguguccacggggaaaugg

SEQ ID NO: 1151473 - RNA, 19 nt, Artificial Sequence
  Description of Artificial Sequence: Synthetic oligonucleotide
acauagacgguuguggugu

SEQ ID NO: 1151474 - RNA, 19 nt, Artificial Sequence
  Description of Artificial Sequence: Synthetic oligonucleotide
uuuggggacuguaaguaua

SEQ ID NO: 1151475 - RNA, 19 nt, Artificial Sequence
  Description of Artificial Sequence: Synthetic oligonucleotide
auaugggacaaugucauau

SEQ ID NO: 1151476 - RNA, 19 nt, Artificial Sequence
  Description of Artificial Sequence: Synthetic oligonucleotide
guuagaugagcagaaucgc

SEQ ID NO: 1151477 - RNA, 19 nt, Artificial Sequence
  Description of Artificial Sequence: Synthetic oligonucleotide
uugccauauauguuggcaa

SEQ ID NO: 1151478 - RNA, 19 nt, Artificial Sequence
  Description of Artificial Sequence: Synthetic oligonucleotide
agcaguggaguuucgucag

SEQ ID NO: 1151479 - RNA, 19 nt, Artificial Sequence
  Description of Artificial Sequence: Synthetic oligonucleotide
ugagggguauaacaagcaa

SEQ ID NO: 1151480 - RNA, 19 nt, Artificial Sequence
  Description of Artificial Sequence: Synthetic oligonucleotide
caccaucaaaacuaccuug

SEQ ID NO: 1151481 - RNA, 19 nt, Artificial Sequence
  Description of Artificial Sequence: Synthetic oligonucleotide
gggacuguaaguauaauuc

SEQ ID NO: 1151482 - RNA, 19 nt, Artificial Sequence
  Description of Artificial Sequence: Synthetic oligonucleotide
gccacuaaaauauguauuc

SEQ ID NO: 1151483 - RNA, 19 nt, Artificial Sequence
  Description of Artificial Sequence: Synthetic oligonucleotide
ucuaaauugccggucuagu

SEQ ID NO: 1151484 - RNA, 19 nt, Artificial Sequence
  Description of Artificial Sequence: Synthetic oligonucleotide
cuacuucauaacaucugac

SEQ ID NO: 1151485 - RNA, 19 nt, Artificial Sequence
  Description of Artificial Sequence: Synthetic oligonucleotide
ccucuaacaacugaaacag

SEQ ID NO: 1151486 - RNA, 19 nt, Artificial Sequence
  Description of Artificial Sequence: Synthetic oligonucleotide
agguugauagacaaagacu

SEQ ID NO: 1151487 - RNA, 19 nt, Artificial Sequence
  Description of Artificial Sequence: Synthetic oligonucleotide
acgcuuuaaaugccgggag

SEQ ID NO: 1151488 - RNA, 19 nt, Artificial Sequence
  Description of Artificial Sequence: Synthetic oligonucleotide
gacguggauguguccacgg

SEQ ID NO: 1151489 - RNA, 19 nt, Artificial Sequence
  Description of Artificial Sequence: Synthetic oligonucleotide
accaaacgcuuuaaaugcc

SEQ ID NO: 1151490 - RNA, 19 nt, Artificial Sequence
  Description of Artificial Sequence: Synthetic oligonucleotide
acuauaaguaucagauaug

SEQ ID NO: 1151491 - RNA, 19 nt, Artificial Sequence
  Description of Artificial Sequence: Synthetic oligonucleotide
aagucgaggguuaaacaga

SEQ ID NO: 1151492 - RNA, 19 nt, Artificial Sequence
  Description of Artificial Sequence: Synthetic oligonucleotide
uaucugucguugcccagcc

SEQ ID NO: 1151493 - RNA, 19 nt, Artificial Sequence
  Description of Artificial Sequence: Synthetic oligonucleotide
uuaugucuaauaagucuuu

SEQ ID NO: 1151494 - RNA, 19 nt, Artificial Sequence
  Description of Artificial Sequence: Synthetic oligonucleotide
uggugaagaugucccacca

SEQ ID NO: 1151495 - RNA, 19 nt, Artificial Sequence
  Description of Artificial Sequence: Synthetic oligonucleotide
gacuuauaaaucacuccac

SEQ ID NO: 1151496 - RNA, 19 nt, Artificial Sequence
  Description of Artificial Sequence: Synthetic oligonucleotide
auauauguuggcaacugaa

SEQ ID NO: 1151497 - RNA, 19 nt, Artificial Sequence
  Description of Artificial Sequence: Synthetic oligonucleotide
gaaagccucuaacaacuga

SEQ ID NO: 1151498 - RNA, 19 nt, Artificial Sequence
  Description of Artificial Sequence: Synthetic oligonucleotide
gaauacugaguaagugacc

SEQ ID NO: 1151499 - RNA, 19 nt, Artificial Sequence
  Description of Artificial Sequence: Synthetic oligonucleotide
aucagauaugugccuaaga

SEQ ID NO: 1151500 - RNA, 19 nt, Artificial Sequence
  Description of Artificial Sequence: Synthetic oligonucleotide
uaucagauaugugccuaag

SEQ ID NO: 1151501 - RNA, 19 nt, Artificial Sequence
  Description of Artificial Sequence: Synthetic oligonucleotide
aguaagugaccagcagugg

SEQ ID NO: 1151502 - RNA, 19 nt, Artificial Sequence
  Description of Artificial Sequence: Synthetic oligonucleotide
uucauaacaucugaccauu

SEQ ID NO: 1151503 - RNA, 19 nt, Artificial Sequence
  Description of Artificial Sequence: Synthetic oligonucleotide
auggcagugcuucuauugu

SEQ ID NO: 1151504 - RNA, 19 nt, Artificial Sequence
  Description of Artificial Sequence: Synthetic oligonucleotide
gguuaaccaucagagagag

SEQ ID NO: 1151505 - RNA, 19 nt, Artificial Sequence
  Description of Artificial Sequence: Synthetic oligonucleotide
guuauauaugguuaaccau

SEQ ID NO: 1151506 - RNA, 19 nt, Artificial Sequence
  Description of Artificial Sequence: Synthetic oligonucleotide
aacacucguggugaagaug

SEQ ID NO: 1151507 - RNA, 19 nt, Artificial Sequence
  Description of Artificial Sequence: Synthetic oligonucleotide
auaggcaucguuugugguu

SEQ ID NO: 1151508 - RNA, 19 nt, Artificial Sequence
  Description of Artificial Sequence: Synthetic oligonucleotide
ggugaguacaaccauccuc

SEQ ID NO: 1151509 - RNA, 19 nt, Artificial Sequence
  Description of Artificial Sequence: Synthetic oligonucleotide
aaacacucguggugaagau

SEQ ID NO: 1151510 - RNA, 19 nt, Artificial Sequence
  Description of Artificial Sequence: Synthetic oligonucleotide
uugcccagccacuaaaaua

SEQ ID NO: 1151511 - RNA, 19 nt, Artificial Sequence
  Description of Artificial Sequence: Synthetic oligonucleotide
cuaacacuagcugguagac

SEQ ID NO: 1151512 - RNA, 19 nt, Artificial Sequence
  Description of Artificial Sequence: Synthetic oligonucleotide
acuuauccauauaacagaa

SEQ ID NO: 1151513 - RNA, 19 nt, Artificial Sequence
  Description of Artificial Sequence: Synthetic oligonucleotide
gucauagugcguccgggug

SEQ ID NO: 1151514 - RNA, 19 nt, Artificial Sequence
  Description of Artificial Sequence: Synthetic oligonucleotide
uuccaucauuagauaggag

SEQ ID NO: 1151515 - RNA, 19 nt, Artificial Sequence
  Description of Artificial Sequence: Synthetic oligonucleotide
ugucauagugcguccgggu

SEQ ID NO: 1151516 - RNA, 19 nt, Artificial Sequence
  Description of Artificial Sequence: Synthetic oligonucleotide
uaugugccuaagacgugga

SEQ ID NO: 1151517 - RNA, 19 nt, Artificial Sequence
  Description of Artificial Sequence: Synthetic oligonucleotide
uaugggacaaugucauauu

SEQ ID NO: 1151518 - RNA, 19 nt, Artificial Sequence
  Description of Artificial Sequence: Synthetic oligonucleotide
agggguauaacaagcaaau

SEQ ID NO: 1151519 - RNA, 19 nt, Artificial Sequence
  Description of Artificial Sequence: Synthetic oligonucleotide
auagauggagggucaaguu

SEQ ID NO: 1151520 - RNA, 19 nt, Artificial Sequence
  Description of Artificial Sequence: Synthetic oligonucleotide
aggaguauauggaaaugcu

SEQ ID NO: 1151521 - RNA, 19 nt, Artificial Sequence
  Description of Artificial Sequence: Synthetic oligonucleotide
gaguacaaccauccuccug

SEQ ID NO: 1151522 - RNA, 19 nt, Artificial Sequence
  Description of Artificial Sequence: Synthetic oligonucleotide
gagguauagugaaagccuc

SEQ ID NO: 1151523 - RNA, 19 nt, Artificial Sequence
  Description of Artificial Sequence: Synthetic oligonucleotide
aguccuuugcuguuuuaaa

SEQ ID NO: 1151524 - RNA, 19 nt, Artificial Sequence
  Description of Artificial Sequence: Synthetic oligonucleotide
ggguauaacaagcaaauau

SEQ ID NO: 1151525 - RNA, 19 nt, Artificial Sequence
  Description of Artificial Sequence: Synthetic oligonucleotide
uagacgguugugguguagc

SEQ ID NO: 1151526 - RNA, 19 nt, Artificial Sequence
  Description of Artificial Sequence: Synthetic oligonucleotide
uccugauaucugucguugc

SEQ ID NO: 1151527 - RNA, 19 nt, Artificial Sequence
  Description of Artificial Sequence: Synthetic oligonucleotide
cuaagacguggaugugucc

SEQ ID NO: 1151528 - RNA, 19 nt, Artificial Sequence
  Description of Artificial Sequence: Synthetic oligonucleotide
gugacucacaguuggaucu

SEQ ID NO: 1151529 - RNA, 19 nt, Artificial Sequence
  Description of Artificial Sequence: Synthetic oligonucleotide
cuuugccauauauguuggc

SEQ ID NO: 1151530 - RNA, 19 nt, Artificial Sequence
  Description of Artificial Sequence: Synthetic oligonucleotide
aucugcauccaugaacaca

SEQ ID NO: 1151531 - RNA, 19 nt, Artificial Sequence
  Description of Artificial Sequence: Synthetic oligonucleotide
aagugaccagcaguggagu

SEQ ID NO: 1151532 - RNA, 19 nt, Artificial Sequence
  Description of Artificial Sequence: Synthetic oligonucleotide
cauagugcguccggguggg

SEQ ID NO: 1151533 - RNA, 19 nt, Artificial Sequence
  Description of Artificial Sequence: Synthetic oligonucleotide
cauauauguuggcaacuga

SEQ ID NO: 1151534 - RNA, 19 nt, Artificial Sequence
  Description of Artificial Sequence: Synthetic oligonucleotide
uuccuuugccauauauguu

SEQ ID NO: 1151535 - RNA, 19 nt, Artificial Sequence
  Description of Artificial Sequence: Synthetic oligonucleotide
gcaucguuugugguuagcg

SEQ ID NO: 1151536 - RNA, 19 nt, Artificial Sequence
  Description of Artificial Sequence: Synthetic oligonucleotide
gugccuaagacguggaugu

SEQ ID NO: 1151537 - RNA, 19 nt, Artificial Sequence
  Description of Artificial Sequence: Synthetic oligonucleotide
gaggacauagacgguugug

SEQ ID NO: 1151538 - RNA, 19 nt, Artificial Sequence
  Description of Artificial Sequence: Synthetic oligonucleotide
cagggguaaaacacucgug

SEQ ID NO: 1151539 - RNA, 19 nt, Artificial Sequence
  Description of Artificial Sequence: Synthetic oligonucleotide
cacuccacuguguuaauaa

SEQ ID NO: 1151540 - RNA, 19 nt, Artificial Sequence
  Description of Artificial Sequence: Synthetic oligonucleotide
aaauggcagugcuucuauu

SEQ ID NO: 1151541 - RNA, 19 nt, Artificial Sequence
  Description of Artificial Sequence: Synthetic oligonucleotide
aucugucauagugcguccg

SEQ ID NO: 1151542 - RNA, 19 nt, Artificial Sequence
  Description of Artificial Sequence: Synthetic oligonucleotide
aguggaguuucgucagggu

SEQ ID NO: 1151543 - RNA, 19 nt, Artificial Sequence
  Description of Artificial Sequence: Synthetic oligonucleotide
ucucaucuuuuguccugcc

SEQ ID NO: 1151544 - RNA, 19 nt, Artificial Sequence
  Description of Artificial Sequence: Synthetic oligonucleotide
aauugccggucuagugagg

SEQ ID NO: 1151545 - RNA, 19 nt, Artificial Sequence
  Description of Artificial Sequence: Synthetic oligonucleotide
agguaagugucaaguuuuc

SEQ ID NO: 1151546 - RNA, 19 nt, Artificial Sequence
  Description of Artificial Sequence: Synthetic oligonucleotide
cagcaguggaguuucguca

SEQ ID NO: 1151547 - RNA, 19 nt, Artificial Sequence
  Description of Artificial Sequence: Synthetic oligonucleotide
ucguugcccagccacuaaa

SEQ ID NO: 1151548 - RNA, 19 nt, Artificial Sequence
  Description of Artificial Sequence: Synthetic oligonucleotide
aaaugccgggagguaggag

SEQ ID NO: 1151549 - RNA, 19 nt, Artificial Sequence
  Description of Artificial Sequence: Synthetic oligonucleotide
uggugaguacaaccauccu

SEQ ID NO: 1151550 - RNA, 19 nt, Artificial Sequence
  Description of Artificial Sequence: Synthetic oligonucleotide
uugccggucuagugagggg

SEQ ID NO: 1151551 - RNA, 19 nt, Artificial Sequence
  Description of Artificial Sequence: Synthetic oligonucleotide
ugaguacaaccauccuccu

SEQ ID NO: 1151552 - RNA, 19 nt, Artificial Sequence
  Description of Artificial Sequence: Synthetic oligonucleotide
gacgguugugguguagcug

SEQ ID NO: 1151553 - RNA, 19 nt, Artificial Sequence
  Description of Artificial Sequence: Synthetic oligonucleotide
ggugggucggaagagccgg

SEQ ID NO: 1151554 - RNA, 19 nt, Artificial Sequence
  Description of Artificial Sequence: Synthetic oligonucleotide
ugccggucuagugaggggu

SEQ ID NO: 1151555 - RNA, 19 nt, Artificial Sequence
  Description of Artificial Sequence: Synthetic oligonucleotide
ucauaacaucugaccauuu

SEQ ID NO: 1151556 - RNA, 19 nt, Artificial Sequence
  Description of Artificial Sequence: Synthetic oligonucleotide
gagauucacauuugacacu

SEQ ID NO: 1151557 - RNA, 19 nt, Artificial Sequence
  Description of Artificial Sequence: Synthetic oligonucleotide
caucaaagacaguuucuaa

SEQ ID NO: 1151558 - RNA, 19 nt, Artificial Sequence
  Description of Artificial Sequence: Synthetic oligonucleotide
gcagugcuucuauuguagg

SEQ ID NO: 1151559 - RNA, 19 nt, Artificial Sequence
  Description of Artificial Sequence: Synthetic oligonucleotide
agacgguugugguguagcu

SEQ ID NO: 1151560 - RNA, 19 nt, Artificial Sequence
  Description of Artificial Sequence: Synthetic oligonucleotide
ggugacucacaguuggauc

SEQ ID NO: 1151561 - RNA, 19 nt, Artificial Sequence
  Description of Artificial Sequence: Synthetic oligonucleotide
ggcagugcuucuauuguag

SEQ ID NO: 1151562 - RNA, 19 nt, Artificial Sequence
  Description of Artificial Sequence: Synthetic oligonucleotide
aggguuaaacagaacuuau

SEQ ID NO: 1151563 - RNA, 19 nt, Artificial Sequence
  Description of Artificial Sequence: Synthetic oligonucleotide
agccacuaaaauauguauu

SEQ ID NO: 1151564 - RNA, 19 nt, Artificial Sequence
  Description of Artificial Sequence: Synthetic oligonucleotide
guauagugaaagccucuaa

SEQ ID NO: 1151565 - RNA, 19 nt, Artificial Sequence
  Description of Artificial Sequence: Synthetic oligonucleotide
uaucugcauccaugaacac

SEQ ID NO: 1151566 - RNA, 19 nt, Artificial Sequence
  Description of Artificial Sequence: Synthetic oligonucleotide
cuucauaacaucugaccau

SEQ ID NO: 1151567 - RNA, 19 nt, Artificial Sequence
  Description of Artificial Sequence: Synthetic oligonucleotide
uucugaggacauagacggu

SEQ ID NO: 1151568 - RNA, 19 nt, Artificial Sequence
  Description of Artificial Sequence: Synthetic oligonucleotide
cucaucuggugagguauag

SEQ ID NO: 1151569 - RNA, 19 nt, Artificial Sequence
  Description of Artificial Sequence: Synthetic oligonucleotide
cagugcaccuuuggcauag

SEQ ID NO: 1151570 - RNA, 19 nt, Artificial Sequence
  Description of Artificial Sequence: Synthetic oligonucleotide
ccuaagacguggauguguc

SEQ ID NO: 1151571 - RNA, 19 nt, Artificial Sequence
  Description of Artificial Sequence: Synthetic oligonucleotide
agucgaggguuaaacagaa

SEQ ID NO: 1151572 - RNA, 19 nt, Artificial Sequence
  Description of Artificial Sequence: Synthetic oligonucleotide
ggaccagugcaccuuuggc

SEQ ID NO: 1151573 - RNA, 19 nt, Artificial Sequence
  Description of Artificial Sequence: Synthetic oligonucleotide
ggcaacugaagaaauuaga

SEQ ID NO: 1151574 - RNA, 19 nt, Artificial Sequence
  Description of Artificial Sequence: Synthetic oligonucleotide
auguauucaguaggcccug

SEQ ID NO: 1151575 - RNA, 19 nt, Artificial Sequence
  Description of Artificial Sequence: Synthetic oligonucleotide
ggucggaagagccgggcgc

SEQ ID NO: 1151576 - RNA, 19 nt, Artificial Sequence
  Description of Artificial Sequence: Synthetic oligonucleotide
gaaucgccacuguccaaga

SEQ ID NO: 1151577 - RNA, 19 nt, Artificial Sequence
  Description of Artificial Sequence: Synthetic oligonucleotide
agguaggaguauauggaaa

SEQ ID NO: 1151578 - RNA, 19 nt, Artificial Sequence
  Description of Artificial Sequence: Synthetic oligonucleotide
agguauagugaaagccucu

SEQ ID NO: 1151579 - RNA, 19 nt, Artificial Sequence
  Description of Artificial Sequence: Synthetic oligonucleotide
gauguguccacggggaaau

SEQ ID NO: 1151580 - RNA, 19 nt, Artificial Sequence
  Description of Artificial Sequence: Synthetic oligonucleotide
auagacgguugugguguag

SEQ ID NO: 1151581 - RNA, 19 nt, Artificial Sequence
  Description of Artificial Sequence: Synthetic oligonucleotide
cugcccaaacccucaucug

SEQ ID NO: 1151582 - RNA, 19 nt, Artificial Sequence
  Description of Artificial Sequence: Synthetic oligonucleotide
ucgucagggugaugcccag

SEQ ID NO: 1151583 - RNA, 19 nt, Artificial Sequence
  Description of Artificial Sequence: Synthetic oligonucleotide
gagaccuguggggugguga

SEQ ID NO: 1151584 - RNA, 19 nt, Artificial Sequence
  Description of Artificial Sequence: Synthetic oligonucleotide
gguggugaguacaaccauc

SEQ ID NO: 1151585 - RNA, 19 nt, Artificial Sequence
  Description of Artificial Sequence: Synthetic oligonucleotide
cauuagauaggagcaggua

SEQ ID NO: 1151586 - RNA, 19 nt, Artificial Sequence
  Description of Artificial Sequence: Synthetic oligonucleotide
gguagacuuauaaaucacu

SEQ ID NO: 1151587 - RNA, 19 nt, Artificial Sequence
  Description of Artificial Sequence: Synthetic oligonucleotide
cagccacuaaaauauguau

SEQ ID NO: 1151588 - RNA, 19 nt, Artificial Sequence
  Description of Artificial Sequence: Synthetic oligonucleotide
cacggggaaauggcagugc

SEQ ID NO: 1151589 - RNA, 19 nt, Artificial Sequence
  Description of Artificial Sequence: Synthetic oligonucleotide
augugccuaagacguggau

SEQ ID NO: 1151590 - RNA, 19 nt, Artificial Sequence
  Description of Artificial Sequence: Synthetic oligonucleotide
uccugcccaaacccucauc

SEQ ID NO: 1151591 - RNA, 19 nt, Artificial Sequence
  Description of Artificial Sequence: Synthetic oligonucleotide
gaacuaacacuagcuggua

SEQ ID NO: 1151592 - RNA, 19 nt, Artificial Sequence
  Description of Artificial Sequence: Synthetic oligonucleotide
cgcuuuaaaugccgggagg

SEQ ID NO: 1151593 - RNA, 19 nt, Artificial Sequence
  Description of Artificial Sequence: Synthetic oligonucleotide
ccauguaaucagccuggcc

SEQ ID NO: 1151594 - RNA, 19 nt, Artificial Sequence
  Description of Artificial Sequence: Synthetic oligonucleotide
guuaaccaucagagagagc

SEQ ID NO: 1151595 - RNA, 19 nt, Artificial Sequence
  Description of Artificial Sequence: Synthetic oligonucleotide
aggcaucguuugugguuag

SEQ ID NO: 1151596 - RNA, 19 nt, Artificial Sequence
  Description of Artificial Sequence: Synthetic oligonucleotide
gguuagcgucacaaaggcc

SEQ ID NO: 1151597 - RNA, 19 nt, Artificial Sequence
  Description of Artificial Sequence: Synthetic oligonucleotide
agaugucccaccacagguu

SEQ ID NO: 1151598 - RNA, 19 nt, Artificial Sequence
  Description of Artificial Sequence: Synthetic oligonucleotide
gguauagugaaagccucua

SEQ ID NO: 1151599 - RNA, 19 nt, Artificial Sequence
  Description of Artificial Sequence: Synthetic oligonucleotide
ugccuaagacguggaugug

SEQ ID NO: 1151600 - RNA, 19 nt, Artificial Sequence
  Description of Artificial Sequence: Synthetic oligonucleotide
gucuagugagggguauaac

SEQ ID NO: 1151601 - RNA, 19 nt, Artificial Sequence
  Description of Artificial Sequence: Synthetic oligonucleotide
guuuggggacuguaaguau

SEQ ID NO: 1151602 - RNA, 19 nt, Artificial Sequence
  Description of Artificial Sequence: Synthetic oligonucleotide
gggcuuccccaauggacag

SEQ ID NO: 1151603 - RNA, 19 nt, Artificial Sequence
  Description of Artificial Sequence: Synthetic oligonucleotide
cuuuaaaugccgggaggua

SEQ ID NO: 1151604 - RNA, 19 nt, Artificial Sequence
  Description of Artificial Sequence: Synthetic oligonucleotide
ggacauagacgguuguggu

SEQ ID NO: 1151605 - RNA, 19 nt, Artificial Sequence
  Description of Artificial Sequence: Synthetic oligonucleotide
gcuuuaaaugccgggaggu

SEQ ID NO: 1151606 - RNA, 19 nt, Artificial Sequence
  Description of Artificial Sequence: Synthetic oligonucleotide
guugcccagccacuaaaau

SEQ ID NO: 1151607 - RNA, 19 nt, Artificial Sequence
  Description of Artificial Sequence: Synthetic oligonucleotide
agcgucacaaaggccugau

SEQ ID NO: 1151608 - RNA, 19 nt, Artificial Sequence
  Description of Artificial Sequence: Synthetic oligonucleotide
ccagccacuaaaauaugua

SEQ ID NO: 1151609 - RNA, 19 nt, Artificial Sequence
  Description of Artificial Sequence: Synthetic oligonucleotide
ggggacuguaaguauaauu

SEQ ID NO: 1151610 - RNA, 19 nt, Artificial Sequence
  Description of Artificial Sequence: Synthetic oligonucleotide
acaaagcuccugagacaug

SEQ ID NO: 1151611 - RNA, 19 nt, Artificial Sequence
  Description of Artificial Sequence: Synthetic oligonucleotide
uggggacuguaaguauaau

SEQ ID NO: 1151612 - RNA, 19 nt, Artificial Sequence
  Description of Artificial Sequence: Synthetic oligonucleotide
ggucuagugagggguauaa

SEQ ID NO: 1151613 - RNA, 19 nt, Artificial Sequence
  Description of Artificial Sequence: Synthetic oligonucleotide
aggccugaucugucauagu

SEQ ID NO: 1151614 - RNA, 19 nt, Artificial Sequence
  Description of Artificial Sequence: Synthetic oligonucleotide
aucugucguugcccagcca

SEQ ID NO: 1151615 - RNA, 19 nt, Artificial Sequence
  Description of Artificial Sequence: Synthetic oligonucleotide
gucgaggguuaaacagaac

SEQ ID NO: 1151616 - RNA, 19 nt, Artificial Sequence
  Description of Artificial Sequence: Synthetic oligonucleotide
guaguccuuugcuguuuua

SEQ ID NO: 1151617 - RNA, 19 nt, Artificial Sequence
  Description of Artificial Sequence: Synthetic oligonucleotide
ccugcccaaacccucaucu

SEQ ID NO: 1151618 - RNA, 19 nt, Artificial Sequence
  Description of Artificial Sequence: Synthetic oligonucleotide
cucaggccucuucauuaaa

SEQ ID NO: 1151619 - RNA, 19 nt, Artificial Sequence
  Description of Artificial Sequence: Synthetic oligonucleotide
guacaaccauccuccuggu

SEQ ID NO: 1151620 - RNA, 19 nt, Artificial Sequence
  Description of Artificial Sequence: Synthetic oligonucleotide
ggauguguccacggggaaa

SEQ ID NO: 1151621 - RNA, 19 nt, Artificial Sequence
  Description of Artificial Sequence: Synthetic oligonucleotide
gcucccauguaaucagccu

SEQ ID NO: 1151622 - RNA, 19 nt, Artificial Sequence
  Description of Artificial Sequence: Synthetic oligonucleotide
acacuagcugguagacuua

SEQ ID NO: 1151623 - RNA, 19 nt, Artificial Sequence
  Description of Artificial Sequence: Synthetic oligonucleotide
cauagacgguuguggugua

SEQ ID NO: 1151624 - RNA, 19 nt, Artificial Sequence
  Description of Artificial Sequence: Synthetic oligonucleotide
augccgggagguaggagua

SEQ ID NO: 1151625 - RNA, 19 nt, Artificial Sequence
  Description of Artificial Sequence: Synthetic oligonucleotide
ggcaucguuugugguuagc

SEQ ID NO: 1151626 - RNA, 19 nt, Artificial Sequence
  Description of Artificial Sequence: Synthetic oligonucleotide
gaguuucgucagggugaug

SEQ ID NO: 1151627 - RNA, 19 nt, Artificial Sequence
  Description of Artificial Sequence: Synthetic oligonucleotide
gggguauaacaagcaaaua

SEQ ID NO: 1151628 - RNA, 19 nt, Artificial Sequence
  Description of Artificial Sequence: Synthetic oligonucleotide
cauuugcaccaaacgcuuu

SEQ ID NO: 1151629 - RNA, 19 nt, Artificial Sequence
  Description of Artificial Sequence: Synthetic oligonucleotide
cccagccacuaaaauaugu

SEQ ID NO: 1151630 - RNA, 19 nt, Artificial Sequence
  Description of Artificial Sequence: Synthetic oligonucleotide
gcgucacaaaggccugauc

SEQ ID NO: 1151631 - RNA, 19 nt, Artificial Sequence
  Description of Artificial Sequence: Synthetic oligonucleotide
ccgggugggucggaagagc

SEQ ID NO: 1151632 - RNA, 19 nt, Artificial Sequence
  Description of Artificial Sequence: Synthetic oligonucleotide
ggaguuucgucagggugau

SEQ ID NO: 1151633 - RNA, 19 nt, Artificial Sequence
  Description of Artificial Sequence: Synthetic oligonucleotide
auagugcguccgggugggu

SEQ ID NO: 1151634 - RNA, 19 nt, Artificial Sequence
  Description of Artificial Sequence: Synthetic oligonucleotide
ugcguccgggugggucgga

SEQ ID NO: 1151635 - RNA, 19 nt, Artificial Sequence
  Description of Artificial Sequence: Synthetic oligonucleotide
ccccaauggacagguguga

SEQ ID NO: 1151636 - RNA, 19 nt, Artificial Sequence
  Description of Artificial Sequence: Synthetic oligonucleotide
cagucaggccaaccuggau

SEQ ID NO: 1151637 - RNA, 19 nt, Artificial Sequence
  Description of Artificial Sequence: Synthetic oligonucleotide
ccagugcaccuuuggcaua

SEQ ID NO: 1151638 - RNA, 19 nt, Artificial Sequence
  Description of Artificial Sequence: Synthetic oligonucleotide
gccggucuagugaggggua

SEQ ID NO: 1151639 - RNA, 19 nt, Artificial Sequence
  Description of Artificial Sequence: Synthetic oligonucleotide
ccgggagguaggaguauau

SEQ ID NO: 1151640 - RNA, 19 nt, Artificial Sequence
  Description of Artificial Sequence: Synthetic oligonucleotide
ccaagacaucuaccaugau

SEQ ID NO: 1151641 - RNA, 19 nt, Artificial Sequence
  Description of Artificial Sequence: Synthetic oligonucleotide
gcguccgggugggucggaa

SEQ ID NO: 1151642 - RNA, 19 nt, Artificial Sequence
  Description of Artificial Sequence: Synthetic oligonucleotide
cggucuagugagggguaua

SEQ ID NO: 1151643 - RNA, 19 nt, Artificial Sequence
  Description of Artificial Sequence: Synthetic oligonucleotide
ccggucuagugagggguau

SEQ ID NO: 1151644 - RNA, 19 nt, Artificial Sequence
  Description of Artificial Sequence: Synthetic oligonucleotide
aaucgcaucacuuuuagcg

SEQ ID NO: 1151645 - RNA, 19 nt, Artificial Sequence
  Description of Artificial Sequence: Synthetic oligonucleotide
aauguagauacacauuccc

SEQ ID NO: 1151646 - RNA, 19 nt, Artificial Sequence
  Description of Artificial Sequence: Synthetic oligonucleotide
aacugcaaagcacaagucc

SEQ ID NO: 1151647 - RNA, 19 nt, Artificial Sequence
  Description of Artificial Sequence: Synthetic oligonucleotide
aauucuguuacauuguaca

SEQ ID NO: 1151648 - RNA, 19 nt, Artificial Sequence
  Description of Artificial Sequence: Synthetic oligonucleotide
uuaagaaugugucagugag

SEQ ID NO: 1151649 - RNA, 19 nt, Artificial Sequence
  Description of Artificial Sequence: Synthetic oligonucleotide
ucauuaacugguuaaagag

SEQ ID NO: 1151650 - RNA, 19 nt, Artificial Sequence
  Description of Artificial Sequence: Synthetic oligonucleotide
ucauuaugaacacugaugu

SEQ ID NO: 1151651 - RNA, 19 nt, Artificial Sequence
  Description of Artificial Sequence: Synthetic oligonucleotide
aaaucuuuucacgaaggcc

SEQ ID NO: 1151652 - RNA, 19 nt, Artificial Sequence
  Description of Artificial Sequence: Synthetic oligonucleotide
ucugcauuguaaaauuugg

SEQ ID NO: 1151653 - RNA, 19 nt, Artificial Sequence
  Description of Artificial Sequence: Synthetic oligonucleotide
guuacauuguacauuaucg

SEQ ID NO: 1151654 - RNA, 19 nt, Artificial Sequence
  Description of Artificial Sequence: Synthetic oligonucleotide
aucuccguaaccuggagcc

SEQ ID NO: 1151655 - RNA, 19 nt, Artificial Sequence
  Description of Artificial Sequence: Synthetic oligonucleotide
uauauucccgaaauuuugg

SEQ ID NO: 1151656 - RNA, 19 nt, Artificial Sequence
  Description of Artificial Sequence: Synthetic oligonucleotide
ugaaaaucuuuucacgaag

SEQ ID NO: 1151657 - RNA, 19 nt, Artificial Sequence
  Description of Artificial Sequence: Synthetic oligonucleotide
uuaaauuugguacggcccc

SEQ ID NO: 1151658 - RNA, 19 nt, Artificial Sequence
  Description of Artificial Sequence: Synthetic oligonucleotide
aacgcugagaacuugucug

SEQ ID NO: 1151659 - RNA, 19 nt, Artificial Sequence
  Description of Artificial Sequence: Synthetic oligonucleotide
auuaaauuugguacggccc

SEQ ID NO: 1151660 - RNA, 19 nt, Artificial Sequence
  Description of Artificial Sequence: Synthetic oligonucleotide
auaaacauaggugagguug

SEQ ID NO: 1151661 - RNA, 19 nt, Artificial Sequence
  Description of Artificial Sequence: Synthetic oligonucleotide
cauguuacaggaauauugg

SEQ ID NO: 1151662 - RNA, 19 nt, Artificial Sequence
  Description of Artificial Sequence: Synthetic oligonucleotide
agucuuaagccagagauac

SEQ ID NO: 1151663 - RNA, 19 nt, Artificial Sequence
  Description of Artificial Sequence: Synthetic oligonucleotide
uuacagguaauacggaaag

SEQ ID NO: 1151664 - RNA, 19 nt, Artificial Sequence
  Description of Artificial Sequence: Synthetic oligonucleotide
ucuaaagagagccuaacau

SEQ ID NO: 1151665 - RNA, 19 nt, Artificial Sequence
  Description of Artificial Sequence: Synthetic oligonucleotide
aauacggaaagguucuucu

SEQ ID NO: 1151666 - RNA, 19 nt, Artificial Sequence
  Description of Artificial Sequence: Synthetic oligonucleotide
accaauauaucuuuuacaa

SEQ ID NO: 1151667 - RNA, 19 nt, Artificial Sequence
  Description of Artificial Sequence: Synthetic oligonucleotide
auaugugugucccaauuuc

SEQ ID NO: 1151668 - RNA, 19 nt, Artificial Sequence
  Description of Artificial Sequence: Synthetic oligonucleotide
uguaccgaagacaggagag

SEQ ID NO: 1151669 - RNA, 19 nt, Artificial Sequence
  Description of Artificial Sequence: Synthetic oligonucleotide
uacaguugaaggaucaucu

SEQ ID NO: 1151670 - RNA, 19 nt, Artificial Sequence
  Description of Artificial Sequence: Synthetic oligonucleotide
cauuaaauuugguacggcc

SEQ ID NO: 1151671 - RNA, 19 nt, Artificial Sequence
  Description of Artificial Sequence: Synthetic oligonucleotide
caguuugugauuuuacagg

SEQ ID NO: 1151672 - RNA, 19 nt, Artificial Sequence
  Description of Artificial Sequence: Synthetic oligonucleotide
agauccaucguccuuucac

SEQ ID NO: 1151673 - RNA, 19 nt, Artificial Sequence
  Description of Artificial Sequence: Synthetic oligonucleotide
aguaggcuuagucaaucgc

SEQ ID NO: 1151674 - RNA, 19 nt, Artificial Sequence
  Description of Artificial Sequence: Synthetic oligonucleotide
uccgccuucaccaauauau

SEQ ID NO: 1151675 - RNA, 19 nt, Artificial Sequence
  Description of Artificial Sequence: Synthetic oligonucleotide
uauucccgaaauuuugggg

SEQ ID NO: 1151676 - RNA, 19 nt, Artificial Sequence
  Description of Artificial Sequence: Synthetic oligonucleotide
uuuccaaugacugucacuc

SEQ ID NO: 1151677 - RNA, 19 nt, Artificial Sequence
  Description of Artificial Sequence: Synthetic oligonucleotide
auuaucgauggcuccaggg

SEQ ID NO: 1151678 - RNA, 19 nt, Artificial Sequence
  Description of Artificial Sequence: Synthetic oligonucleotide
ucuguuacauuguacauua

SEQ ID NO: 1151679 - RNA, 19 nt, Artificial Sequence
  Description of Artificial Sequence: Synthetic oligonucleotide
cuucuuaggcuuuaggcag

SEQ ID NO: 1151680 - RNA, 19 nt, Artificial Sequence
  Description of Artificial Sequence: Synthetic oligonucleotide
aucgcaucacuuuuagcgc

SEQ ID NO: 1151681 - RNA, 19 nt, Artificial Sequence
  Description of Artificial Sequence: Synthetic oligonucleotide
aggcugaaagguuuaaacg

SEQ ID NO: 1151682 - RNA, 19 nt, Artificial Sequence
  Description of Artificial Sequence: Synthetic oligonucleotide
uacggaaagguucuucuag

SEQ ID NO: 1151683 - RNA, 19 nt, Artificial Sequence
  Description of Artificial Sequence: Synthetic oligonucleotide
caccauuuacaguugaagg

SEQ ID NO: 1151684 - RNA, 19 nt, Artificial Sequence
  Description of Artificial Sequence: Synthetic oligonucleotide
auuaugaacacugauguaa

SEQ ID NO: 1151685 - RNA, 19 nt, Artificial Sequence
  Description of Artificial Sequence: Synthetic oligonucleotide
ugguauugcacauuuccag

SEQ ID NO: 1151686 - RNA, 19 nt, Artificial Sequence
  Description of Artificial Sequence: Synthetic oligonucleotide
ugucagugagucuuaagcc

SEQ ID NO: 1151687 - RNA, 19 nt, Artificial Sequence
  Description of Artificial Sequence: Synthetic oligonucleotide
uguaacucacagcacacac

SEQ ID NO: 1151688 - RNA, 19 nt, Artificial Sequence
  Description of Artificial Sequence: Synthetic oligonucleotide
agauauuuaacaucagaaa

SEQ ID NO: 1151689 - RNA, 19 nt, Artificial Sequence
  Description of Artificial Sequence: Synthetic oligonucleotide
uuuacagguaauacggaaa

SEQ ID NO: 1151690 - RNA, 19 nt, Artificial Sequence
  Description of Artificial Sequence: Synthetic oligonucleotide
ugaauuugggcuucaagaa

SEQ ID NO: 1151691 - RNA, 19 nt, Artificial Sequence
  Description of Artificial Sequence: Synthetic oligonucleotide
gaucaucucucauuaacug

SEQ ID NO: 1151692 - RNA, 19 nt, Artificial Sequence
  Description of Artificial Sequence: Synthetic oligonucleotide
acuuuggagccccuguacc

SEQ ID NO: 1151693 - RNA, 19 nt, Artificial Sequence
  Description of Artificial Sequence: Synthetic oligonucleotide
gugucagugagucuuaagc

SEQ ID NO: 1151694 - RNA, 19 nt, Artificial Sequence
  Description of Artificial Sequence: Synthetic oligonucleotide
aacuuaacuucucuuugca

SEQ ID NO: 1151695 - RNA, 19 nt, Artificial Sequence
  Description of Artificial Sequence: Synthetic oligonucleotide
cuaaagagagccuaacauc

SEQ ID NO: 1151696 - RNA, 19 nt, Artificial Sequence
  Description of Artificial Sequence: Synthetic oligonucleotide
ucugaauuugggcuucaag

SEQ ID NO: 1151697 - RNA, 19 nt, Artificial Sequence
  Description of Artificial Sequence: Synthetic oligonucleotide
ucaaucgcaucacuuuuag

SEQ ID NO: 1151698 - RNA, 19 nt, Artificial Sequence
  Description of Artificial Sequence: Synthetic oligonucleotide
aagacgcggccucaaacac

SEQ ID NO: 1151699 - RNA, 19 nt, Artificial Sequence
  Description of Artificial Sequence: Synthetic oligonucleotide
auauucccgaaauuuuggg

SEQ ID NO: 1151700 - RNA, 19 nt, Artificial Sequence
  Description of Artificial Sequence: Synthetic oligonucleotide
aauacaacaaucagguuua

SEQ ID NO: 1151701 - RNA, 19 nt, Artificial Sequence
  Description of Artificial Sequence: Synthetic oligonucleotide
agagauacuuuggagcccc

SEQ ID NO: 1151702 - RNA, 19 nt, Artificial Sequence
  Description of Artificial Sequence: Synthetic oligonucleotide
ugggauggccucuaaagag

SEQ ID NO: 1151703 - RNA, 19 nt, Artificial Sequence
  Description of Artificial Sequence: Synthetic oligonucleotide
uuaugaacacugauguaac

SEQ ID NO: 1151704 - RNA, 19 nt, Artificial Sequence
  Description of Artificial Sequence: Synthetic oligonucleotide
auucccgaaauuuuggggu

SEQ ID NO: 1151705 - RNA, 19 nt, Artificial Sequence
  Description of Artificial Sequence: Synthetic oligonucleotide
aaguaggcuuagucaaucg

SEQ ID NO: 1151706 - RNA, 19 nt, Artificial Sequence
  Description of Artificial Sequence: Synthetic oligonucleotide
uuuuacagguaauacggaa

SEQ ID NO: 1151707 - RNA, 19 nt, Artificial Sequence
  Description of Artificial Sequence: Synthetic oligonucleotide
uguaacuagaaaaggucuc

SEQ ID NO: 1151708 - RNA, 19 nt, Artificial Sequence
  Description of Artificial Sequence: Synthetic oligonucleotide
uuaucgauggcuccaggga

SEQ ID NO: 1151709 - RNA, 19 nt, Artificial Sequence
  Description of Artificial Sequence: Synthetic oligonucleotide
auaaguacuggcguguauc

SEQ ID NO: 1151710 - RNA, 19 nt, Artificial Sequence
  Description of Artificial Sequence: Synthetic oligonucleotide
ucuagguucacuguaucug

SEQ ID NO: 1151711 - RNA, 19 nt, Artificial Sequence
  Description of Artificial Sequence: Synthetic oligonucleotide
aucauauucguauguucuc

SEQ ID NO: 1151712 - RNA, 19 nt, Artificial Sequence
  Description of Artificial Sequence: Synthetic oligonucleotide
cuaacuuaacuucucuuug

SEQ ID NO: 1151713 - RNA, 19 nt, Artificial Sequence
  Description of Artificial Sequence: Synthetic oligonucleotide
uaacuuaacuucucuuugc

SEQ ID NO: 1151714 - RNA, 19 nt, Artificial Sequence
  Description of Artificial Sequence: Synthetic oligonucleotide
uaaagagaucaccaggcaa

SEQ ID NO: 1151715 - RNA, 19 nt, Artificial Sequence
  Description of Artificial Sequence: Synthetic oligonucleotide
ucguauguucucuuuaaga

SEQ ID NO: 1151716 - RNA, 19 nt, Artificial Sequence
  Description of Artificial Sequence: Synthetic oligonucleotide
uuguacauuaucgauggcu

SEQ ID NO: 1151717 - RNA, 19 nt, Artificial Sequence
  Description of Artificial Sequence: Synthetic oligonucleotide
ggaauauuggugaacaaag

SEQ ID NO: 1151718 - RNA, 19 nt, Artificial Sequence
  Description of Artificial Sequence: Synthetic oligonucleotide
cuagguuuguuuuccacac

SEQ ID NO: 1151719 - RNA, 19 nt, Artificial Sequence
  Description of Artificial Sequence: Synthetic oligonucleotide
aauuuacacaaaagcugac

SEQ ID NO: 1151720 - RNA, 19 nt, Artificial Sequence
  Description of Artificial Sequence: Synthetic oligonucleotide
uaaacauaggugagguugu

SEQ ID NO: 1151721 - RNA, 19 nt, Artificial Sequence
  Description of Artificial Sequence: Synthetic oligonucleotide
gucauuaugaacacugaug

SEQ ID NO: 1151722 - RNA, 19 nt, Artificial Sequence
  Description of Artificial Sequence: Synthetic oligonucleotide
gauccaaauguagauacac

SEQ ID NO: 1151723 - RNA, 19 nt, Artificial Sequence
  Description of Artificial Sequence: Synthetic oligonucleotide
ugcaaauauccucuggauc

SEQ ID NO: 1151724 - RNA, 19 nt, Artificial Sequence
  Description of Artificial Sequence: Synthetic oligonucleotide
acuauguccaacuuuccaa

SEQ ID NO: 1151725 - RNA, 19 nt, Artificial Sequence
  Description of Artificial Sequence: Synthetic oligonucleotide
cacaagucccggaagacgc

SEQ ID NO: 1151726 - RNA, 19 nt, Artificial Sequence
  Description of Artificial Sequence: Synthetic oligonucleotide
uugguauugcacauuucca

SEQ ID NO: 1151727 - RNA, 19 nt, Artificial Sequence
  Description of Artificial Sequence: Synthetic oligonucleotide
uaggcuuuaggcaguauaa

SEQ ID NO: 1151728 - RNA, 19 nt, Artificial Sequence
  Description of Artificial Sequence: Synthetic oligonucleotide
gguauugcacauuuccagg

SEQ ID NO: 1151729 - RNA, 19 nt, Artificial Sequence
  Description of Artificial Sequence: Synthetic oligonucleotide
cucguacuaacuuaacuuc

SEQ ID NO: 1151730 - RNA, 19 nt, Artificial Sequence
  Description of Artificial Sequence: Synthetic oligonucleotide
aacuugauugcugucauua

SEQ ID NO: 1151731 - RNA, 19 nt, Artificial Sequence
  Description of Artificial Sequence: Synthetic oligonucleotide
acggaaagguucuucuagg

SEQ ID NO: 1151732 - RNA, 19 nt, Artificial Sequence
  Description of Artificial Sequence: Synthetic oligonucleotide
ucucauuaacugguuaaag

SEQ ID NO: 1151733 - RNA, 19 nt, Artificial Sequence
  Description of Artificial Sequence: Synthetic oligonucleotide
ugucauuaugaacacugau

SEQ ID NO: 1151734 - RNA, 19 nt, Artificial Sequence
  Description of Artificial Sequence: Synthetic oligonucleotide
uguaaucuuccccuuucac

SEQ ID NO: 1151735 - RNA, 19 nt, Artificial Sequence
  Description of Artificial Sequence: Synthetic oligonucleotide
agguuuaaacgcugagaac

SEQ ID NO: 1151736 - RNA, 19 nt, Artificial Sequence
  Description of Artificial Sequence: Synthetic oligonucleotide
cuugauugcugucauuaug

SEQ ID NO: 1151737 - RNA, 19 nt, Artificial Sequence
  Description of Artificial Sequence: Synthetic oligonucleotide
ugucaucauauucguaugu

SEQ ID NO: 1151738 - RNA, 19 nt, Artificial Sequence
  Description of Artificial Sequence: Synthetic oligonucleotide
ucacuuuuagcgccagcag

SEQ ID NO: 1151739 - RNA, 19 nt, Artificial Sequence
  Description of Artificial Sequence: Synthetic oligonucleotide
agaaagacuucaucaguca

SEQ ID NO: 1151740 - RNA, 19 nt, Artificial Sequence
  Description of Artificial Sequence: Synthetic oligonucleotide
ucuuaagccagagauacuu

SEQ ID NO: 1151741 - RNA, 19 nt, Artificial Sequence
  Description of Artificial Sequence: Synthetic oligonucleotide
ucguacuaacuuaacuucu

SEQ ID NO: 1151742 - RNA, 19 nt, Artificial Sequence
  Description of Artificial Sequence: Synthetic oligonucleotide
uggugaacaaaguaggcuu

SEQ ID NO: 1151743 - RNA, 19 nt, Artificial Sequence
  Description of Artificial Sequence: Synthetic oligonucleotide
gaugagaccacgcagacuu

SEQ ID NO: 1151744 - RNA, 19 nt, Artificial Sequence
  Description of Artificial Sequence: Synthetic oligonucleotide
cucauuaacugguuaaaga

SEQ ID NO: 1151745 - RNA, 19 nt, Artificial Sequence
  Description of Artificial Sequence: Synthetic oligonucleotide
uuagucaaucgcaucacuu

SEQ ID NO: 1151746 - RNA, 19 nt, Artificial Sequence
  Description of Artificial Sequence: Synthetic oligonucleotide
guaacuagaaaaggucucc

SEQ ID NO: 1151747 - RNA, 19 nt, Artificial Sequence
  Description of Artificial Sequence: Synthetic oligonucleotide
gcaguuugugauuuuacag

SEQ ID NO: 1151748 - RNA, 19 nt, Artificial Sequence
  Description of Artificial Sequence: Synthetic oligonucleotide
acauuguacauuaucgaug

SEQ ID NO: 1151749 - RNA, 19 nt, Artificial Sequence
  Description of Artificial Sequence: Synthetic oligonucleotide
cuugacuucaugguguaug

SEQ ID NO: 1151750 - RNA, 19 nt, Artificial Sequence
  Description of Artificial Sequence: Synthetic oligonucleotide
ugguguaugacaucaucaa

SEQ ID NO: 1151751 - RNA, 19 nt, Artificial Sequence
  Description of Artificial Sequence: Synthetic oligonucleotide
gaaggaucaucucucauua

SEQ ID NO: 1151752 - RNA, 19 nt, Artificial Sequence
  Description of Artificial Sequence: Synthetic oligonucleotide
aaacacacgcccaacuucu

SEQ ID NO: 1151753 - RNA, 19 nt, Artificial Sequence
  Description of Artificial Sequence: Synthetic oligonucleotide
ggcaguauaaguacuggcg

SEQ ID NO: 1151754 - RNA, 19 nt, Artificial Sequence
  Description of Artificial Sequence: Synthetic oligonucleotide
cugaagauccgccuucacc

SEQ ID NO: 1151755 - RNA, 19 nt, Artificial Sequence
  Description of Artificial Sequence: Synthetic oligonucleotide
uauucguauguucucuuua

SEQ ID NO: 1151756 - RNA, 19 nt, Artificial Sequence
  Description of Artificial Sequence: Synthetic oligonucleotide
ucgggaaggaaacugcaaa

SEQ ID NO: 1151757 - RNA, 19 nt, Artificial Sequence
  Description of Artificial Sequence: Synthetic oligonucleotide
caucagaaauuuucuuuag

SEQ ID NO: 1151758 - RNA, 19 nt, Artificial Sequence
  Description of Artificial Sequence: Synthetic oligonucleotide
ucauauucguauguucucu

SEQ ID NO: 1151759 - RNA, 19 nt, Artificial Sequence
  Description of Artificial Sequence: Synthetic oligonucleotide
uuggugaacaaaguaggcu

SEQ ID NO: 1151760 - RNA, 19 nt, Artificial Sequence
  Description of Artificial Sequence: Synthetic oligonucleotide
auuugguacggccccagug

SEQ ID NO: 1151761 - RNA, 19 nt, Artificial Sequence
  Description of Artificial Sequence: Synthetic oligonucleotide
augacugucacucccuuaa

SEQ ID NO: 1151762 - RNA, 19 nt, Artificial Sequence
  Description of Artificial Sequence: Synthetic oligonucleotide
guggauagaauugguauug

SEQ ID NO: 1151763 - RNA, 19 nt, Artificial Sequence
  Description of Artificial Sequence: Synthetic oligonucleotide
aucacuuuuagcgccagca

SEQ ID NO: 1151764 - RNA, 19 nt, Artificial Sequence
  Description of Artificial Sequence: Synthetic oligonucleotide
uacauuaucgauggcucca

SEQ ID NO: 1151765 - RNA, 19 nt, Artificial Sequence
  Description of Artificial Sequence: Synthetic oligonucleotide
acauuccccggcuuggguc

SEQ ID NO: 1151766 - RNA, 19 nt, Artificial Sequence
  Description of Artificial Sequence: Synthetic oligonucleotide
gugauuuuacagguaauac

SEQ ID NO: 1151767 - RNA, 19 nt, Artificial Sequence
  Description of Artificial Sequence: Synthetic oligonucleotide
aaagagagccuaacaucuc

SEQ ID NO: 1151768 - RNA, 19 nt, Artificial Sequence
  Description of Artificial Sequence: Synthetic oligonucleotide
ugucccaauuuccuugacu

SEQ ID NO: 1151769 - RNA, 19 nt, Artificial Sequence
  Description of Artificial Sequence: Synthetic oligonucleotide
cuccauaaacauaggugag

SEQ ID NO: 1151770 - RNA, 19 nt, Artificial Sequence
  Description of Artificial Sequence: Synthetic oligonucleotide
aguggauagaauugguauu

SEQ ID NO: 1151771 - RNA, 19 nt, Artificial Sequence
  Description of Artificial Sequence: Synthetic oligonucleotide
ucgcaucacuuuuagcgcc

SEQ ID NO: 1151772 - RNA, 19 nt, Artificial Sequence
  Description of Artificial Sequence: Synthetic oligonucleotide
gucagugagucuuaagcca

SEQ ID NO: 1151773 - RNA, 19 nt, Artificial Sequence
  Description of Artificial Sequence: Synthetic oligonucleotide
ccagagauacuuuggagcc

SEQ ID NO: 1151774 - RNA, 19 nt, Artificial Sequence
  Description of Artificial Sequence: Synthetic oligonucleotide
aauugguauugcacauuuc

SEQ ID NO: 1151775 - RNA, 19 nt, Artificial Sequence
  Description of Artificial Sequence: Synthetic oligonucleotide
acuggcguguauccauugg

SEQ ID NO: 1151776 - RNA, 19 nt, Artificial Sequence
  Description of Artificial Sequence: Synthetic oligonucleotide
gaauuugggcuucaagaaa

SEQ ID NO: 1151777 - RNA, 19 nt, Artificial Sequence
  Description of Artificial Sequence: Synthetic oligonucleotide
uccauuggcugcaaauauc

SEQ ID NO: 1151778 - RNA, 19 nt, Artificial Sequence
  Description of Artificial Sequence: Synthetic oligonucleotide
gagaacuugucugaagauc

SEQ ID NO: 1151779 - RNA, 19 nt, Artificial Sequence
  Description of Artificial Sequence: Synthetic oligonucleotide
uaggcuuagucaaucgcau

SEQ ID NO: 1151780 - RNA, 19 nt, Artificial Sequence
  Description of Artificial Sequence: Synthetic oligonucleotide
aaauuugguacggccccag

SEQ ID NO: 1151781 - RNA, 19 nt, Artificial Sequence
  Description of Artificial Sequence: Synthetic oligonucleotide
uccaucguccuuucacugc

SEQ ID NO: 1151782 - RNA, 19 nt, Artificial Sequence
  Description of Artificial Sequence: Synthetic oligonucleotide
uagucaaucgcaucacuuu

SEQ ID NO: 1151783 - RNA, 19 nt, Artificial Sequence
  Description of Artificial Sequence: Synthetic oligonucleotide
acucccuuaaugaugccag

SEQ ID NO: 1151784 - RNA, 19 nt, Artificial Sequence
  Description of Artificial Sequence: Synthetic oligonucleotide
aggaauauuggugaacaaa

SEQ ID NO: 1151785 - RNA, 19 nt, Artificial Sequence
  Description of Artificial Sequence: Synthetic oligonucleotide
ugugucccaauuuccuuga

SEQ ID NO: 1151786 - RNA, 19 nt, Artificial Sequence
  Description of Artificial Sequence: Synthetic oligonucleotide
guacauuaucgauggcucc

SEQ ID NO: 1151787 - RNA, 19 nt, Artificial Sequence
  Description of Artificial Sequence: Synthetic oligonucleotide
caugguguaugacaucauc

SEQ ID NO: 1151788 - RNA, 19 nt, Artificial Sequence
  Description of Artificial Sequence: Synthetic oligonucleotide
auguuacaggaauauuggu

SEQ ID NO: 1151789 - RNA, 19 nt, Artificial Sequence
  Description of Artificial Sequence: Synthetic oligonucleotide
auuuacaguugaaggauca

SEQ ID NO: 1151790 - RNA, 19 nt, Artificial Sequence
  Description of Artificial Sequence: Synthetic oligonucleotide
caucauauucguauguucu

SEQ ID NO: 1151791 - RNA, 19 nt, Artificial Sequence
  Description of Artificial Sequence: Synthetic oligonucleotide
uguucucuuuaagaaugug

SEQ ID NO: 1151792 - RNA, 19 nt, Artificial Sequence
  Description of Artificial Sequence: Synthetic oligonucleotide
ucggcucguacuaacuuaa

SEQ ID NO: 1151793 - RNA, 19 nt, Artificial Sequence
  Description of Artificial Sequence: Synthetic oligonucleotide
agucaaucgcaucacuuuu

SEQ ID NO: 1151794 - RNA, 19 nt, Artificial Sequence
  Description of Artificial Sequence: Synthetic oligonucleotide
ucuuucggcucguacuaac

SEQ ID NO: 1151795 - RNA, 19 nt, Artificial Sequence
  Description of Artificial Sequence: Synthetic oligonucleotide
acuucaugguguaugacau

SEQ ID NO: 1151796 - RNA, 19 nt, Artificial Sequence
  Description of Artificial Sequence: Synthetic oligonucleotide
aauuugguacggccccagu

SEQ ID NO: 1151797 - RNA, 19 nt, Artificial Sequence
  Description of Artificial Sequence: Synthetic oligonucleotide
aagagaucaccaggcaagu

SEQ ID NO: 1151798 - RNA, 19 nt, Artificial Sequence
  Description of Artificial Sequence: Synthetic oligonucleotide
guaacucacagcacacacc

SEQ ID NO: 1151799 - RNA, 19 nt, Artificial Sequence
  Description of Artificial Sequence: Synthetic oligonucleotide
agcacaagucccggaagac

SEQ ID NO: 1151800 - RNA, 19 nt, Artificial Sequence
  Description of Artificial Sequence: Synthetic oligonucleotide
guaggcuuagucaaucgca

SEQ ID NO: 1151801 - RNA, 19 nt, Artificial Sequence
  Description of Artificial Sequence: Synthetic oligonucleotide
agagagccuaacaucuccg

SEQ ID NO: 1151802 - RNA, 19 nt, Artificial Sequence
  Description of Artificial Sequence: Synthetic oligonucleotide
gaccacgcagacuugugca

SEQ ID NO: 1151803 - RNA, 19 nt, Artificial Sequence
  Description of Artificial Sequence: Synthetic oligonucleotide
uggauagaauugguauugc

SEQ ID NO: 1151804 - RNA, 19 nt, Artificial Sequence
  Description of Artificial Sequence: Synthetic oligonucleotide
ugauugcugucauuaugaa

SEQ ID NO: 1151805 - RNA, 19 nt, Artificial Sequence
  Description of Artificial Sequence: Synthetic oligonucleotide
aggcuuagucaaucgcauc

SEQ ID NO: 1151806 - RNA, 19 nt, Artificial Sequence
  Description of Artificial Sequence: Synthetic oligonucleotide
uucuuaggcuuuaggcagu

SEQ ID NO: 1151807 - RNA, 19 nt, Artificial Sequence
  Description of Artificial Sequence: Synthetic oligonucleotide
uuucggcucguacuaacuu

SEQ ID NO: 1151808 - RNA, 19 nt, Artificial Sequence
  Description of Artificial Sequence: Synthetic oligonucleotide
cucaggaguuucacccugg

SEQ ID NO: 1151809 - RNA, 19 nt, Artificial Sequence
  Description of Artificial Sequence: Synthetic oligonucleotide
accuugaguuguguaacuc

SEQ ID NO: 1151810 - RNA, 19 nt, Artificial Sequence
  Description of Artificial Sequence: Synthetic oligonucleotide
ucccuuaaugaugccagcu

SEQ ID NO: 1151811 - RNA, 19 nt, Artificial Sequence
  Description of Artificial Sequence: Synthetic oligonucleotide
uucggcucguacuaacuua

SEQ ID NO: 1151812 - RNA, 19 nt, Artificial Sequence
  Description of Artificial Sequence: Synthetic oligonucleotide
agaacugaggucacucucu

SEQ ID NO: 1151813 - RNA, 19 nt, Artificial Sequence
  Description of Artificial Sequence: Synthetic oligonucleotide
cucuccagcccgaaacuac

SEQ ID NO: 1151814 - RNA, 19 nt, Artificial Sequence
  Description of Artificial Sequence: Synthetic oligonucleotide
gacgcggccucaaacacac

SEQ ID NO: 1151815 - RNA, 19 nt, Artificial Sequence
  Description of Artificial Sequence: Synthetic oligonucleotide
uaaauuugguacggcccca

SEQ ID NO: 1151816 - RNA, 19 nt, Artificial Sequence
  Description of Artificial Sequence: Synthetic oligonucleotide
gcugcaaauauccucugga

SEQ ID NO: 1151817 - RNA, 19 nt, Artificial Sequence
  Description of Artificial Sequence: Synthetic oligonucleotide
accaauaugugugucccaa

SEQ ID NO: 1151818 - RNA, 19 nt, Artificial Sequence
  Description of Artificial Sequence: Synthetic oligonucleotide
cauuaucgauggcuccagg

SEQ ID NO: 1151819 - RNA, 19 nt, Artificial Sequence
  Description of Artificial Sequence: Synthetic oligonucleotide
acauuaucgauggcuccag

SEQ ID NO: 1151820 - RNA, 19 nt, Artificial Sequence
  Description of Artificial Sequence: Synthetic oligonucleotide
caaucgcaucacuuuuagc

SEQ ID NO: 1151821 - RNA, 19 nt, Artificial Sequence
  Description of Artificial Sequence: Synthetic oligonucleotide
uuccaaugacugucacucc

SEQ ID NO: 1151822 - RNA, 19 nt, Artificial Sequence
  Description of Artificial Sequence: Synthetic oligonucleotide
uguucugaauuugggcuuc

SEQ ID NO: 1151823 - RNA, 19 nt, Artificial Sequence
  Description of Artificial Sequence: Synthetic oligonucleotide
uaccgaagacaggagaguc

SEQ ID NO: 1151824 - RNA, 19 nt, Artificial Sequence
  Description of Artificial Sequence: Synthetic oligonucleotide
acuugauugcugucauuau

SEQ ID NO: 1151825 - RNA, 19 nt, Artificial Sequence
  Description of Artificial Sequence: Synthetic oligonucleotide
auuuuacagguaauacgga

SEQ ID NO: 1151826 - RNA, 19 nt, Artificial Sequence
  Description of Artificial Sequence: Synthetic oligonucleotide
aagauccgccuucaccaau

SEQ ID NO: 1151827 - RNA, 19 nt, Artificial Sequence
  Description of Artificial Sequence: Synthetic oligonucleotide
gauccaucguccuuucacu

SEQ ID NO: 1151828 - RNA, 19 nt, Artificial Sequence
  Description of Artificial Sequence: Synthetic oligonucleotide
aggcuuuaggcaguauaag

SEQ ID NO: 1151829 - RNA, 19 nt, Artificial Sequence
  Description of Artificial Sequence: Synthetic oligonucleotide
ugagaccacgcagacuugu

SEQ ID NO: 1151830 - RNA, 19 nt, Artificial Sequence
  Description of Artificial Sequence: Synthetic oligonucleotide
acgcugagaacuugucuga

SEQ ID NO: 1151831 - RNA, 19 nt, Artificial Sequence
  Description of Artificial Sequence: Synthetic oligonucleotide
agaaugugucagugagucu

SEQ ID NO: 1151832 - RNA, 19 nt, Artificial Sequence
  Description of Artificial Sequence: Synthetic oligonucleotide
aggugagguuguaauguuc

SEQ ID NO: 1151833 - RNA, 19 nt, Artificial Sequence
  Description of Artificial Sequence: Synthetic oligonucleotide
cacuauguccaacuuucca

SEQ ID NO: 1151834 - RNA, 19 nt, Artificial Sequence
  Description of Artificial Sequence: Synthetic oligonucleotide
ggauagaauugguauugca

SEQ ID NO: 1151835 - RNA, 19 nt, Artificial Sequence
  Description of Artificial Sequence: Synthetic oligonucleotide
aucucucauuaacugguua

SEQ ID NO: 1151836 - RNA, 19 nt, Artificial Sequence
  Description of Artificial Sequence: Synthetic oligonucleotide
agagccuaacaucuccgua

SEQ ID NO: 1151837 - RNA, 19 nt, Artificial Sequence
  Description of Artificial Sequence: Synthetic oligonucleotide
caaucagguuuaaguucag

SEQ ID NO: 1151838 - RNA, 19 nt, Artificial Sequence
  Description of Artificial Sequence: Synthetic oligonucleotide
ugcacauuuccaggaccag

SEQ ID NO: 1151839 - RNA, 19 nt, Artificial Sequence
  Description of Artificial Sequence: Synthetic oligonucleotide
ucccaauuuccuugacuuc

SEQ ID NO: 1151840 - RNA, 19 nt, Artificial Sequence
  Description of Artificial Sequence: Synthetic oligonucleotide
auuuugggguaaagucaac

SEQ ID NO: 1151841 - RNA, 19 nt, Artificial Sequence
  Description of Artificial Sequence: Synthetic oligonucleotide
ggaaacugcaaagcacaag

SEQ ID NO: 1151842 - RNA, 19 nt, Artificial Sequence
  Description of Artificial Sequence: Synthetic oligonucleotide
aucguccuuucacugcagu

SEQ ID NO: 1151843 - RNA, 19 nt, Artificial Sequence
  Description of Artificial Sequence: Synthetic oligonucleotide
cucccuuaaugaugccagc

SEQ ID NO: 1151844 - RNA, 19 nt, Artificial Sequence
  Description of Artificial Sequence: Synthetic oligonucleotide
auacggaaagguucuucua

SEQ ID NO: 1151845 - RNA, 19 nt, Artificial Sequence
  Description of Artificial Sequence: Synthetic oligonucleotide
cugggauggccucuaaaga

SEQ ID NO: 1151846 - RNA, 19 nt, Artificial Sequence
  Description of Artificial Sequence: Synthetic oligonucleotide
cccaacuucuuucggcucg

SEQ ID NO: 1151847 - RNA, 19 nt, Artificial Sequence
  Description of Artificial Sequence: Synthetic oligonucleotide
uugggucacugaauuuaau

SEQ ID NO: 1151848 - RNA, 19 nt, Artificial Sequence
  Description of Artificial Sequence: Synthetic oligonucleotide
cuguaccgaagacaggaga

SEQ ID NO: 1151849 - RNA, 19 nt, Artificial Sequence
  Description of Artificial Sequence: Synthetic oligonucleotide
ggcguguauccauuggcug

SEQ ID NO: 1151850 - RNA, 19 nt, Artificial Sequence
  Description of Artificial Sequence: Synthetic oligonucleotide
cuugggucacugaauuuaa

SEQ ID NO: 1151851 - RNA, 19 nt, Artificial Sequence
  Description of Artificial Sequence: Synthetic oligonucleotide
ggaagacgcggccucaaac

SEQ ID NO: 1151852 - RNA, 19 nt, Artificial Sequence
  Description of Artificial Sequence: Synthetic oligonucleotide
cagagauacuuuggagccc

SEQ ID NO: 1151853 - RNA, 19 nt, Artificial Sequence
  Description of Artificial Sequence: Synthetic oligonucleotide
agguuguaauguucugaau

SEQ ID NO: 1151854 - RNA, 19 nt, Artificial Sequence
  Description of Artificial Sequence: Synthetic oligonucleotide
gugaggagcuuggaugcag

SEQ ID NO: 1151855 - RNA, 19 nt, Artificial Sequence
  Description of Artificial Sequence: Synthetic oligonucleotide
uggccucuaaagagagccu

SEQ ID NO: 1151856 - RNA, 19 nt, Artificial Sequence
  Description of Artificial Sequence: Synthetic oligonucleotide
gguaauacggaaagguucu

SEQ ID NO: 1151857 - RNA, 19 nt, Artificial Sequence
  Description of Artificial Sequence: Synthetic oligonucleotide
cguauguucucuuuaagaa

SEQ ID NO: 1151858 - RNA, 19 nt, Artificial Sequence
  Description of Artificial Sequence: Synthetic oligonucleotide
agauacuuuggagccccug

SEQ ID NO: 1151859 - RNA, 19 nt, Artificial Sequence
  Description of Artificial Sequence: Synthetic oligonucleotide
ugaugagaccacgcagacu

SEQ ID NO: 1151860 - RNA, 19 nt, Artificial Sequence
  Description of Artificial Sequence: Synthetic oligonucleotide
aaugugucagugagucuua

SEQ ID NO: 1151861 - RNA, 19 nt, Artificial Sequence
  Description of Artificial Sequence: Synthetic oligonucleotide
uccuuucacugcaguuugu

SEQ ID NO: 1151862 - RNA, 19 nt, Artificial Sequence
  Description of Artificial Sequence: Synthetic oligonucleotide
aguuucacccugggucggg

SEQ ID NO: 1151863 - RNA, 19 nt, Artificial Sequence
  Description of Artificial Sequence: Synthetic oligonucleotide
agaauugguauugcacauu

SEQ ID NO: 1151864 - RNA, 19 nt, Artificial Sequence
  Description of Artificial Sequence: Synthetic oligonucleotide
acaagucccggaagacgcg

SEQ ID NO: 1151865 - RNA, 19 nt, Artificial Sequence
  Description of Artificial Sequence: Synthetic oligonucleotide
ugacuucaugguguaugac

SEQ ID NO: 1151866 - RNA, 19 nt, Artificial Sequence
  Description of Artificial Sequence: Synthetic oligonucleotide
cuuuuagcgccagcaggug

SEQ ID NO: 1151867 - RNA, 19 nt, Artificial Sequence
  Description of Artificial Sequence: Synthetic oligonucleotide
gaagauccgccuucaccaa

SEQ ID NO: 1151868 - RNA, 19 nt, Artificial Sequence
  Description of Artificial Sequence: Synthetic oligonucleotide
gcuuuaggcaguauaagua

SEQ ID NO: 1151869 - RNA, 19 nt, Artificial Sequence
  Description of Artificial Sequence: Synthetic oligonucleotide
cacgcccaacuucuuucgg

SEQ ID NO: 1151870 - RNA, 19 nt, Artificial Sequence
  Description of Artificial Sequence: Synthetic oligonucleotide
cauuccccggcuuggguca

SEQ ID NO: 1151871 - RNA, 19 nt, Artificial Sequence
  Description of Artificial Sequence: Synthetic oligonucleotide
gcacaagucccggaagacg

SEQ ID NO: 1151872 - RNA, 19 nt, Artificial Sequence
  Description of Artificial Sequence: Synthetic oligonucleotide
caucacuuuuagcgccagc

SEQ ID NO: 1151873 - RNA, 19 nt, Artificial Sequence
  Description of Artificial Sequence: Synthetic oligonucleotide
cuauguccaacuuuccaau

SEQ ID NO: 1151874 - RNA, 19 nt, Artificial Sequence
  Description of Artificial Sequence: Synthetic oligonucleotide
ccuagguuuguuuuccaca

SEQ ID NO: 1151875 - RNA, 19 nt, Artificial Sequence
  Description of Artificial Sequence: Synthetic oligonucleotide
gagaccacgcagacuugug

SEQ ID NO: 1151876 - RNA, 19 nt, Artificial Sequence
  Description of Artificial Sequence: Synthetic oligonucleotide
ggcuuuaggcaguauaagu

SEQ ID NO: 1151877 - RNA, 19 nt, Artificial Sequence
  Description of Artificial Sequence: Synthetic oligonucleotide
cuugucugaagauccgccu

SEQ ID NO: 1151878 - RNA, 19 nt, Artificial Sequence
  Description of Artificial Sequence: Synthetic oligonucleotide
accacgcagacuugugcaa

SEQ ID NO: 1151879 - RNA, 19 nt, Artificial Sequence
  Description of Artificial Sequence: Synthetic oligonucleotide
ccgaagacaggagagucag

SEQ ID NO: 1151880 - RNA, 19 nt, Artificial Sequence
  Description of Artificial Sequence: Synthetic oligonucleotide
agccccuguaccgaagaca

SEQ ID NO: 1151881 - RNA, 19 nt, Artificial Sequence
  Description of Artificial Sequence: Synthetic oligonucleotide
cuccagcccgaaacuacug

SEQ ID NO: 1151882 - RNA, 19 nt, Artificial Sequence
  Description of Artificial Sequence: Synthetic oligonucleotide
gcucguacuaacuuaacuu

SEQ ID NO: 1151883 - RNA, 19 nt, Artificial Sequence
  Description of Artificial Sequence: Synthetic oligonucleotide
caucguccuuucacugcag

SEQ ID NO: 1151884 - RNA, 19 nt, Artificial Sequence
  Description of Artificial Sequence: Synthetic oligonucleotide
gagucuuaagccagagaua

SEQ ID NO: 1151885 - RNA, 19 nt, Artificial Sequence
  Description of Artificial Sequence: Synthetic oligonucleotide
cucucauuaacugguuaaa

SEQ ID NO: 1151886 - RNA, 19 nt, Artificial Sequence
  Description of Artificial Sequence: Synthetic oligonucleotide
cuuaaugaugccagcuuuu

SEQ ID NO: 1151887 - RNA, 19 nt, Artificial Sequence
  Description of Artificial Sequence: Synthetic oligonucleotide
ucuuaggcuuuaggcagua

SEQ ID NO: 1151888 - RNA, 19 nt, Artificial Sequence
  Description of Artificial Sequence: Synthetic oligonucleotide
ccugggucgggaaggaaac

SEQ ID NO: 1151889 - RNA, 19 nt, Artificial Sequence
  Description of Artificial Sequence: Synthetic oligonucleotide
gagagccuaacaucuccgu

SEQ ID NO: 1151890 - RNA, 19 nt, Artificial Sequence
  Description of Artificial Sequence: Synthetic oligonucleotide
cguacuaacuuaacuucuc

SEQ ID NO: 1151891 - RNA, 19 nt, Artificial Sequence
  Description of Artificial Sequence: Synthetic oligonucleotide
ucccgaaauuuugggguaa

SEQ ID NO: 1151892 - RNA, 19 nt, Artificial Sequence
  Description of Artificial Sequence: Synthetic oligonucleotide
gguacggccccagugaaaa

SEQ ID NO: 1151893 - RNA, 19 nt, Artificial Sequence
  Description of Artificial Sequence: Synthetic oligonucleotide
cacucccuuaaugaugcca

SEQ ID NO: 1151894 - RNA, 19 nt, Artificial Sequence
  Description of Artificial Sequence: Synthetic oligonucleotide
uucuuucggcucguacuaa

SEQ ID NO: 1151895 - RNA, 19 nt, Artificial Sequence
  Description of Artificial Sequence: Synthetic oligonucleotide
ggagcuuggaugcagcuuu

SEQ ID NO: 1151896 - RNA, 19 nt, Artificial Sequence
  Description of Artificial Sequence: Synthetic oligonucleotide
cuuucggcucguacuaacu

SEQ ID NO: 1151897 - RNA, 19 nt, Artificial Sequence
  Description of Artificial Sequence: Synthetic oligonucleotide
gcuuagucaaucgcaucac

SEQ ID NO: 1151898 - RNA, 19 nt, Artificial Sequence
  Description of Artificial Sequence: Synthetic oligonucleotide
ccuguaccgaagacaggag

SEQ ID NO: 1151899 - RNA, 19 nt, Artificial Sequence
  Description of Artificial Sequence: Synthetic oligonucleotide
cugcaaauauccucuggau

SEQ ID NO: 1151900 - RNA, 19 nt, Artificial Sequence
  Description of Artificial Sequence: Synthetic oligonucleotide
ccuaacaucuccguaaccu

SEQ ID NO: 1151901 - RNA, 19 nt, Artificial Sequence
  Description of Artificial Sequence: Synthetic oligonucleotide
gggucgggaaggaaacugc

SEQ ID NO: 1151902 - RNA, 19 nt, Artificial Sequence
  Description of Artificial Sequence: Synthetic oligonucleotide
ggcucguacuaacuuaacu

SEQ ID NO: 1151903 - RNA, 19 nt, Artificial Sequence
  Description of Artificial Sequence: Synthetic oligonucleotide
gucaaucgcaucacuuuua

SEQ ID NO: 1151904 - RNA, 19 nt, Artificial Sequence
  Description of Artificial Sequence: Synthetic oligonucleotide
cgcggccucaaacacacgc

SEQ ID NO: 1151905 - RNA, 19 nt, Artificial Sequence
  Description of Artificial Sequence: Synthetic oligonucleotide
gguguaugacaucaucaau

SEQ ID NO: 1151906 - RNA, 19 nt, Artificial Sequence
  Description of Artificial Sequence: Synthetic oligonucleotide
cugcaccauuuacaguuga

SEQ ID NO: 1151907 - RNA, 19 nt, Artificial Sequence
  Description of Artificial Sequence: Synthetic oligonucleotide
ucuuuucacgaaggccauu

SEQ ID NO: 1151908 - RNA, 19 nt, Artificial Sequence
  Description of Artificial Sequence: Synthetic oligonucleotide
agacgcggccucaaacaca

SEQ ID NO: 1151909 - RNA, 19 nt, Artificial Sequence
  Description of Artificial Sequence: Synthetic oligonucleotide
ccucuaaagagagccuaac

SEQ ID NO: 1151910 - RNA, 19 nt, Artificial Sequence
  Description of Artificial Sequence: Synthetic oligonucleotide
caccaauauguguguccca

SEQ ID NO: 1151911 - RNA, 19 nt, Artificial Sequence
  Description of Artificial Sequence: Synthetic oligonucleotide
gccuaacaucuccguaacc

SEQ ID NO: 1151912 - RNA, 19 nt, Artificial Sequence
  Description of Artificial Sequence: Synthetic oligonucleotide
guaccgaagacaggagagu

SEQ ID NO: 1151913 - RNA, 19 nt, Artificial Sequence
  Description of Artificial Sequence: Synthetic oligonucleotide
ccgaaauuuugggguaaag

SEQ ID NO: 1151914 - RNA, 19 nt, Artificial Sequence
  Description of Artificial Sequence: Synthetic oligonucleotide
cauuggaggcugaaagguu

SEQ ID NO: 1151915 - RNA, 19 nt, Artificial Sequence
  Description of Artificial Sequence: Synthetic oligonucleotide
gcacauuuccaggaccaga

SEQ ID NO: 1151916 - RNA, 19 nt, Artificial Sequence
  Description of Artificial Sequence: Synthetic oligonucleotide
gcggccucaaacacacgcc

SEQ ID NO: 1151917 - RNA, 19 nt, Artificial Sequence
  Description of Artificial Sequence: Synthetic oligonucleotide
cauaaacauaggugagguu

SEQ ID NO: 1151918 - RNA, 19 nt, Artificial Sequence
  Description of Artificial Sequence: Synthetic oligonucleotide
augagaccacgcagacuug

SEQ ID NO: 1151919 - RNA, 19 nt, Artificial Sequence
  Description of Artificial Sequence: Synthetic oligonucleotide
guccaacuuuccaaugacu

SEQ ID NO: 1151920 - RNA, 19 nt, Artificial Sequence
  Description of Artificial Sequence: Synthetic oligonucleotide
caccuugaguuguguaacu

SEQ ID NO: 1151921 - RNA, 19 nt, Artificial Sequence
  Description of Artificial Sequence: Synthetic oligonucleotide
gcaucacuuuuagcgccag

SEQ ID NO: 1151922 - RNA, 19 nt, Artificial Sequence
  Description of Artificial Sequence: Synthetic oligonucleotide
gcccgaaacuacugucuca

SEQ ID NO: 1151923 - RNA, 19 nt, Artificial Sequence
  Description of Artificial Sequence: Synthetic oligonucleotide
ccaaauguagauacacauu

SEQ ID NO: 1151924 - RNA, 19 nt, Artificial Sequence
  Description of Artificial Sequence: Synthetic oligonucleotide
cccgaaacuacugucucaa

SEQ ID NO: 1151925 - RNA, 19 nt, Artificial Sequence
  Description of Artificial Sequence: Synthetic oligonucleotide
gucuuaagccagagauacu

SEQ ID NO: 1151926 - RNA, 19 nt, Artificial Sequence
  Description of Artificial Sequence: Synthetic oligonucleotide
cacauuccccggcuugggu

SEQ ID NO: 1151927 - RNA, 19 nt, Artificial Sequence
  Description of Artificial Sequence: Synthetic oligonucleotide
gccucuaaagagagccuaa

SEQ ID NO: 1151928 - RNA, 19 nt, Artificial Sequence
  Description of Artificial Sequence: Synthetic oligonucleotide
guaauacggaaagguucuu

SEQ ID NO: 1151929 - RNA, 19 nt, Artificial Sequence
  Description of Artificial Sequence: Synthetic oligonucleotide
cuccguaaccuggagccau

SEQ ID NO: 1151930 - RNA, 19 nt, Artificial Sequence
  Description of Artificial Sequence: Synthetic oligonucleotide
gagauacuuuggagccccu

SEQ ID NO: 1151931 - RNA, 19 nt, Artificial Sequence
  Description of Artificial Sequence: Synthetic oligonucleotide
gaucaccaggcaagucuuu

SEQ ID NO: 1151932 - RNA, 19 nt, Artificial Sequence
  Description of Artificial Sequence: Synthetic oligonucleotide
cgcaucacuuuuagcgcca

SEQ ID NO: 1151933 - RNA, 19 nt, Artificial Sequence
  Description of Artificial Sequence: Synthetic oligonucleotide
acgcggccucaaacacacg

SEQ ID NO: 1151934 - RNA, 19 nt, Artificial Sequence
  Description of Artificial Sequence: Synthetic oligonucleotide
cacccugggucgggaagga

SEQ ID NO: 1151935 - RNA, 19 nt, Artificial Sequence
  Description of Artificial Sequence: Synthetic oligonucleotide
cggaaagguucuucuaggu

SEQ ID NO: 1151936 - RNA, 19 nt, Artificial Sequence
  Description of Artificial Sequence: Synthetic oligonucleotide
ccguaaccuggagccauuc

SEQ ID NO: 1151937 - RNA, 19 nt, Artificial Sequence
  Description of Artificial Sequence: Synthetic oligonucleotide
cccuuaaugaugccagcuu

SEQ ID NO: 1151938 - RNA, 19 nt, Artificial Sequence
  Description of Artificial Sequence: Synthetic oligonucleotide
ccacacuauguccaacuuu

SEQ ID NO: 1151939 - RNA, 19 nt, Artificial Sequence
  Description of Artificial Sequence: Synthetic oligonucleotide
cggcucguacuaacuuaac

SEQ ID NO: 1151940 - RNA, 19 nt, Artificial Sequence
  Description of Artificial Sequence: Synthetic oligonucleotide
guacggccccagugaaaau

SEQ ID NO: 1151941 - RNA, 19 nt, Artificial Sequence
  Description of Artificial Sequence: Synthetic oligonucleotide
ccaauaugugugucccaau

SEQ ID NO: 1151942 - RNA, 19 nt, Artificial Sequence
  Description of Artificial Sequence: Synthetic oligonucleotide
cugggucgggaaggaaacu

SEQ ID NO: 1151943 - RNA, 19 nt, Artificial Sequence
  Description of Artificial Sequence: Synthetic oligonucleotide
ccgaaacuacugucucaaa

SEQ ID NO: 1151944 - RNA, 19 nt, Artificial Sequence
  Description of Artificial Sequence: Synthetic oligonucleotide
caacuucuuucggcucgua

SEQ ID NO: 1151945 - RNA, 19 nt, Artificial Sequence
  Description of Artificial Sequence: Synthetic oligonucleotide
cccgaaauuuugggguaaa

SEQ ID NO: 1151946 - RNA, 19 nt, Artificial Sequence
  Description of Artificial Sequence: Synthetic oligonucleotide
cggaagacgcggccucaaa

SEQ ID NO: 1151947 - RNA, 19 nt, Artificial Sequence
  Description of Artificial Sequence: Synthetic oligonucleotide
ccggaagacgcggccucaa

SEQ ID NO: 1151948 - RNA, 19 nt, Artificial Sequence
  Description of Artificial Sequence: Synthetic oligonucleotide
aaaccaauuaaaauuagcc

SEQ ID NO: 1151949 - RNA, 19 nt, Artificial Sequence
  Description of Artificial Sequence: Synthetic oligonucleotide
aauacuuuagguauggguc

SEQ ID NO: 1151950 - RNA, 19 nt, Artificial Sequence
  Description of Artificial Sequence: Synthetic oligonucleotide
aaauuagccaaauaagucu

SEQ ID NO: 1151951 - RNA, 19 nt, Artificial Sequence
  Description of Artificial Sequence: Synthetic oligonucleotide
uuauuauccugacaguugg

SEQ ID NO: 1151952 - RNA, 19 nt, Artificial Sequence
  Description of Artificial Sequence: Synthetic oligonucleotide
uaagacaauagacaugucc

SEQ ID NO: 1151953 - RNA, 19 nt, Artificial Sequence
  Description of Artificial Sequence: Synthetic oligonucleotide
cuuagaauaaccaauguca

SEQ ID NO: 1151954 - RNA, 19 nt, Artificial Sequence
  Description of Artificial Sequence: Synthetic oligonucleotide
aauguuaacaaaccaauua

SEQ ID NO: 1151955 - RNA, 19 nt, Artificial Sequence
  Description of Artificial Sequence: Synthetic oligonucleotide
acugauuuacuguuggcgc

SEQ ID NO: 1151956 - RNA, 19 nt, Artificial Sequence
  Description of Artificial Sequence: Synthetic oligonucleotide
gaacaauaaaccaaguuag

SEQ ID NO: 1151957 - RNA, 19 nt, Artificial Sequence
  Description of Artificial Sequence: Synthetic oligonucleotide
aacggcgacauguucaucg

SEQ ID NO: 1151958 - RNA, 19 nt, Artificial Sequence
  Description of Artificial Sequence: Synthetic oligonucleotide
cuuaacacagacauggaag

SEQ ID NO: 1151959 - RNA, 19 nt, Artificial Sequence
  Description of Artificial Sequence: Synthetic oligonucleotide
gugaauaucuucaugauag

SEQ ID NO: 1151960 - RNA, 19 nt, Artificial Sequence
  Description of Artificial Sequence: Synthetic oligonucleotide
uguauagagugcuaaauga

SEQ ID NO: 1151961 - RNA, 19 nt, Artificial Sequence
  Description of Artificial Sequence: Synthetic oligonucleotide
uuagaauaaccaaugucag

SEQ ID NO: 1151962 - RNA, 19 nt, Artificial Sequence
  Description of Artificial Sequence: Synthetic oligonucleotide
auaucuucaugauagucgg

SEQ ID NO: 1151963 - RNA, 19 nt, Artificial Sequence
  Description of Artificial Sequence: Synthetic oligonucleotide
ugauucaaagcuaccaucc

SEQ ID NO: 1151964 - RNA, 19 nt, Artificial Sequence
  Description of Artificial Sequence: Synthetic oligonucleotide
aauugguucaguugcuuag

SEQ ID NO: 1151965 - RNA, 19 nt, Artificial Sequence
  Description of Artificial Sequence: Synthetic oligonucleotide
ucucaaauuaacuuugacu

SEQ ID NO: 1151966 - RNA, 19 nt, Artificial Sequence
  Description of Artificial Sequence: Synthetic oligonucleotide
uauacacaaacucugcuac

SEQ ID NO: 1151967 - RNA, 19 nt, Artificial Sequence
  Description of Artificial Sequence: Synthetic oligonucleotide
uuugaagcuagcagcauag

SEQ ID NO: 1151968 - RNA, 19 nt, Artificial Sequence
  Description of Artificial Sequence: Synthetic oligonucleotide
uccacaugaauagugaagg

SEQ ID NO: 1151969 - RNA, 19 nt, Artificial Sequence
  Description of Artificial Sequence: Synthetic oligonucleotide
uucuaagugacauuaucag

SEQ ID NO: 1151970 - RNA, 19 nt, Artificial Sequence
  Description of Artificial Sequence: Synthetic oligonucleotide
auauccagucuuuuguacc

SEQ ID NO: 1151971 - RNA, 19 nt, Artificial Sequence
  Description of Artificial Sequence: Synthetic oligonucleotide
aagguuuaagacuuuccag

SEQ ID NO: 1151972 - RNA, 19 nt, Artificial Sequence
  Description of Artificial Sequence: Synthetic oligonucleotide
aacugauuuacuguuggcg

SEQ ID NO: 1151973 - RNA, 19 nt, Artificial Sequence
  Description of Artificial Sequence: Synthetic oligonucleotide
ucuuuuguaccaaugacuc

SEQ ID NO: 1151974 - RNA, 19 nt, Artificial Sequence
  Description of Artificial Sequence: Synthetic oligonucleotide
uuagguaugggucagcauc

SEQ ID NO: 1151975 - RNA, 19 nt, Artificial Sequence
  Description of Artificial Sequence: Synthetic oligonucleotide
aacucugcuacuucugggg

SEQ ID NO: 1151976 - RNA, 19 nt, Artificial Sequence
  Description of Artificial Sequence: Synthetic oligonucleotide
cauuuagugucucuggugg

SEQ ID NO: 1151977 - RNA, 19 nt, Artificial Sequence
  Description of Artificial Sequence: Synthetic oligonucleotide
caaauuuugaagcuagcag

SEQ ID NO: 1151978 - RNA, 19 nt, Artificial Sequence
  Description of Artificial Sequence: Synthetic oligonucleotide
aaucaagagguaccagugg

SEQ ID NO: 1151979 - RNA, 19 nt, Artificial Sequence
  Description of Artificial Sequence: Synthetic oligonucleotide
ugagacaagguuuaagacu

SEQ ID NO: 1151980 - RNA, 19 nt, Artificial Sequence
  Description of Artificial Sequence: Synthetic oligonucleotide
ucgucuguaauauacacaa

SEQ ID NO: 1151981 - RNA, 19 nt, Artificial Sequence
  Description of Artificial Sequence: Synthetic oligonucleotide
uuccucuuaacacagacau

SEQ ID NO: 1151982 - RNA, 19 nt, Artificial Sequence
  Description of Artificial Sequence: Synthetic oligonucleotide
cuaucaaacuuaauucucc

SEQ ID NO: 1151983 - RNA, 19 nt, Artificial Sequence
  Description of Artificial Sequence: Synthetic oligonucleotide
aacaauaaaccaaguuagc

SEQ ID NO: 1151984 - RNA, 19 nt, Artificial Sequence
  Description of Artificial Sequence: Synthetic oligonucleotide
uggauaaucaagagguacc

SEQ ID NO: 1151985 - RNA, 19 nt, Artificial Sequence
  Description of Artificial Sequence: Synthetic oligonucleotide
guaguucacagccaaaugc

SEQ ID NO: 1151986 - RNA, 19 nt, Artificial Sequence
  Description of Artificial Sequence: Synthetic oligonucleotide
uuuaagaggugcaacccgc

SEQ ID NO: 1151987 - RNA, 19 nt, Artificial Sequence
  Description of Artificial Sequence: Synthetic oligonucleotide
aaguuagccuuucuaagug

SEQ ID NO: 1151988 - RNA, 19 nt, Artificial Sequence
  Description of Artificial Sequence: Synthetic oligonucleotide
aaccgaucaauguaguuca

SEQ ID NO: 1151989 - RNA, 19 nt, Artificial Sequence
  Description of Artificial Sequence: Synthetic oligonucleotide
ucaacuuugcaguuugcag

SEQ ID NO: 1151990 - RNA, 19 nt, Artificial Sequence
  Description of Artificial Sequence: Synthetic oligonucleotide
ugagugauggcaaauacuu

SEQ ID NO: 1151991 - RNA, 19 nt, Artificial Sequence
  Description of Artificial Sequence: Synthetic oligonucleotide
uuuaagacuuuccagggua

SEQ ID NO: 1151992 - RNA, 19 nt, Artificial Sequence
  Description of Artificial Sequence: Synthetic oligonucleotide
guaccaaugacucaggcca

SEQ ID NO: 1151993 - RNA, 19 nt, Artificial Sequence
  Description of Artificial Sequence: Synthetic oligonucleotide
aacaccaugguauuuugaa

SEQ ID NO: 1151994 - RNA, 19 nt, Artificial Sequence
  Description of Artificial Sequence: Synthetic oligonucleotide
uucaucguuuauagaaagg

SEQ ID NO: 1151995 - RNA, 19 nt, Artificial Sequence
  Description of Artificial Sequence: Synthetic oligonucleotide
ucuaucaaacuuaauucuc

SEQ ID NO: 1151996 - RNA, 19 nt, Artificial Sequence
  Description of Artificial Sequence: Synthetic oligonucleotide
uugcuuagaauaaccaaug

SEQ ID NO: 1151997 - RNA, 19 nt, Artificial Sequence
  Description of Artificial Sequence: Synthetic oligonucleotide
gacauuaucagucuuauuu

SEQ ID NO: 1151998 - RNA, 19 nt, Artificial Sequence
  Description of Artificial Sequence: Synthetic oligonucleotide
aauagugaaggccggcugu

SEQ ID NO: 1151999 - RNA, 19 nt, Artificial Sequence
  Description of Artificial Sequence: Synthetic oligonucleotide
cagguaaagagacagcagc

SEQ ID NO: 1152000 - RNA, 19 nt, Artificial Sequence
  Description of Artificial Sequence: Synthetic oligonucleotide
ucaaauuuugaagcuagca

SEQ ID NO: 1152001 - RNA, 19 nt, Artificial Sequence
  Description of Artificial Sequence: Synthetic oligonucleotide
cauccauuggauaaucaag

SEQ ID NO: 1152002 - RNA, 19 nt, Artificial Sequence
  Description of Artificial Sequence: Synthetic oligonucleotide
ucgucuucuaagacaauag

SEQ ID NO: 1152003 - RNA, 19 nt, Artificial Sequence
  Description of Artificial Sequence: Synthetic oligonucleotide
ucagcaauugguucaguug

SEQ ID NO: 1152004 - RNA, 19 nt, Artificial Sequence
  Description of Artificial Sequence: Synthetic oligonucleotide
ucaucguuuauagaaaggu

SEQ ID NO: 1152005 - RNA, 19 nt, Artificial Sequence
  Description of Artificial Sequence: Synthetic oligonucleotide
uaucaaacuuaauucuccc

SEQ ID NO: 1152006 - RNA, 19 nt, Artificial Sequence
  Description of Artificial Sequence: Synthetic oligonucleotide
cuuauuauccugacaguug

SEQ ID NO: 1152007 - RNA, 19 nt, Artificial Sequence
  Description of Artificial Sequence: Synthetic oligonucleotide
uguaauuuauauucuucuc

SEQ ID NO: 1152008 - RNA, 19 nt, Artificial Sequence
  Description of Artificial Sequence: Synthetic oligonucleotide
acauugcuaagcuuucaac

SEQ ID NO: 1152009 - RNA, 19 nt, Artificial Sequence
  Description of Artificial Sequence: Synthetic oligonucleotide
uguggugauucaaagcuac

SEQ ID NO: 1152010 - RNA, 19 nt, Artificial Sequence
  Description of Artificial Sequence: Synthetic oligonucleotide
aucucaaauuaacuuugac

SEQ ID NO: 1152011 - RNA, 19 nt, Artificial Sequence
  Description of Artificial Sequence: Synthetic oligonucleotide
uguaccaaugacucaggcc

SEQ ID NO: 1152012 - RNA, 19 nt, Artificial Sequence
  Description of Artificial Sequence: Synthetic oligonucleotide
agugcuaaaugaaaggcag

SEQ ID NO: 1152013 - RNA, 19 nt, Artificial Sequence
  Description of Artificial Sequence: Synthetic oligonucleotide
uggcaaauacuuuagguau

SEQ ID NO: 1152014 - RNA, 19 nt, Artificial Sequence
  Description of Artificial Sequence: Synthetic oligonucleotide
aaaacauugcuaagcuuuc

SEQ ID NO: 1152015 - RNA, 19 nt, Artificial Sequence
  Description of Artificial Sequence: Synthetic oligonucleotide
ugguugcuuuccaugaagg

SEQ ID NO: 1152016 - RNA, 19 nt, Artificial Sequence
  Description of Artificial Sequence: Synthetic oligonucleotide
ucagcaucuaucaaacuua

SEQ ID NO: 1152017 - RNA, 19 nt, Artificial Sequence
  Description of Artificial Sequence: Synthetic oligonucleotide
gacuuuccaggguauaucc

SEQ ID NO: 1152018 - RNA, 19 nt, Artificial Sequence
  Description of Artificial Sequence: Synthetic oligonucleotide
cuuuaagaggugcaacccg

SEQ ID NO: 1152019 - RNA, 19 nt, Artificial Sequence
  Description of Artificial Sequence: Synthetic oligonucleotide
acuguuagugaugucuggc

SEQ ID NO: 1152020 - RNA, 19 nt, Artificial Sequence
  Description of Artificial Sequence: Synthetic oligonucleotide
cagcaauugguucaguugc

SEQ ID NO: 1152021 - RNA, 19 nt, Artificial Sequence
  Description of Artificial Sequence: Synthetic oligonucleotide
uguaguucacagccaaaug

SEQ ID NO: 1152022 - RNA, 19 nt, Artificial Sequence
  Description of Artificial Sequence: Synthetic oligonucleotide
aauagguaucgucuguaau

SEQ ID NO: 1152023 - RNA, 19 nt, Artificial Sequence
  Description of Artificial Sequence: Synthetic oligonucleotide
agugauggcaaauacuuua

SEQ ID NO: 1152024 - RNA, 19 nt, Artificial Sequence
  Description of Artificial Sequence: Synthetic oligonucleotide
uccauuggauaaucaagag

SEQ ID NO: 1152025 - RNA, 19 nt, Artificial Sequence
  Description of Artificial Sequence: Synthetic oligonucleotide
uaucgucuguaauauacac

SEQ ID NO: 1152026 - RNA, 19 nt, Artificial Sequence
  Description of Artificial Sequence: Synthetic oligonucleotide
auagagugcuaaaugaaag

SEQ ID NO: 1152027 - RNA, 19 nt, Artificial Sequence
  Description of Artificial Sequence: Synthetic oligonucleotide
aucguuuauagaaaggucu

SEQ ID NO: 1152028 - RNA, 19 nt, Artificial Sequence
  Description of Artificial Sequence: Synthetic oligonucleotide
uuauuuuauugaccaaguc

SEQ ID NO: 1152029 - RNA, 19 nt, Artificial Sequence
  Description of Artificial Sequence: Synthetic oligonucleotide
uaaccaaugucagaauuug

SEQ ID NO: 1152030 - RNA, 19 nt, Artificial Sequence
  Description of Artificial Sequence: Synthetic oligonucleotide
auagguaucgucuguaaua

SEQ ID NO: 1152031 - RNA, 19 nt, Artificial Sequence
  Description of Artificial Sequence: Synthetic oligonucleotide
ucauuaacauucacuggcu

SEQ ID NO: 1152032 - RNA, 19 nt, Artificial Sequence
  Description of Artificial Sequence: Synthetic oligonucleotide
ucauucuuacacauuuagu

SEQ ID NO: 1152033 - RNA, 19 nt, Artificial Sequence
  Description of Artificial Sequence: Synthetic oligonucleotide
uauauccagucuuuuguac

SEQ ID NO: 1152034 - RNA, 19 nt, Artificial Sequence
  Description of Artificial Sequence: Synthetic oligonucleotide
uuggauaaucaagagguac

SEQ ID NO: 1152035 - RNA, 19 nt, Artificial Sequence
  Description of Artificial Sequence: Synthetic oligonucleotide
aacauugcuaagcuuucaa

SEQ ID NO: 1152036 - RNA, 19 nt, Artificial Sequence
  Description of Artificial Sequence: Synthetic oligonucleotide
ugacuugcaaagauuucca

SEQ ID NO: 1152037 - RNA, 19 nt, Artificial Sequence
  Description of Artificial Sequence: Synthetic oligonucleotide
ucuuacacauuuagugucu

SEQ ID NO: 1152038 - RNA, 19 nt, Artificial Sequence
  Description of Artificial Sequence: Synthetic oligonucleotide
uuacuguuggcgcagcuaa

SEQ ID NO: 1152039 - RNA, 19 nt, Artificial Sequence
  Description of Artificial Sequence: Synthetic oligonucleotide
ucuuuaagaggugcaaccc

SEQ ID NO: 1152040 - RNA, 19 nt, Artificial Sequence
  Description of Artificial Sequence: Synthetic oligonucleotide
cacaugaauagugaaggcc

SEQ ID NO: 1152041 - RNA, 19 nt, Artificial Sequence
  Description of Artificial Sequence: Synthetic oligonucleotide
ugugaauaucuucaugaua

SEQ ID NO: 1152042 - RNA, 19 nt, Artificial Sequence
  Description of Artificial Sequence: Synthetic oligonucleotide
ugcuaaaugaaaggcagcu

SEQ ID NO: 1152043 - RNA, 19 nt, Artificial Sequence
  Description of Artificial Sequence: Synthetic oligonucleotide
ccucuuaacacagacaugg

SEQ ID NO: 1152044 - RNA, 19 nt, Artificial Sequence
  Description of Artificial Sequence: Synthetic oligonucleotide
uaagaggugcaacccgccg

SEQ ID NO: 1152045 - RNA, 19 nt, Artificial Sequence
  Description of Artificial Sequence: Synthetic oligonucleotide
guaccagugguuuucuugc

SEQ ID NO: 1152046 - RNA, 19 nt, Artificial Sequence
  Description of Artificial Sequence: Synthetic oligonucleotide
cuguauagagugcuaaaug

SEQ ID NO: 1152047 - RNA, 19 nt, Artificial Sequence
  Description of Artificial Sequence: Synthetic oligonucleotide
uacugguuaagaaacugau

SEQ ID NO: 1152048 - RNA, 19 nt, Artificial Sequence
  Description of Artificial Sequence: Synthetic oligonucleotide
cuaagucaaaagcaaggac

SEQ ID NO: 1152049 - RNA, 19 nt, Artificial Sequence
  Description of Artificial Sequence: Synthetic oligonucleotide
aggacuuucaauacuaggu

SEQ ID NO: 1152050 - RNA, 19 nt, Artificial Sequence
  Description of Artificial Sequence: Synthetic oligonucleotide
auggcaaauacuuuaggua

SEQ ID NO: 1152051 - RNA, 19 nt, Artificial Sequence
  Description of Artificial Sequence: Synthetic oligonucleotide
cuuuccucuuaacacagac

SEQ ID NO: 1152052 - RNA, 19 nt, Artificial Sequence
  Description of Artificial Sequence: Synthetic oligonucleotide
agaaaguacugguuaagaa

SEQ ID NO: 1152053 - RNA, 19 nt, Artificial Sequence
  Description of Artificial Sequence: Synthetic oligonucleotide
uauaacccacuuuagguuu

SEQ ID NO: 1152054 - RNA, 19 nt, Artificial Sequence
  Description of Artificial Sequence: Synthetic oligonucleotide
uucaaauuuugaagcuagc

SEQ ID NO: 1152055 - RNA, 19 nt, Artificial Sequence
  Description of Artificial Sequence: Synthetic oligonucleotide
auugcuaagcuuucaacuu

SEQ ID NO: 1152056 - RNA, 19 nt, Artificial Sequence
  Description of Artificial Sequence: Synthetic oligonucleotide
uuacugguugcuuuccaug

SEQ ID NO: 1152057 - RNA, 19 nt, Artificial Sequence
  Description of Artificial Sequence: Synthetic oligonucleotide
agucggguacuucauuaac

SEQ ID NO: 1152058 - RNA, 19 nt, Artificial Sequence
  Description of Artificial Sequence: Synthetic oligonucleotide
gaaccgaucaauguaguuc

SEQ ID NO: 1152059 - RNA, 19 nt, Artificial Sequence
  Description of Artificial Sequence: Synthetic oligonucleotide
ucuuggaauagguaucguc

SEQ ID NO: 1152060 - RNA, 19 nt, Artificial Sequence
  Description of Artificial Sequence: Synthetic oligonucleotide
acauuuagugucucuggug

SEQ ID NO: 1152061 - RNA, 19 nt, Artificial Sequence
  Description of Artificial Sequence: Synthetic oligonucleotide
auauaacccacuuuagguu

SEQ ID NO: 1152062 - RNA, 19 nt, Artificial Sequence
  Description of Artificial Sequence: Synthetic oligonucleotide
uagaauaaccaaugucaga

SEQ ID NO: 1152063 - RNA, 19 nt, Artificial Sequence
  Description of Artificial Sequence: Synthetic oligonucleotide
caugaauagugaaggccgg

SEQ ID NO: 1152064 - RNA, 19 nt, Artificial Sequence
  Description of Artificial Sequence: Synthetic oligonucleotide
auuuagugucucugguggg

SEQ ID NO: 1152065 - RNA, 19 nt, Artificial Sequence
  Description of Artificial Sequence: Synthetic oligonucleotide
uggguugagaagagaaaca

SEQ ID NO: 1152066 - RNA, 19 nt, Artificial Sequence
  Description of Artificial Sequence: Synthetic oligonucleotide
ucuuauuauccugacaguu

SEQ ID NO: 1152067 - RNA, 19 nt, Artificial Sequence
  Description of Artificial Sequence: Synthetic oligonucleotide
uguccugugacuguauaga

SEQ ID NO: 1152068 - RNA, 19 nt, Artificial Sequence
  Description of Artificial Sequence: Synthetic oligonucleotide
uaucucaaauuaacuuuga

SEQ ID NO: 1152069 - RNA, 19 nt, Artificial Sequence
  Description of Artificial Sequence: Synthetic oligonucleotide
auuaacauucacuggcuuu

SEQ ID NO: 1152070 - RNA, 19 nt, Artificial Sequence
  Description of Artificial Sequence: Synthetic oligonucleotide
agccaaauaagucuuucau

SEQ ID NO: 1152071 - RNA, 19 nt, Artificial Sequence
  Description of Artificial Sequence: Synthetic oligonucleotide
uuaagaggugcaacccgcc

SEQ ID NO: 1152072 - RNA, 19 nt, Artificial Sequence
  Description of Artificial Sequence: Synthetic oligonucleotide
cuucaugauagucggguac

SEQ ID NO: 1152073 - RNA, 19 nt, Artificial Sequence
  Description of Artificial Sequence: Synthetic oligonucleotide
uacuguuagugaugucugg

SEQ ID NO: 1152074 - RNA, 19 nt, Artificial Sequence
  Description of Artificial Sequence: Synthetic oligonucleotide
aguacugguuaagaaacug

SEQ ID NO: 1152075 - RNA, 19 nt, Artificial Sequence
  Description of Artificial Sequence: Synthetic oligonucleotide
uacugguugcuuuccauga

SEQ ID NO: 1152076 - RNA, 19 nt, Artificial Sequence
  Description of Artificial Sequence: Synthetic oligonucleotide
uauugacuguugagcaugc

SEQ ID NO: 1152077 - RNA, 19 nt, Artificial Sequence
  Description of Artificial Sequence: Synthetic oligonucleotide
cuuuucgucuucuaagaca

SEQ ID NO: 1152078 - RNA, 19 nt, Artificial Sequence
  Description of Artificial Sequence: Synthetic oligonucleotide
uucaacuuugcaguuugca

SEQ ID NO: 1152079 - RNA, 19 nt, Artificial Sequence
  Description of Artificial Sequence: Synthetic oligonucleotide
uucccuuauugacuguuga

SEQ ID NO: 1152080 - RNA, 19 nt, Artificial Sequence
  Description of Artificial Sequence: Synthetic oligonucleotide
ccugugacuguauagagug

SEQ ID NO: 1152081 - RNA, 19 nt, Artificial Sequence
  Description of Artificial Sequence: Synthetic oligonucleotide
gguucaguugcuuagaaua

SEQ ID NO: 1152082 - RNA, 19 nt, Artificial Sequence
  Description of Artificial Sequence: Synthetic oligonucleotide
uggugauucaaagcuacca

SEQ ID NO: 1152083 - RNA, 19 nt, Artificial Sequence
  Description of Artificial Sequence: Synthetic oligonucleotide
ucccuuauugacuguugag

SEQ ID NO: 1152084 - RNA, 19 nt, Artificial Sequence
  Description of Artificial Sequence: Synthetic oligonucleotide
gacugucucgagcugcccg

SEQ ID NO: 1152085 - RNA, 19 nt, Artificial Sequence
  Description of Artificial Sequence: Synthetic oligonucleotide
uuugacuugcaaagauuuc

SEQ ID NO: 1152086 - RNA, 19 nt, Artificial Sequence
  Description of Artificial Sequence: Synthetic oligonucleotide
caucguuuauagaaagguc

SEQ ID NO: 1152087 - RNA, 19 nt, Artificial Sequence
  Description of Artificial Sequence: Synthetic oligonucleotide
ucggguacuucauuaacau

SEQ ID NO: 1152088 - RNA, 19 nt, Artificial Sequence
  Description of Artificial Sequence: Synthetic oligonucleotide
ugauuuacuguuggcgcag

SEQ ID NO: 1152089 - RNA, 19 nt, Artificial Sequence
  Description of Artificial Sequence: Synthetic oligonucleotide
cuuggaauagguaucgucu

SEQ ID NO: 1152090 - RNA, 19 nt, Artificial Sequence
  Description of Artificial Sequence: Synthetic oligonucleotide
ggguacuucauuaacauuc

SEQ ID NO: 1152091 - RNA, 19 nt, Artificial Sequence
  Description of Artificial Sequence: Synthetic oligonucleotide
ggacuuucaauacuaggug

SEQ ID NO: 1152092 - RNA, 19 nt, Artificial Sequence
  Description of Artificial Sequence: Synthetic oligonucleotide
ucguuuauagaaaggucuu

SEQ ID NO: 1152093 - RNA, 19 nt, Artificial Sequence
  Description of Artificial Sequence: Synthetic oligonucleotide
auccauuggauaaucaaga

SEQ ID NO: 1152094 - RNA, 19 nt, Artificial Sequence
  Description of Artificial Sequence: Synthetic oligonucleotide
uuagccuuucuaagugaca

SEQ ID NO: 1152095 - RNA, 19 nt, Artificial Sequence
  Description of Artificial Sequence: Synthetic oligonucleotide
aggaccaacggcgacaugu

SEQ ID NO: 1152096 - RNA, 19 nt, Artificial Sequence
  Description of Artificial Sequence: Synthetic oligonucleotide
uuuacugguugcuuuccau

SEQ ID NO: 1152097 - RNA, 19 nt, Artificial Sequence
  Description of Artificial Sequence: Synthetic oligonucleotide
aagagaggaaccgaucaau

SEQ ID NO: 1152098 - RNA, 19 nt, Artificial Sequence
  Description of Artificial Sequence: Synthetic oligonucleotide
agguccaugagacaagguu

SEQ ID NO: 1152099 - RNA, 19 nt, Artificial Sequence
  Description of Artificial Sequence: Synthetic oligonucleotide
uucuuauuauccugacagu

SEQ ID NO: 1152100 - RNA, 19 nt, Artificial Sequence
  Description of Artificial Sequence: Synthetic oligonucleotide
uaugugugaauaucuucau

SEQ ID NO: 1152101 - RNA, 19 nt, Artificial Sequence
  Description of Artificial Sequence: Synthetic oligonucleotide
augucagaauuugaagauc

SEQ ID NO: 1152102 - RNA, 19 nt, Artificial Sequence
  Description of Artificial Sequence: Synthetic oligonucleotide
uuuaaccuccauuucccua

SEQ ID NO: 1152103 - RNA, 19 nt, Artificial Sequence
  Description of Artificial Sequence: Synthetic oligonucleotide
augugugaauaucuucaug

SEQ ID NO: 1152104 - RNA, 19 nt, Artificial Sequence
  Description of Artificial Sequence: Synthetic oligonucleotide
uuaagacuuuccaggguau

SEQ ID NO: 1152105 - RNA, 19 nt, Artificial Sequence
  Description of Artificial Sequence: Synthetic oligonucleotide
cucgggguugacauuuucc

SEQ ID NO: 1152106 - RNA, 19 nt, Artificial Sequence
  Description of Artificial Sequence: Synthetic oligonucleotide
uucaugauagucggguacu

SEQ ID NO: 1152107 - RNA, 19 nt, Artificial Sequence
  Description of Artificial Sequence: Synthetic oligonucleotide
uccugugacuguauagagu

SEQ ID NO: 1152108 - RNA, 19 nt, Artificial Sequence
  Description of Artificial Sequence: Synthetic oligonucleotide
agaggugcaacccgccgag

SEQ ID NO: 1152109 - RNA, 19 nt, Artificial Sequence
  Description of Artificial Sequence: Synthetic oligonucleotide
auagucggguacuucauua

SEQ ID NO: 1152110 - RNA, 19 nt, Artificial Sequence
  Description of Artificial Sequence: Synthetic oligonucleotide
caauagacauguccauagc

SEQ ID NO: 1152111 - RNA, 19 nt, Artificial Sequence
  Description of Artificial Sequence: Synthetic oligonucleotide
gguaccagugguuuucuug

SEQ ID NO: 1152112 - RNA, 19 nt, Artificial Sequence
  Description of Artificial Sequence: Synthetic oligonucleotide
uuuagugucucuggugggu

SEQ ID NO: 1152113 - RNA, 19 nt, Artificial Sequence
  Description of Artificial Sequence: Synthetic oligonucleotide
gucaaaagcaaggacuuuc

SEQ ID NO: 1152114 - RNA, 19 nt, Artificial Sequence
  Description of Artificial Sequence: Synthetic oligonucleotide
guggguugagaagagaaac

SEQ ID NO: 1152115 - RNA, 19 nt, Artificial Sequence
  Description of Artificial Sequence: Synthetic oligonucleotide
acuuucaauacuaggugcu

SEQ ID NO: 1152116 - RNA, 19 nt, Artificial Sequence
  Description of Artificial Sequence: Synthetic oligonucleotide
aguuagccuuucuaaguga

SEQ ID NO: 1152117 - RNA, 19 nt, Artificial Sequence
  Description of Artificial Sequence: Synthetic oligonucleotide
uagguaucgucuguaauau

SEQ ID NO: 1152118 - RNA, 19 nt, Artificial Sequence
  Description of Artificial Sequence: Synthetic oligonucleotide
agacuuuccaggguauauc

SEQ ID NO: 1152119 - RNA, 19 nt, Artificial Sequence
  Description of Artificial Sequence: Synthetic oligonucleotide
ccauuggauaaucaagagg

SEQ ID NO: 1152120 - RNA, 19 nt, Artificial Sequence
  Description of Artificial Sequence: Synthetic oligonucleotide
acuguauagagugcuaaau

SEQ ID NO: 1152121 - RNA, 19 nt, Artificial Sequence
  Description of Artificial Sequence: Synthetic oligonucleotide
auggcccgcauacuguuag

SEQ ID NO: 1152122 - RNA, 19 nt, Artificial Sequence
  Description of Artificial Sequence: Synthetic oligonucleotide
uagccuuucuaagugacau

SEQ ID NO: 1152123 - RNA, 19 nt, Artificial Sequence
  Description of Artificial Sequence: Synthetic oligonucleotide
cugguugcuuuccaugaag

SEQ ID NO: 1152124 - RNA, 19 nt, Artificial Sequence
  Description of Artificial Sequence: Synthetic oligonucleotide
uucucccacuucaacuagc

SEQ ID NO: 1152125 - RNA, 19 nt, Artificial Sequence
  Description of Artificial Sequence: Synthetic oligonucleotide
uugcuaagcuuucaacuuu

SEQ ID NO: 1152126 - RNA, 19 nt, Artificial Sequence
  Description of Artificial Sequence: Synthetic oligonucleotide
uuacacauuuagugucucu

SEQ ID NO: 1152127 - RNA, 19 nt, Artificial Sequence
  Description of Artificial Sequence: Synthetic oligonucleotide
uguuuacugguugcuuucc

SEQ ID NO: 1152128 - RNA, 19 nt, Artificial Sequence
  Description of Artificial Sequence: Synthetic oligonucleotide
uacuuuagguaugggucag

SEQ ID NO: 1152129 - RNA, 19 nt, Artificial Sequence
  Description of Artificial Sequence: Synthetic oligonucleotide
uccaggguauauccagucu

SEQ ID NO: 1152130 - RNA, 19 nt, Artificial Sequence
  Description of Artificial Sequence: Synthetic oligonucleotide
gagguaggucuggugaagg

SEQ ID NO: 1152131 - RNA, 19 nt, Artificial Sequence
  Description of Artificial Sequence: Synthetic oligonucleotide
cauacuguuagugaugucu

SEQ ID NO: 1152132 - RNA, 19 nt, Artificial Sequence
  Description of Artificial Sequence: Synthetic oligonucleotide
guccugugacuguauagag

SEQ ID NO: 1152133 - RNA, 19 nt, Artificial Sequence
  Description of Artificial Sequence: Synthetic oligonucleotide
aaacauugcuaagcuuuca

SEQ ID NO: 1152134 - RNA, 19 nt, Artificial Sequence
  Description of Artificial Sequence: Synthetic oligonucleotide
agagcgugcacugcgcccg

SEQ ID NO: 1152135 - RNA, 19 nt, Artificial Sequence
  Description of Artificial Sequence: Synthetic oligonucleotide
auacuguuagugaugucug

SEQ ID NO: 1152136 - RNA, 19 nt, Artificial Sequence
  Description of Artificial Sequence: Synthetic oligonucleotide
uguggcgcguuuccccgcg

SEQ ID NO: 1152137 - RNA, 19 nt, Artificial Sequence
  Description of Artificial Sequence: Synthetic oligonucleotide
uaccaaugacucaggccag

SEQ ID NO: 1152138 - RNA, 19 nt, Artificial Sequence
  Description of Artificial Sequence: Synthetic oligonucleotide
ugacuguauagagugcuaa

SEQ ID NO: 1152139 - RNA, 19 nt, Artificial Sequence
  Description of Artificial Sequence: Synthetic oligonucleotide
aaggucuuuaagaggugca

SEQ ID NO: 1152140 - RNA, 19 nt, Artificial Sequence
  Description of Artificial Sequence: Synthetic oligonucleotide
ucaagagguaccagugguu

SEQ ID NO: 1152141 - RNA, 19 nt, Artificial Sequence
  Description of Artificial Sequence: Synthetic oligonucleotide
agaaacugauuuacuguug

SEQ ID NO: 1152142 - RNA, 19 nt, Artificial Sequence
  Description of Artificial Sequence: Synthetic oligonucleotide
guuagccuuucuaagugac

SEQ ID NO: 1152143 - RNA, 19 nt, Artificial Sequence
  Description of Artificial Sequence: Synthetic oligonucleotide
caacuagccaguccacaag

SEQ ID NO: 1152144 - RNA, 19 nt, Artificial Sequence
  Description of Artificial Sequence: Synthetic oligonucleotide
ugagguaggucuggugaag

SEQ ID NO: 1152145 - RNA, 19 nt, Artificial Sequence
  Description of Artificial Sequence: Synthetic oligonucleotide
gaauagguaucgucuguaa

SEQ ID NO: 1152146 - RNA, 19 nt, Artificial Sequence
  Description of Artificial Sequence: Synthetic oligonucleotide
cuguuuacugguugcuuuc

SEQ ID NO: 1152147 - RNA, 19 nt, Artificial Sequence
  Description of Artificial Sequence: Synthetic oligonucleotide
gaagagaggaaccgaucaa

SEQ ID NO: 1152148 - RNA, 19 nt, Artificial Sequence
  Description of Artificial Sequence: Synthetic oligonucleotide
gagacaagguuuaagacuu

SEQ ID NO: 1152149 - RNA, 19 nt, Artificial Sequence
  Description of Artificial Sequence: Synthetic oligonucleotide
gugaagguccaugagacaa

SEQ ID NO: 1152150 - RNA, 19 nt, Artificial Sequence
  Description of Artificial Sequence: Synthetic oligonucleotide
aacccgccgagucuugagu

SEQ ID NO: 1152151 - RNA, 19 nt, Artificial Sequence
  Description of Artificial Sequence: Synthetic oligonucleotide
agagaggaaccgaucaaug

SEQ ID NO: 1152152 - RNA, 19 nt, Artificial Sequence
  Description of Artificial Sequence: Synthetic oligonucleotide
uuuagguaugggucagcau

SEQ ID NO: 1152153 - RNA, 19 nt, Artificial Sequence
  Description of Artificial Sequence: Synthetic oligonucleotide
agacauguccauagcaugu

SEQ ID NO: 1152154 - RNA, 19 nt, Artificial Sequence
  Description of Artificial Sequence: Synthetic oligonucleotide
cugauuuacuguuggcgca

SEQ ID NO: 1152155 - RNA, 19 nt, Artificial Sequence
  Description of Artificial Sequence: Synthetic oligonucleotide
guauagagugcuaaaugaa

SEQ ID NO: 1152156 - RNA, 19 nt, Artificial Sequence
  Description of Artificial Sequence: Synthetic oligonucleotide
acccgccgagucuugaguc

SEQ ID NO: 1152157 - RNA, 19 nt, Artificial Sequence
  Description of Artificial Sequence: Synthetic oligonucleotide
aaguacugguuaagaaacu

SEQ ID NO: 1152158 - RNA, 19 nt, Artificial Sequence
  Description of Artificial Sequence: Synthetic oligonucleotide
auagcagcagugcccacaa

SEQ ID NO: 1152159 - RNA, 19 nt, Artificial Sequence
  Description of Artificial Sequence: Synthetic oligonucleotide
uuuacuguuggcgcagcua

SEQ ID NO: 1152160 - RNA, 19 nt, Artificial Sequence
  Description of Artificial Sequence: Synthetic oligonucleotide
augagugauggcaaauacu

SEQ ID NO: 1152161 - RNA, 19 nt, Artificial Sequence
  Description of Artificial Sequence: Synthetic oligonucleotide
cuggugaagguccaugaga

SEQ ID NO: 1152162 - RNA, 19 nt, Artificial Sequence
  Description of Artificial Sequence: Synthetic oligonucleotide
guaugggucagcaucuauc

SEQ ID NO: 1152163 - RNA, 19 nt, Artificial Sequence
  Description of Artificial Sequence: Synthetic oligonucleotide
agcauagcagcagugccca

SEQ ID NO: 1152164 - RNA, 19 nt, Artificial Sequence
  Description of Artificial Sequence: Synthetic oligonucleotide
cacuucaacuagccagucc

SEQ ID NO: 1152165 - RNA, 19 nt, Artificial Sequence
  Description of Artificial Sequence: Synthetic oligonucleotide
uacuguuggcgcagcuaag

SEQ ID NO: 1152166 - RNA, 19 nt, Artificial Sequence
  Description of Artificial Sequence: Synthetic oligonucleotide
auacuaggugcuccauucu

SEQ ID NO: 1152167 - RNA, 19 nt, Artificial Sequence
  Description of Artificial Sequence: Synthetic oligonucleotide
gacuguauagagugcuaaa

SEQ ID NO: 1152168 - RNA, 19 nt, Artificial Sequence
  Description of Artificial Sequence: Synthetic oligonucleotide
aaacaccaugguauuuuga

SEQ ID NO: 1152169 - RNA, 19 nt, Artificial Sequence
  Description of Artificial Sequence: Synthetic oligonucleotide
auuuacuguuggcgcagcu

SEQ ID NO: 1152170 - RNA, 19 nt, Artificial Sequence
  Description of Artificial Sequence: Synthetic oligonucleotide
uagucggguacuucauuaa

SEQ ID NO: 1152171 - RNA, 19 nt, Artificial Sequence
  Description of Artificial Sequence: Synthetic oligonucleotide
gagaggaaccgaucaaugu

SEQ ID NO: 1152172 - RNA, 19 nt, Artificial Sequence
  Description of Artificial Sequence: Synthetic oligonucleotide
cuuucaauacuaggugcuc

SEQ ID NO: 1152173 - RNA, 19 nt, Artificial Sequence
  Description of Artificial Sequence: Synthetic oligonucleotide
cugcgcgggacccuggcgg

SEQ ID NO: 1152174 - RNA, 19 nt, Artificial Sequence
  Description of Artificial Sequence: Synthetic oligonucleotide
gcauguggugauucaaagc

SEQ ID NO: 1152175 - RNA, 19 nt, Artificial Sequence
  Description of Artificial Sequence: Synthetic oligonucleotide
aucgucuguaauauacaca

SEQ ID NO: 1152176 - RNA, 19 nt, Artificial Sequence
  Description of Artificial Sequence: Synthetic oligonucleotide
guauauccagucuuuugua

SEQ ID NO: 1152177 - RNA, 19 nt, Artificial Sequence
  Description of Artificial Sequence: Synthetic oligonucleotide
ccuuauugacuguugagca

SEQ ID NO: 1152178 - RNA, 19 nt, Artificial Sequence
  Description of Artificial Sequence: Synthetic oligonucleotide
acuguuggcgcagcuaagu

SEQ ID NO: 1152179 - RNA, 19 nt, Artificial Sequence
  Description of Artificial Sequence: Synthetic oligonucleotide
ugguucaguugcuuagaau

SEQ ID NO: 1152180 - RNA, 19 nt, Artificial Sequence
  Description of Artificial Sequence: Synthetic oligonucleotide
ggcgcagcuaagucaaaag

SEQ ID NO: 1152181 - RNA, 19 nt, Artificial Sequence
  Description of Artificial Sequence: Synthetic oligonucleotide
gguugagaagagaaacacc

SEQ ID NO: 1152182 - RNA, 19 nt, Artificial Sequence
  Description of Artificial Sequence: Synthetic oligonucleotide
gucuuuuguaccaaugacu

SEQ ID NO: 1152183 - RNA, 19 nt, Artificial Sequence
  Description of Artificial Sequence: Synthetic oligonucleotide
gcguucccggccuugaggg

SEQ ID NO: 1152184 - RNA, 19 nt, Artificial Sequence
  Description of Artificial Sequence: Synthetic oligonucleotide
gacuugcaaagauuuccaa

SEQ ID NO: 1152185 - RNA, 19 nt, Artificial Sequence
  Description of Artificial Sequence: Synthetic oligonucleotide
uccggucgggacccgucgg

SEQ ID NO: 1152186 - RNA, 19 nt, Artificial Sequence
  Description of Artificial Sequence: Synthetic oligonucleotide
auagcauguggugauucaa

SEQ ID NO: 1152187 - RNA, 19 nt, Artificial Sequence
  Description of Artificial Sequence: Synthetic oligonucleotide
gcgcagcuaagucaaaagc

SEQ ID NO: 1152188 - RNA, 19 nt, Artificial Sequence
  Description of Artificial Sequence: Synthetic oligonucleotide
gucuggugaagguccauga

SEQ ID NO: 1152189 - RNA, 19 nt, Artificial Sequence
  Description of Artificial Sequence: Synthetic oligonucleotide
uugaagcuagcagcauagc

SEQ ID NO: 1152190 - RNA, 19 nt, Artificial Sequence
  Description of Artificial Sequence: Synthetic oligonucleotide
agugaaggccggcuguuua

SEQ ID NO: 1152191 - RNA, 19 nt, Artificial Sequence
  Description of Artificial Sequence: Synthetic oligonucleotide
guaucgucuguaauauaca

SEQ ID NO: 1152192 - RNA, 19 nt, Artificial Sequence
  Description of Artificial Sequence: Synthetic oligonucleotide
ggcuuuucgucuucuaaga

SEQ ID NO: 1152193 - RNA, 19 nt, Artificial Sequence
  Description of Artificial Sequence: Synthetic oligonucleotide
uggcgcguuuccccgcgcg

SEQ ID NO: 1152194 - RNA, 19 nt, Artificial Sequence
  Description of Artificial Sequence: Synthetic oligonucleotide
guuggcgcagcuaagucaa

SEQ ID NO: 1152195 - RNA, 19 nt, Artificial Sequence
  Description of Artificial Sequence: Synthetic oligonucleotide
agguaggucuggugaaggu

SEQ ID NO: 1152196 - RNA, 19 nt, Artificial Sequence
  Description of Artificial Sequence: Synthetic oligonucleotide
cuuacacauuuagugucuc

SEQ ID NO: 1152197 - RNA, 19 nt, Artificial Sequence
  Description of Artificial Sequence: Synthetic oligonucleotide
ggauaaucaagagguacca

SEQ ID NO: 1152198 - RNA, 19 nt, Artificial Sequence
  Description of Artificial Sequence: Synthetic oligonucleotide
gucggguacuucauuaaca

SEQ ID NO: 1152199 - RNA, 19 nt, Artificial Sequence
  Description of Artificial Sequence: Synthetic oligonucleotide
gcuaagucaaaagcaagga

SEQ ID NO: 1152200 - RNA, 19 nt, Artificial Sequence
  Description of Artificial Sequence: Synthetic oligonucleotide
ucccuaagguaugugugaa

SEQ ID NO: 1152201 - RNA, 19 nt, Artificial Sequence
  Description of Artificial Sequence: Synthetic oligonucleotide
cagagcgugcacugcgccc

SEQ ID NO: 1152202 - RNA, 19 nt, Artificial Sequence
  Description of Artificial Sequence: Synthetic oligonucleotide
auggaagagaggaaccgau

SEQ ID NO: 1152203 - RNA, 19 nt, Artificial Sequence
  Description of Artificial Sequence: Synthetic oligonucleotide
cucgcgacccgacugucuc

SEQ ID NO: 1152204 - RNA, 19 nt, Artificial Sequence
  Description of Artificial Sequence: Synthetic oligonucleotide
uggcgccaccuucucgggg

SEQ ID NO: 1152205 - RNA, 19 nt, Artificial Sequence
  Description of Artificial Sequence: Synthetic oligonucleotide
cuaagacaauagacauguc

SEQ ID NO: 1152206 - RNA, 19 nt, Artificial Sequence
  Description of Artificial Sequence: Synthetic oligonucleotide
gcuguggcgcguuuccccg

SEQ ID NO: 1152207 - RNA, 19 nt, Artificial Sequence
  Description of Artificial Sequence: Synthetic oligonucleotide
gacccuggcggccgacgcg

SEQ ID NO: 1152208 - RNA, 19 nt, Artificial Sequence
  Description of Artificial Sequence: Synthetic oligonucleotide
aggucuuuaagaggugcaa

SEQ ID NO: 1152209 - RNA, 19 nt, Artificial Sequence
  Description of Artificial Sequence: Synthetic oligonucleotide
ucgcgacccgacugucucg

SEQ ID NO: 1152210 - RNA, 19 nt, Artificial Sequence
  Description of Artificial Sequence: Synthetic oligonucleotide
uaccauccauuggauaauc

SEQ ID NO: 1152211 - RNA, 19 nt, Artificial Sequence
  Description of Artificial Sequence: Synthetic oligonucleotide
gggucagcaucuaucaaac

SEQ ID NO: 1152212 - RNA, 19 nt, Artificial Sequence
  Description of Artificial Sequence: Synthetic oligonucleotide
gcuuuucgucuucuaagac

SEQ ID NO: 1152213 - RNA, 19 nt, Artificial Sequence
  Description of Artificial Sequence: Synthetic oligonucleotide
acggcgacauguucaucgu

SEQ ID NO: 1152214 - RNA, 19 nt, Artificial Sequence
  Description of Artificial Sequence: Synthetic oligonucleotide
cucuuaacacagacaugga

SEQ ID NO: 1152215 - RNA, 19 nt, Artificial Sequence
  Description of Artificial Sequence: Synthetic oligonucleotide
cuuuauguucagcuggcau

SEQ ID NO: 1152216 - RNA, 19 nt, Artificial Sequence
  Description of Artificial Sequence: Synthetic oligonucleotide
caacccgccgagucuugag

SEQ ID NO: 1152217 - RNA, 19 nt, Artificial Sequence
  Description of Artificial Sequence: Synthetic oligonucleotide
agcaauugguucaguugcu

SEQ ID NO: 1152218 - RNA, 19 nt, Artificial Sequence
  Description of Artificial Sequence: Synthetic oligonucleotide
cagcaucuaucaaacuuaa

SEQ ID NO: 1152219 - RNA, 19 nt, Artificial Sequence
  Description of Artificial Sequence: Synthetic oligonucleotide
ccacugaacaauaaaccaa

SEQ ID NO: 1152220 - RNA, 19 nt, Artificial Sequence
  Description of Artificial Sequence: Synthetic oligonucleotide
gcagcaccaaauguuaaca

SEQ ID NO: 1152221 - RNA, 19 nt, Artificial Sequence
  Description of Artificial Sequence: Synthetic oligonucleotide
guggugauucaaagcuacc

SEQ ID NO: 1152222 - RNA, 19 nt, Artificial Sequence
  Description of Artificial Sequence: Synthetic oligonucleotide
cuccggucgggacccgucg

SEQ ID NO: 1152223 - RNA, 19 nt, Artificial Sequence
  Description of Artificial Sequence: Synthetic oligonucleotide
cuguuagugaugucuggcu

SEQ ID NO: 1152224 - RNA, 19 nt, Artificial Sequence
  Description of Artificial Sequence: Synthetic oligonucleotide
gaccaacggcgacauguuc

SEQ ID NO: 1152225 - RNA, 19 nt, Artificial Sequence
  Description of Artificial Sequence: Synthetic oligonucleotide
cuuauugacuguugagcau

SEQ ID NO: 1152226 - RNA, 19 nt, Artificial Sequence
  Description of Artificial Sequence: Synthetic oligonucleotide
cacuuuagguuuacauuua

SEQ ID NO: 1152227 - RNA, 19 nt, Artificial Sequence
  Description of Artificial Sequence: Synthetic oligonucleotide
cugcucugagguaggucug

SEQ ID NO: 1152228 - RNA, 19 nt, Artificial Sequence
  Description of Artificial Sequence: Synthetic oligonucleotide
aagguccaugagacaaggu

SEQ ID NO: 1152229 - RNA, 19 nt, Artificial Sequence
  Description of Artificial Sequence: Synthetic oligonucleotide
uggcgcagcuaagucaaaa

SEQ ID NO: 1152230 - RNA, 19 nt, Artificial Sequence
  Description of Artificial Sequence: Synthetic oligonucleotide
ucaugauagucggguacuu

SEQ ID NO: 1152231 - RNA, 19 nt, Artificial Sequence
  Description of Artificial Sequence: Synthetic oligonucleotide
accgaucaauguaguucac

SEQ ID NO: 1152232 - RNA, 19 nt, Artificial Sequence
  Description of Artificial Sequence: Synthetic oligonucleotide
ugcaacccgccgagucuug

SEQ ID NO: 1152233 - RNA, 19 nt, Artificial Sequence
  Description of Artificial Sequence: Synthetic oligonucleotide
auugaccaagucagcaauu

SEQ ID NO: 1152234 - RNA, 19 nt, Artificial Sequence
  Description of Artificial Sequence: Synthetic oligonucleotide
aacccacuuuagguuuaca

SEQ ID NO: 1152235 - RNA, 19 nt, Artificial Sequence
  Description of Artificial Sequence: Synthetic oligonucleotide
ccaugagacaagguuuaag

SEQ ID NO: 1152236 - RNA, 19 nt, Artificial Sequence
  Description of Artificial Sequence: Synthetic oligonucleotide
aggaaccgaucaauguagu

SEQ ID NO: 1152237 - RNA, 19 nt, Artificial Sequence
  Description of Artificial Sequence: Synthetic oligonucleotide
auagugaaggccggcuguu

SEQ ID NO: 1152238 - RNA, 19 nt, Artificial Sequence
  Description of Artificial Sequence: Synthetic oligonucleotide
ccggcuguuuacugguugc

SEQ ID NO: 1152239 - RNA, 19 nt, Artificial Sequence
  Description of Artificial Sequence: Synthetic oligonucleotide
ugcccggcaucgcggcucc

SEQ ID NO: 1152240 - RNA, 19 nt, Artificial Sequence
  Description of Artificial Sequence: Synthetic oligonucleotide
auaacccacuuuagguuua

SEQ ID NO: 1152241 - RNA, 19 nt, Artificial Sequence
  Description of Artificial Sequence: Synthetic oligonucleotide
aggguauauccagucuuuu

SEQ ID NO: 1152242 - RNA, 19 nt, Artificial Sequence
  Description of Artificial Sequence: Synthetic oligonucleotide
ccuaagguaugugugaaua

SEQ ID NO: 1152243 - RNA, 19 nt, Artificial Sequence
  Description of Artificial Sequence: Synthetic oligonucleotide
agguaucgucuguaauaua

SEQ ID NO: 1152244 - RNA, 19 nt, Artificial Sequence
  Description of Artificial Sequence: Synthetic oligonucleotide
ggcggcagagcgugcacug

SEQ ID NO: 1152245 - RNA, 19 nt, Artificial Sequence
  Description of Artificial Sequence: Synthetic oligonucleotide
ggaauagguaucgucugua

SEQ ID NO: 1152246 - RNA, 19 nt, Artificial Sequence
  Description of Artificial Sequence: Synthetic oligonucleotide
gcuaagcuuucaacuuugc

SEQ ID NO: 1152247 - RNA, 19 nt, Artificial Sequence
  Description of Artificial Sequence: Synthetic oligonucleotide
gccggcuguuuacugguug

SEQ ID NO: 1152248 - RNA, 19 nt, Artificial Sequence
  Description of Artificial Sequence: Synthetic oligonucleotide
uucucgggguugacauuuu

SEQ ID NO: 1152249 - RNA, 19 nt, Artificial Sequence
  Description of Artificial Sequence: Synthetic oligonucleotide
ugcccacaaguugaagcuu

SEQ ID NO: 1152250 - RNA, 19 nt, Artificial Sequence
  Description of Artificial Sequence: Synthetic oligonucleotide
cuguggcgcguuuccccgc

SEQ ID NO: 1152251 - RNA, 19 nt, Artificial Sequence
  Description of Artificial Sequence: Synthetic oligonucleotide
ccgcauacuguuagugaug

SEQ ID NO: 1152252 - RNA, 19 nt, Artificial Sequence
  Description of Artificial Sequence: Synthetic oligonucleotide
ugcacugcgcccgccgcuc

SEQ ID NO: 1152253 - RNA, 19 nt, Artificial Sequence
  Description of Artificial Sequence: Synthetic oligonucleotide
uggcccgcauacuguuagu

SEQ ID NO: 1152254 - RNA, 19 nt, Artificial Sequence
  Description of Artificial Sequence: Synthetic oligonucleotide
gccaaauaagucuuucauu

SEQ ID NO: 1152255 - RNA, 19 nt, Artificial Sequence
  Description of Artificial Sequence: Synthetic oligonucleotide
agaccagggcugagcccgc

SEQ ID NO: 1152256 - RNA, 19 nt, Artificial Sequence
  Description of Artificial Sequence: Synthetic oligonucleotide
ccgacugucucgagcugcc

SEQ ID NO: 1152257 - RNA, 19 nt, Artificial Sequence
  Description of Artificial Sequence: Synthetic oligonucleotide
cugagcccgccucgcgacc

SEQ ID NO: 1152258 - RNA, 19 nt, Artificial Sequence
  Description of Artificial Sequence: Synthetic oligonucleotide
cauuaacauucacuggcuu

SEQ ID NO: 1152259 - RNA, 19 nt, Artificial Sequence
  Description of Artificial Sequence: Synthetic oligonucleotide
ggcccgcauacuguuagug

SEQ ID NO: 1152260 - RNA, 19 nt, Artificial Sequence
  Description of Artificial Sequence: Synthetic oligonucleotide
gguaaagagacagcagcau

SEQ ID NO: 1152261 - RNA, 19 nt, Artificial Sequence
  Description of Artificial Sequence: Synthetic oligonucleotide
ggacccgucggcggcagag

SEQ ID NO: 1152262 - RNA, 19 nt, Artificial Sequence
  Description of Artificial Sequence: Synthetic oligonucleotide
uagugaaggccggcuguuu

SEQ ID NO: 1152263 - RNA, 19 nt, Artificial Sequence
  Description of Artificial Sequence: Synthetic oligonucleotide
uggcggccgacgcgcggag

SEQ ID NO: 1152264 - RNA, 19 nt, Artificial Sequence
  Description of Artificial Sequence: Synthetic oligonucleotide
ccauagcauguggugauuc

SEQ ID NO: 1152265 - RNA, 19 nt, Artificial Sequence
  Description of Artificial Sequence: Synthetic oligonucleotide
cgagcugcccggcaucgcg

SEQ ID NO: 1152266 - RNA, 19 nt, Artificial Sequence
  Description of Artificial Sequence: Synthetic oligonucleotide
gagcgugcacugcgcccgc

SEQ ID NO: 1152267 - RNA, 19 nt, Artificial Sequence
  Description of Artificial Sequence: Synthetic oligonucleotide
cgucuucuaagacaauaga

SEQ ID NO: 1152268 - RNA, 19 nt, Artificial Sequence
  Description of Artificial Sequence: Synthetic oligonucleotide
ggacccuggcggccgacgc

SEQ ID NO: 1152269 - RNA, 19 nt, Artificial Sequence
  Description of Artificial Sequence: Synthetic oligonucleotide
ccgagucuugagucucugc

SEQ ID NO: 1152270 - RNA, 19 nt, Artificial Sequence
  Description of Artificial Sequence: Synthetic oligonucleotide
gugacuguauagagugcua

SEQ ID NO: 1152271 - RNA, 19 nt, Artificial Sequence
  Description of Artificial Sequence: Synthetic oligonucleotide
caggguauauccagucuuu

SEQ ID NO: 1152272 - RNA, 19 nt, Artificial Sequence
  Description of Artificial Sequence: Synthetic oligonucleotide
gcauuaaaagccagggcau

SEQ ID NO: 1152273 - RNA, 19 nt, Artificial Sequence
  Description of Artificial Sequence: Synthetic oligonucleotide
gcugcgcgggacccuggcg

SEQ ID NO: 1152274 - RNA, 19 nt, Artificial Sequence
  Description of Artificial Sequence: Synthetic oligonucleotide
gcgugcacugcgcccgccg

SEQ ID NO: 1152275 - RNA, 19 nt, Artificial Sequence
  Description of Artificial Sequence: Synthetic oligonucleotide
ucgagcugcccggcaucgc

SEQ ID NO: 1152276 - RNA, 19 nt, Artificial Sequence
  Description of Artificial Sequence: Synthetic oligonucleotide
cccacaaguugaagcuuuc

SEQ ID NO: 1152277 - RNA, 19 nt, Artificial Sequence
  Description of Artificial Sequence: Synthetic oligonucleotide
cacugcgcccgccgcuccc

SEQ ID NO: 1152278 - RNA, 19 nt, Artificial Sequence
  Description of Artificial Sequence: Synthetic oligonucleotide
gauggcccgcauacuguua

SEQ ID NO: 1152279 - RNA, 19 nt, Artificial Sequence
  Description of Artificial Sequence: Synthetic oligonucleotide
cugcccggcaucgcggcuc

SEQ ID NO: 1152280 - RNA, 19 nt, Artificial Sequence
  Description of Artificial Sequence: Synthetic oligonucleotide
cgcguucccggccuugagg

SEQ ID NO: 1152281 - RNA, 19 nt, Artificial Sequence
  Description of Artificial Sequence: Synthetic oligonucleotide
cuaccauccauuggauaau

SEQ ID NO: 1152282 - RNA, 19 nt, Artificial Sequence
  Description of Artificial Sequence: Synthetic oligonucleotide
cugcagcgagaccagggcu

SEQ ID NO: 1152283 - RNA, 19 nt, Artificial Sequence
  Description of Artificial Sequence: Synthetic oligonucleotide
ggaaccgaucaauguaguu

SEQ ID NO: 1152284 - RNA, 19 nt, Artificial Sequence
  Description of Artificial Sequence: Synthetic oligonucleotide
gcauacuguuagugauguc

SEQ ID NO: 1152285 - RNA, 19 nt, Artificial Sequence
  Description of Artificial Sequence: Synthetic oligonucleotide
ggcgacauguucaucguuu

SEQ ID NO: 1152286 - RNA, 19 nt, Artificial Sequence
  Description of Artificial Sequence: Synthetic oligonucleotide
cgagucuugagucucugcu

SEQ ID NO: 1152287 - RNA, 19 nt, Artificial Sequence
  Description of Artificial Sequence: Synthetic oligonucleotide
gguaugggucagcaucuau

SEQ ID NO: 1152288 - RNA, 19 nt, Artificial Sequence
  Description of Artificial Sequence: Synthetic oligonucleotide
gcggccgacgcgcggagca

SEQ ID NO: 1152289 - RNA, 19 nt, Artificial Sequence
  Description of Artificial Sequence: Synthetic oligonucleotide
guggcgcguuuccccgcgc

SEQ ID NO: 1152290 - RNA, 19 nt, Artificial Sequence
  Description of Artificial Sequence: Synthetic oligonucleotide
ggccgacgcgcggagcagg

SEQ ID NO: 1152291 - RNA, 19 nt, Artificial Sequence
  Description of Artificial Sequence: Synthetic oligonucleotide
cugcgcccgccgcucccgg

SEQ ID NO: 1152292 - RNA, 19 nt, Artificial Sequence
  Description of Artificial Sequence: Synthetic oligonucleotide
ccaggguauauccagucuu

SEQ ID NO: 1152293 - RNA, 19 nt, Artificial Sequence
  Description of Artificial Sequence: Synthetic oligonucleotide
caaugacucaggccagcuu

SEQ ID NO: 1152294 - RNA, 19 nt, Artificial Sequence
  Description of Artificial Sequence: Synthetic oligonucleotide
cccggcaucgcggcuccgg

SEQ ID NO: 1152295 - RNA, 19 nt, Artificial Sequence
  Description of Artificial Sequence: Synthetic oligonucleotide
ccgccucgcgacccgacug

SEQ ID NO: 1152296 - RNA, 19 nt, Artificial Sequence
  Description of Artificial Sequence: Synthetic oligonucleotide
gcguuuccccgcgcguucc

SEQ ID NO: 1152297 - RNA, 19 nt, Artificial Sequence
  Description of Artificial Sequence: Synthetic oligonucleotide
ccacuucaacuagccaguc

SEQ ID NO: 1152298 - RNA, 19 nt, Artificial Sequence
  Description of Artificial Sequence: Synthetic oligonucleotide
gcgcguucccggccuugag

SEQ ID NO: 1152299 - RNA, 19 nt, Artificial Sequence
  Description of Artificial Sequence: Synthetic oligonucleotide
ggccagcuuuguccuguga

SEQ ID NO: 1152300 - RNA, 19 nt, Artificial Sequence
  Description of Artificial Sequence: Synthetic oligonucleotide
ccaacggcgacauguucau

SEQ ID NO: 1152301 - RNA, 19 nt, Artificial Sequence
  Description of Artificial Sequence: Synthetic oligonucleotide
gcgacccgacugucucgag

SEQ ID NO: 1152302 - RNA, 19 nt, Artificial Sequence
  Description of Artificial Sequence: Synthetic oligonucleotide
gugcaacccgccgagucuu

SEQ ID NO: 1152303 - RNA, 19 nt, Artificial Sequence
  Description of Artificial Sequence: Synthetic oligonucleotide
gccgacgcgcggagcaggc

SEQ ID NO: 1152304 - RNA, 19 nt, Artificial Sequence
  Description of Artificial Sequence: Synthetic oligonucleotide
gcaacccgccgagucuuga

SEQ ID NO: 1152305 - RNA, 19 nt, Artificial Sequence
  Description of Artificial Sequence: Synthetic oligonucleotide
gcccacaaguugaagcuuu

SEQ ID NO: 1152306 - RNA, 19 nt, Artificial Sequence
  Description of Artificial Sequence: Synthetic oligonucleotide
gaggugcaacccgccgagu

SEQ ID NO: 1152307 - RNA, 19 nt, Artificial Sequence
  Description of Artificial Sequence: Synthetic oligonucleotide
agcccgccucgcgacccga

SEQ ID NO: 1152308 - RNA, 19 nt, Artificial Sequence
  Description of Artificial Sequence: Synthetic oligonucleotide
cgcguuuccccgcgcguuc

SEQ ID NO: 1152309 - RNA, 19 nt, Artificial Sequence
  Description of Artificial Sequence: Synthetic oligonucleotide
gcuccggucgggacccguc

SEQ ID NO: 1152310 - RNA, 19 nt, Artificial Sequence
  Description of Artificial Sequence: Synthetic oligonucleotide
ggcgcguuuccccgcgcgu

SEQ ID NO: 1152311 - RNA, 19 nt, Artificial Sequence
  Description of Artificial Sequence: Synthetic oligonucleotide
ccgacgcgcggagcaggcg

SEQ ID NO: 1152312 - RNA, 19 nt, Artificial Sequence
  Description of Artificial Sequence: Synthetic oligonucleotide
gcgcccgcggcugcugggc

SEQ ID NO: 1152313 - RNA, 19 nt, Artificial Sequence
  Description of Artificial Sequence: Synthetic oligonucleotide
ccauuucccuaagguaugu

SEQ ID NO: 1152314 - RNA, 19 nt, Artificial Sequence
  Description of Artificial Sequence: Synthetic oligonucleotide
cgcgggacccuggcggccg

SEQ ID NO: 1152315 - RNA, 19 nt, Artificial Sequence
  Description of Artificial Sequence: Synthetic oligonucleotide
cccuaagguaugugugaau

SEQ ID NO: 1152316 - RNA, 19 nt, Artificial Sequence
  Description of Artificial Sequence: Synthetic oligonucleotide
ccgcgcccgcggcugcugg

SEQ ID NO: 1152317 - RNA, 19 nt, Artificial Sequence
  Description of Artificial Sequence: Synthetic oligonucleotide
cguuuauagaaaggucuuu

SEQ ID NO: 1152318 - RNA, 19 nt, Artificial Sequence
  Description of Artificial Sequence: Synthetic oligonucleotide
gccucgcgacccgacuguc

SEQ ID NO: 1152319 - RNA, 19 nt, Artificial Sequence
  Description of Artificial Sequence: Synthetic oligonucleotide
ggcggccgacgcgcggagc

SEQ ID NO: 1152320 - RNA, 19 nt, Artificial Sequence
  Description of Artificial Sequence: Synthetic oligonucleotide
cgcgacccgacugucucga

SEQ ID NO: 1152321 - RNA, 19 nt, Artificial Sequence
  Description of Artificial Sequence: Synthetic oligonucleotide
ccucgcgacccgacugucu

SEQ ID NO: 1152322 - RNA, 19 nt, Artificial Sequence
  Description of Artificial Sequence: Synthetic oligonucleotide
cggguacuucauuaacauu

SEQ ID NO: 1152323 - RNA, 19 nt, Artificial Sequence
  Description of Artificial Sequence: Synthetic oligonucleotide
gcgggacccuggcggccga

SEQ ID NO: 1152324 - RNA, 19 nt, Artificial Sequence
  Description of Artificial Sequence: Synthetic oligonucleotide
ccgcgcguucccggccuug

SEQ ID NO: 1152325 - RNA, 19 nt, Artificial Sequence
  Description of Artificial Sequence: Synthetic oligonucleotide
gcgcguuuccccgcgcguu

SEQ ID NO: 1152326 - RNA, 19 nt, Artificial Sequence
  Description of Artificial Sequence: Synthetic oligonucleotide
cggccgacgcgcggagcag

SEQ ID NO: 1152327 - RNA, 19 nt, Artificial Sequence
  Description of Artificial Sequence: Synthetic oligonucleotide
gcccggcaucgcggcuccg

SEQ ID NO: 1152328 - RNA, 19 nt, Artificial Sequence
  Description of Artificial Sequence: Synthetic oligonucleotide
ggcuccggucgggacccgu

SEQ ID NO: 1152329 - RNA, 19 nt, Artificial Sequence
  Description of Artificial Sequence: Synthetic oligonucleotide
cgcgcguucccggccuuga

SEQ ID NO: 1152330 - RNA, 19 nt, Artificial Sequence
  Description of Artificial Sequence: Synthetic oligonucleotide
cgccgagucuugagucucu

SEQ ID NO: 1152331 - RNA, 19 nt, Artificial Sequence
  Description of Artificial Sequence: Synthetic oligonucleotide
cgccucgcgacccgacugu

SEQ ID NO: 1152332 - RNA, 19 nt, Artificial Sequence
  Description of Artificial Sequence: Synthetic oligonucleotide
ggccggcuguuuacugguu

SEQ ID NO: 1152333 - RNA, 19 nt, Artificial Sequence
  Description of Artificial Sequence: Synthetic oligonucleotide
aagcuuauucuucugagcc

SEQ ID NO: 1152334 - RNA, 19 nt, Artificial Sequence
  Description of Artificial Sequence: Synthetic oligonucleotide
ugugucauguuauauauag

SEQ ID NO: 1152335 - RNA, 19 nt, Artificial Sequence
  Description of Artificial Sequence: Synthetic oligonucleotide
ucuaacauugggcauaucc

SEQ ID NO: 1152336 - RNA, 19 nt, Artificial Sequence
  Description of Artificial Sequence: Synthetic oligonucleotide
ucauguuauauauagaccu

SEQ ID NO: 1152337 - RNA, 19 nt, Artificial Sequence
  Description of Artificial Sequence: Synthetic oligonucleotide
ugagcuaggauuaucagcu

SEQ ID NO: 1152338 - RNA, 19 nt, Artificial Sequence
  Description of Artificial Sequence: Synthetic oligonucleotide
gauuagcuaacaaagaacc

SEQ ID NO: 1152339 - RNA, 19 nt, Artificial Sequence
  Description of Artificial Sequence: Synthetic oligonucleotide
gcuguuguaacuuuaaugg

SEQ ID NO: 1152340 - RNA, 19 nt, Artificial Sequence
  Description of Artificial Sequence: Synthetic oligonucleotide
agugacaacugagagaugc

SEQ ID NO: 1152341 - RNA, 19 nt, Artificial Sequence
  Description of Artificial Sequence: Synthetic oligonucleotide
aaucuauauucccuucccc

SEQ ID NO: 1152342 - RNA, 19 nt, Artificial Sequence
  Description of Artificial Sequence: Synthetic oligonucleotide
augaaaaguguucagcgac

SEQ ID NO: 1152343 - RNA, 19 nt, Artificial Sequence
  Description of Artificial Sequence: Synthetic oligonucleotide
gagaugaaaagucaugagc

SEQ ID NO: 1152344 - RNA, 19 nt, Artificial Sequence
  Description of Artificial Sequence: Synthetic oligonucleotide
aacucucuaacauugggca

SEQ ID NO: 1152345 - RNA, 19 nt, Artificial Sequence
  Description of Artificial Sequence: Synthetic oligonucleotide
uucgacuuggaccaaaucu

SEQ ID NO: 1152346 - RNA, 19 nt, Artificial Sequence
  Description of Artificial Sequence: Synthetic oligonucleotide
uucaguucgacuuggacca

SEQ ID NO: 1152347 - RNA, 19 nt, Artificial Sequence
  Description of Artificial Sequence: Synthetic oligonucleotide
uuuaagguuggcaaccuca

SEQ ID NO: 1152348 - RNA, 19 nt, Artificial Sequence
  Description of Artificial Sequence: Synthetic oligonucleotide
augagcuaggauuaucagc

SEQ ID NO: 1152349 - RNA, 19 nt, Artificial Sequence
  Description of Artificial Sequence: Synthetic oligonucleotide
uauagaccuauucauauau

SEQ ID NO: 1152350 - RNA, 19 nt, Artificial Sequence
  Description of Artificial Sequence: Synthetic oligonucleotide
caauggaacacauaacaag

SEQ ID NO: 1152351 - RNA, 19 nt, Artificial Sequence
  Description of Artificial Sequence: Synthetic oligonucleotide
ugauuagcuaacaaagaac

SEQ ID NO: 1152352 - RNA, 19 nt, Artificial Sequence
  Description of Artificial Sequence: Synthetic oligonucleotide
acugaagcaacaguauucc

SEQ ID NO: 1152353 - RNA, 19 nt, Artificial Sequence
  Description of Artificial Sequence: Synthetic oligonucleotide
uaaguagucagcauagguc

SEQ ID NO: 1152354 - RNA, 19 nt, Artificial Sequence
  Description of Artificial Sequence: Synthetic oligonucleotide
aggauuaucagcuggccag

SEQ ID NO: 1152355 - RNA, 19 nt, Artificial Sequence
  Description of Artificial Sequence: Synthetic oligonucleotide
cauaggacugccaaccugg

SEQ ID NO: 1152356 - RNA, 19 nt, Artificial Sequence
  Description of Artificial Sequence: Synthetic oligonucleotide
acacguagacaccaggggc

SEQ ID NO: 1152357 - RNA, 19 nt, Artificial Sequence
  Description of Artificial Sequence: Synthetic oligonucleotide
uucagcgacucccagaaug

SEQ ID NO: 1152358 - RNA, 19 nt, Artificial Sequence
  Description of Artificial Sequence: Synthetic oligonucleotide
uaacauugggcauauccag

SEQ ID NO: 1152359 - RNA, 19 nt, Artificial Sequence
  Description of Artificial Sequence: Synthetic oligonucleotide
aaaucuuggcgcucccucg

SEQ ID NO: 1152360 - RNA, 19 nt, Artificial Sequence
  Description of Artificial Sequence: Synthetic oligonucleotide
ucaugagcuaggauuauca

SEQ ID NO: 1152361 - RNA, 19 nt, Artificial Sequence
  Description of Artificial Sequence: Synthetic oligonucleotide
aacaagacgugaccuggac

SEQ ID NO: 1152362 - RNA, 19 nt, Artificial Sequence
  Description of Artificial Sequence: Synthetic oligonucleotide
uaugggauacacuugacuu

SEQ ID NO: 1152363 - RNA, 19 nt, Artificial Sequence
  Description of Artificial Sequence: Synthetic oligonucleotide
agcugguucucucagcucg

SEQ ID NO: 1152364 - RNA, 19 nt, Artificial Sequence
  Description of Artificial Sequence: Synthetic oligonucleotide
caggauaucugcauacacg

SEQ ID NO: 1152365 - RNA, 19 nt, Artificial Sequence
  Description of Artificial Sequence: Synthetic oligonucleotide
guuacgaagggcaagggcc

SEQ ID NO: 1152366 - RNA, 19 nt, Artificial Sequence
  Description of Artificial Sequence: Synthetic oligonucleotide
uguuguaacuuuaaugguu

SEQ ID NO: 1152367 - RNA, 19 nt, Artificial Sequence
  Description of Artificial Sequence: Synthetic oligonucleotide
uggaacacauaacaaguac

SEQ ID NO: 1152368 - RNA, 19 nt, Artificial Sequence
  Description of Artificial Sequence: Synthetic oligonucleotide
agagugacaacugagagau

SEQ ID NO: 1152369 - RNA, 19 nt, Artificial Sequence
  Description of Artificial Sequence: Synthetic oligonucleotide
augauuagcuaacaaagaa

SEQ ID NO: 1152370 - RNA, 19 nt, Artificial Sequence
  Description of Artificial Sequence: Synthetic oligonucleotide
gaagguggaggcaaagucg

SEQ ID NO: 1152371 - RNA, 19 nt, Artificial Sequence
  Description of Artificial Sequence: Synthetic oligonucleotide
gaggcaauggaacacauaa

SEQ ID NO: 1152372 - RNA, 19 nt, Artificial Sequence
  Description of Artificial Sequence: Synthetic oligonucleotide
aaacacguagacaccaggg

SEQ ID NO: 1152373 - RNA, 19 nt, Artificial Sequence
  Description of Artificial Sequence: Synthetic oligonucleotide
gaucacaaggucuuccagc

SEQ ID NO: 1152374 - RNA, 19 nt, Artificial Sequence
  Description of Artificial Sequence: Synthetic oligonucleotide
caagacgugaccuggacug

SEQ ID NO: 1152375 - RNA, 19 nt, Artificial Sequence
  Description of Artificial Sequence: Synthetic oligonucleotide
auaggcaaacacugugagc

SEQ ID NO: 1152376 - RNA, 19 nt, Artificial Sequence
  Description of Artificial Sequence: Synthetic oligonucleotide
ugauggaugaguguggcca

SEQ ID NO: 1152377 - RNA, 19 nt, Artificial Sequence
  Description of Artificial Sequence: Synthetic oligonucleotide
ucucuuagauuuauuucug

SEQ ID NO: 1152378 - RNA, 19 nt, Artificial Sequence
  Description of Artificial Sequence: Synthetic oligonucleotide
gugaagaugagagcaagcg

SEQ ID NO: 1152379 - RNA, 19 nt, Artificial Sequence
  Description of Artificial Sequence: Synthetic oligonucleotide
agaccuauucauauauacc

SEQ ID NO: 1152380 - RNA, 19 nt, Artificial Sequence
  Description of Artificial Sequence: Synthetic oligonucleotide
aguauucccaggcccaagg

SEQ ID NO: 1152381 - RNA, 19 nt, Artificial Sequence
  Description of Artificial Sequence: Synthetic oligonucleotide
ucugccaacucucuaacau

SEQ ID NO: 1152382 - RNA, 19 nt, Artificial Sequence
  Description of Artificial Sequence: Synthetic oligonucleotide
ucagcauaggucccauagg

SEQ ID NO: 1152383 - RNA, 19 nt, Artificial Sequence
  Description of Artificial Sequence: Synthetic oligonucleotide
aguccuuucaguucgacuu

SEQ ID NO: 1152384 - RNA, 19 nt, Artificial Sequence
  Description of Artificial Sequence: Synthetic oligonucleotide
aguaccaacaagacgugac

SEQ ID NO: 1152385 - RNA, 19 nt, Artificial Sequence
  Description of Artificial Sequence: Synthetic oligonucleotide
gucagcauaggucccauag

SEQ ID NO: 1152386 - RNA, 19 nt, Artificial Sequence
  Description of Artificial Sequence: Synthetic oligonucleotide
uccuaagaugauuagcuaa

SEQ ID NO: 1152387 - RNA, 19 nt, Artificial Sequence
  Description of Artificial Sequence: Synthetic oligonucleotide
auuggguuuccuaagauga

SEQ ID NO: 1152388 - RNA, 19 nt, Artificial Sequence
  Description of Artificial Sequence: Synthetic oligonucleotide
agcuaggauuaucagcugg

SEQ ID NO: 1152389 - RNA, 19 nt, Artificial Sequence
  Description of Artificial Sequence: Synthetic oligonucleotide
ucucaaguugucuggagcu

SEQ ID NO: 1152390 - RNA, 19 nt, Artificial Sequence
  Description of Artificial Sequence: Synthetic oligonucleotide
agcaacacugcauauggga

SEQ ID NO: 1152391 - RNA, 19 nt, Artificial Sequence
  Description of Artificial Sequence: Synthetic oligonucleotide
uauucccaggcccaaggag

SEQ ID NO: 1152392 - RNA, 19 nt, Artificial Sequence
  Description of Artificial Sequence: Synthetic oligonucleotide
aucuauauucccuucccca

SEQ ID NO: 1152393 - RNA, 19 nt, Artificial Sequence
  Description of Artificial Sequence: Synthetic oligonucleotide
uuggaccaaaucuuggcgc

SEQ ID NO: 1152394 - RNA, 19 nt, Artificial Sequence
  Description of Artificial Sequence: Synthetic oligonucleotide
agucccuugcccuuugagg

SEQ ID NO: 1152395 - RNA, 19 nt, Artificial Sequence
  Description of Artificial Sequence: Synthetic oligonucleotide
ucuauauucccuuccccac

SEQ ID NO: 1152396 - RNA, 19 nt, Artificial Sequence
  Description of Artificial Sequence: Synthetic oligonucleotide
gaacacauaacaaguacca

SEQ ID NO: 1152397 - RNA, 19 nt, Artificial Sequence
  Description of Artificial Sequence: Synthetic oligonucleotide
cucgaugccggacagcacg

SEQ ID NO: 1152398 - RNA, 19 nt, Artificial Sequence
  Description of Artificial Sequence: Synthetic oligonucleotide
caaucuauauucccuuccc

SEQ ID NO: 1152399 - RNA, 19 nt, Artificial Sequence
  Description of Artificial Sequence: Synthetic oligonucleotide
ugaaaaguguucagcgacu

SEQ ID NO: 1152400 - RNA, 19 nt, Artificial Sequence
  Description of Artificial Sequence: Synthetic oligonucleotide
guagucaaccuccagccgc

SEQ ID NO: 1152401 - RNA, 19 nt, Artificial Sequence
  Description of Artificial Sequence: Synthetic oligonucleotide
uuaagguuggcaaccucac

SEQ ID NO: 1152402 - RNA, 19 nt, Artificial Sequence
  Description of Artificial Sequence: Synthetic oligonucleotide
aaagucgcuuucugccaac

SEQ ID NO: 1152403 - RNA, 19 nt, Artificial Sequence
  Description of Artificial Sequence: Synthetic oligonucleotide
gaugaaaaguguucagcga

SEQ ID NO: 1152404 - RNA, 19 nt, Artificial Sequence
  Description of Artificial Sequence: Synthetic oligonucleotide
cagcauaggucccauaggc

SEQ ID NO: 1152405 - RNA, 19 nt, Artificial Sequence
  Description of Artificial Sequence: Synthetic oligonucleotide
gacagcacgaccucacagc

SEQ ID NO: 1152406 - RNA, 19 nt, Artificial Sequence
  Description of Artificial Sequence: Synthetic oligonucleotide
cauaggcaaacacugugag

SEQ ID NO: 1152407 - RNA, 19 nt, Artificial Sequence
  Description of Artificial Sequence: Synthetic oligonucleotide
aacugcagguuaggcaugc

SEQ ID NO: 1152408 - RNA, 19 nt, Artificial Sequence
  Description of Artificial Sequence: Synthetic oligonucleotide
gagagcaagcgugucaggg

SEQ ID NO: 1152409 - RNA, 19 nt, Artificial Sequence
  Description of Artificial Sequence: Synthetic oligonucleotide
aggcaaagucgcuuucugc

SEQ ID NO: 1152410 - RNA, 19 nt, Artificial Sequence
  Description of Artificial Sequence: Synthetic oligonucleotide
agguggaggacacccuucc

SEQ ID NO: 1152411 - RNA, 19 nt, Artificial Sequence
  Description of Artificial Sequence: Synthetic oligonucleotide
ucgacuuggaccaaaucuu

SEQ ID NO: 1152412 - RNA, 19 nt, Artificial Sequence
  Description of Artificial Sequence: Synthetic oligonucleotide
ucccaauagcuuuucaggu

SEQ ID NO: 1152413 - RNA, 19 nt, Artificial Sequence
  Description of Artificial Sequence: Synthetic oligonucleotide
ugagccucgguaagugggg

SEQ ID NO: 1152414 - RNA, 19 nt, Artificial Sequence
  Description of Artificial Sequence: Synthetic oligonucleotide
cugagccucgguaaguggg

SEQ ID NO: 1152415 - RNA, 19 nt, Artificial Sequence
  Description of Artificial Sequence: Synthetic oligonucleotide
uucccagggaagaaacaag

SEQ ID NO: 1152416 - RNA, 19 nt, Artificial Sequence
  Description of Artificial Sequence: Synthetic oligonucleotide
caacaguauucccaggccc

SEQ ID NO: 1152417 - RNA, 19 nt, Artificial Sequence
  Description of Artificial Sequence: Synthetic oligonucleotide
cacguagacaccaggggcc

SEQ ID NO: 1152418 - RNA, 19 nt, Artificial Sequence
  Description of Artificial Sequence: Synthetic oligonucleotide
caaacacguagacaccagg

SEQ ID NO: 1152419 - RNA, 19 nt, Artificial Sequence
  Description of Artificial Sequence: Synthetic oligonucleotide
guggguaaugggcagacac

SEQ ID NO: 1152420 - RNA, 19 nt, Artificial Sequence
  Description of Artificial Sequence: Synthetic oligonucleotide
ugggauacacuugacuuug

SEQ ID NO: 1152421 - RNA, 19 nt, Artificial Sequence
  Description of Artificial Sequence: Synthetic oligonucleotide
ggcaaagucgcuuucugcc

SEQ ID NO: 1152422 - RNA, 19 nt, Artificial Sequence
  Description of Artificial Sequence: Synthetic oligonucleotide
aaguccuuucaguucgacu

SEQ ID NO: 1152423 - RNA, 19 nt, Artificial Sequence
  Description of Artificial Sequence: Synthetic oligonucleotide
gaugauuagcuaacaaaga

SEQ ID NO: 1152424 - RNA, 19 nt, Artificial Sequence
  Description of Artificial Sequence: Synthetic oligonucleotide
guggcgaagagaaagcacc

SEQ ID NO: 1152425 - RNA, 19 nt, Artificial Sequence
  Description of Artificial Sequence: Synthetic oligonucleotide
gacaggacaagaaacaacu

SEQ ID NO: 1152426 - RNA, 19 nt, Artificial Sequence
  Description of Artificial Sequence: Synthetic oligonucleotide
uuacgaagggcaagggccu

SEQ ID NO: 1152427 - RNA, 19 nt, Artificial Sequence
  Description of Artificial Sequence: Synthetic oligonucleotide
guaccaacaagacgugacc

SEQ ID NO: 1152428 - RNA, 19 nt, Artificial Sequence
  Description of Artificial Sequence: Synthetic oligonucleotide
cuuagauuuauuucugugu

SEQ ID NO: 1152429 - RNA, 19 nt, Artificial Sequence
  Description of Artificial Sequence: Synthetic oligonucleotide
agacaggacaagaaacaac

SEQ ID NO: 1152430 - RNA, 19 nt, Artificial Sequence
  Description of Artificial Sequence: Synthetic oligonucleotide
agguuaggcaugcaggggu

SEQ ID NO: 1152431 - RNA, 19 nt, Artificial Sequence
  Description of Artificial Sequence: Synthetic oligonucleotide
cucccuauaggggaugugg

SEQ ID NO: 1152432 - RNA, 19 nt, Artificial Sequence
  Description of Artificial Sequence: Synthetic oligonucleotide
caugagcuaggauuaucag

SEQ ID NO: 1152433 - RNA, 19 nt, Artificial Sequence
  Description of Artificial Sequence: Synthetic oligonucleotide
uagcuaacaaagaaccauu

SEQ ID NO: 1152434 - RNA, 19 nt, Artificial Sequence
  Description of Artificial Sequence: Synthetic oligonucleotide
uguacacagauuucucuua

SEQ ID NO: 1152435 - RNA, 19 nt, Artificial Sequence
  Description of Artificial Sequence: Synthetic oligonucleotide
ucccuauaggggauguggc

SEQ ID NO: 1152436 - RNA, 19 nt, Artificial Sequence
  Description of Artificial Sequence: Synthetic oligonucleotide
gaaacaaguccuuucaguu

SEQ ID NO: 1152437 - RNA, 19 nt, Artificial Sequence
  Description of Artificial Sequence: Synthetic oligonucleotide
cacggccucgaucacaagg

SEQ ID NO: 1152438 - RNA, 19 nt, Artificial Sequence
  Description of Artificial Sequence: Synthetic oligonucleotide
uggguaaugggcagacaca

SEQ ID NO: 1152439 - RNA, 19 nt, Artificial Sequence
  Description of Artificial Sequence: Synthetic oligonucleotide
aacaguauucccaggccca

SEQ ID NO: 1152440 - RNA, 19 nt, Artificial Sequence
  Description of Artificial Sequence: Synthetic oligonucleotide
ggaacacauaacaaguacc

SEQ ID NO: 1152441 - RNA, 19 nt, Artificial Sequence
  Description of Artificial Sequence: Synthetic oligonucleotide
ucgaucacaaggucuucca

SEQ ID NO: 1152442 - RNA, 19 nt, Artificial Sequence
  Description of Artificial Sequence: Synthetic oligonucleotide
uggaccaaaucuuggcgcu

SEQ ID NO: 1152443 - RNA, 19 nt, Artificial Sequence
  Description of Artificial Sequence: Synthetic oligonucleotide
guuggcacggcugacuugc

SEQ ID NO: 1152444 - RNA, 19 nt, Artificial Sequence
  Description of Artificial Sequence: Synthetic oligonucleotide
accaacaagacgugaccug

SEQ ID NO: 1152445 - RNA, 19 nt, Artificial Sequence
  Description of Artificial Sequence: Synthetic oligonucleotide
uggcgaagagaaagcaccc

SEQ ID NO: 1152446 - RNA, 19 nt, Artificial Sequence
  Description of Artificial Sequence: Synthetic oligonucleotide
agcgugucagggaagagag

SEQ ID NO: 1152447 - RNA, 19 nt, Artificial Sequence
  Description of Artificial Sequence: Synthetic oligonucleotide
cuggccuucucccuauagg

SEQ ID NO: 1152448 - RNA, 19 nt, Artificial Sequence
  Description of Artificial Sequence: Synthetic oligonucleotide
uuuuaagguuggcaaccuc

SEQ ID NO: 1152449 - RNA, 19 nt, Artificial Sequence
  Description of Artificial Sequence: Synthetic oligonucleotide
auguggcuuaugcuugggg

SEQ ID NO: 1152450 - RNA, 19 nt, Artificial Sequence
  Description of Artificial Sequence: Synthetic oligonucleotide
ccuaagaugauuagcuaac

SEQ ID NO: 1152451 - RNA, 19 nt, Artificial Sequence
  Description of Artificial Sequence: Synthetic oligonucleotide
acaacugagagaugccgaa

SEQ ID NO: 1152452 - RNA, 19 nt, Artificial Sequence
  Description of Artificial Sequence: Synthetic oligonucleotide
cuggcgcacguuacgaagg

SEQ ID NO: 1152453 - RNA, 19 nt, Artificial Sequence
  Description of Artificial Sequence: Synthetic oligonucleotide
aagcgugucagggaagaga

SEQ ID NO: 1152454 - RNA, 19 nt, Artificial Sequence
  Description of Artificial Sequence: Synthetic oligonucleotide
gcauacacggccucgauca

SEQ ID NO: 1152455 - RNA, 19 nt, Artificial Sequence
  Description of Artificial Sequence: Synthetic oligonucleotide
ucgcucuggucucaaguug

SEQ ID NO: 1152456 - RNA, 19 nt, Artificial Sequence
  Description of Artificial Sequence: Synthetic oligonucleotide
caaaucuuggcgcucccuc

SEQ ID NO: 1152457 - RNA, 19 nt, Artificial Sequence
  Description of Artificial Sequence: Synthetic oligonucleotide
aagaugagagcaagcgugu

SEQ ID NO: 1152458 - RNA, 19 nt, Artificial Sequence
  Description of Artificial Sequence: Synthetic oligonucleotide
caguuccccaaacacguag

SEQ ID NO: 1152459 - RNA, 19 nt, Artificial Sequence
  Description of Artificial Sequence: Synthetic oligonucleotide
aacacauaacaaguaccaa

SEQ ID NO: 1152460 - RNA, 19 nt, Artificial Sequence
  Description of Artificial Sequence: Synthetic oligonucleotide
acgaccucacagccuacac

SEQ ID NO: 1152461 - RNA, 19 nt, Artificial Sequence
  Description of Artificial Sequence: Synthetic oligonucleotide
auauagaccuauucauaua

SEQ ID NO: 1152462 - RNA, 19 nt, Artificial Sequence
  Description of Artificial Sequence: Synthetic oligonucleotide
uuaggcaugcagggguggg

SEQ ID NO: 1152463 - RNA, 19 nt, Artificial Sequence
  Description of Artificial Sequence: Synthetic oligonucleotide
uggcgcacguuacgaaggg

SEQ ID NO: 1152464 - RNA, 19 nt, Artificial Sequence
  Description of Artificial Sequence: Synthetic oligonucleotide
cuucagcuaaguagucagc

SEQ ID NO: 1152465 - RNA, 19 nt, Artificial Sequence
  Description of Artificial Sequence: Synthetic oligonucleotide
ucacucucgaucuguugcu

SEQ ID NO: 1152466 - RNA, 19 nt, Artificial Sequence
  Description of Artificial Sequence: Synthetic oligonucleotide
cuaggauuaucagcuggcc

SEQ ID NO: 1152467 - RNA, 19 nt, Artificial Sequence
  Description of Artificial Sequence: Synthetic oligonucleotide
accaaaucuuggcgcuccc

SEQ ID NO: 1152468 - RNA, 19 nt, Artificial Sequence
  Description of Artificial Sequence: Synthetic oligonucleotide
caggugcagcccaauaggc

SEQ ID NO: 1152469 - RNA, 19 nt, Artificial Sequence
  Description of Artificial Sequence: Synthetic oligonucleotide
uaccaacaagacgugaccu

SEQ ID NO: 1152470 - RNA, 19 nt, Artificial Sequence
  Description of Artificial Sequence: Synthetic oligonucleotide
aagacgugaccuggacugg

SEQ ID NO: 1152471 - RNA, 19 nt, Artificial Sequence
  Description of Artificial Sequence: Synthetic oligonucleotide
auuagcuaacaaagaacca

SEQ ID NO: 1152472 - RNA, 19 nt, Artificial Sequence
  Description of Artificial Sequence: Synthetic oligonucleotide
uagucaaccuccagccgcu

SEQ ID NO: 1152473 - RNA, 19 nt, Artificial Sequence
  Description of Artificial Sequence: Synthetic oligonucleotide
ggugcagcccaauaggcac

SEQ ID NO: 1152474 - RNA, 19 nt, Artificial Sequence
  Description of Artificial Sequence: Synthetic oligonucleotide
ugacguggguaaugggcag

SEQ ID NO: 1152475 - RNA, 19 nt, Artificial Sequence
  Description of Artificial Sequence: Synthetic oligonucleotide
agcacgaccucacagccua

SEQ ID NO: 1152476 - RNA, 19 nt, Artificial Sequence
  Description of Artificial Sequence: Synthetic oligonucleotide
uucugagccucgguaagug

SEQ ID NO: 1152477 - RNA, 19 nt, Artificial Sequence
  Description of Artificial Sequence: Synthetic oligonucleotide
cauaugggauacacuugac

SEQ ID NO: 1152478 - RNA, 19 nt, Artificial Sequence
  Description of Artificial Sequence: Synthetic oligonucleotide
agucgcuuucugccaacuc

SEQ ID NO: 1152479 - RNA, 19 nt, Artificial Sequence
  Description of Artificial Sequence: Synthetic oligonucleotide
ugagagcaagcgugucagg

SEQ ID NO: 1152480 - RNA, 19 nt, Artificial Sequence
  Description of Artificial Sequence: Synthetic oligonucleotide
gagucccuugcccuuugag

SEQ ID NO: 1152481 - RNA, 19 nt, Artificial Sequence
  Description of Artificial Sequence: Synthetic oligonucleotide
ugauugcgcugguccaggg

SEQ ID NO: 1152482 - RNA, 19 nt, Artificial Sequence
  Description of Artificial Sequence: Synthetic oligonucleotide
gaccaaaucuuggcgcucc

SEQ ID NO: 1152483 - RNA, 19 nt, Artificial Sequence
  Description of Artificial Sequence: Synthetic oligonucleotide
agacgugaccuggacuggc

SEQ ID NO: 1152484 - RNA, 19 nt, Artificial Sequence
  Description of Artificial Sequence: Synthetic oligonucleotide
ucucucccgaugcuguagu

SEQ ID NO: 1152485 - RNA, 19 nt, Artificial Sequence
  Description of Artificial Sequence: Synthetic oligonucleotide
ccaauaggcacagggaagg

SEQ ID NO: 1152486 - RNA, 19 nt, Artificial Sequence
  Description of Artificial Sequence: Synthetic oligonucleotide
cucgaucacaaggucuucc

SEQ ID NO: 1152487 - RNA, 19 nt, Artificial Sequence
  Description of Artificial Sequence: Synthetic oligonucleotide
ucugcauacacggccucga

SEQ ID NO: 1152488 - RNA, 19 nt, Artificial Sequence
  Description of Artificial Sequence: Synthetic oligonucleotide
cuaaguagucagcauaggu

SEQ ID NO: 1152489 - RNA, 19 nt, Artificial Sequence
  Description of Artificial Sequence: Synthetic oligonucleotide
cagagugacaacugagaga

SEQ ID NO: 1152490 - RNA, 19 nt, Artificial Sequence
  Description of Artificial Sequence: Synthetic oligonucleotide
aaguaccaacaagacguga

SEQ ID NO: 1152491 - RNA, 19 nt, Artificial Sequence
  Description of Artificial Sequence: Synthetic oligonucleotide
gauguggcuuaugcuuggg

SEQ ID NO: 1152492 - RNA, 19 nt, Artificial Sequence
  Description of Artificial Sequence: Synthetic oligonucleotide
gacaacugagagaugccga

SEQ ID NO: 1152493 - RNA, 19 nt, Artificial Sequence
  Description of Artificial Sequence: Synthetic oligonucleotide
cauguuauauauagaccua

SEQ ID NO: 1152494 - RNA, 19 nt, Artificial Sequence
  Description of Artificial Sequence: Synthetic oligonucleotide
agcaccugauggaugagug

SEQ ID NO: 1152495 - RNA, 19 nt, Artificial Sequence
  Description of Artificial Sequence: Synthetic oligonucleotide
cccuuugaggcuuucuugc

SEQ ID NO: 1152496 - RNA, 19 nt, Artificial Sequence
  Description of Artificial Sequence: Synthetic oligonucleotide
uucugccaacucucuaaca

SEQ ID NO: 1152497 - RNA, 19 nt, Artificial Sequence
  Description of Artificial Sequence: Synthetic oligonucleotide
cugauggaugaguguggcc

SEQ ID NO: 1152498 - RNA, 19 nt, Artificial Sequence
  Description of Artificial Sequence: Synthetic oligonucleotide
gagcaagcgugucagggaa

SEQ ID NO: 1152499 - RNA, 19 nt, Artificial Sequence
  Description of Artificial Sequence: Synthetic oligonucleotide
aucugcauacacggccucg

SEQ ID NO: 1152500 - RNA, 19 nt, Artificial Sequence
  Description of Artificial Sequence: Synthetic oligonucleotide
cugcauaugggauacacuu

SEQ ID NO: 1152501 - RNA, 19 nt, Artificial Sequence
  Description of Artificial Sequence: Synthetic oligonucleotide
acguggguaaugggcagac

SEQ ID NO: 1152502 - RNA, 19 nt, Artificial Sequence
  Description of Artificial Sequence: Synthetic oligonucleotide
guuccccaaacacguagac

SEQ ID NO: 1152503 - RNA, 19 nt, Artificial Sequence
  Description of Artificial Sequence: Synthetic oligonucleotide
cauugggcauauccagcag

SEQ ID NO: 1152504 - RNA, 19 nt, Artificial Sequence
  Description of Artificial Sequence: Synthetic oligonucleotide
cagcaacacugcauauggg

SEQ ID NO: 1152505 - RNA, 19 nt, Artificial Sequence
  Description of Artificial Sequence: Synthetic oligonucleotide
ucgaugccggacagcacga

SEQ ID NO: 1152506 - RNA, 19 nt, Artificial Sequence
  Description of Artificial Sequence: Synthetic oligonucleotide
gugaugggauucugggaug

SEQ ID NO: 1152507 - RNA, 19 nt, Artificial Sequence
  Description of Artificial Sequence: Synthetic oligonucleotide
cuaagaugauuagcuaaca

SEQ ID NO: 1152508 - RNA, 19 nt, Artificial Sequence
  Description of Artificial Sequence: Synthetic oligonucleotide
gucgcuuucugccaacucu

SEQ ID NO: 1152509 - RNA, 19 nt, Artificial Sequence
  Description of Artificial Sequence: Synthetic oligonucleotide
auucugggaugaaaagugu

SEQ ID NO: 1152510 - RNA, 19 nt, Artificial Sequence
  Description of Artificial Sequence: Synthetic oligonucleotide
gcauaggucccauaggcaa

SEQ ID NO: 1152511 - RNA, 19 nt, Artificial Sequence
  Description of Artificial Sequence: Synthetic oligonucleotide
ggcaaccucacucucgauc

SEQ ID NO: 1152512 - RNA, 19 nt, Artificial Sequence
  Description of Artificial Sequence: Synthetic oligonucleotide
uggguuuccuaagaugauu

SEQ ID NO: 1152513 - RNA, 19 nt, Artificial Sequence
  Description of Artificial Sequence: Synthetic oligonucleotide
cugauugcgcugguccagg

SEQ ID NO: 1152514 - RNA, 19 nt, Artificial Sequence
  Description of Artificial Sequence: Synthetic oligonucleotide
acaggacaagaaacaacug

SEQ ID NO: 1152515 - RNA, 19 nt, Artificial Sequence
  Description of Artificial Sequence: Synthetic oligonucleotide
gcugggaccccacauuccc

SEQ ID NO: 1152516 - RNA, 19 nt, Artificial Sequence
  Description of Artificial Sequence: Synthetic oligonucleotide
ggauuaucagcuggccagg

SEQ ID NO: 1152517 - RNA, 19 nt, Artificial Sequence
  Description of Artificial Sequence: Synthetic oligonucleotide
gugacaacugagagaugcc

SEQ ID NO: 1152518 - RNA, 19 nt, Artificial Sequence
  Description of Artificial Sequence: Synthetic oligonucleotide
ucggucagguguuguucug

SEQ ID NO: 1152519 - RNA, 19 nt, Artificial Sequence
  Description of Artificial Sequence: Synthetic oligonucleotide
gcuggcgcacguuacgaag

SEQ ID NO: 1152520 - RNA, 19 nt, Artificial Sequence
  Description of Artificial Sequence: Synthetic oligonucleotide
cccaauaggcacagggaag

SEQ ID NO: 1152521 - RNA, 19 nt, Artificial Sequence
  Description of Artificial Sequence: Synthetic oligonucleotide
cccaauagcuuuucaggug

SEQ ID NO: 1152522 - RNA, 19 nt, Artificial Sequence
  Description of Artificial Sequence: Synthetic oligonucleotide
aagucgcuuucugccaacu

SEQ ID NO: 1152523 - RNA, 19 nt, Artificial Sequence
  Description of Artificial Sequence: Synthetic oligonucleotide
agauuccuggcuucagcua

SEQ ID NO: 1152524 - RNA, 19 nt, Artificial Sequence
  Description of Artificial Sequence: Synthetic oligonucleotide
gccaaccugguugaugacg

SEQ ID NO: 1152525 - RNA, 19 nt, Artificial Sequence
  Description of Artificial Sequence: Synthetic oligonucleotide
acggccucgaucacaaggu

SEQ ID NO: 1152526 - RNA, 19 nt, Artificial Sequence
  Description of Artificial Sequence: Synthetic oligonucleotide
cagcugggaccccacauuc

SEQ ID NO: 1152527 - RNA, 19 nt, Artificial Sequence
  Description of Artificial Sequence: Synthetic oligonucleotide
ugcgcugguccagggagcc

SEQ ID NO: 1152528 - RNA, 19 nt, Artificial Sequence
  Description of Artificial Sequence: Synthetic oligonucleotide
cagugccgagugaagauga

SEQ ID NO: 1152529 - RNA, 19 nt, Artificial Sequence
  Description of Artificial Sequence: Synthetic oligonucleotide
acguuacgaagggcaaggg

SEQ ID NO: 1152530 - RNA, 19 nt, Artificial Sequence
  Description of Artificial Sequence: Synthetic oligonucleotide
agcauaggucccauaggca

SEQ ID NO: 1152531 - RNA, 19 nt, Artificial Sequence
  Description of Artificial Sequence: Synthetic oligonucleotide
ccugguucugcccugucac

SEQ ID NO: 1152532 - RNA, 19 nt, Artificial Sequence
  Description of Artificial Sequence: Synthetic oligonucleotide
guauucccaggcccaagga

SEQ ID NO: 1152533 - RNA, 19 nt, Artificial Sequence
  Description of Artificial Sequence: Synthetic oligonucleotide
ugguucucucagcucgguc

SEQ ID NO: 1152534 - RNA, 19 nt, Artificial Sequence
  Description of Artificial Sequence: Synthetic oligonucleotide
gacgugaccuggacuggcc

SEQ ID NO: 1152535 - RNA, 19 nt, Artificial Sequence
  Description of Artificial Sequence: Synthetic oligonucleotide
gccuacacaccacuccugc

SEQ ID NO: 1152536 - RNA, 19 nt, Artificial Sequence
  Description of Artificial Sequence: Synthetic oligonucleotide
auggaacacauaacaagua

SEQ ID NO: 1152537 - RNA, 19 nt, Artificial Sequence
  Description of Artificial Sequence: Synthetic oligonucleotide
cacagccuacacaccacuc

SEQ ID NO: 1152538 - RNA, 19 nt, Artificial Sequence
  Description of Artificial Sequence: Synthetic oligonucleotide
guucgacuuggaccaaauc

SEQ ID NO: 1152539 - RNA, 19 nt, Artificial Sequence
  Description of Artificial Sequence: Synthetic oligonucleotide
agcuaacaaagaaccauuu

SEQ ID NO: 1152540 - RNA, 19 nt, Artificial Sequence
  Description of Artificial Sequence: Synthetic oligonucleotide
auagcuguucuggggcucu

SEQ ID NO: 1152541 - RNA, 19 nt, Artificial Sequence
  Description of Artificial Sequence: Synthetic oligonucleotide
accuauucauauauaccuu

SEQ ID NO: 1152542 - RNA, 19 nt, Artificial Sequence
  Description of Artificial Sequence: Synthetic oligonucleotide
agcccaauaggcacaggga

SEQ ID NO: 1152543 - RNA, 19 nt, Artificial Sequence
  Description of Artificial Sequence: Synthetic oligonucleotide
cuauaggggauguggcuua

SEQ ID NO: 1152544 - RNA, 19 nt, Artificial Sequence
  Description of Artificial Sequence: Synthetic oligonucleotide
ccgagugaagaugagagca

SEQ ID NO: 1152545 - RNA, 19 nt, Artificial Sequence
  Description of Artificial Sequence: Synthetic oligonucleotide
caaagucgcuuucugccaa

SEQ ID NO: 1152546 - RNA, 19 nt, Artificial Sequence
  Description of Artificial Sequence: Synthetic oligonucleotide
gucaugagcuaggauuauc

SEQ ID NO: 1152547 - RNA, 19 nt, Artificial Sequence
  Description of Artificial Sequence: Synthetic oligonucleotide
auacacggccucgaucaca

SEQ ID NO: 1152548 - RNA, 19 nt, Artificial Sequence
  Description of Artificial Sequence: Synthetic oligonucleotide
ugccgcuguuguaacuuua

SEQ ID NO: 1152549 - RNA, 19 nt, Artificial Sequence
  Description of Artificial Sequence: Synthetic oligonucleotide
gucucucccgaugcuguag

SEQ ID NO: 1152550 - RNA, 19 nt, Artificial Sequence
  Description of Artificial Sequence: Synthetic oligonucleotide
ccaaacacguagacaccag

SEQ ID NO: 1152551 - RNA, 19 nt, Artificial Sequence
  Description of Artificial Sequence: Synthetic oligonucleotide
gcagacuggcuccagaacu

SEQ ID NO: 1152552 - RNA, 19 nt, Artificial Sequence
  Description of Artificial Sequence: Synthetic oligonucleotide
ccgcugauugcgcuggucc

SEQ ID NO: 1152553 - RNA, 19 nt, Artificial Sequence
  Description of Artificial Sequence: Synthetic oligonucleotide
gguguuguucuggauccug

SEQ ID NO: 1152554 - RNA, 19 nt, Artificial Sequence
  Description of Artificial Sequence: Synthetic oligonucleotide
gacuuggcaaggagcagaa

SEQ ID NO: 1152555 - RNA, 19 nt, Artificial Sequence
  Description of Artificial Sequence: Synthetic oligonucleotide
gguucgggcaauggcacug

SEQ ID NO: 1152556 - RNA, 19 nt, Artificial Sequence
  Description of Artificial Sequence: Synthetic oligonucleotide
cauacacggccucgaucac

SEQ ID NO: 1152557 - RNA, 19 nt, Artificial Sequence
  Description of Artificial Sequence: Synthetic oligonucleotide
ucucccuauaggggaugug

SEQ ID NO: 1152558 - RNA, 19 nt, Artificial Sequence
  Description of Artificial Sequence: Synthetic oligonucleotide
gcccaauaggcacagggaa

SEQ ID NO: 1152559 - RNA, 19 nt, Artificial Sequence
  Description of Artificial Sequence: Synthetic oligonucleotide
gccgagugaagaugagagc

SEQ ID NO: 1152560 - RNA, 19 nt, Artificial Sequence
  Description of Artificial Sequence: Synthetic oligonucleotide
uuggccgacuuggcaagga

SEQ ID NO: 1152561 - RNA, 19 nt, Artificial Sequence
  Description of Artificial Sequence: Synthetic oligonucleotide
cugcccugucaccuucacc

SEQ ID NO: 1152562 - RNA, 19 nt, Artificial Sequence
  Description of Artificial Sequence: Synthetic oligonucleotide
aguucgacuuggaccaaau

SEQ ID NO: 1152563 - RNA, 19 nt, Artificial Sequence
  Description of Artificial Sequence: Synthetic oligonucleotide
gguggcgaagagaaagcac

SEQ ID NO: 1152564 - RNA, 19 nt, Artificial Sequence
  Description of Artificial Sequence: Synthetic oligonucleotide
ucccgaugcuguagucaac

SEQ ID NO: 1152565 - RNA, 19 nt, Artificial Sequence
  Description of Artificial Sequence: Synthetic oligonucleotide
guguuguucuggauccuga

SEQ ID NO: 1152566 - RNA, 19 nt, Artificial Sequence
  Description of Artificial Sequence: Synthetic oligonucleotide
agugccgagugaagaugag

SEQ ID NO: 1152567 - RNA, 19 nt, Artificial Sequence
  Description of Artificial Sequence: Synthetic oligonucleotide
gagcugguucucucagcuc

SEQ ID NO: 1152568 - RNA, 19 nt, Artificial Sequence
  Description of Artificial Sequence: Synthetic oligonucleotide
caaccugguugaugacgug

SEQ ID NO: 1152569 - RNA, 19 nt, Artificial Sequence
  Description of Artificial Sequence: Synthetic oligonucleotide
ucagcucggucagguguug

SEQ ID NO: 1152570 - RNA, 19 nt, Artificial Sequence
  Description of Artificial Sequence: Synthetic oligonucleotide
cguuacgaagggcaagggc

SEQ ID NO: 1152571 - RNA, 19 nt, Artificial Sequence
  Description of Artificial Sequence: Synthetic oligonucleotide
aucuuggcgcucccucgga

SEQ ID NO: 1152572 - RNA, 19 nt, Artificial Sequence
  Description of Artificial Sequence: Synthetic oligonucleotide
agcucggucagguguuguu

SEQ ID NO: 1152573 - RNA, 19 nt, Artificial Sequence
  Description of Artificial Sequence: Synthetic oligonucleotide
acguagacaccaggggccu

SEQ ID NO: 1152574 - RNA, 19 nt, Artificial Sequence
  Description of Artificial Sequence: Synthetic oligonucleotide
agggguaggcagguaggca

SEQ ID NO: 1152575 - RNA, 19 nt, Artificial Sequence
  Description of Artificial Sequence: Synthetic oligonucleotide
ggucagguguuguucugga

SEQ ID NO: 1152576 - RNA, 19 nt, Artificial Sequence
  Description of Artificial Sequence: Synthetic oligonucleotide
gacguggguaaugggcaga

SEQ ID NO: 1152577 - RNA, 19 nt, Artificial Sequence
  Description of Artificial Sequence: Synthetic oligonucleotide
agcaagcgugucagggaag

SEQ ID NO: 1152578 - RNA, 19 nt, Artificial Sequence
  Description of Artificial Sequence: Synthetic oligonucleotide
gccgacuuggcaaggagca

SEQ ID NO: 1152579 - RNA, 19 nt, Artificial Sequence
  Description of Artificial Sequence: Synthetic oligonucleotide
agcuggcgcacguuacgaa

SEQ ID NO: 1152580 - RNA, 19 nt, Artificial Sequence
  Description of Artificial Sequence: Synthetic oligonucleotide
caagcgugucagggaagag

SEQ ID NO: 1152581 - RNA, 19 nt, Artificial Sequence
  Description of Artificial Sequence: Synthetic oligonucleotide
gugaccuggacuggccuuc

SEQ ID NO: 1152582 - RNA, 19 nt, Artificial Sequence
  Description of Artificial Sequence: Synthetic oligonucleotide
auaggacugccaaccuggu

SEQ ID NO: 1152583 - RNA, 19 nt, Artificial Sequence
  Description of Artificial Sequence: Synthetic oligonucleotide
cagcgacucccagaauggc

SEQ ID NO: 1152584 - RNA, 19 nt, Artificial Sequence
  Description of Artificial Sequence: Synthetic oligonucleotide
cgacuuggaccaaaucuug

SEQ ID NO: 1152585 - RNA, 19 nt, Artificial Sequence
  Description of Artificial Sequence: Synthetic oligonucleotide
auauucccuuccccaccaa

SEQ ID NO: 1152586 - RNA, 19 nt, Artificial Sequence
  Description of Artificial Sequence: Synthetic oligonucleotide
ggacugccaaccugguuga

SEQ ID NO: 1152587 - RNA, 19 nt, Artificial Sequence
  Description of Artificial Sequence: Synthetic oligonucleotide
cucggucagguguuguucu

SEQ ID NO: 1152588 - RNA, 19 nt, Artificial Sequence
  Description of Artificial Sequence: Synthetic oligonucleotide
gugccgagugaagaugaga

SEQ ID NO: 1152589 - RNA, 19 nt, Artificial Sequence
  Description of Artificial Sequence: Synthetic oligonucleotide
cacccuucccaauagcuuu

SEQ ID NO: 1152590 - RNA, 19 nt, Artificial Sequence
  Description of Artificial Sequence: Synthetic oligonucleotide
uacgaagggcaagggccuc

SEQ ID NO: 1152591 - RNA, 19 nt, Artificial Sequence
  Description of Artificial Sequence: Synthetic oligonucleotide
gcgcacguuacgaagggca

SEQ ID NO: 1152592 - RNA, 19 nt, Artificial Sequence
  Description of Artificial Sequence: Synthetic oligonucleotide
gcaagcgugucagggaaga

SEQ ID NO: 1152593 - RNA, 19 nt, Artificial Sequence
  Description of Artificial Sequence: Synthetic oligonucleotide
ccccaaacacguagacacc

SEQ ID NO: 1152594 - RNA, 19 nt, Artificial Sequence
  Description of Artificial Sequence: Synthetic oligonucleotide
gaugggauucugggaugaa

SEQ ID NO: 1152595 - RNA, 19 nt, Artificial Sequence
  Description of Artificial Sequence: Synthetic oligonucleotide
cacccuccauaggacugcc

SEQ ID NO: 1152596 - RNA, 19 nt, Artificial Sequence
  Description of Artificial Sequence: Synthetic oligonucleotide
cuucaccucggcgcucaug

SEQ ID NO: 1152597 - RNA, 19 nt, Artificial Sequence
  Description of Artificial Sequence: Synthetic oligonucleotide
gagugacaacugagagaug

SEQ ID NO: 1152598 - RNA, 19 nt, Artificial Sequence
  Description of Artificial Sequence: Synthetic oligonucleotide
caauaggcacagggaagga

SEQ ID NO: 1152599 - RNA, 19 nt, Artificial Sequence
  Description of Artificial Sequence: Synthetic oligonucleotide
ccuauucauauauaccuuu

SEQ ID NO: 1152600 - RNA, 19 nt, Artificial Sequence
  Description of Artificial Sequence: Synthetic oligonucleotide
gcguggguggcgaagagaa

SEQ ID NO: 1152601 - RNA, 19 nt, Artificial Sequence
  Description of Artificial Sequence: Synthetic oligonucleotide
acaaguccuuucaguucga

SEQ ID NO: 1152602 - RNA, 19 nt, Artificial Sequence
  Description of Artificial Sequence: Synthetic oligonucleotide
cccucggagucccuugccc

SEQ ID NO: 1152603 - RNA, 19 nt, Artificial Sequence
  Description of Artificial Sequence: Synthetic oligonucleotide
cccaaacacguagacacca

SEQ ID NO: 1152604 - RNA, 19 nt, Artificial Sequence
  Description of Artificial Sequence: Synthetic oligonucleotide
ucaguucgacuuggaccaa

SEQ ID NO: 1152605 - RNA, 19 nt, Artificial Sequence
  Description of Artificial Sequence: Synthetic oligonucleotide
ggacuccuaagggguaggc

SEQ ID NO: 1152606 - RNA, 19 nt, Artificial Sequence
  Description of Artificial Sequence: Synthetic oligonucleotide
agguguuguucuggauccu

SEQ ID NO: 1152607 - RNA, 19 nt, Artificial Sequence
  Description of Artificial Sequence: Synthetic oligonucleotide
cucgcucuggucucaaguu

SEQ ID NO: 1152608 - RNA, 19 nt, Artificial Sequence
  Description of Artificial Sequence: Synthetic oligonucleotide
uggcgcucccucggagucc

SEQ ID NO: 1152609 - RNA, 19 nt, Artificial Sequence
  Description of Artificial Sequence: Synthetic oligonucleotide
cuuggcgcucccucggagu

SEQ ID NO: 1152610 - RNA, 19 nt, Artificial Sequence
  Description of Artificial Sequence: Synthetic oligonucleotide
ccaaccugguugaugacgu

SEQ ID NO: 1152611 - RNA, 19 nt, Artificial Sequence
  Description of Artificial Sequence: Synthetic oligonucleotide
cuugcuccucgaugccgga

SEQ ID NO: 1152612 - RNA, 19 nt, Artificial Sequence
  Description of Artificial Sequence: Synthetic oligonucleotide
ccggacagcacgaccucac

SEQ ID NO: 1152613 - RNA, 19 nt, Artificial Sequence
  Description of Artificial Sequence: Synthetic oligonucleotide
guucgggcaauggcacuga

SEQ ID NO: 1152614 - RNA, 19 nt, Artificial Sequence
  Description of Artificial Sequence: Synthetic oligonucleotide
gugcagcccaauaggcaca

SEQ ID NO: 1152615 - RNA, 19 nt, Artificial Sequence
  Description of Artificial Sequence: Synthetic oligonucleotide
cacgaccucacagccuaca

SEQ ID NO: 1152616 - RNA, 19 nt, Artificial Sequence
  Description of Artificial Sequence: Synthetic oligonucleotide
cugccaacucucuaacauu

SEQ ID NO: 1152617 - RNA, 19 nt, Artificial Sequence
  Description of Artificial Sequence: Synthetic oligonucleotide
uggcaaccucacucucgau

SEQ ID NO: 1152618 - RNA, 19 nt, Artificial Sequence
  Description of Artificial Sequence: Synthetic oligonucleotide
gcucggucagguguuguuc

SEQ ID NO: 1152619 - RNA, 19 nt, Artificial Sequence
  Description of Artificial Sequence: Synthetic oligonucleotide
gcucgcucuggucucaagu

SEQ ID NO: 1152620 - RNA, 19 nt, Artificial Sequence
  Description of Artificial Sequence: Synthetic oligonucleotide
gaccuggacuggccuucuc

SEQ ID NO: 1152621 - RNA, 19 nt, Artificial Sequence
  Description of Artificial Sequence: Synthetic oligonucleotide
ggcgcucccucggaguccc

SEQ ID NO: 1152622 - RNA, 19 nt, Artificial Sequence
  Description of Artificial Sequence: Synthetic oligonucleotide
acucuaaggcugggaugaa

SEQ ID NO: 1152623 - RNA, 19 nt, Artificial Sequence
  Description of Artificial Sequence: Synthetic oligonucleotide
acccuucccaauagcuuuu

SEQ ID NO: 1152624 - RNA, 19 nt, Artificial Sequence
  Description of Artificial Sequence: Synthetic oligonucleotide
ggcgcacguuacgaagggc

SEQ ID NO: 1152625 - RNA, 19 nt, Artificial Sequence
  Description of Artificial Sequence: Synthetic oligonucleotide
ggaccaaaucuuggcgcuc

SEQ ID NO: 1152626 - RNA, 19 nt, Artificial Sequence
  Description of Artificial Sequence: Synthetic oligonucleotide
caguucgacuuggaccaaa

SEQ ID NO: 1152627 - RNA, 19 nt, Artificial Sequence
  Description of Artificial Sequence: Synthetic oligonucleotide
ccuuucaguucgacuugga

SEQ ID NO: 1152628 - RNA, 19 nt, Artificial Sequence
  Description of Artificial Sequence: Synthetic oligonucleotide
gccgcuguuguaacuuuaa

SEQ ID NO: 1152629 - RNA, 19 nt, Artificial Sequence
  Description of Artificial Sequence: Synthetic oligonucleotide
cucuaacauugggcauauc

SEQ ID NO: 1152630 - RNA, 19 nt, Artificial Sequence
  Description of Artificial Sequence: Synthetic oligonucleotide
ggcguggguggcgaagaga

SEQ ID NO: 1152631 - RNA, 19 nt, Artificial Sequence
  Description of Artificial Sequence: Synthetic oligonucleotide
gcgcucauggcugcacuga

SEQ ID NO: 1152632 - RNA, 19 nt, Artificial Sequence
  Description of Artificial Sequence: Synthetic oligonucleotide
ccgacuuggcaaggagcag

SEQ ID NO: 1152633 - RNA, 19 nt, Artificial Sequence
  Description of Artificial Sequence: Synthetic oligonucleotide
gcucuggucucaaguuguc

SEQ ID NO: 1152634 - RNA, 19 nt, Artificial Sequence
  Description of Artificial Sequence: Synthetic oligonucleotide
ucgcucgcucuggucucaa

SEQ ID NO: 1152635 - RNA, 19 nt, Artificial Sequence
  Description of Artificial Sequence: Synthetic oligonucleotide
ccucgaugccggacagcac

SEQ ID NO: 1152636 - RNA, 19 nt, Artificial Sequence
  Description of Artificial Sequence: Synthetic oligonucleotide
cagcacgaccucacagccu

SEQ ID NO: 1152637 - RNA, 19 nt, Artificial Sequence
  Description of Artificial Sequence: Synthetic oligonucleotide
acccuccauaggacugcca

SEQ ID NO: 1152638 - RNA, 19 nt, Artificial Sequence
  Description of Artificial Sequence: Synthetic oligonucleotide
gcagcccaauaggcacagg

SEQ ID NO: 1152639 - RNA, 19 nt, Artificial Sequence
  Description of Artificial Sequence: Synthetic oligonucleotide
ccucggagucccuugcccu

SEQ ID NO: 1152640 - RNA, 19 nt, Artificial Sequence
  Description of Artificial Sequence: Synthetic oligonucleotide
cgcacguuacgaagggcaa

SEQ ID NO: 1152641 - RNA, 19 nt, Artificial Sequence
  Description of Artificial Sequence: Synthetic oligonucleotide
ggacuggccuucucccuau

SEQ ID NO: 1152642 - RNA, 19 nt, Artificial Sequence
  Description of Artificial Sequence: Synthetic oligonucleotide
gccggacagcacgaccuca

SEQ ID NO: 1152643 - RNA, 19 nt, Artificial Sequence
  Description of Artificial Sequence: Synthetic oligonucleotide
ggguucgggcaauggcacu

SEQ ID NO: 1152644 - RNA, 19 nt, Artificial Sequence
  Description of Artificial Sequence: Synthetic oligonucleotide
gcuggaugucucucccgau

SEQ ID NO: 1152645 - RNA, 19 nt, Artificial Sequence
  Description of Artificial Sequence: Synthetic oligonucleotide
gccgcugauugcgcugguc

SEQ ID NO: 1152646 - RNA, 19 nt, Artificial Sequence
  Description of Artificial Sequence: Synthetic oligonucleotide
gccccgcaggauaucugca

SEQ ID NO: 1152647 - RNA, 19 nt, Artificial Sequence
  Description of Artificial Sequence: Synthetic oligonucleotide
ggcugacuugcuccucgau

SEQ ID NO: 1152648 - RNA, 19 nt, Artificial Sequence
  Description of Artificial Sequence: Synthetic oligonucleotide
ggugggcguggguggcgaa

SEQ ID NO: 1152649 - RNA, 19 nt, Artificial Sequence
  Description of Artificial Sequence: Synthetic oligonucleotide
cgcucgcucuggucucaag

SEQ ID NO: 1152650 - RNA, 19 nt, Artificial Sequence
  Description of Artificial Sequence: Synthetic oligonucleotide
ccaaaucuuggcgcucccu

SEQ ID NO: 1152651 - RNA, 19 nt, Artificial Sequence
  Description of Artificial Sequence: Synthetic oligonucleotide
cagcucggucagguguugu

SEQ ID NO: 1152652 - RNA, 19 nt, Artificial Sequence
  Description of Artificial Sequence: Synthetic oligonucleotide
gcgcugguccagggagccc

SEQ ID NO: 1152653 - RNA, 19 nt, Artificial Sequence
  Description of Artificial Sequence: Synthetic oligonucleotide
cgaugccggacagcacgac

SEQ ID NO: 1152654 - RNA, 19 nt, Artificial Sequence
  Description of Artificial Sequence: Synthetic oligonucleotide
ccgcuguuguaacuuuaau

SEQ ID NO: 1152655 - RNA, 19 nt, Artificial Sequence
  Description of Artificial Sequence: Synthetic oligonucleotide
ccuaagggguaggcaggua

SEQ ID NO: 1152656 - RNA, 19 nt, Artificial Sequence
  Description of Artificial Sequence: Synthetic oligonucleotide
aagggaaugauuuuguggc

SEQ ID NO: 1152657 - RNA, 19 nt, Artificial Sequence
  Description of Artificial Sequence: Synthetic oligonucleotide
aaccuaaucauauucauca

SEQ ID NO: 1152658 - RNA, 19 nt, Artificial Sequence
  Description of Artificial Sequence: Synthetic oligonucleotide
aauaacuuaugacuguauc

SEQ ID NO: 1152659 - RNA, 19 nt, Artificial Sequence
  Description of Artificial Sequence: Synthetic oligonucleotide
agcaaaauaacuuaugacu

SEQ ID NO: 1152660 - RNA, 19 nt, Artificial Sequence
  Description of Artificial Sequence: Synthetic oligonucleotide
caggagauaacuuugaccc

SEQ ID NO: 1152661 - RNA, 19 nt, Artificial Sequence
  Description of Artificial Sequence: Synthetic oligonucleotide
aaugaaaacgagcacugag

SEQ ID NO: 1152662 - RNA, 19 nt, Artificial Sequence
  Description of Artificial Sequence: Synthetic oligonucleotide
gauaacuuugaccccaugg

SEQ ID NO: 1152663 - RNA, 19 nt, Artificial Sequence
  Description of Artificial Sequence: Synthetic oligonucleotide
uuuguuacuaacagaaucu

SEQ ID NO: 1152664 - RNA, 19 nt, Artificial Sequence
  Description of Artificial Sequence: Synthetic oligonucleotide
aaaacgagcacugagguca

SEQ ID NO: 1152665 - RNA, 19 nt, Artificial Sequence
  Description of Artificial Sequence: Synthetic oligonucleotide
uuuacuaagcauguguggg

SEQ ID NO: 1152666 - RNA, 19 nt, Artificial Sequence
  Description of Artificial Sequence: Synthetic oligonucleotide
uauagcaagcaaaauaacu

SEQ ID NO: 1152667 - RNA, 19 nt, Artificial Sequence
  Description of Artificial Sequence: Synthetic oligonucleotide
auauguaauaaauaucugu

SEQ ID NO: 1152668 - RNA, 19 nt, Artificial Sequence
  Description of Artificial Sequence: Synthetic oligonucleotide
agacuugauuuucauaacc

SEQ ID NO: 1152669 - RNA, 19 nt, Artificial Sequence
  Description of Artificial Sequence: Synthetic oligonucleotide
aaugggaagacgauucugc

SEQ ID NO: 1152670 - RNA, 19 nt, Artificial Sequence
  Description of Artificial Sequence: Synthetic oligonucleotide
aaacuaaugaauugcauua

SEQ ID NO: 1152671 - RNA, 19 nt, Artificial Sequence
  Description of Artificial Sequence: Synthetic oligonucleotide
uccauuaugguuuggauac

SEQ ID NO: 1152672 - RNA, 19 nt, Artificial Sequence
  Description of Artificial Sequence: Synthetic oligonucleotide
ugaauaauacaaauauaca

SEQ ID NO: 1152673 - RNA, 19 nt, Artificial Sequence
  Description of Artificial Sequence: Synthetic oligonucleotide
aagacaauaauccuucaaa

SEQ ID NO: 1152674 - RNA, 19 nt, Artificial Sequence
  Description of Artificial Sequence: Synthetic oligonucleotide
uguaagacaauaauccuuc

SEQ ID NO: 1152675 - RNA, 19 nt, Artificial Sequence
  Description of Artificial Sequence: Synthetic oligonucleotide
aaguacaaugaaaacgagc

SEQ ID NO: 1152676 - RNA, 19 nt, Artificial Sequence
  Description of Artificial Sequence: Synthetic oligonucleotide
uaaauaucuguaauagaug

SEQ ID NO: 1152677 - RNA, 19 nt, Artificial Sequence
  Description of Artificial Sequence: Synthetic oligonucleotide
guaauagauguguaugucg

SEQ ID NO: 1152678 - RNA, 19 nt, Artificial Sequence
  Description of Artificial Sequence: Synthetic oligonucleotide
aucuaugugcuccuggagc

SEQ ID NO: 1152679 - RNA, 19 nt, Artificial Sequence
  Description of Artificial Sequence: Synthetic oligonucleotide
cugcagugcaauuagaugc

SEQ ID NO: 1152680 - RNA, 19 nt, Artificial Sequence
  Description of Artificial Sequence: Synthetic oligonucleotide
aaggcagcaacucagaauu

SEQ ID NO: 1152681 - RNA, 19 nt, Artificial Sequence
  Description of Artificial Sequence: Synthetic oligonucleotide
uaauagauguguaugucga

SEQ ID NO: 1152682 - RNA, 19 nt, Artificial Sequence
  Description of Artificial Sequence: Synthetic oligonucleotide
aaugccaacugaaaggauc

SEQ ID NO: 1152683 - RNA, 19 nt, Artificial Sequence
  Description of Artificial Sequence: Synthetic oligonucleotide
uaacuuaugacuguaucag

SEQ ID NO: 1152684 - RNA, 19 nt, Artificial Sequence
  Description of Artificial Sequence: Synthetic oligonucleotide
uucaagaagggaaugauuu

SEQ ID NO: 1152685 - RNA, 19 nt, Artificial Sequence
  Description of Artificial Sequence: Synthetic oligonucleotide
ugaaaccuaaucauauuca

SEQ ID NO: 1152686 - RNA, 19 nt, Artificial Sequence
  Description of Artificial Sequence: Synthetic oligonucleotide
agacaauaauccuucaaag

SEQ ID NO: 1152687 - RNA, 19 nt, Artificial Sequence
  Description of Artificial Sequence: Synthetic oligonucleotide
uuuagcaucuaugugcucc

SEQ ID NO: 1152688 - RNA, 19 nt, Artificial Sequence
  Description of Artificial Sequence: Synthetic oligonucleotide
agccuuuaaauuuucagug

SEQ ID NO: 1152689 - RNA, 19 nt, Artificial Sequence
  Description of Artificial Sequence: Synthetic oligonucleotide
cuaacaaagccauuuuagc

SEQ ID NO: 1152690 - RNA, 19 nt, Artificial Sequence
  Description of Artificial Sequence: Synthetic oligonucleotide
auaacuuaugacuguauca

SEQ ID NO: 1152691 - RNA, 19 nt, Artificial Sequence
  Description of Artificial Sequence: Synthetic oligonucleotide
uucaaaggacauuaaagac

SEQ ID NO: 1152692 - RNA, 19 nt, Artificial Sequence
  Description of Artificial Sequence: Synthetic oligonucleotide
uaugguuuggauacuguca

SEQ ID NO: 1152693 - RNA, 19 nt, Artificial Sequence
  Description of Artificial Sequence: Synthetic oligonucleotide
gauccucucaucaaugugg

SEQ ID NO: 1152694 - RNA, 19 nt, Artificial Sequence
  Description of Artificial Sequence: Synthetic oligonucleotide
cuucagacucaccagaucc

SEQ ID NO: 1152695 - RNA, 19 nt, Artificial Sequence
  Description of Artificial Sequence: Synthetic oligonucleotide
ugcaauuagaugcuugugu

SEQ ID NO: 1152696 - RNA, 19 nt, Artificial Sequence
  Description of Artificial Sequence: Synthetic oligonucleotide
cugacuacauaaauucugg

SEQ ID NO: 1152697 - RNA, 19 nt, Artificial Sequence
  Description of Artificial Sequence: Synthetic oligonucleotide
ccauguaagacaauaaucc

SEQ ID NO: 1152698 - RNA, 19 nt, Artificial Sequence
  Description of Artificial Sequence: Synthetic oligonucleotide
uagauguguaugucgauag

SEQ ID NO: 1152699 - RNA, 19 nt, Artificial Sequence
  Description of Artificial Sequence: Synthetic oligonucleotide
aacuaaugaauugcauuac

SEQ ID NO: 1152700 - RNA, 19 nt, Artificial Sequence
  Description of Artificial Sequence: Synthetic oligonucleotide
uauccgugauccuagagca

SEQ ID NO: 1152701 - RNA, 19 nt, Artificial Sequence
  Description of Artificial Sequence: Synthetic oligonucleotide
uacugaugagcacacacug

SEQ ID NO: 1152702 - RNA, 19 nt, Artificial Sequence
  Description of Artificial Sequence: Synthetic oligonucleotide
gaccugacuacauaaauuc

SEQ ID NO: 1152703 - RNA, 19 nt, Artificial Sequence
  Description of Artificial Sequence: Synthetic oligonucleotide
ugcauuacaaguccuuaca

SEQ ID NO: 1152704 - RNA, 19 nt, Artificial Sequence
  Description of Artificial Sequence: Synthetic oligonucleotide
augaauugcauuacaaguc

SEQ ID NO: 1152705 - RNA, 19 nt, Artificial Sequence
  Description of Artificial Sequence: Synthetic oligonucleotide
ucuaaaaggaaaaggugua

SEQ ID NO: 1152706 - RNA, 19 nt, Artificial Sequence
  Description of Artificial Sequence: Synthetic oligonucleotide
aacuuuacugaugagcaca

SEQ ID NO: 1152707 - RNA, 19 nt, Artificial Sequence
  Description of Artificial Sequence: Synthetic oligonucleotide
ucuacaacuccugaagaag

SEQ ID NO: 1152708 - RNA, 19 nt, Artificial Sequence
  Description of Artificial Sequence: Synthetic oligonucleotide
uuugcaacaaguccacuaa

SEQ ID NO: 1152709 - RNA, 19 nt, Artificial Sequence
  Description of Artificial Sequence: Synthetic oligonucleotide
gagucauagugucuuagag

SEQ ID NO: 1152710 - RNA, 19 nt, Artificial Sequence
  Description of Artificial Sequence: Synthetic oligonucleotide
ucgaaguucaagucuuggg

SEQ ID NO: 1152711 - RNA, 19 nt, Artificial Sequence
  Description of Artificial Sequence: Synthetic oligonucleotide
uuugacucuguaauaaaua

SEQ ID NO: 1152712 - RNA, 19 nt, Artificial Sequence
  Description of Artificial Sequence: Synthetic oligonucleotide
ugucaauccaguucuaaaa

SEQ ID NO: 1152713 - RNA, 19 nt, Artificial Sequence
  Description of Artificial Sequence: Synthetic oligonucleotide
cuauccgugauccuagagc

SEQ ID NO: 1152714 - RNA, 19 nt, Artificial Sequence
  Description of Artificial Sequence: Synthetic oligonucleotide
uugggauuuugcaacaagu

SEQ ID NO: 1152715 - RNA, 19 nt, Artificial Sequence
  Description of Artificial Sequence: Synthetic oligonucleotide
uccaaugggaagacgauuc

SEQ ID NO: 1152716 - RNA, 19 nt, Artificial Sequence
  Description of Artificial Sequence: Synthetic oligonucleotide
augucgauagcucaucucu

SEQ ID NO: 1152717 - RNA, 19 nt, Artificial Sequence
  Description of Artificial Sequence: Synthetic oligonucleotide
uguguaugucgauagcuca

SEQ ID NO: 1152718 - RNA, 19 nt, Artificial Sequence
  Description of Artificial Sequence: Synthetic oligonucleotide
ugggagauuccaauuuuag

SEQ ID NO: 1152719 - RNA, 19 nt, Artificial Sequence
  Description of Artificial Sequence: Synthetic oligonucleotide
gucaauccaguucuaaaag

SEQ ID NO: 1152720 - RNA, 19 nt, Artificial Sequence
  Description of Artificial Sequence: Synthetic oligonucleotide
uucagacucaccagauccg

SEQ ID NO: 1152721 - RNA, 19 nt, Artificial Sequence
  Description of Artificial Sequence: Synthetic oligonucleotide
agcaacuuuauuuuacuaa

SEQ ID NO: 1152722 - RNA, 19 nt, Artificial Sequence
  Description of Artificial Sequence: Synthetic oligonucleotide
cugaaaccuaaucauauuc

SEQ ID NO: 1152723 - RNA, 19 nt, Artificial Sequence
  Description of Artificial Sequence: Synthetic oligonucleotide
ugaccuuggucucacgugc

SEQ ID NO: 1152724 - RNA, 19 nt, Artificial Sequence
  Description of Artificial Sequence: Synthetic oligonucleotide
cauuaugucccacucggag

SEQ ID NO: 1152725 - RNA, 19 nt, Artificial Sequence
  Description of Artificial Sequence: Synthetic oligonucleotide
caugguuagugguauuucc

SEQ ID NO: 1152726 - RNA, 19 nt, Artificial Sequence
  Description of Artificial Sequence: Synthetic oligonucleotide
acuuaugacuguaucagag

SEQ ID NO: 1152727 - RNA, 19 nt, Artificial Sequence
  Description of Artificial Sequence: Synthetic oligonucleotide
augaaaacgagcacugagg

SEQ ID NO: 1152728 - RNA, 19 nt, Artificial Sequence
  Description of Artificial Sequence: Synthetic oligonucleotide
ucucacgugcaccacaacu

SEQ ID NO: 1152729 - RNA, 19 nt, Artificial Sequence
  Description of Artificial Sequence: Synthetic oligonucleotide
uaagacaauaauccuucaa

SEQ ID NO: 1152730 - RNA, 19 nt, Artificial Sequence
  Description of Artificial Sequence: Synthetic oligonucleotide
agauguguaugucgauagc

SEQ ID NO: 1152731 - RNA, 19 nt, Artificial Sequence
  Description of Artificial Sequence: Synthetic oligonucleotide
uccaucgaaacaccgacaa

SEQ ID NO: 1152732 - RNA, 19 nt, Artificial Sequence
  Description of Artificial Sequence: Synthetic oligonucleotide
acuaaugaauugcauuaca

SEQ ID NO: 1152733 - RNA, 19 nt, Artificial Sequence
  Description of Artificial Sequence: Synthetic oligonucleotide
ggcauuaugucccacucgg

SEQ ID NO: 1152734 - RNA, 19 nt, Artificial Sequence
  Description of Artificial Sequence: Synthetic oligonucleotide
uuuugcaacaaguccacua

SEQ ID NO: 1152735 - RNA, 19 nt, Artificial Sequence
  Description of Artificial Sequence: Synthetic oligonucleotide
aaguccacuaacaaagcca

SEQ ID NO: 1152736 - RNA, 19 nt, Artificial Sequence
  Description of Artificial Sequence: Synthetic oligonucleotide
ccaaguaggagcaaauagg

SEQ ID NO: 1152737 - RNA, 19 nt, Artificial Sequence
  Description of Artificial Sequence: Synthetic oligonucleotide
uuaugucccacucggagau

SEQ ID NO: 1152738 - RNA, 19 nt, Artificial Sequence
  Description of Artificial Sequence: Synthetic oligonucleotide
aucgaaacaccgacaaugc

SEQ ID NO: 1152739 - RNA, 19 nt, Artificial Sequence
  Description of Artificial Sequence: Synthetic oligonucleotide
auuuuacuaagcaugugug

SEQ ID NO: 1152740 - RNA, 19 nt, Artificial Sequence
  Description of Artificial Sequence: Synthetic oligonucleotide
aaugauuuuguggcacaag

SEQ ID NO: 1152741 - RNA, 19 nt, Artificial Sequence
  Description of Artificial Sequence: Synthetic oligonucleotide
gucauagugucuuagaggu

SEQ ID NO: 1152742 - RNA, 19 nt, Artificial Sequence
  Description of Artificial Sequence: Synthetic oligonucleotide
aauaucuguaauagaugug

SEQ ID NO: 1152743 - RNA, 19 nt, Artificial Sequence
  Description of Artificial Sequence: Synthetic oligonucleotide
ucuuccaucgaaacaccga

SEQ ID NO: 1152744 - RNA, 19 nt, Artificial Sequence
  Description of Artificial Sequence: Synthetic oligonucleotide
aacuuaugacuguaucaga

SEQ ID NO: 1152745 - RNA, 19 nt, Artificial Sequence
  Description of Artificial Sequence: Synthetic oligonucleotide
ugucuacaacuccugaaga

SEQ ID NO: 1152746 - RNA, 19 nt, Artificial Sequence
  Description of Artificial Sequence: Synthetic oligonucleotide
uuaugguuuggauacuguc

SEQ ID NO: 1152747 - RNA, 19 nt, Artificial Sequence
  Description of Artificial Sequence: Synthetic oligonucleotide
uuaaagacuugauuuucau

SEQ ID NO: 1152748 - RNA, 19 nt, Artificial Sequence
  Description of Artificial Sequence: Synthetic oligonucleotide
acuuccauguuucuuugcu

SEQ ID NO: 1152749 - RNA, 19 nt, Artificial Sequence
  Description of Artificial Sequence: Synthetic oligonucleotide
uuuucaccgaaggacagca

SEQ ID NO: 1152750 - RNA, 19 nt, Artificial Sequence
  Description of Artificial Sequence: Synthetic oligonucleotide
gauuugcugaccuuggucu

SEQ ID NO: 1152751 - RNA, 19 nt, Artificial Sequence
  Description of Artificial Sequence: Synthetic oligonucleotide
cuuccaucgaaacaccgac

SEQ ID NO: 1152752 - RNA, 19 nt, Artificial Sequence
  Description of Artificial Sequence: Synthetic oligonucleotide
accgacaaugcucucucgg

SEQ ID NO: 1152753 - RNA, 19 nt, Artificial Sequence
  Description of Artificial Sequence: Synthetic oligonucleotide
auuaugucccacucggaga

SEQ ID NO: 1152754 - RNA, 19 nt, Artificial Sequence
  Description of Artificial Sequence: Synthetic oligonucleotide
aaauaggcugcucuuccau

SEQ ID NO: 1152755 - RNA, 19 nt, Artificial Sequence
  Description of Artificial Sequence: Synthetic oligonucleotide
gauacugucaaggucuauc

SEQ ID NO: 1152756 - RNA, 19 nt, Artificial Sequence
  Description of Artificial Sequence: Synthetic oligonucleotide
cagaccugaaucuacagga

SEQ ID NO: 1152757 - RNA, 19 nt, Artificial Sequence
  Description of Artificial Sequence: Synthetic oligonucleotide
caaggucuauccgugaucc

SEQ ID NO: 1152758 - RNA, 19 nt, Artificial Sequence
  Description of Artificial Sequence: Synthetic oligonucleotide
gaacucagaaugccaacug

SEQ ID NO: 1152759 - RNA, 19 nt, Artificial Sequence
  Description of Artificial Sequence: Synthetic oligonucleotide
auagcaagcaaaauaacuu

SEQ ID NO: 1152760 - RNA, 19 nt, Artificial Sequence
  Description of Artificial Sequence: Synthetic oligonucleotide
cacgccgcgacccaggacg

SEQ ID NO: 1152761 - RNA, 19 nt, Artificial Sequence
  Description of Artificial Sequence: Synthetic oligonucleotide
gggauuuugcaacaagucc

SEQ ID NO: 1152762 - RNA, 19 nt, Artificial Sequence
  Description of Artificial Sequence: Synthetic oligonucleotide
uguaauagauguguauguc

SEQ ID NO: 1152763 - RNA, 19 nt, Artificial Sequence
  Description of Artificial Sequence: Synthetic oligonucleotide
ucuauccgugauccuagag

SEQ ID NO: 1152764 - RNA, 19 nt, Artificial Sequence
  Description of Artificial Sequence: Synthetic oligonucleotide
uggcauuaugucccacucg

SEQ ID NO: 1152765 - RNA, 19 nt, Artificial Sequence
  Description of Artificial Sequence: Synthetic oligonucleotide
uagcaagcaaaauaacuua

SEQ ID NO: 1152766 - RNA, 19 nt, Artificial Sequence
  Description of Artificial Sequence: Synthetic oligonucleotide
caaguccacuaacaaagcc

SEQ ID NO: 1152767 - RNA, 19 nt, Artificial Sequence
  Description of Artificial Sequence: Synthetic oligonucleotide
gauccgagccuagagcugg

SEQ ID NO: 1152768 - RNA, 19 nt, Artificial Sequence
  Description of Artificial Sequence: Synthetic oligonucleotide
gguuuggauacugucaagg

SEQ ID NO: 1152769 - RNA, 19 nt, Artificial Sequence
  Description of Artificial Sequence: Synthetic oligonucleotide
uacacaucccaaacacuug

SEQ ID NO: 1152770 - RNA, 19 nt, Artificial Sequence
  Description of Artificial Sequence: Synthetic oligonucleotide
auggcugaaggugucaauc

SEQ ID NO: 1152771 - RNA, 19 nt, Artificial Sequence
  Description of Artificial Sequence: Synthetic oligonucleotide
cuaaugaauugcauuacaa

SEQ ID NO: 1152772 - RNA, 19 nt, Artificial Sequence
  Description of Artificial Sequence: Synthetic oligonucleotide
ugcagugcaauuagaugcu

SEQ ID NO: 1152773 - RNA, 19 nt, Artificial Sequence
  Description of Artificial Sequence: Synthetic oligonucleotide
cacucaucaugguuagugg

SEQ ID NO: 1152774 - RNA, 19 nt, Artificial Sequence
  Description of Artificial Sequence: Synthetic oligonucleotide
uccacuaacaaagccauuu

SEQ ID NO: 1152775 - RNA, 19 nt, Artificial Sequence
  Description of Artificial Sequence: Synthetic oligonucleotide
acaccgacaaugcucucuc

SEQ ID NO: 1152776 - RNA, 19 nt, Artificial Sequence
  Description of Artificial Sequence: Synthetic oligonucleotide
auuuuagcaucuaugugcu

SEQ ID NO: 1152777 - RNA, 19 nt, Artificial Sequence
  Description of Artificial Sequence: Synthetic oligonucleotide
guugggauuuugcaacaag

SEQ ID NO: 1152778 - RNA, 19 nt, Artificial Sequence
  Description of Artificial Sequence: Synthetic oligonucleotide
ugaccugacuacauaaauu

SEQ ID NO: 1152779 - RNA, 19 nt, Artificial Sequence
  Description of Artificial Sequence: Synthetic oligonucleotide
agaagggaaugauuuugug

SEQ ID NO: 1152780 - RNA, 19 nt, Artificial Sequence
  Description of Artificial Sequence: Synthetic oligonucleotide
ggaacaaguacaaugaaaa

SEQ ID NO: 1152781 - RNA, 19 nt, Artificial Sequence
  Description of Artificial Sequence: Synthetic oligonucleotide
ucaccgaaggacagcaacu

SEQ ID NO: 1152782 - RNA, 19 nt, Artificial Sequence
  Description of Artificial Sequence: Synthetic oligonucleotide
uugcauuacaaguccuuac

SEQ ID NO: 1152783 - RNA, 19 nt, Artificial Sequence
  Description of Artificial Sequence: Synthetic oligonucleotide
cauuacaaguccuuacaca

SEQ ID NO: 1152784 - RNA, 19 nt, Artificial Sequence
  Description of Artificial Sequence: Synthetic oligonucleotide
gggagauuccaauuuuagg

SEQ ID NO: 1152785 - RNA, 19 nt, Artificial Sequence
  Description of Artificial Sequence: Synthetic oligonucleotide
uguuacuaacagaaucuuu

SEQ ID NO: 1152786 - RNA, 19 nt, Artificial Sequence
  Description of Artificial Sequence: Synthetic oligonucleotide
gauuuugcaacaaguccac

SEQ ID NO: 1152787 - RNA, 19 nt, Artificial Sequence
  Description of Artificial Sequence: Synthetic oligonucleotide
acgaggugagcgucgggcc

SEQ ID NO: 1152788 - RNA, 19 nt, Artificial Sequence
  Description of Artificial Sequence: Synthetic oligonucleotide
ugacuacauaaauucugga

SEQ ID NO: 1152789 - RNA, 19 nt, Artificial Sequence
  Description of Artificial Sequence: Synthetic oligonucleotide
gucuuagagguaucccugg

SEQ ID NO: 1152790 - RNA, 19 nt, Artificial Sequence
  Description of Artificial Sequence: Synthetic oligonucleotide
aucuguaauagauguguau

SEQ ID NO: 1152791 - RNA, 19 nt, Artificial Sequence
  Description of Artificial Sequence: Synthetic oligonucleotide
ucggagaugguugaccuga

SEQ ID NO: 1152792 - RNA, 19 nt, Artificial Sequence
  Description of Artificial Sequence: Synthetic oligonucleotide
uugaucgcggucuccauuc

SEQ ID NO: 1152793 - RNA, 19 nt, Artificial Sequence
  Description of Artificial Sequence: Synthetic oligonucleotide
aguucaagucuugggcacc

SEQ ID NO: 1152794 - RNA, 19 nt, Artificial Sequence
  Description of Artificial Sequence: Synthetic oligonucleotide
acaaguccacuaacaaagc

SEQ ID NO: 1152795 - RNA, 19 nt, Artificial Sequence
  Description of Artificial Sequence: Synthetic oligonucleotide
ucuuugaucgcggucucca

SEQ ID NO: 1152796 - RNA, 19 nt, Artificial Sequence
  Description of Artificial Sequence: Synthetic oligonucleotide
accagauccgagccuagag

SEQ ID NO: 1152797 - RNA, 19 nt, Artificial Sequence
  Description of Artificial Sequence: Synthetic oligonucleotide
uuagcaucuaugugcuccu

SEQ ID NO: 1152798 - RNA, 19 nt, Artificial Sequence
  Description of Artificial Sequence: Synthetic oligonucleotide
auguguaugucgauagcuc

SEQ ID NO: 1152799 - RNA, 19 nt, Artificial Sequence
  Description of Artificial Sequence: Synthetic oligonucleotide
uuaggcccacauuucaggu

SEQ ID NO: 1152800 - RNA, 19 nt, Artificial Sequence
  Description of Artificial Sequence: Synthetic oligonucleotide
auuuugacucuguaauaaa

SEQ ID NO: 1152801 - RNA, 19 nt, Artificial Sequence
  Description of Artificial Sequence: Synthetic oligonucleotide
aacaccgacaaugcucucu

SEQ ID NO: 1152802 - RNA, 19 nt, Artificial Sequence
  Description of Artificial Sequence: Synthetic oligonucleotide
cuuugggucagcgacccgc

SEQ ID NO: 1152803 - RNA, 19 nt, Artificial Sequence
  Description of Artificial Sequence: Synthetic oligonucleotide
agcaaauaggcugcucuuc

SEQ ID NO: 1152804 - RNA, 19 nt, Artificial Sequence
  Description of Artificial Sequence: Synthetic oligonucleotide
uagaggaugccuugucuac

SEQ ID NO: 1152805 - RNA, 19 nt, Artificial Sequence
  Description of Artificial Sequence: Synthetic oligonucleotide
aagccauuuuagcaucuau

SEQ ID NO: 1152806 - RNA, 19 nt, Artificial Sequence
  Description of Artificial Sequence: Synthetic oligonucleotide
gaugccuugucuacaacuc

SEQ ID NO: 1152807 - RNA, 19 nt, Artificial Sequence
  Description of Artificial Sequence: Synthetic oligonucleotide
ucaaggucuauccgugauc

SEQ ID NO: 1152808 - RNA, 19 nt, Artificial Sequence
  Description of Artificial Sequence: Synthetic oligonucleotide
aguccuuacacaucccaaa

SEQ ID NO: 1152809 - RNA, 19 nt, Artificial Sequence
  Description of Artificial Sequence: Synthetic oligonucleotide
gaaucuacaggaacaagua

SEQ ID NO: 1152810 - RNA, 19 nt, Artificial Sequence
  Description of Artificial Sequence: Synthetic oligonucleotide
uggugaaggauuugcugac

SEQ ID NO: 1152811 - RNA, 19 nt, Artificial Sequence
  Description of Artificial Sequence: Synthetic oligonucleotide
gugauccuagagcagaaga

SEQ ID NO: 1152812 - RNA, 19 nt, Artificial Sequence
  Description of Artificial Sequence: Synthetic oligonucleotide
uaugucgauagcucaucuc

SEQ ID NO: 1152813 - RNA, 19 nt, Artificial Sequence
  Description of Artificial Sequence: Synthetic oligonucleotide
uuagugguauuuccuucuc

SEQ ID NO: 1152814 - RNA, 19 nt, Artificial Sequence
  Description of Artificial Sequence: Synthetic oligonucleotide
ucaagaagggaaugauuuu

SEQ ID NO: 1152815 - RNA, 19 nt, Artificial Sequence
  Description of Artificial Sequence: Synthetic oligonucleotide
gaaaccuaaucauauucau

SEQ ID NO: 1152816 - RNA, 19 nt, Artificial Sequence
  Description of Artificial Sequence: Synthetic oligonucleotide
gacgaggugagcgucgggc

SEQ ID NO: 1152817 - RNA, 19 nt, Artificial Sequence
  Description of Artificial Sequence: Synthetic oligonucleotide
caacucagaauugggcacg

SEQ ID NO: 1152818 - RNA, 19 nt, Artificial Sequence
  Description of Artificial Sequence: Synthetic oligonucleotide
gaaacaccgacaaugcucu

SEQ ID NO: 1152819 - RNA, 19 nt, Artificial Sequence
  Description of Artificial Sequence: Synthetic oligonucleotide
cauuaugguuuggauacug

SEQ ID NO: 1152820 - RNA, 19 nt, Artificial Sequence
  Description of Artificial Sequence: Synthetic oligonucleotide
cuagagcagaagagcuugg

SEQ ID NO: 1152821 - RNA, 19 nt, Artificial Sequence
  Description of Artificial Sequence: Synthetic oligonucleotide
ucgaaacaccgacaaugcu

SEQ ID NO: 1152822 - RNA, 19 nt, Artificial Sequence
  Description of Artificial Sequence: Synthetic oligonucleotide
ucagcgacccgcacgccgc

SEQ ID NO: 1152823 - RNA, 19 nt, Artificial Sequence
  Description of Artificial Sequence: Synthetic oligonucleotide
uguggcacaaggugacacu

SEQ ID NO: 1152824 - RNA, 19 nt, Artificial Sequence
  Description of Artificial Sequence: Synthetic oligonucleotide
ugucgauagcucaucucuc

SEQ ID NO: 1152825 - RNA, 19 nt, Artificial Sequence
  Description of Artificial Sequence: Synthetic oligonucleotide
uuccaucgaaacaccgaca

SEQ ID NO: 1152826 - RNA, 19 nt, Artificial Sequence
  Description of Artificial Sequence: Synthetic oligonucleotide
uugccaccuggcauuaugu

SEQ ID NO: 1152827 - RNA, 19 nt, Artificial Sequence
  Description of Artificial Sequence: Synthetic oligonucleotide
cucgaaguucaagucuugg

SEQ ID NO: 1152828 - RNA, 19 nt, Artificial Sequence
  Description of Artificial Sequence: Synthetic oligonucleotide
cugaccuuggucucacgug

SEQ ID NO: 1152829 - RNA, 19 nt, Artificial Sequence
  Description of Artificial Sequence: Synthetic oligonucleotide
gcaaauaggcugcucuucc

SEQ ID NO: 1152830 - RNA, 19 nt, Artificial Sequence
  Description of Artificial Sequence: Synthetic oligonucleotide
aaguaggagcaaauaggcu

SEQ ID NO: 1152831 - RNA, 19 nt, Artificial Sequence
  Description of Artificial Sequence: Synthetic oligonucleotide
ugugugggagauuccaauu

SEQ ID NO: 1152832 - RNA, 19 nt, Artificial Sequence
  Description of Artificial Sequence: Synthetic oligonucleotide
gaugguugaccugacuaca

SEQ ID NO: 1152833 - RNA, 19 nt, Artificial Sequence
  Description of Artificial Sequence: Synthetic oligonucleotide
aggcccacauuucagguaa

SEQ ID NO: 1152834 - RNA, 19 nt, Artificial Sequence
  Description of Artificial Sequence: Synthetic oligonucleotide
ugguuagugguauuuccuu

SEQ ID NO: 1152835 - RNA, 19 nt, Artificial Sequence
  Description of Artificial Sequence: Synthetic oligonucleotide
ugaggucaccauguaagac

SEQ ID NO: 1152836 - RNA, 19 nt, Artificial Sequence
  Description of Artificial Sequence: Synthetic oligonucleotide
auguaagacaauaauccuu

SEQ ID NO: 1152837 - RNA, 19 nt, Artificial Sequence
  Description of Artificial Sequence: Synthetic oligonucleotide
uguaugucgauagcucauc

SEQ ID NO: 1152838 - RNA, 19 nt, Artificial Sequence
  Description of Artificial Sequence: Synthetic oligonucleotide
acaucccaaacacuugaau

SEQ ID NO: 1152839 - RNA, 19 nt, Artificial Sequence
  Description of Artificial Sequence: Synthetic oligonucleotide
ucagacucaccagauccga

SEQ ID NO: 1152840 - RNA, 19 nt, Artificial Sequence
  Description of Artificial Sequence: Synthetic oligonucleotide
augugugggagauuccaau

SEQ ID NO: 1152841 - RNA, 19 nt, Artificial Sequence
  Description of Artificial Sequence: Synthetic oligonucleotide
uuugaucgcggucuccauu

SEQ ID NO: 1152842 - RNA, 19 nt, Artificial Sequence
  Description of Artificial Sequence: Synthetic oligonucleotide
gaauugggcacguuugagu

SEQ ID NO: 1152843 - RNA, 19 nt, Artificial Sequence
  Description of Artificial Sequence: Synthetic oligonucleotide
cuuggucucacgugcacca

SEQ ID NO: 1152844 - RNA, 19 nt, Artificial Sequence
  Description of Artificial Sequence: Synthetic oligonucleotide
gagcugauagauccucuca

SEQ ID NO: 1152845 - RNA, 19 nt, Artificial Sequence
  Description of Artificial Sequence: Synthetic oligonucleotide
gacuugauuuucauaaccu

SEQ ID NO: 1152846 - RNA, 19 nt, Artificial Sequence
  Description of Artificial Sequence: Synthetic oligonucleotide
auugggcacguuugaguug

SEQ ID NO: 1152847 - RNA, 19 nt, Artificial Sequence
  Description of Artificial Sequence: Synthetic oligonucleotide
ucgauagcucaucucucuc

SEQ ID NO: 1152848 - RNA, 19 nt, Artificial Sequence
  Description of Artificial Sequence: Synthetic oligonucleotide
caacuuuacugaugagcac

SEQ ID NO: 1152849 - RNA, 19 nt, Artificial Sequence
  Description of Artificial Sequence: Synthetic oligonucleotide
ccaccuggcauuauguccc

SEQ ID NO: 1152850 - RNA, 19 nt, Artificial Sequence
  Description of Artificial Sequence: Synthetic oligonucleotide
gucagcgacccgcacgccg

SEQ ID NO: 1152851 - RNA, 19 nt, Artificial Sequence
  Description of Artificial Sequence: Synthetic oligonucleotide
uguguccugugguucccag

SEQ ID NO: 1152852 - RNA, 19 nt, Artificial Sequence
  Description of Artificial Sequence: Synthetic oligonucleotide
caaaauaacuuaugacugu

SEQ ID NO: 1152853 - RNA, 19 nt, Artificial Sequence
  Description of Artificial Sequence: Synthetic oligonucleotide
guuagugguauuuccuucu

SEQ ID NO: 1152854 - RNA, 19 nt, Artificial Sequence
  Description of Artificial Sequence: Synthetic oligonucleotide
cuggcauuaugucccacuc

SEQ ID NO: 1152855 - RNA, 19 nt, Artificial Sequence
  Description of Artificial Sequence: Synthetic oligonucleotide
gaccccauggacuccauua

SEQ ID NO: 1152856 - RNA, 19 nt, Artificial Sequence
  Description of Artificial Sequence: Synthetic oligonucleotide
auacuccucucccagguua

SEQ ID NO: 1152857 - RNA, 19 nt, Artificial Sequence
  Description of Artificial Sequence: Synthetic oligonucleotide
aguccacuaacaaagccau

SEQ ID NO: 1152858 - RNA, 19 nt, Artificial Sequence
  Description of Artificial Sequence: Synthetic oligonucleotide
gaagacugcagugcaauua

SEQ ID NO: 1152859 - RNA, 19 nt, Artificial Sequence
  Description of Artificial Sequence: Synthetic oligonucleotide
aaacaccgacaaugcucuc

SEQ ID NO: 1152860 - RNA, 19 nt, Artificial Sequence
  Description of Artificial Sequence: Synthetic oligonucleotide
aaacgagcacugaggucac

SEQ ID NO: 1152861 - RNA, 19 nt, Artificial Sequence
  Description of Artificial Sequence: Synthetic oligonucleotide
cauguaagacaauaauccu

SEQ ID NO: 1152862 - RNA, 19 nt, Artificial Sequence
  Description of Artificial Sequence: Synthetic oligonucleotide
agaguagcugcuggugcac

SEQ ID NO: 1152863 - RNA, 19 nt, Artificial Sequence
  Description of Artificial Sequence: Synthetic oligonucleotide
uuguuacuaacagaaucuu

SEQ ID NO: 1152864 - RNA, 19 nt, Artificial Sequence
  Description of Artificial Sequence: Synthetic oligonucleotide
ucaugguuagugguauuuc

SEQ ID NO: 1152865 - RNA, 19 nt, Artificial Sequence
  Description of Artificial Sequence: Synthetic oligonucleotide
auccuagagcagaagagcu

SEQ ID NO: 1152866 - RNA, 19 nt, Artificial Sequence
  Description of Artificial Sequence: Synthetic oligonucleotide
cuuuucaccgaaggacagc

SEQ ID NO: 1152867 - RNA, 19 nt, Artificial Sequence
  Description of Artificial Sequence: Synthetic oligonucleotide
ucacgugcaccacaacuuu

SEQ ID NO: 1152868 - RNA, 19 nt, Artificial Sequence
  Description of Artificial Sequence: Synthetic oligonucleotide
ugucaaggucuauccguga

SEQ ID NO: 1152869 - RNA, 19 nt, Artificial Sequence
  Description of Artificial Sequence: Synthetic oligonucleotide
uggucucacgugcaccaca

SEQ ID NO: 1152870 - RNA, 19 nt, Artificial Sequence
  Description of Artificial Sequence: Synthetic oligonucleotide
uuguggcacaaggugacac

SEQ ID NO: 1152871 - RNA, 19 nt, Artificial Sequence
  Description of Artificial Sequence: Synthetic oligonucleotide
agggaaugauuuuguggca

SEQ ID NO: 1152872 - RNA, 19 nt, Artificial Sequence
  Description of Artificial Sequence: Synthetic oligonucleotide
agcaagcaaaauaacuuau

SEQ ID NO: 1152873 - RNA, 19 nt, Artificial Sequence
  Description of Artificial Sequence: Synthetic oligonucleotide
auuaugguuuggauacugu

SEQ ID NO: 1152874 - RNA, 19 nt, Artificial Sequence
  Description of Artificial Sequence: Synthetic oligonucleotide
acaaacuaaugaauugcau

SEQ ID NO: 1152875 - RNA, 19 nt, Artificial Sequence
  Description of Artificial Sequence: Synthetic oligonucleotide
aggaugccuugucuacaac

SEQ ID NO: 1152876 - RNA, 19 nt, Artificial Sequence
  Description of Artificial Sequence: Synthetic oligonucleotide
augguuagugguauuuccu

SEQ ID NO: 1152877 - RNA, 19 nt, Artificial Sequence
  Description of Artificial Sequence: Synthetic oligonucleotide
guagaggaugccuugucua

SEQ ID NO: 1152878 - RNA, 19 nt, Artificial Sequence
  Description of Artificial Sequence: Synthetic oligonucleotide
gugacacucaucaugguua

SEQ ID NO: 1152879 - RNA, 19 nt, Artificial Sequence
  Description of Artificial Sequence: Synthetic oligonucleotide
ugaucuccaaugggaagac

SEQ ID NO: 1152880 - RNA, 19 nt, Artificial Sequence
  Description of Artificial Sequence: Synthetic oligonucleotide
ugaaggugucaauccaguu

SEQ ID NO: 1152881 - RNA, 19 nt, Artificial Sequence
  Description of Artificial Sequence: Synthetic oligonucleotide
caccacaacuuuacugaug

SEQ ID NO: 1152882 - RNA, 19 nt, Artificial Sequence
  Description of Artificial Sequence: Synthetic oligonucleotide
aaguccuuacacaucccaa

SEQ ID NO: 1152883 - RNA, 19 nt, Artificial Sequence
  Description of Artificial Sequence: Synthetic oligonucleotide
gcauuacaaguccuuacac

SEQ ID NO: 1152884 - RNA, 19 nt, Artificial Sequence
  Description of Artificial Sequence: Synthetic oligonucleotide
uccuagagcagaagagcuu

SEQ ID NO: 1152885 - RNA, 19 nt, Artificial Sequence
  Description of Artificial Sequence: Synthetic oligonucleotide
cuccauuaugguuuggaua

SEQ ID NO: 1152886 - RNA, 19 nt, Artificial Sequence
  Description of Artificial Sequence: Synthetic oligonucleotide
gugucuuagagguaucccu

SEQ ID NO: 1152887 - RNA, 19 nt, Artificial Sequence
  Description of Artificial Sequence: Synthetic oligonucleotide
caaugggaagacgauucug

SEQ ID NO: 1152888 - RNA, 19 nt, Artificial Sequence
  Description of Artificial Sequence: Synthetic oligonucleotide
cagggguuuucaucucggg

SEQ ID NO: 1152889 - RNA, 19 nt, Artificial Sequence
  Description of Artificial Sequence: Synthetic oligonucleotide
cugaaucuacaggaacaag

SEQ ID NO: 1152890 - RNA, 19 nt, Artificial Sequence
  Description of Artificial Sequence: Synthetic oligonucleotide
aauccggguaaggaggcuu

SEQ ID NO: 1152891 - RNA, 19 nt, Artificial Sequence
  Description of Artificial Sequence: Synthetic oligonucleotide
ugguugaccugacuacaua

SEQ ID NO: 1152892 - RNA, 19 nt, Artificial Sequence
  Description of Artificial Sequence: Synthetic oligonucleotide
gugucaauccaguucuaaa

SEQ ID NO: 1152893 - RNA, 19 nt, Artificial Sequence
  Description of Artificial Sequence: Synthetic oligonucleotide
gguuagugguauuuccuuc

SEQ ID NO: 1152894 - RNA, 19 nt, Artificial Sequence
  Description of Artificial Sequence: Synthetic oligonucleotide
ucucggggcuuggagaugu

SEQ ID NO: 1152895 - RNA, 19 nt, Artificial Sequence
  Description of Artificial Sequence: Synthetic oligonucleotide
gccauuuuagcaucuaugu

SEQ ID NO: 1152896 - RNA, 19 nt, Artificial Sequence
  Description of Artificial Sequence: Synthetic oligonucleotide
caggacgaggugagcgucg

SEQ ID NO: 1152897 - RNA, 19 nt, Artificial Sequence
  Description of Artificial Sequence: Synthetic oligonucleotide
aaggucuauccgugauccu

SEQ ID NO: 1152898 - RNA, 19 nt, Artificial Sequence
  Description of Artificial Sequence: Synthetic oligonucleotide
ggauuugcugaccuugguc

SEQ ID NO: 1152899 - RNA, 19 nt, Artificial Sequence
  Description of Artificial Sequence: Synthetic oligonucleotide
agauaacuuugaccccaug

SEQ ID NO: 1152900 - RNA, 19 nt, Artificial Sequence
  Description of Artificial Sequence: Synthetic oligonucleotide
gguugaccugacuacauaa

SEQ ID NO: 1152901 - RNA, 19 nt, Artificial Sequence
  Description of Artificial Sequence: Synthetic oligonucleotide
gaucgcggucuccauucug

SEQ ID NO: 1152902 - RNA, 19 nt, Artificial Sequence
  Description of Artificial Sequence: Synthetic oligonucleotide
cacucggagaugguugacc

SEQ ID NO: 1152903 - RNA, 19 nt, Artificial Sequence
  Description of Artificial Sequence: Synthetic oligonucleotide
gguuccacaauacuccucu

SEQ ID NO: 1152904 - RNA, 19 nt, Artificial Sequence
  Description of Artificial Sequence: Synthetic oligonucleotide
aacucagaauugggcacgu

SEQ ID NO: 1152905 - RNA, 19 nt, Artificial Sequence
  Description of Artificial Sequence: Synthetic oligonucleotide
aggcuuugggucagcgacc

SEQ ID NO: 1152906 - RNA, 19 nt, Artificial Sequence
  Description of Artificial Sequence: Synthetic oligonucleotide
ggcacguuugaguugccac

SEQ ID NO: 1152907 - RNA, 19 nt, Artificial Sequence
  Description of Artificial Sequence: Synthetic oligonucleotide
gaagacgauucugcugcug

SEQ ID NO: 1152908 - RNA, 19 nt, Artificial Sequence
  Description of Artificial Sequence: Synthetic oligonucleotide
ucauagugucuuagaggua

SEQ ID NO: 1152909 - RNA, 19 nt, Artificial Sequence
  Description of Artificial Sequence: Synthetic oligonucleotide
gcagcaacucagaauuggg

SEQ ID NO: 1152910 - RNA, 19 nt, Artificial Sequence
  Description of Artificial Sequence: Synthetic oligonucleotide
uaggcugcucuuccaucga

SEQ ID NO: 1152911 - RNA, 19 nt, Artificial Sequence
  Description of Artificial Sequence: Synthetic oligonucleotide
gcaacaaguccacuaacaa

SEQ ID NO: 1152912 - RNA, 19 nt, Artificial Sequence
  Description of Artificial Sequence: Synthetic oligonucleotide
ggagcaaauaggcugcucu

SEQ ID NO: 1152913 - RNA, 19 nt, Artificial Sequence
  Description of Artificial Sequence: Synthetic oligonucleotide
ccgacaaugcucucucggg

SEQ ID NO: 1152914 - RNA, 19 nt, Artificial Sequence
  Description of Artificial Sequence: Synthetic oligonucleotide
gccuuuaaauuuucaguga

SEQ ID NO: 1152915 - RNA, 19 nt, Artificial Sequence
  Description of Artificial Sequence: Synthetic oligonucleotide
gagcuggcggugccaacag

SEQ ID NO: 1152916 - RNA, 19 nt, Artificial Sequence
  Description of Artificial Sequence: Synthetic oligonucleotide
cagauccgagccuagagcu

SEQ ID NO: 1152917 - RNA, 19 nt, Artificial Sequence
  Description of Artificial Sequence: Synthetic oligonucleotide
ugagcgucgggccgugguc

SEQ ID NO: 1152918 - RNA, 19 nt, Artificial Sequence
  Description of Artificial Sequence: Synthetic oligonucleotide
ggucuauccgugauccuag

SEQ ID NO: 1152919 - RNA, 19 nt, Artificial Sequence
  Description of Artificial Sequence: Synthetic oligonucleotide
ugcuuguguccugugguuc

SEQ ID NO: 1152920 - RNA, 19 nt, Artificial Sequence
  Description of Artificial Sequence: Synthetic oligonucleotide
ccagauccgagccuagagc

SEQ ID NO: 1152921 - RNA, 19 nt, Artificial Sequence
  Description of Artificial Sequence: Synthetic oligonucleotide
agaggaugccuugucuaca

SEQ ID NO: 1152922 - RNA, 19 nt, Artificial Sequence
  Description of Artificial Sequence: Synthetic oligonucleotide
gcugaaggugucaauccag

SEQ ID NO: 1152923 - RNA, 19 nt, Artificial Sequence
  Description of Artificial Sequence: Synthetic oligonucleotide
acguuugaguugccacuug

SEQ ID NO: 1152924 - RNA, 19 nt, Artificial Sequence
  Description of Artificial Sequence: Synthetic oligonucleotide
acaaggugacacucaucau

SEQ ID NO: 1152925 - RNA, 19 nt, Artificial Sequence
  Description of Artificial Sequence: Synthetic oligonucleotide
aggucuauccgugauccua

SEQ ID NO: 1152926 - RNA, 19 nt, Artificial Sequence
  Description of Artificial Sequence: Synthetic oligonucleotide
ggagucauagugucuuaga

SEQ ID NO: 1152927 - RNA, 19 nt, Artificial Sequence
  Description of Artificial Sequence: Synthetic oligonucleotide
accccauggacuccauuau

SEQ ID NO: 1152928 - RNA, 19 nt, Artificial Sequence
  Description of Artificial Sequence: Synthetic oligonucleotide
gggucagcgacccgcacgc

SEQ ID NO: 1152929 - RNA, 19 nt, Artificial Sequence
  Description of Artificial Sequence: Synthetic oligonucleotide
uaggcccacauuucaggua

SEQ ID NO: 1152930 - RNA, 19 nt, Artificial Sequence
  Description of Artificial Sequence: Synthetic oligonucleotide
agacgauucugcugcugaa

SEQ ID NO: 1152931 - RNA, 19 nt, Artificial Sequence
  Description of Artificial Sequence: Synthetic oligonucleotide
aggacgaggugagcgucgg

SEQ ID NO: 1152932 - RNA, 19 nt, Artificial Sequence
  Description of Artificial Sequence: Synthetic oligonucleotide
ugaucgcggucuccauucu

SEQ ID NO: 1152933 - RNA, 19 nt, Artificial Sequence
  Description of Artificial Sequence: Synthetic oligonucleotide
guguagaggaugccuuguc

SEQ ID NO: 1152934 - RNA, 19 nt, Artificial Sequence
  Description of Artificial Sequence: Synthetic oligonucleotide
ucucggggacucagguugu

SEQ ID NO: 1152935 - RNA, 19 nt, Artificial Sequence
  Description of Artificial Sequence: Synthetic oligonucleotide
aggagcaaauaggcugcuc

SEQ ID NO: 1152936 - RNA, 19 nt, Artificial Sequence
  Description of Artificial Sequence: Synthetic oligonucleotide
ggguuuucaucucggggac

SEQ ID NO: 1152937 - RNA, 19 nt, Artificial Sequence
  Description of Artificial Sequence: Synthetic oligonucleotide
cucggagaugguugaccug

SEQ ID NO: 1152938 - RNA, 19 nt, Artificial Sequence
  Description of Artificial Sequence: Synthetic oligonucleotide
gacgauucugcugcugaaa

SEQ ID NO: 1152939 - RNA, 19 nt, Artificial Sequence
  Description of Artificial Sequence: Synthetic oligonucleotide
guugaccugacuacauaaa

SEQ ID NO: 1152940 - RNA, 19 nt, Artificial Sequence
  Description of Artificial Sequence: Synthetic oligonucleotide
gagcgucgggccguggucc

SEQ ID NO: 1152941 - RNA, 19 nt, Artificial Sequence
  Description of Artificial Sequence: Synthetic oligonucleotide
gaauugcauuacaaguccu

SEQ ID NO: 1152942 - RNA, 19 nt, Artificial Sequence
  Description of Artificial Sequence: Synthetic oligonucleotide
uggcccaauccggguaagg

SEQ ID NO: 1152943 - RNA, 19 nt, Artificial Sequence
  Description of Artificial Sequence: Synthetic oligonucleotide
cuggcggugccaacagcug

SEQ ID NO: 1152944 - RNA, 19 nt, Artificial Sequence
  Description of Artificial Sequence: Synthetic oligonucleotide
caugugugggagauuccaa

SEQ ID NO: 1152945 - RNA, 19 nt, Artificial Sequence
  Description of Artificial Sequence: Synthetic oligonucleotide
guaugucgauagcucaucu

SEQ ID NO: 1152946 - RNA, 19 nt, Artificial Sequence
  Description of Artificial Sequence: Synthetic oligonucleotide
caccgacaaugcucucucg

SEQ ID NO: 1152947 - RNA, 19 nt, Artificial Sequence
  Description of Artificial Sequence: Synthetic oligonucleotide
accgaaggacagcaacuuu

SEQ ID NO: 1152948 - RNA, 19 nt, Artificial Sequence
  Description of Artificial Sequence: Synthetic oligonucleotide
cugaaggugucaauccagu

SEQ ID NO: 1152949 - RNA, 19 nt, Artificial Sequence
  Description of Artificial Sequence: Synthetic oligonucleotide
ggaugccuugucuacaacu

SEQ ID NO: 1152950 - RNA, 19 nt, Artificial Sequence
  Description of Artificial Sequence: Synthetic oligonucleotide
ccagguuauacuuccaugu

SEQ ID NO: 1152951 - RNA, 19 nt, Artificial Sequence
  Description of Artificial Sequence: Synthetic oligonucleotide
aggaaaagguguagaggau

SEQ ID NO: 1152952 - RNA, 19 nt, Artificial Sequence
  Description of Artificial Sequence: Synthetic oligonucleotide
cucagaauugggcacguuu

SEQ ID NO: 1152953 - RNA, 19 nt, Artificial Sequence
  Description of Artificial Sequence: Synthetic oligonucleotide
ugucccacucggagauggu

SEQ ID NO: 1152954 - RNA, 19 nt, Artificial Sequence
  Description of Artificial Sequence: Synthetic oligonucleotide
cacuugccuucuuugguaa

SEQ ID NO: 1152955 - RNA, 19 nt, Artificial Sequence
  Description of Artificial Sequence: Synthetic oligonucleotide
cguuugaguugccacuugc

SEQ ID NO: 1152956 - RNA, 19 nt, Artificial Sequence
  Description of Artificial Sequence: Synthetic oligonucleotide
agauccgagccuagagcug

SEQ ID NO: 1152957 - RNA, 19 nt, Artificial Sequence
  Description of Artificial Sequence: Synthetic oligonucleotide
gcagggguuuucaucucgg

SEQ ID NO: 1152958 - RNA, 19 nt, Artificial Sequence
  Description of Artificial Sequence: Synthetic oligonucleotide
agaccugaaucuacaggaa

SEQ ID NO: 1152959 - RNA, 19 nt, Artificial Sequence
  Description of Artificial Sequence: Synthetic oligonucleotide
cucacgugcaccacaacuu

SEQ ID NO: 1152960 - RNA, 19 nt, Artificial Sequence
  Description of Artificial Sequence: Synthetic oligonucleotide
ggcuuugggucagcgaccc

SEQ ID NO: 1152961 - RNA, 19 nt, Artificial Sequence
  Description of Artificial Sequence: Synthetic oligonucleotide
gacccgcacgccgcgaccc

SEQ ID NO: 1152962 - RNA, 19 nt, Artificial Sequence
  Description of Artificial Sequence: Synthetic oligonucleotide
augguugaccugacuacau

SEQ ID NO: 1152963 - RNA, 19 nt, Artificial Sequence
  Description of Artificial Sequence: Synthetic oligonucleotide
gucaaggucuauccgugau

SEQ ID NO: 1152964 - RNA, 19 nt, Artificial Sequence
  Description of Artificial Sequence: Synthetic oligonucleotide
cccauuaggcccacauuuc

SEQ ID NO: 1152965 - RNA, 19 nt, Artificial Sequence
  Description of Artificial Sequence: Synthetic oligonucleotide
cucaccagauccgagccua

SEQ ID NO: 1152966 - RNA, 19 nt, Artificial Sequence
  Description of Artificial Sequence: Synthetic oligonucleotide
gugaagacugcagugcaau

SEQ ID NO: 1152967 - RNA, 19 nt, Artificial Sequence
  Description of Artificial Sequence: Synthetic oligonucleotide
auccgagccuagagcuggc

SEQ ID NO: 1152968 - RNA, 19 nt, Artificial Sequence
  Description of Artificial Sequence: Synthetic oligonucleotide
cuacugguuccacaauacu

SEQ ID NO: 1152969 - RNA, 19 nt, Artificial Sequence
  Description of Artificial Sequence: Synthetic oligonucleotide
auccgugauccuagagcag

SEQ ID NO: 1152970 - RNA, 19 nt, Artificial Sequence
  Description of Artificial Sequence: Synthetic oligonucleotide
accuggcccaauccgggua

SEQ ID NO: 1152971 - RNA, 19 nt, Artificial Sequence
  Description of Artificial Sequence: Synthetic oligonucleotide
gucuauccgugauccuaga

SEQ ID NO: 1152972 - RNA, 19 nt, Artificial Sequence
  Description of Artificial Sequence: Synthetic oligonucleotide
agguaucccuggagguggg

SEQ ID NO: 1152973 - RNA, 19 nt, Artificial Sequence
  Description of Artificial Sequence: Synthetic oligonucleotide
uagagcuggcggugccaac

SEQ ID NO: 1152974 - RNA, 19 nt, Artificial Sequence
  Description of Artificial Sequence: Synthetic oligonucleotide
ucggggacucagguuguuc

SEQ ID NO: 1152975 - RNA, 19 nt, Artificial Sequence
  Description of Artificial Sequence: Synthetic oligonucleotide
guggggaguugggauuuug

SEQ ID NO: 1152976 - RNA, 19 nt, Artificial Sequence
  Description of Artificial Sequence: Synthetic oligonucleotide
agacugcagugcaauuaga

SEQ ID NO: 1152977 - RNA, 19 nt, Artificial Sequence
  Description of Artificial Sequence: Synthetic oligonucleotide
uaagcaugugugggagauu

SEQ ID NO: 1152978 - RNA, 19 nt, Artificial Sequence
  Description of Artificial Sequence: Synthetic oligonucleotide
ugaccccauggacuccauu

SEQ ID NO: 1152979 - RNA, 19 nt, Artificial Sequence
  Description of Artificial Sequence: Synthetic oligonucleotide
gcaccuggcccaauccggg

SEQ ID NO: 1152980 - RNA, 19 nt, Artificial Sequence
  Description of Artificial Sequence: Synthetic oligonucleotide
cuguaucagaguagcugcu

SEQ ID NO: 1152981 - RNA, 19 nt, Artificial Sequence
  Description of Artificial Sequence: Synthetic oligonucleotide
caaugugguccauaagcuu

SEQ ID NO: 1152982 - RNA, 19 nt, Artificial Sequence
  Description of Artificial Sequence: Synthetic oligonucleotide
acacugcuuuucaccgaag

SEQ ID NO: 1152983 - RNA, 19 nt, Artificial Sequence
  Description of Artificial Sequence: Synthetic oligonucleotide
agcgucgggccguggucca

SEQ ID NO: 1152984 - RNA, 19 nt, Artificial Sequence
  Description of Artificial Sequence: Synthetic oligonucleotide
gcacguuugaguugccacu

SEQ ID NO: 1152985 - RNA, 19 nt, Artificial Sequence
  Description of Artificial Sequence: Synthetic oligonucleotide
gucucacgugcaccacaac

SEQ ID NO: 1152986 - RNA, 19 nt, Artificial Sequence
  Description of Artificial Sequence: Synthetic oligonucleotide
gguaucccuggaggugggg

SEQ ID NO: 1152987 - RNA, 19 nt, Artificial Sequence
  Description of Artificial Sequence: Synthetic oligonucleotide
cagguuauacuuccauguu

SEQ ID NO: 1152988 - RNA, 19 nt, Artificial Sequence
  Description of Artificial Sequence: Synthetic oligonucleotide
cgacccaggacgaggugag

SEQ ID NO: 1152989 - RNA, 19 nt, Artificial Sequence
  Description of Artificial Sequence: Synthetic oligonucleotide
ccuugucuacaacuccuga

SEQ ID NO: 1152990 - RNA, 19 nt, Artificial Sequence
  Description of Artificial Sequence: Synthetic oligonucleotide
cagcgacccgcacgccgcg

SEQ ID NO: 1152991 - RNA, 19 nt, Artificial Sequence
  Description of Artificial Sequence: Synthetic oligonucleotide
ggacgaggugagcgucggg

SEQ ID NO: 1152992 - RNA, 19 nt, Artificial Sequence
  Description of Artificial Sequence: Synthetic oligonucleotide
ggucucacgugcaccacaa

SEQ ID NO: 1152993 - RNA, 19 nt, Artificial Sequence
  Description of Artificial Sequence: Synthetic oligonucleotide
gccuagagcuggcggugcc

SEQ ID NO: 1152994 - RNA, 19 nt, Artificial Sequence
  Description of Artificial Sequence: Synthetic oligonucleotide
gccaacugaaaggaucucu

SEQ ID NO: 1152995 - RNA, 19 nt, Artificial Sequence
  Description of Artificial Sequence: Synthetic oligonucleotide
cuggcccaauccggguaag

SEQ ID NO: 1152996 - RNA, 19 nt, Artificial Sequence
  Description of Artificial Sequence: Synthetic oligonucleotide
gcucgaaguucaagucuug

SEQ ID NO: 1152997 - RNA, 19 nt, Artificial Sequence
  Description of Artificial Sequence: Synthetic oligonucleotide
gcgacccaggacgagguga

SEQ ID NO: 1152998 - RNA, 19 nt, Artificial Sequence
  Description of Artificial Sequence: Synthetic oligonucleotide
ccccauuaggcccacauuu

SEQ ID NO: 1152999 - RNA, 19 nt, Artificial Sequence
  Description of Artificial Sequence: Synthetic oligonucleotide
cuuugaucgcggucuccau

SEQ ID NO: 1153000 - RNA, 19 nt, Artificial Sequence
  Description of Artificial Sequence: Synthetic oligonucleotide
ucuugccaccuggcauuau

SEQ ID NO: 1153001 - RNA, 19 nt, Artificial Sequence
  Description of Artificial Sequence: Synthetic oligonucleotide
cgugauccuagagcagaag

SEQ ID NO: 1153002 - RNA, 19 nt, Artificial Sequence
  Description of Artificial Sequence: Synthetic oligonucleotide
acucagaauugggcacguu

SEQ ID NO: 1153003 - RNA, 19 nt, Artificial Sequence
  Description of Artificial Sequence: Synthetic oligonucleotide
cacguuugaguugccacuu

SEQ ID NO: 1153004 - RNA, 19 nt, Artificial Sequence
  Description of Artificial Sequence: Synthetic oligonucleotide
caucucggggacucagguu

SEQ ID NO: 1153005 - RNA, 19 nt, Artificial Sequence
  Description of Artificial Sequence: Synthetic oligonucleotide
ccaaugggaagacgauucu

SEQ ID NO: 1153006 - RNA, 19 nt, Artificial Sequence
  Description of Artificial Sequence: Synthetic oligonucleotide
gggcacguuugaguugcca

SEQ ID NO: 1153007 - RNA, 19 nt, Artificial Sequence
  Description of Artificial Sequence: Synthetic oligonucleotide
aggugucaauccaguucua

SEQ ID NO: 1153008 - RNA, 19 nt, Artificial Sequence
  Description of Artificial Sequence: Synthetic oligonucleotide
ccgcacgccgcgacccagg

SEQ ID NO: 1153009 - RNA, 19 nt, Artificial Sequence
  Description of Artificial Sequence: Synthetic oligonucleotide
ccuggcccaauccggguaa

SEQ ID NO: 1153010 - RNA, 19 nt, Artificial Sequence
  Description of Artificial Sequence: Synthetic oligonucleotide
cuggugcacagaccugaau

SEQ ID NO: 1153011 - RNA, 19 nt, Artificial Sequence
  Description of Artificial Sequence: Synthetic oligonucleotide
ggcggugccaacagcugcu

SEQ ID NO: 1153012 - RNA, 19 nt, Artificial Sequence
  Description of Artificial Sequence: Synthetic oligonucleotide
acgccgcgacccaggacga

SEQ ID NO: 1153013 - RNA, 19 nt, Artificial Sequence
  Description of Artificial Sequence: Synthetic oligonucleotide
ccgugauccuagagcagaa

SEQ ID NO: 1153014 - RNA, 19 nt, Artificial Sequence
  Description of Artificial Sequence: Synthetic oligonucleotide
agcgacccgcacgccgcga

SEQ ID NO: 1153015 - RNA, 19 nt, Artificial Sequence
  Description of Artificial Sequence: Synthetic oligonucleotide
caccuggcccaauccgggu

SEQ ID NO: 1153016 - RNA, 19 nt, Artificial Sequence
  Description of Artificial Sequence: Synthetic oligonucleotide
caauccggguaaggaggcu

SEQ ID NO: 1153017 - RNA, 19 nt, Artificial Sequence
  Description of Artificial Sequence: Synthetic oligonucleotide
gcuggugcacagaccugaa

SEQ ID NO: 1153018 - RNA, 19 nt, Artificial Sequence
  Description of Artificial Sequence: Synthetic oligonucleotide
ccacucggagaugguugac

SEQ ID NO: 1153019 - RNA, 19 nt, Artificial Sequence
  Description of Artificial Sequence: Synthetic oligonucleotide
ggucagcgacccgcacgcc

SEQ ID NO: 1153020 - RNA, 19 nt, Artificial Sequence
  Description of Artificial Sequence: Synthetic oligonucleotide
gcacgccgcgacccaggac

SEQ ID NO: 1153021 - RNA, 19 nt, Artificial Sequence
  Description of Artificial Sequence: Synthetic oligonucleotide
cccaggacgaggugagcgu

SEQ ID NO: 1153022 - RNA, 19 nt, Artificial Sequence
  Description of Artificial Sequence: Synthetic oligonucleotide
guccacuaacaaagccauu

SEQ ID NO: 1153023 - RNA, 19 nt, Artificial Sequence
  Description of Artificial Sequence: Synthetic oligonucleotide
ccaucgaaacaccgacaau

SEQ ID NO: 1153024 - RNA, 19 nt, Artificial Sequence
  Description of Artificial Sequence: Synthetic oligonucleotide
ccggaucuuugaucgcggu

SEQ ID NO: 1153025 - RNA, 19 nt, Artificial Sequence
  Description of Artificial Sequence: Synthetic oligonucleotide
cgugcaccacaacuuuacu

SEQ ID NO: 1153026 - RNA, 19 nt, Artificial Sequence
  Description of Artificial Sequence: Synthetic oligonucleotide
gcgucgggccgugguccag

SEQ ID NO: 1153027 - RNA, 19 nt, Artificial Sequence
  Description of Artificial Sequence: Synthetic oligonucleotide
cggggcuuggagauguuuu

SEQ ID NO: 1153028 - RNA, 19 nt, Artificial Sequence
  Description of Artificial Sequence: Synthetic oligonucleotide
cgcgacccaggacgaggug

SEQ ID NO: 1153029 - RNA, 19 nt, Artificial Sequence
  Description of Artificial Sequence: Synthetic oligonucleotide
ccgcgacccaggacgaggu

SEQ ID NO: 1153030 - RNA, 19 nt, Artificial Sequence
  Description of Artificial Sequence: Synthetic oligonucleotide
cgcggucuccauucugucu

SEQ ID NO: 1153031 - RNA, 19 nt, Artificial Sequence
  Description of Artificial Sequence: Synthetic oligonucleotide
ccgugguccagccccggau

SEQ ID NO: 1153032 - RNA, 19 nt, Artificial Sequence
  Description of Artificial Sequence: Synthetic oligonucleotide
cucggggcuuggagauguu

SEQ ID NO: 1153033 - RNA, 19 nt, Artificial Sequence
  Description of Artificial Sequence: Synthetic oligonucleotide
cucggggacucagguuguu

SEQ ID NO: 1153034 - RNA, 19 nt, Artificial Sequence
  Description of Artificial Sequence: Synthetic oligonucleotide
cgcacgccgcgacccagga

SEQ ID NO: 1153035 - RNA, 19 nt, Artificial Sequence
  Description of Artificial Sequence: Synthetic oligonucleotide
uuaacuaaggcauagaggg

SEQ ID NO: 1153036 - RNA, 19 nt, Artificial Sequence
  Description of Artificial Sequence: Synthetic oligonucleotide
aaauacuaucuucauaccc

SEQ ID NO: 1153037 - RNA, 19 nt, Artificial Sequence
  Description of Artificial Sequence: Synthetic oligonucleotide
uuuuaaaccauuauaugag

SEQ ID NO: 1153038 - RNA, 19 nt, Artificial Sequence
  Description of Artificial Sequence: Synthetic oligonucleotide
uuauuauuuagaaaugcag

SEQ ID NO: 1153039 - RNA, 19 nt, Artificial Sequence
  Description of Artificial Sequence: Synthetic oligonucleotide
aaaggcgccaucuaucccc

SEQ ID NO: 1153040 - RNA, 19 nt, Artificial Sequence
  Description of Artificial Sequence: Synthetic oligonucleotide
uuuaacuaaggcauagagg

SEQ ID NO: 1153041 - RNA, 19 nt, Artificial Sequence
  Description of Artificial Sequence: Synthetic oligonucleotide
aaucuaaguguucuauccc

SEQ ID NO: 1153042 - RNA, 19 nt, Artificial Sequence
  Description of Artificial Sequence: Synthetic oligonucleotide
gacaauguuacguaggaag

SEQ ID NO: 1153043 - RNA, 19 nt, Artificial Sequence
  Description of Artificial Sequence: Synthetic oligonucleotide
uauuauuuagaaaugcagu

SEQ ID NO: 1153044 - RNA, 19 nt, Artificial Sequence
  Description of Artificial Sequence: Synthetic oligonucleotide
aacuaaggcauagagggac

SEQ ID NO: 1153045 - RNA, 19 nt, Artificial Sequence
  Description of Artificial Sequence: Synthetic oligonucleotide
aucuaaguguucuaucccc

SEQ ID NO: 1153046 - RNA, 19 nt, Artificial Sequence
  Description of Artificial Sequence: Synthetic oligonucleotide
ugauaguuaagaaaucacu

SEQ ID NO: 1153047 - RNA, 19 nt, Artificial Sequence
  Description of Artificial Sequence: Synthetic oligonucleotide
ucugcuaagaaucuagaaa

SEQ ID NO: 1153048 - RNA, 19 nt, Artificial Sequence
  Description of Artificial Sequence: Synthetic oligonucleotide
aacccaguuaaguaggcag

SEQ ID NO: 1153049 - RNA, 19 nt, Artificial Sequence
  Description of Artificial Sequence: Synthetic oligonucleotide
aagagcaggccccuggccc

SEQ ID NO: 1153050 - RNA, 19 nt, Artificial Sequence
  Description of Artificial Sequence: Synthetic oligonucleotide
uuaaguaggcagcaaaacu

SEQ ID NO: 1153051 - RNA, 19 nt, Artificial Sequence
  Description of Artificial Sequence: Synthetic oligonucleotide
ugcaguuauauacauagaa

SEQ ID NO: 1153052 - RNA, 19 nt, Artificial Sequence
  Description of Artificial Sequence: Synthetic oligonucleotide
  modified_base (11)..(11): a, c, u, g, unknown or other
gaugugagggnuaaaaggc

SEQ ID NO: 1153053 - RNA, 19 nt, Artificial Sequence
  Description of Artificial Sequence: Synthetic oligonucleotide
aauacuaucuucauaccca

SEQ ID NO: 1153054 - RNA, 19 nt, Artificial Sequence
  Description of Artificial Sequence: Synthetic oligonucleotide
aggauggagaacaugaccc

SEQ ID NO: 1153055 - RNA, 19 nt, Artificial Sequence
  Description of Artificial Sequence: Synthetic oligonucleotide
aaucacuuuagaaagagaa

SEQ ID NO: 1153056 - RNA, 19 nt, Artificial Sequence
  Description of Artificial Sequence: Synthetic oligonucleotide
guuuaacuaaggcauagag

SEQ ID NO: 1153057 - RNA, 19 nt, Artificial Sequence
  Description of Artificial Sequence: Synthetic oligonucleotide
agcaaacccagauugauug

SEQ ID NO: 1153058 - RNA, 19 nt, Artificial Sequence
  Description of Artificial Sequence: Synthetic oligonucleotide
aacgaucuguacucuaggg

SEQ ID NO: 1153059 - RNA, 19 nt, Artificial Sequence
  Description of Artificial Sequence: Synthetic oligonucleotide
aacaugacccuuuuguccu

SEQ ID NO: 1153060 - RNA, 19 nt, Artificial Sequence
  Description of Artificial Sequence: Synthetic oligonucleotide
aagaccacacaaaauacag

SEQ ID NO: 1153061 - RNA, 19 nt, Artificial Sequence
  Description of Artificial Sequence: Synthetic oligonucleotide
uuguaugucacuguucucc

SEQ ID NO: 1153062 - RNA, 19 nt, Artificial Sequence
  Description of Artificial Sequence: Synthetic oligonucleotide
uaaacuuuguacaaauauu

SEQ ID NO: 1153063 - RNA, 19 nt, Artificial Sequence
  Description of Artificial Sequence: Synthetic oligonucleotide
uguucuccgaaucugcagc

SEQ ID NO: 1153064 - RNA, 19 nt, Artificial Sequence
  Description of Artificial Sequence: Synthetic oligonucleotide
gagagagacgggcagagag

SEQ ID NO: 1153065 - RNA, 19 nt, Artificial Sequence
  Description of Artificial Sequence: Synthetic oligonucleotide
caaaauacagaacugggca

SEQ ID NO: 1153066 - RNA, 19 nt, Artificial Sequence
  Description of Artificial Sequence: Synthetic oligonucleotide
uaguuaagaaaucacuuua

SEQ ID NO: 1153067 - RNA, 19 nt, Artificial Sequence
  Description of Artificial Sequence: Synthetic oligonucleotide
gauaucaucuguguacucc

SEQ ID NO: 1153068 - RNA, 19 nt, Artificial Sequence
  Description of Artificial Sequence: Synthetic oligonucleotide
  modified_base (3)..(3): a, c, u, g, unknown or other
ggnuaaaaggcuuuguaug

SEQ ID NO: 1153069 - RNA, 19 nt, Artificial Sequence
  Description of Artificial Sequence: Synthetic oligonucleotide
aaaaggcgccaucuauccc

SEQ ID NO: 1153070 - RNA, 19 nt, Artificial Sequence
  Description of Artificial Sequence: Synthetic oligonucleotide
uggagguaaacccaguuaa

SEQ ID NO: 1153071 - RNA, 19 nt, Artificial Sequence
  Description of Artificial Sequence: Synthetic oligonucleotide
aguuagaugagcccgggcu

SEQ ID NO: 1153072 - RNA, 19 nt, Artificial Sequence
  Description of Artificial Sequence: Synthetic oligonucleotide
auacuaucuucauacccac

SEQ ID NO: 1153073 - RNA, 19 nt, Artificial Sequence
  Description of Artificial Sequence: Synthetic oligonucleotide
aaguauaccuuugucuguc

SEQ ID NO: 1153074 - RNA, 19 nt, Artificial Sequence
  Description of Artificial Sequence: Synthetic oligonucleotide
aguaccauucugcaaagga

SEQ ID NO: 1153075 - RNA, 19 nt, Artificial Sequence
  Description of Artificial Sequence: Synthetic oligonucleotide
gguaaacccaguuaaguag

SEQ ID NO: 1153076 - RNA, 19 nt, Artificial Sequence
  Description of Artificial Sequence: Synthetic oligonucleotide
  modified_base (14)..(14): a, c, u, g, unknown or other
ucugaugugagggnuaaaa

SEQ ID NO: 1153077 - RNA, 19 nt, Artificial Sequence
  Description of Artificial Sequence: Synthetic oligonucleotide
auugauugacauccugcac

SEQ ID NO: 1153078 - RNA, 19 nt, Artificial Sequence
  Description of Artificial Sequence: Synthetic oligonucleotide
acagaggagacaauguuac

SEQ ID NO: 1153079 - RNA, 19 nt, Artificial Sequence
  Description of Artificial Sequence: Synthetic oligonucleotide
ugcacaaccuuaagaagcc

SEQ ID NO: 1153080 - RNA, 19 nt, Artificial Sequence
  Description of Artificial Sequence: Synthetic oligonucleotide
cuaagaaucuagaaauguc

SEQ ID NO: 1153081 - RNA, 19 nt, Artificial Sequence
  Description of Artificial Sequence: Synthetic oligonucleotide
uuacguaggaagccaagug

SEQ ID NO: 1153082 - RNA, 19 nt, Artificial Sequence
  Description of Artificial Sequence: Synthetic oligonucleotide
aaggcuuuguaugucacug

SEQ ID NO: 1153083 - RNA, 19 nt, Artificial Sequence
  Description of Artificial Sequence: Synthetic oligonucleotide
uggugcacaaccuuaagaa

SEQ ID NO: 1153084 - RNA, 19 nt, Artificial Sequence
  Description of Artificial Sequence: Synthetic oligonucleotide
caucuuucuacccaacagc

SEQ ID NO: 1153085 - RNA, 19 nt, Artificial Sequence
  Description of Artificial Sequence: Synthetic oligonucleotide
gaagagggcaagaugaaug

SEQ ID NO: 1153086 - RNA, 19 nt, Artificial Sequence
  Description of Artificial Sequence: Synthetic oligonucleotide
cucuguaugggacaaaguc

SEQ ID NO: 1153087 - RNA, 19 nt, Artificial Sequence
  Description of Artificial Sequence: Synthetic oligonucleotide
uacuccucugaugugaggg

SEQ ID NO: 1153088 - RNA, 19 nt, Artificial Sequence
  Description of Artificial Sequence: Synthetic oligonucleotide
gauugauugacauccugca

SEQ ID NO: 1153089 - RNA, 19 nt, Artificial Sequence
  Description of Artificial Sequence: Synthetic oligonucleotide
cuuucuacccaacagccug

SEQ ID NO: 1153090 - RNA, 19 nt, Artificial Sequence
  Description of Artificial Sequence: Synthetic oligonucleotide
uuaaaccauuauaugagua

SEQ ID NO: 1153091 - RNA, 19 nt, Artificial Sequence
  Description of Artificial Sequence: Synthetic oligonucleotide
uaaaaggcuuuguauguca

SEQ ID NO: 1153092 - RNA, 19 nt, Artificial Sequence
  Description of Artificial Sequence: Synthetic oligonucleotide
cauguuaauggauggggag

SEQ ID NO: 1153093 - RNA, 19 nt, Artificial Sequence
  Description of Artificial Sequence: Synthetic oligonucleotide
uacguaggaagccaagugu

SEQ ID NO: 1153094 - RNA, 19 nt, Artificial Sequence
  Description of Artificial Sequence: Synthetic oligonucleotide
aauguuacguaggaagcca

SEQ ID NO: 1153095 - RNA, 19 nt, Artificial Sequence
  Description of Artificial Sequence: Synthetic oligonucleotide
uguuaauggauggggagag

SEQ ID NO: 1153096 - RNA, 19 nt, Artificial Sequence
  Description of Artificial Sequence: Synthetic oligonucleotide
uauaccuuugucugucuug

SEQ ID NO: 1153097 - RNA, 19 nt, Artificial Sequence
  Description of Artificial Sequence: Synthetic oligonucleotide
agcauguuaauggaugggg

SEQ ID NO: 1153098 - RNA, 19 nt, Artificial Sequence
  Description of Artificial Sequence: Synthetic oligonucleotide
cugauaguuaagaaaucac

SEQ ID NO: 1153099 - RNA, 19 nt, Artificial Sequence
  Description of Artificial Sequence: Synthetic oligonucleotide
agaaaugucugcaacauau

SEQ ID NO: 1153100 - RNA, 19 nt, Artificial Sequence
  Description of Artificial Sequence: Synthetic oligonucleotide
uguucuauccccacauccu

SEQ ID NO: 1153101 - RNA, 19 nt, Artificial Sequence
  Description of Artificial Sequence: Synthetic oligonucleotide
guaaacccaguuaaguagg

SEQ ID NO: 1153102 - RNA, 19 nt, Artificial Sequence
  Description of Artificial Sequence: Synthetic oligonucleotide
ucuagggucagccgguggc

SEQ ID NO: 1153103 - RNA, 19 nt, Artificial Sequence
  Description of Artificial Sequence: Synthetic oligonucleotide
auuauaugaguaccauucu

SEQ ID NO: 1153104 - RNA, 19 nt, Artificial Sequence
  Description of Artificial Sequence: Synthetic oligonucleotide
  modified_base (2)..(2): a, c, u, g, unknown or other
gnuaaaaggcuuuguaugu

SEQ ID NO: 1153105 - RNA, 19 nt, Artificial Sequence
  Description of Artificial Sequence: Synthetic oligonucleotide
aagccuaccuguuuaacua

SEQ ID NO: 1153106 - RNA, 19 nt, Artificial Sequence
  Description of Artificial Sequence: Synthetic oligonucleotide
ucuaaguguucuaucccca

SEQ ID NO: 1153107 - RNA, 19 nt, Artificial Sequence
  Description of Artificial Sequence: Synthetic oligonucleotide
ucuuucaacagugggauau

SEQ ID NO: 1153108 - RNA, 19 nt, Artificial Sequence
  Description of Artificial Sequence: Synthetic oligonucleotide
guacucuagggucagccgg

SEQ ID NO: 1153109 - RNA, 19 nt, Artificial Sequence
  Description of Artificial Sequence: Synthetic oligonucleotide
uuucuacccaacagccugg

SEQ ID NO: 1153110 - RNA, 19 nt, Artificial Sequence
  Description of Artificial Sequence: Synthetic oligonucleotide
ugcuaagaaucuagaaaug

SEQ ID NO: 1153111 - RNA, 19 nt, Artificial Sequence
  Description of Artificial Sequence: Synthetic oligonucleotide
gaacgaucuguacucuagg

SEQ ID NO: 1153112 - RNA, 19 nt, Artificial Sequence
  Description of Artificial Sequence: Synthetic oligonucleotide
auaugaguaccauucugca

SEQ ID NO: 1153113 - RNA, 19 nt, Artificial Sequence
  Description of Artificial Sequence: Synthetic oligonucleotide
uccaguuagaugagcccgg

SEQ ID NO: 1153114 - RNA, 19 nt, Artificial Sequence
  Description of Artificial Sequence: Synthetic oligonucleotide
cuuugucugucuuguagcc

SEQ ID NO: 1153115 - RNA, 19 nt, Artificial Sequence
  Description of Artificial Sequence: Synthetic oligonucleotide
ugcaauguacaggauacca

SEQ ID NO: 1153116 - RNA, 19 nt, Artificial Sequence
  Description of Artificial Sequence: Synthetic oligonucleotide
cuacagaacuguaaagcug

SEQ ID NO: 1153117 - RNA, 19 nt, Artificial Sequence
  Description of Artificial Sequence: Synthetic oligonucleotide
uuuauccaagggucaagcc

SEQ ID NO: 1153118 - RNA, 19 nt, Artificial Sequence
  Description of Artificial Sequence: Synthetic oligonucleotide
ucauaagaacuuuuauuau

SEQ ID NO: 1153119 - RNA, 19 nt, Artificial Sequence
  Description of Artificial Sequence: Synthetic oligonucleotide
gcauguguuguuuuaaacc

SEQ ID NO: 1153120 - RNA, 19 nt, Artificial Sequence
  Description of Artificial Sequence: Synthetic oligonucleotide
aguuaagaaaucacuuuag

SEQ ID NO: 1153121 - RNA, 19 nt, Artificial Sequence
  Description of Artificial Sequence: Synthetic oligonucleotide
cuucauacccacugcaaug

SEQ ID NO: 1153122 - RNA, 19 nt, Artificial Sequence
  Description of Artificial Sequence: Synthetic oligonucleotide
  modified_base (13)..(13): a, c, u, g, unknown or other
cugaugugagggnuaaaag

SEQ ID NO: 1153123 - RNA, 19 nt, Artificial Sequence
  Description of Artificial Sequence: Synthetic oligonucleotide
ugaauggggaagaccacac

SEQ ID NO: 1153124 - RNA, 19 nt, Artificial Sequence
  Description of Artificial Sequence: Synthetic oligonucleotide
gagguucuuuuauccaagg

SEQ ID NO: 1153125 - RNA, 19 nt, Artificial Sequence
  Description of Artificial Sequence: Synthetic oligonucleotide
uguuacguaggaagccaag

SEQ ID NO: 1153126 - RNA, 19 nt, Artificial Sequence
  Description of Artificial Sequence: Synthetic oligonucleotide
uguacuccucugaugugag

SEQ ID NO: 1153127 - RNA, 19 nt, Artificial Sequence
  Description of Artificial Sequence: Synthetic oligonucleotide
uuggcaaucuaaguguucu

SEQ ID NO: 1153128 - RNA, 19 nt, Artificial Sequence
  Description of Artificial Sequence: Synthetic oligonucleotide
uccccauucagccacucac

SEQ ID NO: 1153129 - RNA, 19 nt, Artificial Sequence
  Description of Artificial Sequence: Synthetic oligonucleotide
gagacaauguuacguagga

SEQ ID NO: 1153130 - RNA, 19 nt, Artificial Sequence
  Description of Artificial Sequence: Synthetic oligonucleotide
agaggagacaauguuacgu

SEQ ID NO: 1153131 - RNA, 19 nt, Artificial Sequence
  Description of Artificial Sequence: Synthetic oligonucleotide
gugcacaaccuuaagaagc

SEQ ID NO: 1153132 - RNA, 19 nt, Artificial Sequence
  Description of Artificial Sequence: Synthetic oligonucleotide
cacaaccuuaagaagccag

SEQ ID NO: 1153133 - RNA, 19 nt, Artificial Sequence
  Description of Artificial Sequence: Synthetic oligonucleotide
aacuccaagaacagaccuc

SEQ ID NO: 1153134 - RNA, 19 nt, Artificial Sequence
  Description of Artificial Sequence: Synthetic oligonucleotide
agugggauaucaucugugu

SEQ ID NO: 1153135 - RNA, 19 nt, Artificial Sequence
  Description of Artificial Sequence: Synthetic oligonucleotide
uaaacccaguuaaguaggc

SEQ ID NO: 1153136 - RNA, 19 nt, Artificial Sequence
  Description of Artificial Sequence: Synthetic oligonucleotide
cauacagccaugcagccca

SEQ ID NO: 1153137 - RNA, 19 nt, Artificial Sequence
  Description of Artificial Sequence: Synthetic oligonucleotide
uggugcaccaucacagucu

SEQ ID NO: 1153138 - RNA, 19 nt, Artificial Sequence
  Description of Artificial Sequence: Synthetic oligonucleotide
uccaagaacagaccucaaa

SEQ ID NO: 1153139 - RNA, 19 nt, Artificial Sequence
  Description of Artificial Sequence: Synthetic oligonucleotide
  modified_base (7)..(7): a, c, u, g, unknown or other
ugagggnuaaaaggcuuug

SEQ ID NO: 1153140 - RNA, 19 nt, Artificial Sequence
  Description of Artificial Sequence: Synthetic oligonucleotide
uaggugggaaacuccaaga

SEQ ID NO: 1153141 - RNA, 19 nt, Artificial Sequence
  Description of Artificial Sequence: Synthetic oligonucleotide
  modified_base (9)..(9): a, c, u, g, unknown or other
ugugagggnuaaaaggcuu

SEQ ID NO: 1153142 - RNA, 19 nt, Artificial Sequence
  Description of Artificial Sequence: Synthetic oligonucleotide
acaaccuuaagaagccagg

SEQ ID NO: 1153143 - RNA, 19 nt, Artificial Sequence
  Description of Artificial Sequence: Synthetic oligonucleotide
uucauacccacugcaaugu

SEQ ID NO: 1153144 - RNA, 19 nt, Artificial Sequence
  Description of Artificial Sequence: Synthetic oligonucleotide
caauguuacguaggaagcc

SEQ ID NO: 1153145 - RNA, 19 nt, Artificial Sequence
  Description of Artificial Sequence: Synthetic oligonucleotide
uacccaacagccuggcacc

SEQ ID NO: 1153146 - RNA, 19 nt, Artificial Sequence
  Description of Artificial Sequence: Synthetic oligonucleotide
acgaucuguacucuagggu

SEQ ID NO: 1153147 - RNA, 19 nt, Artificial Sequence
  Description of Artificial Sequence: Synthetic oligonucleotide
uccaccugcagaagagcag

SEQ ID NO: 1153148 - RNA, 19 nt, Artificial Sequence
  Description of Artificial Sequence: Synthetic oligonucleotide
cauacccacugcaauguac

SEQ ID NO: 1153149 - RNA, 19 nt, Artificial Sequence
  Description of Artificial Sequence: Synthetic oligonucleotide
gaugugguugcuuggugca

SEQ ID NO: 1153150 - RNA, 19 nt, Artificial Sequence
  Description of Artificial Sequence: Synthetic oligonucleotide
augcaaugaccagaacugc

SEQ ID NO: 1153151 - RNA, 19 nt, Artificial Sequence
  Description of Artificial Sequence: Synthetic oligonucleotide
uaacuaaggcauagaggga

SEQ ID NO: 1153152 - RNA, 19 nt, Artificial Sequence
  Description of Artificial Sequence: Synthetic oligonucleotide
guuaaguaggcagcaaaac

SEQ ID NO: 1153153 - RNA, 19 nt, Artificial Sequence
  Description of Artificial Sequence: Synthetic oligonucleotide
aaccauuauaugaguacca

SEQ ID NO: 1153154 - RNA, 19 nt, Artificial Sequence
  Description of Artificial Sequence: Synthetic oligonucleotide
ucuuucuacccaacagccu

SEQ ID NO: 1153155 - RNA, 19 nt, Artificial Sequence
  Description of Artificial Sequence: Synthetic oligonucleotide
agaacgaucuguacucuag

SEQ ID NO: 1153156 - RNA, 19 nt, Artificial Sequence
  Description of Artificial Sequence: Synthetic oligonucleotide
caggacagugugcauacag

SEQ ID NO: 1153157 - RNA, 19 nt, Artificial Sequence
  Description of Artificial Sequence: Synthetic oligonucleotide
ugcuuggugcaccaucaca

SEQ ID NO: 1153158 - RNA, 19 nt, Artificial Sequence
  Description of Artificial Sequence: Synthetic oligonucleotide
  modified_base (5)..(5): a, c, u, g, unknown or other
agggnuaaaaggcuuugua

SEQ ID NO: 1153159 - RNA, 19 nt, Artificial Sequence
  Description of Artificial Sequence: Synthetic oligonucleotide
agguaaacccaguuaagua

SEQ ID NO: 1153160 - RNA, 19 nt, Artificial Sequence
  Description of Artificial Sequence: Synthetic oligonucleotide
agcgucuuuguguguuggc

SEQ ID NO: 1153161 - RNA, 19 nt, Artificial Sequence
  Description of Artificial Sequence: Synthetic oligonucleotide
cuguuuaacuaaggcauag

SEQ ID NO: 1153162 - RNA, 19 nt, Artificial Sequence
  Description of Artificial Sequence: Synthetic oligonucleotide
gauaguuaagaaaucacuu

SEQ ID NO: 1153163 - RNA, 19 nt, Artificial Sequence
  Description of Artificial Sequence: Synthetic oligonucleotide
uguuuaacuaaggcauaga

SEQ ID NO: 1153164 - RNA, 19 nt, Artificial Sequence
  Description of Artificial Sequence: Synthetic oligonucleotide
agcaaaacuccuucccacu

SEQ ID NO: 1153165 - RNA, 19 nt, Artificial Sequence
  Description of Artificial Sequence: Synthetic oligonucleotide
ccaucuauccccauucagc

SEQ ID NO: 1153166 - RNA, 19 nt, Artificial Sequence
  Description of Artificial Sequence: Synthetic oligonucleotide
gagcauguuaauggauggg

SEQ ID NO: 1153167 - RNA, 19 nt, Artificial Sequence
  Description of Artificial Sequence: Synthetic oligonucleotide
caaaggaucccauaguggu

SEQ ID NO: 1153168 - RNA, 19 nt, Artificial Sequence
  Description of Artificial Sequence: Synthetic oligonucleotide
cuaaguguucuauccccac

SEQ ID NO: 1153169 - RNA, 19 nt, Artificial Sequence
  Description of Artificial Sequence: Synthetic oligonucleotide
gcucuaagcaucuuucuac

SEQ ID NO: 1153170 - RNA, 19 nt, Artificial Sequence
  Description of Artificial Sequence: Synthetic oligonucleotide
aaaggaucccauaguggug

SEQ ID NO: 1153171 - RNA, 19 nt, Artificial Sequence
  Description of Artificial Sequence: Synthetic oligonucleotide
agcaucuuucuacccaaca

SEQ ID NO: 1153172 - RNA, 19 nt, Artificial Sequence
  Description of Artificial Sequence: Synthetic oligonucleotide
cagcaaaacuccuucccac

SEQ ID NO: 1153173 - RNA, 19 nt, Artificial Sequence
  Description of Artificial Sequence: Synthetic oligonucleotide
auguuaauggauggggaga

SEQ ID NO: 1153174 - RNA, 19 nt, Artificial Sequence
  Description of Artificial Sequence: Synthetic oligonucleotide
auggguuuugggaagaaaa

SEQ ID NO: 1153175 - RNA, 19 nt, Artificial Sequence
  Description of Artificial Sequence: Synthetic oligonucleotide
gguucuuuuauccaagggu

SEQ ID NO: 1153176 - RNA, 19 nt, Artificial Sequence
  Description of Artificial Sequence: Synthetic oligonucleotide
ggugcacaaccuuaagaag

SEQ ID NO: 1153177 - RNA, 19 nt, Artificial Sequence
  Description of Artificial Sequence: Synthetic oligonucleotide
caaacccagauugauugac

SEQ ID NO: 1153178 - RNA, 19 nt, Artificial Sequence
  Description of Artificial Sequence: Synthetic oligonucleotide
uacucuagggucagccggu

SEQ ID NO: 1153179 - RNA, 19 nt, Artificial Sequence
  Description of Artificial Sequence: Synthetic oligonucleotide
ugugguugcuuggugcacc

SEQ ID NO: 1153180 - RNA, 19 nt, Artificial Sequence
  Description of Artificial Sequence: Synthetic oligonucleotide
  modified_base (10)..(10): a, c, u, g, unknown or other
augugagggnuaaaaggcu

SEQ ID NO: 1153181 - RNA, 19 nt, Artificial Sequence
  Description of Artificial Sequence: Synthetic oligonucleotide
auuaugcauguguuguuuu

SEQ ID NO: 1153182 - RNA, 19 nt, Artificial Sequence
  Description of Artificial Sequence: Synthetic oligonucleotide
auaaagccuaccuguuuaa

SEQ ID NO: 1153183 - RNA, 19 nt, Artificial Sequence
  Description of Artificial Sequence: Synthetic oligonucleotide
aaacccaguuaaguaggca

SEQ ID NO: 1153184 - RNA, 19 nt, Artificial Sequence
  Description of Artificial Sequence: Synthetic oligonucleotide
uugcucuaagcaucuuucu

SEQ ID NO: 1153185 - RNA, 19 nt, Artificial Sequence
  Description of Artificial Sequence: Synthetic oligonucleotide
acuaaggcauagagggacg

SEQ ID NO: 1153186 - RNA, 19 nt, Artificial Sequence
  Description of Artificial Sequence: Synthetic oligonucleotide
aguuaaguaggcagcaaaa

SEQ ID NO: 1153187 - RNA, 19 nt, Artificial Sequence
  Description of Artificial Sequence: Synthetic oligonucleotide
uuuguguguuggccggcug

SEQ ID NO: 1153188 - RNA, 19 nt, Artificial Sequence
  Description of Artificial Sequence: Synthetic oligonucleotide
augaauggggaagaccaca

SEQ ID NO: 1153189 - RNA, 19 nt, Artificial Sequence
  Description of Artificial Sequence: Synthetic oligonucleotide
ugacccuuuuguccuccag

SEQ ID NO: 1153190 - RNA, 19 nt, Artificial Sequence
  Description of Artificial Sequence: Synthetic oligonucleotide
auacccacugcaauguaca

SEQ ID NO: 1153191 - RNA, 19 nt, Artificial Sequence
  Description of Artificial Sequence: Synthetic oligonucleotide
cagaggagacaauguuacg

SEQ ID NO: 1153192 - RNA, 19 nt, Artificial Sequence
  Description of Artificial Sequence: Synthetic oligonucleotide
aggugggaaacuccaagaa

SEQ ID NO: 1153193 - RNA, 19 nt, Artificial Sequence
  Description of Artificial Sequence: Synthetic oligonucleotide
ucccacuugcucuaagcau

SEQ ID NO: 1153194 - RNA, 19 nt, Artificial Sequence
  Description of Artificial Sequence: Synthetic oligonucleotide
accucaaaacuaguuucag

SEQ ID NO: 1153195 - RNA, 19 nt, Artificial Sequence
  Description of Artificial Sequence: Synthetic oligonucleotide
caccaucacagucucugag

SEQ ID NO: 1153196 - RNA, 19 nt, Artificial Sequence
  Description of Artificial Sequence: Synthetic oligonucleotide
guucuauccccacauccuc

SEQ ID NO: 1153197 - RNA, 19 nt, Artificial Sequence
  Description of Artificial Sequence: Synthetic oligonucleotide
gggcuugugauccccagag

SEQ ID NO: 1153198 - RNA, 19 nt, Artificial Sequence
  Description of Artificial Sequence: Synthetic oligonucleotide
cagaacuguaaagcugggg

SEQ ID NO: 1153199 - RNA, 19 nt, Artificial Sequence
  Description of Artificial Sequence: Synthetic oligonucleotide
guggugcacaaccuuaaga

SEQ ID NO: 1153200 - RNA, 19 nt, Artificial Sequence
  Description of Artificial Sequence: Synthetic oligonucleotide
ugucccuuggcacguuccu

SEQ ID NO: 1153201 - RNA, 19 nt, Artificial Sequence
  Description of Artificial Sequence: Synthetic oligonucleotide
gaccucaaaacuaguuuca

SEQ ID NO: 1153202 - RNA, 19 nt, Artificial Sequence
  Description of Artificial Sequence: Synthetic oligonucleotide
ggucaagccagaaaggaca

SEQ ID NO: 1153203 - RNA, 19 nt, Artificial Sequence
  Description of Artificial Sequence: Synthetic oligonucleotide
cucugauggguuuugggaa

SEQ ID NO: 1153204 - RNA, 19 nt, Artificial Sequence
  Description of Artificial Sequence: Synthetic oligonucleotide
uaaagccuaccuguuuaac

SEQ ID NO: 1153205 - RNA, 19 nt, Artificial Sequence
  Description of Artificial Sequence: Synthetic oligonucleotide
ccugcacagucaauuaugc

SEQ ID NO: 1153206 - RNA, 19 nt, Artificial Sequence
  Description of Artificial Sequence: Synthetic oligonucleotide
accauuauaugaguaccau

SEQ ID NO: 1153207 - RNA, 19 nt, Artificial Sequence
  Description of Artificial Sequence: Synthetic oligonucleotide
cagucaauuaugcaugugu

SEQ ID NO: 1153208 - RNA, 19 nt, Artificial Sequence
  Description of Artificial Sequence: Synthetic oligonucleotide
cuguguacuccucugaugu

SEQ ID NO: 1153209 - RNA, 19 nt, Artificial Sequence
  Description of Artificial Sequence: Synthetic oligonucleotide
agucccucuguaugggaca

SEQ ID NO: 1153210 - RNA, 19 nt, Artificial Sequence
  Description of Artificial Sequence: Synthetic oligonucleotide
agucaauuaugcauguguu

SEQ ID NO: 1153211 - RNA, 19 nt, Artificial Sequence
  Description of Artificial Sequence: Synthetic oligonucleotide
guuaauggauggggagagg

SEQ ID NO: 1153212 - RNA, 19 nt, Artificial Sequence
  Description of Artificial Sequence: Synthetic oligonucleotide
ucccuacuuggcaaucuaa

SEQ ID NO: 1153213 - RNA, 19 nt, Artificial Sequence
  Description of Artificial Sequence: Synthetic oligonucleotide
gaugaauggggaagaccac

SEQ ID NO: 1153214 - RNA, 19 nt, Artificial Sequence
  Description of Artificial Sequence: Synthetic oligonucleotide
guugcuuggugcaccauca

SEQ ID NO: 1153215 - RNA, 19 nt, Artificial Sequence
  Description of Artificial Sequence: Synthetic oligonucleotide
gccaaguguuuucaggagc

SEQ ID NO: 1153216 - RNA, 19 nt, Artificial Sequence
  Description of Artificial Sequence: Synthetic oligonucleotide
gcacguuccucccacuagg

SEQ ID NO: 1153217 - RNA, 19 nt, Artificial Sequence
  Description of Artificial Sequence: Synthetic oligonucleotide
ccuaccuguuuaacuaagg

SEQ ID NO: 1153218 - RNA, 19 nt, Artificial Sequence
  Description of Artificial Sequence: Synthetic oligonucleotide
uggccccuguguaaaaguc

SEQ ID NO: 1153219 - RNA, 19 nt, Artificial Sequence
  Description of Artificial Sequence: Synthetic oligonucleotide
gcacagucaauuaugcaug

SEQ ID NO: 1153220 - RNA, 19 nt, Artificial Sequence
  Description of Artificial Sequence: Synthetic oligonucleotide
cagucccucuguaugggac

SEQ ID NO: 1153221 - RNA, 19 nt, Artificial Sequence
  Description of Artificial Sequence: Synthetic oligonucleotide
gagguaaacccaguuaagu

SEQ ID NO: 1153222 - RNA, 19 nt, Artificial Sequence
  Description of Artificial Sequence: Synthetic oligonucleotide
caguaggugggaaacucca

SEQ ID NO: 1153223 - RNA, 19 nt, Artificial Sequence
  Description of Artificial Sequence: Synthetic oligonucleotide
gaugccagcagcaguaggu

SEQ ID NO: 1153224 - RNA, 19 nt, Artificial Sequence
  Description of Artificial Sequence: Synthetic oligonucleotide
ggaauguuccucaggaaca

SEQ ID NO: 1153225 - RNA, 19 nt, Artificial Sequence
  Description of Artificial Sequence: Synthetic oligonucleotide
auccugcacagucaauuau

SEQ ID NO: 1153226 - RNA, 19 nt, Artificial Sequence
  Description of Artificial Sequence: Synthetic oligonucleotide
agcaggaaaaguauaccuu

SEQ ID NO: 1153227 - RNA, 19 nt, Artificial Sequence
  Description of Artificial Sequence: Synthetic oligonucleotide
gaaucugcagcgucuuugu

SEQ ID NO: 1153228 - RNA, 19 nt, Artificial Sequence
  Description of Artificial Sequence: Synthetic oligonucleotide
gaugagcccgggcuuguga

SEQ ID NO: 1153229 - RNA, 19 nt, Artificial Sequence
  Description of Artificial Sequence: Synthetic oligonucleotide
cugucccuuggcacguucc

SEQ ID NO: 1153230 - RNA, 19 nt, Artificial Sequence
  Description of Artificial Sequence: Synthetic oligonucleotide
cgaucuguacucuaggguc

SEQ ID NO: 1153231 - RNA, 19 nt, Artificial Sequence
  Description of Artificial Sequence: Synthetic oligonucleotide
uguguguuggccggcugcu

SEQ ID NO: 1153232 - RNA, 19 nt, Artificial Sequence
  Description of Artificial Sequence: Synthetic oligonucleotide
ucuacccaacagccuggca

SEQ ID NO: 1153233 - RNA, 19 nt, Artificial Sequence
  Description of Artificial Sequence: Synthetic oligonucleotide
cccuacuuggcaaucuaag

SEQ ID NO: 1153234 - RNA, 19 nt, Artificial Sequence
  Description of Artificial Sequence: Synthetic oligonucleotide
aggcuuuguaugucacugu

SEQ ID NO: 1153235 - RNA, 19 nt, Artificial Sequence
  Description of Artificial Sequence: Synthetic oligonucleotide
ggagguucuuuuauccaag

SEQ ID NO: 1153236 - RNA, 19 nt, Artificial Sequence
  Description of Artificial Sequence: Synthetic oligonucleotide
gcaaucuaaguguucuauc

SEQ ID NO: 1153237 - RNA, 19 nt, Artificial Sequence
  Description of Artificial Sequence: Synthetic oligonucleotide
  modified_base (4)..(4): a, c, u, g, unknown or other
gggnuaaaaggcuuuguau

SEQ ID NO: 1153238 - RNA, 19 nt, Artificial Sequence
  Description of Artificial Sequence: Synthetic oligonucleotide
aaacuaguuucaggaggau

SEQ ID NO: 1153239 - RNA, 19 nt, Artificial Sequence
  Description of Artificial Sequence: Synthetic oligonucleotide
agaccacacaaaauacaga

SEQ ID NO: 1153240 - RNA, 19 nt, Artificial Sequence
  Description of Artificial Sequence: Synthetic oligonucleotide
acguuccucccacuaggug

SEQ ID NO: 1153241 - RNA, 19 nt, Artificial Sequence
  Description of Artificial Sequence: Synthetic oligonucleotide
ucucccuacuuggcaaucu

SEQ ID NO: 1153242 - RNA, 19 nt, Artificial Sequence
  Description of Artificial Sequence: Synthetic oligonucleotide
auagagggacggaauuucu

SEQ ID NO: 1153243 - RNA, 19 nt, Artificial Sequence
  Description of Artificial Sequence: Synthetic oligonucleotide
agccuaccuguuuaacuaa

SEQ ID NO: 1153244 - RNA, 19 nt, Artificial Sequence
  Description of Artificial Sequence: Synthetic oligonucleotide
ucauacccacugcaaugua

SEQ ID NO: 1153245 - RNA, 19 nt, Artificial Sequence
  Description of Artificial Sequence: Synthetic oligonucleotide
uucuacccaacagccuggc

SEQ ID NO: 1153246 - RNA, 19 nt, Artificial Sequence
  Description of Artificial Sequence: Synthetic oligonucleotide
acuguucuccgaaucugca

SEQ ID NO: 1153247 - RNA, 19 nt, Artificial Sequence
  Description of Artificial Sequence: Synthetic oligonucleotide
uguuucuacccaggcucca

SEQ ID NO: 1153248 - RNA, 19 nt, Artificial Sequence
  Description of Artificial Sequence: Synthetic oligonucleotide
ggagguaaacccaguuaag

SEQ ID NO: 1153249 - RNA, 19 nt, Artificial Sequence
  Description of Artificial Sequence: Synthetic oligonucleotide
caguuagaugagcccgggc

SEQ ID NO: 1153250 - RNA, 19 nt, Artificial Sequence
  Description of Artificial Sequence: Synthetic oligonucleotide
ggacaaaguccagaugccc

SEQ ID NO: 1153251 - RNA, 19 nt, Artificial Sequence
  Description of Artificial Sequence: Synthetic oligonucleotide
caugacccuuuuguccucc

SEQ ID NO: 1153252 - RNA, 19 nt, Artificial Sequence
  Description of Artificial Sequence: Synthetic oligonucleotide
gguugcuuggugcaccauc

SEQ ID NO: 1153253 - RNA, 19 nt, Artificial Sequence
  Description of Artificial Sequence: Synthetic oligonucleotide
agagagcauguuaauggau

SEQ ID NO: 1153254 - RNA, 19 nt, Artificial Sequence
  Description of Artificial Sequence: Synthetic oligonucleotide
gcuaagaaucuagaaaugu

SEQ ID NO: 1153255 - RNA, 19 nt, Artificial Sequence
  Description of Artificial Sequence: Synthetic oligonucleotide
ggcacguuccucccacuag

SEQ ID NO: 1153256 - RNA, 19 nt, Artificial Sequence
  Description of Artificial Sequence: Synthetic oligonucleotide
acguaggaagccaaguguu

SEQ ID NO: 1153257 - RNA, 19 nt, Artificial Sequence
  Description of Artificial Sequence: Synthetic oligonucleotide
cugcaauguacaggauacc

SEQ ID NO: 1153258 - RNA, 19 nt, Artificial Sequence
  Description of Artificial Sequence: Synthetic oligonucleotide
agacgggcagagaggagag

SEQ ID NO: 1153259 - RNA, 19 nt, Artificial Sequence
  Description of Artificial Sequence: Synthetic oligonucleotide
guuacguaggaagccaagu

SEQ ID NO: 1153260 - RNA, 19 nt, Artificial Sequence
  Description of Artificial Sequence: Synthetic oligonucleotide
cuggagguaaacccaguua

SEQ ID NO: 1153261 - RNA, 19 nt, Artificial Sequence
  Description of Artificial Sequence: Synthetic oligonucleotide
cagcccucaugcuucuuuc

SEQ ID NO: 1153262 - RNA, 19 nt, Artificial Sequence
  Description of Artificial Sequence: Synthetic oligonucleotide
guuccucccacuaggugca

SEQ ID NO: 1153263 - RNA, 19 nt, Artificial Sequence
  Description of Artificial Sequence: Synthetic oligonucleotide
agcccucaugcuucuuuca

SEQ ID NO: 1153264 - RNA, 19 nt, Artificial Sequence
  Description of Artificial Sequence: Synthetic oligonucleotide
ugugauccccagagagcau

SEQ ID NO: 1153265 - RNA, 19 nt, Artificial Sequence
  Description of Artificial Sequence: Synthetic oligonucleotide
uggcacguuccucccacua

SEQ ID NO: 1153266 - RNA, 19 nt, Artificial Sequence
  Description of Artificial Sequence: Synthetic oligonucleotide
cauucuggccccuguguaa

SEQ ID NO: 1153267 - RNA, 19 nt, Artificial Sequence
  Description of Artificial Sequence: Synthetic oligonucleotide
agacaauguuacguaggaa

SEQ ID NO: 1153268 - RNA, 19 nt, Artificial Sequence
  Description of Artificial Sequence: Synthetic oligonucleotide
uggcaaucuaaguguucua

SEQ ID NO: 1153269 - RNA, 19 nt, Artificial Sequence
  Description of Artificial Sequence: Synthetic oligonucleotide
gcagcaguaggugggaaac

SEQ ID NO: 1153270 - RNA, 19 nt, Artificial Sequence
  Description of Artificial Sequence: Synthetic oligonucleotide
cagugugcauacagccaug

SEQ ID NO: 1153271 - RNA, 19 nt, Artificial Sequence
  Description of Artificial Sequence: Synthetic oligonucleotide
gugggauaucaucugugua

SEQ ID NO: 1153272 - RNA, 19 nt, Artificial Sequence
  Description of Artificial Sequence: Synthetic oligonucleotide
ccgacugucucuucuggac

SEQ ID NO: 1153273 - RNA, 19 nt, Artificial Sequence
  Description of Artificial Sequence: Synthetic oligonucleotide
gggacaaaguccagaugcc

SEQ ID NO: 1153274 - RNA, 19 nt, Artificial Sequence
  Description of Artificial Sequence: Synthetic oligonucleotide
gagggacggaauuucuuau

SEQ ID NO: 1153275 - RNA, 19 nt, Artificial Sequence
  Description of Artificial Sequence: Synthetic oligonucleotide
caccauucuggccccugug

SEQ ID NO: 1153276 - RNA, 19 nt, Artificial Sequence
  Description of Artificial Sequence: Synthetic oligonucleotide
guaccauucugcaaaggau

SEQ ID NO: 1153277 - RNA, 19 nt, Artificial Sequence
  Description of Artificial Sequence: Synthetic oligonucleotide
cagaccucaaaacuaguuu

SEQ ID NO: 1153278 - RNA, 19 nt, Artificial Sequence
  Description of Artificial Sequence: Synthetic oligonucleotide
cacuaggugcagacccuuc

SEQ ID NO: 1153279 - RNA, 19 nt, Artificial Sequence
  Description of Artificial Sequence: Synthetic oligonucleotide
gcaggaaaaguauaccuuu

SEQ ID NO: 1153280 - RNA, 19 nt, Artificial Sequence
  Description of Artificial Sequence: Synthetic oligonucleotide
caacagccuggcaccugcc

SEQ ID NO: 1153281 - RNA, 19 nt, Artificial Sequence
  Description of Artificial Sequence: Synthetic oligonucleotide
guuagaugagcccgggcuu

SEQ ID NO: 1153282 - RNA, 19 nt, Artificial Sequence
  Description of Artificial Sequence: Synthetic oligonucleotide
gcaguaggugggaaacucc

SEQ ID NO: 1153283 - RNA, 19 nt, Artificial Sequence
  Description of Artificial Sequence: Synthetic oligonucleotide
gugguugcuuggugcacca

SEQ ID NO: 1153284 - RNA, 19 nt, Artificial Sequence
  Description of Artificial Sequence: Synthetic oligonucleotide
cugacccuguuucuaccca

SEQ ID NO: 1153285 - RNA, 19 nt, Artificial Sequence
  Description of Artificial Sequence: Synthetic oligonucleotide
uccaagggucaagccagaa

SEQ ID NO: 1153286 - RNA, 19 nt, Artificial Sequence
  Description of Artificial Sequence: Synthetic oligonucleotide
auguuacguaggaagccaa

SEQ ID NO: 1153287 - RNA, 19 nt, Artificial Sequence
  Description of Artificial Sequence: Synthetic oligonucleotide
ccacucacaaagcaggaaa

SEQ ID NO: 1153288 - RNA, 19 nt, Artificial Sequence
  Description of Artificial Sequence: Synthetic oligonucleotide
aguaggugggaaacuccaa

SEQ ID NO: 1153289 - RNA, 19 nt, Artificial Sequence
  Description of Artificial Sequence: Synthetic oligonucleotide
augacccuuuuguccucca

SEQ ID NO: 1153290 - RNA, 19 nt, Artificial Sequence
  Description of Artificial Sequence: Synthetic oligonucleotide
ggccccuguguaaaagucc

SEQ ID NO: 1153291 - RNA, 19 nt, Artificial Sequence
  Description of Artificial Sequence: Synthetic oligonucleotide
  modified_base (6)..(6): a, c, u, g, unknown or other
gagggnuaaaaggcuuugu

SEQ ID NO: 1153292 - RNA, 19 nt, Artificial Sequence
  Description of Artificial Sequence: Synthetic oligonucleotide
cuggugagcucugcuaaga

SEQ ID NO: 1153293 - RNA, 19 nt, Artificial Sequence
  Description of Artificial Sequence: Synthetic oligonucleotide
gcgccaucuauccccauuc

SEQ ID NO: 1153294 - RNA, 19 nt, Artificial Sequence
  Description of Artificial Sequence: Synthetic oligonucleotide
ggauaucaucuguguacuc

SEQ ID NO: 1153295 - RNA, 19 nt, Artificial Sequence
  Description of Artificial Sequence: Synthetic oligonucleotide
cucccacuaggugcagacc

SEQ ID NO: 1153296 - RNA, 19 nt, Artificial Sequence
  Description of Artificial Sequence: Synthetic oligonucleotide
cccagagagcauguuaaug

SEQ ID NO: 1153297 - RNA, 19 nt, Artificial Sequence
  Description of Artificial Sequence: Synthetic oligonucleotide
uucuggccccuguguaaaa

SEQ ID NO: 1153298 - RNA, 19 nt, Artificial Sequence
  Description of Artificial Sequence: Synthetic oligonucleotide
gccuaccuguuuaacuaag

SEQ ID NO: 1153299 - RNA, 19 nt, Artificial Sequence
  Description of Artificial Sequence: Synthetic oligonucleotide
aggcauagagggacggaau

SEQ ID NO: 1153300 - RNA, 19 nt, Artificial Sequence
  Description of Artificial Sequence: Synthetic oligonucleotide
ggauggagaacaugacccu

SEQ ID NO: 1153301 - RNA, 19 nt, Artificial Sequence
  Description of Artificial Sequence: Synthetic oligonucleotide
cgaaucugcagcgucuuug

SEQ ID NO: 1153302 - RNA, 19 nt, Artificial Sequence
  Description of Artificial Sequence: Synthetic oligonucleotide
auacagccaugcagcccac

SEQ ID NO: 1153303 - RNA, 19 nt, Artificial Sequence
  Description of Artificial Sequence: Synthetic oligonucleotide
guaggaagccaaguguuuu

SEQ ID NO: 1153304 - RNA, 19 nt, Artificial Sequence
  Description of Artificial Sequence: Synthetic oligonucleotide
gucugucuuguagccuggc

SEQ ID NO: 1153305 - RNA, 19 nt, Artificial Sequence
  Description of Artificial Sequence: Synthetic oligonucleotide
ccaguuagaugagcccggg

SEQ ID NO: 1153306 - RNA, 19 nt, Artificial Sequence
  Description of Artificial Sequence: Synthetic oligonucleotide
uguuggccggcugcucccu

SEQ ID NO: 1153307 - RNA, 19 nt, Artificial Sequence
  Description of Artificial Sequence: Synthetic oligonucleotide
cuccgaaucugcagcgucu

SEQ ID NO: 1153308 - RNA, 19 nt, Artificial Sequence
  Description of Artificial Sequence: Synthetic oligonucleotide
gggacggaauuucuuauuu

SEQ ID NO: 1153309 - RNA, 19 nt, Artificial Sequence
  Description of Artificial Sequence: Synthetic oligonucleotide
ccuacuuggcaaucuaagu

SEQ ID NO: 1153310 - RNA, 19 nt, Artificial Sequence
  Description of Artificial Sequence: Synthetic oligonucleotide
cucucccuacuuggcaauc

SEQ ID NO: 1153311 - RNA, 19 nt, Artificial Sequence
  Description of Artificial Sequence: Synthetic oligonucleotide
gggaaccccaggcuucaca

SEQ ID NO: 1153312 - RNA, 19 nt, Artificial Sequence
  Description of Artificial Sequence: Synthetic oligonucleotide
cucccuacuuggcaaucua

SEQ ID NO: 1153313 - RNA, 19 nt, Artificial Sequence
  Description of Artificial Sequence: Synthetic oligonucleotide
cuggccccuguguaaaagu

SEQ ID NO: 1153314 - RNA, 19 nt, Artificial Sequence
  Description of Artificial Sequence: Synthetic oligonucleotide
gagcucugcuaagaaucua

SEQ ID NO: 1153315 - RNA, 19 nt, Artificial Sequence
  Description of Artificial Sequence: Synthetic oligonucleotide
ggcauagagggacggaauu

SEQ ID NO: 1153316 - RNA, 19 nt, Artificial Sequence
  Description of Artificial Sequence: Synthetic oligonucleotide
ccuguuuaacuaaggcaua

SEQ ID NO: 1153317 - RNA, 19 nt, Artificial Sequence
  Description of Artificial Sequence: Synthetic oligonucleotide
gucccucuguaugggacaa

SEQ ID NO: 1153318 - RNA, 19 nt, Artificial Sequence
  Description of Artificial Sequence: Synthetic oligonucleotide
guaggcagcaaaacuccuu

SEQ ID NO: 1153319 - RNA, 19 nt, Artificial Sequence
  Description of Artificial Sequence: Synthetic oligonucleotide
gccgacugucucuucugga

SEQ ID NO: 1153320 - RNA, 19 nt, Artificial Sequence
  Description of Artificial Sequence: Synthetic oligonucleotide
cccaguuaaguaggcagca

SEQ ID NO: 1153321 - RNA, 19 nt, Artificial Sequence
  Description of Artificial Sequence: Synthetic oligonucleotide
cacguuccucccacuaggu

SEQ ID NO: 1153322 - RNA, 19 nt, Artificial Sequence
  Description of Artificial Sequence: Synthetic oligonucleotide
  modified_base (8)..(8): a, c, u, g, unknown or other
gugagggnuaaaaggcuuu

SEQ ID NO: 1153323 - RNA, 19 nt, Artificial Sequence
  Description of Artificial Sequence: Synthetic oligonucleotide
gacgggcagagaggagaga

SEQ ID NO: 1153324 - RNA, 19 nt, Artificial Sequence
  Description of Artificial Sequence: Synthetic oligonucleotide
cccuuggcacguuccuccc

SEQ ID NO: 1153325 - RNA, 19 nt, Artificial Sequence
  Description of Artificial Sequence: Synthetic oligonucleotide
ggacggaauuucuuauuuu

SEQ ID NO: 1153326 - RNA, 19 nt, Artificial Sequence
  Description of Artificial Sequence: Synthetic oligonucleotide
cuuuguguguuggccggcu

SEQ ID NO: 1153327 - RNA, 19 nt, Artificial Sequence
  Description of Artificial Sequence: Synthetic oligonucleotide
cccauucagccacucacaa

SEQ ID NO: 1153328 - RNA, 19 nt, Artificial Sequence
  Description of Artificial Sequence: Synthetic oligonucleotide
guggggaagagggcaagau

SEQ ID NO: 1153329 - RNA, 19 nt, Artificial Sequence
  Description of Artificial Sequence: Synthetic oligonucleotide
ucccucuguaugggacaaa

SEQ ID NO: 1153330 - RNA, 19 nt, Artificial Sequence
  Description of Artificial Sequence: Synthetic oligonucleotide
ugguugcuuggugcaccau

SEQ ID NO: 1153331 - RNA, 19 nt, Artificial Sequence
  Description of Artificial Sequence: Synthetic oligonucleotide
ggaucccauaguggugcac

SEQ ID NO: 1153332 - RNA, 19 nt, Artificial Sequence
  Description of Artificial Sequence: Synthetic oligonucleotide
gcugucccuuggcacguuc

SEQ ID NO: 1153333 - RNA, 19 nt, Artificial Sequence
  Description of Artificial Sequence: Synthetic oligonucleotide
ccgggcuugugauccccag

SEQ ID NO: 1153334 - RNA, 19 nt, Artificial Sequence
  Description of Artificial Sequence: Synthetic oligonucleotide
ugggaaccccaggcuucac

SEQ ID NO: 1153335 - RNA, 19 nt, Artificial Sequence
  Description of Artificial Sequence: Synthetic oligonucleotide
gccccuguguaaaaguccu

SEQ ID NO: 1153336 - RNA, 19 nt, Artificial Sequence
  Description of Artificial Sequence: Synthetic oligonucleotide
gcacaaccuuaagaagcca

SEQ ID NO: 1153337 - RNA, 19 nt, Artificial Sequence
  Description of Artificial Sequence: Synthetic oligonucleotide
cgacugucucuucuggaca

SEQ ID NO: 1153338 - RNA, 19 nt, Artificial Sequence
  Description of Artificial Sequence: Synthetic oligonucleotide
gccacucacaaagcaggaa

SEQ ID NO: 1153339 - RNA, 19 nt, Artificial Sequence
  Description of Artificial Sequence: Synthetic oligonucleotide
cuggacaagucugcaggau

SEQ ID NO: 1153340 - RNA, 19 nt, Artificial Sequence
  Description of Artificial Sequence: Synthetic oligonucleotide
ggggaagaccacacaaaau

SEQ ID NO: 1153341 - RNA, 19 nt, Artificial Sequence
  Description of Artificial Sequence: Synthetic oligonucleotide
cuauccccacauccucccu

SEQ ID NO: 1153342 - RNA, 19 nt, Artificial Sequence
  Description of Artificial Sequence: Synthetic oligonucleotide
cacccaggaagaugugguu

SEQ ID NO: 1153343 - RNA, 19 nt, Artificial Sequence
  Description of Artificial Sequence: Synthetic oligonucleotide
  modified_base (15)..(15): a, c, u, g, unknown or other
cucugaugugagggnuaaa

SEQ ID NO: 1153344 - RNA, 19 nt, Artificial Sequence
  Description of Artificial Sequence: Synthetic oligonucleotide
cagcaguaggugggaaacu

SEQ ID NO: 1153345 - RNA, 19 nt, Artificial Sequence
  Description of Artificial Sequence: Synthetic oligonucleotide
aggcgccaucuauccccau

SEQ ID NO: 1153346 - RNA, 19 nt, Artificial Sequence
  Description of Artificial Sequence: Synthetic oligonucleotide
ccuggagguaaacccaguu

SEQ ID NO: 1153347 - RNA, 19 nt, Artificial Sequence
  Description of Artificial Sequence: Synthetic oligonucleotide
caguggcagcccucaugcu

SEQ ID NO: 1153348 - RNA, 19 nt, Artificial Sequence
  Description of Artificial Sequence: Synthetic oligonucleotide
cccacuaggugcagacccu

SEQ ID NO: 1153349 - RNA, 19 nt, Artificial Sequence
  Description of Artificial Sequence: Synthetic oligonucleotide
gaauggcccggagccucau

SEQ ID NO: 1153350 - RNA, 19 nt, Artificial Sequence
  Description of Artificial Sequence: Synthetic oligonucleotide
ggcuccaccucaaggcaau

SEQ ID NO: 1153351 - RNA, 19 nt, Artificial Sequence
  Description of Artificial Sequence: Synthetic oligonucleotide
cguaggaagccaaguguuu

SEQ ID NO: 1153352 - RNA, 19 nt, Artificial Sequence
  Description of Artificial Sequence: Synthetic oligonucleotide
cccgggcuugugaucccca

SEQ ID NO: 1153353 - RNA, 19 nt, Artificial Sequence
  Description of Artificial Sequence: Synthetic oligonucleotide
ggucagccgguggcaugca

SEQ ID NO: 1153354 - RNA, 19 nt, Artificial Sequence
  Description of Artificial Sequence: Synthetic oligonucleotide
ccucucccuacuuggcaau

SEQ ID NO: 1153355 - RNA, 19 nt, Artificial Sequence
  Description of Artificial Sequence: Synthetic oligonucleotide
ccaggacagugugcauaca

SEQ ID NO: 1153356 - RNA, 19 nt, Artificial Sequence
  Description of Artificial Sequence: Synthetic oligonucleotide
ccccagagagcauguuaau

SEQ ID NO: 1153357 - RNA, 19 nt, Artificial Sequence
  Description of Artificial Sequence: Synthetic oligonucleotide
cccuggagguaaacccagu

SEQ ID NO: 1153358 - RNA, 19 nt, Artificial Sequence
  Description of Artificial Sequence: Synthetic oligonucleotide
ccacugcaauguacaggau

SEQ ID NO: 1153359 - RNA, 19 nt, Artificial Sequence
  Description of Artificial Sequence: Synthetic oligonucleotide
ccacuaggugcagacccuu

SEQ ID NO: 1153360 - RNA, 19 nt, Artificial Sequence
  Description of Artificial Sequence: Synthetic oligonucleotide
gcuccaccucaaggcaauu

SEQ ID NO: 1153361 - RNA, 19 nt, Artificial Sequence
  Description of Artificial Sequence: Synthetic oligonucleotide
gacacaagcacguaaaacg

SEQ ID NO: 1153362 - RNA, 19 nt, Artificial Sequence
  Description of Artificial Sequence: Synthetic oligonucleotide
ugacgaacaaguuaggagg

SEQ ID NO: 1153363 - RNA, 19 nt, Artificial Sequence
  Description of Artificial Sequence: Synthetic oligonucleotide
ugagugauguauuuuaugc

SEQ ID NO: 1153364 - RNA, 19 nt, Artificial Sequence
  Description of Artificial Sequence: Synthetic oligonucleotide
augucagugacucacaauc

SEQ ID NO: 1153365 - RNA, 19 nt, Artificial Sequence
  Description of Artificial Sequence: Synthetic oligonucleotide
uauuuuaugcagaagggcu

SEQ ID NO: 1153366 - RNA, 19 nt, Artificial Sequence
  Description of Artificial Sequence: Synthetic oligonucleotide
aaucugacgaacaaguuag

SEQ ID NO: 1153367 - RNA, 19 nt, Artificial Sequence
  Description of Artificial Sequence: Synthetic oligonucleotide
uuacaauucacacuuggac

SEQ ID NO: 1153368 - RNA, 19 nt, Artificial Sequence
  Description of Artificial Sequence: Synthetic oligonucleotide
uuuacaucauggcuguggg

SEQ ID NO: 1153369 - RNA, 19 nt, Artificial Sequence
  Description of Artificial Sequence: Synthetic oligonucleotide
auuuacaauucacacuugg

SEQ ID NO: 1153370 - RNA, 19 nt, Artificial Sequence
  Description of Artificial Sequence: Synthetic oligonucleotide
ugcacuaaaauaacugaag

SEQ ID NO: 1153371 - RNA, 19 nt, Artificial Sequence
  Description of Artificial Sequence: Synthetic oligonucleotide
aauaagaucauuacagggu

SEQ ID NO: 1153372 - RNA, 19 nt, Artificial Sequence
  Description of Artificial Sequence: Synthetic oligonucleotide
acuacuaugagacgcaugu

SEQ ID NO: 1153373 - RNA, 19 nt, Artificial Sequence
  Description of Artificial Sequence: Synthetic oligonucleotide
auaucaacaggccagagau

SEQ ID NO: 1153374 - RNA, 19 nt, Artificial Sequence
  Description of Artificial Sequence: Synthetic oligonucleotide
uaagcuagcuuccauuucc

SEQ ID NO: 1153375 - RNA, 19 nt, Artificial Sequence
  Description of Artificial Sequence: Synthetic oligonucleotide
uuugcacuaaaauaacuga

SEQ ID NO: 1153376 - RNA, 19 nt, Artificial Sequence
  Description of Artificial Sequence: Synthetic oligonucleotide
caaauaagaucauuacagg

SEQ ID NO: 1153377 - RNA, 19 nt, Artificial Sequence
  Description of Artificial Sequence: Synthetic oligonucleotide
agaggggcaucucauagcc

SEQ ID NO: 1153378 - RNA, 19 nt, Artificial Sequence
  Description of Artificial Sequence: Synthetic oligonucleotide
gaaaauucguuuccaauac

SEQ ID NO: 1153379 - RNA, 19 nt, Artificial Sequence
  Description of Artificial Sequence: Synthetic oligonucleotide
aguagguguugccucaucc

SEQ ID NO: 1153380 - RNA, 19 nt, Artificial Sequence
  Description of Artificial Sequence: Synthetic oligonucleotide
aaauucguuuccaauacag

SEQ ID NO: 1153381 - RNA, 19 nt, Artificial Sequence
  Description of Artificial Sequence: Synthetic oligonucleotide
cguaaaacgauguagaggg

SEQ ID NO: 1153382 - RNA, 19 nt, Artificial Sequence
  Description of Artificial Sequence: Synthetic oligonucleotide
uuuuacaucauggcugugg

SEQ ID NO: 1153383 - RNA, 19 nt, Artificial Sequence
  Description of Artificial Sequence: Synthetic oligonucleotide
aguggugcgaaaaugggcc

SEQ ID NO: 1153384 - RNA, 19 nt, Artificial Sequence
  Description of Artificial Sequence: Synthetic oligonucleotide
auagcccacaaguacacac

SEQ ID NO: 1153385 - RNA, 19 nt, Artificial Sequence
  Description of Artificial Sequence: Synthetic oligonucleotide
aauccuaacaaaguugaca

SEQ ID NO: 1153386 - RNA, 19 nt, Artificial Sequence
  Description of Artificial Sequence: Synthetic oligonucleotide
aucaacaggccagagauac

SEQ ID NO: 1153387 - RNA, 19 nt, Artificial Sequence
  Description of Artificial Sequence: Synthetic oligonucleotide
auuagauccacagaccuag

SEQ ID NO: 1153388 - RNA, 19 nt, Artificial Sequence
  Description of Artificial Sequence: Synthetic oligonucleotide
aagaggggcaucucauagc

SEQ ID NO: 1153389 - RNA, 19 nt, Artificial Sequence
  Description of Artificial Sequence: Synthetic oligonucleotide
aucauuacaggguaggggu

SEQ ID NO: 1153390 - RNA, 19 nt, Artificial Sequence
  Description of Artificial Sequence: Synthetic oligonucleotide
aagaucauuacaggguagg

SEQ ID NO: 1153391 - RNA, 19 nt, Artificial Sequence
  Description of Artificial Sequence: Synthetic oligonucleotide
uuucagugguuucuuaaag

SEQ ID NO: 1153392 - RNA, 19 nt, Artificial Sequence
  Description of Artificial Sequence: Synthetic oligonucleotide
ucucaaauaagaucauuac

SEQ ID NO: 1153393 - RNA, 19 nt, Artificial Sequence
  Description of Artificial Sequence: Synthetic oligonucleotide
ugaagagucuuuaaacaac

SEQ ID NO: 1153394 - RNA, 19 nt, Artificial Sequence
  Description of Artificial Sequence: Synthetic oligonucleotide
uaagggagagcaaaguaga

SEQ ID NO: 1153395 - RNA, 19 nt, Artificial Sequence
  Description of Artificial Sequence: Synthetic oligonucleotide
gaugagacuguaugaacag

SEQ ID NO: 1153396 - RNA, 19 nt, Artificial Sequence
  Description of Artificial Sequence: Synthetic oligonucleotide
ucguuuccaauacagaagu

SEQ ID NO: 1153397 - RNA, 19 nt, Artificial Sequence
  Description of Artificial Sequence: Synthetic oligonucleotide
uuaugcagaaggcaccgag

SEQ ID NO: 1153398 - RNA, 19 nt, Artificial Sequence
  Description of Artificial Sequence: Synthetic oligonucleotide
uccaauacagaaguuacca

SEQ ID NO: 1153399 - RNA, 19 nt, Artificial Sequence
  Description of Artificial Sequence: Synthetic oligonucleotide
cucccgaagaauaaagggg

SEQ ID NO: 1153400 - RNA, 19 nt, Artificial Sequence
  Description of Artificial Sequence: Synthetic oligonucleotide
ugcauuagacagcacaaga

SEQ ID NO: 1153401 - RNA, 19 nt, Artificial Sequence
  Description of Artificial Sequence: Synthetic oligonucleotide
uauuuuacaucauggcugu

SEQ ID NO: 1153402 - RNA, 19 nt, Artificial Sequence
  Description of Artificial Sequence: Synthetic oligonucleotide
cugagauugccuuagcuac

SEQ ID NO: 1153403 - RNA, 19 nt, Artificial Sequence
  Description of Artificial Sequence: Synthetic oligonucleotide
agacuguaugaacaggagg

SEQ ID NO: 1153404 - RNA, 19 nt, Artificial Sequence
  Description of Artificial Sequence: Synthetic oligonucleotide
aaaugggccugucccacac

SEQ ID NO: 1153405 - RNA, 19 nt, Artificial Sequence
  Description of Artificial Sequence: Synthetic oligonucleotide
uuaagucaccgcuagcuca

SEQ ID NO: 1153406 - RNA, 19 nt, Artificial Sequence
  Description of Artificial Sequence: Synthetic oligonucleotide
aaguugacagcaaucugac

SEQ ID NO: 1153407 - RNA, 19 nt, Artificial Sequence
  Description of Artificial Sequence: Synthetic oligonucleotide
cugacgaacaaguuaggag

SEQ ID NO: 1153408 - RNA, 19 nt, Artificial Sequence
  Description of Artificial Sequence: Synthetic oligonucleotide
gaucauuacaggguagggg

SEQ ID NO: 1153409 - RNA, 19 nt, Artificial Sequence
  Description of Artificial Sequence: Synthetic oligonucleotide
ucccuugcuaauuaucucc

SEQ ID NO: 1153410 - RNA, 19 nt, Artificial Sequence
  Description of Artificial Sequence: Synthetic oligonucleotide
aaguggugcgaaaaugggc

SEQ ID NO: 1153411 - RNA, 19 nt, Artificial Sequence
  Description of Artificial Sequence: Synthetic oligonucleotide
uagcuacauaucaacaggc

SEQ ID NO: 1153412 - RNA, 19 nt, Artificial Sequence
  Description of Artificial Sequence: Synthetic oligonucleotide
caaguugaccaacucagcc

SEQ ID NO: 1153413 - RNA, 19 nt, Artificial Sequence
  Description of Artificial Sequence: Synthetic oligonucleotide
accacaacccaaguggugc

SEQ ID NO: 1153414 - RNA, 19 nt, Artificial Sequence
  Description of Artificial Sequence: Synthetic oligonucleotide
aaacgauguagagggauuc

SEQ ID NO: 1153415 - RNA, 19 nt, Artificial Sequence
  Description of Artificial Sequence: Synthetic oligonucleotide
uguaugaacaggaggccga

SEQ ID NO: 1153416 - RNA, 19 nt, Artificial Sequence
  Description of Artificial Sequence: Synthetic oligonucleotide
caucaugucguccagagga

SEQ ID NO: 1153417 - RNA, 19 nt, Artificial Sequence
  Description of Artificial Sequence: Synthetic oligonucleotide
cucccuauuagauccacag

SEQ ID NO: 1153418 - RNA, 19 nt, Artificial Sequence
  Description of Artificial Sequence: Synthetic oligonucleotide
aaguuaccaggccagccag

SEQ ID NO: 1153419 - RNA, 19 nt, Artificial Sequence
  Description of Artificial Sequence: Synthetic oligonucleotide
gagcuguuaagcuagcuuc

SEQ ID NO: 1153420 - RNA, 19 nt, Artificial Sequence
  Description of Artificial Sequence: Synthetic oligonucleotide
acagcacaagauuucagug

SEQ ID NO: 1153421 - RNA, 19 nt, Artificial Sequence
  Description of Artificial Sequence: Synthetic oligonucleotide
gaagaacugguacuaacca

SEQ ID NO: 1153422 - RNA, 19 nt, Artificial Sequence
  Description of Artificial Sequence: Synthetic oligonucleotide
agauccacagaccuagucu

SEQ ID NO: 1153423 - RNA, 19 nt, Artificial Sequence
  Description of Artificial Sequence: Synthetic oligonucleotide
auaagaucauuacagggua

SEQ ID NO: 1153424 - RNA, 19 nt, Artificial Sequence
  Description of Artificial Sequence: Synthetic oligonucleotide
uugcacuaaaauaacugaa

SEQ ID NO: 1153425 - RNA, 19 nt, Artificial Sequence
  Description of Artificial Sequence: Synthetic oligonucleotide
ucuacaagucacagcgucc

SEQ ID NO: 1153426 - RNA, 19 nt, Artificial Sequence
  Description of Artificial Sequence: Synthetic oligonucleotide
uaagucaccgcuagcucag

SEQ ID NO: 1153427 - RNA, 19 nt, Artificial Sequence
  Description of Artificial Sequence: Synthetic oligonucleotide
agcacguaaaacgauguag

SEQ ID NO: 1153428 - RNA, 19 nt, Artificial Sequence
  Description of Artificial Sequence: Synthetic oligonucleotide
acguaaaacgauguagagg

SEQ ID NO: 1153429 - RNA, 19 nt, Artificial Sequence
  Description of Artificial Sequence: Synthetic oligonucleotide
aaucaugcuucuggcuucc

SEQ ID NO: 1153430 - RNA, 19 nt, Artificial Sequence
  Description of Artificial Sequence: Synthetic oligonucleotide
ucacaauccuaacaaaguu

SEQ ID NO: 1153431 - RNA, 19 nt, Artificial Sequence
  Description of Artificial Sequence: Synthetic oligonucleotide
auauauggggccaucaugu

SEQ ID NO: 1153432 - RNA, 19 nt, Artificial Sequence
  Description of Artificial Sequence: Synthetic oligonucleotide
ugggacuagcccaaguuga

SEQ ID NO: 1153433 - RNA, 19 nt, Artificial Sequence
  Description of Artificial Sequence: Synthetic oligonucleotide
agaaguuaccaggccagcc

SEQ ID NO: 1153434 - RNA, 19 nt, Artificial Sequence
  Description of Artificial Sequence: Synthetic oligonucleotide
accuagucugucugggacc

SEQ ID NO: 1153435 - RNA, 19 nt, Artificial Sequence
  Description of Artificial Sequence: Synthetic oligonucleotide
ugucagugacucacaaucc

SEQ ID NO: 1153436 - RNA, 19 nt, Artificial Sequence
  Description of Artificial Sequence: Synthetic oligonucleotide
cccuuauggaaucugaugg

SEQ ID NO: 1153437 - RNA, 19 nt, Artificial Sequence
  Description of Artificial Sequence: Synthetic oligonucleotide
uuugcguucucccuucuau

SEQ ID NO: 1153438 - RNA, 19 nt, Artificial Sequence
  Description of Artificial Sequence: Synthetic oligonucleotide
acaauccuaacaaaguuga

SEQ ID NO: 1153439 - RNA, 19 nt, Artificial Sequence
  Description of Artificial Sequence: Synthetic oligonucleotide
uucacaagagggcauuuau

SEQ ID NO: 1153440 - RNA, 19 nt, Artificial Sequence
  Description of Artificial Sequence: Synthetic oligonucleotide
acucacaauccuaacaaag

SEQ ID NO: 1153441 - RNA, 19 nt, Artificial Sequence
  Description of Artificial Sequence: Synthetic oligonucleotide
cuuuaugcagaaggcaccg

SEQ ID NO: 1153442 - RNA, 19 nt, Artificial Sequence
  Description of Artificial Sequence: Synthetic oligonucleotide
gaagagucuuuaaacaaca

SEQ ID NO: 1153443 - RNA, 19 nt, Artificial Sequence
  Description of Artificial Sequence: Synthetic oligonucleotide
uccgaucuuggcaauuggc

SEQ ID NO: 1153444 - RNA, 19 nt, Artificial Sequence
  Description of Artificial Sequence: Synthetic oligonucleotide
ugagacgcauguuugcacu

SEQ ID NO: 1153445 - RNA, 19 nt, Artificial Sequence
  Description of Artificial Sequence: Synthetic oligonucleotide
gaaucugaugggaaucaag

SEQ ID NO: 1153446 - RNA, 19 nt, Artificial Sequence
  Description of Artificial Sequence: Synthetic oligonucleotide
agcaaucugacgaacaagu

SEQ ID NO: 1153447 - RNA, 19 nt, Artificial Sequence
  Description of Artificial Sequence: Synthetic oligonucleotide
agaacugguacuaaccaca

SEQ ID NO: 1153448 - RNA, 19 nt, Artificial Sequence
  Description of Artificial Sequence: Synthetic oligonucleotide
ugacacaucuugcaagcaa

SEQ ID NO: 1153449 - RNA, 19 nt, Artificial Sequence
  Description of Artificial Sequence: Synthetic oligonucleotide
cacguaaaacgauguagag

SEQ ID NO: 1153450 - RNA, 19 nt, Artificial Sequence
  Description of Artificial Sequence: Synthetic oligonucleotide
gacuagcccaaguugacca

SEQ ID NO: 1153451 - RNA, 19 nt, Artificial Sequence
  Description of Artificial Sequence: Synthetic oligonucleotide
acguucauucucaagaugu

SEQ ID NO: 1153452 - RNA, 19 nt, Artificial Sequence
  Description of Artificial Sequence: Synthetic oligonucleotide
aaauaacugaagagcccuc

SEQ ID NO: 1153453 - RNA, 19 nt, Artificial Sequence
  Description of Artificial Sequence: Synthetic oligonucleotide
aggggcaucucauagccca

SEQ ID NO: 1153454 - RNA, 19 nt, Artificial Sequence
  Description of Artificial Sequence: Synthetic oligonucleotide
cacaccaagguggacaacc

SEQ ID NO: 1153455 - RNA, 19 nt, Artificial Sequence
  Description of Artificial Sequence: Synthetic oligonucleotide
ucgaagaacugguacuaac

SEQ ID NO: 1153456 - RNA, 19 nt, Artificial Sequence
  Description of Artificial Sequence: Synthetic oligonucleotide
aauucguuuccaauacaga

SEQ ID NO: 1153457 - RNA, 19 nt, Artificial Sequence
  Description of Artificial Sequence: Synthetic oligonucleotide
agggcuuuaugcagaaggc

SEQ ID NO: 1153458 - RNA, 19 nt, Artificial Sequence
  Description of Artificial Sequence: Synthetic oligonucleotide
accgagguagcuaagggag

SEQ ID NO: 1153459 - RNA, 19 nt, Artificial Sequence
  Description of Artificial Sequence: Synthetic oligonucleotide
ugguacuaaccacaaccca

SEQ ID NO: 1153460 - RNA, 19 nt, Artificial Sequence
  Description of Artificial Sequence: Synthetic oligonucleotide
agauguguagcucuugcuu

SEQ ID NO: 1153461 - RNA, 19 nt, Artificial Sequence
  Description of Artificial Sequence: Synthetic oligonucleotide
ugcgaaaaugggccugucc

SEQ ID NO: 1153462 - RNA, 19 nt, Artificial Sequence
  Description of Artificial Sequence: Synthetic oligonucleotide
auguuugcacuaaaauaac

SEQ ID NO: 1153463 - RNA, 19 nt, Artificial Sequence
  Description of Artificial Sequence: Synthetic oligonucleotide
uugcuaauuaucucccgaa

SEQ ID NO: 1153464 - RNA, 19 nt, Artificial Sequence
  Description of Artificial Sequence: Synthetic oligonucleotide
ucugacgaacaaguuagga

SEQ ID NO: 1153465 - RNA, 19 nt, Artificial Sequence
  Description of Artificial Sequence: Synthetic oligonucleotide
cccuauuagauccacagac

SEQ ID NO: 1153466 - RNA, 19 nt, Artificial Sequence
  Description of Artificial Sequence: Synthetic oligonucleotide
cagccacuuagcuagugcc

SEQ ID NO: 1153467 - RNA, 19 nt, Artificial Sequence
  Description of Artificial Sequence: Synthetic oligonucleotide
agagguccgaucuuggcaa

SEQ ID NO: 1153468 - RNA, 19 nt, Artificial Sequence
  Description of Artificial Sequence: Synthetic oligonucleotide
ucuaucaccugggacuagc

SEQ ID NO: 1153469 - RNA, 19 nt, Artificial Sequence
  Description of Artificial Sequence: Synthetic oligonucleotide
uuaagcuagcuuccauuuc

SEQ ID NO: 1153470 - RNA, 19 nt, Artificial Sequence
  Description of Artificial Sequence: Synthetic oligonucleotide
caaguuaggagguucugga

SEQ ID NO: 1153471 - RNA, 19 nt, Artificial Sequence
  Description of Artificial Sequence: Synthetic oligonucleotide
guacuaaccacaacccaag

SEQ ID NO: 1153472 - RNA, 19 nt, Artificial Sequence
  Description of Artificial Sequence: Synthetic oligonucleotide
gaccuagucugucugggac

SEQ ID NO: 1153473 - RNA, 19 nt, Artificial Sequence
  Description of Artificial Sequence: Synthetic oligonucleotide
uauuagauccacagaccua

SEQ ID NO: 1153474 - RNA, 19 nt, Artificial Sequence
  Description of Artificial Sequence: Synthetic oligonucleotide
gauugccuuagcuacauau

SEQ ID NO: 1153475 - RNA, 19 nt, Artificial Sequence
  Description of Artificial Sequence: Synthetic oligonucleotide
ggaaagaggagcccggccc

SEQ ID NO: 1153476 - RNA, 19 nt, Artificial Sequence
  Description of Artificial Sequence: Synthetic oligonucleotide
acaagcacguaaaacgaug

SEQ ID NO: 1153477 - RNA, 19 nt, Artificial Sequence
  Description of Artificial Sequence: Synthetic oligonucleotide
ugaugucagugacucacaa

SEQ ID NO: 1153478 - RNA, 19 nt, Artificial Sequence
  Description of Artificial Sequence: Synthetic oligonucleotide
ucagugacucacaauccua

SEQ ID NO: 1153479 - RNA, 19 nt, Artificial Sequence
  Description of Artificial Sequence: Synthetic oligonucleotide
auguagagggauucuggca

SEQ ID NO: 1153480 - RNA, 19 nt, Artificial Sequence
  Description of Artificial Sequence: Synthetic oligonucleotide
aacaaguuaggagguucug

SEQ ID NO: 1153481 - RNA, 19 nt, Artificial Sequence
  Description of Artificial Sequence: Synthetic oligonucleotide
ucccacguucuccagauuu

SEQ ID NO: 1153482 - RNA, 19 nt, Artificial Sequence
  Description of Artificial Sequence: Synthetic oligonucleotide
cagggugagacuacuauga

SEQ ID NO: 1153483 - RNA, 19 nt, Artificial Sequence
  Description of Artificial Sequence: Synthetic oligonucleotide
ucccuauuagauccacaga

SEQ ID NO: 1153484 - RNA, 19 nt, Artificial Sequence
  Description of Artificial Sequence: Synthetic oligonucleotide
caugcauuagacagcacaa

SEQ ID NO: 1153485 - RNA, 19 nt, Artificial Sequence
  Description of Artificial Sequence: Synthetic oligonucleotide
cuuaagucaccgcuagcuc

SEQ ID NO: 1153486 - RNA, 19 nt, Artificial Sequence
  Description of Artificial Sequence: Synthetic oligonucleotide
gggacauaguuacaagacc

SEQ ID NO: 1153487 - RNA, 19 nt, Artificial Sequence
  Description of Artificial Sequence: Synthetic oligonucleotide
uuacaagaccagucccaag

SEQ ID NO: 1153488 - RNA, 19 nt, Artificial Sequence
  Description of Artificial Sequence: Synthetic oligonucleotide
gaaaaugggccugucccac

SEQ ID NO: 1153489 - RNA, 19 nt, Artificial Sequence
  Description of Artificial Sequence: Synthetic oligonucleotide
ccuauuagauccacagacc

SEQ ID NO: 1153490 - RNA, 19 nt, Artificial Sequence
  Description of Artificial Sequence: Synthetic oligonucleotide
caagagggcauuuauuuua

SEQ ID NO: 1153491 - RNA, 19 nt, Artificial Sequence
  Description of Artificial Sequence: Synthetic oligonucleotide
cuauuagauccacagaccu

SEQ ID NO: 1153492 - RNA, 19 nt, Artificial Sequence
  Description of Artificial Sequence: Synthetic oligonucleotide
agggugagacuacuaugag

SEQ ID NO: 1153493 - RNA, 19 nt, Artificial Sequence
  Description of Artificial Sequence: Synthetic oligonucleotide
ucacaagagggcauuuauu

SEQ ID NO: 1153494 - RNA, 19 nt, Artificial Sequence
  Description of Artificial Sequence: Synthetic oligonucleotide
cauaucaacaggccagaga

SEQ ID NO: 1153495 - RNA, 19 nt, Artificial Sequence
  Description of Artificial Sequence: Synthetic oligonucleotide
guuaccaggccagccagag

SEQ ID NO: 1153496 - RNA, 19 nt, Artificial Sequence
  Description of Artificial Sequence: Synthetic oligonucleotide
gucacagcgucccacguuc

SEQ ID NO: 1153497 - RNA, 19 nt, Artificial Sequence
  Description of Artificial Sequence: Synthetic oligonucleotide
aacgauguagagggauucu

SEQ ID NO: 1153498 - RNA, 19 nt, Artificial Sequence
  Description of Artificial Sequence: Synthetic oligonucleotide
guucaggcuaccugggcac

SEQ ID NO: 1153499 - RNA, 19 nt, Artificial Sequence
  Description of Artificial Sequence: Synthetic oligonucleotide
uggacacaagcacguaaaa

SEQ ID NO: 1153500 - RNA, 19 nt, Artificial Sequence
  Description of Artificial Sequence: Synthetic oligonucleotide
cuuauggaaucugauggga

SEQ ID NO: 1153501 - RNA, 19 nt, Artificial Sequence
  Description of Artificial Sequence: Synthetic oligonucleotide
cugggcacaugacaccacc

SEQ ID NO: 1153502 - RNA, 19 nt, Artificial Sequence
  Description of Artificial Sequence: Synthetic oligonucleotide
cacagaccuagucugucug

SEQ ID NO: 1153503 - RNA, 19 nt, Artificial Sequence
  Description of Artificial Sequence: Synthetic oligonucleotide
aagcacguaaaacgaugua

SEQ ID NO: 1153504 - RNA, 19 nt, Artificial Sequence
  Description of Artificial Sequence: Synthetic oligonucleotide
uauauggggccaucauguc

SEQ ID NO: 1153505 - RNA, 19 nt, Artificial Sequence
  Description of Artificial Sequence: Synthetic oligonucleotide
cgaagaacugguacuaacc

SEQ ID NO: 1153506 - RNA, 19 nt, Artificial Sequence
  Description of Artificial Sequence: Synthetic oligonucleotide
cacacugagagguccgauc

SEQ ID NO: 1153507 - RNA, 19 nt, Artificial Sequence
  Description of Artificial Sequence: Synthetic oligonucleotide
aacccaaguggugcgaaaa

SEQ ID NO: 1153508 - RNA, 19 nt, Artificial Sequence
  Description of Artificial Sequence: Synthetic oligonucleotide
uccuuaagucaccgcuagc

SEQ ID NO: 1153509 - RNA, 19 nt, Artificial Sequence
  Description of Artificial Sequence: Synthetic oligonucleotide
gccaucaugucguccagag

SEQ ID NO: 1153510 - RNA, 19 nt, Artificial Sequence
  Description of Artificial Sequence: Synthetic oligonucleotide
ugggcacaugacaccacca

SEQ ID NO: 1153511 - RNA, 19 nt, Artificial Sequence
  Description of Artificial Sequence: Synthetic oligonucleotide
gagacuacuaugagacgca

SEQ ID NO: 1153512 - RNA, 19 nt, Artificial Sequence
  Description of Artificial Sequence: Synthetic oligonucleotide
ucaugucguccagaggagc

SEQ ID NO: 1153513 - RNA, 19 nt, Artificial Sequence
  Description of Artificial Sequence: Synthetic oligonucleotide
ggaugagacuguaugaaca

SEQ ID NO: 1153514 - RNA, 19 nt, Artificial Sequence
  Description of Artificial Sequence: Synthetic oligonucleotide
aacucagggugagacuacu

SEQ ID NO: 1153515 - RNA, 19 nt, Artificial Sequence
  Description of Artificial Sequence: Synthetic oligonucleotide
cacguucauucucaagaug

SEQ ID NO: 1153516 - RNA, 19 nt, Artificial Sequence
  Description of Artificial Sequence: Synthetic oligonucleotide
aaugccccagcaagaauaa

SEQ ID NO: 1153517 - RNA, 19 nt, Artificial Sequence
  Description of Artificial Sequence: Synthetic oligonucleotide
agaagggcuuuaugcagaa

SEQ ID NO: 1153518 - RNA, 19 nt, Artificial Sequence
  Description of Artificial Sequence: Synthetic oligonucleotide
cugggaugagacuguauga

SEQ ID NO: 1153519 - RNA, 19 nt, Artificial Sequence
  Description of Artificial Sequence: Synthetic oligonucleotide
gaauauauggggccaucau

SEQ ID NO: 1153520 - RNA, 19 nt, Artificial Sequence
  Description of Artificial Sequence: Synthetic oligonucleotide
aaccacaacccaaguggug

SEQ ID NO: 1153521 - RNA, 19 nt, Artificial Sequence
  Description of Artificial Sequence: Synthetic oligonucleotide
aagucaccgcuagcucagc

SEQ ID NO: 1153522 - RNA, 19 nt, Artificial Sequence
  Description of Artificial Sequence: Synthetic oligonucleotide
gagacccuuauggaaucug

SEQ ID NO: 1153523 - RNA, 19 nt, Artificial Sequence
  Description of Artificial Sequence: Synthetic oligonucleotide
guuaagcuagcuuccauuu

SEQ ID NO: 1153524 - RNA, 19 nt, Artificial Sequence
  Description of Artificial Sequence: Synthetic oligonucleotide
ggggacauaguuacaagac

SEQ ID NO: 1153525 - RNA, 19 nt, Artificial Sequence
  Description of Artificial Sequence: Synthetic oligonucleotide
gaugggaaucaagucuaca

SEQ ID NO: 1153526 - RNA, 19 nt, Artificial Sequence
  Description of Artificial Sequence: Synthetic oligonucleotide
gacuacuaugagacgcaug

SEQ ID NO: 1153527 - RNA, 19 nt, Artificial Sequence
  Description of Artificial Sequence: Synthetic oligonucleotide
gguacuaaccacaacccaa

SEQ ID NO: 1153528 - RNA, 19 nt, Artificial Sequence
  Description of Artificial Sequence: Synthetic oligonucleotide
gucaccgcuagcucagcac

SEQ ID NO: 1153529 - RNA, 19 nt, Artificial Sequence
  Description of Artificial Sequence: Synthetic oligonucleotide
cucccuugcuaauuaucuc

SEQ ID NO: 1153530 - RNA, 19 nt, Artificial Sequence
  Description of Artificial Sequence: Synthetic oligonucleotide
uaucaacaggccagagaua

SEQ ID NO: 1153531 - RNA, 19 nt, Artificial Sequence
  Description of Artificial Sequence: Synthetic oligonucleotide
uuuaugcagaaggcaccga

SEQ ID NO: 1153532 - RNA, 19 nt, Artificial Sequence
  Description of Artificial Sequence: Synthetic oligonucleotide
auuacaggguaggggugag

SEQ ID NO: 1153533 - RNA, 19 nt, Artificial Sequence
  Description of Artificial Sequence: Synthetic oligonucleotide
cagcaaucugacgaacaag

SEQ ID NO: 1153534 - RNA, 19 nt, Artificial Sequence
  Description of Artificial Sequence: Synthetic oligonucleotide
gcaccgagguagcuaaggg

SEQ ID NO: 1153535 - RNA, 19 nt, Artificial Sequence
  Description of Artificial Sequence: Synthetic oligonucleotide
gggaugagacuguaugaac

SEQ ID NO: 1153536 - RNA, 19 nt, Artificial Sequence
  Description of Artificial Sequence: Synthetic oligonucleotide
aaaguagguguugccucau

SEQ ID NO: 1153537 - RNA, 19 nt, Artificial Sequence
  Description of Artificial Sequence: Synthetic oligonucleotide
aucaugucguccagaggag

SEQ ID NO: 1153538 - RNA, 19 nt, Artificial Sequence
  Description of Artificial Sequence: Synthetic oligonucleotide
gcuuuaugcagaaggcacc

SEQ ID NO: 1153539 - RNA, 19 nt, Artificial Sequence
  Description of Artificial Sequence: Synthetic oligonucleotide
guuacaagaccagucccaa

SEQ ID NO: 1153540 - RNA, 19 nt, Artificial Sequence
  Description of Artificial Sequence: Synthetic oligonucleotide
cagugacucacaauccuaa

SEQ ID NO: 1153541 - RNA, 19 nt, Artificial Sequence
  Description of Artificial Sequence: Synthetic oligonucleotide
cuacccacuuccuucccca

SEQ ID NO: 1153542 - RNA, 19 nt, Artificial Sequence
  Description of Artificial Sequence: Synthetic oligonucleotide
aucaagaggggcaucucau

SEQ ID NO: 1153543 - RNA, 19 nt, Artificial Sequence
  Description of Artificial Sequence: Synthetic oligonucleotide
gcaagaauaaaaugccagu

SEQ ID NO: 1153544 - RNA, 19 nt, Artificial Sequence
  Description of Artificial Sequence: Synthetic oligonucleotide
agaccagucccaagacuuc

SEQ ID NO: 1153545 - RNA, 19 nt, Artificial Sequence
  Description of Artificial Sequence: Synthetic oligonucleotide
gucagugacucacaauccu

SEQ ID NO: 1153546 - RNA, 19 nt, Artificial Sequence
  Description of Artificial Sequence: Synthetic oligonucleotide
caagcacguaaaacgaugu

SEQ ID NO: 1153547 - RNA, 19 nt, Artificial Sequence
  Description of Artificial Sequence: Synthetic oligonucleotide
ggacacaagcacguaaaac

SEQ ID NO: 1153548 - RNA, 19 nt, Artificial Sequence
  Description of Artificial Sequence: Synthetic oligonucleotide
gcacguaaaacgauguaga

SEQ ID NO: 1153549 - RNA, 19 nt, Artificial Sequence
  Description of Artificial Sequence: Synthetic oligonucleotide
cuagcccaaguugaccaac

SEQ ID NO: 1153550 - RNA, 19 nt, Artificial Sequence
  Description of Artificial Sequence: Synthetic oligonucleotide
agacccuuauggaaucuga

SEQ ID NO: 1153551 - RNA, 19 nt, Artificial Sequence
  Description of Artificial Sequence: Synthetic oligonucleotide
acaaugccccagcaagaau

SEQ ID NO: 1153552 - RNA, 19 nt, Artificial Sequence
  Description of Artificial Sequence: Synthetic oligonucleotide
aucugacgaacaaguuagg

SEQ ID NO: 1153553 - RNA, 19 nt, Artificial Sequence
  Description of Artificial Sequence: Synthetic oligonucleotide
uggaauauauggggccauc

SEQ ID NO: 1153554 - RNA, 19 nt, Artificial Sequence
  Description of Artificial Sequence: Synthetic oligonucleotide
acuagcccaaguugaccaa

SEQ ID NO: 1153555 - RNA, 19 nt, Artificial Sequence
  Description of Artificial Sequence: Synthetic oligonucleotide
ugcgggcugagugauguau

SEQ ID NO: 1153556 - RNA, 19 nt, Artificial Sequence
  Description of Artificial Sequence: Synthetic oligonucleotide
aggcuaccugggcacauga

SEQ ID NO: 1153557 - RNA, 19 nt, Artificial Sequence
  Description of Artificial Sequence: Synthetic oligonucleotide
gcauaaagguaaaguagac

SEQ ID NO: 1153558 - RNA, 19 nt, Artificial Sequence
  Description of Artificial Sequence: Synthetic oligonucleotide
caccgagguagcuaaggga

SEQ ID NO: 1153559 - RNA, 19 nt, Artificial Sequence
  Description of Artificial Sequence: Synthetic oligonucleotide
ggcugagugauguauuuua

SEQ ID NO: 1153560 - RNA, 19 nt, Artificial Sequence
  Description of Artificial Sequence: Synthetic oligonucleotide
uagcuagugccugcgggcu

SEQ ID NO: 1153561 - RNA, 19 nt, Artificial Sequence
  Description of Artificial Sequence: Synthetic oligonucleotide
gagguagcuaagggagagc

SEQ ID NO: 1153562 - RNA, 19 nt, Artificial Sequence
  Description of Artificial Sequence: Synthetic oligonucleotide
gaacugguacuaaccacaa

SEQ ID NO: 1153563 - RNA, 19 nt, Artificial Sequence
  Description of Artificial Sequence: Synthetic oligonucleotide
cagaaguuaccaggccagc

SEQ ID NO: 1153564 - RNA, 19 nt, Artificial Sequence
  Description of Artificial Sequence: Synthetic oligonucleotide
cagaggagcuguuaagcua

SEQ ID NO: 1153565 - RNA, 19 nt, Artificial Sequence
  Description of Artificial Sequence: Synthetic oligonucleotide
gaugucagugacucacaau

SEQ ID NO: 1153566 - RNA, 19 nt, Artificial Sequence
  Description of Artificial Sequence: Synthetic oligonucleotide
gacgcauguuugcacuaaa

SEQ ID NO: 1153567 - RNA, 19 nt, Artificial Sequence
  Description of Artificial Sequence: Synthetic oligonucleotide
gacgaacaaguuaggaggu

SEQ ID NO: 1153568 - RNA, 19 nt, Artificial Sequence
  Description of Artificial Sequence: Synthetic oligonucleotide
ggaauauauggggccauca

SEQ ID NO: 1153569 - RNA, 19 nt, Artificial Sequence
  Description of Artificial Sequence: Synthetic oligonucleotide
cccaccugguagaaaauuc

SEQ ID NO: 1153570 - RNA, 19 nt, Artificial Sequence
  Description of Artificial Sequence: Synthetic oligonucleotide
ucacagcgucccacguucu

SEQ ID NO: 1153571 - RNA, 19 nt, Artificial Sequence
  Description of Artificial Sequence: Synthetic oligonucleotide
gguaggggugagcaccuac

SEQ ID NO: 1153572 - RNA, 19 nt, Artificial Sequence
  Description of Artificial Sequence: Synthetic oligonucleotide
caugucguccagaggagcu

SEQ ID NO: 1153573 - RNA, 19 nt, Artificial Sequence
  Description of Artificial Sequence: Synthetic oligonucleotide
gaaggcaccgagguagcua

SEQ ID NO: 1153574 - RNA, 19 nt, Artificial Sequence
  Description of Artificial Sequence: Synthetic oligonucleotide
cccuacaucaagccacuug

SEQ ID NO: 1153575 - RNA, 19 nt, Artificial Sequence
  Description of Artificial Sequence: Synthetic oligonucleotide
accugguagaaaauucguu

SEQ ID NO: 1153576 - RNA, 19 nt, Artificial Sequence
  Description of Artificial Sequence: Synthetic oligonucleotide
agccacuuagcuagugccu

SEQ ID NO: 1153577 - RNA, 19 nt, Artificial Sequence
  Description of Artificial Sequence: Synthetic oligonucleotide
gguccgaucuuggcaauug

SEQ ID NO: 1153578 - RNA, 19 nt, Artificial Sequence
  Description of Artificial Sequence: Synthetic oligonucleotide
gagacgcauguuugcacua

SEQ ID NO: 1153579 - RNA, 19 nt, Artificial Sequence
  Description of Artificial Sequence: Synthetic oligonucleotide
uucaggcuaccugggcaca

SEQ ID NO: 1153580 - RNA, 19 nt, Artificial Sequence
  Description of Artificial Sequence: Synthetic oligonucleotide
agagacccuuauggaaucu

SEQ ID NO: 1153581 - RNA, 19 nt, Artificial Sequence
  Description of Artificial Sequence: Synthetic oligonucleotide
accugggacuagcccaagu

SEQ ID NO: 1153582 - RNA, 19 nt, Artificial Sequence
  Description of Artificial Sequence: Synthetic oligonucleotide
ccacaacccaaguggugcg

SEQ ID NO: 1153583 - RNA, 19 nt, Artificial Sequence
  Description of Artificial Sequence: Synthetic oligonucleotide
agacuacuaugagacgcau

SEQ ID NO: 1153584 - RNA, 19 nt, Artificial Sequence
  Description of Artificial Sequence: Synthetic oligonucleotide
guaaaacgauguagaggga

SEQ ID NO: 1153585 - RNA, 19 nt, Artificial Sequence
  Description of Artificial Sequence: Synthetic oligonucleotide
auggguguucaggcuaccu

SEQ ID NO: 1153586 - RNA, 19 nt, Artificial Sequence
  Description of Artificial Sequence: Synthetic oligonucleotide
agacgcauguuugcacuaa

SEQ ID NO: 1153587 - RNA, 19 nt, Artificial Sequence
  Description of Artificial Sequence: Synthetic oligonucleotide
acaacccaaguggugcgaa

SEQ ID NO: 1153588 - RNA, 19 nt, Artificial Sequence
  Description of Artificial Sequence: Synthetic oligonucleotide
agucuacaagucacagcgu

SEQ ID NO: 1153589 - RNA, 19 nt, Artificial Sequence
  Description of Artificial Sequence: Synthetic oligonucleotide
agcgucccacguucuccag

SEQ ID NO: 1153590 - RNA, 19 nt, Artificial Sequence
  Description of Artificial Sequence: Synthetic oligonucleotide
aggccacaaugccccagca

SEQ ID NO: 1153591 - RNA, 19 nt, Artificial Sequence
  Description of Artificial Sequence: Synthetic oligonucleotide
cguucauucucaagaugug

SEQ ID NO: 1153592 - RNA, 19 nt, Artificial Sequence
  Description of Artificial Sequence: Synthetic oligonucleotide
uggggccaucaugucgucc

SEQ ID NO: 1153593 - RNA, 19 nt, Artificial Sequence
  Description of Artificial Sequence: Synthetic oligonucleotide
caccaugaagagucuuuaa

SEQ ID NO: 1153594 - RNA, 19 nt, Artificial Sequence
  Description of Artificial Sequence: Synthetic oligonucleotide
cacaagauuucagugguuu

SEQ ID NO: 1153595 - RNA, 19 nt, Artificial Sequence
  Description of Artificial Sequence: Synthetic oligonucleotide
gagauugccuuagcuacau

SEQ ID NO: 1153596 - RNA, 19 nt, Artificial Sequence
  Description of Artificial Sequence: Synthetic oligonucleotide
ugcuucuggcuuccacguu

SEQ ID NO: 1153597 - RNA, 19 nt, Artificial Sequence
  Description of Artificial Sequence: Synthetic oligonucleotide
ccaucaugucguccagagg

SEQ ID NO: 1153598 - RNA, 19 nt, Artificial Sequence
  Description of Artificial Sequence: Synthetic oligonucleotide
cuucccgaggccauguuuu

SEQ ID NO: 1153599 - RNA, 19 nt, Artificial Sequence
  Description of Artificial Sequence: Synthetic oligonucleotide
acgcauguuugcacuaaaa

SEQ ID NO: 1153600 - RNA, 19 nt, Artificial Sequence
  Description of Artificial Sequence: Synthetic oligonucleotide
gugccugcgggcugaguga

SEQ ID NO: 1153601 - RNA, 19 nt, Artificial Sequence
  Description of Artificial Sequence: Synthetic oligonucleotide
cacagcgucccacguucuc

SEQ ID NO: 1153602 - RNA, 19 nt, Artificial Sequence
  Description of Artificial Sequence: Synthetic oligonucleotide
agaaggcaccgagguagcu

SEQ ID NO: 1153603 - RNA, 19 nt, Artificial Sequence
  Description of Artificial Sequence: Synthetic oligonucleotide
ugcaggccacaaugcccca

SEQ ID NO: 1153604 - RNA, 19 nt, Artificial Sequence
  Description of Artificial Sequence: Synthetic oligonucleotide
ucaggcuaccugggcacau

SEQ ID NO: 1153605 - RNA, 19 nt, Artificial Sequence
  Description of Artificial Sequence: Synthetic oligonucleotide
cugggaccaaaggccaauc

SEQ ID NO: 1153606 - RNA, 19 nt, Artificial Sequence
  Description of Artificial Sequence: Synthetic oligonucleotide
acgaacaaguuaggagguu

SEQ ID NO: 1153607 - RNA, 19 nt, Artificial Sequence
  Description of Artificial Sequence: Synthetic oligonucleotide
gcguucucccuucuaucac

SEQ ID NO: 1153608 - RNA, 19 nt, Artificial Sequence
  Description of Artificial Sequence: Synthetic oligonucleotide
gauggcccgcccaggccug

SEQ ID NO: 1153609 - RNA, 19 nt, Artificial Sequence
  Description of Artificial Sequence: Synthetic oligonucleotide
cgagguagcuaagggagag

SEQ ID NO: 1153610 - RNA, 19 nt, Artificial Sequence
  Description of Artificial Sequence: Synthetic oligonucleotide
cacagccuguggaauauau

SEQ ID NO: 1153611 - RNA, 19 nt, Artificial Sequence
  Description of Artificial Sequence: Synthetic oligonucleotide
agauugccuuagcuacaua

SEQ ID NO: 1153612 - RNA, 19 nt, Artificial Sequence
  Description of Artificial Sequence: Synthetic oligonucleotide
ccuuaagucaccgcuagcu

SEQ ID NO: 1153613 - RNA, 19 nt, Artificial Sequence
  Description of Artificial Sequence: Synthetic oligonucleotide
gucacacugagagguccga

SEQ ID NO: 1153614 - RNA, 19 nt, Artificial Sequence
  Description of Artificial Sequence: Synthetic oligonucleotide
ccucccuugcuaauuaucu

SEQ ID NO: 1153615 - RNA, 19 nt, Artificial Sequence
  Description of Artificial Sequence: Synthetic oligonucleotide
gacccuuauggaaucugau

SEQ ID NO: 1153616 - RNA, 19 nt, Artificial Sequence
  Description of Artificial Sequence: Synthetic oligonucleotide
cuuccacguucauucucaa

SEQ ID NO: 1153617 - RNA, 19 nt, Artificial Sequence
  Description of Artificial Sequence: Synthetic oligonucleotide
guuugcguucucccuucua

SEQ ID NO: 1153618 - RNA, 19 nt, Artificial Sequence
  Description of Artificial Sequence: Synthetic oligonucleotide
agcccggccccugggauga

SEQ ID NO: 1153619 - RNA, 19 nt, Artificial Sequence
  Description of Artificial Sequence: Synthetic oligonucleotide
caggcuaccugggcacaug

SEQ ID NO: 1153620 - RNA, 19 nt, Artificial Sequence
  Description of Artificial Sequence: Synthetic oligonucleotide
gcccacaaguacacacggg

SEQ ID NO: 1153621 - RNA, 19 nt, Artificial Sequence
  Description of Artificial Sequence: Synthetic oligonucleotide
guugaccaacucagccuuc

SEQ ID NO: 1153622 - RNA, 19 nt, Artificial Sequence
  Description of Artificial Sequence: Synthetic oligonucleotide
ccgaucuuggcaauuggcu

SEQ ID NO: 1153623 - RNA, 19 nt, Artificial Sequence
  Description of Artificial Sequence: Synthetic oligonucleotide
caacccaaguggugcgaaa

SEQ ID NO: 1153624 - RNA, 19 nt, Artificial Sequence
  Description of Artificial Sequence: Synthetic oligonucleotide
ccaagacuucugcaggcca

SEQ ID NO: 1153625 - RNA, 19 nt, Artificial Sequence
  Description of Artificial Sequence: Synthetic oligonucleotide
cgaaaaugggccuguccca

SEQ ID NO: 1153626 - RNA, 19 nt, Artificial Sequence
  Description of Artificial Sequence: Synthetic oligonucleotide
ccuagucugucugggacca

SEQ ID NO: 1153627 - RNA, 19 nt, Artificial Sequence
  Description of Artificial Sequence: Synthetic oligonucleotide
ggaaucugaugggaaucaa

SEQ ID NO: 1153628 - RNA, 19 nt, Artificial Sequence
  Description of Artificial Sequence: Synthetic oligonucleotide
guaugaacaggaggccgau

SEQ ID NO: 1153629 - RNA, 19 nt, Artificial Sequence
  Description of Artificial Sequence: Synthetic oligonucleotide
gcuagugccugcgggcuga

SEQ ID NO: 1153630 - RNA, 19 nt, Artificial Sequence
  Description of Artificial Sequence: Synthetic oligonucleotide
gccucccuugcuaauuauc

SEQ ID NO: 1153631 - RNA, 19 nt, Artificial Sequence
  Description of Artificial Sequence: Synthetic oligonucleotide
gguagcuaagggagagcaa

SEQ ID NO: 1153632 - RNA, 19 nt, Artificial Sequence
  Description of Artificial Sequence: Synthetic oligonucleotide
agguccgaucuuggcaauu

SEQ ID NO: 1153633 - RNA, 19 nt, Artificial Sequence
  Description of Artificial Sequence: Synthetic oligonucleotide
guggaauauauggggccau

SEQ ID NO: 1153634 - RNA, 19 nt, Artificial Sequence
  Description of Artificial Sequence: Synthetic oligonucleotide
ggugcgaaaaugggccugu

SEQ ID NO: 1153635 - RNA, 19 nt, Artificial Sequence
  Description of Artificial Sequence: Synthetic oligonucleotide
gagguccgaucuuggcaau

SEQ ID NO: 1153636 - RNA, 19 nt, Artificial Sequence
  Description of Artificial Sequence: Synthetic oligonucleotide
ccgcuagcucagcacuggc

SEQ ID NO: 1153637 - RNA, 19 nt, Artificial Sequence
  Description of Artificial Sequence: Synthetic oligonucleotide
gugcgaaaaugggccuguc

SEQ ID NO: 1153638 - RNA, 19 nt, Artificial Sequence
  Description of Artificial Sequence: Synthetic oligonucleotide
ggcuaccugggcacaugac

SEQ ID NO: 1153639 - RNA, 19 nt, Artificial Sequence
  Description of Artificial Sequence: Synthetic oligonucleotide
ccgagguagcuaagggaga

SEQ ID NO: 1153640 - RNA, 19 nt, Artificial Sequence
  Description of Artificial Sequence: Synthetic oligonucleotide
gcgucccacguucuccaga

SEQ ID NO: 1153641 - RNA, 19 nt, Artificial Sequence
  Description of Artificial Sequence: Synthetic oligonucleotide
ccacguucauucucaagau

SEQ ID NO: 1153642 - RNA, 19 nt, Artificial Sequence
  Description of Artificial Sequence: Synthetic oligonucleotide
ccccugagauugccuuagc

SEQ ID NO: 1153643 - RNA, 19 nt, Artificial Sequence
  Description of Artificial Sequence: Synthetic oligonucleotide
ccugggacuagcccaaguu

SEQ ID NO: 1153644 - RNA, 19 nt, Artificial Sequence
  Description of Artificial Sequence: Synthetic oligonucleotide
gcccgcccaggccugucca

SEQ ID NO: 1153645 - RNA, 19 nt, Artificial Sequence
  Description of Artificial Sequence: Synthetic oligonucleotide
cugugggguucaagggcuu

SEQ ID NO: 1153646 - RNA, 19 nt, Artificial Sequence
  Description of Artificial Sequence: Synthetic oligonucleotide
gucguccagaggagcuguu

SEQ ID NO: 1153647 - RNA, 19 nt, Artificial Sequence
  Description of Artificial Sequence: Synthetic oligonucleotide
gcgggcugagugauguauu

SEQ ID NO: 1153648 - RNA, 19 nt, Artificial Sequence
  Description of Artificial Sequence: Synthetic oligonucleotide
cguuuccaauacagaaguu

SEQ ID NO: 1153649 - RNA, 19 nt, Artificial Sequence
  Description of Artificial Sequence: Synthetic oligonucleotide
cgggcugagugauguauuu

SEQ ID NO: 1153650 - RNA, 19 nt, Artificial Sequence
  Description of Artificial Sequence: Synthetic oligonucleotide
ccagcacgucuuccucgaa

SEQ ID NO: 1153651 - RNA, 19 nt, Artificial Sequence
  Description of Artificial Sequence: Synthetic oligonucleotide
ggcuucccgaggccauguu

SEQ ID NO: 1153652 - RNA, 19 nt, Artificial Sequence
  Description of Artificial Sequence: Synthetic oligonucleotide
ggguaggggugagcaccua

SEQ ID NO: 1153653 - RNA, 19 nt, Artificial Sequence
  Description of Artificial Sequence: Synthetic oligonucleotide
cguuugcguucucccuucu

SEQ ID NO: 1153654 - RNA, 19 nt, Artificial Sequence
  Description of Artificial Sequence: Synthetic oligonucleotide
ccccuacaucaagccacuu

SEQ ID NO: 1153655 - RNA, 19 nt, Artificial Sequence
  Description of Artificial Sequence: Synthetic oligonucleotide
aaauuuauugauuguaggc

SEQ ID NO: 1153656 - RNA, 19 nt, Artificial Sequence
  Description of Artificial Sequence: Synthetic oligonucleotide
uguuauuggggcaagaucc

SEQ ID NO: 1153657 - RNA, 19 nt, Artificial Sequence
  Description of Artificial Sequence: Synthetic oligonucleotide
aagggaaccacauucagag

SEQ ID NO: 1153658 - RNA, 19 nt, Artificial Sequence
  Description of Artificial Sequence: Synthetic oligonucleotide
uguuuuaccauauuuauuc

SEQ ID NO: 1153659 - RNA, 19 nt, Artificial Sequence
  Description of Artificial Sequence: Synthetic oligonucleotide
uuucugaccauccugaacc

SEQ ID NO: 1153660 - RNA, 19 nt, Artificial Sequence
  Description of Artificial Sequence: Synthetic oligonucleotide
caaacuaaugucaucaucc

SEQ ID NO: 1153661 - RNA, 19 nt, Artificial Sequence
  Description of Artificial Sequence: Synthetic oligonucleotide
aacaaaacaucccagaaau

SEQ ID NO: 1153662 - RNA, 19 nt, Artificial Sequence
  Description of Artificial Sequence: Synthetic oligonucleotide
aaacuaaugucaucauccc

SEQ ID NO: 1153663 - RNA, 19 nt, Artificial Sequence
  Description of Artificial Sequence: Synthetic oligonucleotide
uuaagcucggaacuguugg

SEQ ID NO: 1153664 - RNA, 19 nt, Artificial Sequence
  Description of Artificial Sequence: Synthetic oligonucleotide
caggcuaucuccuagaccc

SEQ ID NO: 1153665 - RNA, 19 nt, Artificial Sequence
  Description of Artificial Sequence: Synthetic oligonucleotide
acaaauuacgucuucaggu

SEQ ID NO: 1153666 - RNA, 19 nt, Artificial Sequence
  Description of Artificial Sequence: Synthetic oligonucleotide
ugcuaaaacaucccgaucu

SEQ ID NO: 1153667 - RNA, 19 nt, Artificial Sequence
  Description of Artificial Sequence: Synthetic oligonucleotide
aauuuauugauuguaggcu

SEQ ID NO: 1153668 - RNA, 19 nt, Artificial Sequence
  Description of Artificial Sequence: Synthetic oligonucleotide
ugagguuucuccauggucc

SEQ ID NO: 1153669 - RNA, 19 nt, Artificial Sequence
  Description of Artificial Sequence: Synthetic oligonucleotide
ugaacuucccuuuaagugc

SEQ ID NO: 1153670 - RNA, 19 nt, Artificial Sequence
  Description of Artificial Sequence: Synthetic oligonucleotide
augagagcaaccaaggucc

SEQ ID NO: 1153671 - RNA, 19 nt, Artificial Sequence
  Description of Artificial Sequence: Synthetic oligonucleotide
uccuauuuguuguugagcc

SEQ ID NO: 1153672 - RNA, 19 nt, Artificial Sequence
  Description of Artificial Sequence: Synthetic oligonucleotide
uaugagagcaaccaagguc

SEQ ID NO: 1153673 - RNA, 19 nt, Artificial Sequence
  Description of Artificial Sequence: Synthetic oligonucleotide
auuuauugauuguaggcug

SEQ ID NO: 1153674 - RNA, 19 nt, Artificial Sequence
  Description of Artificial Sequence: Synthetic oligonucleotide
uuaagugcaggacuuggcc

SEQ ID NO: 1153675 - RNA, 19 nt, Artificial Sequence
  Description of Artificial Sequence: Synthetic oligonucleotide
uguacuucuuuccacugcc

SEQ ID NO: 1153676 - RNA, 19 nt, Artificial Sequence
  Description of Artificial Sequence: Synthetic oligonucleotide
ugaaccuuaagcucggaac

SEQ ID NO: 1153677 - RNA, 19 nt, Artificial Sequence
  Description of Artificial Sequence: Synthetic oligonucleotide
cauggucaguauuagaggc

SEQ ID NO: 1153678 - RNA, 19 nt, Artificial Sequence
  Description of Artificial Sequence: Synthetic oligonucleotide
aacucuagagucaaagcag

SEQ ID NO: 1153679 - RNA, 19 nt, Artificial Sequence
  Description of Artificial Sequence: Synthetic oligonucleotide
uauuuggcgucucaagcag

SEQ ID NO: 1153680 - RNA, 19 nt, Artificial Sequence
  Description of Artificial Sequence: Synthetic oligonucleotide
uuuucacaaucaaaggggu

SEQ ID NO: 1153681 - RNA, 19 nt, Artificial Sequence
  Description of Artificial Sequence: Synthetic oligonucleotide
aaggggugugaagaaaagc

SEQ ID NO: 1153682 - RNA, 19 nt, Artificial Sequence
  Description of Artificial Sequence: Synthetic oligonucleotide
uuuauuuccugcuggguaa

SEQ ID NO: 1153683 - RNA, 19 nt, Artificial Sequence
  Description of Artificial Sequence: Synthetic oligonucleotide
accauauuuauucuuugga

SEQ ID NO: 1153684 - RNA, 19 nt, Artificial Sequence
  Description of Artificial Sequence: Synthetic oligonucleotide
cagaaguggaacauaguag

SEQ ID NO: 1153685 - RNA, 19 nt, Artificial Sequence
  Description of Artificial Sequence: Synthetic oligonucleotide
cagaccagggucaauacag

SEQ ID NO: 1153686 - RNA, 19 nt, Artificial Sequence
  Description of Artificial Sequence: Synthetic oligonucleotide
aaauuacgucuucaggugu

SEQ ID NO: 1153687 - RNA, 19 nt, Artificial Sequence
  Description of Artificial Sequence: Synthetic oligonucleotide
gcuucuuucacaaauuacg

SEQ ID NO: 1153688 - RNA, 19 nt, Artificial Sequence
  Description of Artificial Sequence: Synthetic oligonucleotide
uucacaaucaaaggggugu

SEQ ID NO: 1153689 - RNA, 19 nt, Artificial Sequence
  Description of Artificial Sequence: Synthetic oligonucleotide
auuguaggcugauucugac

SEQ ID NO: 1153690 - RNA, 19 nt, Artificial Sequence
  Description of Artificial Sequence: Synthetic oligonucleotide
ugagaagacagaucaacaa

SEQ ID NO: 1153691 - RNA, 19 nt, Artificial Sequence
  Description of Artificial Sequence: Synthetic oligonucleotide
caaauuacgucuucaggug

SEQ ID NO: 1153692 - RNA, 19 nt, Artificial Sequence
  Description of Artificial Sequence: Synthetic oligonucleotide
uagucuucuagucuuugca

SEQ ID NO: 1153693 - RNA, 19 nt, Artificial Sequence
  Description of Artificial Sequence: Synthetic oligonucleotide
aucauccccaucuagaaau

SEQ ID NO: 1153694 - RNA, 19 nt, Artificial Sequence
  Description of Artificial Sequence: Synthetic oligonucleotide
ucuucuagucuuugcaagc

SEQ ID NO: 1153695 - RNA, 19 nt, Artificial Sequence
  Description of Artificial Sequence: Synthetic oligonucleotide
cacaaauuacgucuucagg

SEQ ID NO: 1153696 - RNA, 19 nt, Artificial Sequence
  Description of Artificial Sequence: Synthetic oligonucleotide
aacaucccgaucuaguuuu

SEQ ID NO: 1153697 - RNA, 19 nt, Artificial Sequence
  Description of Artificial Sequence: Synthetic oligonucleotide
acuuugagcuauauuuugc

SEQ ID NO: 1153698 - RNA, 19 nt, Artificial Sequence
  Description of Artificial Sequence: Synthetic oligonucleotide
uuuuccagcguuuucggaa

SEQ ID NO: 1153699 - RNA, 19 nt, Artificial Sequence
  Description of Artificial Sequence: Synthetic oligonucleotide
aacugcagcuaugagagca

SEQ ID NO: 1153700 - RNA, 19 nt, Artificial Sequence
  Description of Artificial Sequence: Synthetic oligonucleotide
agacagaucaacaaaacau

SEQ ID NO: 1153701 - RNA, 19 nt, Artificial Sequence
  Description of Artificial Sequence: Synthetic oligonucleotide
uggggcaagauccaacuga

SEQ ID NO: 1153702 - RNA, 19 nt, Artificial Sequence
  Description of Artificial Sequence: Synthetic oligonucleotide
ugugaacuucccuuuaagu

SEQ ID NO: 1153703 - RNA, 19 nt, Artificial Sequence
  Description of Artificial Sequence: Synthetic oligonucleotide
uuaccauauuuauucuuug

SEQ ID NO: 1153704 - RNA, 19 nt, Artificial Sequence
  Description of Artificial Sequence: Synthetic oligonucleotide
agcuauauuuugcugauuu

SEQ ID NO: 1153705 - RNA, 19 nt, Artificial Sequence
  Description of Artificial Sequence: Synthetic oligonucleotide
ucuuccaaacuaaugucau

SEQ ID NO: 1153706 - RNA, 19 nt, Artificial Sequence
  Description of Artificial Sequence: Synthetic oligonucleotide
uaguagugacccauuaagu

SEQ ID NO: 1153707 - RNA, 19 nt, Artificial Sequence
  Description of Artificial Sequence: Synthetic oligonucleotide
agcguuuucggaaaucuuc

SEQ ID NO: 1153708 - RNA, 19 nt, Artificial Sequence
  Description of Artificial Sequence: Synthetic oligonucleotide
ugacccauuaaguauucuc

SEQ ID NO: 1153709 - RNA, 19 nt, Artificial Sequence
  Description of Artificial Sequence: Synthetic oligonucleotide
uuugcaagccuuccugaga

SEQ ID NO: 1153710 - RNA, 19 nt, Artificial Sequence
  Description of Artificial Sequence: Synthetic oligonucleotide
ucccuuuaagugcaggacu

SEQ ID NO: 1153711 - RNA, 19 nt, Artificial Sequence
  Description of Artificial Sequence: Synthetic oligonucleotide
ucgagguggaguuuuccag

SEQ ID NO: 1153712 - RNA, 19 nt, Artificial Sequence
  Description of Artificial Sequence: Synthetic oligonucleotide
uccuagacccugcaaauuc

SEQ ID NO: 1153713 - RNA, 19 nt, Artificial Sequence
  Description of Artificial Sequence: Synthetic oligonucleotide
uaagugcaggacuuggcca

SEQ ID NO: 1153714 - RNA, 19 nt, Artificial Sequence
  Description of Artificial Sequence: Synthetic oligonucleotide
agaagugucuucugcccuc

SEQ ID NO: 1153715 - RNA, 19 nt, Artificial Sequence
  Description of Artificial Sequence: Synthetic oligonucleotide
caggacuuggccaacuuug

SEQ ID NO: 1153716 - RNA, 19 nt, Artificial Sequence
  Description of Artificial Sequence: Synthetic oligonucleotide
uugcaagccuuccugagaa

SEQ ID NO: 1153717 - RNA, 19 nt, Artificial Sequence
  Description of Artificial Sequence: Synthetic oligonucleotide
ucgguauugcaggaggagg

SEQ ID NO: 1153718 - RNA, 19 nt, Artificial Sequence
  Description of Artificial Sequence: Synthetic oligonucleotide
caugguccaccuuuugucc

SEQ ID NO: 1153719 - RNA, 19 nt, Artificial Sequence
  Description of Artificial Sequence: Synthetic oligonucleotide
ucuagucccauuccaccug

SEQ ID NO: 1153720 - RNA, 19 nt, Artificial Sequence
  Description of Artificial Sequence: Synthetic oligonucleotide
aggaggagguaccagugag

SEQ ID NO: 1153721 - RNA, 19 nt, Artificial Sequence
  Description of Artificial Sequence: Synthetic oligonucleotide
caguauuagaggcuucagc

SEQ ID NO: 1153722 - RNA, 19 nt, Artificial Sequence
  Description of Artificial Sequence: Synthetic oligonucleotide
uucacaaauuacgucuuca

SEQ ID NO: 1153723 - RNA, 19 nt, Artificial Sequence
  Description of Artificial Sequence: Synthetic oligonucleotide
ucucucaaugccucguucu

SEQ ID NO: 1153724 - RNA, 19 nt, Artificial Sequence
  Description of Artificial Sequence: Synthetic oligonucleotide
ugcaaggcgggccaugugu

SEQ ID NO: 1153725 - RNA, 19 nt, Artificial Sequence
  Description of Artificial Sequence: Synthetic oligonucleotide
ugacuuugagcuauauuuu

SEQ ID NO: 1153726 - RNA, 19 nt, Artificial Sequence
  Description of Artificial Sequence: Synthetic oligonucleotide
ucccgaucuaguuuugaug

SEQ ID NO: 1153727 - RNA, 19 nt, Artificial Sequence
  Description of Artificial Sequence: Synthetic oligonucleotide
ugguggaauuuccuguggc

SEQ ID NO: 1153728 - RNA, 19 nt, Artificial Sequence
  Description of Artificial Sequence: Synthetic oligonucleotide
acaggcacacucaagagcu

SEQ ID NO: 1153729 - RNA, 19 nt, Artificial Sequence
  Description of Artificial Sequence: Synthetic oligonucleotide
uugaacucagggcuggcuc

SEQ ID NO: 1153730 - RNA, 19 nt, Artificial Sequence
  Description of Artificial Sequence: Synthetic oligonucleotide
guaagguagucuucuaguc

SEQ ID NO: 1153731 - RNA, 19 nt, Artificial Sequence
  Description of Artificial Sequence: Synthetic oligonucleotide
ucucaaugccucguucugg

SEQ ID NO: 1153732 - RNA, 19 nt, Artificial Sequence
  Description of Artificial Sequence: Synthetic oligonucleotide
aacccagggguaccccagc

SEQ ID NO: 1153733 - RNA, 19 nt, Artificial Sequence
  Description of Artificial Sequence: Synthetic oligonucleotide
uucuccuauuuguuguuga

SEQ ID NO: 1153734 - RNA, 19 nt, Artificial Sequence
  Description of Artificial Sequence: Synthetic oligonucleotide
ucuagagucaaagcagaaa

SEQ ID NO: 1153735 - RNA, 19 nt, Artificial Sequence
  Description of Artificial Sequence: Synthetic oligonucleotide
cuuaagcucggaacuguug

SEQ ID NO: 1153736 - RNA, 19 nt, Artificial Sequence
  Description of Artificial Sequence: Synthetic oligonucleotide
uucccacucucucaaugcc

SEQ ID NO: 1153737 - RNA, 19 nt, Artificial Sequence
  Description of Artificial Sequence: Synthetic oligonucleotide
uucgagguggaguuuucca

SEQ ID NO: 1153738 - RNA, 19 nt, Artificial Sequence
  Description of Artificial Sequence: Synthetic oligonucleotide
agcaggcuaucuccuagac

SEQ ID NO: 1153739 - RNA, 19 nt, Artificial Sequence
  Description of Artificial Sequence: Synthetic oligonucleotide
acgucuucagguguuuuac

SEQ ID NO: 1153740 - RNA, 19 nt, Artificial Sequence
  Description of Artificial Sequence: Synthetic oligonucleotide
acucagaccaccauguggu

SEQ ID NO: 1153741 - RNA, 19 nt, Artificial Sequence
  Description of Artificial Sequence: Synthetic oligonucleotide
uagugacccauuaaguauu

SEQ ID NO: 1153742 - RNA, 19 nt, Artificial Sequence
  Description of Artificial Sequence: Synthetic oligonucleotide
uucguccugaacugcagcu

SEQ ID NO: 1153743 - RNA, 19 nt, Artificial Sequence
  Description of Artificial Sequence: Synthetic oligonucleotide
ugcagcuaugagagcaacc

SEQ ID NO: 1153744 - RNA, 19 nt, Artificial Sequence
  Description of Artificial Sequence: Synthetic oligonucleotide
gaccagggucaauacaggc

SEQ ID NO: 1153745 - RNA, 19 nt, Artificial Sequence
  Description of Artificial Sequence: Synthetic oligonucleotide
gaaccuuaagcucggaacu

SEQ ID NO: 1153746 - RNA, 19 nt, Artificial Sequence
  Description of Artificial Sequence: Synthetic oligonucleotide
acauuccagccauugccuc

SEQ ID NO: 1153747 - RNA, 19 nt, Artificial Sequence
  Description of Artificial Sequence: Synthetic oligonucleotide
agggucaauacaggcacac

SEQ ID NO: 1153748 - RNA, 19 nt, Artificial Sequence
  Description of Artificial Sequence: Synthetic oligonucleotide
cucggaacuguugggaucc

SEQ ID NO: 1153749 - RNA, 19 nt, Artificial Sequence
  Description of Artificial Sequence: Synthetic oligonucleotide
ugucugagggugaguagca

SEQ ID NO: 1153750 - RNA, 19 nt, Artificial Sequence
  Description of Artificial Sequence: Synthetic oligonucleotide
uuucacaaauuacgucuuc

SEQ ID NO: 1153751 - RNA, 19 nt, Artificial Sequence
  Description of Artificial Sequence: Synthetic oligonucleotide
cauccuuuggaaguggguc

SEQ ID NO: 1153752 - RNA, 19 nt, Artificial Sequence
  Description of Artificial Sequence: Synthetic oligonucleotide
cacgaaagcucucaauguc

SEQ ID NO: 1153753 - RNA, 19 nt, Artificial Sequence
  Description of Artificial Sequence: Synthetic oligonucleotide
agucuucuagucuuugcaa

SEQ ID NO: 1153754 - RNA, 19 nt, Artificial Sequence
  Description of Artificial Sequence: Synthetic oligonucleotide
gcuaugagagcaaccaagg

SEQ ID NO: 1153755 - RNA, 19 nt, Artificial Sequence
  Description of Artificial Sequence: Synthetic oligonucleotide
auucaacccagggguaccc

SEQ ID NO: 1153756 - RNA, 19 nt, Artificial Sequence
  Description of Artificial Sequence: Synthetic oligonucleotide
ggaagugggucccaugugc

SEQ ID NO: 1153757 - RNA, 19 nt, Artificial Sequence
  Description of Artificial Sequence: Synthetic oligonucleotide
caguauucaacccaggggu

SEQ ID NO: 1153758 - RNA, 19 nt, Artificial Sequence
  Description of Artificial Sequence: Synthetic oligonucleotide
ggagguaccagugagucac

SEQ ID NO: 1153759 - RNA, 19 nt, Artificial Sequence
  Description of Artificial Sequence: Synthetic oligonucleotide
gguuauuuucaagucucgg

SEQ ID NO: 1153760 - RNA, 19 nt, Artificial Sequence
  Description of Artificial Sequence: Synthetic oligonucleotide
ugcuucguccugaacugca

SEQ ID NO: 1153761 - RNA, 19 nt, Artificial Sequence
  Description of Artificial Sequence: Synthetic oligonucleotide
ucuccuagacccugcaaau

SEQ ID NO: 1153762 - RNA, 19 nt, Artificial Sequence
  Description of Artificial Sequence: Synthetic oligonucleotide
caauacaggcacacucaag

SEQ ID NO: 1153763 - RNA, 19 nt, Artificial Sequence
  Description of Artificial Sequence: Synthetic oligonucleotide
uauucaacccagggguacc

SEQ ID NO: 1153764 - RNA, 19 nt, Artificial Sequence
  Description of Artificial Sequence: Synthetic oligonucleotide
gauguuguggaagaagccu

SEQ ID NO: 1153765 - RNA, 19 nt, Artificial Sequence
  Description of Artificial Sequence: Synthetic oligonucleotide
caugagcuagcucccuucc

SEQ ID NO: 1153766 - RNA, 19 nt, Artificial Sequence
  Description of Artificial Sequence: Synthetic oligonucleotide
aagcaggcuaucuccuaga

SEQ ID NO: 1153767 - RNA, 19 nt, Artificial Sequence
  Description of Artificial Sequence: Synthetic oligonucleotide
guuucugaccauccugaac

SEQ ID NO: 1153768 - RNA, 19 nt, Artificial Sequence
  Description of Artificial Sequence: Synthetic oligonucleotide
ggcucuacagagcugcaag

SEQ ID NO: 1153769 - RNA, 19 nt, Artificial Sequence
  Description of Artificial Sequence: Synthetic oligonucleotide
ugugccggacuguaccgcc

SEQ ID NO: 1153770 - RNA, 19 nt, Artificial Sequence
  Description of Artificial Sequence: Synthetic oligonucleotide
gaagugggucccaugugcc

SEQ ID NO: 1153771 - RNA, 19 nt, Artificial Sequence
  Description of Artificial Sequence: Synthetic oligonucleotide
caagccuuccugagaagac

SEQ ID NO: 1153772 - RNA, 19 nt, Artificial Sequence
  Description of Artificial Sequence: Synthetic oligonucleotide
ucacaaucaaaggggugug

SEQ ID NO: 1153773 - RNA, 19 nt, Artificial Sequence
  Description of Artificial Sequence: Synthetic oligonucleotide
cuagucuuugcaagccuuc

SEQ ID NO: 1153774 - RNA, 19 nt, Artificial Sequence
  Description of Artificial Sequence: Synthetic oligonucleotide
uuguaggcugauucugacu

SEQ ID NO: 1153775 - RNA, 19 nt, Artificial Sequence
  Description of Artificial Sequence: Synthetic oligonucleotide
uacagaccagggucaauac

SEQ ID NO: 1153776 - RNA, 19 nt, Artificial Sequence
  Description of Artificial Sequence: Synthetic oligonucleotide
cuagucccauuccaccugc

SEQ ID NO: 1153777 - RNA, 19 nt, Artificial Sequence
  Description of Artificial Sequence: Synthetic oligonucleotide
uugauggcuccccuccaga

SEQ ID NO: 1153778 - RNA, 19 nt, Artificial Sequence
  Description of Artificial Sequence: Synthetic oligonucleotide
auguuguggaagaagccug

SEQ ID NO: 1153779 - RNA, 19 nt, Artificial Sequence
  Description of Artificial Sequence: Synthetic oligonucleotide
acagaccagggucaauaca

SEQ ID NO: 1153780 - RNA, 19 nt, Artificial Sequence
  Description of Artificial Sequence: Synthetic oligonucleotide
gaucuaguuuugauggcuc

SEQ ID NO: 1153781 - RNA, 19 nt, Artificial Sequence
  Description of Artificial Sequence: Synthetic oligonucleotide
gaagccugcuuucuuucga

SEQ ID NO: 1153782 - RNA, 19 nt, Artificial Sequence
  Description of Artificial Sequence: Synthetic oligonucleotide
ugccggacuguaccgcccg

SEQ ID NO: 1153783 - RNA, 19 nt, Artificial Sequence
  Description of Artificial Sequence: Synthetic oligonucleotide
ucaacccagggguacccca

SEQ ID NO: 1153784 - RNA, 19 nt, Artificial Sequence
  Description of Artificial Sequence: Synthetic oligonucleotide
aagcucggaacuguuggga

SEQ ID NO: 1153785 - RNA, 19 nt, Artificial Sequence
  Description of Artificial Sequence: Synthetic oligonucleotide
guagugacccauuaaguau

SEQ ID NO: 1153786 - RNA, 19 nt, Artificial Sequence
  Description of Artificial Sequence: Synthetic oligonucleotide
cuucuuucacaaauuacgu

SEQ ID NO: 1153787 - RNA, 19 nt, Artificial Sequence
  Description of Artificial Sequence: Synthetic oligonucleotide
ggguaagguagucuucuag

SEQ ID NO: 1153788 - RNA, 19 nt, Artificial Sequence
  Description of Artificial Sequence: Synthetic oligonucleotide
cugguggaauuuccugugg

SEQ ID NO: 1153789 - RNA, 19 nt, Artificial Sequence
  Description of Artificial Sequence: Synthetic oligonucleotide
cuucccuuuaagugcagga

SEQ ID NO: 1153790 - RNA, 19 nt, Artificial Sequence
  Description of Artificial Sequence: Synthetic oligonucleotide
aauuacgucuucagguguu

SEQ ID NO: 1153791 - RNA, 19 nt, Artificial Sequence
  Description of Artificial Sequence: Synthetic oligonucleotide
agccugcuuucuuucgagg

SEQ ID NO: 1153792 - RNA, 19 nt, Artificial Sequence
  Description of Artificial Sequence: Synthetic oligonucleotide
cccacgaaagcucucaaug

SEQ ID NO: 1153793 - RNA, 19 nt, Artificial Sequence
  Description of Artificial Sequence: Synthetic oligonucleotide
uucuaccauggucaguauu

SEQ ID NO: 1153794 - RNA, 19 nt, Artificial Sequence
  Description of Artificial Sequence: Synthetic oligonucleotide
acgaaagcucucaauguca

SEQ ID NO: 1153795 - RNA, 19 nt, Artificial Sequence
  Description of Artificial Sequence: Synthetic oligonucleotide
uacgucuucagguguuuua

SEQ ID NO: 1153796 - RNA, 19 nt, Artificial Sequence
  Description of Artificial Sequence: Synthetic oligonucleotide
cucucaaugccucguucug

SEQ ID NO: 1153797 - RNA, 19 nt, Artificial Sequence
  Description of Artificial Sequence: Synthetic oligonucleotide
uaccauggucaguauuaga

SEQ ID NO: 1153798 - RNA, 19 nt, Artificial Sequence
  Description of Artificial Sequence: Synthetic oligonucleotide
ggcaagauccaacugaggu

SEQ ID NO: 1153799 - RNA, 19 nt, Artificial Sequence
  Description of Artificial Sequence: Synthetic oligonucleotide
acacucaagagcugcuaaa

SEQ ID NO: 1153800 - RNA, 19 nt, Artificial Sequence
  Description of Artificial Sequence: Synthetic oligonucleotide
cagcuggacugcuucgucc

SEQ ID NO: 1153801 - RNA, 19 nt, Artificial Sequence
  Description of Artificial Sequence: Synthetic oligonucleotide
aaaugcucccacggagaug

SEQ ID NO: 1153802 - RNA, 19 nt, Artificial Sequence
  Description of Artificial Sequence: Synthetic oligonucleotide
agggugaguagcacaggac

SEQ ID NO: 1153803 - RNA, 19 nt, Artificial Sequence
  Description of Artificial Sequence: Synthetic oligonucleotide
gaguugcuguacuucuuuc

SEQ ID NO: 1153804 - RNA, 19 nt, Artificial Sequence
  Description of Artificial Sequence: Synthetic oligonucleotide
uggccucuagucccauucc

SEQ ID NO: 1153805 - RNA, 19 nt, Artificial Sequence
  Description of Artificial Sequence: Synthetic oligonucleotide
ugaccauccugaaccuuaa

SEQ ID NO: 1153806 - RNA, 19 nt, Artificial Sequence
  Description of Artificial Sequence: Synthetic oligonucleotide
cccaguauucaacccaggg

SEQ ID NO: 1153807 - RNA, 19 nt, Artificial Sequence
  Description of Artificial Sequence: Synthetic oligonucleotide
ucuuucgagguggaguuuu

SEQ ID NO: 1153808 - RNA, 19 nt, Artificial Sequence
  Description of Artificial Sequence: Synthetic oligonucleotide
cuaccauggucaguauuag

SEQ ID NO: 1153809 - RNA, 19 nt, Artificial Sequence
  Description of Artificial Sequence: Synthetic oligonucleotide
guauucaacccagggguac

SEQ ID NO: 1153810 - RNA, 19 nt, Artificial Sequence
  Description of Artificial Sequence: Synthetic oligonucleotide
uuauugauuguaggcugau

SEQ ID NO: 1153811 - RNA, 19 nt, Artificial Sequence
  Description of Artificial Sequence: Synthetic oligonucleotide
gcucuacagagcugcaagg

SEQ ID NO: 1153812 - RNA, 19 nt, Artificial Sequence
  Description of Artificial Sequence: Synthetic oligonucleotide
guggccucuagucccauuc

SEQ ID NO: 1153813 - RNA, 19 nt, Artificial Sequence
  Description of Artificial Sequence: Synthetic oligonucleotide
uggucaguauuagaggcuu

SEQ ID NO: 1153814 - RNA, 19 nt, Artificial Sequence
  Description of Artificial Sequence: Synthetic oligonucleotide
cauaguagugacccauuaa

SEQ ID NO: 1153815 - RNA, 19 nt, Artificial Sequence
  Description of Artificial Sequence: Synthetic oligonucleotide
auuuggcgucucaagcagg

SEQ ID NO: 1153816 - RNA, 19 nt, Artificial Sequence
  Description of Artificial Sequence: Synthetic oligonucleotide
ugugaaggccaggggagga

SEQ ID NO: 1153817 - RNA, 19 nt, Artificial Sequence
  Description of Artificial Sequence: Synthetic oligonucleotide
augugccggacuguaccgc

SEQ ID NO: 1153818 - RNA, 19 nt, Artificial Sequence
  Description of Artificial Sequence: Synthetic oligonucleotide
aucccgaucuaguuuugau

SEQ ID NO: 1153819 - RNA, 19 nt, Artificial Sequence
  Description of Artificial Sequence: Synthetic oligonucleotide
caaugacaggagaagaagu

SEQ ID NO: 1153820 - RNA, 19 nt, Artificial Sequence
  Description of Artificial Sequence: Synthetic oligonucleotide
gguaagguagucuucuagu

SEQ ID NO: 1153821 - RNA, 19 nt, Artificial Sequence
  Description of Artificial Sequence: Synthetic oligonucleotide
cuucagguguuuuaccaua

SEQ ID NO: 1153822 - RNA, 19 nt, Artificial Sequence
  Description of Artificial Sequence: Synthetic oligonucleotide
ugcaagccuuccugagaag

SEQ ID NO: 1153823 - RNA, 19 nt, Artificial Sequence
  Description of Artificial Sequence: Synthetic oligonucleotide
gacuguaccgcccggggcu

SEQ ID NO: 1153824 - RNA, 19 nt, Artificial Sequence
  Description of Artificial Sequence: Synthetic oligonucleotide
ccaugugccggacuguacc

SEQ ID NO: 1153825 - RNA, 19 nt, Artificial Sequence
  Description of Artificial Sequence: Synthetic oligonucleotide
gguggaauuuccuguggca

SEQ ID NO: 1153826 - RNA, 19 nt, Artificial Sequence
  Description of Artificial Sequence: Synthetic oligonucleotide
agcucggaacuguugggau

SEQ ID NO: 1153827 - RNA, 19 nt, Artificial Sequence
  Description of Artificial Sequence: Synthetic oligonucleotide
ccaugguccaccuuuuguc

SEQ ID NO: 1153828 - RNA, 19 nt, Artificial Sequence
  Description of Artificial Sequence: Synthetic oligonucleotide
gaccauccugaaccuuaag

SEQ ID NO: 1153829 - RNA, 19 nt, Artificial Sequence
  Description of Artificial Sequence: Synthetic oligonucleotide
accuuaagcucggaacugu

SEQ ID NO: 1153830 - RNA, 19 nt, Artificial Sequence
  Description of Artificial Sequence: Synthetic oligonucleotide
caaggcgggccaugugugc

SEQ ID NO: 1153831 - RNA, 19 nt, Artificial Sequence
  Description of Artificial Sequence: Synthetic oligonucleotide
ggcugugaaggccagggga

SEQ ID NO: 1153832 - RNA, 19 nt, Artificial Sequence
  Description of Artificial Sequence: Synthetic oligonucleotide
guacagaccagggucaaua

SEQ ID NO: 1153833 - RNA, 19 nt, Artificial Sequence
  Description of Artificial Sequence: Synthetic oligonucleotide
gaaaugcucccacggagau

SEQ ID NO: 1153834 - RNA, 19 nt, Artificial Sequence
  Description of Artificial Sequence: Synthetic oligonucleotide
uuagaggcuucagcucucu

SEQ ID NO: 1153835 - RNA, 19 nt, Artificial Sequence
  Description of Artificial Sequence: Synthetic oligonucleotide
gccuuggauggacucagag

SEQ ID NO: 1153836 - RNA, 19 nt, Artificial Sequence
  Description of Artificial Sequence: Synthetic oligonucleotide
cucugacacuucacuguug

SEQ ID NO: 1153837 - RNA, 19 nt, Artificial Sequence
  Description of Artificial Sequence: Synthetic oligonucleotide
uauugauuguaggcugauu

SEQ ID NO: 1153838 - RNA, 19 nt, Artificial Sequence
  Description of Artificial Sequence: Synthetic oligonucleotide
uggaguuuuccagcguuuu

SEQ ID NO: 1153839 - RNA, 19 nt, Artificial Sequence
  Description of Artificial Sequence: Synthetic oligonucleotide
cuccccaaugacaggagaa

SEQ ID NO: 1153840 - RNA, 19 nt, Artificial Sequence
  Description of Artificial Sequence: Synthetic oligonucleotide
cugcccucagaaguggaac

SEQ ID NO: 1153841 - RNA, 19 nt, Artificial Sequence
  Description of Artificial Sequence: Synthetic oligonucleotide
agggaaccacauucagagu

SEQ ID NO: 1153842 - RNA, 19 nt, Artificial Sequence
  Description of Artificial Sequence: Synthetic oligonucleotide
caagauccaacugagguuu

SEQ ID NO: 1153843 - RNA, 19 nt, Artificial Sequence
  Description of Artificial Sequence: Synthetic oligonucleotide
gacucagaggccccacgaa

SEQ ID NO: 1153844 - RNA, 19 nt, Artificial Sequence
  Description of Artificial Sequence: Synthetic oligonucleotide
ucaaugccucguucuggau

SEQ ID NO: 1153845 - RNA, 19 nt, Artificial Sequence
  Description of Artificial Sequence: Synthetic oligonucleotide
gcaggcuaucuccuagacc

SEQ ID NO: 1153846 - RNA, 19 nt, Artificial Sequence
  Description of Artificial Sequence: Synthetic oligonucleotide
cacacucaagagcugcuaa

SEQ ID NO: 1153847 - RNA, 19 nt, Artificial Sequence
  Description of Artificial Sequence: Synthetic oligonucleotide
gggaaccacauucagaguu

SEQ ID NO: 1153848 - RNA, 19 nt, Artificial Sequence
  Description of Artificial Sequence: Synthetic oligonucleotide
ccugcuuucuuucgaggug

SEQ ID NO: 1153849 - RNA, 19 nt, Artificial Sequence
  Description of Artificial Sequence: Synthetic oligonucleotide
cugaaccuuaagcucggaa

SEQ ID NO: 1153850 - RNA, 19 nt, Artificial Sequence
  Description of Artificial Sequence: Synthetic oligonucleotide
uaucuagaccaggcuguuc

SEQ ID NO: 1153851 - RNA, 19 nt, Artificial Sequence
  Description of Artificial Sequence: Synthetic oligonucleotide
cacucaagagcugcuaaaa

SEQ ID NO: 1153852 - RNA, 19 nt, Artificial Sequence
  Description of Artificial Sequence: Synthetic oligonucleotide
aggacuuggccaacuuugu

SEQ ID NO: 1153853 - RNA, 19 nt, Artificial Sequence
  Description of Artificial Sequence: Synthetic oligonucleotide
aguauucaacccaggggua

SEQ ID NO: 1153854 - RNA, 19 nt, Artificial Sequence
  Description of Artificial Sequence: Synthetic oligonucleotide
gugaaggccaggggaggag

SEQ ID NO: 1153855 - RNA, 19 nt, Artificial Sequence
  Description of Artificial Sequence: Synthetic oligonucleotide
cucuagucccauuccaccu

SEQ ID NO: 1153856 - RNA, 19 nt, Artificial Sequence
  Description of Artificial Sequence: Synthetic oligonucleotide
auuacgucuucagguguuu

SEQ ID NO: 1153857 - RNA, 19 nt, Artificial Sequence
  Description of Artificial Sequence: Synthetic oligonucleotide
uuccagcguuuucggaaau

SEQ ID NO: 1153858 - RNA, 19 nt, Artificial Sequence
  Description of Artificial Sequence: Synthetic oligonucleotide
cuaugagagcaaccaaggu

SEQ ID NO: 1153859 - RNA, 19 nt, Artificial Sequence
  Description of Artificial Sequence: Synthetic oligonucleotide
ucguccugaacugcagcua

SEQ ID NO: 1153860 - RNA, 19 nt, Artificial Sequence
  Description of Artificial Sequence: Synthetic oligonucleotide
ugccuuggauggacucaga

SEQ ID NO: 1153861 - RNA, 19 nt, Artificial Sequence
  Description of Artificial Sequence: Synthetic oligonucleotide
uuacgucuucagguguuuu

SEQ ID NO: 1153862 - RNA, 19 nt, Artificial Sequence
  Description of Artificial Sequence: Synthetic oligonucleotide
ggacuguaccgcccggggc

SEQ ID NO: 1153863 - RNA, 19 nt, Artificial Sequence
  Description of Artificial Sequence: Synthetic oligonucleotide
uggcucuacagagcugcaa

SEQ ID NO: 1153864 - RNA, 19 nt, Artificial Sequence
  Description of Artificial Sequence: Synthetic oligonucleotide
ccgaucuaguuuugauggc

SEQ ID NO: 1153865 - RNA, 19 nt, Artificial Sequence
  Description of Artificial Sequence: Synthetic oligonucleotide
gcuaaaacaucccgaucua

SEQ ID NO: 1153866 - RNA, 19 nt, Artificial Sequence
  Description of Artificial Sequence: Synthetic oligonucleotide
cugcagcuaugagagcaac

SEQ ID NO: 1153867 - RNA, 19 nt, Artificial Sequence
  Description of Artificial Sequence: Synthetic oligonucleotide
cuggguaagguagucuucu

SEQ ID NO: 1153868 - RNA, 19 nt, Artificial Sequence
  Description of Artificial Sequence: Synthetic oligonucleotide
cccauuaaguauucucuaa

SEQ ID NO: 1153869 - RNA, 19 nt, Artificial Sequence
  Description of Artificial Sequence: Synthetic oligonucleotide
ggcagaugagaacacuggu

SEQ ID NO: 1153870 - RNA, 19 nt, Artificial Sequence
  Description of Artificial Sequence: Synthetic oligonucleotide
cucagaaguggaacauagu

SEQ ID NO: 1153871 - RNA, 19 nt, Artificial Sequence
  Description of Artificial Sequence: Synthetic oligonucleotide
ccuagacccugcaaauuca

SEQ ID NO: 1153872 - RNA, 19 nt, Artificial Sequence
  Description of Artificial Sequence: Synthetic oligonucleotide
gcuaucuccuagacccugc

SEQ ID NO: 1153873 - RNA, 19 nt, Artificial Sequence
  Description of Artificial Sequence: Synthetic oligonucleotide
aggcgggccaugugugcca

SEQ ID NO: 1153874 - RNA, 19 nt, Artificial Sequence
  Description of Artificial Sequence: Synthetic oligonucleotide
gaucagacuuucugauguu

SEQ ID NO: 1153875 - RNA, 19 nt, Artificial Sequence
  Description of Artificial Sequence: Synthetic oligonucleotide
ggcuaucuccuagacccug

SEQ ID NO: 1153876 - RNA, 19 nt, Artificial Sequence
  Description of Artificial Sequence: Synthetic oligonucleotide
uguaccgcccggggcugug

SEQ ID NO: 1153877 - RNA, 19 nt, Artificial Sequence
  Description of Artificial Sequence: Synthetic oligonucleotide
ggccucuagucccauucca

SEQ ID NO: 1153878 - RNA, 19 nt, Artificial Sequence
  Description of Artificial Sequence: Synthetic oligonucleotide
ugcuaccagcuggacugcu

SEQ ID NO: 1153879 - RNA, 19 nt, Artificial Sequence
  Description of Artificial Sequence: Synthetic oligonucleotide
accgcccggggcugugaag

SEQ ID NO: 1153880 - RNA, 19 nt, Artificial Sequence
  Description of Artificial Sequence: Synthetic oligonucleotide
gggcaagauccaacugagg

SEQ ID NO: 1153881 - RNA, 19 nt, Artificial Sequence
  Description of Artificial Sequence: Synthetic oligonucleotide
uaccgcccggggcugugaa

SEQ ID NO: 1153882 - RNA, 19 nt, Artificial Sequence
  Description of Artificial Sequence: Synthetic oligonucleotide
gcaagauccaacugagguu

SEQ ID NO: 1153883 - RNA, 19 nt, Artificial Sequence
  Description of Artificial Sequence: Synthetic oligonucleotide
gguuucugaccauccugaa

SEQ ID NO: 1153884 - RNA, 19 nt, Artificial Sequence
  Description of Artificial Sequence: Synthetic oligonucleotide
gcaaggcgggccaugugug

SEQ ID NO: 1153885 - RNA, 19 nt, Artificial Sequence
  Description of Artificial Sequence: Synthetic oligonucleotide
acaucccgaucuaguuuug

SEQ ID NO: 1153886 - RNA, 19 nt, Artificial Sequence
  Description of Artificial Sequence: Synthetic oligonucleotide
cugcaaggcgggccaugug

SEQ ID NO: 1153887 - RNA, 19 nt, Artificial Sequence
  Description of Artificial Sequence: Synthetic oligonucleotide
gggguaccccagcucauga

SEQ ID NO: 1153888 - RNA, 19 nt, Artificial Sequence
  Description of Artificial Sequence: Synthetic oligonucleotide
ggaguugcuguacuucuuu

SEQ ID NO: 1153889 - RNA, 19 nt, Artificial Sequence
  Description of Artificial Sequence: Synthetic oligonucleotide
ggauggacucagaggcccc

SEQ ID NO: 1153890 - RNA, 19 nt, Artificial Sequence
  Description of Artificial Sequence: Synthetic oligonucleotide
ccgcccggggcugugaagg

SEQ ID NO: 1153891 - RNA, 19 nt, Artificial Sequence
  Description of Artificial Sequence: Synthetic oligonucleotide
ucggaacuguugggaucca

SEQ ID NO: 1153892 - RNA, 19 nt, Artificial Sequence
  Description of Artificial Sequence: Synthetic oligonucleotide
gcguuuucggaaaucuucu

SEQ ID NO: 1153893 - RNA, 19 nt, Artificial Sequence
  Description of Artificial Sequence: Synthetic oligonucleotide
cuggcucuacagagcugca

SEQ ID NO: 1153894 - RNA, 19 nt, Artificial Sequence
  Description of Artificial Sequence: Synthetic oligonucleotide
aggcuaucuccuagacccu

SEQ ID NO: 1153895 - RNA, 19 nt, Artificial Sequence
  Description of Artificial Sequence: Synthetic oligonucleotide
ccacgaaagcucucaaugu

SEQ ID NO: 1153896 - RNA, 19 nt, Artificial Sequence
  Description of Artificial Sequence: Synthetic oligonucleotide
cggacuguaccgcccgggg

SEQ ID NO: 1153897 - RNA, 19 nt, Artificial Sequence
  Description of Artificial Sequence: Synthetic oligonucleotide
ggucaguauuagaggcuuc

SEQ ID NO: 1153898 - RNA, 19 nt, Artificial Sequence
  Description of Artificial Sequence: Synthetic oligonucleotide
agaccaccaugugguugcu

SEQ ID NO: 1153899 - RNA, 19 nt, Artificial Sequence
  Description of Artificial Sequence: Synthetic oligonucleotide
gcagaugagaacacugguu

SEQ ID NO: 1153900 - RNA, 19 nt, Artificial Sequence
  Description of Artificial Sequence: Synthetic oligonucleotide
cccaugugccggacuguac

SEQ ID NO: 1153901 - RNA, 19 nt, Artificial Sequence
  Description of Artificial Sequence: Synthetic oligonucleotide
gccauugccucugacacuu

SEQ ID NO: 1153902 - RNA, 19 nt, Artificial Sequence
  Description of Artificial Sequence: Synthetic oligonucleotide
cacucucucaaugccucgu

SEQ ID NO: 1153903 - RNA, 19 nt, Artificial Sequence
  Description of Artificial Sequence: Synthetic oligonucleotide
gccggacuguaccgcccgg

SEQ ID NO: 1153904 - RNA, 19 nt, Artificial Sequence
  Description of Artificial Sequence: Synthetic oligonucleotide
aggccccacgaaagcucuc

SEQ ID NO: 1153905 - RNA, 19 nt, Artificial Sequence
  Description of Artificial Sequence: Synthetic oligonucleotide
cagaggccccacgaaagcu

SEQ ID NO: 1153906 - RNA, 19 nt, Artificial Sequence
  Description of Artificial Sequence: Synthetic oligonucleotide
ccggacuguaccgcccggg

SEQ ID NO: 1153907 - RNA, 19 nt, Artificial Sequence
  Description of Artificial Sequence: Synthetic oligonucleotide
ccaacugagguuucuccau

SEQ ID NO: 1153908 - RNA, 19 nt, Artificial Sequence
  Description of Artificial Sequence: Synthetic oligonucleotide
cucccacggagauggaguu

SEQ ID NO: 1153909 - RNA, 19 nt, Artificial Sequence
  Description of Artificial Sequence: Synthetic oligonucleotide
gugacccauuaaguauucu

SEQ ID NO: 1153910 - RNA, 19 nt, Artificial Sequence
  Description of Artificial Sequence: Synthetic oligonucleotide
cuguugguucugucuuggu

SEQ ID NO: 1153911 - RNA, 19 nt, Artificial Sequence
  Description of Artificial Sequence: Synthetic oligonucleotide
ggaggagguaccagugagu

SEQ ID NO: 1153912 - RNA, 19 nt, Artificial Sequence
  Description of Artificial Sequence: Synthetic oligonucleotide
cagcguuuucggaaaucuu

SEQ ID NO: 1153913 - RNA, 19 nt, Artificial Sequence
  Description of Artificial Sequence: Synthetic oligonucleotide
cgaucuaguuuugauggcu

SEQ ID NO: 1153914 - RNA, 19 nt, Artificial Sequence
  Description of Artificial Sequence: Synthetic oligonucleotide
ccucguucuggaucagacu

SEQ ID NO: 1153915 - RNA, 19 nt, Artificial Sequence
  Description of Artificial Sequence: Synthetic oligonucleotide
cucagaccaccaugugguu

SEQ ID NO: 1153916 - RNA, 19 nt, Artificial Sequence
  Description of Artificial Sequence: Synthetic oligonucleotide
cuccuagacccugcaaauu

SEQ ID NO: 1153917 - RNA, 19 nt, Artificial Sequence
  Description of Artificial Sequence: Synthetic oligonucleotide
gggucaauacaggcacacu

SEQ ID NO: 1153918 - RNA, 19 nt, Artificial Sequence
  Description of Artificial Sequence: Synthetic oligonucleotide
guaccgcccggggcuguga

SEQ ID NO: 1153919 - RNA, 19 nt, Artificial Sequence
  Description of Artificial Sequence: Synthetic oligonucleotide
ccauugccucugacacuuc

SEQ ID NO: 1153920 - RNA, 19 nt, Artificial Sequence
  Description of Artificial Sequence: Synthetic oligonucleotide
cagggguaccccagcucau

SEQ ID NO: 1153921 - RNA, 19 nt, Artificial Sequence
  Description of Artificial Sequence: Synthetic oligonucleotide
ccuuaagcucggaacuguu

SEQ ID NO: 1153922 - RNA, 19 nt, Artificial Sequence
  Description of Artificial Sequence: Synthetic oligonucleotide
gccaugugugccauccuuu

SEQ ID NO: 1153923 - RNA, 19 nt, Artificial Sequence
  Description of Artificial Sequence: Synthetic oligonucleotide
gguaguggaagggccucuu

SEQ ID NO: 1153924 - RNA, 19 nt, Artificial Sequence
  Description of Artificial Sequence: Synthetic oligonucleotide
gcccucagaaguggaacau

SEQ ID NO: 1153925 - RNA, 19 nt, Artificial Sequence
  Description of Artificial Sequence: Synthetic oligonucleotide
gcgucucaagcaggcuauc

SEQ ID NO: 1153926 - RNA, 19 nt, Artificial Sequence
  Description of Artificial Sequence: Synthetic oligonucleotide
gguacagaccagggucaau

SEQ ID NO: 1153927 - RNA, 19 nt, Artificial Sequence
  Description of Artificial Sequence: Synthetic oligonucleotide
cguccugaacugcagcuau

SEQ ID NO: 1153928 - RNA, 19 nt, Artificial Sequence
  Description of Artificial Sequence: Synthetic oligonucleotide
gggcugcuaccagcuggac

SEQ ID NO: 1153929 - RNA, 19 nt, Artificial Sequence
  Description of Artificial Sequence: Synthetic oligonucleotide
cccugcaaauucaguuuau

SEQ ID NO: 1153930 - RNA, 19 nt, Artificial Sequence
  Description of Artificial Sequence: Synthetic oligonucleotide
ccugaaccuuaagcucgga

SEQ ID NO: 1153931 - RNA, 19 nt, Artificial Sequence
  Description of Artificial Sequence: Synthetic oligonucleotide
cgucucaagcaggcuaucu

SEQ ID NO: 1153932 - RNA, 19 nt, Artificial Sequence
  Description of Artificial Sequence: Synthetic oligonucleotide
gcgggccaugugugccauc

SEQ ID NO: 1153933 - RNA, 19 nt, Artificial Sequence
  Description of Artificial Sequence: Synthetic oligonucleotide
cuguaccgcccggggcugu

SEQ ID NO: 1153934 - RNA, 19 nt, Artificial Sequence
  Description of Artificial Sequence: Synthetic oligonucleotide
uuuauuuggaacagggagg

SEQ ID NO: 1153935 - RNA, 19 nt, Artificial Sequence
  Description of Artificial Sequence: Synthetic oligonucleotide
gauguuacagcucaggccc

SEQ ID NO: 1153936 - RNA, 19 nt, Artificial Sequence
  Description of Artificial Sequence: Synthetic oligonucleotide
uugcauguggagaagaugg

SEQ ID NO: 1153937 - RNA, 19 nt, Artificial Sequence
  Description of Artificial Sequence: Synthetic oligonucleotide
uauacuggaacuuccaaag

SEQ ID NO: 1153938 - RNA, 19 nt, Artificial Sequence
  Description of Artificial Sequence: Synthetic oligonucleotide
aagcuauccacaccgaugg

SEQ ID NO: 1153939 - RNA, 19 nt, Artificial Sequence
  Description of Artificial Sequence: Synthetic oligonucleotide
aaggccaauguucagcucg

SEQ ID NO: 1153940 - RNA, 19 nt, Artificial Sequence
  Description of Artificial Sequence: Synthetic oligonucleotide
uguggggugaucuugauug

SEQ ID NO: 1153941 - RNA, 19 nt, Artificial Sequence
  Description of Artificial Sequence: Synthetic oligonucleotide
cuuacuuaucucuaugucc

SEQ ID NO: 1153942 - RNA, 19 nt, Artificial Sequence
  Description of Artificial Sequence: Synthetic oligonucleotide
agauguuacagcucaggcc

SEQ ID NO: 1153943 - RNA, 19 nt, Artificial Sequence
  Description of Artificial Sequence: Synthetic oligonucleotide
gaggguuuagcauauacug

SEQ ID NO: 1153944 - RNA, 19 nt, Artificial Sequence
  Description of Artificial Sequence: Synthetic oligonucleotide
uaggcaacgggccagauca

SEQ ID NO: 1153945 - RNA, 19 nt, Artificial Sequence
  Description of Artificial Sequence: Synthetic oligonucleotide
uuacagauguuacagcuca

SEQ ID NO: 1153946 - RNA, 19 nt, Artificial Sequence
  Description of Artificial Sequence: Synthetic oligonucleotide
aaauucucaccuucauaac

SEQ ID NO: 1153947 - RNA, 19 nt, Artificial Sequence
  Description of Artificial Sequence: Synthetic oligonucleotide
uauaugugccccaucaucu

SEQ ID NO: 1153948 - RNA, 19 nt, Artificial Sequence
  Description of Artificial Sequence: Synthetic oligonucleotide
auauaugugccccaucauc

SEQ ID NO: 1153949 - RNA, 19 nt, Artificial Sequence
  Description of Artificial Sequence: Synthetic oligonucleotide
ugaguggacaccaaugucu

SEQ ID NO: 1153950 - RNA, 19 nt, Artificial Sequence
  Description of Artificial Sequence: Synthetic oligonucleotide
aaucgaagcuauccacacc

SEQ ID NO: 1153951 - RNA, 19 nt, Artificial Sequence
  Description of Artificial Sequence: Synthetic oligonucleotide
acaaguaucucuaugaggu

SEQ ID NO: 1153952 - RNA, 19 nt, Artificial Sequence
  Description of Artificial Sequence: Synthetic oligonucleotide
gacccacucagcuagagag

SEQ ID NO: 1153953 - RNA, 19 nt, Artificial Sequence
  Description of Artificial Sequence: Synthetic oligonucleotide
aaccgucaaagacucuucc

SEQ ID NO: 1153954 - RNA, 19 nt, Artificial Sequence
  Description of Artificial Sequence: Synthetic oligonucleotide
ucaacuugcauggggaggg

SEQ ID NO: 1153955 - RNA, 19 nt, Artificial Sequence
  Description of Artificial Sequence: Synthetic oligonucleotide
ucuagaauccagccuacug

SEQ ID NO: 1153956 - RNA, 19 nt, Artificial Sequence
  Description of Artificial Sequence: Synthetic oligonucleotide
ugagcaaucgaagcuaucc

SEQ ID NO: 1153957 - RNA, 19 nt, Artificial Sequence
  Description of Artificial Sequence: Synthetic oligonucleotide
gaucucaaccgucaaagac

SEQ ID NO: 1153958 - RNA, 19 nt, Artificial Sequence
  Description of Artificial Sequence: Synthetic oligonucleotide
ugugaguggacaccaaugu

SEQ ID NO: 1153959 - RNA, 19 nt, Artificial Sequence
  Description of Artificial Sequence: Synthetic oligonucleotide
uuugagaggggauuggauc

SEQ ID NO: 1153960 - RNA, 19 nt, Artificial Sequence
  Description of Artificial Sequence: Synthetic oligonucleotide
aucuuguccggacauacag

SEQ ID NO: 1153961 - RNA, 19 nt, Artificial Sequence
  Description of Artificial Sequence: Synthetic oligonucleotide
uuuaguuuucggaucuugu

SEQ ID NO: 1153962 - RNA, 19 nt, Artificial Sequence
  Description of Artificial Sequence: Synthetic oligonucleotide
cagcuagagagacagagcc

SEQ ID NO: 1153963 - RNA, 19 nt, Artificial Sequence
  Description of Artificial Sequence: Synthetic oligonucleotide
ucgaucgagauacaccacc

SEQ ID NO: 1153964 - RNA, 19 nt, Artificial Sequence
  Description of Artificial Sequence: Synthetic oligonucleotide
guagauggaaacaacgccc

SEQ ID NO: 1153965 - RNA, 19 nt, Artificial Sequence
  Description of Artificial Sequence: Synthetic oligonucleotide
auuggaucgcucuucuguc

SEQ ID NO: 1153966 - RNA, 19 nt, Artificial Sequence
  Description of Artificial Sequence: Synthetic oligonucleotide
ugguugauaguacaaguau

SEQ ID NO: 1153967 - RNA, 19 nt, Artificial Sequence
  Description of Artificial Sequence: Synthetic oligonucleotide
auagaucuggcccaucuca

SEQ ID NO: 1153968 - RNA, 19 nt, Artificial Sequence
  Description of Artificial Sequence: Synthetic oligonucleotide
ucuuguccggacauacagg

SEQ ID NO: 1153969 - RNA, 19 nt, Artificial Sequence
  Description of Artificial Sequence: Synthetic oligonucleotide
aagcuguagguauucugag

SEQ ID NO: 1153970 - RNA, 19 nt, Artificial Sequence
  Description of Artificial Sequence: Synthetic oligonucleotide
auuuucuugggguaucacu

SEQ ID NO: 1153971 - RNA, 19 nt, Artificial Sequence
  Description of Artificial Sequence: Synthetic oligonucleotide
uagaauccagccuacugug

SEQ ID NO: 1153972 - RNA, 19 nt, Artificial Sequence
  Description of Artificial Sequence: Synthetic oligonucleotide
uauuccuaccacuuccagc

SEQ ID NO: 1153973 - RNA, 19 nt, Artificial Sequence
  Description of Artificial Sequence: Synthetic oligonucleotide
ucaggucgaacaccugucg

SEQ ID NO: 1153974 - RNA, 19 nt, Artificial Sequence
  Description of Artificial Sequence: Synthetic oligonucleotide
acauacaggacccucgggu

SEQ ID NO: 1153975 - RNA, 19 nt, Artificial Sequence
  Description of Artificial Sequence: Synthetic oligonucleotide
gaaacaacgcccacgaauc

SEQ ID NO: 1153976 - RNA, 19 nt, Artificial Sequence
  Description of Artificial Sequence: Synthetic oligonucleotide
aaccugagcccauacucag

SEQ ID NO: 1153977 - RNA, 19 nt, Artificial Sequence
  Description of Artificial Sequence: Synthetic oligonucleotide
uuaguuuucggaucuuguc

SEQ ID NO: 1153978 - RNA, 19 nt, Artificial Sequence
  Description of Artificial Sequence: Synthetic oligonucleotide
ugggauauucaguacugca

SEQ ID NO: 1153979 - RNA, 19 nt, Artificial Sequence
  Description of Artificial Sequence: Synthetic oligonucleotide
ucgagauacaccaccuuac

SEQ ID NO: 1153980 - RNA, 19 nt, Artificial Sequence
  Description of Artificial Sequence: Synthetic oligonucleotide
guacaaguaucucuaugag

SEQ ID NO: 1153981 - RNA, 19 nt, Artificial Sequence
  Description of Artificial Sequence: Synthetic oligonucleotide
uuccagggaccaucgaucg

SEQ ID NO: 1153982 - RNA, 19 nt, Artificial Sequence
  Description of Artificial Sequence: Synthetic oligonucleotide
cauaagcauaggcaucugg

SEQ ID NO: 1153983 - RNA, 19 nt, Artificial Sequence
  Description of Artificial Sequence: Synthetic oligonucleotide
gaauugaggaaugucucug

SEQ ID NO: 1153984 - RNA, 19 nt, Artificial Sequence
  Description of Artificial Sequence: Synthetic oligonucleotide
uugaugauuugagagggga

SEQ ID NO: 1153985 - RNA, 19 nt, Artificial Sequence
  Description of Artificial Sequence: Synthetic oligonucleotide
gagucugguauagaucugg

SEQ ID NO: 1153986 - RNA, 19 nt, Artificial Sequence
  Description of Artificial Sequence: Synthetic oligonucleotide
ucucaaccgucaaagacuc

SEQ ID NO: 1153987 - RNA, 19 nt, Artificial Sequence
  Description of Artificial Sequence: Synthetic oligonucleotide
cagaucucaaccgucaaag

SEQ ID NO: 1153988 - RNA, 19 nt, Artificial Sequence
  Description of Artificial Sequence: Synthetic oligonucleotide
guaguuauugaugauuuga

SEQ ID NO: 1153989 - RNA, 19 nt, Artificial Sequence
  Description of Artificial Sequence: Synthetic oligonucleotide
agaaucuuugccaaauucu

SEQ ID NO: 1153990 - RNA, 19 nt, Artificial Sequence
  Description of Artificial Sequence: Synthetic oligonucleotide
cuugggauauucaguacug

SEQ ID NO: 1153991 - RNA, 19 nt, Artificial Sequence
  Description of Artificial Sequence: Synthetic oligonucleotide
aucucuaugaggucuccug

SEQ ID NO: 1153992 - RNA, 19 nt, Artificial Sequence
  Description of Artificial Sequence: Synthetic oligonucleotide
uucuugggguaucacuucc

SEQ ID NO: 1153993 - RNA, 19 nt, Artificial Sequence
  Description of Artificial Sequence: Synthetic oligonucleotide
ucgaggguuuagcauauac

SEQ ID NO: 1153994 - RNA, 19 nt, Artificial Sequence
  Description of Artificial Sequence: Synthetic oligonucleotide
ggcacaaccggcaaguugg

SEQ ID NO: 1153995 - RNA, 19 nt, Artificial Sequence
  Description of Artificial Sequence: Synthetic oligonucleotide
gaagcuauccacaccgaug

SEQ ID NO: 1153996 - RNA, 19 nt, Artificial Sequence
  Description of Artificial Sequence: Synthetic oligonucleotide
ucuguugucuuuaguuuuc

SEQ ID NO: 1153997 - RNA, 19 nt, Artificial Sequence
  Description of Artificial Sequence: Synthetic oligonucleotide
agcaacggcacagugguag

SEQ ID NO: 1153998 - RNA, 19 nt, Artificial Sequence
  Description of Artificial Sequence: Synthetic oligonucleotide
ugauuguacaggugccugc

SEQ ID NO: 1153999 - RNA, 19 nt, Artificial Sequence
  Description of Artificial Sequence: Synthetic oligonucleotide
auaggcaucugguucuugu

SEQ ID NO: 1154000 - RNA, 19 nt, Artificial Sequence
  Description of Artificial Sequence: Synthetic oligonucleotide
gguuuucaggauaucaggg

SEQ ID NO: 1154001 - RNA, 19 nt, Artificial Sequence
  Description of Artificial Sequence: Synthetic oligonucleotide
aauacccggaauugaggaa

SEQ ID NO: 1154002 - RNA, 19 nt, Artificial Sequence
  Description of Artificial Sequence: Synthetic oligonucleotide
caaucgaagcuauccacac

SEQ ID NO: 1154003 - RNA, 19 nt, Artificial Sequence
  Description of Artificial Sequence: Synthetic oligonucleotide
ugucguuuauuuggaacag

SEQ ID NO: 1154004 - RNA, 19 nt, Artificial Sequence
  Description of Artificial Sequence: Synthetic oligonucleotide
gucgcaaauuccaaguacc

SEQ ID NO: 1154005 - RNA, 19 nt, Artificial Sequence
  Description of Artificial Sequence: Synthetic oligonucleotide
gauuggaucgcucuucugu

SEQ ID NO: 1154006 - RNA, 19 nt, Artificial Sequence
  Description of Artificial Sequence: Synthetic oligonucleotide
ucgcaaauuccaaguacca

SEQ ID NO: 1154007 - RNA, 19 nt, Artificial Sequence
  Description of Artificial Sequence: Synthetic oligonucleotide
ugcggacuucacaaggcag

SEQ ID NO: 1154008 - RNA, 19 nt, Artificial Sequence
  Description of Artificial Sequence: Synthetic oligonucleotide
guuaggaacagggucaauc

SEQ ID NO: 1154009 - RNA, 19 nt, Artificial Sequence
  Description of Artificial Sequence: Synthetic oligonucleotide
gaugucgcaaauuccaagu

SEQ ID NO: 1154010 - RNA, 19 nt, Artificial Sequence
  Description of Artificial Sequence: Synthetic oligonucleotide
uugggguaucacuuccagg

SEQ ID NO: 1154011 - RNA, 19 nt, Artificial Sequence
  Description of Artificial Sequence: Synthetic oligonucleotide
uuccccaucguaggcaacg

SEQ ID NO: 1154012 - RNA, 19 nt, Artificial Sequence
  Description of Artificial Sequence: Synthetic oligonucleotide
cuuguccggacauacagga

SEQ ID NO: 1154013 - RNA, 19 nt, Artificial Sequence
  Description of Artificial Sequence: Synthetic oligonucleotide
ggaccaucgaucgagauac

SEQ ID NO: 1154014 - RNA, 19 nt, Artificial Sequence
  Description of Artificial Sequence: Synthetic oligonucleotide
aacuggugagcaaucgaag

SEQ ID NO: 1154015 - RNA, 19 nt, Artificial Sequence
  Description of Artificial Sequence: Synthetic oligonucleotide
accacacaccaauacccgg

SEQ ID NO: 1154016 - RNA, 19 nt, Artificial Sequence
  Description of Artificial Sequence: Synthetic oligonucleotide
cuucauaaccccuucccca

SEQ ID NO: 1154017 - RNA, 19 nt, Artificial Sequence
  Description of Artificial Sequence: Synthetic oligonucleotide
uccucuauuccuaccacuu

SEQ ID NO: 1154018 - RNA, 19 nt, Artificial Sequence
  Description of Artificial Sequence: Synthetic oligonucleotide
cuggagaaucucuuggguc

SEQ ID NO: 1154019 - RNA, 19 nt, Artificial Sequence
  Description of Artificial Sequence: Synthetic oligonucleotide
ccuagugccugguugauag

SEQ ID NO: 1154020 - RNA, 19 nt, Artificial Sequence
  Description of Artificial Sequence: Synthetic oligonucleotide
caauacccggaauugagga

SEQ ID NO: 1154021 - RNA, 19 nt, Artificial Sequence
  Description of Artificial Sequence: Synthetic oligonucleotide
uuucuagaauccagccuac

SEQ ID NO: 1154022 - RNA, 19 nt, Artificial Sequence
  Description of Artificial Sequence: Synthetic oligonucleotide
ucagggucugugauuauuu

SEQ ID NO: 1154023 - RNA, 19 nt, Artificial Sequence
  Description of Artificial Sequence: Synthetic oligonucleotide
ucaaccgucaaagacucuu

SEQ ID NO: 1154024 - RNA, 19 nt, Artificial Sequence
  Description of Artificial Sequence: Synthetic oligonucleotide
uucaggucgaacaccuguc

SEQ ID NO: 1154025 - RNA, 19 nt, Artificial Sequence
  Description of Artificial Sequence: Synthetic oligonucleotide
accaucgaucgagauacac

SEQ ID NO: 1154026 - RNA, 19 nt, Artificial Sequence
  Description of Artificial Sequence: Synthetic oligonucleotide
uucauaaccccuuccccau

SEQ ID NO: 1154027 - RNA, 19 nt, Artificial Sequence
  Description of Artificial Sequence: Synthetic oligonucleotide
ggagaaguaguuauugaug

SEQ ID NO: 1154028 - RNA, 19 nt, Artificial Sequence
  Description of Artificial Sequence: Synthetic oligonucleotide
cuugggguaucacuuccag

SEQ ID NO: 1154029 - RNA, 19 nt, Artificial Sequence
  Description of Artificial Sequence: Synthetic oligonucleotide
guugauaguacaaguaucu

SEQ ID NO: 1154030 - RNA, 19 nt, Artificial Sequence
  Description of Artificial Sequence: Synthetic oligonucleotide
gucuccauauaugugcccc

SEQ ID NO: 1154031 - RNA, 19 nt, Artificial Sequence
  Description of Artificial Sequence: Synthetic oligonucleotide
cacacaugugaguggacac

SEQ ID NO: 1154032 - RNA, 19 nt, Artificial Sequence
  Description of Artificial Sequence: Synthetic oligonucleotide
agagucauauccauuccca

SEQ ID NO: 1154033 - RNA, 19 nt, Artificial Sequence
  Description of Artificial Sequence: Synthetic oligonucleotide
aguacugcaaugccuucaa

SEQ ID NO: 1154034 - RNA, 19 nt, Artificial Sequence
  Description of Artificial Sequence: Synthetic oligonucleotide
ugcauguggagaagaugga

SEQ ID NO: 1154035 - RNA, 19 nt, Artificial Sequence
  Description of Artificial Sequence: Synthetic oligonucleotide
uccuaccacuuccagccgc

SEQ ID NO: 1154036 - RNA, 19 nt, Artificial Sequence
  Description of Artificial Sequence: Synthetic oligonucleotide
gaucauucccagugcccag

SEQ ID NO: 1154037 - RNA, 19 nt, Artificial Sequence
  Description of Artificial Sequence: Synthetic oligonucleotide
cuauccacaccgauggaga

SEQ ID NO: 1154038 - RNA, 19 nt, Artificial Sequence
  Description of Artificial Sequence: Synthetic oligonucleotide
ucggguagauggaaacaac

SEQ ID NO: 1154039 - RNA, 19 nt, Artificial Sequence
  Description of Artificial Sequence: Synthetic oligonucleotide
cagaagcacaagcaacggc

SEQ ID NO: 1154040 - RNA, 19 nt, Artificial Sequence
  Description of Artificial Sequence: Synthetic oligonucleotide
aagcacaagcaacggcaca

SEQ ID NO: 1154041 - RNA, 19 nt, Artificial Sequence
  Description of Artificial Sequence: Synthetic oligonucleotide
uuucuugggguaucacuuc

SEQ ID NO: 1154042 - RNA, 19 nt, Artificial Sequence
  Description of Artificial Sequence: Synthetic oligonucleotide
acaccaauacccggaauug

SEQ ID NO: 1154043 - RNA, 19 nt, Artificial Sequence
  Description of Artificial Sequence: Synthetic oligonucleotide
agauugacaaagacuagaa

SEQ ID NO: 1154044 - RNA, 19 nt, Artificial Sequence
  Description of Artificial Sequence: Synthetic oligonucleotide
cagaagguaacccucagcu

SEQ ID NO: 1154045 - RNA, 19 nt, Artificial Sequence
  Description of Artificial Sequence: Synthetic oligonucleotide
agggacuggucacugagau

SEQ ID NO: 1154046 - RNA, 19 nt, Artificial Sequence
  Description of Artificial Sequence: Synthetic oligonucleotide
cgaaucaccagccuccucg

SEQ ID NO: 1154047 - RNA, 19 nt, Artificial Sequence
  Description of Artificial Sequence: Synthetic oligonucleotide
guagacccagcccggaccc

SEQ ID NO: 1154048 - RNA, 19 nt, Artificial Sequence
  Description of Artificial Sequence: Synthetic oligonucleotide
ugcaugcuugggauauuca

SEQ ID NO: 1154049 - RNA, 19 nt, Artificial Sequence
  Description of Artificial Sequence: Synthetic oligonucleotide
aacgcccacgaaucaccag

SEQ ID NO: 1154050 - RNA, 19 nt, Artificial Sequence
  Description of Artificial Sequence: Synthetic oligonucleotide
uccggaaugugaucucgga

SEQ ID NO: 1154051 - RNA, 19 nt, Artificial Sequence
  Description of Artificial Sequence: Synthetic oligonucleotide
uugggauauucaguacugc

SEQ ID NO: 1154052 - RNA, 19 nt, Artificial Sequence
  Description of Artificial Sequence: Synthetic oligonucleotide
gacuagaagugggugggug

SEQ ID NO: 1154053 - RNA, 19 nt, Artificial Sequence
  Description of Artificial Sequence: Synthetic oligonucleotide
cuauuccuaccacuuccag

SEQ ID NO: 1154054 - RNA, 19 nt, Artificial Sequence
  Description of Artificial Sequence: Synthetic oligonucleotide
agaaguggguggguguuag

SEQ ID NO: 1154055 - RNA, 19 nt, Artificial Sequence
  Description of Artificial Sequence: Synthetic oligonucleotide
cuagaauccagccuacugu

SEQ ID NO: 1154056 - RNA, 19 nt, Artificial Sequence
  Description of Artificial Sequence: Synthetic oligonucleotide
accgucaaagacucuucca

SEQ ID NO: 1154057 - RNA, 19 nt, Artificial Sequence
  Description of Artificial Sequence: Synthetic oligonucleotide
agaucucaaccgucaaaga

SEQ ID NO: 1154058 - RNA, 19 nt, Artificial Sequence
  Description of Artificial Sequence: Synthetic oligonucleotide
gucguuuauuuggaacagg

SEQ ID NO: 1154059 - RNA, 19 nt, Artificial Sequence
  Description of Artificial Sequence: Synthetic oligonucleotide
cagauugacaaagacuaga

SEQ ID NO: 1154060 - RNA, 19 nt, Artificial Sequence
  Description of Artificial Sequence: Synthetic oligonucleotide
gguguuaggaacaggguca

SEQ ID NO: 1154061 - RNA, 19 nt, Artificial Sequence
  Description of Artificial Sequence: Synthetic oligonucleotide
augugaguggacaccaaug

SEQ ID NO: 1154062 - RNA, 19 nt, Artificial Sequence
  Description of Artificial Sequence: Synthetic oligonucleotide
auacccggaauugaggaau

SEQ ID NO: 1154063 - RNA, 19 nt, Artificial Sequence
  Description of Artificial Sequence: Synthetic oligonucleotide
uguuaucugcugucguuua

SEQ ID NO: 1154064 - RNA, 19 nt, Artificial Sequence
  Description of Artificial Sequence: Synthetic oligonucleotide
acagaucucaaccgucaaa

SEQ ID NO: 1154065 - RNA, 19 nt, Artificial Sequence
  Description of Artificial Sequence: Synthetic oligonucleotide
uuccuaccacuuccagccg

SEQ ID NO: 1154066 - RNA, 19 nt, Artificial Sequence
  Description of Artificial Sequence: Synthetic oligonucleotide
uuuugugguccggaaugug

SEQ ID NO: 1154067 - RNA, 19 nt, Artificial Sequence
  Description of Artificial Sequence: Synthetic oligonucleotide
caccuuacuuaucucuaug

SEQ ID NO: 1154068 - RNA, 19 nt, Artificial Sequence
  Description of Artificial Sequence: Synthetic oligonucleotide
uuggagccaccaugcaugc

SEQ ID NO: 1154069 - RNA, 19 nt, Artificial Sequence
  Description of Artificial Sequence: Synthetic oligonucleotide
ccaucgaucgagauacacc

SEQ ID NO: 1154070 - RNA, 19 nt, Artificial Sequence
  Description of Artificial Sequence: Synthetic oligonucleotide
caagcaacggcacaguggu

SEQ ID NO: 1154071 - RNA, 19 nt, Artificial Sequence
  Description of Artificial Sequence: Synthetic oligonucleotide
guguacuuacagauguuac

SEQ ID NO: 1154072 - RNA, 19 nt, Artificial Sequence
  Description of Artificial Sequence: Synthetic oligonucleotide
uacccggaauugaggaaug

SEQ ID NO: 1154073 - RNA, 19 nt, Artificial Sequence
  Description of Artificial Sequence: Synthetic oligonucleotide
cuugggucuccauauaugu

SEQ ID NO: 1154074 - RNA, 19 nt, Artificial Sequence
  Description of Artificial Sequence: Synthetic oligonucleotide
uaugugccccaucaucuuu

SEQ ID NO: 1154075 - RNA, 19 nt, Artificial Sequence
  Description of Artificial Sequence: Synthetic oligonucleotide
ugucgaggguuuagcauau

SEQ ID NO: 1154076 - RNA, 19 nt, Artificial Sequence
  Description of Artificial Sequence: Synthetic oligonucleotide
ggauacuucucucgcauga

SEQ ID NO: 1154077 - RNA, 19 nt, Artificial Sequence
  Description of Artificial Sequence: Synthetic oligonucleotide
gaagcacaagcaacggcac

SEQ ID NO: 1154078 - RNA, 19 nt, Artificial Sequence
  Description of Artificial Sequence: Synthetic oligonucleotide
cuguugucuuuaguuuucg

SEQ ID NO: 1154079 - RNA, 19 nt, Artificial Sequence
  Description of Artificial Sequence: Synthetic oligonucleotide
aggauacuucucucgcaug

SEQ ID NO: 1154080 - RNA, 19 nt, Artificial Sequence
  Description of Artificial Sequence: Synthetic oligonucleotide
ccgucaaagacucuuccag

SEQ ID NO: 1154081 - RNA, 19 nt, Artificial Sequence
  Description of Artificial Sequence: Synthetic oligonucleotide
ccaauacccggaauugagg

SEQ ID NO: 1154082 - RNA, 19 nt, Artificial Sequence
  Description of Artificial Sequence: Synthetic oligonucleotide
ggguagauggaaacaacgc

SEQ ID NO: 1154083 - RNA, 19 nt, Artificial Sequence
  Description of Artificial Sequence: Synthetic oligonucleotide
cgaagagccucaauggugc

SEQ ID NO: 1154084 - RNA, 19 nt, Artificial Sequence
  Description of Artificial Sequence: Synthetic oligonucleotide
gguagacccagcccggacc

SEQ ID NO: 1154085 - RNA, 19 nt, Artificial Sequence
  Description of Artificial Sequence: Synthetic oligonucleotide
uccauauaugugccccauc

SEQ ID NO: 1154086 - RNA, 19 nt, Artificial Sequence
  Description of Artificial Sequence: Synthetic oligonucleotide
cugguugauaguacaagua

SEQ ID NO: 1154087 - RNA, 19 nt, Artificial Sequence
  Description of Artificial Sequence: Synthetic oligonucleotide
cauccucuauuccuaccac

SEQ ID NO: 1154088 - RNA, 19 nt, Artificial Sequence
  Description of Artificial Sequence: Synthetic oligonucleotide
ugucuugcacacugguuuu

SEQ ID NO: 1154089 - RNA, 19 nt, Artificial Sequence
  Description of Artificial Sequence: Synthetic oligonucleotide
gcuauccacaccgauggag

SEQ ID NO: 1154090 - RNA, 19 nt, Artificial Sequence
  Description of Artificial Sequence: Synthetic oligonucleotide
accugucgaggguuuagca

SEQ ID NO: 1154091 - RNA, 19 nt, Artificial Sequence
  Description of Artificial Sequence: Synthetic oligonucleotide
aggccaauguucagcucgc

SEQ ID NO: 1154092 - RNA, 19 nt, Artificial Sequence
  Description of Artificial Sequence: Synthetic oligonucleotide
gguaucacuuccagggacc

SEQ ID NO: 1154093 - RNA, 19 nt, Artificial Sequence
  Description of Artificial Sequence: Synthetic oligonucleotide
aagguaacccucagcucca

SEQ ID NO: 1154094 - RNA, 19 nt, Artificial Sequence
  Description of Artificial Sequence: Synthetic oligonucleotide
caaccgucaaagacucuuc

SEQ ID NO: 1154095 - RNA, 19 nt, Artificial Sequence
  Description of Artificial Sequence: Synthetic oligonucleotide
ucgaagcuauccacaccga

SEQ ID NO: 1154096 - RNA, 19 nt, Artificial Sequence
  Description of Artificial Sequence: Synthetic oligonucleotide
cugucgaggguuuagcaua

SEQ ID NO: 1154097 - RNA, 19 nt, Artificial Sequence
  Description of Artificial Sequence: Synthetic oligonucleotide
cuuuccgagacuuggcaua

SEQ ID NO: 1154098 - RNA, 19 nt, Artificial Sequence
  Description of Artificial Sequence: Synthetic oligonucleotide
agccuacugugccgucucc

SEQ ID NO: 1154099 - RNA, 19 nt, Artificial Sequence
  Description of Artificial Sequence: Synthetic oligonucleotide
aucguaggcaacgggccag

SEQ ID NO: 1154100 - RNA, 19 nt, Artificial Sequence
  Description of Artificial Sequence: Synthetic oligonucleotide
agcucgcacagguugcagu

SEQ ID NO: 1154101 - RNA, 19 nt, Artificial Sequence
  Description of Artificial Sequence: Synthetic oligonucleotide
acccucugucccugcuucc

SEQ ID NO: 1154102 - RNA, 19 nt, Artificial Sequence
  Description of Artificial Sequence: Synthetic oligonucleotide
augucgcaaauuccaagua

SEQ ID NO: 1154103 - RNA, 19 nt, Artificial Sequence
  Description of Artificial Sequence: Synthetic oligonucleotide
ggucugugauuauuuuggc

SEQ ID NO: 1154104 - RNA, 19 nt, Artificial Sequence
  Description of Artificial Sequence: Synthetic oligonucleotide
ggaaacaacgcccacgaau

SEQ ID NO: 1154105 - RNA, 19 nt, Artificial Sequence
  Description of Artificial Sequence: Synthetic oligonucleotide
uagugccugguugauagua

SEQ ID NO: 1154106 - RNA, 19 nt, Artificial Sequence
  Description of Artificial Sequence: Synthetic oligonucleotide
ccaauguucagcucgcaca

SEQ ID NO: 1154107 - RNA, 19 nt, Artificial Sequence
  Description of Artificial Sequence: Synthetic oligonucleotide
cuucucaggauacuucucu

SEQ ID NO: 1154108 - RNA, 19 nt, Artificial Sequence
  Description of Artificial Sequence: Synthetic oligonucleotide
ccaucguaggcaacgggcc

SEQ ID NO: 1154109 - RNA, 19 nt, Artificial Sequence
  Description of Artificial Sequence: Synthetic oligonucleotide
gauaucagggucugugauu

SEQ ID NO: 1154110 - RNA, 19 nt, Artificial Sequence
  Description of Artificial Sequence: Synthetic oligonucleotide
ugugguccggaaugugauc

SEQ ID NO: 1154111 - RNA, 19 nt, Artificial Sequence
  Description of Artificial Sequence: Synthetic oligonucleotide
auaugugccccaucaucuu

SEQ ID NO: 1154112 - RNA, 19 nt, Artificial Sequence
  Description of Artificial Sequence: Synthetic oligonucleotide
aucgaucgagauacaccac

SEQ ID NO: 1154113 - RNA, 19 nt, Artificial Sequence
  Description of Artificial Sequence: Synthetic oligonucleotide
gguugcaguagacuggucu

SEQ ID NO: 1154114 - RNA, 19 nt, Artificial Sequence
  Description of Artificial Sequence: Synthetic oligonucleotide
gcggacuucacaaggcagg

SEQ ID NO: 1154115 - RNA, 19 nt, Artificial Sequence
  Description of Artificial Sequence: Synthetic oligonucleotide
aaucaccagccuccucgaa

SEQ ID NO: 1154116 - RNA, 19 nt, Artificial Sequence
  Description of Artificial Sequence: Synthetic oligonucleotide
guacugcaaugccuucaag

SEQ ID NO: 1154117 - RNA, 19 nt, Artificial Sequence
  Description of Artificial Sequence: Synthetic oligonucleotide
ggaucuuguccggacauac

SEQ ID NO: 1154118 - RNA, 19 nt, Artificial Sequence
  Description of Artificial Sequence: Synthetic oligonucleotide
ggauauucaguacugcaau

SEQ ID NO: 1154119 - RNA, 19 nt, Artificial Sequence
  Description of Artificial Sequence: Synthetic oligonucleotide
gguccggaaugugaucucg

SEQ ID NO: 1154120 - RNA, 19 nt, Artificial Sequence
  Description of Artificial Sequence: Synthetic oligonucleotide
guccggaaugugaucucgg

SEQ ID NO: 1154121 - RNA, 19 nt, Artificial Sequence
  Description of Artificial Sequence: Synthetic oligonucleotide
ggucaauccgaagagccuc

SEQ ID NO: 1154122 - RNA, 19 nt, Artificial Sequence
  Description of Artificial Sequence: Synthetic oligonucleotide
guaggcaacgggccagauc

SEQ ID NO: 1154123 - RNA, 19 nt, Artificial Sequence
  Description of Artificial Sequence: Synthetic oligonucleotide
cugccuagugccugguuga

SEQ ID NO: 1154124 - RNA, 19 nt, Artificial Sequence
  Description of Artificial Sequence: Synthetic oligonucleotide
gaaugugaucucggagcac

SEQ ID NO: 1154125 - RNA, 19 nt, Artificial Sequence
  Description of Artificial Sequence: Synthetic oligonucleotide
cauguggagaagauggauu

SEQ ID NO: 1154126 - RNA, 19 nt, Artificial Sequence
  Description of Artificial Sequence: Synthetic oligonucleotide
uggaaacaacgcccacgaa

SEQ ID NO: 1154127 - RNA, 19 nt, Artificial Sequence
  Description of Artificial Sequence: Synthetic oligonucleotide
cucggguagauggaaacaa

SEQ ID NO: 1154128 - RNA, 19 nt, Artificial Sequence
  Description of Artificial Sequence: Synthetic oligonucleotide
gaucuuguccggacauaca

SEQ ID NO: 1154129 - RNA, 19 nt, Artificial Sequence
  Description of Artificial Sequence: Synthetic oligonucleotide
gugcggacuucacaaggca

SEQ ID NO: 1154130 - RNA, 19 nt, Artificial Sequence
  Description of Artificial Sequence: Synthetic oligonucleotide
cacuuggccagccgguguc

SEQ ID NO: 1154131 - RNA, 19 nt, Artificial Sequence
  Description of Artificial Sequence: Synthetic oligonucleotide
cccggacccacucagcuag

SEQ ID NO: 1154132 - RNA, 19 nt, Artificial Sequence
  Description of Artificial Sequence: Synthetic oligonucleotide
ggugcggacuucacaaggc

SEQ ID NO: 1154133 - RNA, 19 nt, Artificial Sequence
  Description of Artificial Sequence: Synthetic oligonucleotide
gcuugggauauucaguacu

SEQ ID NO: 1154134 - RNA, 19 nt, Artificial Sequence
  Description of Artificial Sequence: Synthetic oligonucleotide
ggaauugaggaaugucucu

SEQ ID NO: 1154135 - RNA, 19 nt, Artificial Sequence
  Description of Artificial Sequence: Synthetic oligonucleotide
gagauacaccaccuuacuu

SEQ ID NO: 1154136 - RNA, 19 nt, Artificial Sequence
  Description of Artificial Sequence: Synthetic oligonucleotide
gcaaucgaagcuauccaca

SEQ ID NO: 1154137 - RNA, 19 nt, Artificial Sequence
  Description of Artificial Sequence: Synthetic oligonucleotide
cacaccaauacccggaauu

SEQ ID NO: 1154138 - RNA, 19 nt, Artificial Sequence
  Description of Artificial Sequence: Synthetic oligonucleotide
agaggggauuggaucgcuc

SEQ ID NO: 1154139 - RNA, 19 nt, Artificial Sequence
  Description of Artificial Sequence: Synthetic oligonucleotide
cagaugucgcaaauuccaa

SEQ ID NO: 1154140 - RNA, 19 nt, Artificial Sequence
  Description of Artificial Sequence: Synthetic oligonucleotide
caccugucgaggguuuagc

SEQ ID NO: 1154141 - RNA, 19 nt, Artificial Sequence
  Description of Artificial Sequence: Synthetic oligonucleotide
cggacauacaggacccucg

SEQ ID NO: 1154142 - RNA, 19 nt, Artificial Sequence
  Description of Artificial Sequence: Synthetic oligonucleotide
uuccgagacuuggcauagg

SEQ ID NO: 1154143 - RNA, 19 nt, Artificial Sequence
  Description of Artificial Sequence: Synthetic oligonucleotide
gcaguagacuggucuggag

SEQ ID NO: 1154144 - RNA, 19 nt, Artificial Sequence
  Description of Artificial Sequence: Synthetic oligonucleotide
caucguaggcaacgggcca

SEQ ID NO: 1154145 - RNA, 19 nt, Artificial Sequence
  Description of Artificial Sequence: Synthetic oligonucleotide
agaaucgguuucagcucag

SEQ ID NO: 1154146 - RNA, 19 nt, Artificial Sequence
  Description of Artificial Sequence: Synthetic oligonucleotide
acuugcauggggaggguuu

SEQ ID NO: 1154147 - RNA, 19 nt, Artificial Sequence
  Description of Artificial Sequence: Synthetic oligonucleotide
gccaauguucagcucgcac

SEQ ID NO: 1154148 - RNA, 19 nt, Artificial Sequence
  Description of Artificial Sequence: Synthetic oligonucleotide
accaccuuacuuaucucua

SEQ ID NO: 1154149 - RNA, 19 nt, Artificial Sequence
  Description of Artificial Sequence: Synthetic oligonucleotide
ugguauagaucuggcccau

SEQ ID NO: 1154150 - RNA, 19 nt, Artificial Sequence
  Description of Artificial Sequence: Synthetic oligonucleotide
ccggaaugugaucucggag

SEQ ID NO: 1154151 - RNA, 19 nt, Artificial Sequence
  Description of Artificial Sequence: Synthetic oligonucleotide
gggucuccauauaugugcc

SEQ ID NO: 1154152 - RNA, 19 nt, Artificial Sequence
  Description of Artificial Sequence: Synthetic oligonucleotide
agggaccaucgaucgagau

SEQ ID NO: 1154153 - RNA, 19 nt, Artificial Sequence
  Description of Artificial Sequence: Synthetic oligonucleotide
agguuggagccaccaugca

SEQ ID NO: 1154154 - RNA, 19 nt, Artificial Sequence
  Description of Artificial Sequence: Synthetic oligonucleotide
ugguccggaaugugaucuc

SEQ ID NO: 1154155 - RNA, 19 nt, Artificial Sequence
  Description of Artificial Sequence: Synthetic oligonucleotide
uaucaccccagagguugga

SEQ ID NO: 1154156 - RNA, 19 nt, Artificial Sequence
  Description of Artificial Sequence: Synthetic oligonucleotide
caggucgaacaccugucga

SEQ ID NO: 1154157 - RNA, 19 nt, Artificial Sequence
  Description of Artificial Sequence: Synthetic oligonucleotide
cucucgcaugacguggaac

SEQ ID NO: 1154158 - RNA, 19 nt, Artificial Sequence
  Description of Artificial Sequence: Synthetic oligonucleotide
ucaauccgaagagccucaa

SEQ ID NO: 1154159 - RNA, 19 nt, Artificial Sequence
  Description of Artificial Sequence: Synthetic oligonucleotide
gauucagaugucgcaaauu

SEQ ID NO: 1154160 - RNA, 19 nt, Artificial Sequence
  Description of Artificial Sequence: Synthetic oligonucleotide
gugguccggaaugugaucu

SEQ ID NO: 1154161 - RNA, 19 nt, Artificial Sequence
  Description of Artificial Sequence: Synthetic oligonucleotide
acacaccaauacccggaau

SEQ ID NO: 1154162 - RNA, 19 nt, Artificial Sequence
  Description of Artificial Sequence: Synthetic oligonucleotide
agcuauccacaccgaugga

SEQ ID NO: 1154163 - RNA, 19 nt, Artificial Sequence
  Description of Artificial Sequence: Synthetic oligonucleotide
agcacccucugucccugcu

SEQ ID NO: 1154164 - RNA, 19 nt, Artificial Sequence
  Description of Artificial Sequence: Synthetic oligonucleotide
uucacaaggcagggccuuc

SEQ ID NO: 1154165 - RNA, 19 nt, Artificial Sequence
  Description of Artificial Sequence: Synthetic oligonucleotide
cucuaugaggucuccuggu

SEQ ID NO: 1154166 - RNA, 19 nt, Artificial Sequence
  Description of Artificial Sequence: Synthetic oligonucleotide
cccacgaaucaccagccuc

SEQ ID NO: 1154167 - RNA, 19 nt, Artificial Sequence
  Description of Artificial Sequence: Synthetic oligonucleotide
caacgcccacgaaucacca

SEQ ID NO: 1154168 - RNA, 19 nt, Artificial Sequence
  Description of Artificial Sequence: Synthetic oligonucleotide
caccgcaacaggaggcaca

SEQ ID NO: 1154169 - RNA, 19 nt, Artificial Sequence
  Description of Artificial Sequence: Synthetic oligonucleotide
ggauuggaucgcucuucug

SEQ ID NO: 1154170 - RNA, 19 nt, Artificial Sequence
  Description of Artificial Sequence: Synthetic oligonucleotide
aacaccugucgaggguuua

SEQ ID NO: 1154171 - RNA, 19 nt, Artificial Sequence
  Description of Artificial Sequence: Synthetic oligonucleotide
caggauacuucucucgcau

SEQ ID NO: 1154172 - RNA, 19 nt, Artificial Sequence
  Description of Artificial Sequence: Synthetic oligonucleotide
cacacaccaauacccggaa

SEQ ID NO: 1154173 - RNA, 19 nt, Artificial Sequence
  Description of Artificial Sequence: Synthetic oligonucleotide
ucguaggcaacgggccaga

SEQ ID NO: 1154174 - RNA, 19 nt, Artificial Sequence
  Description of Artificial Sequence: Synthetic oligonucleotide
cccucggguagauggaaac

SEQ ID NO: 1154175 - RNA, 19 nt, Artificial Sequence
  Description of Artificial Sequence: Synthetic oligonucleotide
caccaauacccggaauuga

SEQ ID NO: 1154176 - RNA, 19 nt, Artificial Sequence
  Description of Artificial Sequence: Synthetic oligonucleotide
cuuccccaucguaggcaac

SEQ ID NO: 1154177 - RNA, 19 nt, Artificial Sequence
  Description of Artificial Sequence: Synthetic oligonucleotide
caccaaugucuuuccgaga

SEQ ID NO: 1154178 - RNA, 19 nt, Artificial Sequence
  Description of Artificial Sequence: Synthetic oligonucleotide
caugugaguggacaccaau

SEQ ID NO: 1154179 - RNA, 19 nt, Artificial Sequence
  Description of Artificial Sequence: Synthetic oligonucleotide
aaccggcaaguuggcuuug

SEQ ID NO: 1154180 - RNA, 19 nt, Artificial Sequence
  Description of Artificial Sequence: Synthetic oligonucleotide
guguuaggaacagggucaa

SEQ ID NO: 1154181 - RNA, 19 nt, Artificial Sequence
  Description of Artificial Sequence: Synthetic oligonucleotide
ccacacaccaauacccgga

SEQ ID NO: 1154182 - RNA, 19 nt, Artificial Sequence
  Description of Artificial Sequence: Synthetic oligonucleotide
ccgagacuuggcauaggug

SEQ ID NO: 1154183 - RNA, 19 nt, Artificial Sequence
  Description of Artificial Sequence: Synthetic oligonucleotide
acguggaacuggugagcaa

SEQ ID NO: 1154184 - RNA, 19 nt, Artificial Sequence
  Description of Artificial Sequence: Synthetic oligonucleotide
gcaacgggccagaucauuc

SEQ ID NO: 1154185 - RNA, 19 nt, Artificial Sequence
  Description of Artificial Sequence: Synthetic oligonucleotide
gcccuguuugccaaggcca

SEQ ID NO: 1154186 - RNA, 19 nt, Artificial Sequence
  Description of Artificial Sequence: Synthetic oligonucleotide
gggguaucacuuccaggga

SEQ ID NO: 1154187 - RNA, 19 nt, Artificial Sequence
  Description of Artificial Sequence: Synthetic oligonucleotide
guacaggugccugcaucca

SEQ ID NO: 1154188 - RNA, 19 nt, Artificial Sequence
  Description of Artificial Sequence: Synthetic oligonucleotide
ggacccacucagcuagaga

SEQ ID NO: 1154189 - RNA, 19 nt, Artificial Sequence
  Description of Artificial Sequence: Synthetic oligonucleotide
gugagcaaucgaagcuauc

SEQ ID NO: 1154190 - RNA, 19 nt, Artificial Sequence
  Description of Artificial Sequence: Synthetic oligonucleotide
ugccuagugccugguugau

SEQ ID NO: 1154191 - RNA, 19 nt, Artificial Sequence
  Description of Artificial Sequence: Synthetic oligonucleotide
ccacacaugugaguggaca

SEQ ID NO: 1154192 - RNA, 19 nt, Artificial Sequence
  Description of Artificial Sequence: Synthetic oligonucleotide
uccagccuacugugccguc

SEQ ID NO: 1154193 - RNA, 19 nt, Artificial Sequence
  Description of Artificial Sequence: Synthetic oligonucleotide
ggauucagaugucgcaaau

SEQ ID NO: 1154194 - RNA, 19 nt, Artificial Sequence
  Description of Artificial Sequence: Synthetic oligonucleotide
gggacuggucacugagauc

SEQ ID NO: 1154195 - RNA, 19 nt, Artificial Sequence
  Description of Artificial Sequence: Synthetic oligonucleotide
gcaacggcacagugguaga

SEQ ID NO: 1154196 - RNA, 19 nt, Artificial Sequence
  Description of Artificial Sequence: Synthetic oligonucleotide
caaccggcaaguuggcuuu

SEQ ID NO: 1154197 - RNA, 19 nt, Artificial Sequence
  Description of Artificial Sequence: Synthetic oligonucleotide
cccggaauugaggaauguc

SEQ ID NO: 1154198 - RNA, 19 nt, Artificial Sequence
  Description of Artificial Sequence: Synthetic oligonucleotide
gcccauaagcauaggcauc

SEQ ID NO: 1154199 - RNA, 19 nt, Artificial Sequence
  Description of Artificial Sequence: Synthetic oligonucleotide
ggaccauccuucaggucga

SEQ ID NO: 1154200 - RNA, 19 nt, Artificial Sequence
  Description of Artificial Sequence: Synthetic oligonucleotide
gagaggggauuggaucgcu

SEQ ID NO: 1154201 - RNA, 19 nt, Artificial Sequence
  Description of Artificial Sequence: Synthetic oligonucleotide
cccauaagcauaggcaucu

SEQ ID NO: 1154202 - RNA, 19 nt, Artificial Sequence
  Description of Artificial Sequence: Synthetic oligonucleotide
acaggacccucggguagau

SEQ ID NO: 1154203 - RNA, 19 nt, Artificial Sequence
  Description of Artificial Sequence: Synthetic oligonucleotide
augugaucucggagcacuu

SEQ ID NO: 1154204 - RNA, 19 nt, Artificial Sequence
  Description of Artificial Sequence: Synthetic oligonucleotide
cagccuccucgaauccaca

SEQ ID NO: 1154205 - RNA, 19 nt, Artificial Sequence
  Description of Artificial Sequence: Synthetic oligonucleotide
gguauagaucuggcccauc

SEQ ID NO: 1154206 - RNA, 19 nt, Artificial Sequence
  Description of Artificial Sequence: Synthetic oligonucleotide
gaccaucgaucgagauaca

SEQ ID NO: 1154207 - RNA, 19 nt, Artificial Sequence
  Description of Artificial Sequence: Synthetic oligonucleotide
aagcaacggcacaguggua

SEQ ID NO: 1154208 - RNA, 19 nt, Artificial Sequence
  Description of Artificial Sequence: Synthetic oligonucleotide
cuagugccugguugauagu

SEQ ID NO: 1154209 - RNA, 19 nt, Artificial Sequence
  Description of Artificial Sequence: Synthetic oligonucleotide
ccggacauacaggacccuc

SEQ ID NO: 1154210 - RNA, 19 nt, Artificial Sequence
  Description of Artificial Sequence: Synthetic oligonucleotide
gcacaaccggcaaguuggc

SEQ ID NO: 1154211 - RNA, 19 nt, Artificial Sequence
  Description of Artificial Sequence: Synthetic oligonucleotide
ggugagcaaucgaagcuau

SEQ ID NO: 1154212 - RNA, 19 nt, Artificial Sequence
  Description of Artificial Sequence: Synthetic oligonucleotide
cuccauauaugugccccau

SEQ ID NO: 1154213 - RNA, 19 nt, Artificial Sequence
  Description of Artificial Sequence: Synthetic oligonucleotide
ccugucgaggguuuagcau

SEQ ID NO: 1154214 - RNA, 19 nt, Artificial Sequence
  Description of Artificial Sequence: Synthetic oligonucleotide
gccuacugugccgucucca

SEQ ID NO: 1154215 - RNA, 19 nt, Artificial Sequence
  Description of Artificial Sequence: Synthetic oligonucleotide
ccggcaaguuggcuuuguc

SEQ ID NO: 1154216 - RNA, 19 nt, Artificial Sequence
  Description of Artificial Sequence: Synthetic oligonucleotide
ccucggguagauggaaaca

SEQ ID NO: 1154217 - RNA, 19 nt, Artificial Sequence
  Description of Artificial Sequence: Synthetic oligonucleotide
gaacaccugucgaggguuu

SEQ ID NO: 1154218 - RNA, 19 nt, Artificial Sequence
  Description of Artificial Sequence: Synthetic oligonucleotide
cacgaaucaccagccuccu

SEQ ID NO: 1154219 - RNA, 19 nt, Artificial Sequence
  Description of Artificial Sequence: Synthetic oligonucleotide
cucaaccgucaaagacucu

SEQ ID NO: 1154220 - RNA, 19 nt, Artificial Sequence
  Description of Artificial Sequence: Synthetic oligonucleotide
ccuaccacuuccagccgcu

SEQ ID NO: 1154221 - RNA, 19 nt, Artificial Sequence
  Description of Artificial Sequence: Synthetic oligonucleotide
gcaccgcaacaggaggcac

SEQ ID NO: 1154222 - RNA, 19 nt, Artificial Sequence
  Description of Artificial Sequence: Synthetic oligonucleotide
ccaccuuacuuaucucuau

SEQ ID NO: 1154223 - RNA, 19 nt, Artificial Sequence
  Description of Artificial Sequence: Synthetic oligonucleotide
aggcaacgggccagaucau

SEQ ID NO: 1154224 - RNA, 19 nt, Artificial Sequence
  Description of Artificial Sequence: Synthetic oligonucleotide
ggccaauguucagcucgca

SEQ ID NO: 1154225 - RNA, 19 nt, Artificial Sequence
  Description of Artificial Sequence: Synthetic oligonucleotide
gucgaggguuuagcauaua

SEQ ID NO: 1154226 - RNA, 19 nt, Artificial Sequence
  Description of Artificial Sequence: Synthetic oligonucleotide
gaggcacaaccggcaaguu

SEQ ID NO: 1154227 - RNA, 19 nt, Artificial Sequence
  Description of Artificial Sequence: Synthetic oligonucleotide
ggaucgcucuucuguccau

SEQ ID NO: 1154228 - RNA, 19 nt, Artificial Sequence
  Description of Artificial Sequence: Synthetic oligonucleotide
gccgguguccagcauucuu

SEQ ID NO: 1154229 - RNA, 19 nt, Artificial Sequence
  Description of Artificial Sequence: Synthetic oligonucleotide
caacuugcauggggagggu

SEQ ID NO: 1154230 - RNA, 19 nt, Artificial Sequence
  Description of Artificial Sequence: Synthetic oligonucleotide
gacccagcccggacccacu

SEQ ID NO: 1154231 - RNA, 19 nt, Artificial Sequence
  Description of Artificial Sequence: Synthetic oligonucleotide
cgaagcuauccacaccgau

SEQ ID NO: 1154232 - RNA, 19 nt, Artificial Sequence
  Description of Artificial Sequence: Synthetic oligonucleotide
ggcaacgggccagaucauu

SEQ ID NO: 1154233 - RNA, 19 nt, Artificial Sequence
  Description of Artificial Sequence: Synthetic oligonucleotide
gccuagugccugguugaua

SEQ ID NO: 1154234 - RNA, 19 nt, Artificial Sequence
  Description of Artificial Sequence: Synthetic oligonucleotide
cuaccacuuccagccgcuu

SEQ ID NO: 1154235 - RNA, 19 nt, Artificial Sequence
  Description of Artificial Sequence: Synthetic oligonucleotide
ccgcaacaggaggcacaac

SEQ ID NO: 1154236 - RNA, 19 nt, Artificial Sequence
  Description of Artificial Sequence: Synthetic oligonucleotide
cguaggcaacgggccagau

SEQ ID NO: 1154237 - RNA, 19 nt, Artificial Sequence
  Description of Artificial Sequence: Synthetic oligonucleotide
aauaauauucacuccaggg

SEQ ID NO: 1154238 - RNA, 19 nt, Artificial Sequence
  Description of Artificial Sequence: Synthetic oligonucleotide
uuuaauaauauucacucca

SEQ ID NO: 1154239 - RNA, 19 nt, Artificial Sequence
  Description of Artificial Sequence: Synthetic oligonucleotide
uauauauauauauauaaac

SEQ ID NO: 1154240 - RNA, 19 nt, Artificial Sequence
  Description of Artificial Sequence: Synthetic oligonucleotide
aacaaacuaagccacauag

SEQ ID NO: 1154241 - RNA, 19 nt, Artificial Sequence
  Description of Artificial Sequence: Synthetic oligonucleotide
uauauauauauauauauaa

SEQ ID NO: 1154242 - RNA, 19 nt, Artificial Sequence
  Description of Artificial Sequence: Synthetic oligonucleotide
uauauauauauauauauau

SEQ ID NO: 1154243 - RNA, 19 nt, Artificial Sequence
  Description of Artificial Sequence: Synthetic oligonucleotide
uguauauauauauauauau

SEQ ID NO: 1154244 - RNA, 19 nt, Artificial Sequence
  Description of Artificial Sequence: Synthetic oligonucleotide
aguuggaacauacaugagc

SEQ ID NO: 1154245 - RNA, 19 nt, Artificial Sequence
  Description of Artificial Sequence: Synthetic oligonucleotide
uauauauauauaaacauuu

SEQ ID NO: 1154246 - RNA, 19 nt, Artificial Sequence
  Description of Artificial Sequence: Synthetic oligonucleotide
aaggccuacagcucgaccc

SEQ ID NO: 1154247 - RNA, 19 nt, Artificial Sequence
  Description of Artificial Sequence: Synthetic oligonucleotide
uauauauauauauaaacau

SEQ ID NO: 1154248 - RNA, 19 nt, Artificial Sequence
  Description of Artificial Sequence: Synthetic oligonucleotide
aauagagcgccguaauggc

SEQ ID NO: 1154249 - RNA, 19 nt, Artificial Sequence
  Description of Artificial Sequence: Synthetic oligonucleotide
uuuaaauucuggaaauugc

SEQ ID NO: 1154250 - RNA, 19 nt, Artificial Sequence
  Description of Artificial Sequence: Synthetic oligonucleotide
aaauagagcgccguaaugg

SEQ ID NO: 1154251 - RNA, 19 nt, Artificial Sequence
  Description of Artificial Sequence: Synthetic oligonucleotide
uguguauauauauauauau

SEQ ID NO: 1154252 - RNA, 19 nt, Artificial Sequence
  Description of Artificial Sequence: Synthetic oligonucleotide
uaaacuugaauuccgccag

SEQ ID NO: 1154253 - RNA, 19 nt, Artificial Sequence
  Description of Artificial Sequence: Synthetic oligonucleotide
guuaauacaaccucuggug

SEQ ID NO: 1154254 - RNA, 19 nt, Artificial Sequence
  Description of Artificial Sequence: Synthetic oligonucleotide
uauguguauauauauauau

SEQ ID NO: 1154255 - RNA, 19 nt, Artificial Sequence
  Description of Artificial Sequence: Synthetic oligonucleotide
uuaaauucuggaaauugcu

SEQ ID NO: 1154256 - RNA, 19 nt, Artificial Sequence
  Description of Artificial Sequence: Synthetic oligonucleotide
agacgugauucccagaagc

SEQ ID NO: 1154257 - RNA, 19 nt, Artificial Sequence
  Description of Artificial Sequence: Synthetic oligonucleotide
auuccgucagccuaguuac

SEQ ID NO: 1154258 - RNA, 19 nt, Artificial Sequence
  Description of Artificial Sequence: Synthetic oligonucleotide
gaaaccaugugacaugaag

SEQ ID NO: 1154259 - RNA, 19 nt, Artificial Sequence
  Description of Artificial Sequence: Synthetic oligonucleotide
auauauauauauauaaaca

SEQ ID NO: 1154260 - RNA, 19 nt, Artificial Sequence
  Description of Artificial Sequence: Synthetic oligonucleotide
agaacucguccuuucaugc

SEQ ID NO: 1154261 - RNA, 19 nt, Artificial Sequence
  Description of Artificial Sequence: Synthetic oligonucleotide
uguuaauacaaccucuggu

SEQ ID NO: 1154262 - RNA, 19 nt, Artificial Sequence
  Description of Artificial Sequence: Synthetic oligonucleotide
ugugccaccagcaaagcgc

SEQ ID NO: 1154263 - RNA, 19 nt, Artificial Sequence
  Description of Artificial Sequence: Synthetic oligonucleotide
cugaguucauucaugagcc

SEQ ID NO: 1154264 - RNA, 19 nt, Artificial Sequence
  Description of Artificial Sequence: Synthetic oligonucleotide
acagaacaagugcugaccc

SEQ ID NO: 1154265 - RNA, 19 nt, Artificial Sequence
  Description of Artificial Sequence: Synthetic oligonucleotide
ucgaaaacauucuucagga

SEQ ID NO: 1154266 - RNA, 19 nt, Artificial Sequence
  Description of Artificial Sequence: Synthetic oligonucleotide
cagucuaccauugagaggc

SEQ ID NO: 1154267 - RNA, 19 nt, Artificial Sequence
  Description of Artificial Sequence: Synthetic oligonucleotide
aaacuaagccacauagggc

SEQ ID NO: 1154268 - RNA, 19 nt, Artificial Sequence
  Description of Artificial Sequence: Synthetic oligonucleotide
uuacaaucaccuaaaacuc

SEQ ID NO: 1154269 - RNA, 19 nt, Artificial Sequence
  Description of Artificial Sequence: Synthetic oligonucleotide
acauacaugagcagggugc

SEQ ID NO: 1154270 - RNA, 19 nt, Artificial Sequence
  Description of Artificial Sequence: Synthetic oligonucleotide
uguguuaauacaaccucug

SEQ ID NO: 1154271 - RNA, 19 nt, Artificial Sequence
  Description of Artificial Sequence: Synthetic oligonucleotide
ugacaugaaguucuugugc

SEQ ID NO: 1154272 - RNA, 19 nt, Artificial Sequence
  Description of Artificial Sequence: Synthetic oligonucleotide
aagagucucccauuuuagg

SEQ ID NO: 1154273 - RNA, 19 nt, Artificial Sequence
  Description of Artificial Sequence: Synthetic oligonucleotide
uggaacauacaugagcagg

SEQ ID NO: 1154274 - RNA, 19 nt, Artificial Sequence
  Description of Artificial Sequence: Synthetic oligonucleotide
uguaagcacaccuuaguga

SEQ ID NO: 1154275 - RNA, 19 nt, Artificial Sequence
  Description of Artificial Sequence: Synthetic oligonucleotide
uggaaacaaacuaagccac

SEQ ID NO: 1154276 - RNA, 19 nt, Artificial Sequence
  Description of Artificial Sequence: Synthetic oligonucleotide
cuuuaauaauauucacucc

SEQ ID NO: 1154277 - RNA, 19 nt, Artificial Sequence
  Description of Artificial Sequence: Synthetic oligonucleotide
aaagcgagcagagucacug

SEQ ID NO: 1154278 - RNA, 19 nt, Artificial Sequence
  Description of Artificial Sequence: Synthetic oligonucleotide
uauuaaaugccagucuacc

SEQ ID NO: 1154279 - RNA, 19 nt, Artificial Sequence
  Description of Artificial Sequence: Synthetic oligonucleotide
gauaucguaggacucuggc

SEQ ID NO: 1154280 - RNA, 19 nt, Artificial Sequence
  Description of Artificial Sequence: Synthetic oligonucleotide
aagaacucguccuuucaug

SEQ ID NO: 1154281 - RNA, 19 nt, Artificial Sequence
  Description of Artificial Sequence: Synthetic oligonucleotide
cuguguguaugccaaagcg

SEQ ID NO: 1154282 - RNA, 19 nt, Artificial Sequence
  Description of Artificial Sequence: Synthetic oligonucleotide
agcaaagcgccucagccac

SEQ ID NO: 1154283 - RNA, 19 nt, Artificial Sequence
  Description of Artificial Sequence: Synthetic oligonucleotide
ggugcuaauacccaaggcc

SEQ ID NO: 1154284 - RNA, 19 nt, Artificial Sequence
  Description of Artificial Sequence: Synthetic oligonucleotide
aauaacugcuccagcuacc

SEQ ID NO: 1154285 - RNA, 19 nt, Artificial Sequence
  Description of Artificial Sequence: Synthetic oligonucleotide
uauaccaacccaagagacc

SEQ ID NO: 1154286 - RNA, 19 nt, Artificial Sequence
  Description of Artificial Sequence: Synthetic oligonucleotide
uugaauuccgccaguguca

SEQ ID NO: 1154287 - RNA, 19 nt, Artificial Sequence
  Description of Artificial Sequence: Synthetic oligonucleotide
aacauacaugagcagggug

SEQ ID NO: 1154288 - RNA, 19 nt, Artificial Sequence
  Description of Artificial Sequence: Synthetic oligonucleotide
auauaccaacccaagagac

SEQ ID NO: 1154289 - RNA, 19 nt, Artificial Sequence
  Description of Artificial Sequence: Synthetic oligonucleotide
ugccauauugcccuggccu

SEQ ID NO: 1154290 - RNA, 19 nt, Artificial Sequence
  Description of Artificial Sequence: Synthetic oligonucleotide
uaucguaggacucuggcuu

SEQ ID NO: 1154291 - RNA, 19 nt, Artificial Sequence
  Description of Artificial Sequence: Synthetic oligonucleotide
ggaguuguaaacaaggccc

SEQ ID NO: 1154292 - RNA, 19 nt, Artificial Sequence
  Description of Artificial Sequence: Synthetic oligonucleotide
cuggaaacaaacuaagcca

SEQ ID NO: 1154293 - RNA, 19 nt, Artificial Sequence
  Description of Artificial Sequence: Synthetic oligonucleotide
auagggcaagaacucgucc

SEQ ID NO: 1154294 - RNA, 19 nt, Artificial Sequence
  Description of Artificial Sequence: Synthetic oligonucleotide
ucuaccauugagaggccag

SEQ ID NO: 1154295 - RNA, 19 nt, Artificial Sequence
  Description of Artificial Sequence: Synthetic oligonucleotide
accguguuuuguuaccagc

SEQ ID NO: 1154296 - RNA, 19 nt, Artificial Sequence
  Description of Artificial Sequence: Synthetic oligonucleotide
cauguguuaauacaaccuc

SEQ ID NO: 1154297 - RNA, 19 nt, Artificial Sequence
  Description of Artificial Sequence: Synthetic oligonucleotide
uagagcgccguaauggcag

SEQ ID NO: 1154298 - RNA, 19 nt, Artificial Sequence
  Description of Artificial Sequence: Synthetic oligonucleotide
gaagccggugaucaaacug

SEQ ID NO: 1154299 - RNA, 19 nt, Artificial Sequence
  Description of Artificial Sequence: Synthetic oligonucleotide
ggaguuggaacauacauga

SEQ ID NO: 1154300 - RNA, 19 nt, Artificial Sequence
  Description of Artificial Sequence: Synthetic oligonucleotide
uugcugaugaauucccaag

SEQ ID NO: 1154301 - RNA, 19 nt, Artificial Sequence
  Description of Artificial Sequence: Synthetic oligonucleotide
ggagagacagcucaguugc

SEQ ID NO: 1154302 - RNA, 19 nt, Artificial Sequence
  Description of Artificial Sequence: Synthetic oligonucleotide
aacucguccuuucaugcca

SEQ ID NO: 1154303 - RNA, 19 nt, Artificial Sequence
  Description of Artificial Sequence: Synthetic oligonucleotide
ucaccuaaaacuccagcuc

SEQ ID NO: 1154304 - RNA, 19 nt, Artificial Sequence
  Description of Artificial Sequence: Synthetic oligonucleotide
guacugacugacccgaggg

SEQ ID NO: 1154305 - RNA, 19 nt, Artificial Sequence
  Description of Artificial Sequence: Synthetic oligonucleotide
agccacauagggcaagaac

SEQ ID NO: 1154306 - RNA, 19 nt, Artificial Sequence
  Description of Artificial Sequence: Synthetic oligonucleotide
ugccaaagcgagcagaguc

SEQ ID NO: 1154307 - RNA, 19 nt, Artificial Sequence
  Description of Artificial Sequence: Synthetic oligonucleotide
acagcucgaccccacauuc

SEQ ID NO: 1154308 - RNA, 19 nt, Artificial Sequence
  Description of Artificial Sequence: Synthetic oligonucleotide
ugcgaguauuccauguacc

SEQ ID NO: 1154309 - RNA, 19 nt, Artificial Sequence
  Description of Artificial Sequence: Synthetic oligonucleotide
uuagggaaggaguuguaaa

SEQ ID NO: 1154310 - RNA, 19 nt, Artificial Sequence
  Description of Artificial Sequence: Synthetic oligonucleotide
auauauauauauauauaaa

SEQ ID NO: 1154311 - RNA, 19 nt, Artificial Sequence
  Description of Artificial Sequence: Synthetic oligonucleotide
acauggcauguguuaauac

SEQ ID NO: 1154312 - RNA, 19 nt, Artificial Sequence
  Description of Artificial Sequence: Synthetic oligonucleotide
ucagccuaguuacuccucc

SEQ ID NO: 1154313 - RNA, 19 nt, Artificial Sequence
  Description of Artificial Sequence: Synthetic oligonucleotide
auauauauauauaaacauu

SEQ ID NO: 1154314 - RNA, 19 nt, Artificial Sequence
  Description of Artificial Sequence: Synthetic oligonucleotide
guguuaauacaaccucugg

SEQ ID NO: 1154315 - RNA, 19 nt, Artificial Sequence
  Description of Artificial Sequence: Synthetic oligonucleotide
agaauuauuuuggaacucu

SEQ ID NO: 1154316 - RNA, 19 nt, Artificial Sequence
  Description of Artificial Sequence: Synthetic oligonucleotide
agagccguaaggaagacca

SEQ ID NO: 1154317 - RNA, 19 nt, Artificial Sequence
  Description of Artificial Sequence: Synthetic oligonucleotide
auucucgaaaacauucuuc

SEQ ID NO: 1154318 - RNA, 19 nt, Artificial Sequence
  Description of Artificial Sequence: Synthetic oligonucleotide
gaguuguaaacaaggcccg

SEQ ID NO: 1154319 - RNA, 19 nt, Artificial Sequence
  Description of Artificial Sequence: Synthetic oligonucleotide
aauacaaccucugguguaa

SEQ ID NO: 1154320 - RNA, 19 nt, Artificial Sequence
  Description of Artificial Sequence: Synthetic oligonucleotide
gugagagugagguccacag

SEQ ID NO: 1154321 - RNA, 19 nt, Artificial Sequence
  Description of Artificial Sequence: Synthetic oligonucleotide
uauugcccuggccucagag

SEQ ID NO: 1154322 - RNA, 19 nt, Artificial Sequence
  Description of Artificial Sequence: Synthetic oligonucleotide
ucucccauuuuagggaagg

SEQ ID NO: 1154323 - RNA, 19 nt, Artificial Sequence
  Description of Artificial Sequence: Synthetic oligonucleotide
aggaccguguuuuguuacc

SEQ ID NO: 1154324 - RNA, 19 nt, Artificial Sequence
  Description of Artificial Sequence: Synthetic oligonucleotide
auuuuagggaaggaguugu

SEQ ID NO: 1154325 - RNA, 19 nt, Artificial Sequence
  Description of Artificial Sequence: Synthetic oligonucleotide
uaacuugugcugaggaagu

SEQ ID NO: 1154326 - RNA, 19 nt, Artificial Sequence
  Description of Artificial Sequence: Synthetic oligonucleotide
ugguguaagcacaccuuag

SEQ ID NO: 1154327 - RNA, 19 nt, Artificial Sequence
  Description of Artificial Sequence: Synthetic oligonucleotide
auaacugcuccagcuaccg

SEQ ID NO: 1154328 - RNA, 19 nt, Artificial Sequence
  Description of Artificial Sequence: Synthetic oligonucleotide
agugacauucuugauccag

SEQ ID NO: 1154329 - RNA, 19 nt, Artificial Sequence
  Description of Artificial Sequence: Synthetic oligonucleotide
acugacccgagggauaucg

SEQ ID NO: 1154330 - RNA, 19 nt, Artificial Sequence
  Description of Artificial Sequence: Synthetic oligonucleotide
caagagucucccauuuuag

SEQ ID NO: 1154331 - RNA, 19 nt, Artificial Sequence
  Description of Artificial Sequence: Synthetic oligonucleotide
auauauauauauauauaua

SEQ ID NO: 1154332 - RNA, 19 nt, Artificial Sequence
  Description of Artificial Sequence: Synthetic oligonucleotide
ucccauuuuagggaaggag

SEQ ID NO: 1154333 - RNA, 19 nt, Artificial Sequence
  Description of Artificial Sequence: Synthetic oligonucleotide
gauuccgucagccuaguua

SEQ ID NO: 1154334 - RNA, 19 nt, Artificial Sequence
  Description of Artificial Sequence: Synthetic oligonucleotide
agcucgaccccacauucgg

SEQ ID NO: 1154335 - RNA, 19 nt, Artificial Sequence
  Description of Artificial Sequence: Synthetic oligonucleotide
caguuucaguccuaggaag

SEQ ID NO: 1154336 - RNA, 19 nt, Artificial Sequence
  Description of Artificial Sequence: Synthetic oligonucleotide
accaauuuggaaaccaugu

SEQ ID NO: 1154337 - RNA, 19 nt, Artificial Sequence
  Description of Artificial Sequence: Synthetic oligonucleotide
aguugcugagagugcuugc

SEQ ID NO: 1154338 - RNA, 19 nt, Artificial Sequence
  Description of Artificial Sequence: Synthetic oligonucleotide
agggugcuaauacccaagg

SEQ ID NO: 1154339 - RNA, 19 nt, Artificial Sequence
  Description of Artificial Sequence: Synthetic oligonucleotide
ugccagucuaccauugaga

SEQ ID NO: 1154340 - RNA, 19 nt, Artificial Sequence
  Description of Artificial Sequence: Synthetic oligonucleotide
acaaacuaagccacauagg

SEQ ID NO: 1154341 - RNA, 19 nt, Artificial Sequence
  Description of Artificial Sequence: Synthetic oligonucleotide
uaauccacuuuucaccaua

SEQ ID NO: 1154342 - RNA, 19 nt, Artificial Sequence
  Description of Artificial Sequence: Synthetic oligonucleotide
cauugagaggccagauucc

SEQ ID NO: 1154343 - RNA, 19 nt, Artificial Sequence
  Description of Artificial Sequence: Synthetic oligonucleotide
auaucguaggacucuggcu

SEQ ID NO: 1154344 - RNA, 19 nt, Artificial Sequence
  Description of Artificial Sequence: Synthetic oligonucleotide
uguacgcaaggccuacagc

SEQ ID NO: 1154345 - RNA, 19 nt, Artificial Sequence
  Description of Artificial Sequence: Synthetic oligonucleotide
cauucuugauccagugccc

SEQ ID NO: 1154346 - RNA, 19 nt, Artificial Sequence
  Description of Artificial Sequence: Synthetic oligonucleotide
uuucaggggcggaaggagc

SEQ ID NO: 1154347 - RNA, 19 nt, Artificial Sequence
  Description of Artificial Sequence: Synthetic oligonucleotide
gugacaugaaguucuugug

SEQ ID NO: 1154348 - RNA, 19 nt, Artificial Sequence
  Description of Artificial Sequence: Synthetic oligonucleotide
ucagguaacuugugcugag

SEQ ID NO: 1154349 - RNA, 19 nt, Artificial Sequence
  Description of Artificial Sequence: Synthetic oligonucleotide
gaauucccaaggcaguuuc

SEQ ID NO: 1154350 - RNA, 19 nt, Artificial Sequence
  Description of Artificial Sequence: Synthetic oligonucleotide
aggccuacagcucgacccc

SEQ ID NO: 1154351 - RNA, 19 nt, Artificial Sequence
  Description of Artificial Sequence: Synthetic oligonucleotide
ugcacacaagcagccaucg

SEQ ID NO: 1154352 - RNA, 19 nt, Artificial Sequence
  Description of Artificial Sequence: Synthetic oligonucleotide
aaugccagucuaccauuga

SEQ ID NO: 1154353 - RNA, 19 nt, Artificial Sequence
  Description of Artificial Sequence: Synthetic oligonucleotide
accagcaaagcgccucagc

SEQ ID NO: 1154354 - RNA, 19 nt, Artificial Sequence
  Description of Artificial Sequence: Synthetic oligonucleotide
gagucucccauuuuaggga

SEQ ID NO: 1154355 - RNA, 19 nt, Artificial Sequence
  Description of Artificial Sequence: Synthetic oligonucleotide
caagaauaacugcuccagc

SEQ ID NO: 1154356 - RNA, 19 nt, Artificial Sequence
  Description of Artificial Sequence: Synthetic oligonucleotide
aguuacuccuccaagaaua

SEQ ID NO: 1154357 - RNA, 19 nt, Artificial Sequence
  Description of Artificial Sequence: Synthetic oligonucleotide
auuuggaaaccaugugaca

SEQ ID NO: 1154358 - RNA, 19 nt, Artificial Sequence
  Description of Artificial Sequence: Synthetic oligonucleotide
acgcaaggccuacagcucg

SEQ ID NO: 1154359 - RNA, 19 nt, Artificial Sequence
  Description of Artificial Sequence: Synthetic oligonucleotide
aacuugaauuccgccagug

SEQ ID NO: 1154360 - RNA, 19 nt, Artificial Sequence
  Description of Artificial Sequence: Synthetic oligonucleotide
uucaugagccaaagggcac

SEQ ID NO: 1154361 - RNA, 19 nt, Artificial Sequence
  Description of Artificial Sequence: Synthetic oligonucleotide
aguuguaaacaaggcccgc

SEQ ID NO: 1154362 - RNA, 19 nt, Artificial Sequence
  Description of Artificial Sequence: Synthetic oligonucleotide
uguaugccaaagcgagcag

SEQ ID NO: 1154363 - RNA, 19 nt, Artificial Sequence
  Description of Artificial Sequence: Synthetic oligonucleotide
uuguaaacaaggcccgcau

SEQ ID NO: 1154364 - RNA, 19 nt, Artificial Sequence
  Description of Artificial Sequence: Synthetic oligonucleotide
guauauauauauauauaua

SEQ ID NO: 1154365 - RNA, 19 nt, Artificial Sequence
  Description of Artificial Sequence: Synthetic oligonucleotide
caccaauuuggaaaccaug

SEQ ID NO: 1154366 - RNA, 19 nt, Artificial Sequence
  Description of Artificial Sequence: Synthetic oligonucleotide
uccaccaauuuggaaacca

SEQ ID NO: 1154367 - RNA, 19 nt, Artificial Sequence
  Description of Artificial Sequence: Synthetic oligonucleotide
ggcauguguuaauacaacc

SEQ ID NO: 1154368 - RNA, 19 nt, Artificial Sequence
  Description of Artificial Sequence: Synthetic oligonucleotide
uggcauguguuaauacaac

SEQ ID NO: 1154369 - RNA, 19 nt, Artificial Sequence
  Description of Artificial Sequence: Synthetic oligonucleotide
gaacucguccuuucaugcc

SEQ ID NO: 1154370 - RNA, 19 nt, Artificial Sequence
  Description of Artificial Sequence: Synthetic oligonucleotide
acgugauucccagaagccg

SEQ ID NO: 1154371 - RNA, 19 nt, Artificial Sequence
  Description of Artificial Sequence: Synthetic oligonucleotide
acaaucaccuaaaacucca

SEQ ID NO: 1154372 - RNA, 19 nt, Artificial Sequence
  Description of Artificial Sequence: Synthetic oligonucleotide
cuuaucaggcaguuuacaa

SEQ ID NO: 1154373 - RNA, 19 nt, Artificial Sequence
  Description of Artificial Sequence: Synthetic oligonucleotide
gacgugauucccagaagcc

SEQ ID NO: 1154374 - RNA, 19 nt, Artificial Sequence
  Description of Artificial Sequence: Synthetic oligonucleotide
caccuuagugacauucuug

SEQ ID NO: 1154375 - RNA, 19 nt, Artificial Sequence
  Description of Artificial Sequence: Synthetic oligonucleotide
caugucaugauucaggauu

SEQ ID NO: 1154376 - RNA, 19 nt, Artificial Sequence
  Description of Artificial Sequence: Synthetic oligonucleotide
accaugugacaugaaguuc

SEQ ID NO: 1154377 - RNA, 19 nt, Artificial Sequence
  Description of Artificial Sequence: Synthetic oligonucleotide
caccauauaccaacccaag

SEQ ID NO: 1154378 - RNA, 19 nt, Artificial Sequence
  Description of Artificial Sequence: Synthetic oligonucleotide
gccguaauggcagugacag

SEQ ID NO: 1154379 - RNA, 19 nt, Artificial Sequence
  Description of Artificial Sequence: Synthetic oligonucleotide
gccagucuaccauugagag

SEQ ID NO: 1154380 - RNA, 19 nt, Artificial Sequence
  Description of Artificial Sequence: Synthetic oligonucleotide
ugcuaauacccaaggccac

SEQ ID NO: 1154381 - RNA, 19 nt, Artificial Sequence
  Description of Artificial Sequence: Synthetic oligonucleotide
uccagcuaccgucccacug

SEQ ID NO: 1154382 - RNA, 19 nt, Artificial Sequence
  Description of Artificial Sequence: Synthetic oligonucleotide
gguuucagguaacuugugc

SEQ ID NO: 1154383 - RNA, 19 nt, Artificial Sequence
  Description of Artificial Sequence: Synthetic oligonucleotide
guacgcaaggccuacagcu

SEQ ID NO: 1154384 - RNA, 19 nt, Artificial Sequence
  Description of Artificial Sequence: Synthetic oligonucleotide
agccguaaggaagaccagg

SEQ ID NO: 1154385 - RNA, 19 nt, Artificial Sequence
  Description of Artificial Sequence: Synthetic oligonucleotide
gacccgagggauaucguag

SEQ ID NO: 1154386 - RNA, 19 nt, Artificial Sequence
  Description of Artificial Sequence: Synthetic oligonucleotide
ugcaaccccacugugcucu

SEQ ID NO: 1154387 - RNA, 19 nt, Artificial Sequence
  Description of Artificial Sequence: Synthetic oligonucleotide
guagcagugagagugaggu

SEQ ID NO: 1154388 - RNA, 19 nt, Artificial Sequence
  Description of Artificial Sequence: Synthetic oligonucleotide
acccgagggauaucguagg

SEQ ID NO: 1154389 - RNA, 19 nt, Artificial Sequence
  Description of Artificial Sequence: Synthetic oligonucleotide
guaauggcagugacagacg

SEQ ID NO: 1154390 - RNA, 19 nt, Artificial Sequence
  Description of Artificial Sequence: Synthetic oligonucleotide
aggccagauuccgucagcc

SEQ ID NO: 1154391 - RNA, 19 nt, Artificial Sequence
  Description of Artificial Sequence: Synthetic oligonucleotide
cacauagggcaagaacucg

SEQ ID NO: 1154392 - RNA, 19 nt, Artificial Sequence
  Description of Artificial Sequence: Synthetic oligonucleotide
gugcuaauacccaaggcca

SEQ ID NO: 1154393 - RNA, 19 nt, Artificial Sequence
  Description of Artificial Sequence: Synthetic oligonucleotide
uacaaccucugguguaagc

SEQ ID NO: 1154394 - RNA, 19 nt, Artificial Sequence
  Description of Artificial Sequence: Synthetic oligonucleotide
guguaugccaaagcgagca

SEQ ID NO: 1154395 - RNA, 19 nt, Artificial Sequence
  Description of Artificial Sequence: Synthetic oligonucleotide
uacugacugacccgaggga

SEQ ID NO: 1154396 - RNA, 19 nt, Artificial Sequence
  Description of Artificial Sequence: Synthetic oligonucleotide
aaggagccugauuggugug

SEQ ID NO: 1154397 - RNA, 19 nt, Artificial Sequence
  Description of Artificial Sequence: Synthetic oligonucleotide
uccgggacucagcacuucc

SEQ ID NO: 1154398 - RNA, 19 nt, Artificial Sequence
  Description of Artificial Sequence: Synthetic oligonucleotide
cauagggcaagaacucguc

SEQ ID NO: 1154399 - RNA, 19 nt, Artificial Sequence
  Description of Artificial Sequence: Synthetic oligonucleotide
caaucaccuaaaacuccag

SEQ ID NO: 1154400 - RNA, 19 nt, Artificial Sequence
  Description of Artificial Sequence: Synthetic oligonucleotide
cucgaccccacauucggug

SEQ ID NO: 1154401 - RNA, 19 nt, Artificial Sequence
  Description of Artificial Sequence: Synthetic oligonucleotide
ucguccuuucaugccacgg

SEQ ID NO: 1154402 - RNA, 19 nt, Artificial Sequence
  Description of Artificial Sequence: Synthetic oligonucleotide
gguacugacugacccgagg

SEQ ID NO: 1154403 - RNA, 19 nt, Artificial Sequence
  Description of Artificial Sequence: Synthetic oligonucleotide
gaccguguuuuguuaccag

SEQ ID NO: 1154404 - RNA, 19 nt, Artificial Sequence
  Description of Artificial Sequence: Synthetic oligonucleotide
ucuccgggacaggaaauag

SEQ ID NO: 1154405 - RNA, 19 nt, Artificial Sequence
  Description of Artificial Sequence: Synthetic oligonucleotide
gacaggaaauagagcgccg

SEQ ID NO: 1154406 - RNA, 19 nt, Artificial Sequence
  Description of Artificial Sequence: Synthetic oligonucleotide
agcugcaaccccacugugc

SEQ ID NO: 1154407 - RNA, 19 nt, Artificial Sequence
  Description of Artificial Sequence: Synthetic oligonucleotide
gaggaccguguuuuguuac

SEQ ID NO: 1154408 - RNA, 19 nt, Artificial Sequence
  Description of Artificial Sequence: Synthetic oligonucleotide
ugccacgaaagccccugag

SEQ ID NO: 1154409 - RNA, 19 nt, Artificial Sequence
  Description of Artificial Sequence: Synthetic oligonucleotide
gugcgaguauuccauguac

SEQ ID NO: 1154410 - RNA, 19 nt, Artificial Sequence
  Description of Artificial Sequence: Synthetic oligonucleotide
cagggugcuaauacccaag

SEQ ID NO: 1154411 - RNA, 19 nt, Artificial Sequence
  Description of Artificial Sequence: Synthetic oligonucleotide
gagccaaagggcaccacug

SEQ ID NO: 1154412 - RNA, 19 nt, Artificial Sequence
  Description of Artificial Sequence: Synthetic oligonucleotide
cuaggaagugcucuucaga

SEQ ID NO: 1154413 - RNA, 19 nt, Artificial Sequence
  Description of Artificial Sequence: Synthetic oligonucleotide
ugugugucugugugugugu

SEQ ID NO: 1154414 - RNA, 19 nt, Artificial Sequence
  Description of Artificial Sequence: Synthetic oligonucleotide
aguuucaguccuaggaagu

SEQ ID NO: 1154415 - RNA, 19 nt, Artificial Sequence
  Description of Artificial Sequence: Synthetic oligonucleotide
aauggcagugacagacgug

SEQ ID NO: 1154416 - RNA, 19 nt, Artificial Sequence
  Description of Artificial Sequence: Synthetic oligonucleotide
agcgagcagagucacugcu

SEQ ID NO: 1154417 - RNA, 19 nt, Artificial Sequence
  Description of Artificial Sequence: Synthetic oligonucleotide
uacgcaaggccuacagcuc

SEQ ID NO: 1154418 - RNA, 19 nt, Artificial Sequence
  Description of Artificial Sequence: Synthetic oligonucleotide
ugggauucucgaaaacauu

SEQ ID NO: 1154419 - RNA, 19 nt, Artificial Sequence
  Description of Artificial Sequence: Synthetic oligonucleotide
cuuucgaaggaaggggcac

SEQ ID NO: 1154420 - RNA, 19 nt, Artificial Sequence
  Description of Artificial Sequence: Synthetic oligonucleotide
gggauucucgaaaacauuc

SEQ ID NO: 1154421 - RNA, 19 nt, Artificial Sequence
  Description of Artificial Sequence: Synthetic oligonucleotide
uuccagaggaccguguuuu

SEQ ID NO: 1154422 - RNA, 19 nt, Artificial Sequence
  Description of Artificial Sequence: Synthetic oligonucleotide
guguauauauauauauaua

SEQ ID NO: 1154423 - RNA, 19 nt, Artificial Sequence
  Description of Artificial Sequence: Synthetic oligonucleotide
ccacgaaagccccugagag

SEQ ID NO: 1154424 - RNA, 19 nt, Artificial Sequence
  Description of Artificial Sequence: Synthetic oligonucleotide
ucuggaaauugcugguauu

SEQ ID NO: 1154425 - RNA, 19 nt, Artificial Sequence
  Description of Artificial Sequence: Synthetic oligonucleotide
cagauugcaaagccacuuc

SEQ ID NO: 1154426 - RNA, 19 nt, Artificial Sequence
  Description of Artificial Sequence: Synthetic oligonucleotide
caguccugccacgaaagcc

SEQ ID NO: 1154427 - RNA, 19 nt, Artificial Sequence
  Description of Artificial Sequence: Synthetic oligonucleotide
ucgaccccacauucggugc

SEQ ID NO: 1154428 - RNA, 19 nt, Artificial Sequence
  Description of Artificial Sequence: Synthetic oligonucleotide
cugccaaagcugcaacccc

SEQ ID NO: 1154429 - RNA, 19 nt, Artificial Sequence
  Description of Artificial Sequence: Synthetic oligonucleotide
ugggauccaagagucuccc

SEQ ID NO: 1154430 - RNA, 19 nt, Artificial Sequence
  Description of Artificial Sequence: Synthetic oligonucleotide
auguguauauauauauaua

SEQ ID NO: 1154431 - RNA, 19 nt, Artificial Sequence
  Description of Artificial Sequence: Synthetic oligonucleotide
uacagcucgaccccacauu

SEQ ID NO: 1154432 - RNA, 19 nt, Artificial Sequence
  Description of Artificial Sequence: Synthetic oligonucleotide
acaggaaauagagcgccgu

SEQ ID NO: 1154433 - RNA, 19 nt, Artificial Sequence
  Description of Artificial Sequence: Synthetic oligonucleotide
uucgaaggaaggggcacug

SEQ ID NO: 1154434 - RNA, 19 nt, Artificial Sequence
  Description of Artificial Sequence: Synthetic oligonucleotide
agcccgacacugcggcucc

SEQ ID NO: 1154435 - RNA, 19 nt, Artificial Sequence
  Description of Artificial Sequence: Synthetic oligonucleotide
agggauaucguaggacucu

SEQ ID NO: 1154436 - RNA, 19 nt, Artificial Sequence
  Description of Artificial Sequence: Synthetic oligonucleotide
gacucagcacuucccuggc

SEQ ID NO: 1154437 - RNA, 19 nt, Artificial Sequence
  Description of Artificial Sequence: Synthetic oligonucleotide
gagcaaccgcugcauacug

SEQ ID NO: 1154438 - RNA, 19 nt, Artificial Sequence
  Description of Artificial Sequence: Synthetic oligonucleotide
cgugauucccagaagccgg

SEQ ID NO: 1154439 - RNA, 19 nt, Artificial Sequence
  Description of Artificial Sequence: Synthetic oligonucleotide
gacucuccgggacaggaaa

SEQ ID NO: 1154440 - RNA, 19 nt, Artificial Sequence
  Description of Artificial Sequence: Synthetic oligonucleotide
cuaccgucccacugcacac

SEQ ID NO: 1154441 - RNA, 19 nt, Artificial Sequence
  Description of Artificial Sequence: Synthetic oligonucleotide
gugugugucugugugugug

SEQ ID NO: 1154442 - RNA, 19 nt, Artificial Sequence
  Description of Artificial Sequence: Synthetic oligonucleotide
ugacccgagggauaucgua

SEQ ID NO: 1154443 - RNA, 19 nt, Artificial Sequence
  Description of Artificial Sequence: Synthetic oligonucleotide
gagccugauuggugugugg

SEQ ID NO: 1154444 - RNA, 19 nt, Artificial Sequence
  Description of Artificial Sequence: Synthetic oligonucleotide
cagaauuauuuuggaacuc

SEQ ID NO: 1154445 - RNA, 19 nt, Artificial Sequence
  Description of Artificial Sequence: Synthetic oligonucleotide
ggaaggaguuguaaacaag

SEQ ID NO: 1154446 - RNA, 19 nt, Artificial Sequence
  Description of Artificial Sequence: Synthetic oligonucleotide
acaccuuagugacauucuu

SEQ ID NO: 1154447 - RNA, 19 nt, Artificial Sequence
  Description of Artificial Sequence: Synthetic oligonucleotide
aaggcuuucaggggcggaa

SEQ ID NO: 1154448 - RNA, 19 nt, Artificial Sequence
  Description of Artificial Sequence: Synthetic oligonucleotide
aagugcucuucagaauuau

SEQ ID NO: 1154449 - RNA, 19 nt, Artificial Sequence
  Description of Artificial Sequence: Synthetic oligonucleotide
ugggcugcgaggcgguacu

SEQ ID NO: 1154450 - RNA, 19 nt, Artificial Sequence
  Description of Artificial Sequence: Synthetic oligonucleotide
ugaauuccgccagugucau

SEQ ID NO: 1154451 - RNA, 19 nt, Artificial Sequence
  Description of Artificial Sequence: Synthetic oligonucleotide
aggaagugcucuucagaau

SEQ ID NO: 1154452 - RNA, 19 nt, Artificial Sequence
  Description of Artificial Sequence: Synthetic oligonucleotide
guaccuuuuccagauugca

SEQ ID NO: 1154453 - RNA, 19 nt, Artificial Sequence
  Description of Artificial Sequence: Synthetic oligonucleotide
agaagccggugaucaaacu

SEQ ID NO: 1154454 - RNA, 19 nt, Artificial Sequence
  Description of Artificial Sequence: Synthetic oligonucleotide
caggauguacgcaaggccu

SEQ ID NO: 1154455 - RNA, 19 nt, Artificial Sequence
  Description of Artificial Sequence: Synthetic oligonucleotide
guauguguauauauauaua

SEQ ID NO: 1154456 - RNA, 19 nt, Artificial Sequence
  Description of Artificial Sequence: Synthetic oligonucleotide
uccgucagccuaguuacuc

SEQ ID NO: 1154457 - RNA, 19 nt, Artificial Sequence
  Description of Artificial Sequence: Synthetic oligonucleotide
cuaagccacauagggcaag

SEQ ID NO: 1154458 - RNA, 19 nt, Artificial Sequence
  Description of Artificial Sequence: Synthetic oligonucleotide
aguucauucaugagccaaa

SEQ ID NO: 1154459 - RNA, 19 nt, Artificial Sequence
  Description of Artificial Sequence: Synthetic oligonucleotide
gcaaccgcugcauacugac

SEQ ID NO: 1154460 - RNA, 19 nt, Artificial Sequence
  Description of Artificial Sequence: Synthetic oligonucleotide
aguauuccauguaccagau

SEQ ID NO: 1154461 - RNA, 19 nt, Artificial Sequence
  Description of Artificial Sequence: Synthetic oligonucleotide
ugugucuguguguguguau

SEQ ID NO: 1154462 - RNA, 19 nt, Artificial Sequence
  Description of Artificial Sequence: Synthetic oligonucleotide
agaggaccguguuuuguua

SEQ ID NO: 1154463 - RNA, 19 nt, Artificial Sequence
  Description of Artificial Sequence: Synthetic oligonucleotide
aggggcggaaggagcaacc

SEQ ID NO: 1154464 - RNA, 19 nt, Artificial Sequence
  Description of Artificial Sequence: Synthetic oligonucleotide
gagggauaucguaggacuc

SEQ ID NO: 1154465 - RNA, 19 nt, Artificial Sequence
  Description of Artificial Sequence: Synthetic oligonucleotide
ugugugugucugugugugu

SEQ ID NO: 1154466 - RNA, 19 nt, Artificial Sequence
  Description of Artificial Sequence: Synthetic oligonucleotide
ugacugacccgagggauau

SEQ ID NO: 1154467 - RNA, 19 nt, Artificial Sequence
  Description of Artificial Sequence: Synthetic oligonucleotide
cagacgugauucccagaag

SEQ ID NO: 1154468 - RNA, 19 nt, Artificial Sequence
  Description of Artificial Sequence: Synthetic oligonucleotide
acucguccuuucaugccac

SEQ ID NO: 1154469 - RNA, 19 nt, Artificial Sequence
  Description of Artificial Sequence: Synthetic oligonucleotide
uccagaggaccguguuuug

SEQ ID NO: 1154470 - RNA, 19 nt, Artificial Sequence
  Description of Artificial Sequence: Synthetic oligonucleotide
aaagccccugagagagccg

SEQ ID NO: 1154471 - RNA, 19 nt, Artificial Sequence
  Description of Artificial Sequence: Synthetic oligonucleotide
acgaaggcuuucaggggcg

SEQ ID NO: 1154472 - RNA, 19 nt, Artificial Sequence
  Description of Artificial Sequence: Synthetic oligonucleotide
ccuaguuacuccuccaaga

SEQ ID NO: 1154473 - RNA, 19 nt, Artificial Sequence
  Description of Artificial Sequence: Synthetic oligonucleotide
cagcucgaccccacauucg

SEQ ID NO: 1154474 - RNA, 19 nt, Artificial Sequence
  Description of Artificial Sequence: Synthetic oligonucleotide
gagagccguaaggaagacc

SEQ ID NO: 1154475 - RNA, 19 nt, Artificial Sequence
  Description of Artificial Sequence: Synthetic oligonucleotide
uccaagagucucccauuuu

SEQ ID NO: 1154476 - RNA, 19 nt, Artificial Sequence
  Description of Artificial Sequence: Synthetic oligonucleotide
gauccagugcccaucucaa

SEQ ID NO: 1154477 - RNA, 19 nt, Artificial Sequence
  Description of Artificial Sequence: Synthetic oligonucleotide
gcgaguauuccauguacca

SEQ ID NO: 1154478 - RNA, 19 nt, Artificial Sequence
  Description of Artificial Sequence: Synthetic oligonucleotide
caaggagccugauuggugu

SEQ ID NO: 1154479 - RNA, 19 nt, Artificial Sequence
  Description of Artificial Sequence: Synthetic oligonucleotide
ccagcuaccgucccacugc

SEQ ID NO: 1154480 - RNA, 19 nt, Artificial Sequence
  Description of Artificial Sequence: Synthetic oligonucleotide
gcuaccgucccacugcaca

SEQ ID NO: 1154481 - RNA, 19 nt, Artificial Sequence
  Description of Artificial Sequence: Synthetic oligonucleotide
cauauugcccuggccucag

SEQ ID NO: 1154482 - RNA, 19 nt, Artificial Sequence
  Description of Artificial Sequence: Synthetic oligonucleotide
ggugccauauugcccuggc

SEQ ID NO: 1154483 - RNA, 19 nt, Artificial Sequence
  Description of Artificial Sequence: Synthetic oligonucleotide
cucguccuuucaugccacg

SEQ ID NO: 1154484 - RNA, 19 nt, Artificial Sequence
  Description of Artificial Sequence: Synthetic oligonucleotide
gguaacuugugcugaggaa

SEQ ID NO: 1154485 - RNA, 19 nt, Artificial Sequence
  Description of Artificial Sequence: Synthetic oligonucleotide
auagagcgccguaauggca

SEQ ID NO: 1154486 - RNA, 19 nt, Artificial Sequence
  Description of Artificial Sequence: Synthetic oligonucleotide
agucuaccauugagaggcc

SEQ ID NO: 1154487 - RNA, 19 nt, Artificial Sequence
  Description of Artificial Sequence: Synthetic oligonucleotide
gggugcuaauacccaaggc

SEQ ID NO: 1154488 - RNA, 19 nt, Artificial Sequence
  Description of Artificial Sequence: Synthetic oligonucleotide
ccuaggaagugcucuucag

SEQ ID NO: 1154489 - RNA, 19 nt, Artificial Sequence
  Description of Artificial Sequence: Synthetic oligonucleotide
gccguaaggaagaccaggc

SEQ ID NO: 1154490 - RNA, 19 nt, Artificial Sequence
  Description of Artificial Sequence: Synthetic oligonucleotide
gcuaauacccaaggccacc

SEQ ID NO: 1154491 - RNA, 19 nt, Artificial Sequence
  Description of Artificial Sequence: Synthetic oligonucleotide
auacaaccucugguguaag

SEQ ID NO: 1154492 - RNA, 19 nt, Artificial Sequence
  Description of Artificial Sequence: Synthetic oligonucleotide
aucguaggacucuggcuuu

SEQ ID NO: 1154493 - RNA, 19 nt, Artificial Sequence
  Description of Artificial Sequence: Synthetic oligonucleotide
caagcagccaucggcccac

SEQ ID NO: 1154494 - RNA, 19 nt, Artificial Sequence
  Description of Artificial Sequence: Synthetic oligonucleotide
ugauucccagaagccggug

SEQ ID NO: 1154495 - RNA, 19 nt, Artificial Sequence
  Description of Artificial Sequence: Synthetic oligonucleotide
gugccauauugcccuggcc

SEQ ID NO: 1154496 - RNA, 19 nt, Artificial Sequence
  Description of Artificial Sequence: Synthetic oligonucleotide
cucuccgggacucagcacu

SEQ ID NO: 1154497 - RNA, 19 nt, Artificial Sequence
  Description of Artificial Sequence: Synthetic oligonucleotide
gaagugcucuucagaauua

SEQ ID NO: 1154498 - RNA, 19 nt, Artificial Sequence
  Description of Artificial Sequence: Synthetic oligonucleotide
gacagacgugauucccaga

SEQ ID NO: 1154499 - RNA, 19 nt, Artificial Sequence
  Description of Artificial Sequence: Synthetic oligonucleotide
gaggcgguacugacugacc

SEQ ID NO: 1154500 - RNA, 19 nt, Artificial Sequence
  Description of Artificial Sequence: Synthetic oligonucleotide
ggauaucguaggacucugg

SEQ ID NO: 1154501 - RNA, 19 nt, Artificial Sequence
  Description of Artificial Sequence: Synthetic oligonucleotide
agcagggugcuaauaccca

SEQ ID NO: 1154502 - RNA, 19 nt, Artificial Sequence
  Description of Artificial Sequence: Synthetic oligonucleotide
gucaugauucaggauuuua

SEQ ID NO: 1154503 - RNA, 19 nt, Artificial Sequence
  Description of Artificial Sequence: Synthetic oligonucleotide
uuccgucagccuaguuacu

SEQ ID NO: 1154504 - RNA, 19 nt, Artificial Sequence
  Description of Artificial Sequence: Synthetic oligonucleotide
agcgccguaauggcaguga

SEQ ID NO: 1154505 - RNA, 19 nt, Artificial Sequence
  Description of Artificial Sequence: Synthetic oligonucleotide
ccaaggagccugauuggug

SEQ ID NO: 1154506 - RNA, 19 nt, Artificial Sequence
  Description of Artificial Sequence: Synthetic oligonucleotide
gcacaccuuagugacauuc

SEQ ID NO: 1154507 - RNA, 19 nt, Artificial Sequence
  Description of Artificial Sequence: Synthetic oligonucleotide
gcauguguuaauacaaccu

SEQ ID NO: 1154508 - RNA, 19 nt, Artificial Sequence
  Description of Artificial Sequence: Synthetic oligonucleotide
gagccguaaggaagaccag

SEQ ID NO: 1154509 - RNA, 19 nt, Artificial Sequence
  Description of Artificial Sequence: Synthetic oligonucleotide
agagcgccguaauggcagu

SEQ ID NO: 1154510 - RNA, 19 nt, Artificial Sequence
  Description of Artificial Sequence: Synthetic oligonucleotide
aggacgccugcugccaaag

SEQ ID NO: 1154511 - RNA, 19 nt, Artificial Sequence
  Description of Artificial Sequence: Synthetic oligonucleotide
gggacucagcacuucccug

SEQ ID NO: 1154512 - RNA, 19 nt, Artificial Sequence
  Description of Artificial Sequence: Synthetic oligonucleotide
ucuccgggacucagcacuu

SEQ ID NO: 1154513 - RNA, 19 nt, Artificial Sequence
  Description of Artificial Sequence: Synthetic oligonucleotide
acgccaacccuuucuccaa

SEQ ID NO: 1154514 - RNA, 19 nt, Artificial Sequence
  Description of Artificial Sequence: Synthetic oligonucleotide
gccauauugcccuggccuc

SEQ ID NO: 1154515 - RNA, 19 nt, Artificial Sequence
  Description of Artificial Sequence: Synthetic oligonucleotide
cccauuuuagggaaggagu

SEQ ID NO: 1154516 - RNA, 19 nt, Artificial Sequence
  Description of Artificial Sequence: Synthetic oligonucleotide
gugggauucucgaaaacau

SEQ ID NO: 1154517 - RNA, 19 nt, Artificial Sequence
  Description of Artificial Sequence: Synthetic oligonucleotide
gauguacgcaaggccuaca

SEQ ID NO: 1154518 - RNA, 19 nt, Artificial Sequence
  Description of Artificial Sequence: Synthetic oligonucleotide
guugcugagagugcuugcu

SEQ ID NO: 1154519 - RNA, 19 nt, Artificial Sequence
  Description of Artificial Sequence: Synthetic oligonucleotide
aggagccugauuggugugu

SEQ ID NO: 1154520 - RNA, 19 nt, Artificial Sequence
  Description of Artificial Sequence: Synthetic oligonucleotide
ggaaauagagcgccguaau

SEQ ID NO: 1154521 - RNA, 19 nt, Artificial Sequence
  Description of Artificial Sequence: Synthetic oligonucleotide
gagcccgacacugcggcuc

SEQ ID NO: 1154522 - RNA, 19 nt, Artificial Sequence
  Description of Artificial Sequence: Synthetic oligonucleotide
ggauccaagagucucccau

SEQ ID NO: 1154523 - RNA, 19 nt, Artificial Sequence
  Description of Artificial Sequence: Synthetic oligonucleotide
uaccgucccacugcacaca

SEQ ID NO: 1154524 - RNA, 19 nt, Artificial Sequence
  Description of Artificial Sequence: Synthetic oligonucleotide
gcugcaaccccacugugcu

SEQ ID NO: 1154525 - RNA, 19 nt, Artificial Sequence
  Description of Artificial Sequence: Synthetic oligonucleotide
ccguguuuuguuaccagca

SEQ ID NO: 1154526 - RNA, 19 nt, Artificial Sequence
  Description of Artificial Sequence: Synthetic oligonucleotide
ccguaaggaagaccaggcc

SEQ ID NO: 1154527 - RNA, 19 nt, Artificial Sequence
  Description of Artificial Sequence: Synthetic oligonucleotide
aagccacauagggcaagaa

SEQ ID NO: 1154528 - RNA, 19 nt, Artificial Sequence
  Description of Artificial Sequence: Synthetic oligonucleotide
gggauaucguaggacucug

SEQ ID NO: 1154529 - RNA, 19 nt, Artificial Sequence
  Description of Artificial Sequence: Synthetic oligonucleotide
ccgucagccuaguuacucc

SEQ ID NO: 1154530 - RNA, 19 nt, Artificial Sequence
  Description of Artificial Sequence: Synthetic oligonucleotide
gccagauuccgucagccua

SEQ ID NO: 1154531 - RNA, 19 nt, Artificial Sequence
  Description of Artificial Sequence: Synthetic oligonucleotide
gugacauucuugauccagu

SEQ ID NO: 1154532 - RNA, 19 nt, Artificial Sequence
  Description of Artificial Sequence: Synthetic oligonucleotide
ugucaugauucaggauuuu

SEQ ID NO: 1154533 - RNA, 19 nt, Artificial Sequence
  Description of Artificial Sequence: Synthetic oligonucleotide
cuccaccaauuuggaaacc

SEQ ID NO: 1154534 - RNA, 19 nt, Artificial Sequence
  Description of Artificial Sequence: Synthetic oligonucleotide
acggcugacgccaacccuu

SEQ ID NO: 1154535 - RNA, 19 nt, Artificial Sequence
  Description of Artificial Sequence: Synthetic oligonucleotide
gcugcgaggcgguacugac

SEQ ID NO: 1154536 - RNA, 19 nt, Artificial Sequence
  Description of Artificial Sequence: Synthetic oligonucleotide
acuaagccacauagggcaa

SEQ ID NO: 1154537 - RNA, 19 nt, Artificial Sequence
  Description of Artificial Sequence: Synthetic oligonucleotide
gccacgaaagccccugaga

SEQ ID NO: 1154538 - RNA, 19 nt, Artificial Sequence
  Description of Artificial Sequence: Synthetic oligonucleotide
cacauggcauguguuaaua

SEQ ID NO: 1154539 - RNA, 19 nt, Artificial Sequence
  Description of Artificial Sequence: Synthetic oligonucleotide
gucucccauuuuagggaag

SEQ ID NO: 1154540 - RNA, 19 nt, Artificial Sequence
  Description of Artificial Sequence: Synthetic oligonucleotide
cuaauacccaaggccaccu

SEQ ID NO: 1154541 - RNA, 19 nt, Artificial Sequence
  Description of Artificial Sequence: Synthetic oligonucleotide
gugcccaucucaaaauagu

SEQ ID NO: 1154542 - RNA, 19 nt, Artificial Sequence
  Description of Artificial Sequence: Synthetic oligonucleotide
aggauguacgcaaggccua

SEQ ID NO: 1154543 - RNA, 19 nt, Artificial Sequence
  Description of Artificial Sequence: Synthetic oligonucleotide
ggugcgaguauuccaugua

SEQ ID NO: 1154544 - RNA, 19 nt, Artificial Sequence
  Description of Artificial Sequence: Synthetic oligonucleotide
auauugcccuggccucaga

SEQ ID NO: 1154545 - RNA, 19 nt, Artificial Sequence
  Description of Artificial Sequence: Synthetic oligonucleotide
cugacugacccgagggaua

SEQ ID NO: 1154546 - RNA, 19 nt, Artificial Sequence
  Description of Artificial Sequence: Synthetic oligonucleotide
cuggaaauugcugguauuu

SEQ ID NO: 1154547 - RNA, 19 nt, Artificial Sequence
  Description of Artificial Sequence: Synthetic oligonucleotide
cacuucccuggccuccaug

SEQ ID NO: 1154548 - RNA, 19 nt, Artificial Sequence
  Description of Artificial Sequence: Synthetic oligonucleotide
aggggaguuggaacauaca

SEQ ID NO: 1154549 - RNA, 19 nt, Artificial Sequence
  Description of Artificial Sequence: Synthetic oligonucleotide
ugcugaccccaggugggcu

SEQ ID NO: 1154550 - RNA, 19 nt, Artificial Sequence
  Description of Artificial Sequence: Synthetic oligonucleotide
ggcaguuuacaaucaccua

SEQ ID NO: 1154551 - RNA, 19 nt, Artificial Sequence
  Description of Artificial Sequence: Synthetic oligonucleotide
gucuaccauugagaggcca

SEQ ID NO: 1154552 - RNA, 19 nt, Artificial Sequence
  Description of Artificial Sequence: Synthetic oligonucleotide
cagccuaguuacuccucca

SEQ ID NO: 1154553 - RNA, 19 nt, Artificial Sequence
  Description of Artificial Sequence: Synthetic oligonucleotide
gaaggcuuucaggggcgga

SEQ ID NO: 1154554 - RNA, 19 nt, Artificial Sequence
  Description of Artificial Sequence: Synthetic oligonucleotide
ccgggacaggaaauagagc

SEQ ID NO: 1154555 - RNA, 19 nt, Artificial Sequence
  Description of Artificial Sequence: Synthetic oligonucleotide
agccggugaucaaacugca

SEQ ID NO: 1154556 - RNA, 19 nt, Artificial Sequence
  Description of Artificial Sequence: Synthetic oligonucleotide
caugagccaaagggcacca

SEQ ID NO: 1154557 - RNA, 19 nt, Artificial Sequence
  Description of Artificial Sequence: Synthetic oligonucleotide
agcaaccgcugcauacuga

SEQ ID NO: 1154558 - RNA, 19 nt, Artificial Sequence
  Description of Artificial Sequence: Synthetic oligonucleotide
ggagccugauuggugugug

SEQ ID NO: 1154559 - RNA, 19 nt, Artificial Sequence
  Description of Artificial Sequence: Synthetic oligonucleotide
cgaggagcccgacacugcg

SEQ ID NO: 1154560 - RNA, 19 nt, Artificial Sequence
  Description of Artificial Sequence: Synthetic oligonucleotide
ggauguacgcaaggccuac

SEQ ID NO: 1154561 - RNA, 19 nt, Artificial Sequence
  Description of Artificial Sequence: Synthetic oligonucleotide
ucaggggcggaaggagcaa

SEQ ID NO: 1154562 - RNA, 19 nt, Artificial Sequence
  Description of Artificial Sequence: Synthetic oligonucleotide
gucagccuaguuacuccuc

SEQ ID NO: 1154563 - RNA, 19 nt, Artificial Sequence
  Description of Artificial Sequence: Synthetic oligonucleotide
guauuccauguaccagaua

SEQ ID NO: 1154564 - RNA, 19 nt, Artificial Sequence
  Description of Artificial Sequence: Synthetic oligonucleotide
caaccccacugugcucugg

SEQ ID NO: 1154565 - RNA, 19 nt, Artificial Sequence
  Description of Artificial Sequence: Synthetic oligonucleotide
ccucagaggacgccugcug

SEQ ID NO: 1154566 - RNA, 19 nt, Artificial Sequence
  Description of Artificial Sequence: Synthetic oligonucleotide
ggaccguguuuuguuacca

SEQ ID NO: 1154567 - RNA, 19 nt, Artificial Sequence
  Description of Artificial Sequence: Synthetic oligonucleotide
cguaaggaagaccaggccu

SEQ ID NO: 1154568 - RNA, 19 nt, Artificial Sequence
  Description of Artificial Sequence: Synthetic oligonucleotide
gcuuucgaaggaaggggca

SEQ ID NO: 1154569 - RNA, 19 nt, Artificial Sequence
  Description of Artificial Sequence: Synthetic oligonucleotide
ccgggacucagcacuuccc

SEQ ID NO: 1154570 - RNA, 19 nt, Artificial Sequence
  Description of Artificial Sequence: Synthetic oligonucleotide
agcuaccgucccacugcac

SEQ ID NO: 1154571 - RNA, 19 nt, Artificial Sequence
  Description of Artificial Sequence: Synthetic oligonucleotide
caccacugagcagagccaa

SEQ ID NO: 1154572 - RNA, 19 nt, Artificial Sequence
  Description of Artificial Sequence: Synthetic oligonucleotide
agauuccgucagccuaguu

SEQ ID NO: 1154573 - RNA, 19 nt, Artificial Sequence
  Description of Artificial Sequence: Synthetic oligonucleotide
acucuccgggacaggaaau

SEQ ID NO: 1154574 - RNA, 19 nt, Artificial Sequence
  Description of Artificial Sequence: Synthetic oligonucleotide
ggcggaaggagcaaccgcu

SEQ ID NO: 1154575 - RNA, 19 nt, Artificial Sequence
  Description of Artificial Sequence: Synthetic oligonucleotide
cagaggaccguguuuuguu

SEQ ID NO: 1154576 - RNA, 19 nt, Artificial Sequence
  Description of Artificial Sequence: Synthetic oligonucleotide
cagcuaccgucccacugca

SEQ ID NO: 1154577 - RNA, 19 nt, Artificial Sequence
  Description of Artificial Sequence: Synthetic oligonucleotide
ccgagggauaucguaggac

SEQ ID NO: 1154578 - RNA, 19 nt, Artificial Sequence
  Description of Artificial Sequence: Synthetic oligonucleotide
ccacggcugacgccaaccc

SEQ ID NO: 1154579 - RNA, 19 nt, Artificial Sequence
  Description of Artificial Sequence: Synthetic oligonucleotide
gcucaguugcugagagugc

SEQ ID NO: 1154580 - RNA, 19 nt, Artificial Sequence
  Description of Artificial Sequence: Synthetic oligonucleotide
ccaucggcccacugccugc

SEQ ID NO: 1154581 - RNA, 19 nt, Artificial Sequence
  Description of Artificial Sequence: Synthetic oligonucleotide
gcgagcagagucacugcug

SEQ ID NO: 1154582 - RNA, 19 nt, Artificial Sequence
  Description of Artificial Sequence: Synthetic oligonucleotide
gaccccacauucggugcga

SEQ ID NO: 1154583 - RNA, 19 nt, Artificial Sequence
  Description of Artificial Sequence: Synthetic oligonucleotide
ccauuuuagggaaggaguu

SEQ ID NO: 1154584 - RNA, 19 nt, Artificial Sequence
  Description of Artificial Sequence: Synthetic oligonucleotide
caccagcaaagcgccucag

SEQ ID NO: 1154585 - RNA, 19 nt, Artificial Sequence
  Description of Artificial Sequence: Synthetic oligonucleotide
cuaauccacuuuucaccau

SEQ ID NO: 1154586 - RNA, 19 nt, Artificial Sequence
  Description of Artificial Sequence: Synthetic oligonucleotide
gugugucugugugugugua

SEQ ID NO: 1154587 - RNA, 19 nt, Artificial Sequence
  Description of Artificial Sequence: Synthetic oligonucleotide
cgagggauaucguaggacu

SEQ ID NO: 1154588 - RNA, 19 nt, Artificial Sequence
  Description of Artificial Sequence: Synthetic oligonucleotide
auacaugagcagggugcua

SEQ ID NO: 1154589 - RNA, 19 nt, Artificial Sequence
  Description of Artificial Sequence: Synthetic oligonucleotide
gcgccguaauggcagugac

SEQ ID NO: 1154590 - RNA, 19 nt, Artificial Sequence
  Description of Artificial Sequence: Synthetic oligonucleotide
cucuccgggacaggaaaua

SEQ ID NO: 1154591 - RNA, 19 nt, Artificial Sequence
  Description of Artificial Sequence: Synthetic oligonucleotide
cuacagcucgaccccacau

SEQ ID NO: 1154592 - RNA, 19 nt, Artificial Sequence
  Description of Artificial Sequence: Synthetic oligonucleotide
cgaccccacauucggugcg

SEQ ID NO: 1154593 - RNA, 19 nt, Artificial Sequence
  Description of Artificial Sequence: Synthetic oligonucleotide
cccacauucggugcgagua

SEQ ID NO: 1154594 - RNA, 19 nt, Artificial Sequence
  Description of Artificial Sequence: Synthetic oligonucleotide
gcggaaggagcaaccgcug

SEQ ID NO: 1154595 - RNA, 19 nt, Artificial Sequence
  Description of Artificial Sequence: Synthetic oligonucleotide
gcccgcauccaguccugcc

SEQ ID NO: 1154596 - RNA, 19 nt, Artificial Sequence
  Description of Artificial Sequence: Synthetic oligonucleotide
gcauccaguccugccacga

SEQ ID NO: 1154597 - RNA, 19 nt, Artificial Sequence
  Description of Artificial Sequence: Synthetic oligonucleotide
caaagcgagcagagucacu

SEQ ID NO: 1154598 - RNA, 19 nt, Artificial Sequence
  Description of Artificial Sequence: Synthetic oligonucleotide
gggauccaagagucuccca

SEQ ID NO: 1154599 - RNA, 19 nt, Artificial Sequence
  Description of Artificial Sequence: Synthetic oligonucleotide
cgaggcgguacugacugac

SEQ ID NO: 1154600 - RNA, 19 nt, Artificial Sequence
  Description of Artificial Sequence: Synthetic oligonucleotide
cugccacgaaagccccuga

SEQ ID NO: 1154601 - RNA, 19 nt, Artificial Sequence
  Description of Artificial Sequence: Synthetic oligonucleotide
caccuguguguaugccaaa

SEQ ID NO: 1154602 - RNA, 19 nt, Artificial Sequence
  Description of Artificial Sequence: Synthetic oligonucleotide
cacggcugacgccaacccu

SEQ ID NO: 1154603 - RNA, 19 nt, Artificial Sequence
  Description of Artificial Sequence: Synthetic oligonucleotide
cugcgaggcgguacugacu

SEQ ID NO: 1154604 - RNA, 19 nt, Artificial Sequence
  Description of Artificial Sequence: Synthetic oligonucleotide
gcaaccccacugugcucug

SEQ ID NO: 1154605 - RNA, 19 nt, Artificial Sequence
  Description of Artificial Sequence: Synthetic oligonucleotide
cugacccgagggauaucgu

SEQ ID NO: 1154606 - RNA, 19 nt, Artificial Sequence
  Description of Artificial Sequence: Synthetic oligonucleotide
ccauauugcccuggccuca

SEQ ID NO: 1154607 - RNA, 19 nt, Artificial Sequence
  Description of Artificial Sequence: Synthetic oligonucleotide
ccaaggcaguuucaguccu

SEQ ID NO: 1154608 - RNA, 19 nt, Artificial Sequence
  Description of Artificial Sequence: Synthetic oligonucleotide
ggcugcgaggcgguacuga

SEQ ID NO: 1154609 - RNA, 19 nt, Artificial Sequence
  Description of Artificial Sequence: Synthetic oligonucleotide
cccgagggauaucguagga

SEQ ID NO: 1154610 - RNA, 19 nt, Artificial Sequence
  Description of Artificial Sequence: Synthetic oligonucleotide
ccagauugcaaagccacuu

SEQ ID NO: 1154611 - RNA, 19 nt, Artificial Sequence
  Description of Artificial Sequence: Synthetic oligonucleotide
cgaaggcuuucaggggcgg

SEQ ID NO: 1154612 - RNA, 19 nt, Artificial Sequence
  Description of Artificial Sequence: Synthetic oligonucleotide
cacauucggugcgaguauu

SEQ ID NO: 1154613 - RNA, 19 nt, Artificial Sequence
  Description of Artificial Sequence: Synthetic oligonucleotide
gccuacagcucgaccccac

SEQ ID NO: 1154614 - RNA, 19 nt, Artificial Sequence
  Description of Artificial Sequence: Synthetic oligonucleotide
ggacgaggagcccgacacu

SEQ ID NO: 1154615 - RNA, 19 nt, Artificial Sequence
  Description of Artificial Sequence: Synthetic oligonucleotide
cgccguaauggcagugaca

SEQ ID NO: 1154616 - RNA, 19 nt, Artificial Sequence
  Description of Artificial Sequence: Synthetic oligonucleotide
ggccuacagcucgacccca

SEQ ID NO: 1154617 - RNA, 19 nt, Artificial Sequence
  Description of Artificial Sequence: Synthetic oligonucleotide
ccguaauggcagugacaga

SEQ ID NO: 1154618 - RNA, 19 nt, Artificial Sequence
  Description of Artificial Sequence: Synthetic oligonucleotide
cagauuccgucagccuagu

SEQ ID NO: 1154619 - RNA, 19 nt, Artificial Sequence
  Description of Artificial Sequence: Synthetic oligonucleotide
cgucagccuaguuacuccu

SEQ ID NO: 1154620 - RNA, 19 nt, Artificial Sequence
  Description of Artificial Sequence: Synthetic oligonucleotide
cguaggacucuggcuuuuc

SEQ ID NO: 1154621 - RNA, 19 nt, Artificial Sequence
  Description of Artificial Sequence: Synthetic oligonucleotide
ggcccgcauccaguccugc

SEQ ID NO: 1154622 - RNA, 19 nt, Artificial Sequence
  Description of Artificial Sequence: Synthetic oligonucleotide
gcgaggcgguacugacuga

SEQ ID NO: 1154623 - RNA, 19 nt, Artificial Sequence
  Description of Artificial Sequence: Synthetic oligonucleotide
cacucuuaucaggcaguuu

SEQ ID NO: 1154624 - RNA, 19 nt, Artificial Sequence
  Description of Artificial Sequence: Synthetic oligonucleotide
ccagaggaccguguuuugu

SEQ ID NO: 1154625 - RNA, 19 nt, Artificial Sequence
  Description of Artificial Sequence: Synthetic oligonucleotide
agccccugagagagccgua

SEQ ID NO: 1154626 - RNA, 19 nt, Artificial Sequence
  Description of Artificial Sequence: Synthetic oligonucleotide
gggcaccacugagcagagc

SEQ ID NO: 1154627 - RNA, 19 nt, Artificial Sequence
  Description of Artificial Sequence: Synthetic oligonucleotide
ccgacacugcggcucccca

SEQ ID NO: 1154628 - RNA, 19 nt, Artificial Sequence
  Description of Artificial Sequence: Synthetic oligonucleotide
cgcaaggccuacagcucga

SEQ ID NO: 1154629 - RNA, 19 nt, Artificial Sequence
  Description of Artificial Sequence: Synthetic oligonucleotide
ggagcccgacacugcggcu

SEQ ID NO: 1154630 - RNA, 19 nt, Artificial Sequence
  Description of Artificial Sequence: Synthetic oligonucleotide
gggcugcgaggcgguacug

SEQ ID NO: 1154631 - RNA, 19 nt, Artificial Sequence
  Description of Artificial Sequence: Synthetic oligonucleotide
ccacauucggugcgaguau

SEQ ID NO: 1154632 - RNA, 19 nt, Artificial Sequence
  Description of Artificial Sequence: Synthetic oligonucleotide
cggugcgaguauuccaugu

SEQ ID NO: 1154633 - RNA, 19 nt, Artificial Sequence
  Description of Artificial Sequence: Synthetic oligonucleotide
gcucgaccccacauucggu

SEQ ID NO: 1154634 - RNA, 19 nt, Artificial Sequence
  Description of Artificial Sequence: Synthetic oligonucleotide
ccccacauucggugcgagu

SEQ ID NO: 1154635 - RNA, 19 nt, Artificial Sequence
  Description of Artificial Sequence: Synthetic oligonucleotide
auacgaagaagucugaggc

SEQ ID NO: 1154636 - RNA, 19 nt, Artificial Sequence
  Description of Artificial Sequence: Synthetic oligonucleotide
gugacuaccaucuucaugg

SEQ ID NO: 1154637 - RNA, 19 nt, Artificial Sequence
  Description of Artificial Sequence: Synthetic oligonucleotide
cuuguaagcauuaagugcc

SEQ ID NO: 1154638 - RNA, 19 nt, Artificial Sequence
  Description of Artificial Sequence: Synthetic oligonucleotide
cuugucaaagcuuaugacg

SEQ ID NO: 1154639 - RNA, 19 nt, Artificial Sequence
  Description of Artificial Sequence: Synthetic oligonucleotide
aaagcuuaugacgugggcg

SEQ ID NO: 1154640 - RNA, 19 nt, Artificial Sequence
  Description of Artificial Sequence: Synthetic oligonucleotide
guuacuuuagggaaagugg

SEQ ID NO: 1154641 - RNA, 19 nt, Artificial Sequence
  Description of Artificial Sequence: Synthetic oligonucleotide
aacuaggggacccuugaac

SEQ ID NO: 1154642 - RNA, 19 nt, Artificial Sequence
  Description of Artificial Sequence: Synthetic oligonucleotide
cucaauuugggcaaggcac

SEQ ID NO: 1154643 - RNA, 19 nt, Artificial Sequence
  Description of Artificial Sequence: Synthetic oligonucleotide
aaagccucccgguucuucc

SEQ ID NO: 1154644 - RNA, 19 nt, Artificial Sequence
  Description of Artificial Sequence: Synthetic oligonucleotide
uugucaaagcuuaugacgu

SEQ ID NO: 1154645 - RNA, 19 nt, Artificial Sequence
  Description of Artificial Sequence: Synthetic oligonucleotide
cuucaauuccuccacauag

SEQ ID NO: 1154646 - RNA, 19 nt, Artificial Sequence
  Description of Artificial Sequence: Synthetic oligonucleotide
acacaaagcgcucacggac

SEQ ID NO: 1154647 - RNA, 19 nt, Artificial Sequence
  Description of Artificial Sequence: Synthetic oligonucleotide
agggaaaguggacacagac

SEQ ID NO: 1154648 - RNA, 19 nt, Artificial Sequence
  Description of Artificial Sequence: Synthetic oligonucleotide
uucucacucaauuugggca

SEQ ID NO: 1154649 - RNA, 19 nt, Artificial Sequence
  Description of Artificial Sequence: Synthetic oligonucleotide
uugaauaaguccagaggag

SEQ ID NO: 1154650 - RNA, 19 nt, Artificial Sequence
  Description of Artificial Sequence: Synthetic oligonucleotide
cauacgaagaagucugagg

SEQ ID NO: 1154651 - RNA, 19 nt, Artificial Sequence
  Description of Artificial Sequence: Synthetic oligonucleotide
ugcaacucguccaggaagg

SEQ ID NO: 1154652 - RNA, 19 nt, Artificial Sequence
  Description of Artificial Sequence: Synthetic oligonucleotide
aauaaguccagaggaguag

SEQ ID NO: 1154653 - RNA, 19 nt, Artificial Sequence
  Description of Artificial Sequence: Synthetic oligonucleotide
ucucggaagagccggaucc

SEQ ID NO: 1154654 - RNA, 19 nt, Artificial Sequence
  Description of Artificial Sequence: Synthetic oligonucleotide
uguaacgcgggucagugac

SEQ ID NO: 1154655 - RNA, 19 nt, Artificial Sequence
  Description of Artificial Sequence: Synthetic oligonucleotide
aagagcaaccuugagaggu

SEQ ID NO: 1154656 - RNA, 19 nt, Artificial Sequence
  Description of Artificial Sequence: Synthetic oligonucleotide
cugagggugagugagaccg

SEQ ID NO: 1154657 - RNA, 19 nt, Artificial Sequence
  Description of Artificial Sequence: Synthetic oligonucleotide
aagcuuaugacgugggcga

SEQ ID NO: 1154658 - RNA, 19 nt, Artificial Sequence
  Description of Artificial Sequence: Synthetic oligonucleotide
cugagucgcacacaaagcg

SEQ ID NO: 1154659 - RNA, 19 nt, Artificial Sequence
  Description of Artificial Sequence: Synthetic oligonucleotide
ugucucaugcaacucgucc

SEQ ID NO: 1154660 - RNA, 19 nt, Artificial Sequence
  Description of Artificial Sequence: Synthetic oligonucleotide
cauacaucgggucccaggg

SEQ ID NO: 1154661 - RNA, 19 nt, Artificial Sequence
  Description of Artificial Sequence: Synthetic oligonucleotide
ucuacuggcaucacccacc

SEQ ID NO: 1154662 - RNA, 19 nt, Artificial Sequence
  Description of Artificial Sequence: Synthetic oligonucleotide
uuucugagaacuaggggac

SEQ ID NO: 1154663 - RNA, 19 nt, Artificial Sequence
  Description of Artificial Sequence: Synthetic oligonucleotide
gaacacauacaucgggucc

SEQ ID NO: 1154664 - RNA, 19 nt, Artificial Sequence
  Description of Artificial Sequence: Synthetic oligonucleotide
guaucuacuggcaucaccc

SEQ ID NO: 1154665 - RNA, 19 nt, Artificial Sequence
  Description of Artificial Sequence: Synthetic oligonucleotide
uaaagcucggaugugcucc

SEQ ID NO: 1154666 - RNA, 19 nt, Artificial Sequence
  Description of Artificial Sequence: Synthetic oligonucleotide
ugauauagacugcccaucu

SEQ ID NO: 1154667 - RNA, 19 nt, Artificial Sequence
  Description of Artificial Sequence: Synthetic oligonucleotide
uccgaugugucccagccug

SEQ ID NO: 1154668 - RNA, 19 nt, Artificial Sequence
  Description of Artificial Sequence: Synthetic oligonucleotide
ucacacuguaucuacuggc

SEQ ID NO: 1154669 - RNA, 19 nt, Artificial Sequence
  Description of Artificial Sequence: Synthetic oligonucleotide
gaaccuugccuucaauucc

SEQ ID NO: 1154670 - RNA, 19 nt, Artificial Sequence
  Description of Artificial Sequence: Synthetic oligonucleotide
gauggguuacuuuagggaa

SEQ ID NO: 1154671 - RNA, 19 nt, Artificial Sequence
  Description of Artificial Sequence: Synthetic oligonucleotide
ucaauuugggcaaggcacu

SEQ ID NO: 1154672 - RNA, 19 nt, Artificial Sequence
  Description of Artificial Sequence: Synthetic oligonucleotide
ugggccugcgaccaugugg

SEQ ID NO: 1154673 - RNA, 19 nt, Artificial Sequence
  Description of Artificial Sequence: Synthetic oligonucleotide
cuaacaguaguguguuggg

SEQ ID NO: 1154674 - RNA, 19 nt, Artificial Sequence
  Description of Artificial Sequence: Synthetic oligonucleotide
acuaggggacccuugaaca

SEQ ID NO: 1154675 - RNA, 19 nt, Artificial Sequence
  Description of Artificial Sequence: Synthetic oligonucleotide
agacauacgaagaagucug

SEQ ID NO: 1154676 - RNA, 19 nt, Artificial Sequence
  Description of Artificial Sequence: Synthetic oligonucleotide
ugcucaaaggcugagucgc

SEQ ID NO: 1154677 - RNA, 19 nt, Artificial Sequence
  Description of Artificial Sequence: Synthetic oligonucleotide
aaccuugagaggugcuaac

SEQ ID NO: 1154678 - RNA, 19 nt, Artificial Sequence
  Description of Artificial Sequence: Synthetic oligonucleotide
ugaauaaguccagaggagu

SEQ ID NO: 1154679 - RNA, 19 nt, Artificial Sequence
  Description of Artificial Sequence: Synthetic oligonucleotide
uauagacugcccaucucug

SEQ ID NO: 1154680 - RNA, 19 nt, Artificial Sequence
  Description of Artificial Sequence: Synthetic oligonucleotide
aacagaacacauacaucgg

SEQ ID NO: 1154681 - RNA, 19 nt, Artificial Sequence
  Description of Artificial Sequence: Synthetic oligonucleotide
uugagaggugcuaacagua

SEQ ID NO: 1154682 - RNA, 19 nt, Artificial Sequence
  Description of Artificial Sequence: Synthetic oligonucleotide
ugugauauagacugcccau

SEQ ID NO: 1154683 - RNA, 19 nt, Artificial Sequence
  Description of Artificial Sequence: Synthetic oligonucleotide
ugagucgcacacaaagcgc

SEQ ID NO: 1154684 - RNA, 19 nt, Artificial Sequence
  Description of Artificial Sequence: Synthetic oligonucleotide
aacucguccaggaaggucu

SEQ ID NO: 1154685 - RNA, 19 nt, Artificial Sequence
  Description of Artificial Sequence: Synthetic oligonucleotide
guaagcauuaagugccugc

SEQ ID NO: 1154686 - RNA, 19 nt, Artificial Sequence
  Description of Artificial Sequence: Synthetic oligonucleotide
aggaguagagcccggcugg

SEQ ID NO: 1154687 - RNA, 19 nt, Artificial Sequence
  Description of Artificial Sequence: Synthetic oligonucleotide
accaugugggccuuguaag

SEQ ID NO: 1154688 - RNA, 19 nt, Artificial Sequence
  Description of Artificial Sequence: Synthetic oligonucleotide
ucuaaagcucggaugugcu

SEQ ID NO: 1154689 - RNA, 19 nt, Artificial Sequence
  Description of Artificial Sequence: Synthetic oligonucleotide
acuaccaucuucauggccu

SEQ ID NO: 1154690 - RNA, 19 nt, Artificial Sequence
  Description of Artificial Sequence: Synthetic oligonucleotide
gaugcuaaagggugaggac

SEQ ID NO: 1154691 - RNA, 19 nt, Artificial Sequence
  Description of Artificial Sequence: Synthetic oligonucleotide
auagacugcccaucucugg

SEQ ID NO: 1154692 - RNA, 19 nt, Artificial Sequence
  Description of Artificial Sequence: Synthetic oligonucleotide
uguacuaguuucugagaac

SEQ ID NO: 1154693 - RNA, 19 nt, Artificial Sequence
  Description of Artificial Sequence: Synthetic oligonucleotide
aucuacuggcaucacccac

SEQ ID NO: 1154694 - RNA, 19 nt, Artificial Sequence
  Description of Artificial Sequence: Synthetic oligonucleotide
augugauauagacugccca

SEQ ID NO: 1154695 - RNA, 19 nt, Artificial Sequence
  Description of Artificial Sequence: Synthetic oligonucleotide
acgaagaagucugaggcag

SEQ ID NO: 1154696 - RNA, 19 nt, Artificial Sequence
  Description of Artificial Sequence: Synthetic oligonucleotide
cuucucacucaauuugggc

SEQ ID NO: 1154697 - RNA, 19 nt, Artificial Sequence
  Description of Artificial Sequence: Synthetic oligonucleotide
agugagaccgcuugcgaug

SEQ ID NO: 1154698 - RNA, 19 nt, Artificial Sequence
  Description of Artificial Sequence: Synthetic oligonucleotide
agacuauugaaggucagcu

SEQ ID NO: 1154699 - RNA, 19 nt, Artificial Sequence
  Description of Artificial Sequence: Synthetic oligonucleotide
caccccaugugauauagac

SEQ ID NO: 1154700 - RNA, 19 nt, Artificial Sequence
  Description of Artificial Sequence: Synthetic oligonucleotide
caugugauauagacugccc

SEQ ID NO: 1154701 - RNA, 19 nt, Artificial Sequence
  Description of Artificial Sequence: Synthetic oligonucleotide
aaucccuucucacacugua

SEQ ID NO: 1154702 - RNA, 19 nt, Artificial Sequence
  Description of Artificial Sequence: Synthetic oligonucleotide
gcuaacaguaguguguugg

SEQ ID NO: 1154703 - RNA, 19 nt, Artificial Sequence
  Description of Artificial Sequence: Synthetic oligonucleotide
uguugccucgcguccagcg

SEQ ID NO: 1154704 - RNA, 19 nt, Artificial Sequence
  Description of Artificial Sequence: Synthetic oligonucleotide
gucaaagcuuaugacgugg

SEQ ID NO: 1154705 - RNA, 19 nt, Artificial Sequence
  Description of Artificial Sequence: Synthetic oligonucleotide
ucucacucaauuugggcaa

SEQ ID NO: 1154706 - RNA, 19 nt, Artificial Sequence
  Description of Artificial Sequence: Synthetic oligonucleotide
acaguaguguguugggaug

SEQ ID NO: 1154707 - RNA, 19 nt, Artificial Sequence
  Description of Artificial Sequence: Synthetic oligonucleotide
ugcuucgaaaggcagcuuc

SEQ ID NO: 1154708 - RNA, 19 nt, Artificial Sequence
  Description of Artificial Sequence: Synthetic oligonucleotide
ccccaugugauauagacug

SEQ ID NO: 1154709 - RNA, 19 nt, Artificial Sequence
  Description of Artificial Sequence: Synthetic oligonucleotide
acuuuagggaaaguggaca

SEQ ID NO: 1154710 - RNA, 19 nt, Artificial Sequence
  Description of Artificial Sequence: Synthetic oligonucleotide
ucaugcaacucguccagga

SEQ ID NO: 1154711 - RNA, 19 nt, Artificial Sequence
  Description of Artificial Sequence: Synthetic oligonucleotide
caaggcacuguaacgcggg

SEQ ID NO: 1154712 - RNA, 19 nt, Artificial Sequence
  Description of Artificial Sequence: Synthetic oligonucleotide
gaggaagcaaugguggagc

SEQ ID NO: 1154713 - RNA, 19 nt, Artificial Sequence
  Description of Artificial Sequence: Synthetic oligonucleotide
agaacuaggggacccuuga

SEQ ID NO: 1154714 - RNA, 19 nt, Artificial Sequence
  Description of Artificial Sequence: Synthetic oligonucleotide
uagacugcccaucucuggu

SEQ ID NO: 1154715 - RNA, 19 nt, Artificial Sequence
  Description of Artificial Sequence: Synthetic oligonucleotide
uacgaagaagucugaggca

SEQ ID NO: 1154716 - RNA, 19 nt, Artificial Sequence
  Description of Artificial Sequence: Synthetic oligonucleotide
cacaaagcgcucacggacc

SEQ ID NO: 1154717 - RNA, 19 nt, Artificial Sequence
  Description of Artificial Sequence: Synthetic oligonucleotide
ucagcucgcuuuccgaugu

SEQ ID NO: 1154718 - RNA, 19 nt, Artificial Sequence
  Description of Artificial Sequence: Synthetic oligonucleotide
ugcuguaggaguguccgcc

SEQ ID NO: 1154719 - RNA, 19 nt, Artificial Sequence
  Description of Artificial Sequence: Synthetic oligonucleotide
guugggauggguuacuuua

SEQ ID NO: 1154720 - RNA, 19 nt, Artificial Sequence
  Description of Artificial Sequence: Synthetic oligonucleotide
aaagcgcucacggaccucu

SEQ ID NO: 1154721 - RNA, 19 nt, Artificial Sequence
  Description of Artificial Sequence: Synthetic oligonucleotide
aaagcggacaucagugcug

SEQ ID NO: 1154722 - RNA, 19 nt, Artificial Sequence
  Description of Artificial Sequence: Synthetic oligonucleotide
aucauggaaccuugccuuc

SEQ ID NO: 1154723 - RNA, 19 nt, Artificial Sequence
  Description of Artificial Sequence: Synthetic oligonucleotide
uuucccggaaaucccuucu

SEQ ID NO: 1154724 - RNA, 19 nt, Artificial Sequence
  Description of Artificial Sequence: Synthetic oligonucleotide
ugagugagaccgcuugcga

SEQ ID NO: 1154725 - RNA, 19 nt, Artificial Sequence
  Description of Artificial Sequence: Synthetic oligonucleotide
acuguacuaguuucugaga

SEQ ID NO: 1154726 - RNA, 19 nt, Artificial Sequence
  Description of Artificial Sequence: Synthetic oligonucleotide
cacgaagucccaaggcagg

SEQ ID NO: 1154727 - RNA, 19 nt, Artificial Sequence
  Description of Artificial Sequence: Synthetic oligonucleotide
cugcucaaaggcugagucg

SEQ ID NO: 1154728 - RNA, 19 nt, Artificial Sequence
  Description of Artificial Sequence: Synthetic oligonucleotide
acugaugcuaaagggugag

SEQ ID NO: 1154729 - RNA, 19 nt, Artificial Sequence
  Description of Artificial Sequence: Synthetic oligonucleotide
cauucagucugcuccagca

SEQ ID NO: 1154730 - RNA, 19 nt, Artificial Sequence
  Description of Artificial Sequence: Synthetic oligonucleotide
gauauagacugcccaucuc

SEQ ID NO: 1154731 - RNA, 19 nt, Artificial Sequence
  Description of Artificial Sequence: Synthetic oligonucleotide
uuuagggaaaguggacaca

SEQ ID NO: 1154732 - RNA, 19 nt, Artificial Sequence
  Description of Artificial Sequence: Synthetic oligonucleotide
ggaaccuugccuucaauuc

SEQ ID NO: 1154733 - RNA, 19 nt, Artificial Sequence
  Description of Artificial Sequence: Synthetic oligonucleotide
cacauagaacuugaauaag

SEQ ID NO: 1154734 - RNA, 19 nt, Artificial Sequence
  Description of Artificial Sequence: Synthetic oligonucleotide
ugcgaugguguuucuugcc

SEQ ID NO: 1154735 - RNA, 19 nt, Artificial Sequence
  Description of Artificial Sequence: Synthetic oligonucleotide
aaagcucggaugugcuccu

SEQ ID NO: 1154736 - RNA, 19 nt, Artificial Sequence
  Description of Artificial Sequence: Synthetic oligonucleotide
aggugcuaacaguagugug

SEQ ID NO: 1154737 - RNA, 19 nt, Artificial Sequence
  Description of Artificial Sequence: Synthetic oligonucleotide
uugcgaugguguuucuugc

SEQ ID NO: 1154738 - RNA, 19 nt, Artificial Sequence
  Description of Artificial Sequence: Synthetic oligonucleotide
ucgcuuuccgauguguccc

SEQ ID NO: 1154739 - RNA, 19 nt, Artificial Sequence
  Description of Artificial Sequence: Synthetic oligonucleotide
aguguguugggauggguua

SEQ ID NO: 1154740 - RNA, 19 nt, Artificial Sequence
  Description of Artificial Sequence: Synthetic oligonucleotide
ugcgccgcauccuucgugc

SEQ ID NO: 1154741 - RNA, 19 nt, Artificial Sequence
  Description of Artificial Sequence: Synthetic oligonucleotide
gggauggguuacuuuaggg

SEQ ID NO: 1154742 - RNA, 19 nt, Artificial Sequence
  Description of Artificial Sequence: Synthetic oligonucleotide
uggaaccuugccuucaauu

SEQ ID NO: 1154743 - RNA, 19 nt, Artificial Sequence
  Description of Artificial Sequence: Synthetic oligonucleotide
agaggugcuaacaguagug

SEQ ID NO: 1154744 - RNA, 19 nt, Artificial Sequence
  Description of Artificial Sequence: Synthetic oligonucleotide
gccuuguaagcauuaagug

SEQ ID NO: 1154745 - RNA, 19 nt, Artificial Sequence
  Description of Artificial Sequence: Synthetic oligonucleotide
acgcgggucagugacuacc

SEQ ID NO: 1154746 - RNA, 19 nt, Artificial Sequence
  Description of Artificial Sequence: Synthetic oligonucleotide
gugagugagaccgcuugcg

SEQ ID NO: 1154747 - RNA, 19 nt, Artificial Sequence
  Description of Artificial Sequence: Synthetic oligonucleotide
ucccggaaaucccuucuca

SEQ ID NO: 1154748 - RNA, 19 nt, Artificial Sequence
  Description of Artificial Sequence: Synthetic oligonucleotide
caaaggcugagucgcacac

SEQ ID NO: 1154749 - RNA, 19 nt, Artificial Sequence
  Description of Artificial Sequence: Synthetic oligonucleotide
uaucuacuggcaucaccca

SEQ ID NO: 1154750 - RNA, 19 nt, Artificial Sequence
  Description of Artificial Sequence: Synthetic oligonucleotide
uaguguguugggauggguu

SEQ ID NO: 1154751 - RNA, 19 nt, Artificial Sequence
  Description of Artificial Sequence: Synthetic oligonucleotide
cucacgaagucccaaggca

SEQ ID NO: 1154752 - RNA, 19 nt, Artificial Sequence
  Description of Artificial Sequence: Synthetic oligonucleotide
cuguacuaguuucugagaa

SEQ ID NO: 1154753 - RNA, 19 nt, Artificial Sequence
  Description of Artificial Sequence: Synthetic oligonucleotide
aaccuugccuucaauuccu

SEQ ID NO: 1154754 - RNA, 19 nt, Artificial Sequence
  Description of Artificial Sequence: Synthetic oligonucleotide
cuaggggacccuugaacac

SEQ ID NO: 1154755 - RNA, 19 nt, Artificial Sequence
  Description of Artificial Sequence: Synthetic oligonucleotide
ugccucacgaagucccaag

SEQ ID NO: 1154756 - RNA, 19 nt, Artificial Sequence
  Description of Artificial Sequence: Synthetic oligonucleotide
aauuugggcaaggcacugu

SEQ ID NO: 1154757 - RNA, 19 nt, Artificial Sequence
  Description of Artificial Sequence: Synthetic oligonucleotide
cagaccagacauacgaaga

SEQ ID NO: 1154758 - RNA, 19 nt, Artificial Sequence
  Description of Artificial Sequence: Synthetic oligonucleotide
uguaagcauuaagugccug

SEQ ID NO: 1154759 - RNA, 19 nt, Artificial Sequence
  Description of Artificial Sequence: Synthetic oligonucleotide
ggcaaagcggacaucagug

SEQ ID NO: 1154760 - RNA, 19 nt, Artificial Sequence
  Description of Artificial Sequence: Synthetic oligonucleotide
guggacacagaccagacau

SEQ ID NO: 1154761 - RNA, 19 nt, Artificial Sequence
  Description of Artificial Sequence: Synthetic oligonucleotide
cuauugaaggucagcuuga

SEQ ID NO: 1154762 - RNA, 19 nt, Artificial Sequence
  Description of Artificial Sequence: Synthetic oligonucleotide
uguaggaguguccgccuuc

SEQ ID NO: 1154763 - RNA, 19 nt, Artificial Sequence
  Description of Artificial Sequence: Synthetic oligonucleotide
uugccucgcguccagcgca

SEQ ID NO: 1154764 - RNA, 19 nt, Artificial Sequence
  Description of Artificial Sequence: Synthetic oligonucleotide
auuugggcaaggcacugua

SEQ ID NO: 1154765 - RNA, 19 nt, Artificial Sequence
  Description of Artificial Sequence: Synthetic oligonucleotide
ucacucaauuugggcaagg

SEQ ID NO: 1154766 - RNA, 19 nt, Artificial Sequence
  Description of Artificial Sequence: Synthetic oligonucleotide
cagacuauugaaggucagc

SEQ ID NO: 1154767 - RNA, 19 nt, Artificial Sequence
  Description of Artificial Sequence: Synthetic oligonucleotide
cucugcgccgcauccuucg

SEQ ID NO: 1154768 - RNA, 19 nt, Artificial Sequence
  Description of Artificial Sequence: Synthetic oligonucleotide
gaagcccggguccuuaaga

SEQ ID NO: 1154769 - RNA, 19 nt, Artificial Sequence
  Description of Artificial Sequence: Synthetic oligonucleotide
guaggaguguccgccuucg

SEQ ID NO: 1154770 - RNA, 19 nt, Artificial Sequence
  Description of Artificial Sequence: Synthetic oligonucleotide
gguuagggagcucugccug

SEQ ID NO: 1154771 - RNA, 19 nt, Artificial Sequence
  Description of Artificial Sequence: Synthetic oligonucleotide
aguaguguguugggauggg

SEQ ID NO: 1154772 - RNA, 19 nt, Artificial Sequence
  Description of Artificial Sequence: Synthetic oligonucleotide
gaauaaguccagaggagua

SEQ ID NO: 1154773 - RNA, 19 nt, Artificial Sequence
  Description of Artificial Sequence: Synthetic oligonucleotide
gcucuugaaggccuguuug

SEQ ID NO: 1154774 - RNA, 19 nt, Artificial Sequence
  Description of Artificial Sequence: Synthetic oligonucleotide
ggcaaggcacuguaacgcg

SEQ ID NO: 1154775 - RNA, 19 nt, Artificial Sequence
  Description of Artificial Sequence: Synthetic oligonucleotide
aagcauuaagugccugcuu

SEQ ID NO: 1154776 - RNA, 19 nt, Artificial Sequence
  Description of Artificial Sequence: Synthetic oligonucleotide
cuaaagcucggaugugcuc

SEQ ID NO: 1154777 - RNA, 19 nt, Artificial Sequence
  Description of Artificial Sequence: Synthetic oligonucleotide
aggacuguacuaguuucug

SEQ ID NO: 1154778 - RNA, 19 nt, Artificial Sequence
  Description of Artificial Sequence: Synthetic oligonucleotide
ugccucagcaugcuucgaa

SEQ ID NO: 1154779 - RNA, 19 nt, Artificial Sequence
  Description of Artificial Sequence: Synthetic oligonucleotide
uccuguucucugaggguga

SEQ ID NO: 1154780 - RNA, 19 nt, Artificial Sequence
  Description of Artificial Sequence: Synthetic oligonucleotide
aaguccucgaaggcugugu

SEQ ID NO: 1154781 - RNA, 19 nt, Artificial Sequence
  Description of Artificial Sequence: Synthetic oligonucleotide
agucgcccagccuccagag

SEQ ID NO: 1154782 - RNA, 19 nt, Artificial Sequence
  Description of Artificial Sequence: Synthetic oligonucleotide
agcagacuauugaagguca

SEQ ID NO: 1154783 - RNA, 19 nt, Artificial Sequence
  Description of Artificial Sequence: Synthetic oligonucleotide
ucauggaaccuugccuuca

SEQ ID NO: 1154784 - RNA, 19 nt, Artificial Sequence
  Description of Artificial Sequence: Synthetic oligonucleotide
uucccugucuuuguccugu

SEQ ID NO: 1154785 - RNA, 19 nt, Artificial Sequence
  Description of Artificial Sequence: Synthetic oligonucleotide
ugguguuucuugccuuuuc

SEQ ID NO: 1154786 - RNA, 19 nt, Artificial Sequence
  Description of Artificial Sequence: Synthetic oligonucleotide
gugagaccgcuugcgaugg

SEQ ID NO: 1154787 - RNA, 19 nt, Artificial Sequence
  Description of Artificial Sequence: Synthetic oligonucleotide
cacucaauuugggcaaggc

SEQ ID NO: 1154788 - RNA, 19 nt, Artificial Sequence
  Description of Artificial Sequence: Synthetic oligonucleotide
aaggccuguuugccuucuc

SEQ ID NO: 1154789 - RNA, 19 nt, Artificial Sequence
  Description of Artificial Sequence: Synthetic oligonucleotide
cuuucggccuuuggugugg

SEQ ID NO: 1154790 - RNA, 19 nt, Artificial Sequence
  Description of Artificial Sequence: Synthetic oligonucleotide
aaggcacuguaacgcgggu

SEQ ID NO: 1154791 - RNA, 19 nt, Artificial Sequence
  Description of Artificial Sequence: Synthetic oligonucleotide
agcaugcuucgaaaggcag

SEQ ID NO: 1154792 - RNA, 19 nt, Artificial Sequence
  Description of Artificial Sequence: Synthetic oligonucleotide
gugauauagacugcccauc

SEQ ID NO: 1154793 - RNA, 19 nt, Artificial Sequence
  Description of Artificial Sequence: Synthetic oligonucleotide
gcacugaugcuaaagggug

SEQ ID NO: 1154794 - RNA, 19 nt, Artificial Sequence
  Description of Artificial Sequence: Synthetic oligonucleotide
ugauguugccucgcgucca

SEQ ID NO: 1154795 - RNA, 19 nt, Artificial Sequence
  Description of Artificial Sequence: Synthetic oligonucleotide
ugagcaaagcugggguugu

SEQ ID NO: 1154796 - RNA, 19 nt, Artificial Sequence
  Description of Artificial Sequence: Synthetic oligonucleotide
ugagggugagugagaccgc

SEQ ID NO: 1154797 - RNA, 19 nt, Artificial Sequence
  Description of Artificial Sequence: Synthetic oligonucleotide
augacgugggcgaaguccu

SEQ ID NO: 1154798 - RNA, 19 nt, Artificial Sequence
  Description of Artificial Sequence: Synthetic oligonucleotide
ccacauagaacuugaauaa

SEQ ID NO: 1154799 - RNA, 19 nt, Artificial Sequence
  Description of Artificial Sequence: Synthetic oligonucleotide
uucccggaaaucccuucuc

SEQ ID NO: 1154800 - RNA, 19 nt, Artificial Sequence
  Description of Artificial Sequence: Synthetic oligonucleotide
uguugggauggguuacuuu

SEQ ID NO: 1154801 - RNA, 19 nt, Artificial Sequence
  Description of Artificial Sequence: Synthetic oligonucleotide
ugcuaacaguaguguguug

SEQ ID NO: 1154802 - RNA, 19 nt, Artificial Sequence
  Description of Artificial Sequence: Synthetic oligonucleotide
gagaggugcuaacaguagu

SEQ ID NO: 1154803 - RNA, 19 nt, Artificial Sequence
  Description of Artificial Sequence: Synthetic oligonucleotide
ucgcacacaaagcgcucac

SEQ ID NO: 1154804 - RNA, 19 nt, Artificial Sequence
  Description of Artificial Sequence: Synthetic oligonucleotide
gcaaagcggacaucagugc

SEQ ID NO: 1154805 - RNA, 19 nt, Artificial Sequence
  Description of Artificial Sequence: Synthetic oligonucleotide
ccaugugauauagacugcc

SEQ ID NO: 1154806 - RNA, 19 nt, Artificial Sequence
  Description of Artificial Sequence: Synthetic oligonucleotide
ucuuucccggaaaucccuu

SEQ ID NO: 1154807 - RNA, 19 nt, Artificial Sequence
  Description of Artificial Sequence: Synthetic oligonucleotide
uauugaaggucagcuugau

SEQ ID NO: 1154808 - RNA, 19 nt, Artificial Sequence
  Description of Artificial Sequence: Synthetic oligonucleotide
uucucugcgccgcauccuu

SEQ ID NO: 1154809 - RNA, 19 nt, Artificial Sequence
  Description of Artificial Sequence: Synthetic oligonucleotide
guugccucgcguccagcgc

SEQ ID NO: 1154810 - RNA, 19 nt, Artificial Sequence
  Description of Artificial Sequence: Synthetic oligonucleotide
agggguagaggaagcaaug

SEQ ID NO: 1154811 - RNA, 19 nt, Artificial Sequence
  Description of Artificial Sequence: Synthetic oligonucleotide
gagaccgcuugcgauggug

SEQ ID NO: 1154812 - RNA, 19 nt, Artificial Sequence
  Description of Artificial Sequence: Synthetic oligonucleotide
cuaaagggugaggacccug

SEQ ID NO: 1154813 - RNA, 19 nt, Artificial Sequence
  Description of Artificial Sequence: Synthetic oligonucleotide
guaguucguggggucauug

SEQ ID NO: 1154814 - RNA, 19 nt, Artificial Sequence
  Description of Artificial Sequence: Synthetic oligonucleotide
uuccgaugugucccagccu

SEQ ID NO: 1154815 - RNA, 19 nt, Artificial Sequence
  Description of Artificial Sequence: Synthetic oligonucleotide
guacugcugggccugcgac

SEQ ID NO: 1154816 - RNA, 19 nt, Artificial Sequence
  Description of Artificial Sequence: Synthetic oligonucleotide
agggacagccuugucccuc

SEQ ID NO: 1154817 - RNA, 19 nt, Artificial Sequence
  Description of Artificial Sequence: Synthetic oligonucleotide
cugaugcuaaagggugagg

SEQ ID NO: 1154818 - RNA, 19 nt, Artificial Sequence
  Description of Artificial Sequence: Synthetic oligonucleotide
ucggaagagccggauccgc

SEQ ID NO: 1154819 - RNA, 19 nt, Artificial Sequence
  Description of Artificial Sequence: Synthetic oligonucleotide
ugcuccucaaaagcagauc

SEQ ID NO: 1154820 - RNA, 19 nt, Artificial Sequence
  Description of Artificial Sequence: Synthetic oligonucleotide
ggccuguuugccuucuccc

SEQ ID NO: 1154821 - RNA, 19 nt, Artificial Sequence
  Description of Artificial Sequence: Synthetic oligonucleotide
cucggaagagccggauccg

SEQ ID NO: 1154822 - RNA, 19 nt, Artificial Sequence
  Description of Artificial Sequence: Synthetic oligonucleotide
agagcaaccuugagaggug

SEQ ID NO: 1154823 - RNA, 19 nt, Artificial Sequence
  Description of Artificial Sequence: Synthetic oligonucleotide
aggcacuguaacgcggguc

SEQ ID NO: 1154824 - RNA, 19 nt, Artificial Sequence
  Description of Artificial Sequence: Synthetic oligonucleotide
uuaugacgugggcgaaguc

SEQ ID NO: 1154825 - RNA, 19 nt, Artificial Sequence
  Description of Artificial Sequence: Synthetic oligonucleotide
uucgucuuuccagcucccc

SEQ ID NO: 1154826 - RNA, 19 nt, Artificial Sequence
  Description of Artificial Sequence: Synthetic oligonucleotide
cuggguacagcuccaucca

SEQ ID NO: 1154827 - RNA, 19 nt, Artificial Sequence
  Description of Artificial Sequence: Synthetic oligonucleotide
caauuugggcaaggcacug

SEQ ID NO: 1154828 - RNA, 19 nt, Artificial Sequence
  Description of Artificial Sequence: Synthetic oligonucleotide
augugggccuuguaagcau

SEQ ID NO: 1154829 - RNA, 19 nt, Artificial Sequence
  Description of Artificial Sequence: Synthetic oligonucleotide
ggguacagcuccauccagg

SEQ ID NO: 1154830 - RNA, 19 nt, Artificial Sequence
  Description of Artificial Sequence: Synthetic oligonucleotide
ggugagugagaccgcuugc

SEQ ID NO: 1154831 - RNA, 19 nt, Artificial Sequence
  Description of Artificial Sequence: Synthetic oligonucleotide
uaacgcgggucagugacua

SEQ ID NO: 1154832 - RNA, 19 nt, Artificial Sequence
  Description of Artificial Sequence: Synthetic oligonucleotide
ggaaguaguucgugggguc

SEQ ID NO: 1154833 - RNA, 19 nt, Artificial Sequence
  Description of Artificial Sequence: Synthetic oligonucleotide
aguccucgaaggcuguguu

SEQ ID NO: 1154834 - RNA, 19 nt, Artificial Sequence
  Description of Artificial Sequence: Synthetic oligonucleotide
gccucacgaagucccaagg

SEQ ID NO: 1154835 - RNA, 19 nt, Artificial Sequence
  Description of Artificial Sequence: Synthetic oligonucleotide
gagucgcacacaaagcgcu

SEQ ID NO: 1154836 - RNA, 19 nt, Artificial Sequence
  Description of Artificial Sequence: Synthetic oligonucleotide
guacagcuccauccaggug

SEQ ID NO: 1154837 - RNA, 19 nt, Artificial Sequence
  Description of Artificial Sequence: Synthetic oligonucleotide
cucacucaauuugggcaag

SEQ ID NO: 1154838 - RNA, 19 nt, Artificial Sequence
  Description of Artificial Sequence: Synthetic oligonucleotide
gaacuaggggacccuugaa

SEQ ID NO: 1154839 - RNA, 19 nt, Artificial Sequence
  Description of Artificial Sequence: Synthetic oligonucleotide
ggaguguccgccuucgucu

SEQ ID NO: 1154840 - RNA, 19 nt, Artificial Sequence
  Description of Artificial Sequence: Synthetic oligonucleotide
ggugcuaacaguagugugu

SEQ ID NO: 1154841 - RNA, 19 nt, Artificial Sequence
  Description of Artificial Sequence: Synthetic oligonucleotide
cagcaugcuucgaaaggca

SEQ ID NO: 1154842 - RNA, 19 nt, Artificial Sequence
  Description of Artificial Sequence: Synthetic oligonucleotide
caaagcggacaucagugcu

SEQ ID NO: 1154843 - RNA, 19 nt, Artificial Sequence
  Description of Artificial Sequence: Synthetic oligonucleotide
agucgcacacaaagcgcuc

SEQ ID NO: 1154844 - RNA, 19 nt, Artificial Sequence
  Description of Artificial Sequence: Synthetic oligonucleotide
ccucagcaugcuucgaaag

SEQ ID NO: 1154845 - RNA, 19 nt, Artificial Sequence
  Description of Artificial Sequence: Synthetic oligonucleotide
ugccucgcguccagcgcag

SEQ ID NO: 1154846 - RNA, 19 nt, Artificial Sequence
  Description of Artificial Sequence: Synthetic oligonucleotide
auggguuacuuuagggaaa

SEQ ID NO: 1154847 - RNA, 19 nt, Artificial Sequence
  Description of Artificial Sequence: Synthetic oligonucleotide
ccucacgaagucccaaggc

SEQ ID NO: 1154848 - RNA, 19 nt, Artificial Sequence
  Description of Artificial Sequence: Synthetic oligonucleotide
cucgcguccagcgcagcag

SEQ ID NO: 1154849 - RNA, 19 nt, Artificial Sequence
  Description of Artificial Sequence: Synthetic oligonucleotide
accccaugugauauagacu

SEQ ID NO: 1154850 - RNA, 19 nt, Artificial Sequence
  Description of Artificial Sequence: Synthetic oligonucleotide
gaugguguuucuugccuuu

SEQ ID NO: 1154851 - RNA, 19 nt, Artificial Sequence
  Description of Artificial Sequence: Synthetic oligonucleotide
gcaaggcacuguaacgcgg

SEQ ID NO: 1154852 - RNA, 19 nt, Artificial Sequence
  Description of Artificial Sequence: Synthetic oligonucleotide
gaugugucccagccugucu

SEQ ID NO: 1154853 - RNA, 19 nt, Artificial Sequence
  Description of Artificial Sequence: Synthetic oligonucleotide
uccccguugccuccgcuuu

SEQ ID NO: 1154854 - RNA, 19 nt, Artificial Sequence
  Description of Artificial Sequence: Synthetic oligonucleotide
caugcaacucguccaggaa

SEQ ID NO: 1154855 - RNA, 19 nt, Artificial Sequence
  Description of Artificial Sequence: Synthetic oligonucleotide
gaggugcuaacaguagugu

SEQ ID NO: 1154856 - RNA, 19 nt, Artificial Sequence
  Description of Artificial Sequence: Synthetic oligonucleotide
ugguguggaggugcuggca

SEQ ID NO: 1154857 - RNA, 19 nt, Artificial Sequence
  Description of Artificial Sequence: Synthetic oligonucleotide
acgaagucccaaggcagga

SEQ ID NO: 1154858 - RNA, 19 nt, Artificial Sequence
  Description of Artificial Sequence: Synthetic oligonucleotide
gagugagaccgcuugcgau

SEQ ID NO: 1154859 - RNA, 19 nt, Artificial Sequence
  Description of Artificial Sequence: Synthetic oligonucleotide
caucgggucccagggguag

SEQ ID NO: 1154860 - RNA, 19 nt, Artificial Sequence
  Description of Artificial Sequence: Synthetic oligonucleotide
cugucucaugcaacucguc

SEQ ID NO: 1154861 - RNA, 19 nt, Artificial Sequence
  Description of Artificial Sequence: Synthetic oligonucleotide
gggcuaagggcaaggacug

SEQ ID NO: 1154862 - RNA, 19 nt, Artificial Sequence
  Description of Artificial Sequence: Synthetic oligonucleotide
gguggacauggaaugcagc

SEQ ID NO: 1154863 - RNA, 19 nt, Artificial Sequence
  Description of Artificial Sequence: Synthetic oligonucleotide
ugccggaguucccugucuu

SEQ ID NO: 1154864 - RNA, 19 nt, Artificial Sequence
  Description of Artificial Sequence: Synthetic oligonucleotide
uggcaucacccaccccaug

SEQ ID NO: 1154865 - RNA, 19 nt, Artificial Sequence
  Description of Artificial Sequence: Synthetic oligonucleotide
cacggaccucuucccaggc

SEQ ID NO: 1154866 - RNA, 19 nt, Artificial Sequence
  Description of Artificial Sequence: Synthetic oligonucleotide
gcccggguccuuaagaaug

SEQ ID NO: 1154867 - RNA, 19 nt, Artificial Sequence
  Description of Artificial Sequence: Synthetic oligonucleotide
cauuggaagggacagccuu

SEQ ID NO: 1154868 - RNA, 19 nt, Artificial Sequence
  Description of Artificial Sequence: Synthetic oligonucleotide
auguugccucgcguccagc

SEQ ID NO: 1154869 - RNA, 19 nt, Artificial Sequence
  Description of Artificial Sequence: Synthetic oligonucleotide
ucugcgccgcauccuucgu

SEQ ID NO: 1154870 - RNA, 19 nt, Artificial Sequence
  Description of Artificial Sequence: Synthetic oligonucleotide
agaccgcuugcgauggugu

SEQ ID NO: 1154871 - RNA, 19 nt, Artificial Sequence
  Description of Artificial Sequence: Synthetic oligonucleotide
uguccgccuucgucuuucc

SEQ ID NO: 1154872 - RNA, 19 nt, Artificial Sequence
  Description of Artificial Sequence: Synthetic oligonucleotide
aacucucggaagagccgga

SEQ ID NO: 1154873 - RNA, 19 nt, Artificial Sequence
  Description of Artificial Sequence: Synthetic oligonucleotide
agcucgcuuuccgaugugu

SEQ ID NO: 1154874 - RNA, 19 nt, Artificial Sequence
  Description of Artificial Sequence: Synthetic oligonucleotide
cuuaugacgugggcgaagu

SEQ ID NO: 1154875 - RNA, 19 nt, Artificial Sequence
  Description of Artificial Sequence: Synthetic oligonucleotide
acacauacaucggguccca

SEQ ID NO: 1154876 - RNA, 19 nt, Artificial Sequence
  Description of Artificial Sequence: Synthetic oligonucleotide
uccagcgcagcagcccucu

SEQ ID NO: 1154877 - RNA, 19 nt, Artificial Sequence
  Description of Artificial Sequence: Synthetic oligonucleotide
cagguggacauggaaugca

SEQ ID NO: 1154878 - RNA, 19 nt, Artificial Sequence
  Description of Artificial Sequence: Synthetic oligonucleotide
guagagcccggcuggccca

SEQ ID NO: 1154879 - RNA, 19 nt, Artificial Sequence
  Description of Artificial Sequence: Synthetic oligonucleotide
uaggaguguccgccuucgu

SEQ ID NO: 1154880 - RNA, 19 nt, Artificial Sequence
  Description of Artificial Sequence: Synthetic oligonucleotide
gucgcacacaaagcgcuca

SEQ ID NO: 1154881 - RNA, 19 nt, Artificial Sequence
  Description of Artificial Sequence: Synthetic oligonucleotide
caaccuugagaggugcuaa

SEQ ID NO: 1154882 - RNA, 19 nt, Artificial Sequence
  Description of Artificial Sequence: Synthetic oligonucleotide
acggaccucuucccaggca

SEQ ID NO: 1154883 - RNA, 19 nt, Artificial Sequence
  Description of Artificial Sequence: Synthetic oligonucleotide
ggcgccguucccgaagccg

SEQ ID NO: 1154884 - RNA, 19 nt, Artificial Sequence
  Description of Artificial Sequence: Synthetic oligonucleotide
gcuuucggccuuuggugug

SEQ ID NO: 1154885 - RNA, 19 nt, Artificial Sequence
  Description of Artificial Sequence: Synthetic oligonucleotide
cccggaaaucccuucucac

SEQ ID NO: 1154886 - RNA, 19 nt, Artificial Sequence
  Description of Artificial Sequence: Synthetic oligonucleotide
gcuggcgccguucccgaag

SEQ ID NO: 1154887 - RNA, 19 nt, Artificial Sequence
  Description of Artificial Sequence: Synthetic oligonucleotide
cauggaaccuugccuucaa

SEQ ID NO: 1154888 - RNA, 19 nt, Artificial Sequence
  Description of Artificial Sequence: Synthetic oligonucleotide
gcuuaugacgugggcgaag

SEQ ID NO: 1154889 - RNA, 19 nt, Artificial Sequence
  Description of Artificial Sequence: Synthetic oligonucleotide
ucuccccguugccuccgcu

SEQ ID NO: 1154890 - RNA, 19 nt, Artificial Sequence
  Description of Artificial Sequence: Synthetic oligonucleotide
gcagacuauugaaggucag

SEQ ID NO: 1154891 - RNA, 19 nt, Artificial Sequence
  Description of Artificial Sequence: Synthetic oligonucleotide
ggugaucugcucaaaggcu

SEQ ID NO: 1154892 - RNA, 19 nt, Artificial Sequence
  Description of Artificial Sequence: Synthetic oligonucleotide
gguacugcugggccugcga

SEQ ID NO: 1154893 - RNA, 19 nt, Artificial Sequence
  Description of Artificial Sequence: Synthetic oligonucleotide
ggcaucacccaccccaugu

SEQ ID NO: 1154894 - RNA, 19 nt, Artificial Sequence
  Description of Artificial Sequence: Synthetic oligonucleotide
cugcgccgcauccuucgug

SEQ ID NO: 1154895 - RNA, 19 nt, Artificial Sequence
  Description of Artificial Sequence: Synthetic oligonucleotide
gucgcccagccuccagagc

SEQ ID NO: 1154896 - RNA, 19 nt, Artificial Sequence
  Description of Artificial Sequence: Synthetic oligonucleotide
ucccaggcagucgcccagc

SEQ ID NO: 1154897 - RNA, 19 nt, Artificial Sequence
  Description of Artificial Sequence: Synthetic oligonucleotide
gagccggauccgcuccgac

SEQ ID NO: 1154898 - RNA, 19 nt, Artificial Sequence
  Description of Artificial Sequence: Synthetic oligonucleotide
cuguaacgcgggucaguga

SEQ ID NO: 1154899 - RNA, 19 nt, Artificial Sequence
  Description of Artificial Sequence: Synthetic oligonucleotide
gcgccguucccgaagccgg

SEQ ID NO: 1154900 - RNA, 19 nt, Artificial Sequence
  Description of Artificial Sequence: Synthetic oligonucleotide
uggcgccguucccgaagcc

SEQ ID NO: 1154901 - RNA, 19 nt, Artificial Sequence
  Description of Artificial Sequence: Synthetic oligonucleotide
guguccgccuucgucuuuc

SEQ ID NO: 1154902 - RNA, 19 nt, Artificial Sequence
  Description of Artificial Sequence: Synthetic oligonucleotide
agcccucuugucaaagcuu

SEQ ID NO: 1154903 - RNA, 19 nt, Artificial Sequence
  Description of Artificial Sequence: Synthetic oligonucleotide
cacauacaucgggucccag

SEQ ID NO: 1154904 - RNA, 19 nt, Artificial Sequence
  Description of Artificial Sequence: Synthetic oligonucleotide
acucucggaagagccggau

SEQ ID NO: 1154905 - RNA, 19 nt, Artificial Sequence
  Description of Artificial Sequence: Synthetic oligonucleotide
cuccuccuccuccucucuc

SEQ ID NO: 1154906 - RNA, 19 nt, Artificial Sequence
  Description of Artificial Sequence: Synthetic oligonucleotide
agcuuaugacgugggcgaa

SEQ ID NO: 1154907 - RNA, 19 nt, Artificial Sequence
  Description of Artificial Sequence: Synthetic oligonucleotide
ccaugcuuucggccuuugg

SEQ ID NO: 1154908 - RNA, 19 nt, Artificial Sequence
  Description of Artificial Sequence: Synthetic oligonucleotide
gcaaggacuguacuaguuu

SEQ ID NO: 1154909 - RNA, 19 nt, Artificial Sequence
  Description of Artificial Sequence: Synthetic oligonucleotide
aguaguucguggggucauu

SEQ ID NO: 1154910 - RNA, 19 nt, Artificial Sequence
  Description of Artificial Sequence: Synthetic oligonucleotide
gccugcgaccaugugggcc

SEQ ID NO: 1154911 - RNA, 19 nt, Artificial Sequence
  Description of Artificial Sequence: Synthetic oligonucleotide
gccucagcaugcuucgaaa

SEQ ID NO: 1154912 - RNA, 19 nt, Artificial Sequence
  Description of Artificial Sequence: Synthetic oligonucleotide
gugcuaacaguaguguguu

SEQ ID NO: 1154913 - RNA, 19 nt, Artificial Sequence
  Description of Artificial Sequence: Synthetic oligonucleotide
ccggaguucccugucuuug

SEQ ID NO: 1154914 - RNA, 19 nt, Artificial Sequence
  Description of Artificial Sequence: Synthetic oligonucleotide
aguguccgccuucgucuuu

SEQ ID NO: 1154915 - RNA, 19 nt, Artificial Sequence
  Description of Artificial Sequence: Synthetic oligonucleotide
gagcccggcuggcccagca

SEQ ID NO: 1154916 - RNA, 19 nt, Artificial Sequence
  Description of Artificial Sequence: Synthetic oligonucleotide
gcaaccuugagaggugcua

SEQ ID NO: 1154917 - RNA, 19 nt, Artificial Sequence
  Description of Artificial Sequence: Synthetic oligonucleotide
cagaucagugcaucuucuu

SEQ ID NO: 1154918 - RNA, 19 nt, Artificial Sequence
  Description of Artificial Sequence: Synthetic oligonucleotide
cugggccugcgaccaugug

SEQ ID NO: 1154919 - RNA, 19 nt, Artificial Sequence
  Description of Artificial Sequence: Synthetic oligonucleotide
ugcgaccaugugggccuug

SEQ ID NO: 1154920 - RNA, 19 nt, Artificial Sequence
  Description of Artificial Sequence: Synthetic oligonucleotide
gcucgcuuuccgauguguc

SEQ ID NO: 1154921 - RNA, 19 nt, Artificial Sequence
  Description of Artificial Sequence: Synthetic oligonucleotide
ccgcuugcgaugguguuuc

SEQ ID NO: 1154922 - RNA, 19 nt, Artificial Sequence
  Description of Artificial Sequence: Synthetic oligonucleotide
aucgggucccagggguaga

SEQ ID NO: 1154923 - RNA, 19 nt, Artificial Sequence
  Description of Artificial Sequence: Synthetic oligonucleotide
cuucgugccuccuccuuuu

SEQ ID NO: 1154924 - RNA, 19 nt, Artificial Sequence
  Description of Artificial Sequence: Synthetic oligonucleotide
cagaagcccggguccuuaa

SEQ ID NO: 1154925 - RNA, 19 nt, Artificial Sequence
  Description of Artificial Sequence: Synthetic oligonucleotide
cugcuggcgccguucccga

SEQ ID NO: 1154926 - RNA, 19 nt, Artificial Sequence
  Description of Artificial Sequence: Synthetic oligonucleotide
ccugcgaccaugugggccu

SEQ ID NO: 1154927 - RNA, 19 nt, Artificial Sequence
  Description of Artificial Sequence: Synthetic oligonucleotide
gcuugauguugccucgcgu

SEQ ID NO: 1154928 - RNA, 19 nt, Artificial Sequence
  Description of Artificial Sequence: Synthetic oligonucleotide
ggaggugcuggcauucagu

SEQ ID NO: 1154929 - RNA, 19 nt, Artificial Sequence
  Description of Artificial Sequence: Synthetic oligonucleotide
ugcuggcgccguucccgaa

SEQ ID NO: 1154930 - RNA, 19 nt, Artificial Sequence
  Description of Artificial Sequence: Synthetic oligonucleotide
ccguucccgaagccgggcc

SEQ ID NO: 1154931 - RNA, 19 nt, Artificial Sequence
  Description of Artificial Sequence: Synthetic oligonucleotide
ugccaugcuuucggccuuu

SEQ ID NO: 1154932 - RNA, 19 nt, Artificial Sequence
  Description of Artificial Sequence: Synthetic oligonucleotide
acaucgggucccaggggua

SEQ ID NO: 1154933 - RNA, 19 nt, Artificial Sequence
  Description of Artificial Sequence: Synthetic oligonucleotide
ccucgaaggcuguguucac

SEQ ID NO: 1154934 - RNA, 19 nt, Artificial Sequence
  Description of Artificial Sequence: Synthetic oligonucleotide
gaccgcuugcgaugguguu

SEQ ID NO: 1154935 - RNA, 19 nt, Artificial Sequence
  Description of Artificial Sequence: Synthetic oligonucleotide
guaacgcgggucagugacu

SEQ ID NO: 1154936 - RNA, 19 nt, Artificial Sequence
  Description of Artificial Sequence: Synthetic oligonucleotide
cugagaacuaggggacccu

SEQ ID NO: 1154937 - RNA, 19 nt, Artificial Sequence
  Description of Artificial Sequence: Synthetic oligonucleotide
ccugccggaguucccuguc

SEQ ID NO: 1154938 - RNA, 19 nt, Artificial Sequence
  Description of Artificial Sequence: Synthetic oligonucleotide
gagagcgguuagggagcuc

SEQ ID NO: 1154939 - RNA, 19 nt, Artificial Sequence
  Description of Artificial Sequence: Synthetic oligonucleotide
ccuccuccuccucucucuc

SEQ ID NO: 1154940 - RNA, 19 nt, Artificial Sequence
  Description of Artificial Sequence: Synthetic oligonucleotide
cacuguaacgcgggucagu

SEQ ID NO: 1154941 - RNA, 19 nt, Artificial Sequence
  Description of Artificial Sequence: Synthetic oligonucleotide
uuccgcugcuggcgccguu

SEQ ID NO: 1154942 - RNA, 19 nt, Artificial Sequence
  Description of Artificial Sequence: Synthetic oligonucleotide
aagcgcucacggaccucuu

SEQ ID NO: 1154943 - RNA, 19 nt, Artificial Sequence
  Description of Artificial Sequence: Synthetic oligonucleotide
cuucucugcgccgcauccu

SEQ ID NO: 1154944 - RNA, 19 nt, Artificial Sequence
  Description of Artificial Sequence: Synthetic oligonucleotide
cuccuccuccucucucucu

SEQ ID NO: 1154945 - RNA, 19 nt, Artificial Sequence
  Description of Artificial Sequence: Synthetic oligonucleotide
gcgccgcauccuucgugcc

SEQ ID NO: 1154946 - RNA, 19 nt, Artificial Sequence
  Description of Artificial Sequence: Synthetic oligonucleotide
aggcugagucgcacacaaa

SEQ ID NO: 1154947 - RNA, 19 nt, Artificial Sequence
  Description of Artificial Sequence: Synthetic oligonucleotide
cuguaggaguguccgccuu

SEQ ID NO: 1154948 - RNA, 19 nt, Artificial Sequence
  Description of Artificial Sequence: Synthetic oligonucleotide
ccgcuccgacuccagggug

SEQ ID NO: 1154949 - RNA, 19 nt, Artificial Sequence
  Description of Artificial Sequence: Synthetic oligonucleotide
cgaugugucccagccuguc

SEQ ID NO: 1154950 - RNA, 19 nt, Artificial Sequence
  Description of Artificial Sequence: Synthetic oligonucleotide
ggagagcgguuagggagcu

SEQ ID NO: 1154951 - RNA, 19 nt, Artificial Sequence
  Description of Artificial Sequence: Synthetic oligonucleotide
ccaccccaugugauauaga

SEQ ID NO: 1154952 - RNA, 19 nt, Artificial Sequence
  Description of Artificial Sequence: Synthetic oligonucleotide
ccucgcguccagcgcagca

SEQ ID NO: 1154953 - RNA, 19 nt, Artificial Sequence
  Description of Artificial Sequence: Synthetic oligonucleotide
cccggguccuuaagaaugu

SEQ ID NO: 1154954 - RNA, 19 nt, Artificial Sequence
  Description of Artificial Sequence: Synthetic oligonucleotide
gcuaaagggugaggacccu

SEQ ID NO: 1154955 - RNA, 19 nt, Artificial Sequence
  Description of Artificial Sequence: Synthetic oligonucleotide
ccggguccuuaagaauguc

SEQ ID NO: 1154956 - RNA, 19 nt, Artificial Sequence
  Description of Artificial Sequence: Synthetic oligonucleotide
gcgcagcagcccucuuguc

SEQ ID NO: 1154957 - RNA, 19 nt, Artificial Sequence
  Description of Artificial Sequence: Synthetic oligonucleotide
cgguuagggagcucugccu

SEQ ID NO: 1154958 - RNA, 19 nt, Artificial Sequence
  Description of Artificial Sequence: Synthetic oligonucleotide
gccugccggaguucccugu

SEQ ID NO: 1154959 - RNA, 19 nt, Artificial Sequence
  Description of Artificial Sequence: Synthetic oligonucleotide
ggcuaagggcaaggacugu

SEQ ID NO: 1154960 - RNA, 19 nt, Artificial Sequence
  Description of Artificial Sequence: Synthetic oligonucleotide
gccggaguucccugucuuu

SEQ ID NO: 1154961 - RNA, 19 nt, Artificial Sequence
  Description of Artificial Sequence: Synthetic oligonucleotide
cccggcuggcccagcaugu

SEQ ID NO: 1154962 - RNA, 19 nt, Artificial Sequence
  Description of Artificial Sequence: Synthetic oligonucleotide
cgaugguguuucuugccuu

SEQ ID NO: 1154963 - RNA, 19 nt, Artificial Sequence
  Description of Artificial Sequence: Synthetic oligonucleotide
ccgaugugucccagccugu

SEQ ID NO: 1154964 - RNA, 19 nt, Artificial Sequence
  Description of Artificial Sequence: Synthetic oligonucleotide
gccucgcguccagcgcagc

SEQ ID NO: 1154965 - RNA, 19 nt, Artificial Sequence
  Description of Artificial Sequence: Synthetic oligonucleotide
gcuccgacuccagggugau

SEQ ID NO: 1154966 - RNA, 19 nt, Artificial Sequence
  Description of Artificial Sequence: Synthetic oligonucleotide
cugcgaccaugugggccuu

SEQ ID NO: 1154967 - RNA, 19 nt, Artificial Sequence
  Description of Artificial Sequence: Synthetic oligonucleotide
ccccguugccuccgcuuuu

SEQ ID NO: 1154968 - RNA, 19 nt, Artificial Sequence
  Description of Artificial Sequence: Synthetic oligonucleotide
ccggcuggcccagcauguu

SEQ ID NO: 1154969 - RNA, 19 nt, Artificial Sequence
  Description of Artificial Sequence: Synthetic oligonucleotide
aguacaaagauuuaguagg

SEQ ID NO: 1154970 - RNA, 19 nt, Artificial Sequence
  Description of Artificial Sequence: Synthetic oligonucleotide
aauccuaauagaucaaugg

SEQ ID NO: 1154971 - RNA, 19 nt, Artificial Sequence
  Description of Artificial Sequence: Synthetic oligonucleotide
aauaacuaaauuugagggg

SEQ ID NO: 1154972 - RNA, 19 nt, Artificial Sequence
  Description of Artificial Sequence: Synthetic oligonucleotide
auauaaagugacuauuucc

SEQ ID NO: 1154973 - RNA, 19 nt, Artificial Sequence
  Description of Artificial Sequence: Synthetic oligonucleotide
ucuacuaagaagcagguga

SEQ ID NO: 1154974 - RNA, 19 nt, Artificial Sequence
  Description of Artificial Sequence: Synthetic oligonucleotide
aauauuauaacugaauuau

SEQ ID NO: 1154975 - RNA, 19 nt, Artificial Sequence
  Description of Artificial Sequence: Synthetic oligonucleotide
aauuaauucagcucaauaa

SEQ ID NO: 1154976 - RNA, 19 nt, Artificial Sequence
  Description of Artificial Sequence: Synthetic oligonucleotide
ugauauuagaacuaggaga

SEQ ID NO: 1154977 - RNA, 19 nt, Artificial Sequence
  Description of Artificial Sequence: Synthetic oligonucleotide
uauacuauauaaaugacua

SEQ ID NO: 1154978 - RNA, 19 nt, Artificial Sequence
  Description of Artificial Sequence: Synthetic oligonucleotide
aaugacuacauauauuugu

SEQ ID NO: 1154979 - RNA, 19 nt, Artificial Sequence
  Description of Artificial Sequence: Synthetic oligonucleotide
auaguuuuagaguagacug

SEQ ID NO: 1154980 - RNA, 19 nt, Artificial Sequence
  Description of Artificial Sequence: Synthetic oligonucleotide
aaaauuacuuaauauacua

SEQ ID NO: 1154981 - RNA, 19 nt, Artificial Sequence
  Description of Artificial Sequence: Synthetic oligonucleotide
auuugcgaaaaccagaaag

SEQ ID NO: 1154982 - RNA, 19 nt, Artificial Sequence
  Description of Artificial Sequence: Synthetic oligonucleotide
uauaacugaauuauuuuca

SEQ ID NO: 1154983 - RNA, 19 nt, Artificial Sequence
  Description of Artificial Sequence: Synthetic oligonucleotide
uuuagaguagacuggacag

SEQ ID NO: 1154984 - RNA, 19 nt, Artificial Sequence
  Description of Artificial Sequence: Synthetic oligonucleotide
ucuacauuugcgaaaacca

SEQ ID NO: 1154985 - RNA, 19 nt, Artificial Sequence
  Description of Artificial Sequence: Synthetic oligonucleotide
ugaacuacuauuuaggaua

SEQ ID NO: 1154986 - RNA, 19 nt, Artificial Sequence
  Description of Artificial Sequence: Synthetic oligonucleotide
uguaaugcaucuuucauac

SEQ ID NO: 1154987 - RNA, 19 nt, Artificial Sequence
  Description of Artificial Sequence: Synthetic oligonucleotide
uguaauuccuaucucaacu

SEQ ID NO: 1154988 - RNA, 19 nt, Artificial Sequence
  Description of Artificial Sequence: Synthetic oligonucleotide
uauaaauguguagagaagc

SEQ ID NO: 1154989 - RNA, 19 nt, Artificial Sequence
  Description of Artificial Sequence: Synthetic oligonucleotide
ucaaugaacuacuauuuag

SEQ ID NO: 1154990 - RNA, 19 nt, Artificial Sequence
  Description of Artificial Sequence: Synthetic oligonucleotide
uugauauuagaacuaggag

SEQ ID NO: 1154991 - RNA, 19 nt, Artificial Sequence
  Description of Artificial Sequence: Synthetic oligonucleotide
uguaauaaaccauacuacu

SEQ ID NO: 1154992 - RNA, 19 nt, Artificial Sequence
  Description of Artificial Sequence: Synthetic oligonucleotide
auacaggucaauuauagca

SEQ ID NO: 1154993 - RNA, 19 nt, Artificial Sequence
  Description of Artificial Sequence: Synthetic oligonucleotide
ucauacaggucaauuauag

SEQ ID NO: 1154994 - RNA, 19 nt, Artificial Sequence
  Description of Artificial Sequence: Synthetic oligonucleotide
aaaauugccgacuguagca

SEQ ID NO: 1154995 - RNA, 19 nt, Artificial Sequence
  Description of Artificial Sequence: Synthetic oligonucleotide
aucucaacuguauuuacac

SEQ ID NO: 1154996 - RNA, 19 nt, Artificial Sequence
  Description of Artificial Sequence: Synthetic oligonucleotide
agauugugauauuauuucc

SEQ ID NO: 1154997 - RNA, 19 nt, Artificial Sequence
  Description of Artificial Sequence: Synthetic oligonucleotide
ucucggucuacuaagaagc

SEQ ID NO: 1154998 - RNA, 19 nt, Artificial Sequence
  Description of Artificial Sequence: Synthetic oligonucleotide
uaaugaauauuauaacuga

SEQ ID NO: 1154999 - RNA, 19 nt, Artificial Sequence
  Description of Artificial Sequence: Synthetic oligonucleotide
ucuuaauaaacauuauccu

SEQ ID NO: 1155000 - RNA, 19 nt, Artificial Sequence
  Description of Artificial Sequence: Synthetic oligonucleotide
aaugaacuacuauuuagga

SEQ ID NO: 1155001 - RNA, 19 nt, Artificial Sequence
  Description of Artificial Sequence: Synthetic oligonucleotide
aaauguguagagaagcuuc

SEQ ID NO: 1155002 - RNA, 19 nt, Artificial Sequence
  Description of Artificial Sequence: Synthetic oligonucleotide
caaugaacuacuauuuagg

SEQ ID NO: 1155003 - RNA, 19 nt, Artificial Sequence
  Description of Artificial Sequence: Synthetic oligonucleotide
acuaagaagcaggugaugc

SEQ ID NO: 1155004 - RNA, 19 nt, Artificial Sequence
  Description of Artificial Sequence: Synthetic oligonucleotide
auauauuuguacuggaugu

SEQ ID NO: 1155005 - RNA, 19 nt, Artificial Sequence
  Description of Artificial Sequence: Synthetic oligonucleotide
uuugcgaaaaccagaaaga

SEQ ID NO: 1155006 - RNA, 19 nt, Artificial Sequence
  Description of Artificial Sequence: Synthetic oligonucleotide
uccaauaacuaaauuugag

SEQ ID NO: 1155007 - RNA, 19 nt, Artificial Sequence
  Description of Artificial Sequence: Synthetic oligonucleotide
aguaggaauauaaagugac

SEQ ID NO: 1155008 - RNA, 19 nt, Artificial Sequence
  Description of Artificial Sequence: Synthetic oligonucleotide
acaaguuacaucuuuauuu

SEQ ID NO: 1155009 - RNA, 19 nt, Artificial Sequence
  Description of Artificial Sequence: Synthetic oligonucleotide
aaagugacuauuuccguca

SEQ ID NO: 1155010 - RNA, 19 nt, Artificial Sequence
  Description of Artificial Sequence: Synthetic oligonucleotide
uaaaccauacuacuuaaaa

SEQ ID NO: 1155011 - RNA, 19 nt, Artificial Sequence
  Description of Artificial Sequence: Synthetic oligonucleotide
uuauaacugaauuauuuuc

SEQ ID NO: 1155012 - RNA, 19 nt, Artificial Sequence
  Description of Artificial Sequence: Synthetic oligonucleotide
ucuuaucagacccaucugc

SEQ ID NO: 1155013 - RNA, 19 nt, Artificial Sequence
  Description of Artificial Sequence: Synthetic oligonucleotide
aagucaaguagacuuuauc

SEQ ID NO: 1155014 - RNA, 19 nt, Artificial Sequence
  Description of Artificial Sequence: Synthetic oligonucleotide
agucaaguagacuuuaucu

SEQ ID NO: 1155015 - RNA, 19 nt, Artificial Sequence
  Description of Artificial Sequence: Synthetic oligonucleotide
uguuuagcaacuuaccacu

SEQ ID NO: 1155016 - RNA, 19 nt, Artificial Sequence
  Description of Artificial Sequence: Synthetic oligonucleotide
uccuaauagaucaauggcu

SEQ ID NO: 1155017 - RNA, 19 nt, Artificial Sequence
  Description of Artificial Sequence: Synthetic oligonucleotide
uguaucucggucuacuaag

SEQ ID NO: 1155018 - RNA, 19 nt, Artificial Sequence
  Description of Artificial Sequence: Synthetic oligonucleotide
uguauuuacacaaccucga

SEQ ID NO: 1155019 - RNA, 19 nt, Artificial Sequence
  Description of Artificial Sequence: Synthetic oligonucleotide
agaugauuaagccaaauua

SEQ ID NO: 1155020 - RNA, 19 nt, Artificial Sequence
  Description of Artificial Sequence: Synthetic oligonucleotide
ugccuuuauguucugaaag

SEQ ID NO: 1155021 - RNA, 19 nt, Artificial Sequence
  Description of Artificial Sequence: Synthetic oligonucleotide
uaauuauauggucuacaag

SEQ ID NO: 1155022 - RNA, 19 nt, Artificial Sequence
  Description of Artificial Sequence: Synthetic oligonucleotide
ucuauuuaucagaugauua

SEQ ID NO: 1155023 - RNA, 19 nt, Artificial Sequence
  Description of Artificial Sequence: Synthetic oligonucleotide
uaauccacaucuuggaccc

SEQ ID NO: 1155024 - RNA, 19 nt, Artificial Sequence
  Description of Artificial Sequence: Synthetic oligonucleotide
ucaaguagacuuuaucucu

SEQ ID NO: 1155025 - RNA, 19 nt, Artificial Sequence
  Description of Artificial Sequence: Synthetic oligonucleotide
gagauugugauauuauuuc

SEQ ID NO: 1155026 - RNA, 19 nt, Artificial Sequence
  Description of Artificial Sequence: Synthetic oligonucleotide
uuuauaguugaaaaccaau

SEQ ID NO: 1155027 - RNA, 19 nt, Artificial Sequence
  Description of Artificial Sequence: Synthetic oligonucleotide
ugugauauuauuuccuuau

SEQ ID NO: 1155028 - RNA, 19 nt, Artificial Sequence
  Description of Artificial Sequence: Synthetic oligonucleotide
aguaccguguaauaaacca

SEQ ID NO: 1155029 - RNA, 19 nt, Artificial Sequence
  Description of Artificial Sequence: Synthetic oligonucleotide
uuauaguugaaaaccaaua

SEQ ID NO: 1155030 - RNA, 19 nt, Artificial Sequence
  Description of Artificial Sequence: Synthetic oligonucleotide
uuucagacuaucuagucuc

SEQ ID NO: 1155031 - RNA, 19 nt, Artificial Sequence
  Description of Artificial Sequence: Synthetic oligonucleotide
uuggauauuuugauuaggu

SEQ ID NO: 1155032 - RNA, 19 nt, Artificial Sequence
  Description of Artificial Sequence: Synthetic oligonucleotide
aaauuaauucagcucaaua

SEQ ID NO: 1155033 - RNA, 19 nt, Artificial Sequence
  Description of Artificial Sequence: Synthetic oligonucleotide
ugggaugagaaauauaaau

SEQ ID NO: 1155034 - RNA, 19 nt, Artificial Sequence
  Description of Artificial Sequence: Synthetic oligonucleotide
aguccaauaacuaaauuug

SEQ ID NO: 1155035 - RNA, 19 nt, Artificial Sequence
  Description of Artificial Sequence: Synthetic oligonucleotide
aagauaucugcauguucgg

SEQ ID NO: 1155036 - RNA, 19 nt, Artificial Sequence
  Description of Artificial Sequence: Synthetic oligonucleotide
uuuucagacuaucuagucu

SEQ ID NO: 1155037 - RNA, 19 nt, Artificial Sequence
  Description of Artificial Sequence: Synthetic oligonucleotide
uaagcucugauucccaucu

SEQ ID NO: 1155038 - RNA, 19 nt, Artificial Sequence
  Description of Artificial Sequence: Synthetic oligonucleotide
uaaaguaccguguaauaaa

SEQ ID NO: 1155039 - RNA, 19 nt, Artificial Sequence
  Description of Artificial Sequence: Synthetic oligonucleotide
guagacuggacagagaaag

SEQ ID NO: 1155040 - RNA, 19 nt, Artificial Sequence
  Description of Artificial Sequence: Synthetic oligonucleotide
auacuauauaaaugacuac

SEQ ID NO: 1155041 - RNA, 19 nt, Artificial Sequence
  Description of Artificial Sequence: Synthetic oligonucleotide
cagaugauuaauuucagca

SEQ ID NO: 1155042 - RNA, 19 nt, Artificial Sequence
  Description of Artificial Sequence: Synthetic oligonucleotide
aaauaaaguaccguguaau

SEQ ID NO: 1155043 - RNA, 19 nt, Artificial Sequence
  Description of Artificial Sequence: Synthetic oligonucleotide
uuguuuagcaacuuaccac

SEQ ID NO: 1155044 - RNA, 19 nt, Artificial Sequence
  Description of Artificial Sequence: Synthetic oligonucleotide
uuuaucagaugauuaauuu

SEQ ID NO: 1155045 - RNA, 19 nt, Artificial Sequence
  Description of Artificial Sequence: Synthetic oligonucleotide
uuucgcuauaugaaaaccu

SEQ ID NO: 1155046 - RNA, 19 nt, Artificial Sequence
  Description of Artificial Sequence: Synthetic oligonucleotide
ucuccauuccuuaugagau

SEQ ID NO: 1155047 - RNA, 19 nt, Artificial Sequence
  Description of Artificial Sequence: Synthetic oligonucleotide
agccaaauuauuuaaacuu

SEQ ID NO: 1155048 - RNA, 19 nt, Artificial Sequence
  Description of Artificial Sequence: Synthetic oligonucleotide
ugagauugugauauuauuu

SEQ ID NO: 1155049 - RNA, 19 nt, Artificial Sequence
  Description of Artificial Sequence: Synthetic oligonucleotide
uacauuugcgaaaaccaga

SEQ ID NO: 1155050 - RNA, 19 nt, Artificial Sequence
  Description of Artificial Sequence: Synthetic oligonucleotide
uuccuuaugagauugugau

SEQ ID NO: 1155051 - RNA, 19 nt, Artificial Sequence
  Description of Artificial Sequence: Synthetic oligonucleotide
uguucuuaauuauaugguc

SEQ ID NO: 1155052 - RNA, 19 nt, Artificial Sequence
  Description of Artificial Sequence: Synthetic oligonucleotide
uguuccucaggaaauguga

SEQ ID NO: 1155053 - RNA, 19 nt, Artificial Sequence
  Description of Artificial Sequence: Synthetic oligonucleotide
caguacaaagauuuaguag

SEQ ID NO: 1155054 - RNA, 19 nt, Artificial Sequence
  Description of Artificial Sequence: Synthetic oligonucleotide
aaaccaauacaggacaugu

SEQ ID NO: 1155055 - RNA, 19 nt, Artificial Sequence
  Description of Artificial Sequence: Synthetic oligonucleotide
ugacucauaccacaguaca

SEQ ID NO: 1155056 - RNA, 19 nt, Artificial Sequence
  Description of Artificial Sequence: Synthetic oligonucleotide
auauuuugggcguuuguug

SEQ ID NO: 1155057 - RNA, 19 nt, Artificial Sequence
  Description of Artificial Sequence: Synthetic oligonucleotide
uguacucagaaacugggau

SEQ ID NO: 1155058 - RNA, 19 nt, Artificial Sequence
  Description of Artificial Sequence: Synthetic oligonucleotide
aaaaccagaaagauaucug

SEQ ID NO: 1155059 - RNA, 19 nt, Artificial Sequence
  Description of Artificial Sequence: Synthetic oligonucleotide
auuaagccaaauuauuuaa

SEQ ID NO: 1155060 - RNA, 19 nt, Artificial Sequence
  Description of Artificial Sequence: Synthetic oligonucleotide
uuauagcagccaaacauac

SEQ ID NO: 1155061 - RNA, 19 nt, Artificial Sequence
  Description of Artificial Sequence: Synthetic oligonucleotide
uauuuguacuggauguacc

SEQ ID NO: 1155062 - RNA, 19 nt, Artificial Sequence
  Description of Artificial Sequence: Synthetic oligonucleotide
ccaauaacuaaauuugagg

SEQ ID NO: 1155063 - RNA, 19 nt, Artificial Sequence
  Description of Artificial Sequence: Synthetic oligonucleotide
uacuguuuuaauguaauuc

SEQ ID NO: 1155064 - RNA, 19 nt, Artificial Sequence
  Description of Artificial Sequence: Synthetic oligonucleotide
ugcauuguggaaauuaauu

SEQ ID NO: 1155065 - RNA, 19 nt, Artificial Sequence
  Description of Artificial Sequence: Synthetic oligonucleotide
cuuaucagacccaucugcc

SEQ ID NO: 1155066 - RNA, 19 nt, Artificial Sequence
  Description of Artificial Sequence: Synthetic oligonucleotide
auauuuguacuggauguac

SEQ ID NO: 1155067 - RNA, 19 nt, Artificial Sequence
  Description of Artificial Sequence: Synthetic oligonucleotide
uuaaacuuuauaguugaaa

SEQ ID NO: 1155068 - RNA, 19 nt, Artificial Sequence
  Description of Artificial Sequence: Synthetic oligonucleotide
acaaagauuuaguaggaau

SEQ ID NO: 1155069 - RNA, 19 nt, Artificial Sequence
  Description of Artificial Sequence: Synthetic oligonucleotide
acuaugauuugcauugugg

SEQ ID NO: 1155070 - RNA, 19 nt, Artificial Sequence
  Description of Artificial Sequence: Synthetic oligonucleotide
acaaccucgaauauuuaac

SEQ ID NO: 1155071 - RNA, 19 nt, Artificial Sequence
  Description of Artificial Sequence: Synthetic oligonucleotide
ucuaccuuguuuagcaacu

SEQ ID NO: 1155072 - RNA, 19 nt, Artificial Sequence
  Description of Artificial Sequence: Synthetic oligonucleotide
uuugguggugaaaauaaua

SEQ ID NO: 1155073 - RNA, 19 nt, Artificial Sequence
  Description of Artificial Sequence: Synthetic oligonucleotide
aacauuauccuugugcaaa

SEQ ID NO: 1155074 - RNA, 19 nt, Artificial Sequence
  Description of Artificial Sequence: Synthetic oligonucleotide
ugagaaccgggacaagggg

SEQ ID NO: 1155075 - RNA, 19 nt, Artificial Sequence
  Description of Artificial Sequence: Synthetic oligonucleotide
ucaaacagagcccugcaau

SEQ ID NO: 1155076 - RNA, 19 nt, Artificial Sequence
  Description of Artificial Sequence: Synthetic oligonucleotide
aacuaggagaucucaauuu

SEQ ID NO: 1155077 - RNA, 19 nt, Artificial Sequence
  Description of Artificial Sequence: Synthetic oligonucleotide
uauuuugggcguuuguugu

SEQ ID NO: 1155078 - RNA, 19 nt, Artificial Sequence
  Description of Artificial Sequence: Synthetic oligonucleotide
uguucggcauugcuaaucc

SEQ ID NO: 1155079 - RNA, 19 nt, Artificial Sequence
  Description of Artificial Sequence: Synthetic oligonucleotide
uaguaggaauauaaaguga

SEQ ID NO: 1155080 - RNA, 19 nt, Artificial Sequence
  Description of Artificial Sequence: Synthetic oligonucleotide
uaugagauugugauauuau

SEQ ID NO: 1155081 - RNA, 19 nt, Artificial Sequence
  Description of Artificial Sequence: Synthetic oligonucleotide
auuugaaagucaaguagac

SEQ ID NO: 1155082 - RNA, 19 nt, Artificial Sequence
  Description of Artificial Sequence: Synthetic oligonucleotide
uguagagaagcuucaaaau

SEQ ID NO: 1155083 - RNA, 19 nt, Artificial Sequence
  Description of Artificial Sequence: Synthetic oligonucleotide
ucucaaugaacuacuauuu

SEQ ID NO: 1155084 - RNA, 19 nt, Artificial Sequence
  Description of Artificial Sequence: Synthetic oligonucleotide
cuuugauauuagaacuagg

SEQ ID NO: 1155085 - RNA, 19 nt, Artificial Sequence
  Description of Artificial Sequence: Synthetic oligonucleotide
uaaacaugacugugcaaag

SEQ ID NO: 1155086 - RNA, 19 nt, Artificial Sequence
  Description of Artificial Sequence: Synthetic oligonucleotide
ucauguaaugcaucuuuca

SEQ ID NO: 1155087 - RNA, 19 nt, Artificial Sequence
  Description of Artificial Sequence: Synthetic oligonucleotide
auuuguacuggauguaccu

SEQ ID NO: 1155088 - RNA, 19 nt, Artificial Sequence
  Description of Artificial Sequence: Synthetic oligonucleotide
aaggucuaaauuuguccug

SEQ ID NO: 1155089 - RNA, 19 nt, Artificial Sequence
  Description of Artificial Sequence: Synthetic oligonucleotide
cuacauuugcgaaaaccag

SEQ ID NO: 1155090 - RNA, 19 nt, Artificial Sequence
  Description of Artificial Sequence: Synthetic oligonucleotide
uuuucgcuauaugaaaacc

SEQ ID NO: 1155091 - RNA, 19 nt, Artificial Sequence
  Description of Artificial Sequence: Synthetic oligonucleotide
auguaauuccuaucucaac

SEQ ID NO: 1155092 - RNA, 19 nt, Artificial Sequence
  Description of Artificial Sequence: Synthetic oligonucleotide
ucugacucauaccacagua

SEQ ID NO: 1155093 - RNA, 19 nt, Artificial Sequence
  Description of Artificial Sequence: Synthetic oligonucleotide
guaauuccuaucucaacug

SEQ ID NO: 1155094 - RNA, 19 nt, Artificial Sequence
  Description of Artificial Sequence: Synthetic oligonucleotide
aaaagcacgaaaauacuuu

SEQ ID NO: 1155095 - RNA, 19 nt, Artificial Sequence
  Description of Artificial Sequence: Synthetic oligonucleotide
uaaagugacuauuuccguc

SEQ ID NO: 1155096 - RNA, 19 nt, Artificial Sequence
  Description of Artificial Sequence: Synthetic oligonucleotide
auagaucaauggcuucacc

SEQ ID NO: 1155097 - RNA, 19 nt, Artificial Sequence
  Description of Artificial Sequence: Synthetic oligonucleotide
aaguaccguguaauaaacc

SEQ ID NO: 1155098 - RNA, 19 nt, Artificial Sequence
  Description of Artificial Sequence: Synthetic oligonucleotide
ucaacuguauuuacacaac

SEQ ID NO: 1155099 - RNA, 19 nt, Artificial Sequence
  Description of Artificial Sequence: Synthetic oligonucleotide
ucgaauauuuaacuaugau

SEQ ID NO: 1155100 - RNA, 19 nt, Artificial Sequence
  Description of Artificial Sequence: Synthetic oligonucleotide
gauauuagaacuaggagau

SEQ ID NO: 1155101 - RNA, 19 nt, Artificial Sequence
  Description of Artificial Sequence: Synthetic oligonucleotide
agaugauuaauuucagcaa

SEQ ID NO: 1155102 - RNA, 19 nt, Artificial Sequence
  Description of Artificial Sequence: Synthetic oligonucleotide
aucucggucuacuaagaag

SEQ ID NO: 1155103 - RNA, 19 nt, Artificial Sequence
  Description of Artificial Sequence: Synthetic oligonucleotide
aaaaccaauacaggacaug

SEQ ID NO: 1155104 - RNA, 19 nt, Artificial Sequence
  Description of Artificial Sequence: Synthetic oligonucleotide
uaugauuugcauuguggaa

SEQ ID NO: 1155105 - RNA, 19 nt, Artificial Sequence
  Description of Artificial Sequence: Synthetic oligonucleotide
agauuuaguaggaauauaa

SEQ ID NO: 1155106 - RNA, 19 nt, Artificial Sequence
  Description of Artificial Sequence: Synthetic oligonucleotide
uagaguagacuggacagag

SEQ ID NO: 1155107 - RNA, 19 nt, Artificial Sequence
  Description of Artificial Sequence: Synthetic oligonucleotide
aaugcucuaagcucugauu

SEQ ID NO: 1155108 - RNA, 19 nt, Artificial Sequence
  Description of Artificial Sequence: Synthetic oligonucleotide
aaugugaaacucacuuguc

SEQ ID NO: 1155109 - RNA, 19 nt, Artificial Sequence
  Description of Artificial Sequence: Synthetic oligonucleotide
ugucagguuuucuuaauaa

SEQ ID NO: 1155110 - RNA, 19 nt, Artificial Sequence
  Description of Artificial Sequence: Synthetic oligonucleotide
auaaaguccaauaacuaaa

SEQ ID NO: 1155111 - RNA, 19 nt, Artificial Sequence
  Description of Artificial Sequence: Synthetic oligonucleotide
accuuguuuagcaacuuac

SEQ ID NO: 1155112 - RNA, 19 nt, Artificial Sequence
  Description of Artificial Sequence: Synthetic oligonucleotide
uuacacaucuaauguggug

SEQ ID NO: 1155113 - RNA, 19 nt, Artificial Sequence
  Description of Artificial Sequence: Synthetic oligonucleotide
uacuuucuauuuaucagau

SEQ ID NO: 1155114 - RNA, 19 nt, Artificial Sequence
  Description of Artificial Sequence: Synthetic oligonucleotide
caacuguauuuacacaacc

SEQ ID NO: 1155115 - RNA, 19 nt, Artificial Sequence
  Description of Artificial Sequence: Synthetic oligonucleotide
uuauauggucuacaaguua

SEQ ID NO: 1155116 - RNA, 19 nt, Artificial Sequence
  Description of Artificial Sequence: Synthetic oligonucleotide
uguguagagaagcuucaaa

SEQ ID NO: 1155117 - RNA, 19 nt, Artificial Sequence
  Description of Artificial Sequence: Synthetic oligonucleotide
augugaaacucacuugucu

SEQ ID NO: 1155118 - RNA, 19 nt, Artificial Sequence
  Description of Artificial Sequence: Synthetic oligonucleotide
accucgaauauuuaacuau

SEQ ID NO: 1155119 - RNA, 19 nt, Artificial Sequence
  Description of Artificial Sequence: Synthetic oligonucleotide
cuauuuaucagaugauuaa

SEQ ID NO: 1155120 - RNA, 19 nt, Artificial Sequence
  Description of Artificial Sequence: Synthetic oligonucleotide
uucgcuauaugaaaaccuu

SEQ ID NO: 1155121 - RNA, 19 nt, Artificial Sequence
  Description of Artificial Sequence: Synthetic oligonucleotide
uauuuaucagaugauuaau

SEQ ID NO: 1155122 - RNA, 19 nt, Artificial Sequence
  Description of Artificial Sequence: Synthetic oligonucleotide
aauaaacaugacugugcaa

SEQ ID NO: 1155123 - RNA, 19 nt, Artificial Sequence
  Description of Artificial Sequence: Synthetic oligonucleotide
auaaagugacuauuuccgu

SEQ ID NO: 1155124 - RNA, 19 nt, Artificial Sequence
  Description of Artificial Sequence: Synthetic oligonucleotide
agaacuaggagaucucaau

SEQ ID NO: 1155125 - RNA, 19 nt, Artificial Sequence
  Description of Artificial Sequence: Synthetic oligonucleotide
cuuguuuagcaacuuacca

SEQ ID NO: 1155126 - RNA, 19 nt, Artificial Sequence
  Description of Artificial Sequence: Synthetic oligonucleotide
ugacuacauauauuuguac

SEQ ID NO: 1155127 - RNA, 19 nt, Artificial Sequence
  Description of Artificial Sequence: Synthetic oligonucleotide
uucuaccuuguuuagcaac

SEQ ID NO: 1155128 - RNA, 19 nt, Artificial Sequence
  Description of Artificial Sequence: Synthetic oligonucleotide
cucaauaaacaugacugug

SEQ ID NO: 1155129 - RNA, 19 nt, Artificial Sequence
  Description of Artificial Sequence: Synthetic oligonucleotide
guguaauaaaccauacuac

SEQ ID NO: 1155130 - RNA, 19 nt, Artificial Sequence
  Description of Artificial Sequence: Synthetic oligonucleotide
caaagauuuaguaggaaua

SEQ ID NO: 1155131 - RNA, 19 nt, Artificial Sequence
  Description of Artificial Sequence: Synthetic oligonucleotide
ucuggcacagugaaacuuc

SEQ ID NO: 1155132 - RNA, 19 nt, Artificial Sequence
  Description of Artificial Sequence: Synthetic oligonucleotide
aaaccuucuguaucucggu

SEQ ID NO: 1155133 - RNA, 19 nt, Artificial Sequence
  Description of Artificial Sequence: Synthetic oligonucleotide
gagaucucaauuuuccaaa

SEQ ID NO: 1155134 - RNA, 19 nt, Artificial Sequence
  Description of Artificial Sequence: Synthetic oligonucleotide
gacuacauauauuuguacu

SEQ ID NO: 1155135 - RNA, 19 nt, Artificial Sequence
  Description of Artificial Sequence: Synthetic oligonucleotide
uuuacacaaccucgaauau

SEQ ID NO: 1155136 - RNA, 19 nt, Artificial Sequence
  Description of Artificial Sequence: Synthetic oligonucleotide
agugacuauuuccgucagc

SEQ ID NO: 1155137 - RNA, 19 nt, Artificial Sequence
  Description of Artificial Sequence: Synthetic oligonucleotide
gucuacauuugcgaaaacc

SEQ ID NO: 1155138 - RNA, 19 nt, Artificial Sequence
  Description of Artificial Sequence: Synthetic oligonucleotide
uaccuuuucagacuaucua

SEQ ID NO: 1155139 - RNA, 19 nt, Artificial Sequence
  Description of Artificial Sequence: Synthetic oligonucleotide
guuggauauuuugauuagg

SEQ ID NO: 1155140 - RNA, 19 nt, Artificial Sequence
  Description of Artificial Sequence: Synthetic oligonucleotide
augaacuacuauuuaggau

SEQ ID NO: 1155141 - RNA, 19 nt, Artificial Sequence
  Description of Artificial Sequence: Synthetic oligonucleotide
uaccguguaauaaaccaua

SEQ ID NO: 1155142 - RNA, 19 nt, Artificial Sequence
  Description of Artificial Sequence: Synthetic oligonucleotide
uguagcaaacguuccucug

SEQ ID NO: 1155143 - RNA, 19 nt, Artificial Sequence
  Description of Artificial Sequence: Synthetic oligonucleotide
cuuuucagacuaucuaguc

SEQ ID NO: 1155144 - RNA, 19 nt, Artificial Sequence
  Description of Artificial Sequence: Synthetic oligonucleotide
aagugacuauuuccgucag

SEQ ID NO: 1155145 - RNA, 19 nt, Artificial Sequence
  Description of Artificial Sequence: Synthetic oligonucleotide
acuuuauaguugaaaacca

SEQ ID NO: 1155146 - RNA, 19 nt, Artificial Sequence
  Description of Artificial Sequence: Synthetic oligonucleotide
ugcucuaagcucugauucc

SEQ ID NO: 1155147 - RNA, 19 nt, Artificial Sequence
  Description of Artificial Sequence: Synthetic oligonucleotide
guagagaagcuucaaaaua

SEQ ID NO: 1155148 - RNA, 19 nt, Artificial Sequence
  Description of Artificial Sequence: Synthetic oligonucleotide
aacucacuugucugcuguc

SEQ ID NO: 1155149 - RNA, 19 nt, Artificial Sequence
  Description of Artificial Sequence: Synthetic oligonucleotide
aaccucgaauauuuaacua

SEQ ID NO: 1155150 - RNA, 19 nt, Artificial Sequence
  Description of Artificial Sequence: Synthetic oligonucleotide
cuccagaggacucaggguc

SEQ ID NO: 1155151 - RNA, 19 nt, Artificial Sequence
  Description of Artificial Sequence: Synthetic oligonucleotide
acuuaauauacuauauaaa

SEQ ID NO: 1155152 - RNA, 19 nt, Artificial Sequence
  Description of Artificial Sequence: Synthetic oligonucleotide
ugcauguucggcauugcua

SEQ ID NO: 1155153 - RNA, 19 nt, Artificial Sequence
  Description of Artificial Sequence: Synthetic oligonucleotide
agucuccuauucuccauuc

SEQ ID NO: 1155154 - RNA, 19 nt, Artificial Sequence
  Description of Artificial Sequence: Synthetic oligonucleotide
ucucaacuguauuuacaca

SEQ ID NO: 1155155 - RNA, 19 nt, Artificial Sequence
  Description of Artificial Sequence: Synthetic oligonucleotide
auguaaugcaucuuucaua

SEQ ID NO: 1155156 - RNA, 19 nt, Artificial Sequence
  Description of Artificial Sequence: Synthetic oligonucleotide
cuuccuacuguuuuaaugu

SEQ ID NO: 1155157 - RNA, 19 nt, Artificial Sequence
  Description of Artificial Sequence: Synthetic oligonucleotide
uuaugagauugugauauua

SEQ ID NO: 1155158 - RNA, 19 nt, Artificial Sequence
  Description of Artificial Sequence: Synthetic oligonucleotide
uccuaucucaacuguauuu

SEQ ID NO: 1155159 - RNA, 19 nt, Artificial Sequence
  Description of Artificial Sequence: Synthetic oligonucleotide
ugcgaaaaccagaaagaua

SEQ ID NO: 1155160 - RNA, 19 nt, Artificial Sequence
  Description of Artificial Sequence: Synthetic oligonucleotide
ggaugagaaauauaaaugu

SEQ ID NO: 1155161 - RNA, 19 nt, Artificial Sequence
  Description of Artificial Sequence: Synthetic oligonucleotide
uucagacuaucuagucucc

SEQ ID NO: 1155162 - RNA, 19 nt, Artificial Sequence
  Description of Artificial Sequence: Synthetic oligonucleotide
ucggcauugcuaauccaca

SEQ ID NO: 1155163 - RNA, 19 nt, Artificial Sequence
  Description of Artificial Sequence: Synthetic oligonucleotide
uucauacaggucaauuaua

SEQ ID NO: 1155164 - RNA, 19 nt, Artificial Sequence
  Description of Artificial Sequence: Synthetic oligonucleotide
auaaauguguagagaagcu

SEQ ID NO: 1155165 - RNA, 19 nt, Artificial Sequence
  Description of Artificial Sequence: Synthetic oligonucleotide
uugcauuguaaaacauaga

SEQ ID NO: 1155166 - RNA, 19 nt, Artificial Sequence
  Description of Artificial Sequence: Synthetic oligonucleotide
gaugauuaagccaaauuau

SEQ ID NO: 1155167 - RNA, 19 nt, Artificial Sequence
  Description of Artificial Sequence: Synthetic oligonucleotide
uucuauuuaucagaugauu

SEQ ID NO: 1155168 - RNA, 19 nt, Artificial Sequence
  Description of Artificial Sequence: Synthetic oligonucleotide
gugacuauuuccgucagca

SEQ ID NO: 1155169 - RNA, 19 nt, Artificial Sequence
  Description of Artificial Sequence: Synthetic oligonucleotide
caggucaauuauagcagcc

SEQ ID NO: 1155170 - RNA, 19 nt, Artificial Sequence
  Description of Artificial Sequence: Synthetic oligonucleotide
agacuaucuagucuccuau

SEQ ID NO: 1155171 - RNA, 19 nt, Artificial Sequence
  Description of Artificial Sequence: Synthetic oligonucleotide
cuaauagaucaauggcuuc

SEQ ID NO: 1155172 - RNA, 19 nt, Artificial Sequence
  Description of Artificial Sequence: Synthetic oligonucleotide
augagauugugauauuauu

SEQ ID NO: 1155173 - RNA, 19 nt, Artificial Sequence
  Description of Artificial Sequence: Synthetic oligonucleotide
cuuaccacuaaaucuuuaa

SEQ ID NO: 1155174 - RNA, 19 nt, Artificial Sequence
  Description of Artificial Sequence: Synthetic oligonucleotide
uuuugguggugaaaauaau

SEQ ID NO: 1155175 - RNA, 19 nt, Artificial Sequence
  Description of Artificial Sequence: Synthetic oligonucleotide
auucagcucaauaaacaug

SEQ ID NO: 1155176 - RNA, 19 nt, Artificial Sequence
  Description of Artificial Sequence: Synthetic oligonucleotide
uggauauuuugauuagguu

SEQ ID NO: 1155177 - RNA, 19 nt, Artificial Sequence
  Description of Artificial Sequence: Synthetic oligonucleotide
agacccaucugccuuuaug

SEQ ID NO: 1155178 - RNA, 19 nt, Artificial Sequence
  Description of Artificial Sequence: Synthetic oligonucleotide
uuagaguagacuggacaga

SEQ ID NO: 1155179 - RNA, 19 nt, Artificial Sequence
  Description of Artificial Sequence: Synthetic oligonucleotide
ucgcuauaugaaaaccuuc

SEQ ID NO: 1155180 - RNA, 19 nt, Artificial Sequence
  Description of Artificial Sequence: Synthetic oligonucleotide
auuuccgucagcaguacca

SEQ ID NO: 1155181 - RNA, 19 nt, Artificial Sequence
  Description of Artificial Sequence: Synthetic oligonucleotide
acuuucuauuuaucagaug

SEQ ID NO: 1155182 - RNA, 19 nt, Artificial Sequence
  Description of Artificial Sequence: Synthetic oligonucleotide
cuuuauaguugaaaaccaa

SEQ ID NO: 1155183 - RNA, 19 nt, Artificial Sequence
  Description of Artificial Sequence: Synthetic oligonucleotide
aagaagcaggugaugccuc

SEQ ID NO: 1155184 - RNA, 19 nt, Artificial Sequence
  Description of Artificial Sequence: Synthetic oligonucleotide
uauuuccgucagcaguacc

SEQ ID NO: 1155185 - RNA, 19 nt, Artificial Sequence
  Description of Artificial Sequence: Synthetic oligonucleotide
uaaauguguagagaagcuu

SEQ ID NO: 1155186 - RNA, 19 nt, Artificial Sequence
  Description of Artificial Sequence: Synthetic oligonucleotide
gcaacuuaccacuaaaucu

SEQ ID NO: 1155187 - RNA, 19 nt, Artificial Sequence
  Description of Artificial Sequence: Synthetic oligonucleotide
uagcaacuuaccacuaaau

SEQ ID NO: 1155188 - RNA, 19 nt, Artificial Sequence
  Description of Artificial Sequence: Synthetic oligonucleotide
acucauaccacaguacaaa

SEQ ID NO: 1155189 - RNA, 19 nt, Artificial Sequence
  Description of Artificial Sequence: Synthetic oligonucleotide
auaauauuuugggcguuug

SEQ ID NO: 1155190 - RNA, 19 nt, Artificial Sequence
  Description of Artificial Sequence: Synthetic oligonucleotide
auugccgacuguagcaaac

SEQ ID NO: 1155191 - RNA, 19 nt, Artificial Sequence
  Description of Artificial Sequence: Synthetic oligonucleotide
gaaacucacuugucugcug

SEQ ID NO: 1155192 - RNA, 19 nt, Artificial Sequence
  Description of Artificial Sequence: Synthetic oligonucleotide
aaauugccgacuguagcaa

SEQ ID NO: 1155193 - RNA, 19 nt, Artificial Sequence
  Description of Artificial Sequence: Synthetic oligonucleotide
cucgguaaccagagguggg

SEQ ID NO: 1155194 - RNA, 19 nt, Artificial Sequence
  Description of Artificial Sequence: Synthetic oligonucleotide
acuaaaucuuuaaaguauu

SEQ ID NO: 1155195 - RNA, 19 nt, Artificial Sequence
  Description of Artificial Sequence: Synthetic oligonucleotide
auguucggcauugcuaauc

SEQ ID NO: 1155196 - RNA, 19 nt, Artificial Sequence
  Description of Artificial Sequence: Synthetic oligonucleotide
agcucugauucccaucugu

SEQ ID NO: 1155197 - RNA, 19 nt, Artificial Sequence
  Description of Artificial Sequence: Synthetic oligonucleotide
uaucucggucuacuaagaa

SEQ ID NO: 1155198 - RNA, 19 nt, Artificial Sequence
  Description of Artificial Sequence: Synthetic oligonucleotide
accguguaauaaaccauac

SEQ ID NO: 1155199 - RNA, 19 nt, Artificial Sequence
  Description of Artificial Sequence: Synthetic oligonucleotide
gauugugauauuauuuccu

SEQ ID NO: 1155200 - RNA, 19 nt, Artificial Sequence
  Description of Artificial Sequence: Synthetic oligonucleotide
uugccgacuguagcaaacg

SEQ ID NO: 1155201 - RNA, 19 nt, Artificial Sequence
  Description of Artificial Sequence: Synthetic oligonucleotide
gagaaccgggacaaggggc

SEQ ID NO: 1155202 - RNA, 19 nt, Artificial Sequence
  Description of Artificial Sequence: Synthetic oligonucleotide
cacuaaaucuuuaaaguau

SEQ ID NO: 1155203 - RNA, 19 nt, Artificial Sequence
  Description of Artificial Sequence: Synthetic oligonucleotide
cuggauguaccuuuucaga

SEQ ID NO: 1155204 - RNA, 19 nt, Artificial Sequence
  Description of Artificial Sequence: Synthetic oligonucleotide
ucggucuacuaagaagcag

SEQ ID NO: 1155205 - RNA, 19 nt, Artificial Sequence
  Description of Artificial Sequence: Synthetic oligonucleotide
cauuccuuaugagauugug

SEQ ID NO: 1155206 - RNA, 19 nt, Artificial Sequence
  Description of Artificial Sequence: Synthetic oligonucleotide
uauuuaggauaaaguccaa

SEQ ID NO: 1155207 - RNA, 19 nt, Artificial Sequence
  Description of Artificial Sequence: Synthetic oligonucleotide
aauuccuaucucaacugua

SEQ ID NO: 1155208 - RNA, 19 nt, Artificial Sequence
  Description of Artificial Sequence: Synthetic oligonucleotide
ucuccagaggacucagggu

SEQ ID NO: 1155209 - RNA, 19 nt, Artificial Sequence
  Description of Artificial Sequence: Synthetic oligonucleotide
gcuauaugaaaaccuucug

SEQ ID NO: 1155210 - RNA, 19 nt, Artificial Sequence
  Description of Artificial Sequence: Synthetic oligonucleotide
augauuaagccaaauuauu

SEQ ID NO: 1155211 - RNA, 19 nt, Artificial Sequence
  Description of Artificial Sequence: Synthetic oligonucleotide
ccuuguuuagcaacuuacc

SEQ ID NO: 1155212 - RNA, 19 nt, Artificial Sequence
  Description of Artificial Sequence: Synthetic oligonucleotide
uccagaggacucagggucu

SEQ ID NO: 1155213 - RNA, 19 nt, Artificial Sequence
  Description of Artificial Sequence: Synthetic oligonucleotide
cuaagcucugauucccauc

SEQ ID NO: 1155214 - RNA, 19 nt, Artificial Sequence
  Description of Artificial Sequence: Synthetic oligonucleotide
ggacccauugaugauguag

SEQ ID NO: 1155215 - RNA, 19 nt, Artificial Sequence
  Description of Artificial Sequence: Synthetic oligonucleotide
aggucuaaauuuguccugu

SEQ ID NO: 1155216 - RNA, 19 nt, Artificial Sequence
  Description of Artificial Sequence: Synthetic oligonucleotide
auuccuaucucaacuguau

SEQ ID NO: 1155217 - RNA, 19 nt, Artificial Sequence
  Description of Artificial Sequence: Synthetic oligonucleotide
agugcaugauuuaaugaau

SEQ ID NO: 1155218 - RNA, 19 nt, Artificial Sequence
  Description of Artificial Sequence: Synthetic oligonucleotide
aggucaauuauagcagcca

SEQ ID NO: 1155219 - RNA, 19 nt, Artificial Sequence
  Description of Artificial Sequence: Synthetic oligonucleotide
ccucgaauauuuaacuaug

SEQ ID NO: 1155220 - RNA, 19 nt, Artificial Sequence
  Description of Artificial Sequence: Synthetic oligonucleotide
cggucuacuaagaagcagg

SEQ ID NO: 1155221 - RNA, 19 nt, Artificial Sequence
  Description of Artificial Sequence: Synthetic oligonucleotide
uuuugggcguuuguuguuc

SEQ ID NO: 1155222 - RNA, 19 nt, Artificial Sequence
  Description of Artificial Sequence: Synthetic oligonucleotide
caccaguuggauauuuuga

SEQ ID NO: 1155223 - RNA, 19 nt, Artificial Sequence
  Description of Artificial Sequence: Synthetic oligonucleotide
gcgaaaaccagaaagauau

SEQ ID NO: 1155224 - RNA, 19 nt, Artificial Sequence
  Description of Artificial Sequence: Synthetic oligonucleotide
ccgacuguagcaaacguuc

SEQ ID NO: 1155225 - RNA, 19 nt, Artificial Sequence
  Description of Artificial Sequence: Synthetic oligonucleotide
ucuguaucucggucuacua

SEQ ID NO: 1155226 - RNA, 19 nt, Artificial Sequence
  Description of Artificial Sequence: Synthetic oligonucleotide
aucugcauguucggcauug

SEQ ID NO: 1155227 - RNA, 19 nt, Artificial Sequence
  Description of Artificial Sequence: Synthetic oligonucleotide
caaacguuccucugacuca

SEQ ID NO: 1155228 - RNA, 19 nt, Artificial Sequence
  Description of Artificial Sequence: Synthetic oligonucleotide
cguguaauaaaccauacua

SEQ ID NO: 1155229 - RNA, 19 nt, Artificial Sequence
  Description of Artificial Sequence: Synthetic oligonucleotide
augucagguuuucuuaaua

SEQ ID NO: 1155230 - RNA, 19 nt, Artificial Sequence
  Description of Artificial Sequence: Synthetic oligonucleotide
uuccuacuguuuuaaugua

SEQ ID NO: 1155231 - RNA, 19 nt, Artificial Sequence
  Description of Artificial Sequence: Synthetic oligonucleotide
guggggucuacauuugcga

SEQ ID NO: 1155232 - RNA, 19 nt, Artificial Sequence
  Description of Artificial Sequence: Synthetic oligonucleotide
uuacacaaccucgaauauu

SEQ ID NO: 1155233 - RNA, 19 nt, Artificial Sequence
  Description of Artificial Sequence: Synthetic oligonucleotide
uuccuaucucaacuguauu

SEQ ID NO: 1155234 - RNA, 19 nt, Artificial Sequence
  Description of Artificial Sequence: Synthetic oligonucleotide
uccuuaugagauugugaua

SEQ ID NO: 1155235 - RNA, 19 nt, Artificial Sequence
  Description of Artificial Sequence: Synthetic oligonucleotide
cagggucugcaacuggaag

SEQ ID NO: 1155236 - RNA, 19 nt, Artificial Sequence
  Description of Artificial Sequence: Synthetic oligonucleotide
ccuuauaggaguaaaacau

SEQ ID NO: 1155237 - RNA, 19 nt, Artificial Sequence
  Description of Artificial Sequence: Synthetic oligonucleotide
ugccgacuguagcaaacgu

SEQ ID NO: 1155238 - RNA, 19 nt, Artificial Sequence
  Description of Artificial Sequence: Synthetic oligonucleotide
uuugggcguuuguuguucu

SEQ ID NO: 1155239 - RNA, 19 nt, Artificial Sequence
  Description of Artificial Sequence: Synthetic oligonucleotide
uuuguacuggauguaccuu

SEQ ID NO: 1155240 - RNA, 19 nt, Artificial Sequence
  Description of Artificial Sequence: Synthetic oligonucleotide
agaaccgggacaaggggcu

SEQ ID NO: 1155241 - RNA, 19 nt, Artificial Sequence
  Description of Artificial Sequence: Synthetic oligonucleotide
auauuauaacugaauuauu

SEQ ID NO: 1155242 - RNA, 19 nt, Artificial Sequence
  Description of Artificial Sequence: Synthetic oligonucleotide
gucuccuauucuccauucc

SEQ ID NO: 1155243 - RNA, 19 nt, Artificial Sequence
  Description of Artificial Sequence: Synthetic oligonucleotide
aaccgggacaaggggcuuc

SEQ ID NO: 1155244 - RNA, 19 nt, Artificial Sequence
  Description of Artificial Sequence: Synthetic oligonucleotide
gcauguucggcauugcuaa

SEQ ID NO: 1155245 - RNA, 19 nt, Artificial Sequence
  Description of Artificial Sequence: Synthetic oligonucleotide
caggugaugccucgguaac

SEQ ID NO: 1155246 - RNA, 19 nt, Artificial Sequence
  Description of Artificial Sequence: Synthetic oligonucleotide
gaacuaggagaucucaauu

SEQ ID NO: 1155247 - RNA, 19 nt, Artificial Sequence
  Description of Artificial Sequence: Synthetic oligonucleotide
guccuguuucuuccuacug

SEQ ID NO: 1155248 - RNA, 19 nt, Artificial Sequence
  Description of Artificial Sequence: Synthetic oligonucleotide
caaccucgaauauuuaacu

SEQ ID NO: 1155249 - RNA, 19 nt, Artificial Sequence
  Description of Artificial Sequence: Synthetic oligonucleotide
uuuccgucagcaguaccaa

SEQ ID NO: 1155250 - RNA, 19 nt, Artificial Sequence
  Description of Artificial Sequence: Synthetic oligonucleotide
gcuaauccacaucuuggac

SEQ ID NO: 1155251 - RNA, 19 nt, Artificial Sequence
  Description of Artificial Sequence: Synthetic oligonucleotide
gggcuuucaucauuuuccc

SEQ ID NO: 1155252 - RNA, 19 nt, Artificial Sequence
  Description of Artificial Sequence: Synthetic oligonucleotide
cacgaaaauacuuucuauu

SEQ ID NO: 1155253 - RNA, 19 nt, Artificial Sequence
  Description of Artificial Sequence: Synthetic oligonucleotide
cuuauaggaguaaaacauu

SEQ ID NO: 1155254 - RNA, 19 nt, Artificial Sequence
  Description of Artificial Sequence: Synthetic oligonucleotide
guaauaaaccauacuacuu

SEQ ID NO: 1155255 - RNA, 19 nt, Artificial Sequence
  Description of Artificial Sequence: Synthetic oligonucleotide
auuuugggcguuuguuguu

SEQ ID NO: 1155256 - RNA, 19 nt, Artificial Sequence
  Description of Artificial Sequence: Synthetic oligonucleotide
ggucaauuauagcagccaa

SEQ ID NO: 1155257 - RNA, 19 nt, Artificial Sequence
  Description of Artificial Sequence: Synthetic oligonucleotide
cauguaaugcaucuuucau

SEQ ID NO: 1155258 - RNA, 19 nt, Artificial Sequence
  Description of Artificial Sequence: Synthetic oligonucleotide
auaaaccauacuacuuaaa

SEQ ID NO: 1155259 - RNA, 19 nt, Artificial Sequence
  Description of Artificial Sequence: Synthetic oligonucleotide
aacuuaccacuaaaucuuu

SEQ ID NO: 1155260 - RNA, 19 nt, Artificial Sequence
  Description of Artificial Sequence: Synthetic oligonucleotide
gacucauaccacaguacaa

SEQ ID NO: 1155261 - RNA, 19 nt, Artificial Sequence
  Description of Artificial Sequence: Synthetic oligonucleotide
gucuacuaagaagcaggug

SEQ ID NO: 1155262 - RNA, 19 nt, Artificial Sequence
  Description of Artificial Sequence: Synthetic oligonucleotide
uggauccaucccuugcuuu

SEQ ID NO: 1155263 - RNA, 19 nt, Artificial Sequence
  Description of Artificial Sequence: Synthetic oligonucleotide
gucaauuauagcagccaaa

SEQ ID NO: 1155264 - RNA, 19 nt, Artificial Sequence
  Description of Artificial Sequence: Synthetic oligonucleotide
cuguaucucggucuacuaa

SEQ ID NO: 1155265 - RNA, 19 nt, Artificial Sequence
  Description of Artificial Sequence: Synthetic oligonucleotide
caucuuucauacaggucaa

SEQ ID NO: 1155266 - RNA, 19 nt, Artificial Sequence
  Description of Artificial Sequence: Synthetic oligonucleotide
cucacuugucugcugucca

SEQ ID NO: 1155267 - RNA, 19 nt, Artificial Sequence
  Description of Artificial Sequence: Synthetic oligonucleotide
cuucccagauucuggcaca

SEQ ID NO: 1155268 - RNA, 19 nt, Artificial Sequence
  Description of Artificial Sequence: Synthetic oligonucleotide
ggcauugcuaauccacauc

SEQ ID NO: 1155269 - RNA, 19 nt, Artificial Sequence
  Description of Artificial Sequence: Synthetic oligonucleotide
ggcuucaccaguuggauau

SEQ ID NO: 1155270 - RNA, 19 nt, Artificial Sequence
  Description of Artificial Sequence: Synthetic oligonucleotide
gaaauuaauucagcucaau

SEQ ID NO: 1155271 - RNA, 19 nt, Artificial Sequence
  Description of Artificial Sequence: Synthetic oligonucleotide
cuauuuccgucagcaguac

SEQ ID NO: 1155272 - RNA, 19 nt, Artificial Sequence
  Description of Artificial Sequence: Synthetic oligonucleotide
aagcuucaaaauaguuuua

SEQ ID NO: 1155273 - RNA, 19 nt, Artificial Sequence
  Description of Artificial Sequence: Synthetic oligonucleotide
guaggaauauaaagugacu

SEQ ID NO: 1155274 - RNA, 19 nt, Artificial Sequence
  Description of Artificial Sequence: Synthetic oligonucleotide
guaucucggucuacuaaga

SEQ ID NO: 1155275 - RNA, 19 nt, Artificial Sequence
  Description of Artificial Sequence: Synthetic oligonucleotide
cuacuaagaagcaggugau

SEQ ID NO: 1155276 - RNA, 19 nt, Artificial Sequence
  Description of Artificial Sequence: Synthetic oligonucleotide
cucggucuacuaagaagca

SEQ ID NO: 1155277 - RNA, 19 nt, Artificial Sequence
  Description of Artificial Sequence: Synthetic oligonucleotide
cagacuaucuagucuccua

SEQ ID NO: 1155278 - RNA, 19 nt, Artificial Sequence
  Description of Artificial Sequence: Synthetic oligonucleotide
cuuuaucucuuuggauuca

SEQ ID NO: 1155279 - RNA, 19 nt, Artificial Sequence
  Description of Artificial Sequence: Synthetic oligonucleotide
ccuuaugagauugugauau

SEQ ID NO: 1155280 - RNA, 19 nt, Artificial Sequence
  Description of Artificial Sequence: Synthetic oligonucleotide
gguaaccagaggugggguc

SEQ ID NO: 1155281 - RNA, 19 nt, Artificial Sequence
  Description of Artificial Sequence: Synthetic oligonucleotide
guacuggauguaccuuuuc

SEQ ID NO: 1155282 - RNA, 19 nt, Artificial Sequence
  Description of Artificial Sequence: Synthetic oligonucleotide
uggcuucaccaguuggaua

SEQ ID NO: 1155283 - RNA, 19 nt, Artificial Sequence
  Description of Artificial Sequence: Synthetic oligonucleotide
gcaacugcaugagccuugg

SEQ ID NO: 1155284 - RNA, 19 nt, Artificial Sequence
  Description of Artificial Sequence: Synthetic oligonucleotide
gcucaauaaacaugacugu

SEQ ID NO: 1155285 - RNA, 19 nt, Artificial Sequence
  Description of Artificial Sequence: Synthetic oligonucleotide
uuccgucagcaguaccaau

SEQ ID NO: 1155286 - RNA, 19 nt, Artificial Sequence
  Description of Artificial Sequence: Synthetic oligonucleotide
cgaauauuuaacuaugauu

SEQ ID NO: 1155287 - RNA, 19 nt, Artificial Sequence
  Description of Artificial Sequence: Synthetic oligonucleotide
ccuaauagaucaauggcuu

SEQ ID NO: 1155288 - RNA, 19 nt, Artificial Sequence
  Description of Artificial Sequence: Synthetic oligonucleotide
gggucuacauuugcgaaaa

SEQ ID NO: 1155289 - RNA, 19 nt, Artificial Sequence
  Description of Artificial Sequence: Synthetic oligonucleotide
ccgucagcaguaccaauac

SEQ ID NO: 1155290 - RNA, 19 nt, Artificial Sequence
  Description of Artificial Sequence: Synthetic oligonucleotide
cuguagcaaacguuccucu

SEQ ID NO: 1155291 - RNA, 19 nt, Artificial Sequence
  Description of Artificial Sequence: Synthetic oligonucleotide
cauuugcgaaaaccagaaa

SEQ ID NO: 1155292 - RNA, 19 nt, Artificial Sequence
  Description of Artificial Sequence: Synthetic oligonucleotide
ggggucuacauuugcgaaa

SEQ ID NO: 1155293 - RNA, 19 nt, Artificial Sequence
  Description of Artificial Sequence: Synthetic oligonucleotide
cuucuguaucucggucuac

SEQ ID NO: 1155294 - RNA, 19 nt, Artificial Sequence
  Description of Artificial Sequence: Synthetic oligonucleotide
guuuagcaacuuaccacua

SEQ ID NO: 1155295 - RNA, 19 nt, Artificial Sequence
  Description of Artificial Sequence: Synthetic oligonucleotide
guaccguguaauaaaccau

SEQ ID NO: 1155296 - RNA, 19 nt, Artificial Sequence
  Description of Artificial Sequence: Synthetic oligonucleotide
ccuaucucaacuguauuua

SEQ ID NO: 1155297 - RNA, 19 nt, Artificial Sequence
  Description of Artificial Sequence: Synthetic oligonucleotide
uugggcguuuguuguucuu

SEQ ID NO: 1155298 - RNA, 19 nt, Artificial Sequence
  Description of Artificial Sequence: Synthetic oligonucleotide
gccaaacauacugcuuuug

SEQ ID NO: 1155299 - RNA, 19 nt, Artificial Sequence
  Description of Artificial Sequence: Synthetic oligonucleotide
cugcuaaagccaucaugua

SEQ ID NO: 1155300 - RNA, 19 nt, Artificial Sequence
  Description of Artificial Sequence: Synthetic oligonucleotide
cgacuguagcaaacguucc

SEQ ID NO: 1155301 - RNA, 19 nt, Artificial Sequence
  Description of Artificial Sequence: Synthetic oligonucleotide
gccucgguaaccagaggug

SEQ ID NO: 1155302 - RNA, 19 nt, Artificial Sequence
  Description of Artificial Sequence: Synthetic oligonucleotide
gcguuuguuguucuuaauu

SEQ ID NO: 1155303 - RNA, 19 nt, Artificial Sequence
  Description of Artificial Sequence: Synthetic oligonucleotide
gcacgaaaauacuuucuau

SEQ ID NO: 1155304 - RNA, 19 nt, Artificial Sequence
  Description of Artificial Sequence: Synthetic oligonucleotide
caaugcucuaagcucugau

SEQ ID NO: 1155305 - RNA, 19 nt, Artificial Sequence
  Description of Artificial Sequence: Synthetic oligonucleotide
cuagucuccuauucuccau

SEQ ID NO: 1155306 - RNA, 19 nt, Artificial Sequence
  Description of Artificial Sequence: Synthetic oligonucleotide
cuccuauucuccauuccuu

SEQ ID NO: 1155307 - RNA, 19 nt, Artificial Sequence
  Description of Artificial Sequence: Synthetic oligonucleotide
cgcuauaugaaaaccuucu

SEQ ID NO: 1155308 - RNA, 19 nt, Artificial Sequence
  Description of Artificial Sequence: Synthetic oligonucleotide
cuuaugagauugugauauu

SEQ ID NO: 1155309 - RNA, 19 nt, Artificial Sequence
  Description of Artificial Sequence: Synthetic oligonucleotide
ggucuacauuugcgaaaac

SEQ ID NO: 1155310 - RNA, 19 nt, Artificial Sequence
  Description of Artificial Sequence: Synthetic oligonucleotide
gggucuucuuacugacuaa

SEQ ID NO: 1155311 - RNA, 19 nt, Artificial Sequence
  Description of Artificial Sequence: Synthetic oligonucleotide
ggucuacuaagaagcaggu

SEQ ID NO: 1155312 - RNA, 19 nt, Artificial Sequence
  Description of Artificial Sequence: Synthetic oligonucleotide
ccaauacaggacauguuuu

SEQ ID NO: 1155313 - RNA, 19 nt, Artificial Sequence
  Description of Artificial Sequence: Synthetic oligonucleotide
gauuugcauuguggaaauu

SEQ ID NO: 1155314 - RNA, 19 nt, Artificial Sequence
  Description of Artificial Sequence: Synthetic oligonucleotide
ccguguaauaaaccauacu

SEQ ID NO: 1155315 - RNA, 19 nt, Artificial Sequence
  Description of Artificial Sequence: Synthetic oligonucleotide
cauguucggcauugcuaau

SEQ ID NO: 1155316 - RNA, 19 nt, Artificial Sequence
  Description of Artificial Sequence: Synthetic oligonucleotide
ggcguuuguuguucuuaau

SEQ ID NO: 1155317 - RNA, 19 nt, Artificial Sequence
  Description of Artificial Sequence: Synthetic oligonucleotide
gcucugauucccaucuguu

SEQ ID NO: 1155318 - RNA, 19 nt, Artificial Sequence
  Description of Artificial Sequence: Synthetic oligonucleotide
gccgacuguagcaaacguu

SEQ ID NO: 1155319 - RNA, 19 nt, Artificial Sequence
  Description of Artificial Sequence: Synthetic oligonucleotide
gaaccgggacaaggggcuu

SEQ ID NO: 1155320 - RNA, 19 nt, Artificial Sequence
  Description of Artificial Sequence: Synthetic oligonucleotide
gcaugagccuuggggcuau

SEQ ID NO: 1155321 - RNA, 19 nt, Artificial Sequence
  Description of Artificial Sequence: Synthetic oligonucleotide
gcccugcuaaagccaucau

SEQ ID NO: 1155322 - RNA, 19 nt, Artificial Sequence
  Description of Artificial Sequence: Synthetic oligonucleotide
gcuucaccaguuggauauu

SEQ ID NO: 1155323 - RNA, 19 nt, Artificial Sequence
  Description of Artificial Sequence: Synthetic oligonucleotide
cgguaaccagagguggggu

SEQ ID NO: 1155324 - RNA, 19 nt, Artificial Sequence
  Description of Artificial Sequence: Synthetic oligonucleotide
aguucuaccaaacagagca

SEQ ID NO: 1155325 - RNA, 19 nt, Artificial Sequence
  Description of Artificial Sequence: Synthetic oligonucleotide
aaauaaaacgcugacgaac

SEQ ID NO: 1155326 - RNA, 19 nt, Artificial Sequence
  Description of Artificial Sequence: Synthetic oligonucleotide
aacacacacacacacacac

SEQ ID NO: 1155327 - RNA, 19 nt, Artificial Sequence
  Description of Artificial Sequence: Synthetic oligonucleotide
uaauuuaccuugaagaugu

SEQ ID NO: 1155328 - RNA, 19 nt, Artificial Sequence
  Description of Artificial Sequence: Synthetic oligonucleotide
aaauucacaauggaugccc

SEQ ID NO: 1155329 - RNA, 19 nt, Artificial Sequence
  Description of Artificial Sequence: Synthetic oligonucleotide
uuuaacauugcuugaagcc

SEQ ID NO: 1155330 - RNA, 19 nt, Artificial Sequence
  Description of Artificial Sequence: Synthetic oligonucleotide
aauaacccucaauuggggc

SEQ ID NO: 1155331 - RNA, 19 nt, Artificial Sequence
  Description of Artificial Sequence: Synthetic oligonucleotide
aaugccuuuuaauagcgag

SEQ ID NO: 1155332 - RNA, 19 nt, Artificial Sequence
  Description of Artificial Sequence: Synthetic oligonucleotide
agaacacacacacacacac

SEQ ID NO: 1155333 - RNA, 19 nt, Artificial Sequence
  Description of Artificial Sequence: Synthetic oligonucleotide
uuuaccuugaagauguaca

SEQ ID NO: 1155334 - RNA, 19 nt, Artificial Sequence
  Description of Artificial Sequence: Synthetic oligonucleotide
uaaugcaucguuuucaugu

SEQ ID NO: 1155335 - RNA, 19 nt, Artificial Sequence
  Description of Artificial Sequence: Synthetic oligonucleotide
augaguaagcccuucauuc

SEQ ID NO: 1155336 - RNA, 19 nt, Artificial Sequence
  Description of Artificial Sequence: Synthetic oligonucleotide
acacucuuaaauaaaacgc

SEQ ID NO: 1155337 - RNA, 19 nt, Artificial Sequence
  Description of Artificial Sequence: Synthetic oligonucleotide
uuuguugugcucaaaauuc

SEQ ID NO: 1155338 - RNA, 19 nt, Artificial Sequence
  Description of Artificial Sequence: Synthetic oligonucleotide
aaggcaguuucuuugauga

SEQ ID NO: 1155339 - RNA, 19 nt, Artificial Sequence
  Description of Artificial Sequence: Synthetic oligonucleotide
uccggaauccaaaaggagg

SEQ ID NO: 1155340 - RNA, 19 nt, Artificial Sequence
  Description of Artificial Sequence: Synthetic oligonucleotide
uuuaauagcgagcuggguc

SEQ ID NO: 1155341 - RNA, 19 nt, Artificial Sequence
  Description of Artificial Sequence: Synthetic oligonucleotide
ugcucaaaauucacaaugg

SEQ ID NO: 1155342 - RNA, 19 nt, Artificial Sequence
  Description of Artificial Sequence: Synthetic oligonucleotide
aauggcaccgauugugggg

SEQ ID NO: 1155343 - RNA, 19 nt, Artificial Sequence
  Description of Artificial Sequence: Synthetic oligonucleotide
uccguugccaacaaccacg

SEQ ID NO: 1155344 - RNA, 19 nt, Artificial Sequence
  Description of Artificial Sequence: Synthetic oligonucleotide
acucaguuggcauugcucg

SEQ ID NO: 1155345 - RNA, 19 nt, Artificial Sequence
  Description of Artificial Sequence: Synthetic oligonucleotide
ugaggucauauccaaaacc

SEQ ID NO: 1155346 - RNA, 19 nt, Artificial Sequence
  Description of Artificial Sequence: Synthetic oligonucleotide
cagaauaacccucaauugg

SEQ ID NO: 1155347 - RNA, 19 nt, Artificial Sequence
  Description of Artificial Sequence: Synthetic oligonucleotide
ugacaaugccuuuuaauag

SEQ ID NO: 1155348 - RNA, 19 nt, Artificial Sequence
  Description of Artificial Sequence: Synthetic oligonucleotide
ucaaauaaccgagccaugg

SEQ ID NO: 1155349 - RNA, 19 nt, Artificial Sequence
  Description of Artificial Sequence: Synthetic oligonucleotide
cagaagaacacacacacac

SEQ ID NO: 1155350 - RNA, 19 nt, Artificial Sequence
  Description of Artificial Sequence: Synthetic oligonucleotide
ucuuaaauaaaacgcugac

SEQ ID NO: 1155351 - RNA, 19 nt, Artificial Sequence
  Description of Artificial Sequence: Synthetic oligonucleotide
aaauaaccgagccauggcu

SEQ ID NO: 1155352 - RNA, 19 nt, Artificial Sequence
  Description of Artificial Sequence: Synthetic oligonucleotide
ugacgaacaagucauuggc

SEQ ID NO: 1155353 - RNA, 19 nt, Artificial Sequence
  Description of Artificial Sequence: Synthetic oligonucleotide
gaagaacacacacacacac

SEQ ID NO: 1155354 - RNA, 19 nt, Artificial Sequence
  Description of Artificial Sequence: Synthetic oligonucleotide
aaugcaucguuuucauguc

SEQ ID NO: 1155355 - RNA, 19 nt, Artificial Sequence
  Description of Artificial Sequence: Synthetic oligonucleotide
uguaccugugcucaaauaa

SEQ ID NO: 1155356 - RNA, 19 nt, Artificial Sequence
  Description of Artificial Sequence: Synthetic oligonucleotide
uguaauuuaccuugaagau

SEQ ID NO: 1155357 - RNA, 19 nt, Artificial Sequence
  Description of Artificial Sequence: Synthetic oligonucleotide
uuaauagcgagcugggucu

SEQ ID NO: 1155358 - RNA, 19 nt, Artificial Sequence
  Description of Artificial Sequence: Synthetic oligonucleotide
cauauuugaguucagcuuc

SEQ ID NO: 1155359 - RNA, 19 nt, Artificial Sequence
  Description of Artificial Sequence: Synthetic oligonucleotide
aacgcugacgaacaaguca

SEQ ID NO: 1155360 - RNA, 19 nt, Artificial Sequence
  Description of Artificial Sequence: Synthetic oligonucleotide
ucagaauaacccucaauug

SEQ ID NO: 1155361 - RNA, 19 nt, Artificial Sequence
  Description of Artificial Sequence: Synthetic oligonucleotide
aauaaaacgcugacgaaca

SEQ ID NO: 1155362 - RNA, 19 nt, Artificial Sequence
  Description of Artificial Sequence: Synthetic oligonucleotide
uuuggguguaccauugcag

SEQ ID NO: 1155363 - RNA, 19 nt, Artificial Sequence
  Description of Artificial Sequence: Synthetic oligonucleotide
uuaccuugaagauguacag

SEQ ID NO: 1155364 - RNA, 19 nt, Artificial Sequence
  Description of Artificial Sequence: Synthetic oligonucleotide
uguuuaaccuuauaaccac

SEQ ID NO: 1155365 - RNA, 19 nt, Artificial Sequence
  Description of Artificial Sequence: Synthetic oligonucleotide
ucagcugcgcuucuaauug

SEQ ID NO: 1155366 - RNA, 19 nt, Artificial Sequence
  Description of Artificial Sequence: Synthetic oligonucleotide
aacacaaccacuguacacu

SEQ ID NO: 1155367 - RNA, 19 nt, Artificial Sequence
  Description of Artificial Sequence: Synthetic oligonucleotide
aagagccgaacccaaaaug

SEQ ID NO: 1155368 - RNA, 19 nt, Artificial Sequence
  Description of Artificial Sequence: Synthetic oligonucleotide
uuggguguaccauugcagg

SEQ ID NO: 1155369 - RNA, 19 nt, Artificial Sequence
  Description of Artificial Sequence: Synthetic oligonucleotide
uucgcagcuuuacagaggc

SEQ ID NO: 1155370 - RNA, 19 nt, Artificial Sequence
  Description of Artificial Sequence: Synthetic oligonucleotide
agccacuugaaaucaacac

SEQ ID NO: 1155371 - RNA, 19 nt, Artificial Sequence
  Description of Artificial Sequence: Synthetic oligonucleotide
ucaacacucuuaaauaaaa

SEQ ID NO: 1155372 - RNA, 19 nt, Artificial Sequence
  Description of Artificial Sequence: Synthetic oligonucleotide
cuuaugguaguuuuauuuc

SEQ ID NO: 1155373 - RNA, 19 nt, Artificial Sequence
  Description of Artificial Sequence: Synthetic oligonucleotide
agaauaacccucaauuggg

SEQ ID NO: 1155374 - RNA, 19 nt, Artificial Sequence
  Description of Artificial Sequence: Synthetic oligonucleotide
uguguggcuaggacaaugg

SEQ ID NO: 1155375 - RNA, 19 nt, Artificial Sequence
  Description of Artificial Sequence: Synthetic oligonucleotide
cuugaucaacuucaggagg

SEQ ID NO: 1155376 - RNA, 19 nt, Artificial Sequence
  Description of Artificial Sequence: Synthetic oligonucleotide
uuaacauugcuugaagcca

SEQ ID NO: 1155377 - RNA, 19 nt, Artificial Sequence
  Description of Artificial Sequence: Synthetic oligonucleotide
aaaggagggucauauuuga

SEQ ID NO: 1155378 - RNA, 19 nt, Artificial Sequence
  Description of Artificial Sequence: Synthetic oligonucleotide
aucgaacugguugagagcg

SEQ ID NO: 1155379 - RNA, 19 nt, Artificial Sequence
  Description of Artificial Sequence: Synthetic oligonucleotide
auauccaaaaccugccaag

SEQ ID NO: 1155380 - RNA, 19 nt, Artificial Sequence
  Description of Artificial Sequence: Synthetic oligonucleotide
cuuuuaauagcgagcuggg

SEQ ID NO: 1155381 - RNA, 19 nt, Artificial Sequence
  Description of Artificial Sequence: Synthetic oligonucleotide
aaaacgcugacgaacaagu

SEQ ID NO: 1155382 - RNA, 19 nt, Artificial Sequence
  Description of Artificial Sequence: Synthetic oligonucleotide
agcaggaaauuccucugcc

SEQ ID NO: 1155383 - RNA, 19 nt, Artificial Sequence
  Description of Artificial Sequence: Synthetic oligonucleotide
cuuuaugcggucagggucc

SEQ ID NO: 1155384 - RNA, 19 nt, Artificial Sequence
  Description of Artificial Sequence: Synthetic oligonucleotide
uucgccacaguucucagcu

SEQ ID NO: 1155385 - RNA, 19 nt, Artificial Sequence
  Description of Artificial Sequence: Synthetic oligonucleotide
ucaggguccacauaaugca

SEQ ID NO: 1155386 - RNA, 19 nt, Artificial Sequence
  Description of Artificial Sequence: Synthetic oligonucleotide
uguacacuugacaaugccu

SEQ ID NO: 1155387 - RNA, 19 nt, Artificial Sequence
  Description of Artificial Sequence: Synthetic oligonucleotide
ucucuucgcagcuuuacag

SEQ ID NO: 1155388 - RNA, 19 nt, Artificial Sequence
  Description of Artificial Sequence: Synthetic oligonucleotide
ugcaaguggcgcuuguucg

SEQ ID NO: 1155389 - RNA, 19 nt, Artificial Sequence
  Description of Artificial Sequence: Synthetic oligonucleotide
ucguuuucaugucacauuc

SEQ ID NO: 1155390 - RNA, 19 nt, Artificial Sequence
  Description of Artificial Sequence: Synthetic oligonucleotide
ucagguagcaaguccaaga

SEQ ID NO: 1155391 - RNA, 19 nt, Artificial Sequence
  Description of Artificial Sequence: Synthetic oligonucleotide
cacacacacacacacaccc

SEQ ID NO: 1155392 - RNA, 19 nt, Artificial Sequence
  Description of Artificial Sequence: Synthetic oligonucleotide
auugugcaugaccugagag

SEQ ID NO: 1155393 - RNA, 19 nt, Artificial Sequence
  Description of Artificial Sequence: Synthetic oligonucleotide
uauuccacguccgacagug

SEQ ID NO: 1155394 - RNA, 19 nt, Artificial Sequence
  Description of Artificial Sequence: Synthetic oligonucleotide
ucuucgcagcuuuacagag

SEQ ID NO: 1155395 - RNA, 19 nt, Artificial Sequence
  Description of Artificial Sequence: Synthetic oligonucleotide
aauucacaauggaugcccc

SEQ ID NO: 1155396 - RNA, 19 nt, Artificial Sequence
  Description of Artificial Sequence: Synthetic oligonucleotide
acacuacaaacacaaccac

SEQ ID NO: 1155397 - RNA, 19 nt, Artificial Sequence
  Description of Artificial Sequence: Synthetic oligonucleotide
aaucucuucgcagcuuuac

SEQ ID NO: 1155398 - RNA, 19 nt, Artificial Sequence
  Description of Artificial Sequence: Synthetic oligonucleotide
gucgacugaggucauaucc

SEQ ID NO: 1155399 - RNA, 19 nt, Artificial Sequence
  Description of Artificial Sequence: Synthetic oligonucleotide
ucaauuggggcacuguuua

SEQ ID NO: 1155400 - RNA, 19 nt, Artificial Sequence
  Description of Artificial Sequence: Synthetic oligonucleotide
ucucuuuaugcggucaggg

SEQ ID NO: 1155401 - RNA, 19 nt, Artificial Sequence
  Description of Artificial Sequence: Synthetic oligonucleotide
cugacgaacaagucauugg

SEQ ID NO: 1155402 - RNA, 19 nt, Artificial Sequence
  Description of Artificial Sequence: Synthetic oligonucleotide
caagcugacuucaucacac

SEQ ID NO: 1155403 - RNA, 19 nt, Artificial Sequence
  Description of Artificial Sequence: Synthetic oligonucleotide
uaccugugcucaaauaacc

SEQ ID NO: 1155404 - RNA, 19 nt, Artificial Sequence
  Description of Artificial Sequence: Synthetic oligonucleotide
cuuuacuggagaacuuccg

SEQ ID NO: 1155405 - RNA, 19 nt, Artificial Sequence
  Description of Artificial Sequence: Synthetic oligonucleotide
uggacuuuacuggagaacu

SEQ ID NO: 1155406 - RNA, 19 nt, Artificial Sequence
  Description of Artificial Sequence: Synthetic oligonucleotide
aacuuccggaauccaaaag

SEQ ID NO: 1155407 - RNA, 19 nt, Artificial Sequence
  Description of Artificial Sequence: Synthetic oligonucleotide
ucuaccaaacagagcagca

SEQ ID NO: 1155408 - RNA, 19 nt, Artificial Sequence
  Description of Artificial Sequence: Synthetic oligonucleotide
guaauuuaccuugaagaug

SEQ ID NO: 1155409 - RNA, 19 nt, Artificial Sequence
  Description of Artificial Sequence: Synthetic oligonucleotide
agagccgaacccaaaaugg

SEQ ID NO: 1155410 - RNA, 19 nt, Artificial Sequence
  Description of Artificial Sequence: Synthetic oligonucleotide
ugcacugacugucaaagua

SEQ ID NO: 1155411 - RNA, 19 nt, Artificial Sequence
  Description of Artificial Sequence: Synthetic oligonucleotide
gguagcaaguccaagaggc

SEQ ID NO: 1155412 - RNA, 19 nt, Artificial Sequence
  Description of Artificial Sequence: Synthetic oligonucleotide
ugugcucaaauaaccgagc

SEQ ID NO: 1155413 - RNA, 19 nt, Artificial Sequence
  Description of Artificial Sequence: Synthetic oligonucleotide
uaaaacgcugacgaacaag

SEQ ID NO: 1155414 - RNA, 19 nt, Artificial Sequence
  Description of Artificial Sequence: Synthetic oligonucleotide
caugcacugacugucaaag

SEQ ID NO: 1155415 - RNA, 19 nt, Artificial Sequence
  Description of Artificial Sequence: Synthetic oligonucleotide
cacacacacacacacacac

SEQ ID NO: 1155416 - RNA, 19 nt, Artificial Sequence
  Description of Artificial Sequence: Synthetic oligonucleotide
ucgacugaggucauaucca

SEQ ID NO: 1155417 - RNA, 19 nt, Artificial Sequence
  Description of Artificial Sequence: Synthetic oligonucleotide
ugccaagcugacuucauca

SEQ ID NO: 1155418 - RNA, 19 nt, Artificial Sequence
  Description of Artificial Sequence: Synthetic oligonucleotide
gaauaacccucaauugggg

SEQ ID NO: 1155419 - RNA, 19 nt, Artificial Sequence
  Description of Artificial Sequence: Synthetic oligonucleotide
gaguaagcccuucauucag

SEQ ID NO: 1155420 - RNA, 19 nt, Artificial Sequence
  Description of Artificial Sequence: Synthetic oligonucleotide
ugaguaagcccuucauuca

SEQ ID NO: 1155421 - RNA, 19 nt, Artificial Sequence
  Description of Artificial Sequence: Synthetic oligonucleotide
ucuggauaagucauccuua

SEQ ID NO: 1155422 - RNA, 19 nt, Artificial Sequence
  Description of Artificial Sequence: Synthetic oligonucleotide
ugccuuuuaauagcgagcu

SEQ ID NO: 1155423 - RNA, 19 nt, Artificial Sequence
  Description of Artificial Sequence: Synthetic oligonucleotide
uaaugcagaggaguccugg

SEQ ID NO: 1155424 - RNA, 19 nt, Artificial Sequence
  Description of Artificial Sequence: Synthetic oligonucleotide
aaccuuauaaccacaucga

SEQ ID NO: 1155425 - RNA, 19 nt, Artificial Sequence
  Description of Artificial Sequence: Synthetic oligonucleotide
uggggauauucuuaucuug

SEQ ID NO: 1155426 - RNA, 19 nt, Artificial Sequence
  Description of Artificial Sequence: Synthetic oligonucleotide
uuauaaccacaucgaacug

SEQ ID NO: 1155427 - RNA, 19 nt, Artificial Sequence
  Description of Artificial Sequence: Synthetic oligonucleotide
ugcucaaauaaccgagcca

SEQ ID NO: 1155428 - RNA, 19 nt, Artificial Sequence
  Description of Artificial Sequence: Synthetic oligonucleotide
ucuaguccauggaggaugc

SEQ ID NO: 1155429 - RNA, 19 nt, Artificial Sequence
  Description of Artificial Sequence: Synthetic oligonucleotide
uuccggaauccaaaaggag

SEQ ID NO: 1155430 - RNA, 19 nt, Artificial Sequence
  Description of Artificial Sequence: Synthetic oligonucleotide
uguugugcucaaaauucac

SEQ ID NO: 1155431 - RNA, 19 nt, Artificial Sequence
  Description of Artificial Sequence: Synthetic oligonucleotide
uguacaggagccacacuac

SEQ ID NO: 1155432 - RNA, 19 nt, Artificial Sequence
  Description of Artificial Sequence: Synthetic oligonucleotide
acaaugccuuuuaauagcg

SEQ ID NO: 1155433 - RNA, 19 nt, Artificial Sequence
  Description of Artificial Sequence: Synthetic oligonucleotide
ugcaucguuuucaugucac

SEQ ID NO: 1155434 - RNA, 19 nt, Artificial Sequence
  Description of Artificial Sequence: Synthetic oligonucleotide
ugaguacugaaggauguca

SEQ ID NO: 1155435 - RNA, 19 nt, Artificial Sequence
  Description of Artificial Sequence: Synthetic oligonucleotide
cugcaagagucaaaguagc

SEQ ID NO: 1155436 - RNA, 19 nt, Artificial Sequence
  Description of Artificial Sequence: Synthetic oligonucleotide
auuguggggauauucuuau

SEQ ID NO: 1155437 - RNA, 19 nt, Artificial Sequence
  Description of Artificial Sequence: Synthetic oligonucleotide
uuggcuucgcggcuucugg

SEQ ID NO: 1155438 - RNA, 19 nt, Artificial Sequence
  Description of Artificial Sequence: Synthetic oligonucleotide
cagaggcgaacucaguugg

SEQ ID NO: 1155439 - RNA, 19 nt, Artificial Sequence
  Description of Artificial Sequence: Synthetic oligonucleotide
uuaaccuuauaaccacauc

SEQ ID NO: 1155440 - RNA, 19 nt, Artificial Sequence
  Description of Artificial Sequence: Synthetic oligonucleotide
ggcaaaguauuccacgucc

SEQ ID NO: 1155441 - RNA, 19 nt, Artificial Sequence
  Description of Artificial Sequence: Synthetic oligonucleotide
caacacucuuaaauaaaac

SEQ ID NO: 1155442 - RNA, 19 nt, Artificial Sequence
  Description of Artificial Sequence: Synthetic oligonucleotide
aguguuuugccuggagugg

SEQ ID NO: 1155443 - RNA, 19 nt, Artificial Sequence
  Description of Artificial Sequence: Synthetic oligonucleotide
augccuuuuaauagcgagc

SEQ ID NO: 1155444 - RNA, 19 nt, Artificial Sequence
  Description of Artificial Sequence: Synthetic oligonucleotide
uucuaccaaacagagcagc

SEQ ID NO: 1155445 - RNA, 19 nt, Artificial Sequence
  Description of Artificial Sequence: Synthetic oligonucleotide
gucauuggcaaaguauucc

SEQ ID NO: 1155446 - RNA, 19 nt, Artificial Sequence
  Description of Artificial Sequence: Synthetic oligonucleotide
uucauggcgcucaugcacu

SEQ ID NO: 1155447 - RNA, 19 nt, Artificial Sequence
  Description of Artificial Sequence: Synthetic oligonucleotide
ucuuaucuuggccccagaa

SEQ ID NO: 1155448 - RNA, 19 nt, Artificial Sequence
  Description of Artificial Sequence: Synthetic oligonucleotide
agguagcaaguccaagagg

SEQ ID NO: 1155449 - RNA, 19 nt, Artificial Sequence
  Description of Artificial Sequence: Synthetic oligonucleotide
ugugcaugaccugagaguu

SEQ ID NO: 1155450 - RNA, 19 nt, Artificial Sequence
  Description of Artificial Sequence: Synthetic oligonucleotide
aacccaaaauggcaggguu

SEQ ID NO: 1155451 - RNA, 19 nt, Artificial Sequence
  Description of Artificial Sequence: Synthetic oligonucleotide
uucaugcuguaccugugcu

SEQ ID NO: 1155452 - RNA, 19 nt, Artificial Sequence
  Description of Artificial Sequence: Synthetic oligonucleotide
aaccacgcagcgcuugcag

SEQ ID NO: 1155453 - RNA, 19 nt, Artificial Sequence
  Description of Artificial Sequence: Synthetic oligonucleotide
ugguaguuuuauuuccaac

SEQ ID NO: 1155454 - RNA, 19 nt, Artificial Sequence
  Description of Artificial Sequence: Synthetic oligonucleotide
ugaugaguaagcccuucau

SEQ ID NO: 1155455 - RNA, 19 nt, Artificial Sequence
  Description of Artificial Sequence: Synthetic oligonucleotide
aaggaugucaaaggcaguu

SEQ ID NO: 1155456 - RNA, 19 nt, Artificial Sequence
  Description of Artificial Sequence: Synthetic oligonucleotide
ugcagggaguucuuugagc

SEQ ID NO: 1155457 - RNA, 19 nt, Artificial Sequence
  Description of Artificial Sequence: Synthetic oligonucleotide
ggucauauccaaaaccugc

SEQ ID NO: 1155458 - RNA, 19 nt, Artificial Sequence
  Description of Artificial Sequence: Synthetic oligonucleotide
acugucaaaguaaugcaga

SEQ ID NO: 1155459 - RNA, 19 nt, Artificial Sequence
  Description of Artificial Sequence: Synthetic oligonucleotide
gucauauccaaaaccugcc

SEQ ID NO: 1155460 - RNA, 19 nt, Artificial Sequence
  Description of Artificial Sequence: Synthetic oligonucleotide
cuguacacuugacaaugcc

SEQ ID NO: 1155461 - RNA, 19 nt, Artificial Sequence
  Description of Artificial Sequence: Synthetic oligonucleotide
uguaccauugcagggaguu

SEQ ID NO: 1155462 - RNA, 19 nt, Artificial Sequence
  Description of Artificial Sequence: Synthetic oligonucleotide
accgauuguggggauauuc

SEQ ID NO: 1155463 - RNA, 19 nt, Artificial Sequence
  Description of Artificial Sequence: Synthetic oligonucleotide
cauugcagggaguucuuug

SEQ ID NO: 1155464 - RNA, 19 nt, Artificial Sequence
  Description of Artificial Sequence: Synthetic oligonucleotide
uaccauugcagggaguucu

SEQ ID NO: 1155465 - RNA, 19 nt, Artificial Sequence
  Description of Artificial Sequence: Synthetic oligonucleotide
uguucaggaaagucacgcu

SEQ ID NO: 1155466 - RNA, 19 nt, Artificial Sequence
  Description of Artificial Sequence: Synthetic oligonucleotide
uggauaagucauccuuaug

SEQ ID NO: 1155467 - RNA, 19 nt, Artificial Sequence
  Description of Artificial Sequence: Synthetic oligonucleotide
agcucuaguccauggagga

SEQ ID NO: 1155468 - RNA, 19 nt, Artificial Sequence
  Description of Artificial Sequence: Synthetic oligonucleotide
gugcucaaauaaccgagcc

SEQ ID NO: 1155469 - RNA, 19 nt, Artificial Sequence
  Description of Artificial Sequence: Synthetic oligonucleotide
uugcaaguggcgcuuguuc

SEQ ID NO: 1155470 - RNA, 19 nt, Artificial Sequence
  Description of Artificial Sequence: Synthetic oligonucleotide
ccggaauccaaaaggaggg

SEQ ID NO: 1155471 - RNA, 19 nt, Artificial Sequence
  Description of Artificial Sequence: Synthetic oligonucleotide
ggggauauucuuaucuugg

SEQ ID NO: 1155472 - RNA, 19 nt, Artificial Sequence
  Description of Artificial Sequence: Synthetic oligonucleotide
acacaccccuucugaaggc

SEQ ID NO: 1155473 - RNA, 19 nt, Artificial Sequence
  Description of Artificial Sequence: Synthetic oligonucleotide
uuccacguccgacaguggu

SEQ ID NO: 1155474 - RNA, 19 nt, Artificial Sequence
  Description of Artificial Sequence: Synthetic oligonucleotide
ccuuauaaccacaucgaac

SEQ ID NO: 1155475 - RNA, 19 nt, Artificial Sequence
  Description of Artificial Sequence: Synthetic oligonucleotide
caucgaacugguugagagc

SEQ ID NO: 1155476 - RNA, 19 nt, Artificial Sequence
  Description of Artificial Sequence: Synthetic oligonucleotide
uuguucgccacaguucuca

SEQ ID NO: 1155477 - RNA, 19 nt, Artificial Sequence
  Description of Artificial Sequence: Synthetic oligonucleotide
gacuuuacuggagaacuuc

SEQ ID NO: 1155478 - RNA, 19 nt, Artificial Sequence
  Description of Artificial Sequence: Synthetic oligonucleotide
aaccugccaagcugacuuc

SEQ ID NO: 1155479 - RNA, 19 nt, Artificial Sequence
  Description of Artificial Sequence: Synthetic oligonucleotide
cugagcauaucucugagcu

SEQ ID NO: 1155480 - RNA, 19 nt, Artificial Sequence
  Description of Artificial Sequence: Synthetic oligonucleotide
gaagccacuugaaaucaac

SEQ ID NO: 1155481 - RNA, 19 nt, Artificial Sequence
  Description of Artificial Sequence: Synthetic oligonucleotide
auaaccacaucgaacuggu

SEQ ID NO: 1155482 - RNA, 19 nt, Artificial Sequence
  Description of Artificial Sequence: Synthetic oligonucleotide
ccaaaagaagagccgaacc

SEQ ID NO: 1155483 - RNA, 19 nt, Artificial Sequence
  Description of Artificial Sequence: Synthetic oligonucleotide
cacauaaugcaucguuuuc

SEQ ID NO: 1155484 - RNA, 19 nt, Artificial Sequence
  Description of Artificial Sequence: Synthetic oligonucleotide
uccacguccgacaguggug

SEQ ID NO: 1155485 - RNA, 19 nt, Artificial Sequence
  Description of Artificial Sequence: Synthetic oligonucleotide
aaaccugggccggcauucc

SEQ ID NO: 1155486 - RNA, 19 nt, Artificial Sequence
  Description of Artificial Sequence: Synthetic oligonucleotide
aaacgcugacgaacaaguc

SEQ ID NO: 1155487 - RNA, 19 nt, Artificial Sequence
  Description of Artificial Sequence: Synthetic oligonucleotide
uuugccuggagugggauuu

SEQ ID NO: 1155488 - RNA, 19 nt, Artificial Sequence
  Description of Artificial Sequence: Synthetic oligonucleotide
accugugcucaaauaaccg

SEQ ID NO: 1155489 - RNA, 19 nt, Artificial Sequence
  Description of Artificial Sequence: Synthetic oligonucleotide
ggguccacauaaugcaucg

SEQ ID NO: 1155490 - RNA, 19 nt, Artificial Sequence
  Description of Artificial Sequence: Synthetic oligonucleotide
cuaccaaacagagcagcag

SEQ ID NO: 1155491 - RNA, 19 nt, Artificial Sequence
  Description of Artificial Sequence: Synthetic oligonucleotide
uaugcggucaggguccaca

SEQ ID NO: 1155492 - RNA, 19 nt, Artificial Sequence
  Description of Artificial Sequence: Synthetic oligonucleotide
uggugcacccucuggauaa

SEQ ID NO: 1155493 - RNA, 19 nt, Artificial Sequence
  Description of Artificial Sequence: Synthetic oligonucleotide
agcuuuacagaggcgaacu

SEQ ID NO: 1155494 - RNA, 19 nt, Artificial Sequence
  Description of Artificial Sequence: Synthetic oligonucleotide
aguggcgcuuguucgccac

SEQ ID NO: 1155495 - RNA, 19 nt, Artificial Sequence
  Description of Artificial Sequence: Synthetic oligonucleotide
aagaacacacacacacaca

SEQ ID NO: 1155496 - RNA, 19 nt, Artificial Sequence
  Description of Artificial Sequence: Synthetic oligonucleotide
cucgcgcccauucagcccc

SEQ ID NO: 1155497 - RNA, 19 nt, Artificial Sequence
  Description of Artificial Sequence: Synthetic oligonucleotide
auccaaaaccugccaagcu

SEQ ID NO: 1155498 - RNA, 19 nt, Artificial Sequence
  Description of Artificial Sequence: Synthetic oligonucleotide
guuuggguguaccauugca

SEQ ID NO: 1155499 - RNA, 19 nt, Artificial Sequence
  Description of Artificial Sequence: Synthetic oligonucleotide
accuuauaaccacaucgaa

SEQ ID NO: 1155500 - RNA, 19 nt, Artificial Sequence
  Description of Artificial Sequence: Synthetic oligonucleotide
uguuuugccuggaguggga

SEQ ID NO: 1155501 - RNA, 19 nt, Artificial Sequence
  Description of Artificial Sequence: Synthetic oligonucleotide
ucacgcucagguagcaagu

SEQ ID NO: 1155502 - RNA, 19 nt, Artificial Sequence
  Description of Artificial Sequence: Synthetic oligonucleotide
cugaggucauauccaaaac

SEQ ID NO: 1155503 - RNA, 19 nt, Artificial Sequence
  Description of Artificial Sequence: Synthetic oligonucleotide
uguucagaauaacccucaa

SEQ ID NO: 1155504 - RNA, 19 nt, Artificial Sequence
  Description of Artificial Sequence: Synthetic oligonucleotide
acacacacacacacacacc

SEQ ID NO: 1155505 - RNA, 19 nt, Artificial Sequence
  Description of Artificial Sequence: Synthetic oligonucleotide
agccacacuacaaacacaa

SEQ ID NO: 1155506 - RNA, 19 nt, Artificial Sequence
  Description of Artificial Sequence: Synthetic oligonucleotide
aaaaccugccaagcugacu

SEQ ID NO: 1155507 - RNA, 19 nt, Artificial Sequence
  Description of Artificial Sequence: Synthetic oligonucleotide
caccaaagggacagaggcc

SEQ ID NO: 1155508 - RNA, 19 nt, Artificial Sequence
  Description of Artificial Sequence: Synthetic oligonucleotide
guagcuguggggugacuug

SEQ ID NO: 1155509 - RNA, 19 nt, Artificial Sequence
  Description of Artificial Sequence: Synthetic oligonucleotide
augguaguuuuauuuccaa

SEQ ID NO: 1155510 - RNA, 19 nt, Artificial Sequence
  Description of Artificial Sequence: Synthetic oligonucleotide
caugcuguaccugugcuca

SEQ ID NO: 1155511 - RNA, 19 nt, Artificial Sequence
  Description of Artificial Sequence: Synthetic oligonucleotide
aucucuucgcagcuuuaca

SEQ ID NO: 1155512 - RNA, 19 nt, Artificial Sequence
  Description of Artificial Sequence: Synthetic oligonucleotide
acacacacacacacacccc

SEQ ID NO: 1155513 - RNA, 19 nt, Artificial Sequence
  Description of Artificial Sequence: Synthetic oligonucleotide
guaccugugcucaaauaac

SEQ ID NO: 1155514 - RNA, 19 nt, Artificial Sequence
  Description of Artificial Sequence: Synthetic oligonucleotide
gaauccagacucggggacc

SEQ ID NO: 1155515 - RNA, 19 nt, Artificial Sequence
  Description of Artificial Sequence: Synthetic oligonucleotide
ugcgcuucuaauugagguu

SEQ ID NO: 1155516 - RNA, 19 nt, Artificial Sequence
  Description of Artificial Sequence: Synthetic oligonucleotide
cuguggggugacuugcaag

SEQ ID NO: 1155517 - RNA, 19 nt, Artificial Sequence
  Description of Artificial Sequence: Synthetic oligonucleotide
caguucuaccaaacagagc

SEQ ID NO: 1155518 - RNA, 19 nt, Artificial Sequence
  Description of Artificial Sequence: Synthetic oligonucleotide
auucuuaucuuggccccag

SEQ ID NO: 1155519 - RNA, 19 nt, Artificial Sequence
  Description of Artificial Sequence: Synthetic oligonucleotide
guggugaugaguaagcccu

SEQ ID NO: 1155520 - RNA, 19 nt, Artificial Sequence
  Description of Artificial Sequence: Synthetic oligonucleotide
guugugcucaaaauucaca

SEQ ID NO: 1155521 - RNA, 19 nt, Artificial Sequence
  Description of Artificial Sequence: Synthetic oligonucleotide
ugaagccacuugaaaucaa

SEQ ID NO: 1155522 - RNA, 19 nt, Artificial Sequence
  Description of Artificial Sequence: Synthetic oligonucleotide
uguucgccacaguucucag

SEQ ID NO: 1155523 - RNA, 19 nt, Artificial Sequence
  Description of Artificial Sequence: Synthetic oligonucleotide
uggcuucgcggcuucuggg

SEQ ID NO: 1155524 - RNA, 19 nt, Artificial Sequence
  Description of Artificial Sequence: Synthetic oligonucleotide
caaaaggagggucauauuu

SEQ ID NO: 1155525 - RNA, 19 nt, Artificial Sequence
  Description of Artificial Sequence: Synthetic oligonucleotide
agaagaacacacacacaca

SEQ ID NO: 1155526 - RNA, 19 nt, Artificial Sequence
  Description of Artificial Sequence: Synthetic oligonucleotide
auaaaacgcugacgaacaa

SEQ ID NO: 1155527 - RNA, 19 nt, Artificial Sequence
  Description of Artificial Sequence: Synthetic oligonucleotide
gagccauggcuuucuuugc

SEQ ID NO: 1155528 - RNA, 19 nt, Artificial Sequence
  Description of Artificial Sequence: Synthetic oligonucleotide
gacgaacaagucauuggca

SEQ ID NO: 1155529 - RNA, 19 nt, Artificial Sequence
  Description of Artificial Sequence: Synthetic oligonucleotide
ggaugucaaaggcaguuuc

SEQ ID NO: 1155530 - RNA, 19 nt, Artificial Sequence
  Description of Artificial Sequence: Synthetic oligonucleotide
uuugcaaaccugggccggc

SEQ ID NO: 1155531 - RNA, 19 nt, Artificial Sequence
  Description of Artificial Sequence: Synthetic oligonucleotide
acacacacacaccccuucu

SEQ ID NO: 1155532 - RNA, 19 nt, Artificial Sequence
  Description of Artificial Sequence: Synthetic oligonucleotide
ggugacuugcaaguggcgc

SEQ ID NO: 1155533 - RNA, 19 nt, Artificial Sequence
  Description of Artificial Sequence: Synthetic oligonucleotide
ugggccggcauuccuucug

SEQ ID NO: 1155534 - RNA, 19 nt, Artificial Sequence
  Description of Artificial Sequence: Synthetic oligonucleotide
uggguuuggguguaccauu

SEQ ID NO: 1155535 - RNA, 19 nt, Artificial Sequence
  Description of Artificial Sequence: Synthetic oligonucleotide
gcaaaguauuccacguccg

SEQ ID NO: 1155536 - RNA, 19 nt, Artificial Sequence
  Description of Artificial Sequence: Synthetic oligonucleotide
caaaguauuccacguccga

SEQ ID NO: 1155537 - RNA, 19 nt, Artificial Sequence
  Description of Artificial Sequence: Synthetic oligonucleotide
cuugacaaugccuuuuaau

SEQ ID NO: 1155538 - RNA, 19 nt, Artificial Sequence
  Description of Artificial Sequence: Synthetic oligonucleotide
aucuuggccccagaaucuc

SEQ ID NO: 1155539 - RNA, 19 nt, Artificial Sequence
  Description of Artificial Sequence: Synthetic oligonucleotide
gaugaguaagcccuucauu

SEQ ID NO: 1155540 - RNA, 19 nt, Artificial Sequence
  Description of Artificial Sequence: Synthetic oligonucleotide
cacauugugcaugaccuga

SEQ ID NO: 1155541 - RNA, 19 nt, Artificial Sequence
  Description of Artificial Sequence: Synthetic oligonucleotide
uagcuguggggugacuugc

SEQ ID NO: 1155542 - RNA, 19 nt, Artificial Sequence
  Description of Artificial Sequence: Synthetic oligonucleotide
auggcaccgauugugggga

SEQ ID NO: 1155543 - RNA, 19 nt, Artificial Sequence
  Description of Artificial Sequence: Synthetic oligonucleotide
acuugacaaugccuuuuaa

SEQ ID NO: 1155544 - RNA, 19 nt, Artificial Sequence
  Description of Artificial Sequence: Synthetic oligonucleotide
aggucauauccaaaaccug

SEQ ID NO: 1155545 - RNA, 19 nt, Artificial Sequence
  Description of Artificial Sequence: Synthetic oligonucleotide
ccggcauuccuucuguagg

SEQ ID NO: 1155546 - RNA, 19 nt, Artificial Sequence
  Description of Artificial Sequence: Synthetic oligonucleotide
acgcugacgaacaagucau

SEQ ID NO: 1155547 - RNA, 19 nt, Artificial Sequence
  Description of Artificial Sequence: Synthetic oligonucleotide
caguggugaugaguaagcc

SEQ ID NO: 1155548 - RNA, 19 nt, Artificial Sequence
  Description of Artificial Sequence: Synthetic oligonucleotide
uucuuaucuuggccccaga

SEQ ID NO: 1155549 - RNA, 19 nt, Artificial Sequence
  Description of Artificial Sequence: Synthetic oligonucleotide
gacuugcugagcauaucuc

SEQ ID NO: 1155550 - RNA, 19 nt, Artificial Sequence
  Description of Artificial Sequence: Synthetic oligonucleotide
caaaccugggccggcauuc

SEQ ID NO: 1155551 - RNA, 19 nt, Artificial Sequence
  Description of Artificial Sequence: Synthetic oligonucleotide
gugcgcaugcuagggaggg

SEQ ID NO: 1155552 - RNA, 19 nt, Artificial Sequence
  Description of Artificial Sequence: Synthetic oligonucleotide
cuucgcggcuucuggggcc

SEQ ID NO: 1155553 - RNA, 19 nt, Artificial Sequence
  Description of Artificial Sequence: Synthetic oligonucleotide
agaggcgaacucaguuggc

SEQ ID NO: 1155554 - RNA, 19 nt, Artificial Sequence
  Description of Artificial Sequence: Synthetic oligonucleotide
ucuggggccgccguuccgc

SEQ ID NO: 1155555 - RNA, 19 nt, Artificial Sequence
  Description of Artificial Sequence: Synthetic oligonucleotide
uccgugcgcaugcuaggga

SEQ ID NO: 1155556 - RNA, 19 nt, Artificial Sequence
  Description of Artificial Sequence: Synthetic oligonucleotide
ugaugauaacuggguucag

SEQ ID NO: 1155557 - RNA, 19 nt, Artificial Sequence
  Description of Artificial Sequence: Synthetic oligonucleotide
ucauggcgcucaugcacug

SEQ ID NO: 1155558 - RNA, 19 nt, Artificial Sequence
  Description of Artificial Sequence: Synthetic oligonucleotide
guucgccacaguucucagc

SEQ ID NO: 1155559 - RNA, 19 nt, Artificial Sequence
  Description of Artificial Sequence: Synthetic oligonucleotide
cacacacacacaccccuuc

SEQ ID NO: 1155560 - RNA, 19 nt, Artificial Sequence
  Description of Artificial Sequence: Synthetic oligonucleotide
uccuuaugguaguuuuauu

SEQ ID NO: 1155561 - RNA, 19 nt, Artificial Sequence
  Description of Artificial Sequence: Synthetic oligonucleotide
aggagccacacuacaaaca

SEQ ID NO: 1155562 - RNA, 19 nt, Artificial Sequence
  Description of Artificial Sequence: Synthetic oligonucleotide
gccuccguugccaacaacc

SEQ ID NO: 1155563 - RNA, 19 nt, Artificial Sequence
  Description of Artificial Sequence: Synthetic oligonucleotide
caugcuagggagggagcgc

SEQ ID NO: 1155564 - RNA, 19 nt, Artificial Sequence
  Description of Artificial Sequence: Synthetic oligonucleotide
guguucagaauaacccuca

SEQ ID NO: 1155565 - RNA, 19 nt, Artificial Sequence
  Description of Artificial Sequence: Synthetic oligonucleotide
uucgcggcuucuggggccg

SEQ ID NO: 1155566 - RNA, 19 nt, Artificial Sequence
  Description of Artificial Sequence: Synthetic oligonucleotide
gaacacacacacacacaca

SEQ ID NO: 1155567 - RNA, 19 nt, Artificial Sequence
  Description of Artificial Sequence: Synthetic oligonucleotide
agccgaacccaaaauggca

SEQ ID NO: 1155568 - RNA, 19 nt, Artificial Sequence
  Description of Artificial Sequence: Synthetic oligonucleotide
gcugacgaacaagucauug

SEQ ID NO: 1155569 - RNA, 19 nt, Artificial Sequence
  Description of Artificial Sequence: Synthetic oligonucleotide
cuccguugccaacaaccac

SEQ ID NO: 1155570 - RNA, 19 nt, Artificial Sequence
  Description of Artificial Sequence: Synthetic oligonucleotide
ggcuucgcggcuucugggg

SEQ ID NO: 1155571 - RNA, 19 nt, Artificial Sequence
  Description of Artificial Sequence: Synthetic oligonucleotide
acguccgacaguggugcac

SEQ ID NO: 1155572 - RNA, 19 nt, Artificial Sequence
  Description of Artificial Sequence: Synthetic oligonucleotide
uccugggucgacugagguc

SEQ ID NO: 1155573 - RNA, 19 nt, Artificial Sequence
  Description of Artificial Sequence: Synthetic oligonucleotide
uuuugccuggagugggauu

SEQ ID NO: 1155574 - RNA, 19 nt, Artificial Sequence
  Description of Artificial Sequence: Synthetic oligonucleotide
cugcgcuucuaauugaggu

SEQ ID NO: 1155575 - RNA, 19 nt, Artificial Sequence
  Description of Artificial Sequence: Synthetic oligonucleotide
gaagagccgaacccaaaau

SEQ ID NO: 1155576 - RNA, 19 nt, Artificial Sequence
  Description of Artificial Sequence: Synthetic oligonucleotide
aggacuugcugagcauauc

SEQ ID NO: 1155577 - RNA, 19 nt, Artificial Sequence
  Description of Artificial Sequence: Synthetic oligonucleotide
ucgaacugguugagagcgu

SEQ ID NO: 1155578 - RNA, 19 nt, Artificial Sequence
  Description of Artificial Sequence: Synthetic oligonucleotide
gcaugcuagggagggagcg

SEQ ID NO: 1155579 - RNA, 19 nt, Artificial Sequence
  Description of Artificial Sequence: Synthetic oligonucleotide
gccacuugaaaucaacacu

SEQ ID NO: 1155580 - RNA, 19 nt, Artificial Sequence
  Description of Artificial Sequence: Synthetic oligonucleotide
ccaaaaccugccaagcuga

SEQ ID NO: 1155581 - RNA, 19 nt, Artificial Sequence
  Description of Artificial Sequence: Synthetic oligonucleotide
accacgcagcgcuugcagu

SEQ ID NO: 1155582 - RNA, 19 nt, Artificial Sequence
  Description of Artificial Sequence: Synthetic oligonucleotide
cucgccgccagccccgggc

SEQ ID NO: 1155583 - RNA, 19 nt, Artificial Sequence
  Description of Artificial Sequence: Synthetic oligonucleotide
uggcgcuuguucgccacag

SEQ ID NO: 1155584 - RNA, 19 nt, Artificial Sequence
  Description of Artificial Sequence: Synthetic oligonucleotide
cuggcucgccgccagcccc

SEQ ID NO: 1155585 - RNA, 19 nt, Artificial Sequence
  Description of Artificial Sequence: Synthetic oligonucleotide
gggacagaggccccucucc

SEQ ID NO: 1155586 - RNA, 19 nt, Artificial Sequence
  Description of Artificial Sequence: Synthetic oligonucleotide
augcuagggagggagcgcu

SEQ ID NO: 1155587 - RNA, 19 nt, Artificial Sequence
  Description of Artificial Sequence: Synthetic oligonucleotide
guacacuugacaaugccuu

SEQ ID NO: 1155588 - RNA, 19 nt, Artificial Sequence
  Description of Artificial Sequence: Synthetic oligonucleotide
cugccaagcugacuucauc

SEQ ID NO: 1155589 - RNA, 19 nt, Artificial Sequence
  Description of Artificial Sequence: Synthetic oligonucleotide
gcucaaauaaccgagccau

SEQ ID NO: 1155590 - RNA, 19 nt, Artificial Sequence
  Description of Artificial Sequence: Synthetic oligonucleotide
ggacuugcugagcauaucu

SEQ ID NO: 1155591 - RNA, 19 nt, Artificial Sequence
  Description of Artificial Sequence: Synthetic oligonucleotide
ggggugacuugcaaguggc

SEQ ID NO: 1155592 - RNA, 19 nt, Artificial Sequence
  Description of Artificial Sequence: Synthetic oligonucleotide
gacucggggaccagggcca

SEQ ID NO: 1155593 - RNA, 19 nt, Artificial Sequence
  Description of Artificial Sequence: Synthetic oligonucleotide
cugaguacugaaggauguc

SEQ ID NO: 1155594 - RNA, 19 nt, Artificial Sequence
  Description of Artificial Sequence: Synthetic oligonucleotide
cagcuuuacagaggcgaac

SEQ ID NO: 1155595 - RNA, 19 nt, Artificial Sequence
  Description of Artificial Sequence: Synthetic oligonucleotide
gguuuggguguaccauugc

SEQ ID NO: 1155596 - RNA, 19 nt, Artificial Sequence
  Description of Artificial Sequence: Synthetic oligonucleotide
gcggucaggguccacauaa

SEQ ID NO: 1155597 - RNA, 19 nt, Artificial Sequence
  Description of Artificial Sequence: Synthetic oligonucleotide
ugcaaaccugggccggcau

SEQ ID NO: 1155598 - RNA, 19 nt, Artificial Sequence
  Description of Artificial Sequence: Synthetic oligonucleotide
guccacauaaugcaucguu

SEQ ID NO: 1155599 - RNA, 19 nt, Artificial Sequence
  Description of Artificial Sequence: Synthetic oligonucleotide
ccgaacccaaaauggcagg

SEQ ID NO: 1155600 - RNA, 19 nt, Artificial Sequence
  Description of Artificial Sequence: Synthetic oligonucleotide
agcucucuuuaugcgguca

SEQ ID NO: 1155601 - RNA, 19 nt, Artificial Sequence
  Description of Artificial Sequence: Synthetic oligonucleotide
ggggaccuucugcacaaag

SEQ ID NO: 1155602 - RNA, 19 nt, Artificial Sequence
  Description of Artificial Sequence: Synthetic oligonucleotide
cuuguucgccacaguucuc

SEQ ID NO: 1155603 - RNA, 19 nt, Artificial Sequence
  Description of Artificial Sequence: Synthetic oligonucleotide
cuuggcuucgcggcuucug

SEQ ID NO: 1155604 - RNA, 19 nt, Artificial Sequence
  Description of Artificial Sequence: Synthetic oligonucleotide
gaacucaguuggcauugcu

SEQ ID NO: 1155605 - RNA, 19 nt, Artificial Sequence
  Description of Artificial Sequence: Synthetic oligonucleotide
cuccaaguucaugcuguac

SEQ ID NO: 1155606 - RNA, 19 nt, Artificial Sequence
  Description of Artificial Sequence: Synthetic oligonucleotide
gggagggagcgcuggcucg

SEQ ID NO: 1155607 - RNA, 19 nt, Artificial Sequence
  Description of Artificial Sequence: Synthetic oligonucleotide
cuuugaugauaacuggguu

SEQ ID NO: 1155608 - RNA, 19 nt, Artificial Sequence
  Description of Artificial Sequence: Synthetic oligonucleotide
ccugugcucaaauaaccga

SEQ ID NO: 1155609 - RNA, 19 nt, Artificial Sequence
  Description of Artificial Sequence: Synthetic oligonucleotide
cacacacacacacaccccu

SEQ ID NO: 1155610 - RNA, 19 nt, Artificial Sequence
  Description of Artificial Sequence: Synthetic oligonucleotide
cauccuuaugguaguuuua

SEQ ID NO: 1155611 - RNA, 19 nt, Artificial Sequence
  Description of Artificial Sequence: Synthetic oligonucleotide
guaaugcagaggaguccug

SEQ ID NO: 1155612 - RNA, 19 nt, Artificial Sequence
  Description of Artificial Sequence: Synthetic oligonucleotide
uggugaugaguaagcccuu

SEQ ID NO: 1155613 - RNA, 19 nt, Artificial Sequence
  Description of Artificial Sequence: Synthetic oligonucleotide
acacacacacacacacaca

SEQ ID NO: 1155614 - RNA, 19 nt, Artificial Sequence
  Description of Artificial Sequence: Synthetic oligonucleotide
gcgaacucaguuggcauug

SEQ ID NO: 1155615 - RNA, 19 nt, Artificial Sequence
  Description of Artificial Sequence: Synthetic oligonucleotide
ccuuaugguaguuuuauuu

SEQ ID NO: 1155616 - RNA, 19 nt, Artificial Sequence
  Description of Artificial Sequence: Synthetic oligonucleotide
accucaucaccaguuuaaa

SEQ ID NO: 1155617 - RNA, 19 nt, Artificial Sequence
  Description of Artificial Sequence: Synthetic oligonucleotide
ggcaguuucuuugaugaua

SEQ ID NO: 1155618 - RNA, 19 nt, Artificial Sequence
  Description of Artificial Sequence: Synthetic oligonucleotide
ggguuuggguguaccauug

SEQ ID NO: 1155619 - RNA, 19 nt, Artificial Sequence
  Description of Artificial Sequence: Synthetic oligonucleotide
acccucuggauaagucauc

SEQ ID NO: 1155620 - RNA, 19 nt, Artificial Sequence
  Description of Artificial Sequence: Synthetic oligonucleotide
cccgcugagguccuucacc

SEQ ID NO: 1155621 - RNA, 19 nt, Artificial Sequence
  Description of Artificial Sequence: Synthetic oligonucleotide
augcggucaggguccacau

SEQ ID NO: 1155622 - RNA, 19 nt, Artificial Sequence
  Description of Artificial Sequence: Synthetic oligonucleotide
ccgugcgcaugcuagggag

SEQ ID NO: 1155623 - RNA, 19 nt, Artificial Sequence
  Description of Artificial Sequence: Synthetic oligonucleotide
gguuuguugugcucaaaau

SEQ ID NO: 1155624 - RNA, 19 nt, Artificial Sequence
  Description of Artificial Sequence: Synthetic oligonucleotide
gagcucucuuuaugcgguc

SEQ ID NO: 1155625 - RNA, 19 nt, Artificial Sequence
  Description of Artificial Sequence: Synthetic oligonucleotide
cacuugacaaugccuuuua

SEQ ID NO: 1155626 - RNA, 19 nt, Artificial Sequence
  Description of Artificial Sequence: Synthetic oligonucleotide
ggugccgcugcuuggcuuc

SEQ ID NO: 1155627 - RNA, 19 nt, Artificial Sequence
  Description of Artificial Sequence: Synthetic oligonucleotide
ugagagcguggcccagcuc

SEQ ID NO: 1155628 - RNA, 19 nt, Artificial Sequence
  Description of Artificial Sequence: Synthetic oligonucleotide
caggaaauuccucugccuu

SEQ ID NO: 1155629 - RNA, 19 nt, Artificial Sequence
  Description of Artificial Sequence: Synthetic oligonucleotide
ggaggaugccuccguugcc

SEQ ID NO: 1155630 - RNA, 19 nt, Artificial Sequence
  Description of Artificial Sequence: Synthetic oligonucleotide
cucggcaggcaggugccgc

SEQ ID NO: 1155631 - RNA, 19 nt, Artificial Sequence
  Description of Artificial Sequence: Synthetic oligonucleotide
ccacgcagcgcuugcagug

SEQ ID NO: 1155632 - RNA, 19 nt, Artificial Sequence
  Description of Artificial Sequence: Synthetic oligonucleotide
uaaccacaucgaacugguu

SEQ ID NO: 1155633 - RNA, 19 nt, Artificial Sequence
  Description of Artificial Sequence: Synthetic oligonucleotide
ccacguccgacaguggugc

SEQ ID NO: 1155634 - RNA, 19 nt, Artificial Sequence
  Description of Artificial Sequence: Synthetic oligonucleotide
cacgcucagguagcaaguc

SEQ ID NO: 1155635 - RNA, 19 nt, Artificial Sequence
  Description of Artificial Sequence: Synthetic oligonucleotide
gacugaggucauauccaaa

SEQ ID NO: 1155636 - RNA, 19 nt, Artificial Sequence
  Description of Artificial Sequence: Synthetic oligonucleotide
cuggggccgccguuccgcg

SEQ ID NO: 1155637 - RNA, 19 nt, Artificial Sequence
  Description of Artificial Sequence: Synthetic oligonucleotide
auuccacguccgacagugg

SEQ ID NO: 1155638 - RNA, 19 nt, Artificial Sequence
  Description of Artificial Sequence: Synthetic oligonucleotide
gccuccgugcgcaugcuag

SEQ ID NO: 1155639 - RNA, 19 nt, Artificial Sequence
  Description of Artificial Sequence: Synthetic oligonucleotide
ccaccugcuuccaaaagaa

SEQ ID NO: 1155640 - RNA, 19 nt, Artificial Sequence
  Description of Artificial Sequence: Synthetic oligonucleotide
ugcggucaggguccacaua

SEQ ID NO: 1155641 - RNA, 19 nt, Artificial Sequence
  Description of Artificial Sequence: Synthetic oligonucleotide
uggcauugcucggcaggca

SEQ ID NO: 1155642 - RNA, 19 nt, Artificial Sequence
  Description of Artificial Sequence: Synthetic oligonucleotide
caucguuuucaugucacau

SEQ ID NO: 1155643 - RNA, 19 nt, Artificial Sequence
  Description of Artificial Sequence: Synthetic oligonucleotide
cgaacccaaaauggcaggg

SEQ ID NO: 1155644 - RNA, 19 nt, Artificial Sequence
  Description of Artificial Sequence: Synthetic oligonucleotide
uaauagcgagcugggucuu

SEQ ID NO: 1155645 - RNA, 19 nt, Artificial Sequence
  Description of Artificial Sequence: Synthetic oligonucleotide
ugccuccguugccaacaac

SEQ ID NO: 1155646 - RNA, 19 nt, Artificial Sequence
  Description of Artificial Sequence: Synthetic oligonucleotide
caauuggggcacuguuuaa

SEQ ID NO: 1155647 - RNA, 19 nt, Artificial Sequence
  Description of Artificial Sequence: Synthetic oligonucleotide
cacccucuggauaagucau

SEQ ID NO: 1155648 - RNA, 19 nt, Artificial Sequence
  Description of Artificial Sequence: Synthetic oligonucleotide
guaccauugcagggaguuc

SEQ ID NO: 1155649 - RNA, 19 nt, Artificial Sequence
  Description of Artificial Sequence: Synthetic oligonucleotide
ucgcgcccauucagccccg

SEQ ID NO: 1155650 - RNA, 19 nt, Artificial Sequence
  Description of Artificial Sequence: Synthetic oligonucleotide
cacagauguguggcuagga

SEQ ID NO: 1155651 - RNA, 19 nt, Artificial Sequence
  Description of Artificial Sequence: Synthetic oligonucleotide
ggugaugaguaagcccuuc

SEQ ID NO: 1155652 - RNA, 19 nt, Artificial Sequence
  Description of Artificial Sequence: Synthetic oligonucleotide
guccgacaguggugcaccc

SEQ ID NO: 1155653 - RNA, 19 nt, Artificial Sequence
  Description of Artificial Sequence: Synthetic oligonucleotide
ugcgcaugcuagggaggga

SEQ ID NO: 1155654 - RNA, 19 nt, Artificial Sequence
  Description of Artificial Sequence: Synthetic oligonucleotide
ccuccgugcgcaugcuagg

SEQ ID NO: 1155655 - RNA, 19 nt, Artificial Sequence
  Description of Artificial Sequence: Synthetic oligonucleotide
ccgacaguggugcacccuc

SEQ ID NO: 1155656 - RNA, 19 nt, Artificial Sequence
  Description of Artificial Sequence: Synthetic oligonucleotide
gccaacaaccacgcagcgc

SEQ ID NO: 1155657 - RNA, 19 nt, Artificial Sequence
  Description of Artificial Sequence: Synthetic oligonucleotide
ggggccgccguuccgcgcc

SEQ ID NO: 1155658 - RNA, 19 nt, Artificial Sequence
  Description of Artificial Sequence: Synthetic oligonucleotide
cagcugcgcuucuaauuga

SEQ ID NO: 1155659 - RNA, 19 nt, Artificial Sequence
  Description of Artificial Sequence: Synthetic oligonucleotide
ggagcgcuggcucgccgcc

SEQ ID NO: 1155660 - RNA, 19 nt, Artificial Sequence
  Description of Artificial Sequence: Synthetic oligonucleotide
ggucgacugaggucauauc

SEQ ID NO: 1155661 - RNA, 19 nt, Artificial Sequence
  Description of Artificial Sequence: Synthetic oligonucleotide
ccuccguugccaacaacca

SEQ ID NO: 1155662 - RNA, 19 nt, Artificial Sequence
  Description of Artificial Sequence: Synthetic oligonucleotide
aggugccgcugcuuggcuu

SEQ ID NO: 1155663 - RNA, 19 nt, Artificial Sequence
  Description of Artificial Sequence: Synthetic oligonucleotide
gcucgcgcccauucagccc

SEQ ID NO: 1155664 - RNA, 19 nt, Artificial Sequence
  Description of Artificial Sequence: Synthetic oligonucleotide
guccugggucgacugaggu

SEQ ID NO: 1155665 - RNA, 19 nt, Artificial Sequence
  Description of Artificial Sequence: Synthetic oligonucleotide
cgugcgcaugcuagggagg

SEQ ID NO: 1155666 - RNA, 19 nt, Artificial Sequence
  Description of Artificial Sequence: Synthetic oligonucleotide
cgcucagguagcaagucca

SEQ ID NO: 1155667 - RNA, 19 nt, Artificial Sequence
  Description of Artificial Sequence: Synthetic oligonucleotide
auccaaaaggagggucaua

SEQ ID NO: 1155668 - RNA, 19 nt, Artificial Sequence
  Description of Artificial Sequence: Synthetic oligonucleotide
gcccuggggaccuucugca

SEQ ID NO: 1155669 - RNA, 19 nt, Artificial Sequence
  Description of Artificial Sequence: Synthetic oligonucleotide
cgcagcuuuacagaggcga

SEQ ID NO: 1155670 - RNA, 19 nt, Artificial Sequence
  Description of Artificial Sequence: Synthetic oligonucleotide
acacacacacacaccccuu

SEQ ID NO: 1155671 - RNA, 19 nt, Artificial Sequence
  Description of Artificial Sequence: Synthetic oligonucleotide
ggagaacuuccggaaucca

SEQ ID NO: 1155672 - RNA, 19 nt, Artificial Sequence
  Description of Artificial Sequence: Synthetic oligonucleotide
cgcucaugcacugacuguc

SEQ ID NO: 1155673 - RNA, 19 nt, Artificial Sequence
  Description of Artificial Sequence: Synthetic oligonucleotide
cauugcucggcaggcaggu

SEQ ID NO: 1155674 - RNA, 19 nt, Artificial Sequence
  Description of Artificial Sequence: Synthetic oligonucleotide
ccugggccggcauuccuuc

SEQ ID NO: 1155675 - RNA, 19 nt, Artificial Sequence
  Description of Artificial Sequence: Synthetic oligonucleotide
ccgauuguggggauauucu

SEQ ID NO: 1155676 - RNA, 19 nt, Artificial Sequence
  Description of Artificial Sequence: Synthetic oligonucleotide
uuaugcggucaggguccac

SEQ ID NO: 1155677 - RNA, 19 nt, Artificial Sequence
  Description of Artificial Sequence: Synthetic oligonucleotide
cguccgacaguggugcacc

SEQ ID NO: 1155678 - RNA, 19 nt, Artificial Sequence
  Description of Artificial Sequence: Synthetic oligonucleotide
guggcgcuuguucgccaca

SEQ ID NO: 1155679 - RNA, 19 nt, Artificial Sequence
  Description of Artificial Sequence: Synthetic oligonucleotide
ccacauaaugcaucguuuu

SEQ ID NO: 1155680 - RNA, 19 nt, Artificial Sequence
  Description of Artificial Sequence: Synthetic oligonucleotide
cgcccauucagccccggac

SEQ ID NO: 1155681 - RNA, 19 nt, Artificial Sequence
  Description of Artificial Sequence: Synthetic oligonucleotide
cgcuucuaauugagguuug

SEQ ID NO: 1155682 - RNA, 19 nt, Artificial Sequence
  Description of Artificial Sequence: Synthetic oligonucleotide
caaccacgcagcgcuugca

SEQ ID NO: 1155683 - RNA, 19 nt, Artificial Sequence
  Description of Artificial Sequence: Synthetic oligonucleotide
gcgcuucuaauugagguuu

SEQ ID NO: 1155684 - RNA, 19 nt, Artificial Sequence
  Description of Artificial Sequence: Synthetic oligonucleotide
ugggucgacugaggucaua

SEQ ID NO: 1155685 - RNA, 19 nt, Artificial Sequence
  Description of Artificial Sequence: Synthetic oligonucleotide
cuguggucacauugugcau

SEQ ID NO: 1155686 - RNA, 19 nt, Artificial Sequence
  Description of Artificial Sequence: Synthetic oligonucleotide
gcuccaaguucaugcugua

SEQ ID NO: 1155687 - RNA, 19 nt, Artificial Sequence
  Description of Artificial Sequence: Synthetic oligonucleotide
gcuucuaauugagguuugu

SEQ ID NO: 1155688 - RNA, 19 nt, Artificial Sequence
  Description of Artificial Sequence: Synthetic oligonucleotide
cacguccgacaguggugca

SEQ ID NO: 1155689 - RNA, 19 nt, Artificial Sequence
  Description of Artificial Sequence: Synthetic oligonucleotide
cacaccccuucugaaggcu

SEQ ID NO: 1155690 - RNA, 19 nt, Artificial Sequence
  Description of Artificial Sequence: Synthetic oligonucleotide
cgcuugcagugcuuggcuc

SEQ ID NO: 1155691 - RNA, 19 nt, Artificial Sequence
  Description of Artificial Sequence: Synthetic oligonucleotide
ggccaucaccaaagggaca

SEQ ID NO: 1155692 - RNA, 19 nt, Artificial Sequence
  Description of Artificial Sequence: Synthetic oligonucleotide
gcgcucgcgcccauucagc

SEQ ID NO: 1155693 - RNA, 19 nt, Artificial Sequence
  Description of Artificial Sequence: Synthetic oligonucleotide
cgaacucaguuggcauugc

SEQ ID NO: 1155694 - RNA, 19 nt, Artificial Sequence
  Description of Artificial Sequence: Synthetic oligonucleotide
gcaccgauuguggggauau

SEQ ID NO: 1155695 - RNA, 19 nt, Artificial Sequence
  Description of Artificial Sequence: Synthetic oligonucleotide
cguuccgcgccgcccgccg

SEQ ID NO: 1155696 - RNA, 19 nt, Artificial Sequence
  Description of Artificial Sequence: Synthetic oligonucleotide
guguaccauugcagggagu

SEQ ID NO: 1155697 - RNA, 19 nt, Artificial Sequence
  Description of Artificial Sequence: Synthetic oligonucleotide
gggccggcauuccuucugu

SEQ ID NO: 1155698 - RNA, 19 nt, Artificial Sequence
  Description of Artificial Sequence: Synthetic oligonucleotide
gggccgccguuccgcgccg

SEQ ID NO: 1155699 - RNA, 19 nt, Artificial Sequence
  Description of Artificial Sequence: Synthetic oligonucleotide
cucggggaccagggccauc

SEQ ID NO: 1155700 - RNA, 19 nt, Artificial Sequence
  Description of Artificial Sequence: Synthetic oligonucleotide
cgcuggcucgccgccagcc

SEQ ID NO: 1155701 - RNA, 19 nt, Artificial Sequence
  Description of Artificial Sequence: Synthetic oligonucleotide
ccccgcugagguccuucac

SEQ ID NO: 1155702 - RNA, 19 nt, Artificial Sequence
  Description of Artificial Sequence: Synthetic oligonucleotide
ggcaccgauuguggggaua

SEQ ID NO: 1155703 - RNA, 19 nt, Artificial Sequence
  Description of Artificial Sequence: Synthetic oligonucleotide
cugggccggcauuccuucu

SEQ ID NO: 1155704 - RNA, 19 nt, Artificial Sequence
  Description of Artificial Sequence: Synthetic oligonucleotide
gccguuccgcgccgcccgc

SEQ ID NO: 1155705 - RNA, 19 nt, Artificial Sequence
  Description of Artificial Sequence: Synthetic oligonucleotide
ggccggcauuccuucugua

SEQ ID NO: 1155706 - RNA, 19 nt, Artificial Sequence
  Description of Artificial Sequence: Synthetic oligonucleotide
ccugccaagcugacuucau

SEQ ID NO: 1155707 - RNA, 19 nt, Artificial Sequence
  Description of Artificial Sequence: Synthetic oligonucleotide
cugggucgacugaggucau

SEQ ID NO: 1155708 - RNA, 19 nt, Artificial Sequence
  Description of Artificial Sequence: Synthetic oligonucleotide
gcgcuggcucgccgccagc

SEQ ID NO: 1155709 - RNA, 19 nt, Artificial Sequence
  Description of Artificial Sequence: Synthetic oligonucleotide
cccucaauuggggcacugu

SEQ ID NO: 1155710 - RNA, 19 nt, Artificial Sequence
  Description of Artificial Sequence: Synthetic oligonucleotide
caccgauuguggggauauu

SEQ ID NO: 1155711 - RNA, 19 nt, Artificial Sequence
  Description of Artificial Sequence: Synthetic oligonucleotide
ccauugcagggaguucuuu

SEQ ID NO: 1155712 - RNA, 19 nt, Artificial Sequence
  Description of Artificial Sequence: Synthetic oligonucleotide
aauaacaccacguacaaac

SEQ ID NO: 1155713 - RNA, 19 nt, Artificial Sequence
  Description of Artificial Sequence: Synthetic oligonucleotide
aauaaauauauauauauau

SEQ ID NO: 1155714 - RNA, 19 nt, Artificial Sequence
  Description of Artificial Sequence: Synthetic oligonucleotide
aauacuauaacucuugaga

SEQ ID NO: 1155715 - RNA, 19 nt, Artificial Sequence
  Description of Artificial Sequence: Synthetic oligonucleotide
aauauauauauauauauau

SEQ ID NO: 1155716 - RNA, 19 nt, Artificial Sequence
  Description of Artificial Sequence: Synthetic oligonucleotide
uauauauauauauauauca

SEQ ID NO: 1155717 - RNA, 19 nt, Artificial Sequence
  Description of Artificial Sequence: Synthetic oligonucleotide
aaauauaauacuauaacuc

SEQ ID NO: 1155718 - RNA, 19 nt, Artificial Sequence
  Description of Artificial Sequence: Synthetic oligonucleotide
auauauaucagcccgaagg

SEQ ID NO: 1155719 - RNA, 19 nt, Artificial Sequence
  Description of Artificial Sequence: Synthetic oligonucleotide
aaacuuaguuuauauauac

SEQ ID NO: 1155720 - RNA, 19 nt, Artificial Sequence
  Description of Artificial Sequence: Synthetic oligonucleotide
auauauauauaucagcccg

SEQ ID NO: 1155721 - RNA, 19 nt, Artificial Sequence
  Description of Artificial Sequence: Synthetic oligonucleotide
aauauaauacuauaacucu

SEQ ID NO: 1155722 - RNA, 19 nt, Artificial Sequence
  Description of Artificial Sequence: Synthetic oligonucleotide
auauauauauauaucagcc

SEQ ID NO: 1155723 - RNA, 19 nt, Artificial Sequence
  Description of Artificial Sequence: Synthetic oligonucleotide
aauaguuugucugauauag

SEQ ID NO: 1155724 - RNA, 19 nt, Artificial Sequence
  Description of Artificial Sequence: Synthetic oligonucleotide
uauauauauauauauauau

SEQ ID NO: 1155725 - RNA, 19 nt, Artificial Sequence
  Description of Artificial Sequence: Synthetic oligonucleotide
uaaauauauauauauauau

SEQ ID NO: 1155726 - RNA, 19 nt, Artificial Sequence
  Description of Artificial Sequence: Synthetic oligonucleotide
uauauauauauauaucagc

SEQ ID NO: 1155727 - RNA, 19 nt, Artificial Sequence
  Description of Artificial Sequence: Synthetic oligonucleotide
uauauaucagcccgaaggg

SEQ ID NO: 1155728 - RNA, 19 nt, Artificial Sequence
  Description of Artificial Sequence: Synthetic oligonucleotide
ugauauagaauauaacaug

SEQ ID NO: 1155729 - RNA, 19 nt, Artificial Sequence
  Description of Artificial Sequence: Synthetic oligonucleotide
auacuauaacucuugagac

SEQ ID NO: 1155730 - RNA, 19 nt, Artificial Sequence
  Description of Artificial Sequence: Synthetic oligonucleotide
uauaauacuauaacucuug

SEQ ID NO: 1155731 - RNA, 19 nt, Artificial Sequence
  Description of Artificial Sequence: Synthetic oligonucleotide
aagcuuauaguucagacau

SEQ ID NO: 1155732 - RNA, 19 nt, Artificial Sequence
  Description of Artificial Sequence: Synthetic oligonucleotide
auauauaccuuucaacguc

SEQ ID NO: 1155733 - RNA, 19 nt, Artificial Sequence
  Description of Artificial Sequence: Synthetic oligonucleotide
uuauauucccaaagaaggg

SEQ ID NO: 1155734 - RNA, 19 nt, Artificial Sequence
  Description of Artificial Sequence: Synthetic oligonucleotide
acuauaacucuugagaccg

SEQ ID NO: 1155735 - RNA, 19 nt, Artificial Sequence
  Description of Artificial Sequence: Synthetic oligonucleotide
acugaaaauaguuugucug

SEQ ID NO: 1155736 - RNA, 19 nt, Artificial Sequence
  Description of Artificial Sequence: Synthetic oligonucleotide
uauauauauauaucagccc

SEQ ID NO: 1155737 - RNA, 19 nt, Artificial Sequence
  Description of Artificial Sequence: Synthetic oligonucleotide
auagaauauaacaugaucu

SEQ ID NO: 1155738 - RNA, 19 nt, Artificial Sequence
  Description of Artificial Sequence: Synthetic oligonucleotide
ucaaccuuaaaacuuaguu

SEQ ID NO: 1155739 - RNA, 19 nt, Artificial Sequence
  Description of Artificial Sequence: Synthetic oligonucleotide
cacgguuaaaauauaauac

SEQ ID NO: 1155740 - RNA, 19 nt, Artificial Sequence
  Description of Artificial Sequence: Synthetic oligonucleotide
uaaauaccuacaaauaaau

SEQ ID NO: 1155741 - RNA, 19 nt, Artificial Sequence
  Description of Artificial Sequence: Synthetic oligonucleotide
auauauauauauauauauc

SEQ ID NO: 1155742 - RNA, 19 nt, Artificial Sequence
  Description of Artificial Sequence: Synthetic oligonucleotide
aucacgaucacgaugcgcc

SEQ ID NO: 1155743 - RNA, 19 nt, Artificial Sequence
  Description of Artificial Sequence: Synthetic oligonucleotide
aagaauaacaccacguaca

SEQ ID NO: 1155744 - RNA, 19 nt, Artificial Sequence
  Description of Artificial Sequence: Synthetic oligonucleotide
gucagugauaauuauauuc

SEQ ID NO: 1155745 - RNA, 19 nt, Artificial Sequence
  Description of Artificial Sequence: Synthetic oligonucleotide
uucaagaauaacaccacgu

SEQ ID NO: 1155746 - RNA, 19 nt, Artificial Sequence
  Description of Artificial Sequence: Synthetic oligonucleotide
uauaccaagguuacuggug

SEQ ID NO: 1155747 - RNA, 19 nt, Artificial Sequence
  Description of Artificial Sequence: Synthetic oligonucleotide
auauauauauauauaucag

SEQ ID NO: 1155748 - RNA, 19 nt, Artificial Sequence
  Description of Artificial Sequence: Synthetic oligonucleotide
aacuccauaaaucuagguu

SEQ ID NO: 1155749 - RNA, 19 nt, Artificial Sequence
  Description of Artificial Sequence: Synthetic oligonucleotide
uauaguucagacauucuau

SEQ ID NO: 1155750 - RNA, 19 nt, Artificial Sequence
  Description of Artificial Sequence: Synthetic oligonucleotide
acgguuaaaauauaauacu

SEQ ID NO: 1155751 - RNA, 19 nt, Artificial Sequence
  Description of Artificial Sequence: Synthetic oligonucleotide
uaauacuauaacucuugag

SEQ ID NO: 1155752 - RNA, 19 nt, Artificial Sequence
  Description of Artificial Sequence: Synthetic oligonucleotide
ugucugauauagaauauaa

SEQ ID NO: 1155753 - RNA, 19 nt, Artificial Sequence
  Description of Artificial Sequence: Synthetic oligonucleotide
uauauucccaaagaagggc

SEQ ID NO: 1155754 - RNA, 19 nt, Artificial Sequence
  Description of Artificial Sequence: Synthetic oligonucleotide
uuuuaaaaguccugucggc

SEQ ID NO: 1155755 - RNA, 19 nt, Artificial Sequence
  Description of Artificial Sequence: Synthetic oligonucleotide
caaauaaauauauauauau

SEQ ID NO: 1155756 - RNA, 19 nt, Artificial Sequence
  Description of Artificial Sequence: Synthetic oligonucleotide
uuuaaaaguccugucggcc

SEQ ID NO: 1155757 - RNA, 19 nt, Artificial Sequence
  Description of Artificial Sequence: Synthetic oligonucleotide
gucacggugaggcaguucg

SEQ ID NO: 1155758 - RNA, 19 nt, Artificial Sequence
  Description of Artificial Sequence: Synthetic oligonucleotide
aaauauauauauauauaua

SEQ ID NO: 1155759 - RNA, 19 nt, Artificial Sequence
  Description of Artificial Sequence: Synthetic oligonucleotide
ucugagcucaaacaauaca

SEQ ID NO: 1155760 - RNA, 19 nt, Artificial Sequence
  Description of Artificial Sequence: Synthetic oligonucleotide
uacuauaacucuugagacc

SEQ ID NO: 1155761 - RNA, 19 nt, Artificial Sequence
  Description of Artificial Sequence: Synthetic oligonucleotide
uauauaccuuucaacgucu

SEQ ID NO: 1155762 - RNA, 19 nt, Artificial Sequence
  Description of Artificial Sequence: Synthetic oligonucleotide
aaauaaauauauauauaua

SEQ ID NO: 1155763 - RNA, 19 nt, Artificial Sequence
  Description of Artificial Sequence: Synthetic oligonucleotide
augaucuagaggaaaacuc

SEQ ID NO: 1155764 - RNA, 19 nt, Artificial Sequence
  Description of Artificial Sequence: Synthetic oligonucleotide
cucggggucuccuauaggg

SEQ ID NO: 1155765 - RNA, 19 nt, Artificial Sequence
  Description of Artificial Sequence: Synthetic oligonucleotide
uuaaaaguccugucggccu

SEQ ID NO: 1155766 - RNA, 19 nt, Artificial Sequence
  Description of Artificial Sequence: Synthetic oligonucleotide
gaagcuuauaguucagaca

SEQ ID NO: 1155767 - RNA, 19 nt, Artificial Sequence
  Description of Artificial Sequence: Synthetic oligonucleotide
guuggaagcuuauaguuca

SEQ ID NO: 1155768 - RNA, 19 nt, Artificial Sequence
  Description of Artificial Sequence: Synthetic oligonucleotide
uacaccgucacguacuccu

SEQ ID NO: 1155769 - RNA, 19 nt, Artificial Sequence
  Description of Artificial Sequence: Synthetic oligonucleotide
auaaauauauauauauaua

SEQ ID NO: 1155770 - RNA, 19 nt, Artificial Sequence
  Description of Artificial Sequence: Synthetic oligonucleotide
auaauacuauaacucuuga

SEQ ID NO: 1155771 - RNA, 19 nt, Artificial Sequence
  Description of Artificial Sequence: Synthetic oligonucleotide
aaccggugcgacuccuucc

SEQ ID NO: 1155772 - RNA, 19 nt, Artificial Sequence
  Description of Artificial Sequence: Synthetic oligonucleotide
uacaaaccgggguagaguc

SEQ ID NO: 1155773 - RNA, 19 nt, Artificial Sequence
  Description of Artificial Sequence: Synthetic oligonucleotide
auaccaagguuacuggugu

SEQ ID NO: 1155774 - RNA, 19 nt, Artificial Sequence
  Description of Artificial Sequence: Synthetic oligonucleotide
gcagguaauaguuggaagc

SEQ ID NO: 1155775 - RNA, 19 nt, Artificial Sequence
  Description of Artificial Sequence: Synthetic oligonucleotide
uugaauucgcucaggggcu

SEQ ID NO: 1155776 - RNA, 19 nt, Artificial Sequence
  Description of Artificial Sequence: Synthetic oligonucleotide
caagucuaugggcucaucc

SEQ ID NO: 1155777 - RNA, 19 nt, Artificial Sequence
  Description of Artificial Sequence: Synthetic oligonucleotide
cagugauaauuauauuccc

SEQ ID NO: 1155778 - RNA, 19 nt, Artificial Sequence
  Description of Artificial Sequence: Synthetic oligonucleotide
aucgcugcgcaucuugacg

SEQ ID NO: 1155779 - RNA, 19 nt, Artificial Sequence
  Description of Artificial Sequence: Synthetic oligonucleotide
uaaaaguccugucggccug

SEQ ID NO: 1155780 - RNA, 19 nt, Artificial Sequence
  Description of Artificial Sequence: Synthetic oligonucleotide
aaaacuuaguuuauauaua

SEQ ID NO: 1155781 - RNA, 19 nt, Artificial Sequence
  Description of Artificial Sequence: Synthetic oligonucleotide
auaacaccacguacaaacc

SEQ ID NO: 1155782 - RNA, 19 nt, Artificial Sequence
  Description of Artificial Sequence: Synthetic oligonucleotide
ugacaaguuagcacgguua

SEQ ID NO: 1155783 - RNA, 19 nt, Artificial Sequence
  Description of Artificial Sequence: Synthetic oligonucleotide
agaauaacaccacguacaa

SEQ ID NO: 1155784 - RNA, 19 nt, Artificial Sequence
  Description of Artificial Sequence: Synthetic oligonucleotide
uauaacucuugagaccgcc

SEQ ID NO: 1155785 - RNA, 19 nt, Artificial Sequence
  Description of Artificial Sequence: Synthetic oligonucleotide
auauaucagcccgaagggg

SEQ ID NO: 1155786 - RNA, 19 nt, Artificial Sequence
  Description of Artificial Sequence: Synthetic oligonucleotide
auauauauauauauauaua

SEQ ID NO: 1155787 - RNA, 19 nt, Artificial Sequence
  Description of Artificial Sequence: Synthetic oligonucleotide
acauucaagcagguaauag

SEQ ID NO: 1155788 - RNA, 19 nt, Artificial Sequence
  Description of Artificial Sequence: Synthetic oligonucleotide
auauaccaagguuacuggu

SEQ ID NO: 1155789 - RNA, 19 nt, Artificial Sequence
  Description of Artificial Sequence: Synthetic oligonucleotide
gaaauggggcaacucaguc

SEQ ID NO: 1155790 - RNA, 19 nt, Artificial Sequence
  Description of Artificial Sequence: Synthetic oligonucleotide
aacucagucgggaucccgg

SEQ ID NO: 1155791 - RNA, 19 nt, Artificial Sequence
  Description of Artificial Sequence: Synthetic oligonucleotide
uaacucuugagaccgccuc

SEQ ID NO: 1155792 - RNA, 19 nt, Artificial Sequence
  Description of Artificial Sequence: Synthetic oligonucleotide
ugcgcaucuugacgcagcg

SEQ ID NO: 1155793 - RNA, 19 nt, Artificial Sequence
  Description of Artificial Sequence: Synthetic oligonucleotide
cugauauagaauauaacau

SEQ ID NO: 1155794 - RNA, 19 nt, Artificial Sequence
  Description of Artificial Sequence: Synthetic oligonucleotide
cuucuugcaggguucgcgc

SEQ ID NO: 1155795 - RNA, 19 nt, Artificial Sequence
  Description of Artificial Sequence: Synthetic oligonucleotide
ugaaaauaguuugucugau

SEQ ID NO: 1155796 - RNA, 19 nt, Artificial Sequence
  Description of Artificial Sequence: Synthetic oligonucleotide
aauacuggaugaagggaga

SEQ ID NO: 1155797 - RNA, 19 nt, Artificial Sequence
  Description of Artificial Sequence: Synthetic oligonucleotide
accaagguuacuggugucg

SEQ ID NO: 1155798 - RNA, 19 nt, Artificial Sequence
  Description of Artificial Sequence: Synthetic oligonucleotide
aacaacacacccaugugua

SEQ ID NO: 1155799 - RNA, 19 nt, Artificial Sequence
  Description of Artificial Sequence: Synthetic oligonucleotide
uucaaccuuaaaacuuagu

SEQ ID NO: 1155800 - RNA, 19 nt, Artificial Sequence
  Description of Artificial Sequence: Synthetic oligonucleotide
ggaagcuuauaguucagac

SEQ ID NO: 1155801 - RNA, 19 nt, Artificial Sequence
  Description of Artificial Sequence: Synthetic oligonucleotide
accacguacaaaccggggu

SEQ ID NO: 1155802 - RNA, 19 nt, Artificial Sequence
  Description of Artificial Sequence: Synthetic oligonucleotide
acgucagugauaauuauau

SEQ ID NO: 1155803 - RNA, 19 nt, Artificial Sequence
  Description of Artificial Sequence: Synthetic oligonucleotide
acuacaccgucacguacuc

SEQ ID NO: 1155804 - RNA, 19 nt, Artificial Sequence
  Description of Artificial Sequence: Synthetic oligonucleotide
uagcacgguuaaaauauaa

SEQ ID NO: 1155805 - RNA, 19 nt, Artificial Sequence
  Description of Artificial Sequence: Synthetic oligonucleotide
auucaagcagguaauaguu

SEQ ID NO: 1155806 - RNA, 19 nt, Artificial Sequence
  Description of Artificial Sequence: Synthetic oligonucleotide
ccgacuugauccuucaccg

SEQ ID NO: 1155807 - RNA, 19 nt, Artificial Sequence
  Description of Artificial Sequence: Synthetic oligonucleotide
auggugguggugguggugg

SEQ ID NO: 1155808 - RNA, 19 nt, Artificial Sequence
  Description of Artificial Sequence: Synthetic oligonucleotide
ucccacuacaccgucacgu

SEQ ID NO: 1155809 - RNA, 19 nt, Artificial Sequence
  Description of Artificial Sequence: Synthetic oligonucleotide
auauaauacuauaacucuu

SEQ ID NO: 1155810 - RNA, 19 nt, Artificial Sequence
  Description of Artificial Sequence: Synthetic oligonucleotide
uugacaaguuagcacgguu

SEQ ID NO: 1155811 - RNA, 19 nt, Artificial Sequence
  Description of Artificial Sequence: Synthetic oligonucleotide
caaguuagcacgguuaaaa

SEQ ID NO: 1155812 - RNA, 19 nt, Artificial Sequence
  Description of Artificial Sequence: Synthetic oligonucleotide
cagcacuugacaaguuagc

SEQ ID NO: 1155813 - RNA, 19 nt, Artificial Sequence
  Description of Artificial Sequence: Synthetic oligonucleotide
caaaccgggguagagucag

SEQ ID NO: 1155814 - RNA, 19 nt, Artificial Sequence
  Description of Artificial Sequence: Synthetic oligonucleotide
agcgcaagucuaugggcuc

SEQ ID NO: 1155815 - RNA, 19 nt, Artificial Sequence
  Description of Artificial Sequence: Synthetic oligonucleotide
ggcuugaauucgcucaggg

SEQ ID NO: 1155816 - RNA, 19 nt, Artificial Sequence
  Description of Artificial Sequence: Synthetic oligonucleotide
ucaucacgaucacgaugcg

SEQ ID NO: 1155817 - RNA, 19 nt, Artificial Sequence
  Description of Artificial Sequence: Synthetic oligonucleotide
uugucugauauagaauaua

SEQ ID NO: 1155818 - RNA, 19 nt, Artificial Sequence
  Description of Artificial Sequence: Synthetic oligonucleotide
aauucgcucaggggcuccg

SEQ ID NO: 1155819 - RNA, 19 nt, Artificial Sequence
  Description of Artificial Sequence: Synthetic oligonucleotide
acuugacaaguuagcacgg

SEQ ID NO: 1155820 - RNA, 19 nt, Artificial Sequence
  Description of Artificial Sequence: Synthetic oligonucleotide
gcuugaauucgcucagggg

SEQ ID NO: 1155821 - RNA, 19 nt, Artificial Sequence
  Description of Artificial Sequence: Synthetic oligonucleotide
gaugcgcccguucuuguuc

SEQ ID NO: 1155822 - RNA, 19 nt, Artificial Sequence
  Description of Artificial Sequence: Synthetic oligonucleotide
gucugauauagaauauaac

SEQ ID NO: 1155823 - RNA, 19 nt, Artificial Sequence
  Description of Artificial Sequence: Synthetic oligonucleotide
uuagcacgguuaaaauaua

SEQ ID NO: 1155824 - RNA, 19 nt, Artificial Sequence
  Description of Artificial Sequence: Synthetic oligonucleotide
guggugguggugguggugg

SEQ ID NO: 1155825 - RNA, 19 nt, Artificial Sequence
  Description of Artificial Sequence: Synthetic oligonucleotide
gcuuauaguucagacauuc

SEQ ID NO: 1155826 - RNA, 19 nt, Artificial Sequence
  Description of Artificial Sequence: Synthetic oligonucleotide
accgggguagagucagcac

SEQ ID NO: 1155827 - RNA, 19 nt, Artificial Sequence
  Description of Artificial Sequence: Synthetic oligonucleotide
gcacgguuaaaauauaaua

SEQ ID NO: 1155828 - RNA, 19 nt, Artificial Sequence
  Description of Artificial Sequence: Synthetic oligonucleotide
acgcagcgcaagucuaugg

SEQ ID NO: 1155829 - RNA, 19 nt, Artificial Sequence
  Description of Artificial Sequence: Synthetic oligonucleotide
ucggggucuccuauaggga

SEQ ID NO: 1155830 - RNA, 19 nt, Artificial Sequence
  Description of Artificial Sequence: Synthetic oligonucleotide
ugugagaaauggggcaacu

SEQ ID NO: 1155831 - RNA, 19 nt, Artificial Sequence
  Description of Artificial Sequence: Synthetic oligonucleotide
cuauaacucuugagaccgc

SEQ ID NO: 1155832 - RNA, 19 nt, Artificial Sequence
  Description of Artificial Sequence: Synthetic oligonucleotide
uaccuuucaacgucuccau

SEQ ID NO: 1155833 - RNA, 19 nt, Artificial Sequence
  Description of Artificial Sequence: Synthetic oligonucleotide
aguuugucugauauagaau

SEQ ID NO: 1155834 - RNA, 19 nt, Artificial Sequence
  Description of Artificial Sequence: Synthetic oligonucleotide
gaaggagacugugagaaau

SEQ ID NO: 1155835 - RNA, 19 nt, Artificial Sequence
  Description of Artificial Sequence: Synthetic oligonucleotide
ugggcgguuccccagcauc

SEQ ID NO: 1155836 - RNA, 19 nt, Artificial Sequence
  Description of Artificial Sequence: Synthetic oligonucleotide
aaccgggguagagucagca

SEQ ID NO: 1155837 - RNA, 19 nt, Artificial Sequence
  Description of Artificial Sequence: Synthetic oligonucleotide
caccgcgugaugguggugg

SEQ ID NO: 1155838 - RNA, 19 nt, Artificial Sequence
  Description of Artificial Sequence: Synthetic oligonucleotide
cacggugaggcaguucgcg

SEQ ID NO: 1155839 - RNA, 19 nt, Artificial Sequence
  Description of Artificial Sequence: Synthetic oligonucleotide
ugacgucagugauaauuau

SEQ ID NO: 1155840 - RNA, 19 nt, Artificial Sequence
  Description of Artificial Sequence: Synthetic oligonucleotide
auauaccuuucaacgucuc

SEQ ID NO: 1155841 - RNA, 19 nt, Artificial Sequence
  Description of Artificial Sequence: Synthetic oligonucleotide
ucuccgugggagccucuag

SEQ ID NO: 1155842 - RNA, 19 nt, Artificial Sequence
  Description of Artificial Sequence: Synthetic oligonucleotide
ucggggagagcuuccggga

SEQ ID NO: 1155843 - RNA, 19 nt, Artificial Sequence
  Description of Artificial Sequence: Synthetic oligonucleotide
ugcugcgggccgucaaccg

SEQ ID NO: 1155844 - RNA, 19 nt, Artificial Sequence
  Description of Artificial Sequence: Synthetic oligonucleotide
caucuugacgcagcgcaag

SEQ ID NO: 1155845 - RNA, 19 nt, Artificial Sequence
  Description of Artificial Sequence: Synthetic oligonucleotide
caccacguacaaaccgggg

SEQ ID NO: 1155846 - RNA, 19 nt, Artificial Sequence
  Description of Artificial Sequence: Synthetic oligonucleotide
ugcgacuccuucccacuac

SEQ ID NO: 1155847 - RNA, 19 nt, Artificial Sequence
  Description of Artificial Sequence: Synthetic oligonucleotide
ggcgcugagucccaaccgg

SEQ ID NO: 1155848 - RNA, 19 nt, Artificial Sequence
  Description of Artificial Sequence: Synthetic oligonucleotide
ggcaacucagucgggaucc

SEQ ID NO: 1155849 - RNA, 19 nt, Artificial Sequence
  Description of Artificial Sequence: Synthetic oligonucleotide
uugacgcagcgcaagucua

SEQ ID NO: 1155850 - RNA, 19 nt, Artificial Sequence
  Description of Artificial Sequence: Synthetic oligonucleotide
agcacgguuaaaauauaau

SEQ ID NO: 1155851 - RNA, 19 nt, Artificial Sequence
  Description of Artificial Sequence: Synthetic oligonucleotide
aggcaguucgcggugacgu

SEQ ID NO: 1155852 - RNA, 19 nt, Artificial Sequence
  Description of Artificial Sequence: Synthetic oligonucleotide
augcugcgggccgucaacc

SEQ ID NO: 1155853 - RNA, 19 nt, Artificial Sequence
  Description of Artificial Sequence: Synthetic oligonucleotide
gcaggguucgcgcucgccg

SEQ ID NO: 1155854 - RNA, 19 nt, Artificial Sequence
  Description of Artificial Sequence: Synthetic oligonucleotide
gcuucuugcaggguucgcg

SEQ ID NO: 1155855 - RNA, 19 nt, Artificial Sequence
  Description of Artificial Sequence: Synthetic oligonucleotide
accgucacguacuccuuga

SEQ ID NO: 1155856 - RNA, 19 nt, Artificial Sequence
  Description of Artificial Sequence: Synthetic oligonucleotide
caucacgaucacgaugcgc

SEQ ID NO: 1155857 - RNA, 19 nt, Artificial Sequence
  Description of Artificial Sequence: Synthetic oligonucleotide
uugagaccgccucggggcu

SEQ ID NO: 1155858 - RNA, 19 nt, Artificial Sequence
  Description of Artificial Sequence: Synthetic oligonucleotide
gccucgcccgacuugaucc

SEQ ID NO: 1155859 - RNA, 19 nt, Artificial Sequence
  Description of Artificial Sequence: Synthetic oligonucleotide
gcucaucacgaucacgaug

SEQ ID NO: 1155860 - RNA, 19 nt, Artificial Sequence
  Description of Artificial Sequence: Synthetic oligonucleotide
ugaguccaacaggaugacc

SEQ ID NO: 1155861 - RNA, 19 nt, Artificial Sequence
  Description of Artificial Sequence: Synthetic oligonucleotide
uguucggcggccgggcugc

SEQ ID NO: 1155862 - RNA, 19 nt, Artificial Sequence
  Description of Artificial Sequence: Synthetic oligonucleotide
ucggccggaggcuucucug

SEQ ID NO: 1155863 - RNA, 19 nt, Artificial Sequence
  Description of Artificial Sequence: Synthetic oligonucleotide
guucgucggcggcagcacg

SEQ ID NO: 1155864 - RNA, 19 nt, Artificial Sequence
  Description of Artificial Sequence: Synthetic oligonucleotide
aaaccgggguagagucagc

SEQ ID NO: 1155865 - RNA, 19 nt, Artificial Sequence
  Description of Artificial Sequence: Synthetic oligonucleotide
cugcgcaucuugacgcagc

SEQ ID NO: 1155866 - RNA, 19 nt, Artificial Sequence
  Description of Artificial Sequence: Synthetic oligonucleotide
ggugucgcaguuccuggag

SEQ ID NO: 1155867 - RNA, 19 nt, Artificial Sequence
  Description of Artificial Sequence: Synthetic oligonucleotide
uuggucggggagagcuucc

SEQ ID NO: 1155868 - RNA, 19 nt, Artificial Sequence
  Description of Artificial Sequence: Synthetic oligonucleotide
acgaucacgaugcgcccgu

SEQ ID NO: 1155869 - RNA, 19 nt, Artificial Sequence
  Description of Artificial Sequence: Synthetic oligonucleotide
gaggcagcgcuugcgcgcg

SEQ ID NO: 1155870 - RNA, 19 nt, Artificial Sequence
  Description of Artificial Sequence: Synthetic oligonucleotide
ucacggugaggcaguucgc

SEQ ID NO: 1155871 - RNA, 19 nt, Artificial Sequence
  Description of Artificial Sequence: Synthetic oligonucleotide
ugacgcagcgcaagucuau

SEQ ID NO: 1155872 - RNA, 19 nt, Artificial Sequence
  Description of Artificial Sequence: Synthetic oligonucleotide
cuucaccgccugcaugccg

SEQ ID NO: 1155873 - RNA, 19 nt, Artificial Sequence
  Description of Artificial Sequence: Synthetic oligonucleotide
gacgucagugauaauuaua

SEQ ID NO: 1155874 - RNA, 19 nt, Artificial Sequence
  Description of Artificial Sequence: Synthetic oligonucleotide
cacgaucacgaugcgcccg

SEQ ID NO: 1155875 - RNA, 19 nt, Artificial Sequence
  Description of Artificial Sequence: Synthetic oligonucleotide
caucgcugcgcaucuugac

SEQ ID NO: 1155876 - RNA, 19 nt, Artificial Sequence
  Description of Artificial Sequence: Synthetic oligonucleotide
acguacuccuugaaaguca

SEQ ID NO: 1155877 - RNA, 19 nt, Artificial Sequence
  Description of Artificial Sequence: Synthetic oligonucleotide
accgcuucuugcaggguuc

SEQ ID NO: 1155878 - RNA, 19 nt, Artificial Sequence
  Description of Artificial Sequence: Synthetic oligonucleotide
acggguggcgggguguucg

SEQ ID NO: 1155879 - RNA, 19 nt, Artificial Sequence
  Description of Artificial Sequence: Synthetic oligonucleotide
guuacuggugucgcaguuc

SEQ ID NO: 1155880 - RNA, 19 nt, Artificial Sequence
  Description of Artificial Sequence: Synthetic oligonucleotide
gugacgucagugauaauua

SEQ ID NO: 1155881 - RNA, 19 nt, Artificial Sequence
  Description of Artificial Sequence: Synthetic oligonucleotide
caugaucuagaggaaaacu

SEQ ID NO: 1155882 - RNA, 19 nt, Artificial Sequence
  Description of Artificial Sequence: Synthetic oligonucleotide
agguuacuggugucgcagu

SEQ ID NO: 1155883 - RNA, 19 nt, Artificial Sequence
  Description of Artificial Sequence: Synthetic oligonucleotide
gaucacgaugcgcccguuc

SEQ ID NO: 1155884 - RNA, 19 nt, Artificial Sequence
  Description of Artificial Sequence: Synthetic oligonucleotide
ucggggugcugaugcugcg

SEQ ID NO: 1155885 - RNA, 19 nt, Artificial Sequence
  Description of Artificial Sequence: Synthetic oligonucleotide
auaacucuugagaccgccu

SEQ ID NO: 1155886 - RNA, 19 nt, Artificial Sequence
  Description of Artificial Sequence: Synthetic oligonucleotide
cuugacgcagcgcaagucu

SEQ ID NO: 1155887 - RNA, 19 nt, Artificial Sequence
  Description of Artificial Sequence: Synthetic oligonucleotide
cuuggucggggagagcuuc

SEQ ID NO: 1155888 - RNA, 19 nt, Artificial Sequence
  Description of Artificial Sequence: Synthetic oligonucleotide
gcgugggagagguucaggc

SEQ ID NO: 1155889 - RNA, 19 nt, Artificial Sequence
  Description of Artificial Sequence: Synthetic oligonucleotide
gauggugguggugguggug

SEQ ID NO: 1155890 - RNA, 19 nt, Artificial Sequence
  Description of Artificial Sequence: Synthetic oligonucleotide
caguucgcggugacgucag

SEQ ID NO: 1155891 - RNA, 19 nt, Artificial Sequence
  Description of Artificial Sequence: Synthetic oligonucleotide
uggucggggagagcuuccg

SEQ ID NO: 1155892 - RNA, 19 nt, Artificial Sequence
  Description of Artificial Sequence: Synthetic oligonucleotide
ggcgucuucuccgugggag

SEQ ID NO: 1155893 - RNA, 19 nt, Artificial Sequence
  Description of Artificial Sequence: Synthetic oligonucleotide
gacgcagcgcaagucuaug

SEQ ID NO: 1155894 - RNA, 19 nt, Artificial Sequence
  Description of Artificial Sequence: Synthetic oligonucleotide
gccgucaaccgcuucuugc

SEQ ID NO: 1155895 - RNA, 19 nt, Artificial Sequence
  Description of Artificial Sequence: Synthetic oligonucleotide
cuuauaguucagacauucu

SEQ ID NO: 1155896 - RNA, 19 nt, Artificial Sequence
  Description of Artificial Sequence: Synthetic oligonucleotide
auucgcucaggggcuccgc

SEQ ID NO: 1155897 - RNA, 19 nt, Artificial Sequence
  Description of Artificial Sequence: Synthetic oligonucleotide
caaggccgcaggcaccgag

SEQ ID NO: 1155898 - RNA, 19 nt, Artificial Sequence
  Description of Artificial Sequence: Synthetic oligonucleotide
gcguuugcagggcacuucc

SEQ ID NO: 1155899 - RNA, 19 nt, Artificial Sequence
  Description of Artificial Sequence: Synthetic oligonucleotide
ugaccucgggcugcggcag

SEQ ID NO: 1155900 - RNA, 19 nt, Artificial Sequence
  Description of Artificial Sequence: Synthetic oligonucleotide
ucgcggugacgucagugau

SEQ ID NO: 1155901 - RNA, 19 nt, Artificial Sequence
  Description of Artificial Sequence: Synthetic oligonucleotide
uaccaagguuacugguguc

SEQ ID NO: 1155902 - RNA, 19 nt, Artificial Sequence
  Description of Artificial Sequence: Synthetic oligonucleotide
gucccaaccggugcgacuc

SEQ ID NO: 1155903 - RNA, 19 nt, Artificial Sequence
  Description of Artificial Sequence: Synthetic oligonucleotide
agucccaaccggugcgacu

SEQ ID NO: 1155904 - RNA, 19 nt, Artificial Sequence
  Description of Artificial Sequence: Synthetic oligonucleotide
gaauaacaccacguacaaa

SEQ ID NO: 1155905 - RNA, 19 nt, Artificial Sequence
  Description of Artificial Sequence: Synthetic oligonucleotide
caacucagucgggaucccg

SEQ ID NO: 1155906 - RNA, 19 nt, Artificial Sequence
  Description of Artificial Sequence: Synthetic oligonucleotide
uguucaccaaaggccuccu

SEQ ID NO: 1155907 - RNA, 19 nt, Artificial Sequence
  Description of Artificial Sequence: Synthetic oligonucleotide
gaauucgcucaggggcucc

SEQ ID NO: 1155908 - RNA, 19 nt, Artificial Sequence
  Description of Artificial Sequence: Synthetic oligonucleotide
uccuucccacuacaccguc

SEQ ID NO: 1155909 - RNA, 19 nt, Artificial Sequence
  Description of Artificial Sequence: Synthetic oligonucleotide
ucggcggcagcacgcuucu

SEQ ID NO: 1155910 - RNA, 19 nt, Artificial Sequence
  Description of Artificial Sequence: Synthetic oligonucleotide
augcgcccguucuuguucu

SEQ ID NO: 1155911 - RNA, 19 nt, Artificial Sequence
  Description of Artificial Sequence: Synthetic oligonucleotide
ugagucccaaccggugcga

SEQ ID NO: 1155912 - RNA, 19 nt, Artificial Sequence
  Description of Artificial Sequence: Synthetic oligonucleotide
ugaauucgcucaggggcuc

SEQ ID NO: 1155913 - RNA, 19 nt, Artificial Sequence
  Description of Artificial Sequence: Synthetic oligonucleotide
ucgccgugggucucagaga

SEQ ID NO: 1155914 - RNA, 19 nt, Artificial Sequence
  Description of Artificial Sequence: Synthetic oligonucleotide
cuaggcgcugagucccaac

SEQ ID NO: 1155915 - RNA, 19 nt, Artificial Sequence
  Description of Artificial Sequence: Synthetic oligonucleotide
ggugacgucagugauaauu

SEQ ID NO: 1155916 - RNA, 19 nt, Artificial Sequence
  Description of Artificial Sequence: Synthetic oligonucleotide
cacuacaccgucacguacu

SEQ ID NO: 1155917 - RNA, 19 nt, Artificial Sequence
  Description of Artificial Sequence: Synthetic oligonucleotide
caccgucacguacuccuug

SEQ ID NO: 1155918 - RNA, 19 nt, Artificial Sequence
  Description of Artificial Sequence: Synthetic oligonucleotide
acaaguuagcacgguuaaa

SEQ ID NO: 1155919 - RNA, 19 nt, Artificial Sequence
  Description of Artificial Sequence: Synthetic oligonucleotide
gugguggugguggugguga

SEQ ID NO: 1155920 - RNA, 19 nt, Artificial Sequence
  Description of Artificial Sequence: Synthetic oligonucleotide
agguaauaguuggaagcuu

SEQ ID NO: 1155921 - RNA, 19 nt, Artificial Sequence
  Description of Artificial Sequence: Synthetic oligonucleotide
gggacccuagguccugggg

SEQ ID NO: 1155922 - RNA, 19 nt, Artificial Sequence
  Description of Artificial Sequence: Synthetic oligonucleotide
guuccccagcaucgcugcg

SEQ ID NO: 1155923 - RNA, 19 nt, Artificial Sequence
  Description of Artificial Sequence: Synthetic oligonucleotide
ucccugcguuugcagggca

SEQ ID NO: 1155924 - RNA, 19 nt, Artificial Sequence
  Description of Artificial Sequence: Synthetic oligonucleotide
ucgcccgacuugauccuuc

SEQ ID NO: 1155925 - RNA, 19 nt, Artificial Sequence
  Description of Artificial Sequence: Synthetic oligonucleotide
ggaaaacuccauaaaucua

SEQ ID NO: 1155926 - RNA, 19 nt, Artificial Sequence
  Description of Artificial Sequence: Synthetic oligonucleotide
agucacggugaggcaguuc

SEQ ID NO: 1155927 - RNA, 19 nt, Artificial Sequence
  Description of Artificial Sequence: Synthetic oligonucleotide
uucaggcccaccgcgugau

SEQ ID NO: 1155928 - RNA, 19 nt, Artificial Sequence
  Description of Artificial Sequence: Synthetic oligonucleotide
ucccaaccggugcgacucc

SEQ ID NO: 1155929 - RNA, 19 nt, Artificial Sequence
  Description of Artificial Sequence: Synthetic oligonucleotide
guguucggcggccgggcug

SEQ ID NO: 1155930 - RNA, 19 nt, Artificial Sequence
  Description of Artificial Sequence: Synthetic oligonucleotide
ccaagguuacuggugucgc

SEQ ID NO: 1155931 - RNA, 19 nt, Artificial Sequence
  Description of Artificial Sequence: Synthetic oligonucleotide
cagcgcaagucuaugggcu

SEQ ID NO: 1155932 - RNA, 19 nt, Artificial Sequence
  Description of Artificial Sequence: Synthetic oligonucleotide
acaaaccgggguagaguca

SEQ ID NO: 1155933 - RNA, 19 nt, Artificial Sequence
  Description of Artificial Sequence: Synthetic oligonucleotide
ggucggggagagcuuccgg

SEQ ID NO: 1155934 - RNA, 19 nt, Artificial Sequence
  Description of Artificial Sequence: Synthetic oligonucleotide
gagaccgccucggggcugc

SEQ ID NO: 1155935 - RNA, 19 nt, Artificial Sequence
  Description of Artificial Sequence: Synthetic oligonucleotide
guacaaaccgggguagagu

SEQ ID NO: 1155936 - RNA, 19 nt, Artificial Sequence
  Description of Artificial Sequence: Synthetic oligonucleotide
cacacccauguguacaagu

SEQ ID NO: 1155937 - RNA, 19 nt, Artificial Sequence
  Description of Artificial Sequence: Synthetic oligonucleotide
gaccucgggcugcggcagg

SEQ ID NO: 1155938 - RNA, 19 nt, Artificial Sequence
  Description of Artificial Sequence: Synthetic oligonucleotide
ucgguggccucgcccgacu

SEQ ID NO: 1155939 - RNA, 19 nt, Artificial Sequence
  Description of Artificial Sequence: Synthetic oligonucleotide
aggguucgcgcucgccgug

SEQ ID NO: 1155940 - RNA, 19 nt, Artificial Sequence
  Description of Artificial Sequence: Synthetic oligonucleotide
guaauaguuggaagcuuau

SEQ ID NO: 1155941 - RNA, 19 nt, Artificial Sequence
  Description of Artificial Sequence: Synthetic oligonucleotide
gcggcaaggccgcaggcac

SEQ ID NO: 1155942 - RNA, 19 nt, Artificial Sequence
  Description of Artificial Sequence: Synthetic oligonucleotide
ucgcgcucgccgugggucu

SEQ ID NO: 1155943 - RNA, 19 nt, Artificial Sequence
  Description of Artificial Sequence: Synthetic oligonucleotide
ugguggugguggugguggu

SEQ ID NO: 1155944 - RNA, 19 nt, Artificial Sequence
  Description of Artificial Sequence: Synthetic oligonucleotide
ggguccgcggacaccagag

SEQ ID NO: 1155945 - RNA, 19 nt, Artificial Sequence
  Description of Artificial Sequence: Synthetic oligonucleotide
ugggcgggugggugugagc

SEQ ID NO: 1155946 - RNA, 19 nt, Artificial Sequence
  Description of Artificial Sequence: Synthetic oligonucleotide
gggccaguucuggaggucc

SEQ ID NO: 1155947 - RNA, 19 nt, Artificial Sequence
  Description of Artificial Sequence: Synthetic oligonucleotide
accgcgugauggugguggu

SEQ ID NO: 1155948 - RNA, 19 nt, Artificial Sequence
  Description of Artificial Sequence: Synthetic oligonucleotide
ugagaccgccucggggcug

SEQ ID NO: 1155949 - RNA, 19 nt, Artificial Sequence
  Description of Artificial Sequence: Synthetic oligonucleotide
gggcaacucagucgggauc

SEQ ID NO: 1155950 - RNA, 19 nt, Artificial Sequence
  Description of Artificial Sequence: Synthetic oligonucleotide
ggcuguucaccaaaggccu

SEQ ID NO: 1155951 - RNA, 19 nt, Artificial Sequence
  Description of Artificial Sequence: Synthetic oligonucleotide
ccacuacaccgucacguac

SEQ ID NO: 1155952 - RNA, 19 nt, Artificial Sequence
  Description of Artificial Sequence: Synthetic oligonucleotide
gggguggcguucgucggcg

SEQ ID NO: 1155953 - RNA, 19 nt, Artificial Sequence
  Description of Artificial Sequence: Synthetic oligonucleotide
gcucggggucuccuauagg

SEQ ID NO: 1155954 - RNA, 19 nt, Artificial Sequence
  Description of Artificial Sequence: Synthetic oligonucleotide
uucuccgugggagccucua

SEQ ID NO: 1155955 - RNA, 19 nt, Artificial Sequence
  Description of Artificial Sequence: Synthetic oligonucleotide
cagcgcuugcgcgcguggg

SEQ ID NO: 1155956 - RNA, 19 nt, Artificial Sequence
  Description of Artificial Sequence: Synthetic oligonucleotide
cguacaaaccgggguagag

SEQ ID NO: 1155957 - RNA, 19 nt, Artificial Sequence
  Description of Artificial Sequence: Synthetic oligonucleotide
gagucccaaccggugcgac

SEQ ID NO: 1155958 - RNA, 19 nt, Artificial Sequence
  Description of Artificial Sequence: Synthetic oligonucleotide
ggucuccuauagggaaggg

SEQ ID NO: 1155959 - RNA, 19 nt, Artificial Sequence
  Description of Artificial Sequence: Synthetic oligonucleotide
uggugguggugguggugau

SEQ ID NO: 1155960 - RNA, 19 nt, Artificial Sequence
  Description of Artificial Sequence: Synthetic oligonucleotide
gguucgcgcucgccguggg

SEQ ID NO: 1155961 - RNA, 19 nt, Artificial Sequence
  Description of Artificial Sequence: Synthetic oligonucleotide
gcuugcgcgcgugggagag

SEQ ID NO: 1155962 - RNA, 19 nt, Artificial Sequence
  Description of Artificial Sequence: Synthetic oligonucleotide
gcaguucgcggugacguca

SEQ ID NO: 1155963 - RNA, 19 nt, Artificial Sequence
  Description of Artificial Sequence: Synthetic oligonucleotide
gcagcggcuguucaccaaa

SEQ ID NO: 1155964 - RNA, 19 nt, Artificial Sequence
  Description of Artificial Sequence: Synthetic oligonucleotide
aguucgcggugacgucagu

SEQ ID NO: 1155965 - RNA, 19 nt, Artificial Sequence
  Description of Artificial Sequence: Synthetic oligonucleotide
aagucacggugaggcaguu

SEQ ID NO: 1155966 - RNA, 19 nt, Artificial Sequence
  Description of Artificial Sequence: Synthetic oligonucleotide
guggcguucgucggcggca

SEQ ID NO: 1155967 - RNA, 19 nt, Artificial Sequence
  Description of Artificial Sequence: Synthetic oligonucleotide
gcagcgcuugcgcgcgugg

SEQ ID NO: 1155968 - RNA, 19 nt, Artificial Sequence
  Description of Artificial Sequence: Synthetic oligonucleotide
gucgggccuucugagcuca

SEQ ID NO: 1155969 - RNA, 19 nt, Artificial Sequence
  Description of Artificial Sequence: Synthetic oligonucleotide
gcgacuccuucccacuaca

SEQ ID NO: 1155970 - RNA, 19 nt, Artificial Sequence
  Description of Artificial Sequence: Synthetic oligonucleotide
ccuuaaaacuuaguuuaua

SEQ ID NO: 1155971 - RNA, 19 nt, Artificial Sequence
  Description of Artificial Sequence: Synthetic oligonucleotide
gggguguucggcggccggg

SEQ ID NO: 1155972 - RNA, 19 nt, Artificial Sequence
  Description of Artificial Sequence: Synthetic oligonucleotide
gguggugguggugguggug

SEQ ID NO: 1155973 - RNA, 19 nt, Artificial Sequence
  Description of Artificial Sequence: Synthetic oligonucleotide
ggugcgacuccuucccacu

SEQ ID NO: 1155974 - RNA, 19 nt, Artificial Sequence
  Description of Artificial Sequence: Synthetic oligonucleotide
ggguucgcgcucgccgugg

SEQ ID NO: 1155975 - RNA, 19 nt, Artificial Sequence
  Description of Artificial Sequence: Synthetic oligonucleotide
gcccaccgcgugauggugg

SEQ ID NO: 1155976 - RNA, 19 nt, Artificial Sequence
  Description of Artificial Sequence: Synthetic oligonucleotide
gcgcuugcgcgcgugggag

SEQ ID NO: 1155977 - RNA, 19 nt, Artificial Sequence
  Description of Artificial Sequence: Synthetic oligonucleotide
ggcaguucgcggugacguc

SEQ ID NO: 1155978 - RNA, 19 nt, Artificial Sequence
  Description of Artificial Sequence: Synthetic oligonucleotide
cugcgggccgucaaccgcu

SEQ ID NO: 1155979 - RNA, 19 nt, Artificial Sequence
  Description of Artificial Sequence: Synthetic oligonucleotide
aggggcucggggucuccua

SEQ ID NO: 1155980 - RNA, 19 nt, Artificial Sequence
  Description of Artificial Sequence: Synthetic oligonucleotide
ggccgucaaccgcuucuug

SEQ ID NO: 1155981 - RNA, 19 nt, Artificial Sequence
  Description of Artificial Sequence: Synthetic oligonucleotide
cgucuucuccgugggagcc

SEQ ID NO: 1155982 - RNA, 19 nt, Artificial Sequence
  Description of Artificial Sequence: Synthetic oligonucleotide
caggguucgcgcucgccgu

SEQ ID NO: 1155983 - RNA, 19 nt, Artificial Sequence
  Description of Artificial Sequence: Synthetic oligonucleotide
ggcgguuccccagcaucgc

SEQ ID NO: 1155984 - RNA, 19 nt, Artificial Sequence
  Description of Artificial Sequence: Synthetic oligonucleotide
ugcgggccgucaaccgcuu

SEQ ID NO: 1155985 - RNA, 19 nt, Artificial Sequence
  Description of Artificial Sequence: Synthetic oligonucleotide
gcugcggcagggacgcggc

SEQ ID NO: 1155986 - RNA, 19 nt, Artificial Sequence
  Description of Artificial Sequence: Synthetic oligonucleotide
ggucgggccuucugagcuc

SEQ ID NO: 1155987 - RNA, 19 nt, Artificial Sequence
  Description of Artificial Sequence: Synthetic oligonucleotide
cagggucggggugcugaug

SEQ ID NO: 1155988 - RNA, 19 nt, Artificial Sequence
  Description of Artificial Sequence: Synthetic oligonucleotide
cccugcguuugcagggcac

SEQ ID NO: 1155989 - RNA, 19 nt, Artificial Sequence
  Description of Artificial Sequence: Synthetic oligonucleotide
ggccucgcccgacuugauc

SEQ ID NO: 1155990 - RNA, 19 nt, Artificial Sequence
  Description of Artificial Sequence: Synthetic oligonucleotide
ggguggcguucgucggcgg

SEQ ID NO: 1155991 - RNA, 19 nt, Artificial Sequence
  Description of Artificial Sequence: Synthetic oligonucleotide
ccuauagggaaggggaggu

SEQ ID NO: 1155992 - RNA, 19 nt, Artificial Sequence
  Description of Artificial Sequence: Synthetic oligonucleotide
gcaucgcugcgcaucuuga

SEQ ID NO: 1155993 - RNA, 19 nt, Artificial Sequence
  Description of Artificial Sequence: Synthetic oligonucleotide
gcgcgcgugggagagguuc

SEQ ID NO: 1155994 - RNA, 19 nt, Artificial Sequence
  Description of Artificial Sequence: Synthetic oligonucleotide
ucgggccuucugagcucaa

SEQ ID NO: 1155995 - RNA, 19 nt, Artificial Sequence
  Description of Artificial Sequence: Synthetic oligonucleotide
ccgcuucuugcaggguucg

SEQ ID NO: 1155996 - RNA, 19 nt, Artificial Sequence
  Description of Artificial Sequence: Synthetic oligonucleotide
gcaacucagucgggauccc

SEQ ID NO: 1155997 - RNA, 19 nt, Artificial Sequence
  Description of Artificial Sequence: Synthetic oligonucleotide
gcgcaagucuaugggcuca

SEQ ID NO: 1155998 - RNA, 19 nt, Artificial Sequence
  Description of Artificial Sequence: Synthetic oligonucleotide
ugcgcccguucuuguucuu

SEQ ID NO: 1155999 - RNA, 19 nt, Artificial Sequence
  Description of Artificial Sequence: Synthetic oligonucleotide
gcguucgucggcggcagca

SEQ ID NO: 1156000 - RNA, 19 nt, Artificial Sequence
  Description of Artificial Sequence: Synthetic oligonucleotide
acacggguggcgggguguu

SEQ ID NO: 1156001 - RNA, 19 nt, Artificial Sequence
  Description of Artificial Sequence: Synthetic oligonucleotide
gcgcccguucuuguucuug

SEQ ID NO: 1156002 - RNA, 19 nt, Artificial Sequence
  Description of Artificial Sequence: Synthetic oligonucleotide
gcugggcgguuccccagca

SEQ ID NO: 1156003 - RNA, 19 nt, Artificial Sequence
  Description of Artificial Sequence: Synthetic oligonucleotide
ggcccaccgcgugauggug

SEQ ID NO: 1156004 - RNA, 19 nt, Artificial Sequence
  Description of Artificial Sequence: Synthetic oligonucleotide
cagcacgcuucuuguggcu

SEQ ID NO: 1156005 - RNA, 19 nt, Artificial Sequence
  Description of Artificial Sequence: Synthetic oligonucleotide
cccacuacaccgucacgua

SEQ ID NO: 1156006 - RNA, 19 nt, Artificial Sequence
  Description of Artificial Sequence: Synthetic oligonucleotide
ggcgggguguucggcggcc

SEQ ID NO: 1156007 - RNA, 19 nt, Artificial Sequence
  Description of Artificial Sequence: Synthetic oligonucleotide
ggcagcgcuugcgcgcgug

SEQ ID NO: 1156008 - RNA, 19 nt, Artificial Sequence
  Description of Artificial Sequence: Synthetic oligonucleotide
cggggagagcuuccgggac

SEQ ID NO: 1156009 - RNA, 19 nt, Artificial Sequence
  Description of Artificial Sequence: Synthetic oligonucleotide
guucaccaaaggccuccuu

SEQ ID NO: 1156010 - RNA, 19 nt, Artificial Sequence
  Description of Artificial Sequence: Synthetic oligonucleotide
cucggccggaggcuucucu

SEQ ID NO: 1156011 - RNA, 19 nt, Artificial Sequence
  Description of Artificial Sequence: Synthetic oligonucleotide
caccgccugcaugccguuc

SEQ ID NO: 1156012 - RNA, 19 nt, Artificial Sequence
  Description of Artificial Sequence: Synthetic oligonucleotide
ccgcggacaccagagccuc

SEQ ID NO: 1156013 - RNA, 19 nt, Artificial Sequence
  Description of Artificial Sequence: Synthetic oligonucleotide
gcgggguguucggcggccg

SEQ ID NO: 1156014 - RNA, 19 nt, Artificial Sequence
  Description of Artificial Sequence: Synthetic oligonucleotide
ccagcaucgcugcgcaucu

SEQ ID NO: 1156015 - RNA, 19 nt, Artificial Sequence
  Description of Artificial Sequence: Synthetic oligonucleotide
aggcagcgcuugcgcgcgu

SEQ ID NO: 1156016 - RNA, 19 nt, Artificial Sequence
  Description of Artificial Sequence: Synthetic oligonucleotide
guucgcgcucgccgugggu

SEQ ID NO: 1156017 - RNA, 19 nt, Artificial Sequence
  Description of Artificial Sequence: Synthetic oligonucleotide
cacggguggcgggguguuc

SEQ ID NO: 1156018 - RNA, 19 nt, Artificial Sequence
  Description of Artificial Sequence: Synthetic oligonucleotide
ccgggacccuagguccugg

SEQ ID NO: 1156019 - RNA, 19 nt, Artificial Sequence
  Description of Artificial Sequence: Synthetic oligonucleotide
gguguucggcggccgggcu

SEQ ID NO: 1156020 - RNA, 19 nt, Artificial Sequence
  Description of Artificial Sequence: Synthetic oligonucleotide
cguucgucggcggcagcac

SEQ ID NO: 1156021 - RNA, 19 nt, Artificial Sequence
  Description of Artificial Sequence: Synthetic oligonucleotide
cgggguguucggcggccgg

SEQ ID NO: 1156022 - RNA, 19 nt, Artificial Sequence
  Description of Artificial Sequence: Synthetic oligonucleotide
gggcgucuucuccguggga

SEQ ID NO: 1156023 - RNA, 19 nt, Artificial Sequence
  Description of Artificial Sequence: Synthetic oligonucleotide
ccgaguggaaggagacugu

SEQ ID NO: 1156024 - RNA, 19 nt, Artificial Sequence
  Description of Artificial Sequence: Synthetic oligonucleotide
gcgguuccccagcaucgcu

SEQ ID NO: 1156025 - RNA, 19 nt, Artificial Sequence
  Description of Artificial Sequence: Synthetic oligonucleotide
gggcucggggucuccuaua

SEQ ID NO: 1156026 - RNA, 19 nt, Artificial Sequence
  Description of Artificial Sequence: Synthetic oligonucleotide
gggccgggucccaggccag

SEQ ID NO: 1156027 - RNA, 19 nt, Artificial Sequence
  Description of Artificial Sequence: Synthetic oligonucleotide
ccugcguuugcagggcacu

SEQ ID NO: 1156028 - RNA, 19 nt, Artificial Sequence
  Description of Artificial Sequence: Synthetic oligonucleotide
ccgucacguacuccuugaa

SEQ ID NO: 1156029 - RNA, 19 nt, Artificial Sequence
  Description of Artificial Sequence: Synthetic oligonucleotide
ccgcgugauggugguggug

SEQ ID NO: 1156030 - RNA, 19 nt, Artificial Sequence
  Description of Artificial Sequence: Synthetic oligonucleotide
cgcggugacgucagugaua

SEQ ID NO: 1156031 - RNA, 19 nt, Artificial Sequence
  Description of Artificial Sequence: Synthetic oligonucleotide
cgcccgacuugauccuuca

SEQ ID NO: 1156032 - RNA, 19 nt, Artificial Sequence
  Description of Artificial Sequence: Synthetic oligonucleotide
cgucagugauaauuauauu

SEQ ID NO: 1156033 - RNA, 19 nt, Artificial Sequence
  Description of Artificial Sequence: Synthetic oligonucleotide
cccaccgcgugaugguggu

SEQ ID NO: 1156034 - RNA, 19 nt, Artificial Sequence
  Description of Artificial Sequence: Synthetic oligonucleotide
gcgggccgucaaccgcuuc

SEQ ID NO: 1156035 - RNA, 19 nt, Artificial Sequence
  Description of Artificial Sequence: Synthetic oligonucleotide
ccggugcgacuccuuccca

SEQ ID NO: 1156036 - RNA, 19 nt, Artificial Sequence
  Description of Artificial Sequence: Synthetic oligonucleotide
cgggccgucaaccgcuucu

SEQ ID NO: 1156037 - RNA, 19 nt, Artificial Sequence
  Description of Artificial Sequence: Synthetic oligonucleotide
ggccucggccggaggcuuc

SEQ ID NO: 1156038 - RNA, 19 nt, Artificial Sequence
  Description of Artificial Sequence: Synthetic oligonucleotide
cucgcccgacuugauccuu

SEQ ID NO: 1156039 - RNA, 19 nt, Artificial Sequence
  Description of Artificial Sequence: Synthetic oligonucleotide
ccaccgcgugaugguggug

SEQ ID NO: 1156040 - RNA, 19 nt, Artificial Sequence
  Description of Artificial Sequence: Synthetic oligonucleotide
ccgcaccaccggccgccgc

SEQ ID NO: 1156041 - RNA, 19 nt, Artificial Sequence
  Description of Artificial Sequence: Synthetic oligonucleotide
gggccgucaaccgcuucuu

SEQ ID NO: 1156042 - RNA, 19 nt, Artificial Sequence
  Description of Artificial Sequence: Synthetic oligonucleotide
cgcuugcgcgcgugggaga

SEQ ID NO: 1156043 - RNA, 19 nt, Artificial Sequence
  Description of Artificial Sequence: Synthetic oligonucleotide
ccuuggucggggagagcuu

SEQ ID NO: 1156044 - RNA, 19 nt, Artificial Sequence
  Description of Artificial Sequence: Synthetic oligonucleotide
ggagagcuuccgggacccu

SEQ ID NO: 1156045 - RNA, 19 nt, Artificial Sequence
  Description of Artificial Sequence: Synthetic oligonucleotide
cccaaccggugcgacuccu

SEQ ID NO: 1156046 - RNA, 19 nt, Artificial Sequence
  Description of Artificial Sequence: Synthetic oligonucleotide
cgaugcgcccguucuuguu

SEQ ID NO: 1156047 - RNA, 19 nt, Artificial Sequence
  Description of Artificial Sequence: Synthetic oligonucleotide
cagcaucgcugcgcaucuu

SEQ ID NO: 1156048 - RNA, 19 nt, Artificial Sequence
  Description of Artificial Sequence: Synthetic oligonucleotide
cgaucacgaugcgcccguu

SEQ ID NO: 1156049 - RNA, 19 nt, Artificial Sequence
  Description of Artificial Sequence: Synthetic oligonucleotide
agaaacgugacuuaaaugg

SEQ ID NO: 1156050 - RNA, 19 nt, Artificial Sequence
  Description of Artificial Sequence: Synthetic oligonucleotide
cuuaaauggaauuacaggg

SEQ ID NO: 1156051 - RNA, 19 nt, Artificial Sequence
  Description of Artificial Sequence: Synthetic oligonucleotide
ucugcuagggauuuuaagg

SEQ ID NO: 1156052 - RNA, 19 nt, Artificial Sequence
  Description of Artificial Sequence: Synthetic oligonucleotide
auuauuaauugguccaugc

SEQ ID NO: 1156053 - RNA, 19 nt, Artificial Sequence
  Description of Artificial Sequence: Synthetic oligonucleotide
uuuauggaugcuaacaagc

SEQ ID NO: 1156054 - RNA, 19 nt, Artificial Sequence
  Description of Artificial Sequence: Synthetic oligonucleotide
auauaaaggaguucggaac

SEQ ID NO: 1156055 - RNA, 19 nt, Artificial Sequence
  Description of Artificial Sequence: Synthetic oligonucleotide
uauuaauugguccaugcug

SEQ ID NO: 1156056 - RNA, 19 nt, Artificial Sequence
  Description of Artificial Sequence: Synthetic oligonucleotide
aaauugucaaugcacucuc

SEQ ID NO: 1156057 - RNA, 19 nt, Artificial Sequence
  Description of Artificial Sequence: Synthetic oligonucleotide
agucaaaucacacugaaau

SEQ ID NO: 1156058 - RNA, 19 nt, Artificial Sequence
  Description of Artificial Sequence: Synthetic oligonucleotide
aagguugacucuuaucuuc

SEQ ID NO: 1156059 - RNA, 19 nt, Artificial Sequence
  Description of Artificial Sequence: Synthetic oligonucleotide
ugaacacccacacagcuag

SEQ ID NO: 1156060 - RNA, 19 nt, Artificial Sequence
  Description of Artificial Sequence: Synthetic oligonucleotide
uuagcuuuaaguucaagaa

SEQ ID NO: 1156061 - RNA, 19 nt, Artificial Sequence
  Description of Artificial Sequence: Synthetic oligonucleotide
uauauauaaaggaguucgg

SEQ ID NO: 1156062 - RNA, 19 nt, Artificial Sequence
  Description of Artificial Sequence: Synthetic oligonucleotide
uuuuauacaagucccgaac

SEQ ID NO: 1156063 - RNA, 19 nt, Artificial Sequence
  Description of Artificial Sequence: Synthetic oligonucleotide
agcgaaauugccaaaauac

SEQ ID NO: 1156064 - RNA, 19 nt, Artificial Sequence
  Description of Artificial Sequence: Synthetic oligonucleotide
ucaauaguggacaucgagc

SEQ ID NO: 1156065 - RNA, 19 nt, Artificial Sequence
  Description of Artificial Sequence: Synthetic oligonucleotide
aaauguacaauugugccca

SEQ ID NO: 1156066 - RNA, 19 nt, Artificial Sequence
  Description of Artificial Sequence: Synthetic oligonucleotide
uuaggauacaucuaucuuc

SEQ ID NO: 1156067 - RNA, 19 nt, Artificial Sequence
  Description of Artificial Sequence: Synthetic oligonucleotide
uauaaaggaguucggaacu

SEQ ID NO: 1156068 - RNA, 19 nt, Artificial Sequence
  Description of Artificial Sequence: Synthetic oligonucleotide
uuaaauggaauuacagggu

SEQ ID NO: 1156069 - RNA, 19 nt, Artificial Sequence
  Description of Artificial Sequence: Synthetic oligonucleotide
aaaugauuauuaauugguc

SEQ ID NO: 1156070 - RNA, 19 nt, Artificial Sequence
  Description of Artificial Sequence: Synthetic oligonucleotide
aucucaauaguggacaucg

SEQ ID NO: 1156071 - RNA, 19 nt, Artificial Sequence
  Description of Artificial Sequence: Synthetic oligonucleotide
aauccagggagccauauau

SEQ ID NO: 1156072 - RNA, 19 nt, Artificial Sequence
  Description of Artificial Sequence: Synthetic oligonucleotide
uuuauacaagucccgaaca

SEQ ID NO: 1156073 - RNA, 19 nt, Artificial Sequence
  Description of Artificial Sequence: Synthetic oligonucleotide
auuaauugguccaugcugg

SEQ ID NO: 1156074 - RNA, 19 nt, Artificial Sequence
  Description of Artificial Sequence: Synthetic oligonucleotide
augauuauuaauuggucca

SEQ ID NO: 1156075 - RNA, 19 nt, Artificial Sequence
  Description of Artificial Sequence: Synthetic oligonucleotide
uucugcauaauucaguaau

SEQ ID NO: 1156076 - RNA, 19 nt, Artificial Sequence
  Description of Artificial Sequence: Synthetic oligonucleotide
uccuauuacagacaggauc

SEQ ID NO: 1156077 - RNA, 19 nt, Artificial Sequence
  Description of Artificial Sequence: Synthetic oligonucleotide
aauuacagggucuguucuc

SEQ ID NO: 1156078 - RNA, 19 nt, Artificial Sequence
  Description of Artificial Sequence: Synthetic oligonucleotide
uuauggaugcuaacaagcc

SEQ ID NO: 1156079 - RNA, 19 nt, Artificial Sequence
  Description of Artificial Sequence: Synthetic oligonucleotide
uuaaugaaugugcucgagc

SEQ ID NO: 1156080 - RNA, 19 nt, Artificial Sequence
  Description of Artificial Sequence: Synthetic oligonucleotide
auuuaggauacaucuaucu

SEQ ID NO: 1156081 - RNA, 19 nt, Artificial Sequence
  Description of Artificial Sequence: Synthetic oligonucleotide
uacugcuuguuaaugaaug

SEQ ID NO: 1156082 - RNA, 19 nt, Artificial Sequence
  Description of Artificial Sequence: Synthetic oligonucleotide
guuagaugaauucuuuagc

SEQ ID NO: 1156083 - RNA, 19 nt, Artificial Sequence
  Description of Artificial Sequence: Synthetic oligonucleotide
aagaaacgugacuuaaaug

SEQ ID NO: 1156084 - RNA, 19 nt, Artificial Sequence
  Description of Artificial Sequence: Synthetic oligonucleotide
gagguaucugguuagauga

SEQ ID NO: 1156085 - RNA, 19 nt, Artificial Sequence
  Description of Artificial Sequence: Synthetic oligonucleotide
ugggcaacguaucaaaaca

SEQ ID NO: 1156086 - RNA, 19 nt, Artificial Sequence
  Description of Artificial Sequence: Synthetic oligonucleotide
acugauugcucucuuuccg

SEQ ID NO: 1156087 - RNA, 19 nt, Artificial Sequence
  Description of Artificial Sequence: Synthetic oligonucleotide
uugaaagcgaaauugccaa

SEQ ID NO: 1156088 - RNA, 19 nt, Artificial Sequence
  Description of Artificial Sequence: Synthetic oligonucleotide
ugggagaaucucaauagug

SEQ ID NO: 1156089 - RNA, 19 nt, Artificial Sequence
  Description of Artificial Sequence: Synthetic oligonucleotide
ucucauagaagaaaugauu

SEQ ID NO: 1156090 - RNA, 19 nt, Artificial Sequence
  Description of Artificial Sequence: Synthetic oligonucleotide
ugucgaauauuuauggaau

SEQ ID NO: 1156091 - RNA, 19 nt, Artificial Sequence
  Description of Artificial Sequence: Synthetic oligonucleotide
aauugugcccauuuaggau

SEQ ID NO: 1156092 - RNA, 19 nt, Artificial Sequence
  Description of Artificial Sequence: Synthetic oligonucleotide
aaguuaaggccugucaaag

SEQ ID NO: 1156093 - RNA, 19 nt, Artificial Sequence
  Description of Artificial Sequence: Synthetic oligonucleotide
aaaguuaaggccugucaaa

SEQ ID NO: 1156094 - RNA, 19 nt, Artificial Sequence
  Description of Artificial Sequence: Synthetic oligonucleotide
aauucuacaacagcaugga

SEQ ID NO: 1156095 - RNA, 19 nt, Artificial Sequence
  Description of Artificial Sequence: Synthetic oligonucleotide
gguuagaugaauucuuuag

SEQ ID NO: 1156096 - RNA, 19 nt, Artificial Sequence
  Description of Artificial Sequence: Synthetic oligonucleotide
uuaguauuuucugaacacc

SEQ ID NO: 1156097 - RNA, 19 nt, Artificial Sequence
  Description of Artificial Sequence: Synthetic oligonucleotide
uuagggagaaguuugugau

SEQ ID NO: 1156098 - RNA, 19 nt, Artificial Sequence
  Description of Artificial Sequence: Synthetic oligonucleotide
acagcuagggccaaaauug

SEQ ID NO: 1156099 - RNA, 19 nt, Artificial Sequence
  Description of Artificial Sequence: Synthetic oligonucleotide
aagcuguugccaucacacc

SEQ ID NO: 1156100 - RNA, 19 nt, Artificial Sequence
  Description of Artificial Sequence: Synthetic oligonucleotide
ugacuuaaauggaauuaca

SEQ ID NO: 1156101 - RNA, 19 nt, Artificial Sequence
  Description of Artificial Sequence: Synthetic oligonucleotide
uguugagguaucugguuag

SEQ ID NO: 1156102 - RNA, 19 nt, Artificial Sequence
  Description of Artificial Sequence: Synthetic oligonucleotide
aagcaauacuguuguuaac

SEQ ID NO: 1156103 - RNA, 19 nt, Artificial Sequence
  Description of Artificial Sequence: Synthetic oligonucleotide
ucugaacacccacacagcu

SEQ ID NO: 1156104 - RNA, 19 nt, Artificial Sequence
  Description of Artificial Sequence: Synthetic oligonucleotide
aaugacacagccaggaaaa

SEQ ID NO: 1156105 - RNA, 19 nt, Artificial Sequence
  Description of Artificial Sequence: Synthetic oligonucleotide
acaucgagcauuuaguauu

SEQ ID NO: 1156106 - RNA, 19 nt, Artificial Sequence
  Description of Artificial Sequence: Synthetic oligonucleotide
uauggaugcuaacaagccu

SEQ ID NO: 1156107 - RNA, 19 nt, Artificial Sequence
  Description of Artificial Sequence: Synthetic oligonucleotide
uuuaggauacaucuaucuu

SEQ ID NO: 1156108 - RNA, 19 nt, Artificial Sequence
  Description of Artificial Sequence: Synthetic oligonucleotide
aucacuguuagggagaagu

SEQ ID NO: 1156109 - RNA, 19 nt, Artificial Sequence
  Description of Artificial Sequence: Synthetic oligonucleotide
uuauuugggcaacguauca

SEQ ID NO: 1156110 - RNA, 19 nt, Artificial Sequence
  Description of Artificial Sequence: Synthetic oligonucleotide
uggcaaaauucuacaacag

SEQ ID NO: 1156111 - RNA, 19 nt, Artificial Sequence
  Description of Artificial Sequence: Synthetic oligonucleotide
ugucaaugcacucuccuau

SEQ ID NO: 1156112 - RNA, 19 nt, Artificial Sequence
  Description of Artificial Sequence: Synthetic oligonucleotide
uuauacaagucccgaacaa

SEQ ID NO: 1156113 - RNA, 19 nt, Artificial Sequence
  Description of Artificial Sequence: Synthetic oligonucleotide
cucaauaguggacaucgag

SEQ ID NO: 1156114 - RNA, 19 nt, Artificial Sequence
  Description of Artificial Sequence: Synthetic oligonucleotide
uuucuugcuugaaggaggc

SEQ ID NO: 1156115 - RNA, 19 nt, Artificial Sequence
  Description of Artificial Sequence: Synthetic oligonucleotide
agcaauacuguuguuaaca

SEQ ID NO: 1156116 - RNA, 19 nt, Artificial Sequence
  Description of Artificial Sequence: Synthetic oligonucleotide
uuauguugagagaugucuc

SEQ ID NO: 1156117 - RNA, 19 nt, Artificial Sequence
  Description of Artificial Sequence: Synthetic oligonucleotide
acaauugugcccauuuagg

SEQ ID NO: 1156118 - RNA, 19 nt, Artificial Sequence
  Description of Artificial Sequence: Synthetic oligonucleotide
agaaucucaauaguggaca

SEQ ID NO: 1156119 - RNA, 19 nt, Artificial Sequence
  Description of Artificial Sequence: Synthetic oligonucleotide
aagucccgaacaaauguac

SEQ ID NO: 1156120 - RNA, 19 nt, Artificial Sequence
  Description of Artificial Sequence: Synthetic oligonucleotide
ugauccacguaccaggaau

SEQ ID NO: 1156121 - RNA, 19 nt, Artificial Sequence
  Description of Artificial Sequence: Synthetic oligonucleotide
uuaauugguccaugcuggg

SEQ ID NO: 1156122 - RNA, 19 nt, Artificial Sequence
  Description of Artificial Sequence: Synthetic oligonucleotide
uguuaacagucaaaucaca

SEQ ID NO: 1156123 - RNA, 19 nt, Artificial Sequence
  Description of Artificial Sequence: Synthetic oligonucleotide
aaacaguccgcugagccug

SEQ ID NO: 1156124 - RNA, 19 nt, Artificial Sequence
  Description of Artificial Sequence: Synthetic oligonucleotide
acucuccuauuacagacag

SEQ ID NO: 1156125 - RNA, 19 nt, Artificial Sequence
  Description of Artificial Sequence: Synthetic oligonucleotide
uuugugauccacguaccag

SEQ ID NO: 1156126 - RNA, 19 nt, Artificial Sequence
  Description of Artificial Sequence: Synthetic oligonucleotide
cuuggaacugucuguagug

SEQ ID NO: 1156127 - RNA, 19 nt, Artificial Sequence
  Description of Artificial Sequence: Synthetic oligonucleotide
gauugcucucuuuccgugg

SEQ ID NO: 1156128 - RNA, 19 nt, Artificial Sequence
  Description of Artificial Sequence: Synthetic oligonucleotide
guggacaucgagcauuuag

SEQ ID NO: 1156129 - RNA, 19 nt, Artificial Sequence
  Description of Artificial Sequence: Synthetic oligonucleotide
agccauauauauaaaggag

SEQ ID NO: 1156130 - RNA, 19 nt, Artificial Sequence
  Description of Artificial Sequence: Synthetic oligonucleotide
gugcauacgacuguugagg

SEQ ID NO: 1156131 - RNA, 19 nt, Artificial Sequence
  Description of Artificial Sequence: Synthetic oligonucleotide
caauaguggacaucgagca

SEQ ID NO: 1156132 - RNA, 19 nt, Artificial Sequence
  Description of Artificial Sequence: Synthetic oligonucleotide
caaugagagagcagguuag

SEQ ID NO: 1156133 - RNA, 19 nt, Artificial Sequence
  Description of Artificial Sequence: Synthetic oligonucleotide
uacaagucccgaacaaaug

SEQ ID NO: 1156134 - RNA, 19 nt, Artificial Sequence
  Description of Artificial Sequence: Synthetic oligonucleotide
ugaucgucuauguuuucug

SEQ ID NO: 1156135 - RNA, 19 nt, Artificial Sequence
  Description of Artificial Sequence: Synthetic oligonucleotide
aaagcgaaauugccaaaau

SEQ ID NO: 1156136 - RNA, 19 nt, Artificial Sequence
  Description of Artificial Sequence: Synthetic oligonucleotide
cauuuaguauuuucugaac

SEQ ID NO: 1156137 - RNA, 19 nt, Artificial Sequence
  Description of Artificial Sequence: Synthetic oligonucleotide
gaccaucacuguuagggag

SEQ ID NO: 1156138 - RNA, 19 nt, Artificial Sequence
  Description of Artificial Sequence: Synthetic oligonucleotide
agccaggaaaauaugcagc

SEQ ID NO: 1156139 - RNA, 19 nt, Artificial Sequence
  Description of Artificial Sequence: Synthetic oligonucleotide
acuguuagggagaaguuug

SEQ ID NO: 1156140 - RNA, 19 nt, Artificial Sequence
  Description of Artificial Sequence: Synthetic oligonucleotide
uaucugguuagaugaauuc

SEQ ID NO: 1156141 - RNA, 19 nt, Artificial Sequence
  Description of Artificial Sequence: Synthetic oligonucleotide
aucacaucccaauuugcca

SEQ ID NO: 1156142 - RNA, 19 nt, Artificial Sequence
  Description of Artificial Sequence: Synthetic oligonucleotide
aaucucaauaguggacauc

SEQ ID NO: 1156143 - RNA, 19 nt, Artificial Sequence
  Description of Artificial Sequence: Synthetic oligonucleotide
ugucaaaguuucacagcag

SEQ ID NO: 1156144 - RNA, 19 nt, Artificial Sequence
  Description of Artificial Sequence: Synthetic oligonucleotide
auaaaaguuaaggccuguc

SEQ ID NO: 1156145 - RNA, 19 nt, Artificial Sequence
  Description of Artificial Sequence: Synthetic oligonucleotide
gaucgucuauguuuucugc

SEQ ID NO: 1156146 - RNA, 19 nt, Artificial Sequence
  Description of Artificial Sequence: Synthetic oligonucleotide
cacaccuguguacugauug

SEQ ID NO: 1156147 - RNA, 19 nt, Artificial Sequence
  Description of Artificial Sequence: Synthetic oligonucleotide
uaaguucaagaaacgugac

SEQ ID NO: 1156148 - RNA, 19 nt, Artificial Sequence
  Description of Artificial Sequence: Synthetic oligonucleotide
ucccugucgaauauuuaug

SEQ ID NO: 1156149 - RNA, 19 nt, Artificial Sequence
  Description of Artificial Sequence: Synthetic oligonucleotide
guuagggagaaguuuguga

SEQ ID NO: 1156150 - RNA, 19 nt, Artificial Sequence
  Description of Artificial Sequence: Synthetic oligonucleotide
agggccaaaauugucaaug

SEQ ID NO: 1156151 - RNA, 19 nt, Artificial Sequence
  Description of Artificial Sequence: Synthetic oligonucleotide
cuuguuaaugaaugugcuc

SEQ ID NO: 1156152 - RNA, 19 nt, Artificial Sequence
  Description of Artificial Sequence: Synthetic oligonucleotide
ugcaccucagagaaucucu

SEQ ID NO: 1156153 - RNA, 19 nt, Artificial Sequence
  Description of Artificial Sequence: Synthetic oligonucleotide
aaauccccugcauucuugu

SEQ ID NO: 1156154 - RNA, 19 nt, Artificial Sequence
  Description of Artificial Sequence: Synthetic oligonucleotide
uguuaaugaaugugcucga

SEQ ID NO: 1156155 - RNA, 19 nt, Artificial Sequence
  Description of Artificial Sequence: Synthetic oligonucleotide
aagcgaaauugccaaaaua

SEQ ID NO: 1156156 - RNA, 19 nt, Artificial Sequence
  Description of Artificial Sequence: Synthetic oligonucleotide
auuuuauacaagucccgaa

SEQ ID NO: 1156157 - RNA, 19 nt, Artificial Sequence
  Description of Artificial Sequence: Synthetic oligonucleotide
ugggguauguguuccauuc

SEQ ID NO: 1156158 - RNA, 19 nt, Artificial Sequence
  Description of Artificial Sequence: Synthetic oligonucleotide
guucggaacuuuucaaagc

SEQ ID NO: 1156159 - RNA, 19 nt, Artificial Sequence
  Description of Artificial Sequence: Synthetic oligonucleotide
cagauaaaaguuaaggccu

SEQ ID NO: 1156160 - RNA, 19 nt, Artificial Sequence
  Description of Artificial Sequence: Synthetic oligonucleotide
cuagggauuuuaaggaauc

SEQ ID NO: 1156161 - RNA, 19 nt, Artificial Sequence
  Description of Artificial Sequence: Synthetic oligonucleotide
ucuugcuugaaggaggcaa

SEQ ID NO: 1156162 - RNA, 19 nt, Artificial Sequence
  Description of Artificial Sequence: Synthetic oligonucleotide
aaugugcucgagcccagca

SEQ ID NO: 1156163 - RNA, 19 nt, Artificial Sequence
  Description of Artificial Sequence: Synthetic oligonucleotide
gaaagccuucagaagagug

SEQ ID NO: 1156164 - RNA, 19 nt, Artificial Sequence
  Description of Artificial Sequence: Synthetic oligonucleotide
ugcaaugagucuacacugu

SEQ ID NO: 1156165 - RNA, 19 nt, Artificial Sequence
  Description of Artificial Sequence: Synthetic oligonucleotide
aucugcuagggauuuuaag

SEQ ID NO: 1156166 - RNA, 19 nt, Artificial Sequence
  Description of Artificial Sequence: Synthetic oligonucleotide
gauuauuaauugguccaug

SEQ ID NO: 1156167 - RNA, 19 nt, Artificial Sequence
  Description of Artificial Sequence: Synthetic oligonucleotide
ggauacaucuaucuucagc

SEQ ID NO: 1156168 - RNA, 19 nt, Artificial Sequence
  Description of Artificial Sequence: Synthetic oligonucleotide
cuaauguuucuguguuucc

SEQ ID NO: 1156169 - RNA, 19 nt, Artificial Sequence
  Description of Artificial Sequence: Synthetic oligonucleotide
aguaauucaaagaguuucu

SEQ ID NO: 1156170 - RNA, 19 nt, Artificial Sequence
  Description of Artificial Sequence: Synthetic oligonucleotide
gcaaaauucuacaacagca

SEQ ID NO: 1156171 - RNA, 19 nt, Artificial Sequence
  Description of Artificial Sequence: Synthetic oligonucleotide
aguuugugauccacguacc

SEQ ID NO: 1156172 - RNA, 19 nt, Artificial Sequence
  Description of Artificial Sequence: Synthetic oligonucleotide
uucugaacacccacacagc

SEQ ID NO: 1156173 - RNA, 19 nt, Artificial Sequence
  Description of Artificial Sequence: Synthetic oligonucleotide
guagcaauucuaauguuuc

SEQ ID NO: 1156174 - RNA, 19 nt, Artificial Sequence
  Description of Artificial Sequence: Synthetic oligonucleotide
aaucacacugaaauccaga

SEQ ID NO: 1156175 - RNA, 19 nt, Artificial Sequence
  Description of Artificial Sequence: Synthetic oligonucleotide
ugugauccacguaccagga

SEQ ID NO: 1156176 - RNA, 19 nt, Artificial Sequence
  Description of Artificial Sequence: Synthetic oligonucleotide
gugacuuaaauggaauuac

SEQ ID NO: 1156177 - RNA, 19 nt, Artificial Sequence
  Description of Artificial Sequence: Synthetic oligonucleotide
ugcuuauguugagagaugu

SEQ ID NO: 1156178 - RNA, 19 nt, Artificial Sequence
  Description of Artificial Sequence: Synthetic oligonucleotide
ugauugcucucuuuccgug

SEQ ID NO: 1156179 - RNA, 19 nt, Artificial Sequence
  Description of Artificial Sequence: Synthetic oligonucleotide
ugacucacauucuugcuua

SEQ ID NO: 1156180 - RNA, 19 nt, Artificial Sequence
  Description of Artificial Sequence: Synthetic oligonucleotide
gcuauguccucaaugagag

SEQ ID NO: 1156181 - RNA, 19 nt, Artificial Sequence
  Description of Artificial Sequence: Synthetic oligonucleotide
uauacaagucccgaacaaa

SEQ ID NO: 1156182 - RNA, 19 nt, Artificial Sequence
  Description of Artificial Sequence: Synthetic oligonucleotide
agaguguucagcugaucgu

SEQ ID NO: 1156183 - RNA, 19 nt, Artificial Sequence
  Description of Artificial Sequence: Synthetic oligonucleotide
ucgagcauuuaguauuuuc

SEQ ID NO: 1156184 - RNA, 19 nt, Artificial Sequence
  Description of Artificial Sequence: Synthetic oligonucleotide
ugcugggauaaauacuuaa

SEQ ID NO: 1156185 - RNA, 19 nt, Artificial Sequence
  Description of Artificial Sequence: Synthetic oligonucleotide
aucgucuauguuuucugca

SEQ ID NO: 1156186 - RNA, 19 nt, Artificial Sequence
  Description of Artificial Sequence: Synthetic oligonucleotide
cugucgaauauuuauggaa

SEQ ID NO: 1156187 - RNA, 19 nt, Artificial Sequence
  Description of Artificial Sequence: Synthetic oligonucleotide
ucucuggccaaauccacaa

SEQ ID NO: 1156188 - RNA, 19 nt, Artificial Sequence
  Description of Artificial Sequence: Synthetic oligonucleotide
gagaaucucaauaguggac

SEQ ID NO: 1156189 - RNA, 19 nt, Artificial Sequence
  Description of Artificial Sequence: Synthetic oligonucleotide
guacugauugcucucuuuc

SEQ ID NO: 1156190 - RNA, 19 nt, Artificial Sequence
  Description of Artificial Sequence: Synthetic oligonucleotide
ucuugcuuauguugagaga

SEQ ID NO: 1156191 - RNA, 19 nt, Artificial Sequence
  Description of Artificial Sequence: Synthetic oligonucleotide
uccuucaguagcaauucua

SEQ ID NO: 1156192 - RNA, 19 nt, Artificial Sequence
  Description of Artificial Sequence: Synthetic oligonucleotide
cauuauuugggcaacguau

SEQ ID NO: 1156193 - RNA, 19 nt, Artificial Sequence
  Description of Artificial Sequence: Synthetic oligonucleotide
ugccaaauguguucacuga

SEQ ID NO: 1156194 - RNA, 19 nt, Artificial Sequence
  Description of Artificial Sequence: Synthetic oligonucleotide
gucaaaucacacugaaauc

SEQ ID NO: 1156195 - RNA, 19 nt, Artificial Sequence
  Description of Artificial Sequence: Synthetic oligonucleotide
uugcuuauguugagagaug

SEQ ID NO: 1156196 - RNA, 19 nt, Artificial Sequence
  Description of Artificial Sequence: Synthetic oligonucleotide
uguuuugggguauguguuc

SEQ ID NO: 1156197 - RNA, 19 nt, Artificial Sequence
  Description of Artificial Sequence: Synthetic oligonucleotide
uugaaagggaagguugacu

SEQ ID NO: 1156198 - RNA, 19 nt, Artificial Sequence
  Description of Artificial Sequence: Synthetic oligonucleotide
ugcauacgacuguugaggu

SEQ ID NO: 1156199 - RNA, 19 nt, Artificial Sequence
  Description of Artificial Sequence: Synthetic oligonucleotide
agagguguggagacugccc

SEQ ID NO: 1156200 - RNA, 19 nt, Artificial Sequence
  Description of Artificial Sequence: Synthetic oligonucleotide
cauuuaggauacaucuauc

SEQ ID NO: 1156201 - RNA, 19 nt, Artificial Sequence
  Description of Artificial Sequence: Synthetic oligonucleotide
gaaacgugacuuaaaugga

SEQ ID NO: 1156202 - RNA, 19 nt, Artificial Sequence
  Description of Artificial Sequence: Synthetic oligonucleotide
ucgucuauguuuucugcau

SEQ ID NO: 1156203 - RNA, 19 nt, Artificial Sequence
  Description of Artificial Sequence: Synthetic oligonucleotide
aaacgugacuuaaauggaa

SEQ ID NO: 1156204 - RNA, 19 nt, Artificial Sequence
  Description of Artificial Sequence: Synthetic oligonucleotide
cugcuagggauuuuaagga

SEQ ID NO: 1156205 - RNA, 19 nt, Artificial Sequence
  Description of Artificial Sequence: Synthetic oligonucleotide
ugauuauuaauugguccau

SEQ ID NO: 1156206 - RNA, 19 nt, Artificial Sequence
  Description of Artificial Sequence: Synthetic oligonucleotide
aggaauacugcuuguuaau

SEQ ID NO: 1156207 - RNA, 19 nt, Artificial Sequence
  Description of Artificial Sequence: Synthetic oligonucleotide
auccccugcauucuuguga

SEQ ID NO: 1156208 - RNA, 19 nt, Artificial Sequence
  Description of Artificial Sequence: Synthetic oligonucleotide
ggcucuuacucuugaaucc

SEQ ID NO: 1156209 - RNA, 19 nt, Artificial Sequence
  Description of Artificial Sequence: Synthetic oligonucleotide
ugaccaucacuguuaggga

SEQ ID NO: 1156210 - RNA, 19 nt, Artificial Sequence
  Description of Artificial Sequence: Synthetic oligonucleotide
gcaauacuguuguuaacag

SEQ ID NO: 1156211 - RNA, 19 nt, Artificial Sequence
  Description of Artificial Sequence: Synthetic oligonucleotide
guuaaugaaugugcucgag

SEQ ID NO: 1156212 - RNA, 19 nt, Artificial Sequence
  Description of Artificial Sequence: Synthetic oligonucleotide
ucugugcauacgacuguug

SEQ ID NO: 1156213 - RNA, 19 nt, Artificial Sequence
  Description of Artificial Sequence: Synthetic oligonucleotide
ucaaugcacucuccuauua

SEQ ID NO: 1156214 - RNA, 19 nt, Artificial Sequence
  Description of Artificial Sequence: Synthetic oligonucleotide
aacgugacuuaaauggaau

SEQ ID NO: 1156215 - RNA, 19 nt, Artificial Sequence
  Description of Artificial Sequence: Synthetic oligonucleotide
ugcuagggauuuuaaggaa

SEQ ID NO: 1156216 - RNA, 19 nt, Artificial Sequence
  Description of Artificial Sequence: Synthetic oligonucleotide
gaaagcgaaauugccaaaa

SEQ ID NO: 1156217 - RNA, 19 nt, Artificial Sequence
  Description of Artificial Sequence: Synthetic oligonucleotide
uugugaacaucaaguuuuc

SEQ ID NO: 1156218 - RNA, 19 nt, Artificial Sequence
  Description of Artificial Sequence: Synthetic oligonucleotide
gcagcuauguccucaauga

SEQ ID NO: 1156219 - RNA, 19 nt, Artificial Sequence
  Description of Artificial Sequence: Synthetic oligonucleotide
uguuagggagaaguuugug

SEQ ID NO: 1156220 - RNA, 19 nt, Artificial Sequence
  Description of Artificial Sequence: Synthetic oligonucleotide
aauccccugcauucuugug

SEQ ID NO: 1156221 - RNA, 19 nt, Artificial Sequence
  Description of Artificial Sequence: Synthetic oligonucleotide
uauuugggcaacguaucaa

SEQ ID NO: 1156222 - RNA, 19 nt, Artificial Sequence
  Description of Artificial Sequence: Synthetic oligonucleotide
ccacguaccaggaauacug

SEQ ID NO: 1156223 - RNA, 19 nt, Artificial Sequence
  Description of Artificial Sequence: Synthetic oligonucleotide
acauuauuugggcaacgua

SEQ ID NO: 1156224 - RNA, 19 nt, Artificial Sequence
  Description of Artificial Sequence: Synthetic oligonucleotide
ugcaauccuuucugaagga

SEQ ID NO: 1156225 - RNA, 19 nt, Artificial Sequence
  Description of Artificial Sequence: Synthetic oligonucleotide
gaggagucagguuuguucu

SEQ ID NO: 1156226 - RNA, 19 nt, Artificial Sequence
  Description of Artificial Sequence: Synthetic oligonucleotide
cagguuagauggcggagcc

SEQ ID NO: 1156227 - RNA, 19 nt, Artificial Sequence
  Description of Artificial Sequence: Synthetic oligonucleotide
ugcccauuuaggauacauc

SEQ ID NO: 1156228 - RNA, 19 nt, Artificial Sequence
  Description of Artificial Sequence: Synthetic oligonucleotide
ugguuagaugaauucuuua

SEQ ID NO: 1156229 - RNA, 19 nt, Artificial Sequence
  Description of Artificial Sequence: Synthetic oligonucleotide
ugucugugcauacgacugu

SEQ ID NO: 1156230 - RNA, 19 nt, Artificial Sequence
  Description of Artificial Sequence: Synthetic oligonucleotide
gccugucaaaguuucacag

SEQ ID NO: 1156231 - RNA, 19 nt, Artificial Sequence
  Description of Artificial Sequence: Synthetic oligonucleotide
ggagaaucucaauagugga

SEQ ID NO: 1156232 - RNA, 19 nt, Artificial Sequence
  Description of Artificial Sequence: Synthetic oligonucleotide
cccugucgaauauuuaugg

SEQ ID NO: 1156233 - RNA, 19 nt, Artificial Sequence
  Description of Artificial Sequence: Synthetic oligonucleotide
auacaagucccgaacaaau

SEQ ID NO: 1156234 - RNA, 19 nt, Artificial Sequence
  Description of Artificial Sequence: Synthetic oligonucleotide
ucggaacuuuucaaagcaa

SEQ ID NO: 1156235 - RNA, 19 nt, Artificial Sequence
  Description of Artificial Sequence: Synthetic oligonucleotide
ggaauuacagggucuguuc

SEQ ID NO: 1156236 - RNA, 19 nt, Artificial Sequence
  Description of Artificial Sequence: Synthetic oligonucleotide
ugucuguagugcuacuuuu

SEQ ID NO: 1156237 - RNA, 19 nt, Artificial Sequence
  Description of Artificial Sequence: Synthetic oligonucleotide
agaccaaagcucucauaga

SEQ ID NO: 1156238 - RNA, 19 nt, Artificial Sequence
  Description of Artificial Sequence: Synthetic oligonucleotide
ugaaagcgaaauugccaaa

SEQ ID NO: 1156239 - RNA, 19 nt, Artificial Sequence
  Description of Artificial Sequence: Synthetic oligonucleotide
acguaucaaaacaguccgc

SEQ ID NO: 1156240 - RNA, 19 nt, Artificial Sequence
  Description of Artificial Sequence: Synthetic oligonucleotide
uguacugauugcucucuuu

SEQ ID NO: 1156241 - RNA, 19 nt, Artificial Sequence
  Description of Artificial Sequence: Synthetic oligonucleotide
cgaaauugccaaaauacuc

SEQ ID NO: 1156242 - RNA, 19 nt, Artificial Sequence
  Description of Artificial Sequence: Synthetic oligonucleotide
ucuggguugcaauccuuuc

SEQ ID NO: 1156243 - RNA, 19 nt, Artificial Sequence
  Description of Artificial Sequence: Synthetic oligonucleotide
agagcagguuagauggcgg

SEQ ID NO: 1156244 - RNA, 19 nt, Artificial Sequence
  Description of Artificial Sequence: Synthetic oligonucleotide
caucgcacacugaacacca

SEQ ID NO: 1156245 - RNA, 19 nt, Artificial Sequence
  Description of Artificial Sequence: Synthetic oligonucleotide
auccacguaccaggaauac

SEQ ID NO: 1156246 - RNA, 19 nt, Artificial Sequence
  Description of Artificial Sequence: Synthetic oligonucleotide
cuugcuuauguugagagau

SEQ ID NO: 1156247 - RNA, 19 nt, Artificial Sequence
  Description of Artificial Sequence: Synthetic oligonucleotide
uuccuucaguagcaauucu

SEQ ID NO: 1156248 - RNA, 19 nt, Artificial Sequence
  Description of Artificial Sequence: Synthetic oligonucleotide
cagcaucgcacacugaaca

SEQ ID NO: 1156249 - RNA, 19 nt, Artificial Sequence
  Description of Artificial Sequence: Synthetic oligonucleotide
guuugugauccacguacca

SEQ ID NO: 1156250 - RNA, 19 nt, Artificial Sequence
  Description of Artificial Sequence: Synthetic oligonucleotide
ucacuguuagggagaaguu

SEQ ID NO: 1156251 - RNA, 19 nt, Artificial Sequence
  Description of Artificial Sequence: Synthetic oligonucleotide
acguaccaggaauacugcu

SEQ ID NO: 1156252 - RNA, 19 nt, Artificial Sequence
  Description of Artificial Sequence: Synthetic oligonucleotide
ucuugaauccagggagcca

SEQ ID NO: 1156253 - RNA, 19 nt, Artificial Sequence
  Description of Artificial Sequence: Synthetic oligonucleotide
ucccgaacaaauguacaau

SEQ ID NO: 1156254 - RNA, 19 nt, Artificial Sequence
  Description of Artificial Sequence: Synthetic oligonucleotide
acgugacuuaaauggaauu

SEQ ID NO: 1156255 - RNA, 19 nt, Artificial Sequence
  Description of Artificial Sequence: Synthetic oligonucleotide
cugugcauacgacuguuga

SEQ ID NO: 1156256 - RNA, 19 nt, Artificial Sequence
  Description of Artificial Sequence: Synthetic oligonucleotide
ugcucucuuuccgugggug

SEQ ID NO: 1156257 - RNA, 19 nt, Artificial Sequence
  Description of Artificial Sequence: Synthetic oligonucleotide
gucccgaacaaauguacaa

SEQ ID NO: 1156258 - RNA, 19 nt, Artificial Sequence
  Description of Artificial Sequence: Synthetic oligonucleotide
aauguacaauugugcccau

SEQ ID NO: 1156259 - RNA, 19 nt, Artificial Sequence
  Description of Artificial Sequence: Synthetic oligonucleotide
cgacuguugagguaucugg

SEQ ID NO: 1156260 - RNA, 19 nt, Artificial Sequence
  Description of Artificial Sequence: Synthetic oligonucleotide
caagaaacgugacuuaaau

SEQ ID NO: 1156261 - RNA, 19 nt, Artificial Sequence
  Description of Artificial Sequence: Synthetic oligonucleotide
uucuaauguuucuguguuu

SEQ ID NO: 1156262 - RNA, 19 nt, Artificial Sequence
  Description of Artificial Sequence: Synthetic oligonucleotide
gacaucgagcauuuaguau

SEQ ID NO: 1156263 - RNA, 19 nt, Artificial Sequence
  Description of Artificial Sequence: Synthetic oligonucleotide
ugcuuguuugucugugcau

SEQ ID NO: 1156264 - RNA, 19 nt, Artificial Sequence
  Description of Artificial Sequence: Synthetic oligonucleotide
ugacucuuaucuuccuguu

SEQ ID NO: 1156265 - RNA, 19 nt, Artificial Sequence
  Description of Artificial Sequence: Synthetic oligonucleotide
uggagaccaaagcucucau

SEQ ID NO: 1156266 - RNA, 19 nt, Artificial Sequence
  Description of Artificial Sequence: Synthetic oligonucleotide
gcccauuuaggauacaucu

SEQ ID NO: 1156267 - RNA, 19 nt, Artificial Sequence
  Description of Artificial Sequence: Synthetic oligonucleotide
uuagauggcggagccugac

SEQ ID NO: 1156268 - RNA, 19 nt, Artificial Sequence
  Description of Artificial Sequence: Synthetic oligonucleotide
gaaguuugugauccacgua

SEQ ID NO: 1156269 - RNA, 19 nt, Artificial Sequence
  Description of Artificial Sequence: Synthetic oligonucleotide
agcagguuagauggcggag

SEQ ID NO: 1156270 - RNA, 19 nt, Artificial Sequence
  Description of Artificial Sequence: Synthetic oligonucleotide
gagcagguuagauggcgga

SEQ ID NO: 1156271 - RNA, 19 nt, Artificial Sequence
  Description of Artificial Sequence: Synthetic oligonucleotide
cuagggccaaaauugucaa

SEQ ID NO: 1156272 - RNA, 19 nt, Artificial Sequence
  Description of Artificial Sequence: Synthetic oligonucleotide
acuguuguuaacagucaaa

SEQ ID NO: 1156273 - RNA, 19 nt, Artificial Sequence
  Description of Artificial Sequence: Synthetic oligonucleotide
gggccaaaauugucaaugc

SEQ ID NO: 1156274 - RNA, 19 nt, Artificial Sequence
  Description of Artificial Sequence: Synthetic oligonucleotide
aggauacaucuaucuucag

SEQ ID NO: 1156275 - RNA, 19 nt, Artificial Sequence
  Description of Artificial Sequence: Synthetic oligonucleotide
acgacuguugagguaucug

SEQ ID NO: 1156276 - RNA, 19 nt, Artificial Sequence
  Description of Artificial Sequence: Synthetic oligonucleotide
cauacgacuguugagguau

SEQ ID NO: 1156277 - RNA, 19 nt, Artificial Sequence
  Description of Artificial Sequence: Synthetic oligonucleotide
uccacguaccaggaauacu

SEQ ID NO: 1156278 - RNA, 19 nt, Artificial Sequence
  Description of Artificial Sequence: Synthetic oligonucleotide
uccgugggugcccuuggaa

SEQ ID NO: 1156279 - RNA, 19 nt, Artificial Sequence
  Description of Artificial Sequence: Synthetic oligonucleotide
uugagguaucugguuagau

SEQ ID NO: 1156280 - RNA, 19 nt, Artificial Sequence
  Description of Artificial Sequence: Synthetic oligonucleotide
gcaacguaucaaaacaguc

SEQ ID NO: 1156281 - RNA, 19 nt, Artificial Sequence
  Description of Artificial Sequence: Synthetic oligonucleotide
ugaauccagggagccauau

SEQ ID NO: 1156282 - RNA, 19 nt, Artificial Sequence
  Description of Artificial Sequence: Synthetic oligonucleotide
cucucauagaagaaaugau

SEQ ID NO: 1156283 - RNA, 19 nt, Artificial Sequence
  Description of Artificial Sequence: Synthetic oligonucleotide
ucgagcccagcaucgcaca

SEQ ID NO: 1156284 - RNA, 19 nt, Artificial Sequence
  Description of Artificial Sequence: Synthetic oligonucleotide
agucccgaacaaauguaca

SEQ ID NO: 1156285 - RNA, 19 nt, Artificial Sequence
  Description of Artificial Sequence: Synthetic oligonucleotide
cuguugagguaucugguua

SEQ ID NO: 1156286 - RNA, 19 nt, Artificial Sequence
  Description of Artificial Sequence: Synthetic oligonucleotide
acucacauucuugcuuaug

SEQ ID NO: 1156287 - RNA, 19 nt, Artificial Sequence
  Description of Artificial Sequence: Synthetic oligonucleotide
caagucccgaacaaaugua

SEQ ID NO: 1156288 - RNA, 19 nt, Artificial Sequence
  Description of Artificial Sequence: Synthetic oligonucleotide
gcaauucuaauguuucugu

SEQ ID NO: 1156289 - RNA, 19 nt, Artificial Sequence
  Description of Artificial Sequence: Synthetic oligonucleotide
augagagagcagguuagau

SEQ ID NO: 1156290 - RNA, 19 nt, Artificial Sequence
  Description of Artificial Sequence: Synthetic oligonucleotide
gggcaacguaucaaaacag

SEQ ID NO: 1156291 - RNA, 19 nt, Artificial Sequence
  Description of Artificial Sequence: Synthetic oligonucleotide
gccauauauauaaaggagu

SEQ ID NO: 1156292 - RNA, 19 nt, Artificial Sequence
  Description of Artificial Sequence: Synthetic oligonucleotide
augugcucgagcccagcau

SEQ ID NO: 1156293 - RNA, 19 nt, Artificial Sequence
  Description of Artificial Sequence: Synthetic oligonucleotide
agcugaucgucuauguuuu

SEQ ID NO: 1156294 - RNA, 19 nt, Artificial Sequence
  Description of Artificial Sequence: Synthetic oligonucleotide
ucaaagcaauacuguuguu

SEQ ID NO: 1156295 - RNA, 19 nt, Artificial Sequence
  Description of Artificial Sequence: Synthetic oligonucleotide
gugcucgagcccagcaucg

SEQ ID NO: 1156296 - RNA, 19 nt, Artificial Sequence
  Description of Artificial Sequence: Synthetic oligonucleotide
uacgacuguugagguaucu

SEQ ID NO: 1156297 - RNA, 19 nt, Artificial Sequence
  Description of Artificial Sequence: Synthetic oligonucleotide
auacugcuuguuaaugaau

SEQ ID NO: 1156298 - RNA, 19 nt, Artificial Sequence
  Description of Artificial Sequence: Synthetic oligonucleotide
gauaaaaguuaaggccugu

SEQ ID NO: 1156299 - RNA, 19 nt, Artificial Sequence
  Description of Artificial Sequence: Synthetic oligonucleotide
guacaauugugcccauuua

SEQ ID NO: 1156300 - RNA, 19 nt, Artificial Sequence
  Description of Artificial Sequence: Synthetic oligonucleotide
gcaaugagucuacacuguc

SEQ ID NO: 1156301 - RNA, 19 nt, Artificial Sequence
  Description of Artificial Sequence: Synthetic oligonucleotide
caauacuguuguuaacagu

SEQ ID NO: 1156302 - RNA, 19 nt, Artificial Sequence
  Description of Artificial Sequence: Synthetic oligonucleotide
uugggguauguguuccauu

SEQ ID NO: 1156303 - RNA, 19 nt, Artificial Sequence
  Description of Artificial Sequence: Synthetic oligonucleotide
agggaagguugacucuuau

SEQ ID NO: 1156304 - RNA, 19 nt, Artificial Sequence
  Description of Artificial Sequence: Synthetic oligonucleotide
cuugaauccagggagccau

SEQ ID NO: 1156305 - RNA, 19 nt, Artificial Sequence
  Description of Artificial Sequence: Synthetic oligonucleotide
uagggccaaaauugucaau

SEQ ID NO: 1156306 - RNA, 19 nt, Artificial Sequence
  Description of Artificial Sequence: Synthetic oligonucleotide
gaaugugcucgagcccagc

SEQ ID NO: 1156307 - RNA, 19 nt, Artificial Sequence
  Description of Artificial Sequence: Synthetic oligonucleotide
gauccacguaccaggaaua

SEQ ID NO: 1156308 - RNA, 19 nt, Artificial Sequence
  Description of Artificial Sequence: Synthetic oligonucleotide
uugaauccagggagccaua

SEQ ID NO: 1156309 - RNA, 19 nt, Artificial Sequence
  Description of Artificial Sequence: Synthetic oligonucleotide
gaacacccacacagcuagg

SEQ ID NO: 1156310 - RNA, 19 nt, Artificial Sequence
  Description of Artificial Sequence: Synthetic oligonucleotide
ggacaucgagcauuuagua

SEQ ID NO: 1156311 - RNA, 19 nt, Artificial Sequence
  Description of Artificial Sequence: Synthetic oligonucleotide
cagcugaucgucuauguuu

SEQ ID NO: 1156312 - RNA, 19 nt, Artificial Sequence
  Description of Artificial Sequence: Synthetic oligonucleotide
cagucaaaucacacugaaa

SEQ ID NO: 1156313 - RNA, 19 nt, Artificial Sequence
  Description of Artificial Sequence: Synthetic oligonucleotide
gcugcuuacuugaaaggga

SEQ ID NO: 1156314 - RNA, 19 nt, Artificial Sequence
  Description of Artificial Sequence: Synthetic oligonucleotide
auggaauuacagggucugu

SEQ ID NO: 1156315 - RNA, 19 nt, Artificial Sequence
  Description of Artificial Sequence: Synthetic oligonucleotide
gguguggagacugccccag

SEQ ID NO: 1156316 - RNA, 19 nt, Artificial Sequence
  Description of Artificial Sequence: Synthetic oligonucleotide
cugaacacccacacagcua

SEQ ID NO: 1156317 - RNA, 19 nt, Artificial Sequence
  Description of Artificial Sequence: Synthetic oligonucleotide
gggaagguugacucuuauc

SEQ ID NO: 1156318 - RNA, 19 nt, Artificial Sequence
  Description of Artificial Sequence: Synthetic oligonucleotide
aggaucuucuggguugcaa

SEQ ID NO: 1156319 - RNA, 19 nt, Artificial Sequence
  Description of Artificial Sequence: Synthetic oligonucleotide
auacgacuguugagguauc

SEQ ID NO: 1156320 - RNA, 19 nt, Artificial Sequence
  Description of Artificial Sequence: Synthetic oligonucleotide
cacagcuagggccaaaauu

SEQ ID NO: 1156321 - RNA, 19 nt, Artificial Sequence
  Description of Artificial Sequence: Synthetic oligonucleotide
ccauuuaggauacaucuau

SEQ ID NO: 1156322 - RNA, 19 nt, Artificial Sequence
  Description of Artificial Sequence: Synthetic oligonucleotide
ugcucgagcccagcaucgc

SEQ ID NO: 1156323 - RNA, 19 nt, Artificial Sequence
  Description of Artificial Sequence: Synthetic oligonucleotide
guguucacugaggagccaa

SEQ ID NO: 1156324 - RNA, 19 nt, Artificial Sequence
  Description of Artificial Sequence: Synthetic oligonucleotide
caucugcuagggauuuuaa

SEQ ID NO: 1156325 - RNA, 19 nt, Artificial Sequence
  Description of Artificial Sequence: Synthetic oligonucleotide
cacugaacaccaaggcucu

SEQ ID NO: 1156326 - RNA, 19 nt, Artificial Sequence
  Description of Artificial Sequence: Synthetic oligonucleotide
aagggaagguugacucuua

SEQ ID NO: 1156327 - RNA, 19 nt, Artificial Sequence
  Description of Artificial Sequence: Synthetic oligonucleotide
guaucugguuagaugaauu

SEQ ID NO: 1156328 - RNA, 19 nt, Artificial Sequence
  Description of Artificial Sequence: Synthetic oligonucleotide
gcucuuacucuugaaucca

SEQ ID NO: 1156329 - RNA, 19 nt, Artificial Sequence
  Description of Artificial Sequence: Synthetic oligonucleotide
cugguuagaugaauucuuu

SEQ ID NO: 1156330 - RNA, 19 nt, Artificial Sequence
  Description of Artificial Sequence: Synthetic oligonucleotide
gcgaaauugccaaaauacu

SEQ ID NO: 1156331 - RNA, 19 nt, Artificial Sequence
  Description of Artificial Sequence: Synthetic oligonucleotide
caaggcucuuacucuugaa

SEQ ID NO: 1156332 - RNA, 19 nt, Artificial Sequence
  Description of Artificial Sequence: Synthetic oligonucleotide
aacaguccgcugagccugu

SEQ ID NO: 1156333 - RNA, 19 nt, Artificial Sequence
  Description of Artificial Sequence: Synthetic oligonucleotide
augacacagccaggaaaau

SEQ ID NO: 1156334 - RNA, 19 nt, Artificial Sequence
  Description of Artificial Sequence: Synthetic oligonucleotide
agguaucugguuagaugaa

SEQ ID NO: 1156335 - RNA, 19 nt, Artificial Sequence
  Description of Artificial Sequence: Synthetic oligonucleotide
ggaaaauaugcagcagcua

SEQ ID NO: 1156336 - RNA, 19 nt, Artificial Sequence
  Description of Artificial Sequence: Synthetic oligonucleotide
aggaggcaacugcuuguuu

SEQ ID NO: 1156337 - RNA, 19 nt, Artificial Sequence
  Description of Artificial Sequence: Synthetic oligonucleotide
ggcaacguaucaaaacagu

SEQ ID NO: 1156338 - RNA, 19 nt, Artificial Sequence
  Description of Artificial Sequence: Synthetic oligonucleotide
gucaaugcacucuccuauu

SEQ ID NO: 1156339 - RNA, 19 nt, Artificial Sequence
  Description of Artificial Sequence: Synthetic oligonucleotide
caucgagcauuuaguauuu

SEQ ID NO: 1156340 - RNA, 19 nt, Artificial Sequence
  Description of Artificial Sequence: Synthetic oligonucleotide
gcuuauguugagagauguc

SEQ ID NO: 1156341 - RNA, 19 nt, Artificial Sequence
  Description of Artificial Sequence: Synthetic oligonucleotide
caucacuguuagggagaag

SEQ ID NO: 1156342 - RNA, 19 nt, Artificial Sequence
  Description of Artificial Sequence: Synthetic oligonucleotide
gcauggagaccaaagcucu

SEQ ID NO: 1156343 - RNA, 19 nt, Artificial Sequence
  Description of Artificial Sequence: Synthetic oligonucleotide
cugucuguagugcuacuuu

SEQ ID NO: 1156344 - RNA, 19 nt, Artificial Sequence
  Description of Artificial Sequence: Synthetic oligonucleotide
auccagggagccauauaua

SEQ ID NO: 1156345 - RNA, 19 nt, Artificial Sequence
  Description of Artificial Sequence: Synthetic oligonucleotide
cagggcugcuuacuugaaa

SEQ ID NO: 1156346 - RNA, 19 nt, Artificial Sequence
  Description of Artificial Sequence: Synthetic oligonucleotide
aggcacugucucuggccaa

SEQ ID NO: 1156347 - RNA, 19 nt, Artificial Sequence
  Description of Artificial Sequence: Synthetic oligonucleotide
ggagaccaaagcucucaua

SEQ ID NO: 1156348 - RNA, 19 nt, Artificial Sequence
  Description of Artificial Sequence: Synthetic oligonucleotide
gcaucugcuagggauuuua

SEQ ID NO: 1156349 - RNA, 19 nt, Artificial Sequence
  Description of Artificial Sequence: Synthetic oligonucleotide
gcuagggauuuuaaggaau

SEQ ID NO: 1156350 - RNA, 19 nt, Artificial Sequence
  Description of Artificial Sequence: Synthetic oligonucleotide
cacuguuagggagaaguuu

SEQ ID NO: 1156351 - RNA, 19 nt, Artificial Sequence
  Description of Artificial Sequence: Synthetic oligonucleotide
cgugacuuaaauggaauua

SEQ ID NO: 1156352 - RNA, 19 nt, Artificial Sequence
  Description of Artificial Sequence: Synthetic oligonucleotide
agaggccugaugggagaau

SEQ ID NO: 1156353 - RNA, 19 nt, Artificial Sequence
  Description of Artificial Sequence: Synthetic oligonucleotide
gguaucugguuagaugaau

SEQ ID NO: 1156354 - RNA, 19 nt, Artificial Sequence
  Description of Artificial Sequence: Synthetic oligonucleotide
aucgagcauuuaguauuuu

SEQ ID NO: 1156355 - RNA, 19 nt, Artificial Sequence
  Description of Artificial Sequence: Synthetic oligonucleotide
caccuguguacugauugcu

SEQ ID NO: 1156356 - RNA, 19 nt, Artificial Sequence
  Description of Artificial Sequence: Synthetic oligonucleotide
gcucgagcccagcaucgca

SEQ ID NO: 1156357 - RNA, 19 nt, Artificial Sequence
  Description of Artificial Sequence: Synthetic oligonucleotide
gguugacucuuaucuuccu

SEQ ID NO: 1156358 - RNA, 19 nt, Artificial Sequence
  Description of Artificial Sequence: Synthetic oligonucleotide
caccaaggcucuuacucuu

SEQ ID NO: 1156359 - RNA, 19 nt, Artificial Sequence
  Description of Artificial Sequence: Synthetic oligonucleotide
gcauacgacuguugaggua

SEQ ID NO: 1156360 - RNA, 19 nt, Artificial Sequence
  Description of Artificial Sequence: Synthetic oligonucleotide
cuccuauuacagacaggau

SEQ ID NO: 1156361 - RNA, 19 nt, Artificial Sequence
  Description of Artificial Sequence: Synthetic oligonucleotide
ccagggagccauauauaua

SEQ ID NO: 1156362 - RNA, 19 nt, Artificial Sequence
  Description of Artificial Sequence: Synthetic oligonucleotide
gucugugcauacgacuguu

SEQ ID NO: 1156363 - RNA, 19 nt, Artificial Sequence
  Description of Artificial Sequence: Synthetic oligonucleotide
aguggacaucgagcauuua

SEQ ID NO: 1156364 - RNA, 19 nt, Artificial Sequence
  Description of Artificial Sequence: Synthetic oligonucleotide
cguaccaggaauacugcuu

SEQ ID NO: 1156365 - RNA, 19 nt, Artificial Sequence
  Description of Artificial Sequence: Synthetic oligonucleotide
gggugcccuuggaacuguc

SEQ ID NO: 1156366 - RNA, 19 nt, Artificial Sequence
  Description of Artificial Sequence: Synthetic oligonucleotide
aaugcagugacauucaucc

SEQ ID NO: 1156367 - RNA, 19 nt, Artificial Sequence
  Description of Artificial Sequence: Synthetic oligonucleotide
aaacaaaaggguuucagag

SEQ ID NO: 1156368 - RNA, 19 nt, Artificial Sequence
  Description of Artificial Sequence: Synthetic oligonucleotide
agcauagucucuuagaugg

SEQ ID NO: 1156369 - RNA, 19 nt, Artificial Sequence
  Description of Artificial Sequence: Synthetic oligonucleotide
aaacauaauguucuuccac

SEQ ID NO: 1156370 - RNA, 19 nt, Artificial Sequence
  Description of Artificial Sequence: Synthetic oligonucleotide
uauuguuccuuucuggugg

SEQ ID NO: 1156371 - RNA, 19 nt, Artificial Sequence
  Description of Artificial Sequence: Synthetic oligonucleotide
acacguaugaccuccagcc

SEQ ID NO: 1156372 - RNA, 19 nt, Artificial Sequence
  Description of Artificial Sequence: Synthetic oligonucleotide
auaauguucuuccacaguc

SEQ ID NO: 1156373 - RNA, 19 nt, Artificial Sequence
  Description of Artificial Sequence: Synthetic oligonucleotide
aauguucuuccacagucac

SEQ ID NO: 1156374 - RNA, 19 nt, Artificial Sequence
  Description of Artificial Sequence: Synthetic oligonucleotide
ugauccacuguuuaaaagc

SEQ ID NO: 1156375 - RNA, 19 nt, Artificial Sequence
  Description of Artificial Sequence: Synthetic oligonucleotide
aacauaauguucuuccaca

SEQ ID NO: 1156376 - RNA, 19 nt, Artificial Sequence
  Description of Artificial Sequence: Synthetic oligonucleotide
gaugggaucgccuuguuug

SEQ ID NO: 1156377 - RNA, 19 nt, Artificial Sequence
  Description of Artificial Sequence: Synthetic oligonucleotide
aacacguaugaccuccagc

SEQ ID NO: 1156378 - RNA, 19 nt, Artificial Sequence
  Description of Artificial Sequence: Synthetic oligonucleotide
guaguacucggucagaggg

SEQ ID NO: 1156379 - RNA, 19 nt, Artificial Sequence
  Description of Artificial Sequence: Synthetic oligonucleotide
aacaaauccagccugugaa

SEQ ID NO: 1156380 - RNA, 19 nt, Artificial Sequence
  Description of Artificial Sequence: Synthetic oligonucleotide
ucuggguacaaucauacuc

SEQ ID NO: 1156381 - RNA, 19 nt, Artificial Sequence
  Description of Artificial Sequence: Synthetic oligonucleotide
uucaaugauagaauuauuu

SEQ ID NO: 1156382 - RNA, 19 nt, Artificial Sequence
  Description of Artificial Sequence: Synthetic oligonucleotide
aaggaaaccaguccggggu

SEQ ID NO: 1156383 - RNA, 19 nt, Artificial Sequence
  Description of Artificial Sequence: Synthetic oligonucleotide
cucauuaaucccaaccucc

SEQ ID NO: 1156384 - RNA, 19 nt, Artificial Sequence
  Description of Artificial Sequence: Synthetic oligonucleotide
uugaucuggaaucucguug

SEQ ID NO: 1156385 - RNA, 19 nt, Artificial Sequence
  Description of Artificial Sequence: Synthetic oligonucleotide
aaaggaaaccaguccgggg

SEQ ID NO: 1156386 - RNA, 19 nt, Artificial Sequence
  Description of Artificial Sequence: Synthetic oligonucleotide
aaaacauaauguucuucca

SEQ ID NO: 1156387 - RNA, 19 nt, Artificial Sequence
  Description of Artificial Sequence: Synthetic oligonucleotide
guaaaauaccccugugugg

SEQ ID NO: 1156388 - RNA, 19 nt, Artificial Sequence
  Description of Artificial Sequence: Synthetic oligonucleotide
ucuaguucaaugauagaau

SEQ ID NO: 1156389 - RNA, 19 nt, Artificial Sequence
  Description of Artificial Sequence: Synthetic oligonucleotide
uccacuguuuaaaagcgug

SEQ ID NO: 1156390 - RNA, 19 nt, Artificial Sequence
  Description of Artificial Sequence: Synthetic oligonucleotide
ugcgcagggauuuuaauga

SEQ ID NO: 1156391 - RNA, 19 nt, Artificial Sequence
  Description of Artificial Sequence: Synthetic oligonucleotide
ugugaaguugaucuggaau

SEQ ID NO: 1156392 - RNA, 19 nt, Artificial Sequence
  Description of Artificial Sequence: Synthetic oligonucleotide
augacugaggaauguggcc

SEQ ID NO: 1156393 - RNA, 19 nt, Artificial Sequence
  Description of Artificial Sequence: Synthetic oligonucleotide
gguacaaucauacucugug

SEQ ID NO: 1156394 - RNA, 19 nt, Artificial Sequence
  Description of Artificial Sequence: Synthetic oligonucleotide
ugauagaauuauuuugcca

SEQ ID NO: 1156395 - RNA, 19 nt, Artificial Sequence
  Description of Artificial Sequence: Synthetic oligonucleotide
uguuggugugaccagaccu

SEQ ID NO: 1156396 - RNA, 19 nt, Artificial Sequence
  Description of Artificial Sequence: Synthetic oligonucleotide
agaaccuugucuccacgcc

SEQ ID NO: 1156397 - RNA, 19 nt, Artificial Sequence
  Description of Artificial Sequence: Synthetic oligonucleotide
auagaauuauuuugccauc

SEQ ID NO: 1156398 - RNA, 19 nt, Artificial Sequence
  Description of Artificial Sequence: Synthetic oligonucleotide
agaagaucggccuuguccu

SEQ ID NO: 1156399 - RNA, 19 nt, Artificial Sequence
  Description of Artificial Sequence: Synthetic oligonucleotide
acaucaaaguuccucagga

SEQ ID NO: 1156400 - RNA, 19 nt, Artificial Sequence
  Description of Artificial Sequence: Synthetic oligonucleotide
gguaaaauaccccugugug

SEQ ID NO: 1156401 - RNA, 19 nt, Artificial Sequence
  Description of Artificial Sequence: Synthetic oligonucleotide
ucaaacaaaaggguuucag

SEQ ID NO: 1156402 - RNA, 19 nt, Artificial Sequence
  Description of Artificial Sequence: Synthetic oligonucleotide
auagaagugaccaaggaaa

SEQ ID NO: 1156403 - RNA, 19 nt, Artificial Sequence
  Description of Artificial Sequence: Synthetic oligonucleotide
accucugggcuauuguucc

SEQ ID NO: 1156404 - RNA, 19 nt, Artificial Sequence
  Description of Artificial Sequence: Synthetic oligonucleotide
auuaaucccaaccuccaga

SEQ ID NO: 1156405 - RNA, 19 nt, Artificial Sequence
  Description of Artificial Sequence: Synthetic oligonucleotide
aggcagaugccauuugcgc

SEQ ID NO: 1156406 - RNA, 19 nt, Artificial Sequence
  Description of Artificial Sequence: Synthetic oligonucleotide
uguaaugcagugacauuca

SEQ ID NO: 1156407 - RNA, 19 nt, Artificial Sequence
  Description of Artificial Sequence: Synthetic oligonucleotide
aguucaaugauagaauuau

SEQ ID NO: 1156408 - RNA, 19 nt, Artificial Sequence
  Description of Artificial Sequence: Synthetic oligonucleotide
uuaaaagcgugucuggauu

SEQ ID NO: 1156409 - RNA, 19 nt, Artificial Sequence
  Description of Artificial Sequence: Synthetic oligonucleotide
cugugaaggacauucuccc

SEQ ID NO: 1156410 - RNA, 19 nt, Artificial Sequence
  Description of Artificial Sequence: Synthetic oligonucleotide
gaugcuccgagucuuugag

SEQ ID NO: 1156411 - RNA, 19 nt, Artificial Sequence
  Description of Artificial Sequence: Synthetic oligonucleotide
ucuugguacacuuccagau

SEQ ID NO: 1156412 - RNA, 19 nt, Artificial Sequence
  Description of Artificial Sequence: Synthetic oligonucleotide
aguugccucuccucgagac

SEQ ID NO: 1156413 - RNA, 19 nt, Artificial Sequence
  Description of Artificial Sequence: Synthetic oligonucleotide
aucgaugguacauuuacau

SEQ ID NO: 1156414 - RNA, 19 nt, Artificial Sequence
  Description of Artificial Sequence: Synthetic oligonucleotide
aauggcaccgugauagaag

SEQ ID NO: 1156415 - RNA, 19 nt, Artificial Sequence
  Description of Artificial Sequence: Synthetic oligonucleotide
uuuaaaagcgugucuggau

SEQ ID NO: 1156416 - RNA, 19 nt, Artificial Sequence
  Description of Artificial Sequence: Synthetic oligonucleotide
uucacguuccaucuuguuc

SEQ ID NO: 1156417 - RNA, 19 nt, Artificial Sequence
  Description of Artificial Sequence: Synthetic oligonucleotide
augggaguugagcacuggc

SEQ ID NO: 1156418 - RNA, 19 nt, Artificial Sequence
  Description of Artificial Sequence: Synthetic oligonucleotide
cuugguaguacucggucag

SEQ ID NO: 1156419 - RNA, 19 nt, Artificial Sequence
  Description of Artificial Sequence: Synthetic oligonucleotide
aaaagcgugucuggauugg

SEQ ID NO: 1156420 - RNA, 19 nt, Artificial Sequence
  Description of Artificial Sequence: Synthetic oligonucleotide
gaugacugaggaauguggc

SEQ ID NO: 1156421 - RNA, 19 nt, Artificial Sequence
  Description of Artificial Sequence: Synthetic oligonucleotide
agugcggaucuucacguuc

SEQ ID NO: 1156422 - RNA, 19 nt, Artificial Sequence
  Description of Artificial Sequence: Synthetic oligonucleotide
gucucuuagauggaggugc

SEQ ID NO: 1156423 - RNA, 19 nt, Artificial Sequence
  Description of Artificial Sequence: Synthetic oligonucleotide
augauugugaugucuaguu

SEQ ID NO: 1156424 - RNA, 19 nt, Artificial Sequence
  Description of Artificial Sequence: Synthetic oligonucleotide
agggauuuuaaugaacuga

SEQ ID NO: 1156425 - RNA, 19 nt, Artificial Sequence
  Description of Artificial Sequence: Synthetic oligonucleotide
aucccguuggcauguaggg

SEQ ID NO: 1156426 - RNA, 19 nt, Artificial Sequence
  Description of Artificial Sequence: Synthetic oligonucleotide
aacauagcucauucugggu

SEQ ID NO: 1156427 - RNA, 19 nt, Artificial Sequence
  Description of Artificial Sequence: Synthetic oligonucleotide
ugaugucuaguucaaugau

SEQ ID NO: 1156428 - RNA, 19 nt, Artificial Sequence
  Description of Artificial Sequence: Synthetic oligonucleotide
ugggcuauuguuccuuucu

SEQ ID NO: 1156429 - RNA, 19 nt, Artificial Sequence
  Description of Artificial Sequence: Synthetic oligonucleotide
uuggggccaacauagcuca

SEQ ID NO: 1156430 - RNA, 19 nt, Artificial Sequence
  Description of Artificial Sequence: Synthetic oligonucleotide
caucccguuggcauguagg

SEQ ID NO: 1156431 - RNA, 19 nt, Artificial Sequence
  Description of Artificial Sequence: Synthetic oligonucleotide
auuucugcccggaugauug

SEQ ID NO: 1156432 - RNA, 19 nt, Artificial Sequence
  Description of Artificial Sequence: Synthetic oligonucleotide
aaucauacucugugaaguu

SEQ ID NO: 1156433 - RNA, 19 nt, Artificial Sequence
  Description of Artificial Sequence: Synthetic oligonucleotide
uagaauuauuuugccaucu

SEQ ID NO: 1156434 - RNA, 19 nt, Artificial Sequence
  Description of Artificial Sequence: Synthetic oligonucleotide
ucagaggguacagaaguug

SEQ ID NO: 1156435 - RNA, 19 nt, Artificial Sequence
  Description of Artificial Sequence: Synthetic oligonucleotide
gugggcauggauuucugcc

SEQ ID NO: 1156436 - RNA, 19 nt, Artificial Sequence
  Description of Artificial Sequence: Synthetic oligonucleotide
acauucaucccguuggcau

SEQ ID NO: 1156437 - RNA, 19 nt, Artificial Sequence
  Description of Artificial Sequence: Synthetic oligonucleotide
guguaaugcagugacauuc

SEQ ID NO: 1156438 - RNA, 19 nt, Artificial Sequence
  Description of Artificial Sequence: Synthetic oligonucleotide
accgugauagaagugacca

SEQ ID NO: 1156439 - RNA, 19 nt, Artificial Sequence
  Description of Artificial Sequence: Synthetic oligonucleotide
aaggcagagucgugucugg

SEQ ID NO: 1156440 - RNA, 19 nt, Artificial Sequence
  Description of Artificial Sequence: Synthetic oligonucleotide
gauccggauggugagcugg

SEQ ID NO: 1156441 - RNA, 19 nt, Artificial Sequence
  Description of Artificial Sequence: Synthetic oligonucleotide
cauagcucauucuggguac

SEQ ID NO: 1156442 - RNA, 19 nt, Artificial Sequence
  Description of Artificial Sequence: Synthetic oligonucleotide
cugauccacuguuuaaaag

SEQ ID NO: 1156443 - RNA, 19 nt, Artificial Sequence
  Description of Artificial Sequence: Synthetic oligonucleotide
guaaccuggauuuccagaa

SEQ ID NO: 1156444 - RNA, 19 nt, Artificial Sequence
  Description of Artificial Sequence: Synthetic oligonucleotide
ucgccuuguuuguaagugg

SEQ ID NO: 1156445 - RNA, 19 nt, Artificial Sequence
  Description of Artificial Sequence: Synthetic oligonucleotide
uuaaugguagaugggaguu

SEQ ID NO: 1156446 - RNA, 19 nt, Artificial Sequence
  Description of Artificial Sequence: Synthetic oligonucleotide
gcauguagggcucggaccg

SEQ ID NO: 1156447 - RNA, 19 nt, Artificial Sequence
  Description of Artificial Sequence: Synthetic oligonucleotide
gauuccuucucaucaccac

SEQ ID NO: 1156448 - RNA, 19 nt, Artificial Sequence
  Description of Artificial Sequence: Synthetic oligonucleotide
caggcagaugccauuugcg

SEQ ID NO: 1156449 - RNA, 19 nt, Artificial Sequence
  Description of Artificial Sequence: Synthetic oligonucleotide
acauagcucauucugggua

SEQ ID NO: 1156450 - RNA, 19 nt, Artificial Sequence
  Description of Artificial Sequence: Synthetic oligonucleotide
gguagaugggaguugagca

SEQ ID NO: 1156451 - RNA, 19 nt, Artificial Sequence
  Description of Artificial Sequence: Synthetic oligonucleotide
agaagugaccaaggaaagg

SEQ ID NO: 1156452 - RNA, 19 nt, Artificial Sequence
  Description of Artificial Sequence: Synthetic oligonucleotide
ggcgucaacacguaugacc

SEQ ID NO: 1156453 - RNA, 19 nt, Artificial Sequence
  Description of Artificial Sequence: Synthetic oligonucleotide
aagcuuaaugguagauggg

SEQ ID NO: 1156454 - RNA, 19 nt, Artificial Sequence
  Description of Artificial Sequence: Synthetic oligonucleotide
aggguuuacguccccuccg

SEQ ID NO: 1156455 - RNA, 19 nt, Artificial Sequence
  Description of Artificial Sequence: Synthetic oligonucleotide
ugguagaugggaguugagc

SEQ ID NO: 1156456 - RNA, 19 nt, Artificial Sequence
  Description of Artificial Sequence: Synthetic oligonucleotide
aaauaccccugugugguca

SEQ ID NO: 1156457 - RNA, 19 nt, Artificial Sequence
  Description of Artificial Sequence: Synthetic oligonucleotide
uguaguccgaguugccucu

SEQ ID NO: 1156458 - RNA, 19 nt, Artificial Sequence
  Description of Artificial Sequence: Synthetic oligonucleotide
auggcaccgugauagaagu

SEQ ID NO: 1156459 - RNA, 19 nt, Artificial Sequence
  Description of Artificial Sequence: Synthetic oligonucleotide
uccccuccgaacacgcugg

SEQ ID NO: 1156460 - RNA, 19 nt, Artificial Sequence
  Description of Artificial Sequence: Synthetic oligonucleotide
cuuguuuguaaguggcauc

SEQ ID NO: 1156461 - RNA, 19 nt, Artificial Sequence
  Description of Artificial Sequence: Synthetic oligonucleotide
ucggucagaggguacagaa

SEQ ID NO: 1156462 - RNA, 19 nt, Artificial Sequence
  Description of Artificial Sequence: Synthetic oligonucleotide
gccaacauagcucauucug

SEQ ID NO: 1156463 - RNA, 19 nt, Artificial Sequence
  Description of Artificial Sequence: Synthetic oligonucleotide
ucaugaugggaucgccuug

SEQ ID NO: 1156464 - RNA, 19 nt, Artificial Sequence
  Description of Artificial Sequence: Synthetic oligonucleotide
cacgccaaggaucuccugc

SEQ ID NO: 1156465 - RNA, 19 nt, Artificial Sequence
  Description of Artificial Sequence: Synthetic oligonucleotide
aucccaaccuccagaaggc

SEQ ID NO: 1156466 - RNA, 19 nt, Artificial Sequence
  Description of Artificial Sequence: Synthetic oligonucleotide
cugcgcagggauuuuaaug

SEQ ID NO: 1156467 - RNA, 19 nt, Artificial Sequence
  Description of Artificial Sequence: Synthetic oligonucleotide
gucagcggcuuccucauag

SEQ ID NO: 1156468 - RNA, 19 nt, Artificial Sequence
  Description of Artificial Sequence: Synthetic oligonucleotide
uggaagggaggguuuacgu

SEQ ID NO: 1156469 - RNA, 19 nt, Artificial Sequence
  Description of Artificial Sequence: Synthetic oligonucleotide
ugucuccacgccaaggauc

SEQ ID NO: 1156470 - RNA, 19 nt, Artificial Sequence
  Description of Artificial Sequence: Synthetic oligonucleotide
uaugaccuccagccagccg

SEQ ID NO: 1156471 - RNA, 19 nt, Artificial Sequence
  Description of Artificial Sequence: Synthetic oligonucleotide
gguacauuuacaucaaagu

SEQ ID NO: 1156472 - RNA, 19 nt, Artificial Sequence
  Description of Artificial Sequence: Synthetic oligonucleotide
cacugugcagacacugucc

SEQ ID NO: 1156473 - RNA, 19 nt, Artificial Sequence
  Description of Artificial Sequence: Synthetic oligonucleotide
uccccuugguaguacucgg

SEQ ID NO: 1156474 - RNA, 19 nt, Artificial Sequence
  Description of Artificial Sequence: Synthetic oligonucleotide
gauggaggugcagaugggc

SEQ ID NO: 1156475 - RNA, 19 nt, Artificial Sequence
  Description of Artificial Sequence: Synthetic oligonucleotide
cucauucuggguacaauca

SEQ ID NO: 1156476 - RNA, 19 nt, Artificial Sequence
  Description of Artificial Sequence: Synthetic oligonucleotide
cugaguuacaggggcaggg

SEQ ID NO: 1156477 - RNA, 19 nt, Artificial Sequence
  Description of Artificial Sequence: Synthetic oligonucleotide
aucgccuuguuuguaagug

SEQ ID NO: 1156478 - RNA, 19 nt, Artificial Sequence
  Description of Artificial Sequence: Synthetic oligonucleotide
guuacaggggcagggaccc

SEQ ID NO: 1156479 - RNA, 19 nt, Artificial Sequence
  Description of Artificial Sequence: Synthetic oligonucleotide
ucugcccggaugauuguga

SEQ ID NO: 1156480 - RNA, 19 nt, Artificial Sequence
  Description of Artificial Sequence: Synthetic oligonucleotide
ugguaguacucggucagag

SEQ ID NO: 1156481 - RNA, 19 nt, Artificial Sequence
  Description of Artificial Sequence: Synthetic oligonucleotide
ccagccgucacucagauca

SEQ ID NO: 1156482 - RNA, 19 nt, Artificial Sequence
  Description of Artificial Sequence: Synthetic oligonucleotide
gaggguuuacguccccucc

SEQ ID NO: 1156483 - RNA, 19 nt, Artificial Sequence
  Description of Artificial Sequence: Synthetic oligonucleotide
ccugugaaggacauucucc

SEQ ID NO: 1156484 - RNA, 19 nt, Artificial Sequence
  Description of Artificial Sequence: Synthetic oligonucleotide
ggagucacugaguggaugc

SEQ ID NO: 1156485 - RNA, 19 nt, Artificial Sequence
  Description of Artificial Sequence: Synthetic oligonucleotide
uagaugggaguugagcacu

SEQ ID NO: 1156486 - RNA, 19 nt, Artificial Sequence
  Description of Artificial Sequence: Synthetic oligonucleotide
aguacguccucuccaaaua

SEQ ID NO: 1156487 - RNA, 19 nt, Artificial Sequence
  Description of Artificial Sequence: Synthetic oligonucleotide
cauucaucccguuggcaug

SEQ ID NO: 1156488 - RNA, 19 nt, Artificial Sequence
  Description of Artificial Sequence: Synthetic oligonucleotide
uuugcgcugccuaggggca

SEQ ID NO: 1156489 - RNA, 19 nt, Artificial Sequence
  Description of Artificial Sequence: Synthetic oligonucleotide
uguccagcuagggacaccu

SEQ ID NO: 1156490 - RNA, 19 nt, Artificial Sequence
  Description of Artificial Sequence: Synthetic oligonucleotide
uccggggucucaugagugg

SEQ ID NO: 1156491 - RNA, 19 nt, Artificial Sequence
  Description of Artificial Sequence: Synthetic oligonucleotide
ggaugacugaggaaugugg

SEQ ID NO: 1156492 - RNA, 19 nt, Artificial Sequence
  Description of Artificial Sequence: Synthetic oligonucleotide
ucacugaguggaugcuccg

SEQ ID NO: 1156493 - RNA, 19 nt, Artificial Sequence
  Description of Artificial Sequence: Synthetic oligonucleotide
acuguaaaccucugggcua

SEQ ID NO: 1156494 - RNA, 19 nt, Artificial Sequence
  Description of Artificial Sequence: Synthetic oligonucleotide
guuuacguccccuccgaac

SEQ ID NO: 1156495 - RNA, 19 nt, Artificial Sequence
  Description of Artificial Sequence: Synthetic oligonucleotide
uguuccuuucuggugggca

SEQ ID NO: 1156496 - RNA, 19 nt, Artificial Sequence
  Description of Artificial Sequence: Synthetic oligonucleotide
ccucauagguuacuguugg

SEQ ID NO: 1156497 - RNA, 19 nt, Artificial Sequence
  Description of Artificial Sequence: Synthetic oligonucleotide
acuguuggugugaccagac

SEQ ID NO: 1156498 - RNA, 19 nt, Artificial Sequence
  Description of Artificial Sequence: Synthetic oligonucleotide
cugagagcggcugaagcgc

SEQ ID NO: 1156499 - RNA, 19 nt, Artificial Sequence
  Description of Artificial Sequence: Synthetic oligonucleotide
uggcauguagggcucggac

SEQ ID NO: 1156500 - RNA, 19 nt, Artificial Sequence
  Description of Artificial Sequence: Synthetic oligonucleotide
gguaguacucggucagagg

SEQ ID NO: 1156501 - RNA, 19 nt, Artificial Sequence
  Description of Artificial Sequence: Synthetic oligonucleotide
uugccaagcugguaaccug

SEQ ID NO: 1156502 - RNA, 19 nt, Artificial Sequence
  Description of Artificial Sequence: Synthetic oligonucleotide
ucuucacguuccaucuugu

SEQ ID NO: 1156503 - RNA, 19 nt, Artificial Sequence
  Description of Artificial Sequence: Synthetic oligonucleotide
uaguacucggucagagggu

SEQ ID NO: 1156504 - RNA, 19 nt, Artificial Sequence
  Description of Artificial Sequence: Synthetic oligonucleotide
agcgaguacguccucucca

SEQ ID NO: 1156505 - RNA, 19 nt, Artificial Sequence
  Description of Artificial Sequence: Synthetic oligonucleotide
aaauggcaccgugauagaa

SEQ ID NO: 1156506 - RNA, 19 nt, Artificial Sequence
  Description of Artificial Sequence: Synthetic oligonucleotide
cuccucgagacauggguug

SEQ ID NO: 1156507 - RNA, 19 nt, Artificial Sequence
  Description of Artificial Sequence: Synthetic oligonucleotide
uccgcagugcggaucuuca

SEQ ID NO: 1156508 - RNA, 19 nt, Artificial Sequence
  Description of Artificial Sequence: Synthetic oligonucleotide
uagguuacuguugguguga

SEQ ID NO: 1156509 - RNA, 19 nt, Artificial Sequence
  Description of Artificial Sequence: Synthetic oligonucleotide
gugaccaaggaaaggugag

SEQ ID NO: 1156510 - RNA, 19 nt, Artificial Sequence
  Description of Artificial Sequence: Synthetic oligonucleotide
agaggguacagaaguuggg

SEQ ID NO: 1156511 - RNA, 19 nt, Artificial Sequence
  Description of Artificial Sequence: Synthetic oligonucleotide
cuguaguccgaguugccuc

SEQ ID NO: 1156512 - RNA, 19 nt, Artificial Sequence
  Description of Artificial Sequence: Synthetic oligonucleotide
gaacacgcuggagaagcag

SEQ ID NO: 1156513 - RNA, 19 nt, Artificial Sequence
  Description of Artificial Sequence: Synthetic oligonucleotide
cacuguuuaaaagcguguc

SEQ ID NO: 1156514 - RNA, 19 nt, Artificial Sequence
  Description of Artificial Sequence: Synthetic oligonucleotide
uggugugaccagaccuccg

SEQ ID NO: 1156515 - RNA, 19 nt, Artificial Sequence
  Description of Artificial Sequence: Synthetic oligonucleotide
ggugagcccacacugguac

SEQ ID NO: 1156516 - RNA, 19 nt, Artificial Sequence
  Description of Artificial Sequence: Synthetic oligonucleotide
gaugucuaguucaaugaua

SEQ ID NO: 1156517 - RNA, 19 nt, Artificial Sequence
  Description of Artificial Sequence: Synthetic oligonucleotide
cuuaaugguagaugggagu

SEQ ID NO: 1156518 - RNA, 19 nt, Artificial Sequence
  Description of Artificial Sequence: Synthetic oligonucleotide
gacgguaaaauaccccugu

SEQ ID NO: 1156519 - RNA, 19 nt, Artificial Sequence
  Description of Artificial Sequence: Synthetic oligonucleotide
ucaucccguuggcauguag

SEQ ID NO: 1156520 - RNA, 19 nt, Artificial Sequence
  Description of Artificial Sequence: Synthetic oligonucleotide
ucuccucgagacauggguu

SEQ ID NO: 1156521 - RNA, 19 nt, Artificial Sequence
  Description of Artificial Sequence: Synthetic oligonucleotide
ugagagcggcugaagcgca

SEQ ID NO: 1156522 - RNA, 19 nt, Artificial Sequence
  Description of Artificial Sequence: Synthetic oligonucleotide
aucaggggcgucaacacgu

SEQ ID NO: 1156523 - RNA, 19 nt, Artificial Sequence
  Description of Artificial Sequence: Synthetic oligonucleotide
cuccccuugguaguacucg

SEQ ID NO: 1156524 - RNA, 19 nt, Artificial Sequence
  Description of Artificial Sequence: Synthetic oligonucleotide
gcagaugccauuugcgcug

SEQ ID NO: 1156525 - RNA, 19 nt, Artificial Sequence
  Description of Artificial Sequence: Synthetic oligonucleotide
uuccagaucgaugguacau

SEQ ID NO: 1156526 - RNA, 19 nt, Artificial Sequence
  Description of Artificial Sequence: Synthetic oligonucleotide
gaugguacauuuacaucaa

SEQ ID NO: 1156527 - RNA, 19 nt, Artificial Sequence
  Description of Artificial Sequence: Synthetic oligonucleotide
caccgugauagaagugacc

SEQ ID NO: 1156528 - RNA, 19 nt, Artificial Sequence
  Description of Artificial Sequence: Synthetic oligonucleotide
cagaucacuguaguccgag

SEQ ID NO: 1156529 - RNA, 19 nt, Artificial Sequence
  Description of Artificial Sequence: Synthetic oligonucleotide
cauuugcgcugccuagggg

SEQ ID NO: 1156530 - RNA, 19 nt, Artificial Sequence
  Description of Artificial Sequence: Synthetic oligonucleotide
auggguugcuugugccaac

SEQ ID NO: 1156531 - RNA, 19 nt, Artificial Sequence
  Description of Artificial Sequence: Synthetic oligonucleotide
ggcauguagggcucggacc

SEQ ID NO: 1156532 - RNA, 19 nt, Artificial Sequence
  Description of Artificial Sequence: Synthetic oligonucleotide
uacucggucagaggguaca

SEQ ID NO: 1156533 - RNA, 19 nt, Artificial Sequence
  Description of Artificial Sequence: Synthetic oligonucleotide
aguccggggucucaugagu

SEQ ID NO: 1156534 - RNA, 19 nt, Artificial Sequence
  Description of Artificial Sequence: Synthetic oligonucleotide
ggcagagucgugucugggg

SEQ ID NO: 1156535 - RNA, 19 nt, Artificial Sequence
  Description of Artificial Sequence: Synthetic oligonucleotide
acgccaaggaucuccugcu

SEQ ID NO: 1156536 - RNA, 19 nt, Artificial Sequence
  Description of Artificial Sequence: Synthetic oligonucleotide
ugagcugcguacaguucuc

SEQ ID NO: 1156537 - RNA, 19 nt, Artificial Sequence
  Description of Artificial Sequence: Synthetic oligonucleotide
ggugugaccagaccuccgc

SEQ ID NO: 1156538 - RNA, 19 nt, Artificial Sequence
  Description of Artificial Sequence: Synthetic oligonucleotide
cagacacuguccagcuagg

SEQ ID NO: 1156539 - RNA, 19 nt, Artificial Sequence
  Description of Artificial Sequence: Synthetic oligonucleotide
cagcuagggacaccugggg

SEQ ID NO: 1156540 - RNA, 19 nt, Artificial Sequence
  Description of Artificial Sequence: Synthetic oligonucleotide
gguaaccuggauuuccaga

SEQ ID NO: 1156541 - RNA, 19 nt, Artificial Sequence
  Description of Artificial Sequence: Synthetic oligonucleotide
gcuuaaugguagaugggag

SEQ ID NO: 1156542 - RNA, 19 nt, Artificial Sequence
  Description of Artificial Sequence: Synthetic oligonucleotide
gggauuuuaaugaacugaa

SEQ ID NO: 1156543 - RNA, 19 nt, Artificial Sequence
  Description of Artificial Sequence: Synthetic oligonucleotide
auguagggcucggaccggc

SEQ ID NO: 1156544 - RNA, 19 nt, Artificial Sequence
  Description of Artificial Sequence: Synthetic oligonucleotide
agguuacuguuggugugac

SEQ ID NO: 1156545 - RNA, 19 nt, Artificial Sequence
  Description of Artificial Sequence: Synthetic oligonucleotide
uuacguccccuccgaacac

SEQ ID NO: 1156546 - RNA, 19 nt, Artificial Sequence
  Description of Artificial Sequence: Synthetic oligonucleotide
gggcauggauuucugcccg

SEQ ID NO: 1156547 - RNA, 19 nt, Artificial Sequence
  Description of Artificial Sequence: Synthetic oligonucleotide
augggaucgccuuguuugu

SEQ ID NO: 1156548 - RNA, 19 nt, Artificial Sequence
  Description of Artificial Sequence: Synthetic oligonucleotide
gcggcugaagcgcacaagc

SEQ ID NO: 1156549 - RNA, 19 nt, Artificial Sequence
  Description of Artificial Sequence: Synthetic oligonucleotide
agucucuuagauggaggug

SEQ ID NO: 1156550 - RNA, 19 nt, Artificial Sequence
  Description of Artificial Sequence: Synthetic oligonucleotide
ugaugggaucgccuuguuu

SEQ ID NO: 1156551 - RNA, 19 nt, Artificial Sequence
  Description of Artificial Sequence: Synthetic oligonucleotide
agauuccuucucaucacca

SEQ ID NO: 1156552 - RNA, 19 nt, Artificial Sequence
  Description of Artificial Sequence: Synthetic oligonucleotide
accuccgcagugcggaucu

SEQ ID NO: 1156553 - RNA, 19 nt, Artificial Sequence
  Description of Artificial Sequence: Synthetic oligonucleotide
ucugcgcagggauuuuaau

SEQ ID NO: 1156554 - RNA, 19 nt, Artificial Sequence
  Description of Artificial Sequence: Synthetic oligonucleotide
acacacugggaacggggcu

SEQ ID NO: 1156555 - RNA, 19 nt, Artificial Sequence
  Description of Artificial Sequence: Synthetic oligonucleotide
auucaucccguuggcaugu

SEQ ID NO: 1156556 - RNA, 19 nt, Artificial Sequence
  Description of Artificial Sequence: Synthetic oligonucleotide
acuguccagcuagggacac

SEQ ID NO: 1156557 - RNA, 19 nt, Artificial Sequence
  Description of Artificial Sequence: Synthetic oligonucleotide
cacuguaaaccucugggcu

SEQ ID NO: 1156558 - RNA, 19 nt, Artificial Sequence
  Description of Artificial Sequence: Synthetic oligonucleotide
auugugaugucuaguucaa

SEQ ID NO: 1156559 - RNA, 19 nt, Artificial Sequence
  Description of Artificial Sequence: Synthetic oligonucleotide
aaaggguuucagagagaca

SEQ ID NO: 1156560 - RNA, 19 nt, Artificial Sequence
  Description of Artificial Sequence: Synthetic oligonucleotide
cauucuggguacaaucaua

SEQ ID NO: 1156561 - RNA, 19 nt, Artificial Sequence
  Description of Artificial Sequence: Synthetic oligonucleotide
accuguaucaggggcguca

SEQ ID NO: 1156562 - RNA, 19 nt, Artificial Sequence
  Description of Artificial Sequence: Synthetic oligonucleotide
uggcugaguuacaggggca

SEQ ID NO: 1156563 - RNA, 19 nt, Artificial Sequence
  Description of Artificial Sequence: Synthetic oligonucleotide
agggagaagaucggccuug

SEQ ID NO: 1156564 - RNA, 19 nt, Artificial Sequence
  Description of Artificial Sequence: Synthetic oligonucleotide
aggauccggauggugagcu

SEQ ID NO: 1156565 - RNA, 19 nt, Artificial Sequence
  Description of Artificial Sequence: Synthetic oligonucleotide
caggccuacagggagucac

SEQ ID NO: 1156566 - RNA, 19 nt, Artificial Sequence
  Description of Artificial Sequence: Synthetic oligonucleotide
guaaaccucugggcuauug

SEQ ID NO: 1156567 - RNA, 19 nt, Artificial Sequence
  Description of Artificial Sequence: Synthetic oligonucleotide
agaucacuguaguccgagu

SEQ ID NO: 1156568 - RNA, 19 nt, Artificial Sequence
  Description of Artificial Sequence: Synthetic oligonucleotide
aaccuugucuccacgccaa

SEQ ID NO: 1156569 - RNA, 19 nt, Artificial Sequence
  Description of Artificial Sequence: Synthetic oligonucleotide
uccucgagacauggguugc

SEQ ID NO: 1156570 - RNA, 19 nt, Artificial Sequence
  Description of Artificial Sequence: Synthetic oligonucleotide
caacacguaugaccuccag

SEQ ID NO: 1156571 - RNA, 19 nt, Artificial Sequence
  Description of Artificial Sequence: Synthetic oligonucleotide
ggcaccgugauagaaguga

SEQ ID NO: 1156572 - RNA, 19 nt, Artificial Sequence
  Description of Artificial Sequence: Synthetic oligonucleotide
uccagaucgaugguacauu

SEQ ID NO: 1156573 - RNA, 19 nt, Artificial Sequence
  Description of Artificial Sequence: Synthetic oligonucleotide
ugucuggauuggagaugag

SEQ ID NO: 1156574 - RNA, 19 nt, Artificial Sequence
  Description of Artificial Sequence: Synthetic oligonucleotide
aggggcgucaacacguaug

SEQ ID NO: 1156575 - RNA, 19 nt, Artificial Sequence
  Description of Artificial Sequence: Synthetic oligonucleotide
guacguccucuccaaauaa

SEQ ID NO: 1156576 - RNA, 19 nt, Artificial Sequence
  Description of Artificial Sequence: Synthetic oligonucleotide
uggguugcuugugccaaca

SEQ ID NO: 1156577 - RNA, 19 nt, Artificial Sequence
  Description of Artificial Sequence: Synthetic oligonucleotide
ugcggaucuucacguucca

SEQ ID NO: 1156578 - RNA, 19 nt, Artificial Sequence
  Description of Artificial Sequence: Synthetic oligonucleotide
aguacucggucagagggua

SEQ ID NO: 1156579 - RNA, 19 nt, Artificial Sequence
  Description of Artificial Sequence: Synthetic oligonucleotide
gggcuucaaaggcagaguc

SEQ ID NO: 1156580 - RNA, 19 nt, Artificial Sequence
  Description of Artificial Sequence: Synthetic oligonucleotide
ggaucuucacguuccaucu

SEQ ID NO: 1156581 - RNA, 19 nt, Artificial Sequence
  Description of Artificial Sequence: Synthetic oligonucleotide
agaugccauuugcgcugcc

SEQ ID NO: 1156582 - RNA, 19 nt, Artificial Sequence
  Description of Artificial Sequence: Synthetic oligonucleotide
ucccguuggcauguagggc

SEQ ID NO: 1156583 - RNA, 19 nt, Artificial Sequence
  Description of Artificial Sequence: Synthetic oligonucleotide
gggacgguaaaauaccccu

SEQ ID NO: 1156584 - RNA, 19 nt, Artificial Sequence
  Description of Artificial Sequence: Synthetic oligonucleotide
ugcccggaugauugugaug

SEQ ID NO: 1156585 - RNA, 19 nt, Artificial Sequence
  Description of Artificial Sequence: Synthetic oligonucleotide
uccgaacacgcuggagaag

SEQ ID NO: 1156586 - RNA, 19 nt, Artificial Sequence
  Description of Artificial Sequence: Synthetic oligonucleotide
gaagcgcacaagccccuuc

SEQ ID NO: 1156587 - RNA, 19 nt, Artificial Sequence
  Description of Artificial Sequence: Synthetic oligonucleotide
cugccagagguguaaugca

SEQ ID NO: 1156588 - RNA, 19 nt, Artificial Sequence
  Description of Artificial Sequence: Synthetic oligonucleotide
uggcaccgugauagaagug

SEQ ID NO: 1156589 - RNA, 19 nt, Artificial Sequence
  Description of Artificial Sequence: Synthetic oligonucleotide
cacacugggaacggggcuc

SEQ ID NO: 1156590 - RNA, 19 nt, Artificial Sequence
  Description of Artificial Sequence: Synthetic oligonucleotide
gaguacguccucuccaaau

SEQ ID NO: 1156591 - RNA, 19 nt, Artificial Sequence
  Description of Artificial Sequence: Synthetic oligonucleotide
cauaauguucuuccacagu

SEQ ID NO: 1156592 - RNA, 19 nt, Artificial Sequence
  Description of Artificial Sequence: Synthetic oligonucleotide
aaaccaguccggggucuca

SEQ ID NO: 1156593 - RNA, 19 nt, Artificial Sequence
  Description of Artificial Sequence: Synthetic oligonucleotide
ucugggcuauuguuccuuu

SEQ ID NO: 1156594 - RNA, 19 nt, Artificial Sequence
  Description of Artificial Sequence: Synthetic oligonucleotide
caguccggggucucaugag

SEQ ID NO: 1156595 - RNA, 19 nt, Artificial Sequence
  Description of Artificial Sequence: Synthetic oligonucleotide
cagcgaguacguccucucc

SEQ ID NO: 1156596 - RNA, 19 nt, Artificial Sequence
  Description of Artificial Sequence: Synthetic oligonucleotide
ggggcgucaacacguauga

SEQ ID NO: 1156597 - RNA, 19 nt, Artificial Sequence
  Description of Artificial Sequence: Synthetic oligonucleotide
ccauuugcgcugccuaggg

SEQ ID NO: 1156598 - RNA, 19 nt, Artificial Sequence
  Description of Artificial Sequence: Synthetic oligonucleotide
cuccgaacacgcuggagaa

SEQ ID NO: 1156599 - RNA, 19 nt, Artificial Sequence
  Description of Artificial Sequence: Synthetic oligonucleotide
gguugcuugugccaacaaa

SEQ ID NO: 1156600 - RNA, 19 nt, Artificial Sequence
  Description of Artificial Sequence: Synthetic oligonucleotide
aggcagagucgugucuggg

SEQ ID NO: 1156601 - RNA, 19 nt, Artificial Sequence
  Description of Artificial Sequence: Synthetic oligonucleotide
cuuccagaucgaugguaca

SEQ ID NO: 1156602 - RNA, 19 nt, Artificial Sequence
  Description of Artificial Sequence: Synthetic oligonucleotide
gaucgccuuguuuguaagu

SEQ ID NO: 1156603 - RNA, 19 nt, Artificial Sequence
  Description of Artificial Sequence: Synthetic oligonucleotide
auccggauggugagcuggg

SEQ ID NO: 1156604 - RNA, 19 nt, Artificial Sequence
  Description of Artificial Sequence: Synthetic oligonucleotide
ucaggggcgucaacacgua

SEQ ID NO: 1156605 - RNA, 19 nt, Artificial Sequence
  Description of Artificial Sequence: Synthetic oligonucleotide
accacuguuauggcuuaaa

SEQ ID NO: 1156606 - RNA, 19 nt, Artificial Sequence
  Description of Artificial Sequence: Synthetic oligonucleotide
cccaaccuccagaaggcag

SEQ ID NO: 1156607 - RNA, 19 nt, Artificial Sequence
  Description of Artificial Sequence: Synthetic oligonucleotide
cucggaccggcuugccaag

SEQ ID NO: 1156608 - RNA, 19 nt, Artificial Sequence
  Description of Artificial Sequence: Synthetic oligonucleotide
cacuguccagcuagggaca

SEQ ID NO: 1156609 - RNA, 19 nt, Artificial Sequence
  Description of Artificial Sequence: Synthetic oligonucleotide
cacuguggagaaccuuguc

SEQ ID NO: 1156610 - RNA, 19 nt, Artificial Sequence
  Description of Artificial Sequence: Synthetic oligonucleotide
uuggcauguagggcucgga

SEQ ID NO: 1156611 - RNA, 19 nt, Artificial Sequence
  Description of Artificial Sequence: Synthetic oligonucleotide
cauguagggcucggaccgg

SEQ ID NO: 1156612 - RNA, 19 nt, Artificial Sequence
  Description of Artificial Sequence: Synthetic oligonucleotide
cagaccuccgcagugcgga

SEQ ID NO: 1156613 - RNA, 19 nt, Artificial Sequence
  Description of Artificial Sequence: Synthetic oligonucleotide
guccggggucucaugagug

SEQ ID NO: 1156614 - RNA, 19 nt, Artificial Sequence
  Description of Artificial Sequence: Synthetic oligonucleotide
agagacacacaggccuaca

SEQ ID NO: 1156615 - RNA, 19 nt, Artificial Sequence
  Description of Artificial Sequence: Synthetic oligonucleotide
gagguguaaugcagugaca

SEQ ID NO: 1156616 - RNA, 19 nt, Artificial Sequence
  Description of Artificial Sequence: Synthetic oligonucleotide
gguuacuguuggugugacc

SEQ ID NO: 1156617 - RNA, 19 nt, Artificial Sequence
  Description of Artificial Sequence: Synthetic oligonucleotide
ggggucucaugaguggugc

SEQ ID NO: 1156618 - RNA, 19 nt, Artificial Sequence
  Description of Artificial Sequence: Synthetic oligonucleotide
ggggacgguaaaauacccc

SEQ ID NO: 1156619 - RNA, 19 nt, Artificial Sequence
  Description of Artificial Sequence: Synthetic oligonucleotide
accaguccggggucucaug

SEQ ID NO: 1156620 - RNA, 19 nt, Artificial Sequence
  Description of Artificial Sequence: Synthetic oligonucleotide
aaccaguccggggucucau

SEQ ID NO: 1156621 - RNA, 19 nt, Artificial Sequence
  Description of Artificial Sequence: Synthetic oligonucleotide
ggaggguuuacguccccuc

SEQ ID NO: 1156622 - RNA, 19 nt, Artificial Sequence
  Description of Artificial Sequence: Synthetic oligonucleotide
ggacgguaaaauaccccug

SEQ ID NO: 1156623 - RNA, 19 nt, Artificial Sequence
  Description of Artificial Sequence: Synthetic oligonucleotide
ccaaauaaaaugggucuga

SEQ ID NO: 1156624 - RNA, 19 nt, Artificial Sequence
  Description of Artificial Sequence: Synthetic oligonucleotide
cacguaugaccuccagcca

SEQ ID NO: 1156625 - RNA, 19 nt, Artificial Sequence
  Description of Artificial Sequence: Synthetic oligonucleotide
cuugccaagcugguaaccu

SEQ ID NO: 1156626 - RNA, 19 nt, Artificial Sequence
  Description of Artificial Sequence: Synthetic oligonucleotide
ggcagaugccauuugcgcu

SEQ ID NO: 1156627 - RNA, 19 nt, Artificial Sequence
  Description of Artificial Sequence: Synthetic oligonucleotide
agagcggcugaagcgcaca

SEQ ID NO: 1156628 - RNA, 19 nt, Artificial Sequence
  Description of Artificial Sequence: Synthetic oligonucleotide
guccgaguugccucuccuc

SEQ ID NO: 1156629 - RNA, 19 nt, Artificial Sequence
  Description of Artificial Sequence: Synthetic oligonucleotide
gaguugccucuccucgaga

SEQ ID NO: 1156630 - RNA, 19 nt, Artificial Sequence
  Description of Artificial Sequence: Synthetic oligonucleotide
caucaccacuguuauggcu

SEQ ID NO: 1156631 - RNA, 19 nt, Artificial Sequence
  Description of Artificial Sequence: Synthetic oligonucleotide
ggccuuggcugaguuacag

SEQ ID NO: 1156632 - RNA, 19 nt, Artificial Sequence
  Description of Artificial Sequence: Synthetic oligonucleotide
gcgcacaagccccuuccag

SEQ ID NO: 1156633 - RNA, 19 nt, Artificial Sequence
  Description of Artificial Sequence: Synthetic oligonucleotide
ggcugauccacuguuuaaa

SEQ ID NO: 1156634 - RNA, 19 nt, Artificial Sequence
  Description of Artificial Sequence: Synthetic oligonucleotide
ggaccggcuugccaagcug

SEQ ID NO: 1156635 - RNA, 19 nt, Artificial Sequence
  Description of Artificial Sequence: Synthetic oligonucleotide
ccuugucuccacgccaagg

SEQ ID NO: 1156636 - RNA, 19 nt, Artificial Sequence
  Description of Artificial Sequence: Synthetic oligonucleotide
cuucagcaaugaggauccg

SEQ ID NO: 1156637 - RNA, 19 nt, Artificial Sequence
  Description of Artificial Sequence: Synthetic oligonucleotide
cuguaucaggggcgucaac

SEQ ID NO: 1156638 - RNA, 19 nt, Artificial Sequence
  Description of Artificial Sequence: Synthetic oligonucleotide
ggguuuacguccccuccga

SEQ ID NO: 1156639 - RNA, 19 nt, Artificial Sequence
  Description of Artificial Sequence: Synthetic oligonucleotide
gggaucgccuuguuuguaa

SEQ ID NO: 1156640 - RNA, 19 nt, Artificial Sequence
  Description of Artificial Sequence: Synthetic oligonucleotide
uugcgcugccuaggggcag

SEQ ID NO: 1156641 - RNA, 19 nt, Artificial Sequence
  Description of Artificial Sequence: Synthetic oligonucleotide
gcucggaccggcuugccaa

SEQ ID NO: 1156642 - RNA, 19 nt, Artificial Sequence
  Description of Artificial Sequence: Synthetic oligonucleotide
ggcuugccaagcugguaac

SEQ ID NO: 1156643 - RNA, 19 nt, Artificial Sequence
  Description of Artificial Sequence: Synthetic oligonucleotide
ucggaccggcuugccaagc

SEQ ID NO: 1156644 - RNA, 19 nt, Artificial Sequence
  Description of Artificial Sequence: Synthetic oligonucleotide
cagccgucacucagaucac

SEQ ID NO: 1156645 - RNA, 19 nt, Artificial Sequence
  Description of Artificial Sequence: Synthetic oligonucleotide
gcagugcggaucuucacgu

SEQ ID NO: 1156646 - RNA, 19 nt, Artificial Sequence
  Description of Artificial Sequence: Synthetic oligonucleotide
agccagcgaguacguccuc

SEQ ID NO: 1156647 - RNA, 19 nt, Artificial Sequence
  Description of Artificial Sequence: Synthetic oligonucleotide
augaugggaucgccuuguu

SEQ ID NO: 1156648 - RNA, 19 nt, Artificial Sequence
  Description of Artificial Sequence: Synthetic oligonucleotide
gagcugcguacaguucuca

SEQ ID NO: 1156649 - RNA, 19 nt, Artificial Sequence
  Description of Artificial Sequence: Synthetic oligonucleotide
ugggaucgccuuguuugua

SEQ ID NO: 1156650 - RNA, 19 nt, Artificial Sequence
  Description of Artificial Sequence: Synthetic oligonucleotide
cuccgcagugcggaucuuc

SEQ ID NO: 1156651 - RNA, 19 nt, Artificial Sequence
  Description of Artificial Sequence: Synthetic oligonucleotide
ccaacaaauccagccugug

SEQ ID NO: 1156652 - RNA, 19 nt, Artificial Sequence
  Description of Artificial Sequence: Synthetic oligonucleotide
gagagcggcugaagcgcac

SEQ ID NO: 1156653 - RNA, 19 nt, Artificial Sequence
  Description of Artificial Sequence: Synthetic oligonucleotide
gagcggcugaagcgcacaa

SEQ ID NO: 1156654 - RNA, 19 nt, Artificial Sequence
  Description of Artificial Sequence: Synthetic oligonucleotide
cacuuccagaucgauggua

SEQ ID NO: 1156655 - RNA, 19 nt, Artificial Sequence
  Description of Artificial Sequence: Synthetic oligonucleotide
guucaaugauagaauuauu

SEQ ID NO: 1156656 - RNA, 19 nt, Artificial Sequence
  Description of Artificial Sequence: Synthetic oligonucleotide
cacugaguggaugcuccga

SEQ ID NO: 1156657 - RNA, 19 nt, Artificial Sequence
  Description of Artificial Sequence: Synthetic oligonucleotide
gcgaguacguccucuccaa

SEQ ID NO: 1156658 - RNA, 19 nt, Artificial Sequence
  Description of Artificial Sequence: Synthetic oligonucleotide
ccagcgaguacguccucuc

SEQ ID NO: 1156659 - RNA, 19 nt, Artificial Sequence
  Description of Artificial Sequence: Synthetic oligonucleotide
cccguuggcauguagggcu

SEQ ID NO: 1156660 - RNA, 19 nt, Artificial Sequence
  Description of Artificial Sequence: Synthetic oligonucleotide
gcaccgugauagaagugac

SEQ ID NO: 1156661 - RNA, 19 nt, Artificial Sequence
  Description of Artificial Sequence: Synthetic oligonucleotide
ugaagcgcacaagccccuu

SEQ ID NO: 1156662 - RNA, 19 nt, Artificial Sequence
  Description of Artificial Sequence: Synthetic oligonucleotide
gagggagaagaucggccuu

SEQ ID NO: 1156663 - RNA, 19 nt, Artificial Sequence
  Description of Artificial Sequence: Synthetic oligonucleotide
gguggaagggaggguuuac

SEQ ID NO: 1156664 - RNA, 19 nt, Artificial Sequence
  Description of Artificial Sequence: Synthetic oligonucleotide
cugaguggaugcuccgagu

SEQ ID NO: 1156665 - RNA, 19 nt, Artificial Sequence
  Description of Artificial Sequence: Synthetic oligonucleotide
guacucggucagaggguac

SEQ ID NO: 1156666 - RNA, 19 nt, Artificial Sequence
  Description of Artificial Sequence: Synthetic oligonucleotide
gaccuccgcagugcggauc

SEQ ID NO: 1156667 - RNA, 19 nt, Artificial Sequence
  Description of Artificial Sequence: Synthetic oligonucleotide
ggauccggauggugagcug

SEQ ID NO: 1156668 - RNA, 19 nt, Artificial Sequence
  Description of Artificial Sequence: Synthetic oligonucleotide
gaucggccuuguccucaca

SEQ ID NO: 1156669 - RNA, 19 nt, Artificial Sequence
  Description of Artificial Sequence: Synthetic oligonucleotide
ggauuuccagaagauuccu

SEQ ID NO: 1156670 - RNA, 19 nt, Artificial Sequence
  Description of Artificial Sequence: Synthetic oligonucleotide
agaccuccgcagugcggau

SEQ ID NO: 1156671 - RNA, 19 nt, Artificial Sequence
  Description of Artificial Sequence: Synthetic oligonucleotide
cucggucagaggguacaga

SEQ ID NO: 1156672 - RNA, 19 nt, Artificial Sequence
  Description of Artificial Sequence: Synthetic oligonucleotide
uggggccaacauagcucau

SEQ ID NO: 1156673 - RNA, 19 nt, Artificial Sequence
  Description of Artificial Sequence: Synthetic oligonucleotide
gggcugauccacuguuuaa

SEQ ID NO: 1156674 - RNA, 19 nt, Artificial Sequence
  Description of Artificial Sequence: Synthetic oligonucleotide
ccacuguuauggcuuaaaa

SEQ ID NO: 1156675 - RNA, 19 nt, Artificial Sequence
  Description of Artificial Sequence: Synthetic oligonucleotide
ugggaacggggcuccccuu

SEQ ID NO: 1156676 - RNA, 19 nt, Artificial Sequence
  Description of Artificial Sequence: Synthetic oligonucleotide
gaggugcagaugggcuuca

SEQ ID NO: 1156677 - RNA, 19 nt, Artificial Sequence
  Description of Artificial Sequence: Synthetic oligonucleotide
ccaguccggggucucauga

SEQ ID NO: 1156678 - RNA, 19 nt, Artificial Sequence
  Description of Artificial Sequence: Synthetic oligonucleotide
gguguaaugcagugacauu

SEQ ID NO: 1156679 - RNA, 19 nt, Artificial Sequence
  Description of Artificial Sequence: Synthetic oligonucleotide
gguuuacguccccuccgaa

SEQ ID NO: 1156680 - RNA, 19 nt, Artificial Sequence
  Description of Artificial Sequence: Synthetic oligonucleotide
uggcugccagagguguaau

SEQ ID NO: 1156681 - RNA, 19 nt, Artificial Sequence
  Description of Artificial Sequence: Synthetic oligonucleotide
acaggccuacagggaguca

SEQ ID NO: 1156682 - RNA, 19 nt, Artificial Sequence
  Description of Artificial Sequence: Synthetic oligonucleotide
guaguccgaguugccucuc

SEQ ID NO: 1156683 - RNA, 19 nt, Artificial Sequence
  Description of Artificial Sequence: Synthetic oligonucleotide
gcugcguacaguucucauu

SEQ ID NO: 1156684 - RNA, 19 nt, Artificial Sequence
  Description of Artificial Sequence: Synthetic oligonucleotide
gcgcagggauuuuaaugaa

SEQ ID NO: 1156685 - RNA, 19 nt, Artificial Sequence
  Description of Artificial Sequence: Synthetic oligonucleotide
ggucaugaugggaucgccu

SEQ ID NO: 1156686 - RNA, 19 nt, Artificial Sequence
  Description of Artificial Sequence: Synthetic oligonucleotide
gcauggauuucugcccgga

SEQ ID NO: 1156687 - RNA, 19 nt, Artificial Sequence
  Description of Artificial Sequence: Synthetic oligonucleotide
cggaugauugugaugucua

SEQ ID NO: 1156688 - RNA, 19 nt, Artificial Sequence
  Description of Artificial Sequence: Synthetic oligonucleotide
cuucacguuccaucuuguu

SEQ ID NO: 1156689 - RNA, 19 nt, Artificial Sequence
  Description of Artificial Sequence: Synthetic oligonucleotide
cgaaugucacaggccuugg

SEQ ID NO: 1156690 - RNA, 19 nt, Artificial Sequence
  Description of Artificial Sequence: Synthetic oligonucleotide
aggugagcccacacuggua

SEQ ID NO: 1156691 - RNA, 19 nt, Artificial Sequence
  Description of Artificial Sequence: Synthetic oligonucleotide
ggcuggcagucuuggucac

SEQ ID NO: 1156692 - RNA, 19 nt, Artificial Sequence
  Description of Artificial Sequence: Synthetic oligonucleotide
ccacuguuuaaaagcgugu

SEQ ID NO: 1156693 - RNA, 19 nt, Artificial Sequence
  Description of Artificial Sequence: Synthetic oligonucleotide
ggcucggaccggcuugcca

SEQ ID NO: 1156694 - RNA, 19 nt, Artificial Sequence
  Description of Artificial Sequence: Synthetic oligonucleotide
gugagcccacacugguacu

SEQ ID NO: 1156695 - RNA, 19 nt, Artificial Sequence
  Description of Artificial Sequence: Synthetic oligonucleotide
caucugcgcagggauuuua

SEQ ID NO: 1156696 - RNA, 19 nt, Artificial Sequence
  Description of Artificial Sequence: Synthetic oligonucleotide
guagggcucggaccggcuu

SEQ ID NO: 1156697 - RNA, 19 nt, Artificial Sequence
  Description of Artificial Sequence: Synthetic oligonucleotide
ucuccacgccaaggaucuc

SEQ ID NO: 1156698 - RNA, 19 nt, Artificial Sequence
  Description of Artificial Sequence: Synthetic oligonucleotide
ccgaguugccucuccucga

SEQ ID NO: 1156699 - RNA, 19 nt, Artificial Sequence
  Description of Artificial Sequence: Synthetic oligonucleotide
ggcaucugcgcagggauuu

SEQ ID NO: 1156700 - RNA, 19 nt, Artificial Sequence
  Description of Artificial Sequence: Synthetic oligonucleotide
ccgugauagaagugaccaa

SEQ ID NO: 1156701 - RNA, 19 nt, Artificial Sequence
  Description of Artificial Sequence: Synthetic oligonucleotide
ccagaucgaugguacauuu

SEQ ID NO: 1156702 - RNA, 19 nt, Artificial Sequence
  Description of Artificial Sequence: Synthetic oligonucleotide
ggugagcugggcaggaauu

SEQ ID NO: 1156703 - RNA, 19 nt, Artificial Sequence
  Description of Artificial Sequence: Synthetic oligonucleotide
caccuguaucaggggcguc

SEQ ID NO: 1156704 - RNA, 19 nt, Artificial Sequence
  Description of Artificial Sequence: Synthetic oligonucleotide
cgucaacacguaugaccuc

SEQ ID NO: 1156705 - RNA, 19 nt, Artificial Sequence
  Description of Artificial Sequence: Synthetic oligonucleotide
gggcgucaacacguaugac

SEQ ID NO: 1156706 - RNA, 19 nt, Artificial Sequence
  Description of Artificial Sequence: Synthetic oligonucleotide
ccacgccaaggaucuccug

SEQ ID NO: 1156707 - RNA, 19 nt, Artificial Sequence
  Description of Artificial Sequence: Synthetic oligonucleotide
cucgagacauggguugcuu

SEQ ID NO: 1156708 - RNA, 19 nt, Artificial Sequence
  Description of Artificial Sequence: Synthetic oligonucleotide
cccuccgaacacgcuggag

SEQ ID NO: 1156709 - RNA, 19 nt, Artificial Sequence
  Description of Artificial Sequence: Synthetic oligonucleotide
cguccucuccaaauaaaau

SEQ ID NO: 1156710 - RNA, 19 nt, Artificial Sequence
  Description of Artificial Sequence: Synthetic oligonucleotide
ccggaugauugugaugucu

SEQ ID NO: 1156711 - RNA, 19 nt, Artificial Sequence
  Description of Artificial Sequence: Synthetic oligonucleotide
gcaccuguaucaggggcgu

SEQ ID NO: 1156712 - RNA, 19 nt, Artificial Sequence
  Description of Artificial Sequence: Synthetic oligonucleotide
ccgagucuuugagaaagcu

SEQ ID NO: 1156713 - RNA, 19 nt, Artificial Sequence
  Description of Artificial Sequence: Synthetic oligonucleotide
gggaggguuuacguccccu

SEQ ID NO: 1156714 - RNA, 19 nt, Artificial Sequence
  Description of Artificial Sequence: Synthetic oligonucleotide
gccagccgucacucagauc

SEQ ID NO: 1156715 - RNA, 19 nt, Artificial Sequence
  Description of Artificial Sequence: Synthetic oligonucleotide
cagugcggaucuucacguu

SEQ ID NO: 1156716 - RNA, 19 nt, Artificial Sequence
  Description of Artificial Sequence: Synthetic oligonucleotide
gccagcgaguacguccucu

SEQ ID NO: 1156717 - RNA, 19 nt, Artificial Sequence
  Description of Artificial Sequence: Synthetic oligonucleotide
ggggccaacauagcucauu

SEQ ID NO: 1156718 - RNA, 19 nt, Artificial Sequence
  Description of Artificial Sequence: Synthetic oligonucleotide
caggggcgucaacacguau

SEQ ID NO: 1156719 - RNA, 19 nt, Artificial Sequence
  Description of Artificial Sequence: Synthetic oligonucleotide
ggauuucugcccggaugau

SEQ ID NO: 1156720 - RNA, 19 nt, Artificial Sequence
  Description of Artificial Sequence: Synthetic oligonucleotide
ggggcuccccuugguagua

SEQ ID NO: 1156721 - RNA, 19 nt, Artificial Sequence
  Description of Artificial Sequence: Synthetic oligonucleotide
ccaagcugguaaccuggau

SEQ ID NO: 1156722 - RNA, 19 nt, Artificial Sequence
  Description of Artificial Sequence: Synthetic oligonucleotide
cgaguacguccucuccaaa

SEQ ID NO: 1156723 - RNA, 19 nt, Artificial Sequence
  Description of Artificial Sequence: Synthetic oligonucleotide
gcggaucuucacguuccau

SEQ ID NO: 1156724 - RNA, 19 nt, Artificial Sequence
  Description of Artificial Sequence: Synthetic oligonucleotide
ccggggucucaugaguggu

SEQ ID NO: 1156725 - RNA, 19 nt, Artificial Sequence
  Description of Artificial Sequence: Synthetic oligonucleotide
ccucgagacauggguugcu

SEQ ID NO: 1156726 - RNA, 19 nt, Artificial Sequence
  Description of Artificial Sequence: Synthetic oligonucleotide
ccccuccgaacacgcugga

SEQ ID NO: 1156727 - RNA, 19 nt, Artificial Sequence
  Description of Artificial Sequence: Synthetic oligonucleotide
gcaucugcgcagggauuuu

SEQ ID NO: 1156728 - RNA, 19 nt, Artificial Sequence
  Description of Artificial Sequence: Synthetic oligonucleotide
ccggcuugccaagcuggua

SEQ ID NO: 1156729 - RNA, 19 nt, Artificial Sequence
  Description of Artificial Sequence: Synthetic oligonucleotide
cggaccggcuugccaagcu

SEQ ID NO: 1156730 - RNA, 19 nt, Artificial Sequence
  Description of Artificial Sequence: Synthetic oligonucleotide
cgcugccuaggggcagguc

SEQ ID NO: 1156731 - RNA, 19 nt, Artificial Sequence
  Description of Artificial Sequence: Synthetic oligonucleotide
gcgcugccuaggggcaggu

SEQ ID NO: 1156732 - RNA, 19 nt, Artificial Sequence
  Description of Artificial Sequence: Synthetic oligonucleotide
agugauaucacucaaaggu

SEQ ID NO: 1156733 - RNA, 19 nt, Artificial Sequence
  Description of Artificial Sequence: Synthetic oligonucleotide
gacaauuuaagggagaagg

SEQ ID NO: 1156734 - RNA, 19 nt, Artificial Sequence
  Description of Artificial Sequence: Synthetic oligonucleotide
ugagaggacaauuuaaggg

SEQ ID NO: 1156735 - RNA, 19 nt, Artificial Sequence
  Description of Artificial Sequence: Synthetic oligonucleotide
uauacauacauacuaggga

SEQ ID NO: 1156736 - RNA, 19 nt, Artificial Sequence
  Description of Artificial Sequence: Synthetic oligonucleotide
ucagucuugaauauguggc

SEQ ID NO: 1156737 - RNA, 19 nt, Artificial Sequence
  Description of Artificial Sequence: Synthetic oligonucleotide
uguauacauacauacuagg

SEQ ID NO: 1156738 - RNA, 19 nt, Artificial Sequence
  Description of Artificial Sequence: Synthetic oligonucleotide
acacguaucauauaaauau

SEQ ID NO: 1156739 - RNA, 19 nt, Artificial Sequence
  Description of Artificial Sequence: Synthetic oligonucleotide
acagauaguacauuccuuc

SEQ ID NO: 1156740 - RNA, 19 nt, Artificial Sequence
  Description of Artificial Sequence: Synthetic oligonucleotide
uucugaagcacacggaggg

SEQ ID NO: 1156741 - RNA, 19 nt, Artificial Sequence
  Description of Artificial Sequence: Synthetic oligonucleotide
uguguuuccaugcucacac

SEQ ID NO: 1156742 - RNA, 19 nt, Artificial Sequence
  Description of Artificial Sequence: Synthetic oligonucleotide
aaaagaaauguccauccau

SEQ ID NO: 1156743 - RNA, 19 nt, Artificial Sequence
  Description of Artificial Sequence: Synthetic oligonucleotide
uaguacauuccuuccaugg

SEQ ID NO: 1156744 - RNA, 19 nt, Artificial Sequence
  Description of Artificial Sequence: Synthetic oligonucleotide
uucagaguccgucagagcu

SEQ ID NO: 1156745 - RNA, 19 nt, Artificial Sequence
  Description of Artificial Sequence: Synthetic oligonucleotide
uguacugucuucuccagcc

SEQ ID NO: 1156746 - RNA, 19 nt, Artificial Sequence
  Description of Artificial Sequence: Synthetic oligonucleotide
auuuguccaaacuacaggu

SEQ ID NO: 1156747 - RNA, 19 nt, Artificial Sequence
  Description of Artificial Sequence: Synthetic oligonucleotide
acuguaccaggcuagaguc

SEQ ID NO: 1156748 - RNA, 19 nt, Artificial Sequence
  Description of Artificial Sequence: Synthetic oligonucleotide
aauauguggcucuggcuuc

SEQ ID NO: 1156749 - RNA, 19 nt, Artificial Sequence
  Description of Artificial Sequence: Synthetic oligonucleotide
uauauuuguccaaacuaca

SEQ ID NO: 1156750 - RNA, 19 nt, Artificial Sequence
  Description of Artificial Sequence: Synthetic oligonucleotide
uuuccaugcucacacaagc

SEQ ID NO: 1156751 - RNA, 19 nt, Artificial Sequence
  Description of Artificial Sequence: Synthetic oligonucleotide
aagcgcuccuuacagauag

SEQ ID NO: 1156752 - RNA, 19 nt, Artificial Sequence
  Description of Artificial Sequence: Synthetic oligonucleotide
uuacagauaguacauuccu

SEQ ID NO: 1156753 - RNA, 19 nt, Artificial Sequence
  Description of Artificial Sequence: Synthetic oligonucleotide
ugauaucacucaaagguga

SEQ ID NO: 1156754 - RNA, 19 nt, Artificial Sequence
  Description of Artificial Sequence: Synthetic oligonucleotide
uguggcagcaucuucauuc

SEQ ID NO: 1156755 - RNA, 19 nt, Artificial Sequence
  Description of Artificial Sequence: Synthetic oligonucleotide
agaagauuggccuccucac

SEQ ID NO: 1156756 - RNA, 19 nt, Artificial Sequence
  Description of Artificial Sequence: Synthetic oligonucleotide
uacauacauacuagggagg

SEQ ID NO: 1156757 - RNA, 19 nt, Artificial Sequence
  Description of Artificial Sequence: Synthetic oligonucleotide
cuuacagauaguacauucc

SEQ ID NO: 1156758 - RNA, 19 nt, Artificial Sequence
  Description of Artificial Sequence: Synthetic oligonucleotide
aaaagugugugugugugug

SEQ ID NO: 1156759 - RNA, 19 nt, Artificial Sequence
  Description of Artificial Sequence: Synthetic oligonucleotide
cacacaagccauaggaugg

SEQ ID NO: 1156760 - RNA, 19 nt, Artificial Sequence
  Description of Artificial Sequence: Synthetic oligonucleotide
aaaggugaaaggguccugg

SEQ ID NO: 1156761 - RNA, 19 nt, Artificial Sequence
  Description of Artificial Sequence: Synthetic oligonucleotide
auguccauccauguggucc

SEQ ID NO: 1156762 - RNA, 19 nt, Artificial Sequence
  Description of Artificial Sequence: Synthetic oligonucleotide
aagccauaggaugggagcc

SEQ ID NO: 1156763 - RNA, 19 nt, Artificial Sequence
  Description of Artificial Sequence: Synthetic oligonucleotide
caauuuaagggagaagggg

SEQ ID NO: 1156764 - RNA, 19 nt, Artificial Sequence
  Description of Artificial Sequence: Synthetic oligonucleotide
cucagucuugaauaugugg

SEQ ID NO: 1156765 - RNA, 19 nt, Artificial Sequence
  Description of Artificial Sequence: Synthetic oligonucleotide
uuuacucucugacaacugu

SEQ ID NO: 1156766 - RNA, 19 nt, Artificial Sequence
  Description of Artificial Sequence: Synthetic oligonucleotide
uggggacucaucuucagag

SEQ ID NO: 1156767 - RNA, 19 nt, Artificial Sequence
  Description of Artificial Sequence: Synthetic oligonucleotide
ugucguagaaggcacugcc

SEQ ID NO: 1156768 - RNA, 19 nt, Artificial Sequence
  Description of Artificial Sequence: Synthetic oligonucleotide
caaacuacaggugagagga

SEQ ID NO: 1156769 - RNA, 19 nt, Artificial Sequence
  Description of Artificial Sequence: Synthetic oligonucleotide
agcucuauaguuaagcucu

SEQ ID NO: 1156770 - RNA, 19 nt, Artificial Sequence
  Description of Artificial Sequence: Synthetic oligonucleotide
uuuccauuugaggacuugg

SEQ ID NO: 1156771 - RNA, 19 nt, Artificial Sequence
  Description of Artificial Sequence: Synthetic oligonucleotide
ucagggagcagaagauugg

SEQ ID NO: 1156772 - RNA, 19 nt, Artificial Sequence
  Description of Artificial Sequence: Synthetic oligonucleotide
aucacucaaaggugaaagg

SEQ ID NO: 1156773 - RNA, 19 nt, Artificial Sequence
  Description of Artificial Sequence: Synthetic oligonucleotide
gagugauaucacucaaagg

SEQ ID NO: 1156774 - RNA, 19 nt, Artificial Sequence
  Description of Artificial Sequence: Synthetic oligonucleotide
acucucugacaacuguacc

SEQ ID NO: 1156775 - RNA, 19 nt, Artificial Sequence
  Description of Artificial Sequence: Synthetic oligonucleotide
ucugcuaccuucucuaauc

SEQ ID NO: 1156776 - RNA, 19 nt, Artificial Sequence
  Description of Artificial Sequence: Synthetic oligonucleotide
uguccaaacuacaggugag

SEQ ID NO: 1156777 - RNA, 19 nt, Artificial Sequence
  Description of Artificial Sequence: Synthetic oligonucleotide
uuguucccgagucagggcc

SEQ ID NO: 1156778 - RNA, 19 nt, Artificial Sequence
  Description of Artificial Sequence: Synthetic oligonucleotide
aggaaagcgcuccuuacag

SEQ ID NO: 1156779 - RNA, 19 nt, Artificial Sequence
  Description of Artificial Sequence: Synthetic oligonucleotide
uuuguccaaacuacaggug

SEQ ID NO: 1156780 - RNA, 19 nt, Artificial Sequence
  Description of Artificial Sequence: Synthetic oligonucleotide
ggagugauaucacucaaag

SEQ ID NO: 1156781 - RNA, 19 nt, Artificial Sequence
  Description of Artificial Sequence: Synthetic oligonucleotide
guugaugacaacaagggaa

SEQ ID NO: 1156782 - RNA, 19 nt, Artificial Sequence
  Description of Artificial Sequence: Synthetic oligonucleotide
ugaggguuuugggaaaugg

SEQ ID NO: 1156783 - RNA, 19 nt, Artificial Sequence
  Description of Artificial Sequence: Synthetic oligonucleotide
uccacuucucaucugcuac

SEQ ID NO: 1156784 - RNA, 19 nt, Artificial Sequence
  Description of Artificial Sequence: Synthetic oligonucleotide
ucuugcuggcccuugaccu

SEQ ID NO: 1156785 - RNA, 19 nt, Artificial Sequence
  Description of Artificial Sequence: Synthetic oligonucleotide
caagccauaggaugggagc

SEQ ID NO: 1156786 - RNA, 19 nt, Artificial Sequence
  Description of Artificial Sequence: Synthetic oligonucleotide
aguucuuauugcugugggg

SEQ ID NO: 1156787 - RNA, 19 nt, Artificial Sequence
  Description of Artificial Sequence: Synthetic oligonucleotide
acaauuuaagggagaaggg

SEQ ID NO: 1156788 - RNA, 19 nt, Artificial Sequence
  Description of Artificial Sequence: Synthetic oligonucleotide
ucucugacaacuguaccag

SEQ ID NO: 1156789 - RNA, 19 nt, Artificial Sequence
  Description of Artificial Sequence: Synthetic oligonucleotide
uacauacuagggaggagug

SEQ ID NO: 1156790 - RNA, 19 nt, Artificial Sequence
  Description of Artificial Sequence: Synthetic oligonucleotide
auauuuguccaaacuacag

SEQ ID NO: 1156791 - RNA, 19 nt, Artificial Sequence
  Description of Artificial Sequence: Synthetic oligonucleotide
ucuaaucgggccuccagcu

SEQ ID NO: 1156792 - RNA, 19 nt, Artificial Sequence
  Description of Artificial Sequence: Synthetic oligonucleotide
agaguccuuuucucgggcc

SEQ ID NO: 1156793 - RNA, 19 nt, Artificial Sequence
  Description of Artificial Sequence: Synthetic oligonucleotide
cuauaguuaagcucuccuc

SEQ ID NO: 1156794 - RNA, 19 nt, Artificial Sequence
  Description of Artificial Sequence: Synthetic oligonucleotide
uguuuccaugcucacacaa

SEQ ID NO: 1156795 - RNA, 19 nt, Artificial Sequence
  Description of Artificial Sequence: Synthetic oligonucleotide
acucucagcaggaaagcgc

SEQ ID NO: 1156796 - RNA, 19 nt, Artificial Sequence
  Description of Artificial Sequence: Synthetic oligonucleotide
auacauacuagggaggagu

SEQ ID NO: 1156797 - RNA, 19 nt, Artificial Sequence
  Description of Artificial Sequence: Synthetic oligonucleotide
agauaguacauuccuucca

SEQ ID NO: 1156798 - RNA, 19 nt, Artificial Sequence
  Description of Artificial Sequence: Synthetic oligonucleotide
uacucucugacaacuguac

SEQ ID NO: 1156799 - RNA, 19 nt, Artificial Sequence
  Description of Artificial Sequence: Synthetic oligonucleotide
uguagcucggcuaguggug

SEQ ID NO: 1156800 - RNA, 19 nt, Artificial Sequence
  Description of Artificial Sequence: Synthetic oligonucleotide
ugaacccugagcaccuugc

SEQ ID NO: 1156801 - RNA, 19 nt, Artificial Sequence
  Description of Artificial Sequence: Synthetic oligonucleotide
cagauaguacauuccuucc

SEQ ID NO: 1156802 - RNA, 19 nt, Artificial Sequence
  Description of Artificial Sequence: Synthetic oligonucleotide
guugguugaugacaacaag

SEQ ID NO: 1156803 - RNA, 19 nt, Artificial Sequence
  Description of Artificial Sequence: Synthetic oligonucleotide
agauuggccuccucacccc

SEQ ID NO: 1156804 - RNA, 19 nt, Artificial Sequence
  Description of Artificial Sequence: Synthetic oligonucleotide
aacucugucagcucucguu

SEQ ID NO: 1156805 - RNA, 19 nt, Artificial Sequence
  Description of Artificial Sequence: Synthetic oligonucleotide
acauuccuuccauggaggg

SEQ ID NO: 1156806 - RNA, 19 nt, Artificial Sequence
  Description of Artificial Sequence: Synthetic oligonucleotide
aguacauuccuuccaugga

SEQ ID NO: 1156807 - RNA, 19 nt, Artificial Sequence
  Description of Artificial Sequence: Synthetic oligonucleotide
uccaaacuacaggugagag

SEQ ID NO: 1156808 - RNA, 19 nt, Artificial Sequence
  Description of Artificial Sequence: Synthetic oligonucleotide
uuucuguuggcuugaggcu

SEQ ID NO: 1156809 - RNA, 19 nt, Artificial Sequence
  Description of Artificial Sequence: Synthetic oligonucleotide
aacuacaggugagaggaca

SEQ ID NO: 1156810 - RNA, 19 nt, Artificial Sequence
  Description of Artificial Sequence: Synthetic oligonucleotide
uguguguguguguauacau

SEQ ID NO: 1156811 - RNA, 19 nt, Artificial Sequence
  Description of Artificial Sequence: Synthetic oligonucleotide
ucguagaaggcacugccaa

SEQ ID NO: 1156812 - RNA, 19 nt, Artificial Sequence
  Description of Artificial Sequence: Synthetic oligonucleotide
uucaguugccugaacccug

SEQ ID NO: 1156813 - RNA, 19 nt, Artificial Sequence
  Description of Artificial Sequence: Synthetic oligonucleotide
ggugaaaggguccugggug

SEQ ID NO: 1156814 - RNA, 19 nt, Artificial Sequence
  Description of Artificial Sequence: Synthetic oligonucleotide
agccgaaggaucucugcac

SEQ ID NO: 1156815 - RNA, 19 nt, Artificial Sequence
  Description of Artificial Sequence: Synthetic oligonucleotide
auuccuuccauggaggggu

SEQ ID NO: 1156816 - RNA, 19 nt, Artificial Sequence
  Description of Artificial Sequence: Synthetic oligonucleotide
aagugugugugugugugug

SEQ ID NO: 1156817 - RNA, 19 nt, Artificial Sequence
  Description of Artificial Sequence: Synthetic oligonucleotide
accugggaucccuuguccc

SEQ ID NO: 1156818 - RNA, 19 nt, Artificial Sequence
  Description of Artificial Sequence: Synthetic oligonucleotide
gacaacuguaccaggcuag

SEQ ID NO: 1156819 - RNA, 19 nt, Artificial Sequence
  Description of Artificial Sequence: Synthetic oligonucleotide
cacuuugucacugaugguc

SEQ ID NO: 1156820 - RNA, 19 nt, Artificial Sequence
  Description of Artificial Sequence: Synthetic oligonucleotide
agggccuucacugugucuc

SEQ ID NO: 1156821 - RNA, 19 nt, Artificial Sequence
  Description of Artificial Sequence: Synthetic oligonucleotide
aguccgucagagcugcagg

SEQ ID NO: 1156822 - RNA, 19 nt, Artificial Sequence
  Description of Artificial Sequence: Synthetic oligonucleotide
agccacuuucugcugugcc

SEQ ID NO: 1156823 - RNA, 19 nt, Artificial Sequence
  Description of Artificial Sequence: Synthetic oligonucleotide
uggaugucauccucuaacu

SEQ ID NO: 1156824 - RNA, 19 nt, Artificial Sequence
  Description of Artificial Sequence: Synthetic oligonucleotide
cucucguuuacucucugac

SEQ ID NO: 1156825 - RNA, 19 nt, Artificial Sequence
  Description of Artificial Sequence: Synthetic oligonucleotide
uuccaugcucacacaagcc

SEQ ID NO: 1156826 - RNA, 19 nt, Artificial Sequence
  Description of Artificial Sequence: Synthetic oligonucleotide
cuaccuucucuaaucgggc

SEQ ID NO: 1156827 - RNA, 19 nt, Artificial Sequence
  Description of Artificial Sequence: Synthetic oligonucleotide
ucucguuuacucucugaca

SEQ ID NO: 1156828 - RNA, 19 nt, Artificial Sequence
  Description of Artificial Sequence: Synthetic oligonucleotide
aauguccauccaugugguc

SEQ ID NO: 1156829 - RNA, 19 nt, Artificial Sequence
  Description of Artificial Sequence: Synthetic oligonucleotide
ugacugcaaagccacuggc

SEQ ID NO: 1156830 - RNA, 19 nt, Artificial Sequence
  Description of Artificial Sequence: Synthetic oligonucleotide
cuagggaggagugauauca

SEQ ID NO: 1156831 - RNA, 19 nt, Artificial Sequence
  Description of Artificial Sequence: Synthetic oligonucleotide
gaacugacugcaaagccac

SEQ ID NO: 1156832 - RNA, 19 nt, Artificial Sequence
  Description of Artificial Sequence: Synthetic oligonucleotide
ugcuaccuucucuaaucgg

SEQ ID NO: 1156833 - RNA, 19 nt, Artificial Sequence
  Description of Artificial Sequence: Synthetic oligonucleotide
cugacugcaaagccacugg

SEQ ID NO: 1156834 - RNA, 19 nt, Artificial Sequence
  Description of Artificial Sequence: Synthetic oligonucleotide
uaaucgggccuccagcuuc

SEQ ID NO: 1156835 - RNA, 19 nt, Artificial Sequence
  Description of Artificial Sequence: Synthetic oligonucleotide
ucagaguccgucagagcug

SEQ ID NO: 1156836 - RNA, 19 nt, Artificial Sequence
  Description of Artificial Sequence: Synthetic oligonucleotide
aaagugugugugugugugu

SEQ ID NO: 1156837 - RNA, 19 nt, Artificial Sequence
  Description of Artificial Sequence: Synthetic oligonucleotide
gaauauguggcucuggcuu

SEQ ID NO: 1156838 - RNA, 19 nt, Artificial Sequence
  Description of Artificial Sequence: Synthetic oligonucleotide
gugauaucacucaaaggug

SEQ ID NO: 1156839 - RNA, 19 nt, Artificial Sequence
  Description of Artificial Sequence: Synthetic oligonucleotide
cuuuucucgggccagcuca

SEQ ID NO: 1156840 - RNA, 19 nt, Artificial Sequence
  Description of Artificial Sequence: Synthetic oligonucleotide
uccuuucaugugcaggcug

SEQ ID NO: 1156841 - RNA, 19 nt, Artificial Sequence
  Description of Artificial Sequence: Synthetic oligonucleotide
uucuguuggcuugaggcug

SEQ ID NO: 1156842 - RNA, 19 nt, Artificial Sequence
  Description of Artificial Sequence: Synthetic oligonucleotide
gcuaccuucucuaaucggg

SEQ ID NO: 1156843 - RNA, 19 nt, Artificial Sequence
  Description of Artificial Sequence: Synthetic oligonucleotide
aaauguccauccauguggu

SEQ ID NO: 1156844 - RNA, 19 nt, Artificial Sequence
  Description of Artificial Sequence: Synthetic oligonucleotide
cucuaaucgggccuccagc

SEQ ID NO: 1156845 - RNA, 19 nt, Artificial Sequence
  Description of Artificial Sequence: Synthetic oligonucleotide
cucguuuacucucugacaa

SEQ ID NO: 1156846 - RNA, 19 nt, Artificial Sequence
  Description of Artificial Sequence: Synthetic oligonucleotide
uguccauccaugugguccu

SEQ ID NO: 1156847 - RNA, 19 nt, Artificial Sequence
  Description of Artificial Sequence: Synthetic oligonucleotide
uuggcuugaggcugcaagu

SEQ ID NO: 1156848 - RNA, 19 nt, Artificial Sequence
  Description of Artificial Sequence: Synthetic oligonucleotide
caagggaagaugccucccg

SEQ ID NO: 1156849 - RNA, 19 nt, Artificial Sequence
  Description of Artificial Sequence: Synthetic oligonucleotide
ugacaacuguaccaggcua

SEQ ID NO: 1156850 - RNA, 19 nt, Artificial Sequence
  Description of Artificial Sequence: Synthetic oligonucleotide
uguguguguguguguauac

SEQ ID NO: 1156851 - RNA, 19 nt, Artificial Sequence
  Description of Artificial Sequence: Synthetic oligonucleotide
uagaguccuuuucucgggc

SEQ ID NO: 1156852 - RNA, 19 nt, Artificial Sequence
  Description of Artificial Sequence: Synthetic oligonucleotide
ucugucagcucucguuuac

SEQ ID NO: 1156853 - RNA, 19 nt, Artificial Sequence
  Description of Artificial Sequence: Synthetic oligonucleotide
uacagauaguacauuccuu

SEQ ID NO: 1156854 - RNA, 19 nt, Artificial Sequence
  Description of Artificial Sequence: Synthetic oligonucleotide
uuuucucgggccagcucag

SEQ ID NO: 1156855 - RNA, 19 nt, Artificial Sequence
  Description of Artificial Sequence: Synthetic oligonucleotide
cugcuggcgguguagcucg

SEQ ID NO: 1156856 - RNA, 19 nt, Artificial Sequence
  Description of Artificial Sequence: Synthetic oligonucleotide
ugacagggaacugacugca

SEQ ID NO: 1156857 - RNA, 19 nt, Artificial Sequence
  Description of Artificial Sequence: Synthetic oligonucleotide
gugaaaggguccugggugc

SEQ ID NO: 1156858 - RNA, 19 nt, Artificial Sequence
  Description of Artificial Sequence: Synthetic oligonucleotide
ugcuuggacuuccuucagc

SEQ ID NO: 1156859 - RNA, 19 nt, Artificial Sequence
  Description of Artificial Sequence: Synthetic oligonucleotide
cugcuaccuucucuaaucg

SEQ ID NO: 1156860 - RNA, 19 nt, Artificial Sequence
  Description of Artificial Sequence: Synthetic oligonucleotide
cucgaagcugcucuuucag

SEQ ID NO: 1156861 - RNA, 19 nt, Artificial Sequence
  Description of Artificial Sequence: Synthetic oligonucleotide
aacccuguccagcucuacu

SEQ ID NO: 1156862 - RNA, 19 nt, Artificial Sequence
  Description of Artificial Sequence: Synthetic oligonucleotide
aggcuagaguccuuuucuc

SEQ ID NO: 1156863 - RNA, 19 nt, Artificial Sequence
  Description of Artificial Sequence: Synthetic oligonucleotide
aaucgggccuccagcuucc

SEQ ID NO: 1156864 - RNA, 19 nt, Artificial Sequence
  Description of Artificial Sequence: Synthetic oligonucleotide
uaccuucucuaaucgggcc

SEQ ID NO: 1156865 - RNA, 19 nt, Artificial Sequence
  Description of Artificial Sequence: Synthetic oligonucleotide
cagcucuauaguuaagcuc

SEQ ID NO: 1156866 - RNA, 19 nt, Artificial Sequence
  Description of Artificial Sequence: Synthetic oligonucleotide
uucucuuguucccgaguca

SEQ ID NO: 1156867 - RNA, 19 nt, Artificial Sequence
  Description of Artificial Sequence: Synthetic oligonucleotide
ggcuagaguccuuuucucg

SEQ ID NO: 1156868 - RNA, 19 nt, Artificial Sequence
  Description of Artificial Sequence: Synthetic oligonucleotide
ccauuugaggacuugggug

SEQ ID NO: 1156869 - RNA, 19 nt, Artificial Sequence
  Description of Artificial Sequence: Synthetic oligonucleotide
acguaucauauaaauauau

SEQ ID NO: 1156870 - RNA, 19 nt, Artificial Sequence
  Description of Artificial Sequence: Synthetic oligonucleotide
uaccugggaucccuugucc

SEQ ID NO: 1156871 - RNA, 19 nt, Artificial Sequence
  Description of Artificial Sequence: Synthetic oligonucleotide
cuugaauauguggcucugg

SEQ ID NO: 1156872 - RNA, 19 nt, Artificial Sequence
  Description of Artificial Sequence: Synthetic oligonucleotide
acuagggaggagugauauc

SEQ ID NO: 1156873 - RNA, 19 nt, Artificial Sequence
  Description of Artificial Sequence: Synthetic oligonucleotide
ugcacucagcuucaggauu

SEQ ID NO: 1156874 - RNA, 19 nt, Artificial Sequence
  Description of Artificial Sequence: Synthetic oligonucleotide
agagcugcuguccuccccu

SEQ ID NO: 1156875 - RNA, 19 nt, Artificial Sequence
  Description of Artificial Sequence: Synthetic oligonucleotide
gaaagcgcuccuuacagau

SEQ ID NO: 1156876 - RNA, 19 nt, Artificial Sequence
  Description of Artificial Sequence: Synthetic oligonucleotide
guuccuggacuccucgaag

SEQ ID NO: 1156877 - RNA, 19 nt, Artificial Sequence
  Description of Artificial Sequence: Synthetic oligonucleotide
caggagcuucucuuguucc

SEQ ID NO: 1156878 - RNA, 19 nt, Artificial Sequence
  Description of Artificial Sequence: Synthetic oligonucleotide
ugucagcucucguuuacuc

SEQ ID NO: 1156879 - RNA, 19 nt, Artificial Sequence
  Description of Artificial Sequence: Synthetic oligonucleotide
cagaagauuggccuccuca

SEQ ID NO: 1156880 - RNA, 19 nt, Artificial Sequence
  Description of Artificial Sequence: Synthetic oligonucleotide
cauuugaggacuugggugu

SEQ ID NO: 1156881 - RNA, 19 nt, Artificial Sequence
  Description of Artificial Sequence: Synthetic oligonucleotide
ccuccuuucaugugcaggc

SEQ ID NO: 1156882 - RNA, 19 nt, Artificial Sequence
  Description of Artificial Sequence: Synthetic oligonucleotide
guccgucagagcugcaggg

SEQ ID NO: 1156883 - RNA, 19 nt, Artificial Sequence
  Description of Artificial Sequence: Synthetic oligonucleotide
gucucuaacccuguccagc

SEQ ID NO: 1156884 - RNA, 19 nt, Artificial Sequence
  Description of Artificial Sequence: Synthetic oligonucleotide
ccuucaguugccugaaccc

SEQ ID NO: 1156885 - RNA, 19 nt, Artificial Sequence
  Description of Artificial Sequence: Synthetic oligonucleotide
gggaacugacugcaaagcc

SEQ ID NO: 1156886 - RNA, 19 nt, Artificial Sequence
  Description of Artificial Sequence: Synthetic oligonucleotide
gagccucauguccucuggg

SEQ ID NO: 1156887 - RNA, 19 nt, Artificial Sequence
  Description of Artificial Sequence: Synthetic oligonucleotide
ucggcuaguggugcggucc

SEQ ID NO: 1156888 - RNA, 19 nt, Artificial Sequence
  Description of Artificial Sequence: Synthetic oligonucleotide
uacgcuccuugcuccauug

SEQ ID NO: 1156889 - RNA, 19 nt, Artificial Sequence
  Description of Artificial Sequence: Synthetic oligonucleotide
ccaaacuacaggugagagg

SEQ ID NO: 1156890 - RNA, 19 nt, Artificial Sequence
  Description of Artificial Sequence: Synthetic oligonucleotide
aguggugcggucccuggcu

SEQ ID NO: 1156891 - RNA, 19 nt, Artificial Sequence
  Description of Artificial Sequence: Synthetic oligonucleotide
aggugaaaggguccugggu

SEQ ID NO: 1156892 - RNA, 19 nt, Artificial Sequence
  Description of Artificial Sequence: Synthetic oligonucleotide
cauuccuuccauggagggg

SEQ ID NO: 1156893 - RNA, 19 nt, Artificial Sequence
  Description of Artificial Sequence: Synthetic oligonucleotide
agggaggagugauaucacu

SEQ ID NO: 1156894 - RNA, 19 nt, Artificial Sequence
  Description of Artificial Sequence: Synthetic oligonucleotide
cucugacaacuguaccagg

SEQ ID NO: 1156895 - RNA, 19 nt, Artificial Sequence
  Description of Artificial Sequence: Synthetic oligonucleotide
cuucuugucugcuuggacu

SEQ ID NO: 1156896 - RNA, 19 nt, Artificial Sequence
  Description of Artificial Sequence: Synthetic oligonucleotide
uagggaggagugauaucac

SEQ ID NO: 1156897 - RNA, 19 nt, Artificial Sequence
  Description of Artificial Sequence: Synthetic oligonucleotide
ucguuuacucucugacaac

SEQ ID NO: 1156898 - RNA, 19 nt, Artificial Sequence
  Description of Artificial Sequence: Synthetic oligonucleotide
agcgcaacucugucagcuc

SEQ ID NO: 1156899 - RNA, 19 nt, Artificial Sequence
  Description of Artificial Sequence: Synthetic oligonucleotide
cuugucacucucagcagga

SEQ ID NO: 1156900 - RNA, 19 nt, Artificial Sequence
  Description of Artificial Sequence: Synthetic oligonucleotide
auaggaugggagccucaug

SEQ ID NO: 1156901 - RNA, 19 nt, Artificial Sequence
  Description of Artificial Sequence: Synthetic oligonucleotide
ggaggagugauaucacuca

SEQ ID NO: 1156902 - RNA, 19 nt, Artificial Sequence
  Description of Artificial Sequence: Synthetic oligonucleotide
cauccuugucacucucagc

SEQ ID NO: 1156903 - RNA, 19 nt, Artificial Sequence
  Description of Artificial Sequence: Synthetic oligonucleotide
cuuguccuucaguugccug

SEQ ID NO: 1156904 - RNA, 19 nt, Artificial Sequence
  Description of Artificial Sequence: Synthetic oligonucleotide
caugucguagaaggcacug

SEQ ID NO: 1156905 - RNA, 19 nt, Artificial Sequence
  Description of Artificial Sequence: Synthetic oligonucleotide
ugugugugugugugugugu

SEQ ID NO: 1156906 - RNA, 19 nt, Artificial Sequence
  Description of Artificial Sequence: Synthetic oligonucleotide
cucuauaguuaagcucucc

SEQ ID NO: 1156907 - RNA, 19 nt, Artificial Sequence
  Description of Artificial Sequence: Synthetic oligonucleotide
gacuccucgaagcugcucu

SEQ ID NO: 1156908 - RNA, 19 nt, Artificial Sequence
  Description of Artificial Sequence: Synthetic oligonucleotide
gaguccgucagagcugcag

SEQ ID NO: 1156909 - RNA, 19 nt, Artificial Sequence
  Description of Artificial Sequence: Synthetic oligonucleotide
ggugcugguugguugauga

SEQ ID NO: 1156910 - RNA, 19 nt, Artificial Sequence
  Description of Artificial Sequence: Synthetic oligonucleotide
gauaucacucaaaggugaa

SEQ ID NO: 1156911 - RNA, 19 nt, Artificial Sequence
  Description of Artificial Sequence: Synthetic oligonucleotide
gguguagcucggcuagugg

SEQ ID NO: 1156912 - RNA, 19 nt, Artificial Sequence
  Description of Artificial Sequence: Synthetic oligonucleotide
cuuugucacugauggucug

SEQ ID NO: 1156913 - RNA, 19 nt, Artificial Sequence
  Description of Artificial Sequence: Synthetic oligonucleotide
gggaagaugccucccggag

SEQ ID NO: 1156914 - RNA, 19 nt, Artificial Sequence
  Description of Artificial Sequence: Synthetic oligonucleotide
agggcauccuucaugugug

SEQ ID NO: 1156915 - RNA, 19 nt, Artificial Sequence
  Description of Artificial Sequence: Synthetic oligonucleotide
gugugugugugugugugug

SEQ ID NO: 1156916 - RNA, 19 nt, Artificial Sequence
  Description of Artificial Sequence: Synthetic oligonucleotide
gaguccuuuucucgggcca

SEQ ID NO: 1156917 - RNA, 19 nt, Artificial Sequence
  Description of Artificial Sequence: Synthetic oligonucleotide
ugaugacaacaagggaaga

SEQ ID NO: 1156918 - RNA, 19 nt, Artificial Sequence
  Description of Artificial Sequence: Synthetic oligonucleotide
gaggagugauaucacucaa

SEQ ID NO: 1156919 - RNA, 19 nt, Artificial Sequence
  Description of Artificial Sequence: Synthetic oligonucleotide
ccuugucacucucagcagg

SEQ ID NO: 1156920 - RNA, 19 nt, Artificial Sequence
  Description of Artificial Sequence: Synthetic oligonucleotide
uguucccgagucagggccu

SEQ ID NO: 1156921 - RNA, 19 nt, Artificial Sequence
  Description of Artificial Sequence: Synthetic oligonucleotide
agugugugugugugugugu

SEQ ID NO: 1156922 - RNA, 19 nt, Artificial Sequence
  Description of Artificial Sequence: Synthetic oligonucleotide
cagaguccgucagagcugc

SEQ ID NO: 1156923 - RNA, 19 nt, Artificial Sequence
  Description of Artificial Sequence: Synthetic oligonucleotide
uccagccgaaggaucucug

SEQ ID NO: 1156924 - RNA, 19 nt, Artificial Sequence
  Description of Artificial Sequence: Synthetic oligonucleotide
ccaauucuuccccaagaag

SEQ ID NO: 1156925 - RNA, 19 nt, Artificial Sequence
  Description of Artificial Sequence: Synthetic oligonucleotide
uaguggugcggucccuggc

SEQ ID NO: 1156926 - RNA, 19 nt, Artificial Sequence
  Description of Artificial Sequence: Synthetic oligonucleotide
cagggagcagaagauuggc

SEQ ID NO: 1156927 - RNA, 19 nt, Artificial Sequence
  Description of Artificial Sequence: Synthetic oligonucleotide
aggugggaagcaaugggug

SEQ ID NO: 1156928 - RNA, 19 nt, Artificial Sequence
  Description of Artificial Sequence: Synthetic oligonucleotide
acugauggucuggauguca

SEQ ID NO: 1156929 - RNA, 19 nt, Artificial Sequence
  Description of Artificial Sequence: Synthetic oligonucleotide
gacuuccuucagcugcccc

SEQ ID NO: 1156930 - RNA, 19 nt, Artificial Sequence
  Description of Artificial Sequence: Synthetic oligonucleotide
aucugcuaccuucucuaau

SEQ ID NO: 1156931 - RNA, 19 nt, Artificial Sequence
  Description of Artificial Sequence: Synthetic oligonucleotide
gguugaugacaacaaggga

SEQ ID NO: 1156932 - RNA, 19 nt, Artificial Sequence
  Description of Artificial Sequence: Synthetic oligonucleotide
cagggcauccuugucacuc

SEQ ID NO: 1156933 - RNA, 19 nt, Artificial Sequence
  Description of Artificial Sequence: Synthetic oligonucleotide
ggcgguguagcucggcuag

SEQ ID NO: 1156934 - RNA, 19 nt, Artificial Sequence
  Description of Artificial Sequence: Synthetic oligonucleotide
gaugacaacaagggaagau

SEQ ID NO: 1156935 - RNA, 19 nt, Artificial Sequence
  Description of Artificial Sequence: Synthetic oligonucleotide
uccgucagagcugcagggc

SEQ ID NO: 1156936 - RNA, 19 nt, Artificial Sequence
  Description of Artificial Sequence: Synthetic oligonucleotide
uguguguguguguguguau

SEQ ID NO: 1156937 - RNA, 19 nt, Artificial Sequence
  Description of Artificial Sequence: Synthetic oligonucleotide
ggagcucaaccucauucug

SEQ ID NO: 1156938 - RNA, 19 nt, Artificial Sequence
  Description of Artificial Sequence: Synthetic oligonucleotide
guagcucggcuaguggugc

SEQ ID NO: 1156939 - RNA, 19 nt, Artificial Sequence
  Description of Artificial Sequence: Synthetic oligonucleotide
uccuguuucuccgccugca

SEQ ID NO: 1156940 - RNA, 19 nt, Artificial Sequence
  Description of Artificial Sequence: Synthetic oligonucleotide
ggagccucauguccucugg

SEQ ID NO: 1156941 - RNA, 19 nt, Artificial Sequence
  Description of Artificial Sequence: Synthetic oligonucleotide
cuugcuggcccuugaccuc

SEQ ID NO: 1156942 - RNA, 19 nt, Artificial Sequence
  Description of Artificial Sequence: Synthetic oligonucleotide
auaucacucaaaggugaaa

SEQ ID NO: 1156943 - RNA, 19 nt, Artificial Sequence
  Description of Artificial Sequence: Synthetic oligonucleotide
acccuguccagcucuacuu

SEQ ID NO: 1156944 - RNA, 19 nt, Artificial Sequence
  Description of Artificial Sequence: Synthetic oligonucleotide
acaacuguaccaggcuaga

SEQ ID NO: 1156945 - RNA, 19 nt, Artificial Sequence
  Description of Artificial Sequence: Synthetic oligonucleotide
ccuguacgcuccuugcucc

SEQ ID NO: 1156946 - RNA, 19 nt, Artificial Sequence
  Description of Artificial Sequence: Synthetic oligonucleotide
acacggagggccgagcgca

SEQ ID NO: 1156947 - RNA, 19 nt, Artificial Sequence
  Description of Artificial Sequence: Synthetic oligonucleotide
caucagcacuuugucacug

SEQ ID NO: 1156948 - RNA, 19 nt, Artificial Sequence
  Description of Artificial Sequence: Synthetic oligonucleotide
guagaaggcacugccaagu

SEQ ID NO: 1156949 - RNA, 19 nt, Artificial Sequence
  Description of Artificial Sequence: Synthetic oligonucleotide
acauacuagggaggaguga

SEQ ID NO: 1156950 - RNA, 19 nt, Artificial Sequence
  Description of Artificial Sequence: Synthetic oligonucleotide
caggaaagcgcuccuuaca

SEQ ID NO: 1156951 - RNA, 19 nt, Artificial Sequence
  Description of Artificial Sequence: Synthetic oligonucleotide
aggacugacuucucaucuu

SEQ ID NO: 1156952 - RNA, 19 nt, Artificial Sequence
  Description of Artificial Sequence: Synthetic oligonucleotide
ccgagcgcaacucugucag

SEQ ID NO: 1156953 - RNA, 19 nt, Artificial Sequence
  Description of Artificial Sequence: Synthetic oligonucleotide
gaggacuuggguguggggu

SEQ ID NO: 1156954 - RNA, 19 nt, Artificial Sequence
  Description of Artificial Sequence: Synthetic oligonucleotide
acgcuccuugcuccauugg

SEQ ID NO: 1156955 - RNA, 19 nt, Artificial Sequence
  Description of Artificial Sequence: Synthetic oligonucleotide
gcuuucuguuggcuugagg

SEQ ID NO: 1156956 - RNA, 19 nt, Artificial Sequence
  Description of Artificial Sequence: Synthetic oligonucleotide
aaggcacugccaaguucag

SEQ ID NO: 1156957 - RNA, 19 nt, Artificial Sequence
  Description of Artificial Sequence: Synthetic oligonucleotide
ggagaggugggaagcaaug

SEQ ID NO: 1156958 - RNA, 19 nt, Artificial Sequence
  Description of Artificial Sequence: Synthetic oligonucleotide
cagucggccacugacuuca

SEQ ID NO: 1156959 - RNA, 19 nt, Artificial Sequence
  Description of Artificial Sequence: Synthetic oligonucleotide
caacuguaccaggcuagag

SEQ ID NO: 1156960 - RNA, 19 nt, Artificial Sequence
  Description of Artificial Sequence: Synthetic oligonucleotide
agcacacggagggccgagc

SEQ ID NO: 1156961 - RNA, 19 nt, Artificial Sequence
  Description of Artificial Sequence: Synthetic oligonucleotide
ugcggucccuggcuccugc

SEQ ID NO: 1156962 - RNA, 19 nt, Artificial Sequence
  Description of Artificial Sequence: Synthetic oligonucleotide
auauguggcucuggcuucu

SEQ ID NO: 1156963 - RNA, 19 nt, Artificial Sequence
  Description of Artificial Sequence: Synthetic oligonucleotide
uugaccuccugcagcucua

SEQ ID NO: 1156964 - RNA, 19 nt, Artificial Sequence
  Description of Artificial Sequence: Synthetic oligonucleotide
cauacuagggaggagugau

SEQ ID NO: 1156965 - RNA, 19 nt, Artificial Sequence
  Description of Artificial Sequence: Synthetic oligonucleotide
cacacggagggccgagcgc

SEQ ID NO: 1156966 - RNA, 19 nt, Artificial Sequence
  Description of Artificial Sequence: Synthetic oligonucleotide
uugggugugggguggcauu

SEQ ID NO: 1156967 - RNA, 19 nt, Artificial Sequence
  Description of Artificial Sequence: Synthetic oligonucleotide
caggcuagaguccuuuucu

SEQ ID NO: 1156968 - RNA, 19 nt, Artificial Sequence
  Description of Artificial Sequence: Synthetic oligonucleotide
gggaggagugauaucacuc

SEQ ID NO: 1156969 - RNA, 19 nt, Artificial Sequence
  Description of Artificial Sequence: Synthetic oligonucleotide
agcucggcuaguggugcgg

SEQ ID NO: 1156970 - RNA, 19 nt, Artificial Sequence
  Description of Artificial Sequence: Synthetic oligonucleotide
ccccaucccucacaaaagg

SEQ ID NO: 1156971 - RNA, 19 nt, Artificial Sequence
  Description of Artificial Sequence: Synthetic oligonucleotide
uggugcggucccuggcucc

SEQ ID NO: 1156972 - RNA, 19 nt, Artificial Sequence
  Description of Artificial Sequence: Synthetic oligonucleotide
uucucuaaucgggccucca

SEQ ID NO: 1156973 - RNA, 19 nt, Artificial Sequence
  Description of Artificial Sequence: Synthetic oligonucleotide
aggagugauaucacucaaa

SEQ ID NO: 1156974 - RNA, 19 nt, Artificial Sequence
  Description of Artificial Sequence: Synthetic oligonucleotide
uccuuacagauaguacauu

SEQ ID NO: 1156975 - RNA, 19 nt, Artificial Sequence
  Description of Artificial Sequence: Synthetic oligonucleotide
ugucacugauggucuggau

SEQ ID NO: 1156976 - RNA, 19 nt, Artificial Sequence
  Description of Artificial Sequence: Synthetic oligonucleotide
ccucauguccucuggggac

SEQ ID NO: 1156977 - RNA, 19 nt, Artificial Sequence
  Description of Artificial Sequence: Synthetic oligonucleotide
cagccgaaggaucucugca

SEQ ID NO: 1156978 - RNA, 19 nt, Artificial Sequence
  Description of Artificial Sequence: Synthetic oligonucleotide
cagggcauccuucaugugu

SEQ ID NO: 1156979 - RNA, 19 nt, Artificial Sequence
  Description of Artificial Sequence: Synthetic oligonucleotide
gcacacggagggccgagcg

SEQ ID NO: 1156980 - RNA, 19 nt, Artificial Sequence
  Description of Artificial Sequence: Synthetic oligonucleotide
ccugggaucccuugucccc

SEQ ID NO: 1156981 - RNA, 19 nt, Artificial Sequence
  Description of Artificial Sequence: Synthetic oligonucleotide
gggaguucuuauugcugug

SEQ ID NO: 1156982 - RNA, 19 nt, Artificial Sequence
  Description of Artificial Sequence: Synthetic oligonucleotide
guguguguguguguauaca

SEQ ID NO: 1156983 - RNA, 19 nt, Artificial Sequence
  Description of Artificial Sequence: Synthetic oligonucleotide
cagcucuacuuccuucauc

SEQ ID NO: 1156984 - RNA, 19 nt, Artificial Sequence
  Description of Artificial Sequence: Synthetic oligonucleotide
ucuggagcucaaccucauu

SEQ ID NO: 1156985 - RNA, 19 nt, Artificial Sequence
  Description of Artificial Sequence: Synthetic oligonucleotide
guccaaacuacaggugaga

SEQ ID NO: 1156986 - RNA, 19 nt, Artificial Sequence
  Description of Artificial Sequence: Synthetic oligonucleotide
cugugccugggccagggca

SEQ ID NO: 1156987 - RNA, 19 nt, Artificial Sequence
  Description of Artificial Sequence: Synthetic oligonucleotide
ccucugacagggaacugac

SEQ ID NO: 1156988 - RNA, 19 nt, Artificial Sequence
  Description of Artificial Sequence: Synthetic oligonucleotide
cagcccuguacgcuccuug

SEQ ID NO: 1156989 - RNA, 19 nt, Artificial Sequence
  Description of Artificial Sequence: Synthetic oligonucleotide
cugcuuggacuuccuucag

SEQ ID NO: 1156990 - RNA, 19 nt, Artificial Sequence
  Description of Artificial Sequence: Synthetic oligonucleotide
aaagcgcuccuuacagaua

SEQ ID NO: 1156991 - RNA, 19 nt, Artificial Sequence
  Description of Artificial Sequence: Synthetic oligonucleotide
ucccuccuuucaugugcag

SEQ ID NO: 1156992 - RNA, 19 nt, Artificial Sequence
  Description of Artificial Sequence: Synthetic oligonucleotide
gaagcaaugggugcugguu

SEQ ID NO: 1156993 - RNA, 19 nt, Artificial Sequence
  Description of Artificial Sequence: Synthetic oligonucleotide
ggggaguucuuauugcugu

SEQ ID NO: 1156994 - RNA, 19 nt, Artificial Sequence
  Description of Artificial Sequence: Synthetic oligonucleotide
cuucucuaaucgggccucc

SEQ ID NO: 1156995 - RNA, 19 nt, Artificial Sequence
  Description of Artificial Sequence: Synthetic oligonucleotide
gagcgcaacucugucagcu

SEQ ID NO: 1156996 - RNA, 19 nt, Artificial Sequence
  Description of Artificial Sequence: Synthetic oligonucleotide
cugcaaguuccuggacucc

SEQ ID NO: 1156997 - RNA, 19 nt, Artificial Sequence
  Description of Artificial Sequence: Synthetic oligonucleotide
agccauaggaugggagccu

SEQ ID NO: 1156998 - RNA, 19 nt, Artificial Sequence
  Description of Artificial Sequence: Synthetic oligonucleotide
gaugccucccggagcccag

SEQ ID NO: 1156999 - RNA, 19 nt, Artificial Sequence
  Description of Artificial Sequence: Synthetic oligonucleotide
ucccgagucagggccuuca

SEQ ID NO: 1157000 - RNA, 19 nt, Artificial Sequence
  Description of Artificial Sequence: Synthetic oligonucleotide
gucguagaaggcacugcca

SEQ ID NO: 1157001 - RNA, 19 nt, Artificial Sequence
  Description of Artificial Sequence: Synthetic oligonucleotide
ccauauucugcagcagccc

SEQ ID NO: 1157002 - RNA, 19 nt, Artificial Sequence
  Description of Artificial Sequence: Synthetic oligonucleotide
ggccaugucguagaaggca

SEQ ID NO: 1157003 - RNA, 19 nt, Artificial Sequence
  Description of Artificial Sequence: Synthetic oligonucleotide
ggaaagcgcuccuuacaga

SEQ ID NO: 1157004 - RNA, 19 nt, Artificial Sequence
  Description of Artificial Sequence: Synthetic oligonucleotide
uggcgguguagcucggcua

SEQ ID NO: 1157005 - RNA, 19 nt, Artificial Sequence
  Description of Artificial Sequence: Synthetic oligonucleotide
cuggggacucaucuucaga

SEQ ID NO: 1157006 - RNA, 19 nt, Artificial Sequence
  Description of Artificial Sequence: Synthetic oligonucleotide
gcccuugaccuccugcagc

SEQ ID NO: 1157007 - RNA, 19 nt, Artificial Sequence
  Description of Artificial Sequence: Synthetic oligonucleotide
guuucuccgccugcagcug

SEQ ID NO: 1157008 - RNA, 19 nt, Artificial Sequence
  Description of Artificial Sequence: Synthetic oligonucleotide
ggcuugaggcugcaaguuc

SEQ ID NO: 1157009 - RNA, 19 nt, Artificial Sequence
  Description of Artificial Sequence: Synthetic oligonucleotide
agaugccucccggagccca

SEQ ID NO: 1157010 - RNA, 19 nt, Artificial Sequence
  Description of Artificial Sequence: Synthetic oligonucleotide
ugcuggcgguguagcucgg

SEQ ID NO: 1157011 - RNA, 19 nt, Artificial Sequence
  Description of Artificial Sequence: Synthetic oligonucleotide
cagcucaguccugcagugg

SEQ ID NO: 1157012 - RNA, 19 nt, Artificial Sequence
  Description of Artificial Sequence: Synthetic oligonucleotide
gcagcucuauaguuaagcu

SEQ ID NO: 1157013 - RNA, 19 nt, Artificial Sequence
  Description of Artificial Sequence: Synthetic oligonucleotide
gccaugucguagaaggcac

SEQ ID NO: 1157014 - RNA, 19 nt, Artificial Sequence
  Description of Artificial Sequence: Synthetic oligonucleotide
cucuaacccuguccagcuc

SEQ ID NO: 1157015 - RNA, 19 nt, Artificial Sequence
  Description of Artificial Sequence: Synthetic oligonucleotide
guguguguguguguguaua

SEQ ID NO: 1157016 - RNA, 19 nt, Artificial Sequence
  Description of Artificial Sequence: Synthetic oligonucleotide
guguuuccaugcucacaca

SEQ ID NO: 1157017 - RNA, 19 nt, Artificial Sequence
  Description of Artificial Sequence: Synthetic oligonucleotide
ugggugugggguggcauua

SEQ ID NO: 1157018 - RNA, 19 nt, Artificial Sequence
  Description of Artificial Sequence: Synthetic oligonucleotide
gugugugugugugugugua

SEQ ID NO: 1157019 - RNA, 19 nt, Artificial Sequence
  Description of Artificial Sequence: Synthetic oligonucleotide
guguguguguguauacaua

SEQ ID NO: 1157020 - RNA, 19 nt, Artificial Sequence
  Description of Artificial Sequence: Synthetic oligonucleotide
uguacgcuccuugcuccau

SEQ ID NO: 1157021 - RNA, 19 nt, Artificial Sequence
  Description of Artificial Sequence: Synthetic oligonucleotide
aaggguccugggugcugaa

SEQ ID NO: 1157022 - RNA, 19 nt, Artificial Sequence
  Description of Artificial Sequence: Synthetic oligonucleotide
cuucaguugccugaacccu

SEQ ID NO: 1157023 - RNA, 19 nt, Artificial Sequence
  Description of Artificial Sequence: Synthetic oligonucleotide
gccuguguuuccaugcuca

SEQ ID NO: 1157024 - RNA, 19 nt, Artificial Sequence
  Description of Artificial Sequence: Synthetic oligonucleotide
uggcuucucuccuccugua

SEQ ID NO: 1157025 - RNA, 19 nt, Artificial Sequence
  Description of Artificial Sequence: Synthetic oligonucleotide
uaacccuguccagcucuac

SEQ ID NO: 1157026 - RNA, 19 nt, Artificial Sequence
  Description of Artificial Sequence: Synthetic oligonucleotide
ccaggcuagaguccuuuuc

SEQ ID NO: 1157027 - RNA, 19 nt, Artificial Sequence
  Description of Artificial Sequence: Synthetic oligonucleotide
agcagaagauuggccuccu

SEQ ID NO: 1157028 - RNA, 19 nt, Artificial Sequence
  Description of Artificial Sequence: Synthetic oligonucleotide
agggccgagcgcaacucug

SEQ ID NO: 1157029 - RNA, 19 nt, Artificial Sequence
  Description of Artificial Sequence: Synthetic oligonucleotide
cguagaaggcacugccaag

SEQ ID NO: 1157030 - RNA, 19 nt, Artificial Sequence
  Description of Artificial Sequence: Synthetic oligonucleotide
gaagcacacggagggccga

SEQ ID NO: 1157031 - RNA, 19 nt, Artificial Sequence
  Description of Artificial Sequence: Synthetic oligonucleotide
cagagaccccagugcuggc

SEQ ID NO: 1157032 - RNA, 19 nt, Artificial Sequence
  Description of Artificial Sequence: Synthetic oligonucleotide
cugccaucaggacugacuu

SEQ ID NO: 1157033 - RNA, 19 nt, Artificial Sequence
  Description of Artificial Sequence: Synthetic oligonucleotide
cucauguacuccagcaauu

SEQ ID NO: 1157034 - RNA, 19 nt, Artificial Sequence
  Description of Artificial Sequence: Synthetic oligonucleotide
gugugggguggcauuaaaa

SEQ ID NO: 1157035 - RNA, 19 nt, Artificial Sequence
  Description of Artificial Sequence: Synthetic oligonucleotide
agccagucggccacugacu

SEQ ID NO: 1157036 - RNA, 19 nt, Artificial Sequence
  Description of Artificial Sequence: Synthetic oligonucleotide
cacuuccagccugcuggcg

SEQ ID NO: 1157037 - RNA, 19 nt, Artificial Sequence
  Description of Artificial Sequence: Synthetic oligonucleotide
ggcccggagaggugggaag

SEQ ID NO: 1157038 - RNA, 19 nt, Artificial Sequence
  Description of Artificial Sequence: Synthetic oligonucleotide
gacuugggugugggguggc

SEQ ID NO: 1157039 - RNA, 19 nt, Artificial Sequence
  Description of Artificial Sequence: Synthetic oligonucleotide
uuucucgggccagcucagu

SEQ ID NO: 1157040 - RNA, 19 nt, Artificial Sequence
  Description of Artificial Sequence: Synthetic oligonucleotide
cuguccuccccuggcccgg

SEQ ID NO: 1157041 - RNA, 19 nt, Artificial Sequence
  Description of Artificial Sequence: Synthetic oligonucleotide
aguccugcaguggccuccu

SEQ ID NO: 1157042 - RNA, 19 nt, Artificial Sequence
  Description of Artificial Sequence: Synthetic oligonucleotide
cccuguacgcuccuugcuc

SEQ ID NO: 1157043 - RNA, 19 nt, Artificial Sequence
  Description of Artificial Sequence: Synthetic oligonucleotide
guggugcggucccuggcuc

SEQ ID NO: 1157044 - RNA, 19 nt, Artificial Sequence
  Description of Artificial Sequence: Synthetic oligonucleotide
ggguaccugggaucccuug

SEQ ID NO: 1157045 - RNA, 19 nt, Artificial Sequence
  Description of Artificial Sequence: Synthetic oligonucleotide
gcucagucuugaauaugug

SEQ ID NO: 1157046 - RNA, 19 nt, Artificial Sequence
  Description of Artificial Sequence: Synthetic oligonucleotide
cuguacgcuccuugcucca

SEQ ID NO: 1157047 - RNA, 19 nt, Artificial Sequence
  Description of Artificial Sequence: Synthetic oligonucleotide
cucggcuaguggugcgguc

SEQ ID NO: 1157048 - RNA, 19 nt, Artificial Sequence
  Description of Artificial Sequence: Synthetic oligonucleotide
gguaccugggaucccuugu

SEQ ID NO: 1157049 - RNA, 19 nt, Artificial Sequence
  Description of Artificial Sequence: Synthetic oligonucleotide
auacuagggaggagugaua

SEQ ID NO: 1157050 - RNA, 19 nt, Artificial Sequence
  Description of Artificial Sequence: Synthetic oligonucleotide
agcugcagggcagcucagu

SEQ ID NO: 1157051 - RNA, 19 nt, Artificial Sequence
  Description of Artificial Sequence: Synthetic oligonucleotide
ucccggagcccaggaggag

SEQ ID NO: 1157052 - RNA, 19 nt, Artificial Sequence
  Description of Artificial Sequence: Synthetic oligonucleotide
cucugucagcucucguuua

SEQ ID NO: 1157053 - RNA, 19 nt, Artificial Sequence
  Description of Artificial Sequence: Synthetic oligonucleotide
ccuccccuggcccggagag

SEQ ID NO: 1157054 - RNA, 19 nt, Artificial Sequence
  Description of Artificial Sequence: Synthetic oligonucleotide
cuaacccuguccagcucua

SEQ ID NO: 1157055 - RNA, 19 nt, Artificial Sequence
  Description of Artificial Sequence: Synthetic oligonucleotide
uggcccggagaggugggaa

SEQ ID NO: 1157056 - RNA, 19 nt, Artificial Sequence
  Description of Artificial Sequence: Synthetic oligonucleotide
gccccaggagcuucucuug

SEQ ID NO: 1157057 - RNA, 19 nt, Artificial Sequence
  Description of Artificial Sequence: Synthetic oligonucleotide
cagccugcuggcgguguag

SEQ ID NO: 1157058 - RNA, 19 nt, Artificial Sequence
  Description of Artificial Sequence: Synthetic oligonucleotide
gcuggccucugacagggaa

SEQ ID NO: 1157059 - RNA, 19 nt, Artificial Sequence
  Description of Artificial Sequence: Synthetic oligonucleotide
gcucucguuuacucucuga

SEQ ID NO: 1157060 - RNA, 19 nt, Artificial Sequence
  Description of Artificial Sequence: Synthetic oligonucleotide
ccauggagggguggcagag

SEQ ID NO: 1157061 - RNA, 19 nt, Artificial Sequence
  Description of Artificial Sequence: Synthetic oligonucleotide
cacaagccauaggauggga

SEQ ID NO: 1157062 - RNA, 19 nt, Artificial Sequence
  Description of Artificial Sequence: Synthetic oligonucleotide
ccgaaggaucucugcacuc

SEQ ID NO: 1157063 - RNA, 19 nt, Artificial Sequence
  Description of Artificial Sequence: Synthetic oligonucleotide
ggugugggguggcauuaaa

SEQ ID NO: 1157064 - RNA, 19 nt, Artificial Sequence
  Description of Artificial Sequence: Synthetic oligonucleotide
gccgagcgcaacucuguca

SEQ ID NO: 1157065 - RNA, 19 nt, Artificial Sequence
  Description of Artificial Sequence: Synthetic oligonucleotide
gccgaaggaucucugcacu

SEQ ID NO: 1157066 - RNA, 19 nt, Artificial Sequence
  Description of Artificial Sequence: Synthetic oligonucleotide
gagggccgagcgcaacucu

SEQ ID NO: 1157067 - RNA, 19 nt, Artificial Sequence
  Description of Artificial Sequence: Synthetic oligonucleotide
cauaggaugggagccucau

SEQ ID NO: 1157068 - RNA, 19 nt, Artificial Sequence
  Description of Artificial Sequence: Synthetic oligonucleotide
agccacuggccaugucgua

SEQ ID NO: 1157069 - RNA, 19 nt, Artificial Sequence
  Description of Artificial Sequence: Synthetic oligonucleotide
ugggugcugguugguugau

SEQ ID NO: 1157070 - RNA, 19 nt, Artificial Sequence
  Description of Artificial Sequence: Synthetic oligonucleotide
cauggagggguggcagaga

SEQ ID NO: 1157071 - RNA, 19 nt, Artificial Sequence
  Description of Artificial Sequence: Synthetic oligonucleotide
ggaagcaaugggugcuggu

SEQ ID NO: 1157072 - RNA, 19 nt, Artificial Sequence
  Description of Artificial Sequence: Synthetic oligonucleotide
ccucauguacuccagcaau

SEQ ID NO: 1157073 - RNA, 19 nt, Artificial Sequence
  Description of Artificial Sequence: Synthetic oligonucleotide
gccauaggaugggagccuc

SEQ ID NO: 1157074 - RNA, 19 nt, Artificial Sequence
  Description of Artificial Sequence: Synthetic oligonucleotide
ccuggcccggagagguggg

SEQ ID NO: 1157075 - RNA, 19 nt, Artificial Sequence
  Description of Artificial Sequence: Synthetic oligonucleotide
cagcucucguuuacucucu

SEQ ID NO: 1157076 - RNA, 19 nt, Artificial Sequence
  Description of Artificial Sequence: Synthetic oligonucleotide
gcucuauaguuaagcucuc

SEQ ID NO: 1157077 - RNA, 19 nt, Artificial Sequence
  Description of Artificial Sequence: Synthetic oligonucleotide
agcgcuccuuacagauagu

SEQ ID NO: 1157078 - RNA, 19 nt, Artificial Sequence
  Description of Artificial Sequence: Synthetic oligonucleotide
cuaaucgggccuccagcuu

SEQ ID NO: 1157079 - RNA, 19 nt, Artificial Sequence
  Description of Artificial Sequence: Synthetic oligonucleotide
ccagucggccacugacuuc

SEQ ID NO: 1157080 - RNA, 19 nt, Artificial Sequence
  Description of Artificial Sequence: Synthetic oligonucleotide
gcgcuccuuacagauagua

SEQ ID NO: 1157081 - RNA, 19 nt, Artificial Sequence
  Description of Artificial Sequence: Synthetic oligonucleotide
cugcugugccugggccagg

SEQ ID NO: 1157082 - RNA, 19 nt, Artificial Sequence
  Description of Artificial Sequence: Synthetic oligonucleotide
cguuuacucucugacaacu

SEQ ID NO: 1157083 - RNA, 19 nt, Artificial Sequence
  Description of Artificial Sequence: Synthetic oligonucleotide
cuccuuucaugugcaggcu

SEQ ID NO: 1157084 - RNA, 19 nt, Artificial Sequence
  Description of Artificial Sequence: Synthetic oligonucleotide
cuacaggugagaggacaau

SEQ ID NO: 1157085 - RNA, 19 nt, Artificial Sequence
  Description of Artificial Sequence: Synthetic oligonucleotide
cucgggccagcucagucuu

SEQ ID NO: 1157086 - RNA, 19 nt, Artificial Sequence
  Description of Artificial Sequence: Synthetic oligonucleotide
gaccccagugcuggccucu

SEQ ID NO: 1157087 - RNA, 19 nt, Artificial Sequence
  Description of Artificial Sequence: Synthetic oligonucleotide
guacgcuccuugcuccauu

SEQ ID NO: 1157088 - RNA, 19 nt, Artificial Sequence
  Description of Artificial Sequence: Synthetic oligonucleotide
ccauaggaugggagccuca

SEQ ID NO: 1157089 - RNA, 19 nt, Artificial Sequence
  Description of Artificial Sequence: Synthetic oligonucleotide
cuugggugugggguggcau

SEQ ID NO: 1157090 - RNA, 19 nt, Artificial Sequence
  Description of Artificial Sequence: Synthetic oligonucleotide
ccagcucagucuugaauau

SEQ ID NO: 1157091 - RNA, 19 nt, Artificial Sequence
  Description of Artificial Sequence: Synthetic oligonucleotide
cggcuaguggugcgguccc

SEQ ID NO: 1157092 - RNA, 19 nt, Artificial Sequence
  Description of Artificial Sequence: Synthetic oligonucleotide
ccugcagaaggugaggguu

SEQ ID NO: 1157093 - RNA, 19 nt, Artificial Sequence
  Description of Artificial Sequence: Synthetic oligonucleotide
gccagucggccacugacuu

SEQ ID NO: 1157094 - RNA, 19 nt, Artificial Sequence
  Description of Artificial Sequence: Synthetic oligonucleotide
cgagcgcaacucugucagc

SEQ ID NO: 1157095 - RNA, 19 nt, Artificial Sequence
  Description of Artificial Sequence: Synthetic oligonucleotide
cgguguagcucggcuagug

SEQ ID NO: 1157096 - RNA, 19 nt, Artificial Sequence
  Description of Artificial Sequence: Synthetic oligonucleotide
cacggagggccgagcgcaa

SEQ ID NO: 1157097 - RNA, 19 nt, Artificial Sequence
  Description of Artificial Sequence: Synthetic oligonucleotide
cccaggaggagaagagccu

SEQ ID NO: 1157098 - RNA, 19 nt, Artificial Sequence
  Description of Artificial Sequence: Synthetic oligonucleotide
agaguccgucagagcugca

SEQ ID NO: 1157099 - RNA, 19 nt, Artificial Sequence
  Description of Artificial Sequence: Synthetic oligonucleotide
caaugggugcugguugguu

SEQ ID NO: 1157100 - RNA, 19 nt, Artificial Sequence
  Description of Artificial Sequence: Synthetic oligonucleotide
ccggagcccaggaggagaa

SEQ ID NO: 1157101 - RNA, 19 nt, Artificial Sequence
  Description of Artificial Sequence: Synthetic oligonucleotide
gcccuguacgcuccuugcu

SEQ ID NO: 1157102 - RNA, 19 nt, Artificial Sequence
  Description of Artificial Sequence: Synthetic oligonucleotide
gugcggucccuggcuccug

SEQ ID NO: 1157103 - RNA, 19 nt, Artificial Sequence
  Description of Artificial Sequence: Synthetic oligonucleotide
cuggcccggagagguggga

SEQ ID NO: 1157104 - RNA, 19 nt, Artificial Sequence
  Description of Artificial Sequence: Synthetic oligonucleotide
ccaugucguagaaggcacu

SEQ ID NO: 1157105 - RNA, 19 nt, Artificial Sequence
  Description of Artificial Sequence: Synthetic oligonucleotide
ggugcggucccuggcuccu

SEQ ID NO: 1157106 - RNA, 19 nt, Artificial Sequence
  Description of Artificial Sequence: Synthetic oligonucleotide
cuguggcagcaucuucauu

SEQ ID NO: 1157107 - RNA, 19 nt, Artificial Sequence
  Description of Artificial Sequence: Synthetic oligonucleotide
ccuugcuccauuggcuacu

SEQ ID NO: 1157108 - RNA, 19 nt, Artificial Sequence
  Description of Artificial Sequence: Synthetic oligonucleotide
gcaaugggugcugguuggu

SEQ ID NO: 1157109 - RNA, 19 nt, Artificial Sequence
  Description of Artificial Sequence: Synthetic oligonucleotide
gggugugggguggcauuaa

SEQ ID NO: 1157110 - RNA, 19 nt, Artificial Sequence
  Description of Artificial Sequence: Synthetic oligonucleotide
gggccgagcgcaacucugu

SEQ ID NO: 1157111 - RNA, 19 nt, Artificial Sequence
  Description of Artificial Sequence: Synthetic oligonucleotide
ccccaggagcuucucuugu

SEQ ID NO: 1157112 - RNA, 19 nt, Artificial Sequence
  Description of Artificial Sequence: Synthetic oligonucleotide
gcucggcuaguggugcggu

SEQ ID NO: 1157113 - RNA, 19 nt, Artificial Sequence
  Description of Artificial Sequence: Synthetic oligonucleotide
caaccucauucugcuucuu

SEQ ID NO: 1157114 - RNA, 19 nt, Artificial Sequence
  Description of Artificial Sequence: Synthetic oligonucleotide
cccucacaaaaggcacaaa

SEQ ID NO: 1157115 - RNA, 19 nt, Artificial Sequence
  Description of Artificial Sequence: Synthetic oligonucleotide
ggcuaguggugcggucccu

SEQ ID NO: 1157116 - RNA, 19 nt, Artificial Sequence
  Description of Artificial Sequence: Synthetic oligonucleotide
cggagcccaggaggagaag

SEQ ID NO: 1157117 - RNA, 19 nt, Artificial Sequence
  Description of Artificial Sequence: Synthetic oligonucleotide
cagccacuuccagccugcu

SEQ ID NO: 1157118 - RNA, 19 nt, Artificial Sequence
  Description of Artificial Sequence: Synthetic oligonucleotide
gcgguguagcucggcuagu

SEQ ID NO: 1157119 - RNA, 19 nt, Artificial Sequence
  Description of Artificial Sequence: Synthetic oligonucleotide
cggagggccgagcgcaacu

SEQ ID NO: 1157120 - RNA, 19 nt, Artificial Sequence
  Description of Artificial Sequence: Synthetic oligonucleotide
gggguaccugggaucccuu

SEQ ID NO: 1157121 - RNA, 19 nt, Artificial Sequence
  Description of Artificial Sequence: Synthetic oligonucleotide
aaagcaguguucuaucugc

SEQ ID NO: 1157122 - RNA, 19 nt, Artificial Sequence
  Description of Artificial Sequence: Synthetic oligonucleotide
uuaaacgaguucaagaaag

SEQ ID NO: 1157123 - RNA, 19 nt, Artificial Sequence
  Description of Artificial Sequence: Synthetic oligonucleotide
uagcucauaaccaugaugc

SEQ ID NO: 1157124 - RNA, 19 nt, Artificial Sequence
  Description of Artificial Sequence: Synthetic oligonucleotide
auaacugaaaacaauaguc

SEQ ID NO: 1157125 - RNA, 19 nt, Artificial Sequence
  Description of Artificial Sequence: Synthetic oligonucleotide
aauagacugcaguacaauc

SEQ ID NO: 1157126 - RNA, 19 nt, Artificial Sequence
  Description of Artificial Sequence: Synthetic oligonucleotide
agauugaguagucuaaugg

SEQ ID NO: 1157127 - RNA, 19 nt, Artificial Sequence
  Description of Artificial Sequence: Synthetic oligonucleotide
acacaacuugguuagagcc

SEQ ID NO: 1157128 - RNA, 19 nt, Artificial Sequence
  Description of Artificial Sequence: Synthetic oligonucleotide
ucuacuucuaaaagugugg

SEQ ID NO: 1157129 - RNA, 19 nt, Artificial Sequence
  Description of Artificial Sequence: Synthetic oligonucleotide
gauguuaaaagccagacua

SEQ ID NO: 1157130 - RNA, 19 nt, Artificial Sequence
  Description of Artificial Sequence: Synthetic oligonucleotide
auaaccaugaugccucugc

SEQ ID NO: 1157131 - RNA, 19 nt, Artificial Sequence
  Description of Artificial Sequence: Synthetic oligonucleotide
uauuaaacgaguucaagaa

SEQ ID NO: 1157132 - RNA, 19 nt, Artificial Sequence
  Description of Artificial Sequence: Synthetic oligonucleotide
ugacaugugcauaagaacu

SEQ ID NO: 1157133 - RNA, 19 nt, Artificial Sequence
  Description of Artificial Sequence: Synthetic oligonucleotide
aagauguuaaaagccagac

SEQ ID NO: 1157134 - RNA, 19 nt, Artificial Sequence
  Description of Artificial Sequence: Synthetic oligonucleotide
acgaguucaagaaagaugg

SEQ ID NO: 1157135 - RNA, 19 nt, Artificial Sequence
  Description of Artificial Sequence: Synthetic oligonucleotide
ugagcaagauguuaaaagc

SEQ ID NO: 1157136 - RNA, 19 nt, Artificial Sequence
  Description of Artificial Sequence: Synthetic oligonucleotide
gauggaauggccuucagca

SEQ ID NO: 1157137 - RNA, 19 nt, Artificial Sequence
  Description of Artificial Sequence: Synthetic oligonucleotide
uaugccacagcaaagucgc

SEQ ID NO: 1157138 - RNA, 19 nt, Artificial Sequence
  Description of Artificial Sequence: Synthetic oligonucleotide
ugaguauucccugacaggg

SEQ ID NO: 1157139 - RNA, 19 nt, Artificial Sequence
  Description of Artificial Sequence: Synthetic oligonucleotide
gauugaguagucuaauggc

SEQ ID NO: 1157140 - RNA, 19 nt, Artificial Sequence
  Description of Artificial Sequence: Synthetic oligonucleotide
uuugcuugcaaugacagcu

SEQ ID NO: 1157141 - RNA, 19 nt, Artificial Sequence
  Description of Artificial Sequence: Synthetic oligonucleotide
uggagaauagcacauugug

SEQ ID NO: 1157142 - RNA, 19 nt, Artificial Sequence
  Description of Artificial Sequence: Synthetic oligonucleotide
aauaggcucaaccacuacu

SEQ ID NO: 1157143 - RNA, 19 nt, Artificial Sequence
  Description of Artificial Sequence: Synthetic oligonucleotide
gauaucacgcuccaugcag

SEQ ID NO: 1157144 - RNA, 19 nt, Artificial Sequence
  Description of Artificial Sequence: Synthetic oligonucleotide
uugaguaguagauugagua

SEQ ID NO: 1157145 - RNA, 19 nt, Artificial Sequence
  Description of Artificial Sequence: Synthetic oligonucleotide
aacguagacauccugguaa

SEQ ID NO: 1157146 - RNA, 19 nt, Artificial Sequence
  Description of Artificial Sequence: Synthetic oligonucleotide
uuaacauaaggccccaaac

SEQ ID NO: 1157147 - RNA, 19 nt, Artificial Sequence
  Description of Artificial Sequence: Synthetic oligonucleotide
uucaagaaagauggaaugg

SEQ ID NO: 1157148 - RNA, 19 nt, Artificial Sequence
  Description of Artificial Sequence: Synthetic oligonucleotide
uggaaugcagcucuggggc

SEQ ID NO: 1157149 - RNA, 19 nt, Artificial Sequence
  Description of Artificial Sequence: Synthetic oligonucleotide
aauagcacauugugcaucu

SEQ ID NO: 1157150 - RNA, 19 nt, Artificial Sequence
  Description of Artificial Sequence: Synthetic oligonucleotide
gugagcaagauguuaaaag

SEQ ID NO: 1157151 - RNA, 19 nt, Artificial Sequence
  Description of Artificial Sequence: Synthetic oligonucleotide
aaagacugaguauucccug

SEQ ID NO: 1157152 - RNA, 19 nt, Artificial Sequence
  Description of Artificial Sequence: Synthetic oligonucleotide
ugaguaguagauugaguag

SEQ ID NO: 1157153 - RNA, 19 nt, Artificial Sequence
  Description of Artificial Sequence: Synthetic oligonucleotide
uuuaguuggauaagcauuu

SEQ ID NO: 1157154 - RNA, 19 nt, Artificial Sequence
  Description of Artificial Sequence: Synthetic oligonucleotide
ucaggucuacuucuaaaag

SEQ ID NO: 1157155 - RNA, 19 nt, Artificial Sequence
  Description of Artificial Sequence: Synthetic oligonucleotide
ucaagaaagauggaauggc

SEQ ID NO: 1157156 - RNA, 19 nt, Artificial Sequence
  Description of Artificial Sequence: Synthetic oligonucleotide
ucuauagcucauaaccaug

SEQ ID NO: 1157157 - RNA, 19 nt, Artificial Sequence
  Description of Artificial Sequence: Synthetic oligonucleotide
uuccuuaacauaaggcccc

SEQ ID NO: 1157158 - RNA, 19 nt, Artificial Sequence
  Description of Artificial Sequence: Synthetic oligonucleotide
ugacuaaaccuugagagga

SEQ ID NO: 1157159 - RNA, 19 nt, Artificial Sequence
  Description of Artificial Sequence: Synthetic oligonucleotide
uuaccgcacagaauaaaag

SEQ ID NO: 1157160 - RNA, 19 nt, Artificial Sequence
  Description of Artificial Sequence: Synthetic oligonucleotide
aacgaggugaacuccucag

SEQ ID NO: 1157161 - RNA, 19 nt, Artificial Sequence
  Description of Artificial Sequence: Synthetic oligonucleotide
agauggaauggccuucagc

SEQ ID NO: 1157162 - RNA, 19 nt, Artificial Sequence
  Description of Artificial Sequence: Synthetic oligonucleotide
agucuauuaaacgaguuca

SEQ ID NO: 1157163 - RNA, 19 nt, Artificial Sequence
  Description of Artificial Sequence: Synthetic oligonucleotide
acuucuaaaagugugggga

SEQ ID NO: 1157164 - RNA, 19 nt, Artificial Sequence
  Description of Artificial Sequence: Synthetic oligonucleotide
aacgaguucaagaaagaug

SEQ ID NO: 1157165 - RNA, 19 nt, Artificial Sequence
  Description of Artificial Sequence: Synthetic oligonucleotide
ucuauuaaacgaguucaag

SEQ ID NO: 1157166 - RNA, 19 nt, Artificial Sequence
  Description of Artificial Sequence: Synthetic oligonucleotide
cauuugcuugcaaugacag

SEQ ID NO: 1157167 - RNA, 19 nt, Artificial Sequence
  Description of Artificial Sequence: Synthetic oligonucleotide
uguaagaacuuuaccgcac

SEQ ID NO: 1157168 - RNA, 19 nt, Artificial Sequence
  Description of Artificial Sequence: Synthetic oligonucleotide
caugcagagauccaagaug

SEQ ID NO: 1157169 - RNA, 19 nt, Artificial Sequence
  Description of Artificial Sequence: Synthetic oligonucleotide
auggcacccauuuguaucg

SEQ ID NO: 1157170 - RNA, 19 nt, Artificial Sequence
  Description of Artificial Sequence: Synthetic oligonucleotide
uccguuccuuaacauaagg

SEQ ID NO: 1157171 - RNA, 19 nt, Artificial Sequence
  Description of Artificial Sequence: Synthetic oligonucleotide
uugaguagucuaauggcac

SEQ ID NO: 1157172 - RNA, 19 nt, Artificial Sequence
  Description of Artificial Sequence: Synthetic oligonucleotide
cccuguaagaacuuuaccg

SEQ ID NO: 1157173 - RNA, 19 nt, Artificial Sequence
  Description of Artificial Sequence: Synthetic oligonucleotide
uagucuauuaaacgaguuc

SEQ ID NO: 1157174 - RNA, 19 nt, Artificial Sequence
  Description of Artificial Sequence: Synthetic oligonucleotide
uggcuaaacauccuuucca

SEQ ID NO: 1157175 - RNA, 19 nt, Artificial Sequence
  Description of Artificial Sequence: Synthetic oligonucleotide
uacuucuaaaagugugggg

SEQ ID NO: 1157176 - RNA, 19 nt, Artificial Sequence
  Description of Artificial Sequence: Synthetic oligonucleotide
caaagugcucuauuguccc

SEQ ID NO: 1157177 - RNA, 19 nt, Artificial Sequence
  Description of Artificial Sequence: Synthetic oligonucleotide
caagaauaggcucaaccac

SEQ ID NO: 1157178 - RNA, 19 nt, Artificial Sequence
  Description of Artificial Sequence: Synthetic oligonucleotide
uaaacgaguucaagaaaga

SEQ ID NO: 1157179 - RNA, 19 nt, Artificial Sequence
  Description of Artificial Sequence: Synthetic oligonucleotide
ucuaaaaguguggggacag

SEQ ID NO: 1157180 - RNA, 19 nt, Artificial Sequence
  Description of Artificial Sequence: Synthetic oligonucleotide
agccuuacauccucuauag

SEQ ID NO: 1157181 - RNA, 19 nt, Artificial Sequence
  Description of Artificial Sequence: Synthetic oligonucleotide
caccacuugagcauggggc

SEQ ID NO: 1157182 - RNA, 19 nt, Artificial Sequence
  Description of Artificial Sequence: Synthetic oligonucleotide
aguuagaaauugcaaggcu

SEQ ID NO: 1157183 - RNA, 19 nt, Artificial Sequence
  Description of Artificial Sequence: Synthetic oligonucleotide
uaguuggauaagcauuugc

SEQ ID NO: 1157184 - RNA, 19 nt, Artificial Sequence
  Description of Artificial Sequence: Synthetic oligonucleotide
gguuagagccaccagaagc

SEQ ID NO: 1157185 - RNA, 19 nt, Artificial Sequence
  Description of Artificial Sequence: Synthetic oligonucleotide
auaagcauuugcuugcaau

SEQ ID NO: 1157186 - RNA, 19 nt, Artificial Sequence
  Description of Artificial Sequence: Synthetic oligonucleotide
gagcaagauguuaaaagcc

SEQ ID NO: 1157187 - RNA, 19 nt, Artificial Sequence
  Description of Artificial Sequence: Synthetic oligonucleotide
gaaacuggauaucacgcuc

SEQ ID NO: 1157188 - RNA, 19 nt, Artificial Sequence
  Description of Artificial Sequence: Synthetic oligonucleotide
cuggauaucacgcuccaug

SEQ ID NO: 1157189 - RNA, 19 nt, Artificial Sequence
  Description of Artificial Sequence: Synthetic oligonucleotide
agcauuagagcagugacga

SEQ ID NO: 1157190 - RNA, 19 nt, Artificial Sequence
  Description of Artificial Sequence: Synthetic oligonucleotide
uugguuagagccaccagaa

SEQ ID NO: 1157191 - RNA, 19 nt, Artificial Sequence
  Description of Artificial Sequence: Synthetic oligonucleotide
uuugaguaguagauugagu

SEQ ID NO: 1157192 - RNA, 19 nt, Artificial Sequence
  Description of Artificial Sequence: Synthetic oligonucleotide
aagaauaggcucaaccacu

SEQ ID NO: 1157193 - RNA, 19 nt, Artificial Sequence
  Description of Artificial Sequence: Synthetic oligonucleotide
auugagugggcauuugagu

SEQ ID NO: 1157194 - RNA, 19 nt, Artificial Sequence
  Description of Artificial Sequence: Synthetic oligonucleotide
aagacugaguauucccuga

SEQ ID NO: 1157195 - RNA, 19 nt, Artificial Sequence
  Description of Artificial Sequence: Synthetic oligonucleotide
cauaaggccccaaacuuug

SEQ ID NO: 1157196 - RNA, 19 nt, Artificial Sequence
  Description of Artificial Sequence: Synthetic oligonucleotide
gaagcaguugccugccccg

SEQ ID NO: 1157197 - RNA, 19 nt, Artificial Sequence
  Description of Artificial Sequence: Synthetic oligonucleotide
cuuggaaugcagcucuggg

SEQ ID NO: 1157198 - RNA, 19 nt, Artificial Sequence
  Description of Artificial Sequence: Synthetic oligonucleotide
gacacaacuugguuagagc

SEQ ID NO: 1157199 - RNA, 19 nt, Artificial Sequence
  Description of Artificial Sequence: Synthetic oligonucleotide
uuaaagacaucucgugcuc

SEQ ID NO: 1157200 - RNA, 19 nt, Artificial Sequence
  Description of Artificial Sequence: Synthetic oligonucleotide
uguuaaaagccagacuaac

SEQ ID NO: 1157201 - RNA, 19 nt, Artificial Sequence
  Description of Artificial Sequence: Synthetic oligonucleotide
ugcucuauugucccagucu

SEQ ID NO: 1157202 - RNA, 19 nt, Artificial Sequence
  Description of Artificial Sequence: Synthetic oligonucleotide
uagauugaguagucuaaug

SEQ ID NO: 1157203 - RNA, 19 nt, Artificial Sequence
  Description of Artificial Sequence: Synthetic oligonucleotide
cuacuucuaaaaguguggg

SEQ ID NO: 1157204 - RNA, 19 nt, Artificial Sequence
  Description of Artificial Sequence: Synthetic oligonucleotide
aguauucccugacagggcu

SEQ ID NO: 1157205 - RNA, 19 nt, Artificial Sequence
  Description of Artificial Sequence: Synthetic oligonucleotide
auuaaacgaguucaagaaa

SEQ ID NO: 1157206 - RNA, 19 nt, Artificial Sequence
  Description of Artificial Sequence: Synthetic oligonucleotide
agcucauaaccaugaugcc

SEQ ID NO: 1157207 - RNA, 19 nt, Artificial Sequence
  Description of Artificial Sequence: Synthetic oligonucleotide
uuacauccucuauagcuca

SEQ ID NO: 1157208 - RNA, 19 nt, Artificial Sequence
  Description of Artificial Sequence: Synthetic oligonucleotide
accaggaauggggagaacg

SEQ ID NO: 1157209 - RNA, 19 nt, Artificial Sequence
  Description of Artificial Sequence: Synthetic oligonucleotide
caagauggagaauagcaca

SEQ ID NO: 1157210 - RNA, 19 nt, Artificial Sequence
  Description of Artificial Sequence: Synthetic oligonucleotide
ugagaaagcaguguucuau

SEQ ID NO: 1157211 - RNA, 19 nt, Artificial Sequence
  Description of Artificial Sequence: Synthetic oligonucleotide
uaaauccccuccuggagca

SEQ ID NO: 1157212 - RNA, 19 nt, Artificial Sequence
  Description of Artificial Sequence: Synthetic oligonucleotide
ugaguagucuaauggcaca

SEQ ID NO: 1157213 - RNA, 19 nt, Artificial Sequence
  Description of Artificial Sequence: Synthetic oligonucleotide
agacugaguauucccugac

SEQ ID NO: 1157214 - RNA, 19 nt, Artificial Sequence
  Description of Artificial Sequence: Synthetic oligonucleotide
ccuguaagaacuuuaccgc

SEQ ID NO: 1157215 - RNA, 19 nt, Artificial Sequence
  Description of Artificial Sequence: Synthetic oligonucleotide
cugaguauucccugacagg

SEQ ID NO: 1157216 - RNA, 19 nt, Artificial Sequence
  Description of Artificial Sequence: Synthetic oligonucleotide
aucugcagaucagacuucc

SEQ ID NO: 1157217 - RNA, 19 nt, Artificial Sequence
  Description of Artificial Sequence: Synthetic oligonucleotide
ugacacaacuugguuagag

SEQ ID NO: 1157218 - RNA, 19 nt, Artificial Sequence
  Description of Artificial Sequence: Synthetic oligonucleotide
cuucuaaaaguguggggac

SEQ ID NO: 1157219 - RNA, 19 nt, Artificial Sequence
  Description of Artificial Sequence: Synthetic oligonucleotide
gacaucucgugcuccaggc

SEQ ID NO: 1157220 - RNA, 19 nt, Artificial Sequence
  Description of Artificial Sequence: Synthetic oligonucleotide
aucccaaagugcucuauug

SEQ ID NO: 1157221 - RNA, 19 nt, Artificial Sequence
  Description of Artificial Sequence: Synthetic oligonucleotide
uguaucguggccugcugca

SEQ ID NO: 1157222 - RNA, 19 nt, Artificial Sequence
  Description of Artificial Sequence: Synthetic oligonucleotide
ggcucaaccacuacuaggg

SEQ ID NO: 1157223 - RNA, 19 nt, Artificial Sequence
  Description of Artificial Sequence: Synthetic oligonucleotide
uuuccgcagcagaauagcc

SEQ ID NO: 1157224 - RNA, 19 nt, Artificial Sequence
  Description of Artificial Sequence: Synthetic oligonucleotide
gguguugcagcauuagagc

SEQ ID NO: 1157225 - RNA, 19 nt, Artificial Sequence
  Description of Artificial Sequence: Synthetic oligonucleotide
cauuagagcagugacgauc

SEQ ID NO: 1157226 - RNA, 19 nt, Artificial Sequence
  Description of Artificial Sequence: Synthetic oligonucleotide
cauggcacccauuuguauc

SEQ ID NO: 1157227 - RNA, 19 nt, Artificial Sequence
  Description of Artificial Sequence: Synthetic oligonucleotide
aguaguagauugaguaguc

SEQ ID NO: 1157228 - RNA, 19 nt, Artificial Sequence
  Description of Artificial Sequence: Synthetic oligonucleotide
cguuccuuaacauaaggcc

SEQ ID NO: 1157229 - RNA, 19 nt, Artificial Sequence
  Description of Artificial Sequence: Synthetic oligonucleotide
aguucaagaaagauggaau

SEQ ID NO: 1157230 - RNA, 19 nt, Artificial Sequence
  Description of Artificial Sequence: Synthetic oligonucleotide
cugguaacugugcuucugg

SEQ ID NO: 1157231 - RNA, 19 nt, Artificial Sequence
  Description of Artificial Sequence: Synthetic oligonucleotide
uucaugcauaacugaaaac

SEQ ID NO: 1157232 - RNA, 19 nt, Artificial Sequence
  Description of Artificial Sequence: Synthetic oligonucleotide
acuaacauggugaggguug

SEQ ID NO: 1157233 - RNA, 19 nt, Artificial Sequence
  Description of Artificial Sequence: Synthetic oligonucleotide
aacuuugacacaacuuggu

SEQ ID NO: 1157234 - RNA, 19 nt, Artificial Sequence
  Description of Artificial Sequence: Synthetic oligonucleotide
ucgaguagcaauguggcua

SEQ ID NO: 1157235 - RNA, 19 nt, Artificial Sequence
  Description of Artificial Sequence: Synthetic oligonucleotide
acagcaaagucgccuuuuc

SEQ ID NO: 1157236 - RNA, 19 nt, Artificial Sequence
  Description of Artificial Sequence: Synthetic oligonucleotide
cuauagcucauaaccauga

SEQ ID NO: 1157237 - RNA, 19 nt, Artificial Sequence
  Description of Artificial Sequence: Synthetic oligonucleotide
cugcaguacaaucccaaag

SEQ ID NO: 1157238 - RNA, 19 nt, Artificial Sequence
  Description of Artificial Sequence: Synthetic oligonucleotide
aaacgaguucaagaaagau

SEQ ID NO: 1157239 - RNA, 19 nt, Artificial Sequence
  Description of Artificial Sequence: Synthetic oligonucleotide
cucagcucgaguagcaaug

SEQ ID NO: 1157240 - RNA, 19 nt, Artificial Sequence
  Description of Artificial Sequence: Synthetic oligonucleotide
aaagauggaauggccuuca

SEQ ID NO: 1157241 - RNA, 19 nt, Artificial Sequence
  Description of Artificial Sequence: Synthetic oligonucleotide
uuguaucguggccugcugc

SEQ ID NO: 1157242 - RNA, 19 nt, Artificial Sequence
  Description of Artificial Sequence: Synthetic oligonucleotide
cuuccguuccuuaacauaa

SEQ ID NO: 1157243 - RNA, 19 nt, Artificial Sequence
  Description of Artificial Sequence: Synthetic oligonucleotide
uccugguaaagagucaugu

SEQ ID NO: 1157244 - RNA, 19 nt, Artificial Sequence
  Description of Artificial Sequence: Synthetic oligonucleotide
agcaagauguuaaaagcca

SEQ ID NO: 1157245 - RNA, 19 nt, Artificial Sequence
  Description of Artificial Sequence: Synthetic oligonucleotide
guaacugugcuucuggugu

SEQ ID NO: 1157246 - RNA, 19 nt, Artificial Sequence
  Description of Artificial Sequence: Synthetic oligonucleotide
gacucuggauuuucaauuc

SEQ ID NO: 1157247 - RNA, 19 nt, Artificial Sequence
  Description of Artificial Sequence: Synthetic oligonucleotide
accaagcucagcuuuaguu

SEQ ID NO: 1157248 - RNA, 19 nt, Artificial Sequence
  Description of Artificial Sequence: Synthetic oligonucleotide
uaagcacagcugcagcaug

SEQ ID NO: 1157249 - RNA, 19 nt, Artificial Sequence
  Description of Artificial Sequence: Synthetic oligonucleotide
aaggcguccugguaacugu

SEQ ID NO: 1157250 - RNA, 19 nt, Artificial Sequence
  Description of Artificial Sequence: Synthetic oligonucleotide
guugacaugugcauaagaa

SEQ ID NO: 1157251 - RNA, 19 nt, Artificial Sequence
  Description of Artificial Sequence: Synthetic oligonucleotide
uaucacgcuccaugcagag

SEQ ID NO: 1157252 - RNA, 19 nt, Artificial Sequence
  Description of Artificial Sequence: Synthetic oligonucleotide
uuuguaucguggccugcug

SEQ ID NO: 1157253 - RNA, 19 nt, Artificial Sequence
  Description of Artificial Sequence: Synthetic oligonucleotide
uaggcucaaccacuacuag

SEQ ID NO: 1157254 - RNA, 19 nt, Artificial Sequence
  Description of Artificial Sequence: Synthetic oligonucleotide
aggacaucaagaauaggcu

SEQ ID NO: 1157255 - RNA, 19 nt, Artificial Sequence
  Description of Artificial Sequence: Synthetic oligonucleotide
caugcauaacugaaaacaa

SEQ ID NO: 1157256 - RNA, 19 nt, Artificial Sequence
  Description of Artificial Sequence: Synthetic oligonucleotide
guggcuaaacauccuuucc

SEQ ID NO: 1157257 - RNA, 19 nt, Artificial Sequence
  Description of Artificial Sequence: Synthetic oligonucleotide
acuaaaccuugagaggaag

SEQ ID NO: 1157258 - RNA, 19 nt, Artificial Sequence
  Description of Artificial Sequence: Synthetic oligonucleotide
uucuaaaaguguggggaca

SEQ ID NO: 1157259 - RNA, 19 nt, Artificial Sequence
  Description of Artificial Sequence: Synthetic oligonucleotide
ucaugugagaaagcagugu

SEQ ID NO: 1157260 - RNA, 19 nt, Artificial Sequence
  Description of Artificial Sequence: Synthetic oligonucleotide
uugagugacuggagcagga

SEQ ID NO: 1157261 - RNA, 19 nt, Artificial Sequence
  Description of Artificial Sequence: Synthetic oligonucleotide
acaagccucucgguguugc

SEQ ID NO: 1157262 - RNA, 19 nt, Artificial Sequence
  Description of Artificial Sequence: Synthetic oligonucleotide
gcaaagucgccuuuucucc

SEQ ID NO: 1157263 - RNA, 19 nt, Artificial Sequence
  Description of Artificial Sequence: Synthetic oligonucleotide
ccaaagugcucuauugucc

SEQ ID NO: 1157264 - RNA, 19 nt, Artificial Sequence
  Description of Artificial Sequence: Synthetic oligonucleotide
gaauagcacauugugcauc

SEQ ID NO: 1157265 - RNA, 19 nt, Artificial Sequence
  Description of Artificial Sequence: Synthetic oligonucleotide
aaagucgccuuuucuccau

SEQ ID NO: 1157266 - RNA, 19 nt, Artificial Sequence
  Description of Artificial Sequence: Synthetic oligonucleotide
aagauggaauggccuucag

SEQ ID NO: 1157267 - RNA, 19 nt, Artificial Sequence
  Description of Artificial Sequence: Synthetic oligonucleotide
uuccguuccuuaacauaag

SEQ ID NO: 1157268 - RNA, 19 nt, Artificial Sequence
  Description of Artificial Sequence: Synthetic oligonucleotide
cacccauuuguaucguggc

SEQ ID NO: 1157269 - RNA, 19 nt, Artificial Sequence
  Description of Artificial Sequence: Synthetic oligonucleotide
aauccccuccuggagcagg

SEQ ID NO: 1157270 - RNA, 19 nt, Artificial Sequence
  Description of Artificial Sequence: Synthetic oligonucleotide
ugguuagagccaccagaag

SEQ ID NO: 1157271 - RNA, 19 nt, Artificial Sequence
  Description of Artificial Sequence: Synthetic oligonucleotide
cuugagugacuggagcagg

SEQ ID NO: 1157272 - RNA, 19 nt, Artificial Sequence
  Description of Artificial Sequence: Synthetic oligonucleotide
gcagaucagacuuccacgc

SEQ ID NO: 1157273 - RNA, 19 nt, Artificial Sequence
  Description of Artificial Sequence: Synthetic oligonucleotide
ccuuaaagacaucucgugc

SEQ ID NO: 1157274 - RNA, 19 nt, Artificial Sequence
  Description of Artificial Sequence: Synthetic oligonucleotide
ugaggcccgcagaaacugg

SEQ ID NO: 1157275 - RNA, 19 nt, Artificial Sequence
  Description of Artificial Sequence: Synthetic oligonucleotide
uauagcucauaaccaugau

SEQ ID NO: 1157276 - RNA, 19 nt, Artificial Sequence
  Description of Artificial Sequence: Synthetic oligonucleotide
guguugcagcauuagagca

SEQ ID NO: 1157277 - RNA, 19 nt, Artificial Sequence
  Description of Artificial Sequence: Synthetic oligonucleotide
agccagacuaacaugguga

SEQ ID NO: 1157278 - RNA, 19 nt, Artificial Sequence
  Description of Artificial Sequence: Synthetic oligonucleotide
acuacuagggccacaggcu

SEQ ID NO: 1157279 - RNA, 19 nt, Artificial Sequence
  Description of Artificial Sequence: Synthetic oligonucleotide
ucgguguugcagcauuaga

SEQ ID NO: 1157280 - RNA, 19 nt, Artificial Sequence
  Description of Artificial Sequence: Synthetic oligonucleotide
ugacagggcuggcaauucc

SEQ ID NO: 1157281 - RNA, 19 nt, Artificial Sequence
  Description of Artificial Sequence: Synthetic oligonucleotide
cuguaagaacuuuaccgca

SEQ ID NO: 1157282 - RNA, 19 nt, Artificial Sequence
  Description of Artificial Sequence: Synthetic oligonucleotide
agaauagcacauugugcau

SEQ ID NO: 1157283 - RNA, 19 nt, Artificial Sequence
  Description of Artificial Sequence: Synthetic oligonucleotide
cuuaacauaaggccccaaa

SEQ ID NO: 1157284 - RNA, 19 nt, Artificial Sequence
  Description of Artificial Sequence: Synthetic oligonucleotide
cuuuaguuggauaagcauu

SEQ ID NO: 1157285 - RNA, 19 nt, Artificial Sequence
  Description of Artificial Sequence: Synthetic oligonucleotide
gcagcauuagagcagugac

SEQ ID NO: 1157286 - RNA, 19 nt, Artificial Sequence
  Description of Artificial Sequence: Synthetic oligonucleotide
ugugccucugucacauagu

SEQ ID NO: 1157287 - RNA, 19 nt, Artificial Sequence
  Description of Artificial Sequence: Synthetic oligonucleotide
gggacugugagcaagaugu

SEQ ID NO: 1157288 - RNA, 19 nt, Artificial Sequence
  Description of Artificial Sequence: Synthetic oligonucleotide
cacguaugccacagcaaag

SEQ ID NO: 1157289 - RNA, 19 nt, Artificial Sequence
  Description of Artificial Sequence: Synthetic oligonucleotide
uuaguuggauaagcauuug

SEQ ID NO: 1157290 - RNA, 19 nt, Artificial Sequence
  Description of Artificial Sequence: Synthetic oligonucleotide
gaacuccucagcucgagua

SEQ ID NO: 1157291 - RNA, 19 nt, Artificial Sequence
  Description of Artificial Sequence: Synthetic oligonucleotide
gaguaguagauugaguagu

SEQ ID NO: 1157292 - RNA, 19 nt, Artificial Sequence
  Description of Artificial Sequence: Synthetic oligonucleotide
gaguagucuaauggcacac

SEQ ID NO: 1157293 - RNA, 19 nt, Artificial Sequence
  Description of Artificial Sequence: Synthetic oligonucleotide
acguaugccacagcaaagu

SEQ ID NO: 1157294 - RNA, 19 nt, Artificial Sequence
  Description of Artificial Sequence: Synthetic oligonucleotide
guuaucccaggcacuaagc

SEQ ID NO: 1157295 - RNA, 19 nt, Artificial Sequence
  Description of Artificial Sequence: Synthetic oligonucleotide
ggcuaaacauccuuuccac

SEQ ID NO: 1157296 - RNA, 19 nt, Artificial Sequence
  Description of Artificial Sequence: Synthetic oligonucleotide
ugaacuccucagcucgagu

SEQ ID NO: 1157297 - RNA, 19 nt, Artificial Sequence
  Description of Artificial Sequence: Synthetic oligonucleotide
gcaguacaaucccaaagug

SEQ ID NO: 1157298 - RNA, 19 nt, Artificial Sequence
  Description of Artificial Sequence: Synthetic oligonucleotide
uuccacgccugagugaugu

SEQ ID NO: 1157299 - RNA, 19 nt, Artificial Sequence
  Description of Artificial Sequence: Synthetic oligonucleotide
uccaguagcugcuuccguu

SEQ ID NO: 1157300 - RNA, 19 nt, Artificial Sequence
  Description of Artificial Sequence: Synthetic oligonucleotide
guacugauggugccuccag

SEQ ID NO: 1157301 - RNA, 19 nt, Artificial Sequence
  Description of Artificial Sequence: Synthetic oligonucleotide
accgcacagaauaaaagau

SEQ ID NO: 1157302 - RNA, 19 nt, Artificial Sequence
  Description of Artificial Sequence: Synthetic oligonucleotide
caugugcauaagaacuuca

SEQ ID NO: 1157303 - RNA, 19 nt, Artificial Sequence
  Description of Artificial Sequence: Synthetic oligonucleotide
ugcaaggcguccugguaac

SEQ ID NO: 1157304 - RNA, 19 nt, Artificial Sequence
  Description of Artificial Sequence: Synthetic oligonucleotide
uccccuuuccgcagcagaa

SEQ ID NO: 1157305 - RNA, 19 nt, Artificial Sequence
  Description of Artificial Sequence: Synthetic oligonucleotide
agcuuuaguuggauaagca

SEQ ID NO: 1157306 - RNA, 19 nt, Artificial Sequence
  Description of Artificial Sequence: Synthetic oligonucleotide
cagaucagacuuccacgcc

SEQ ID NO: 1157307 - RNA, 19 nt, Artificial Sequence
  Description of Artificial Sequence: Synthetic oligonucleotide
gucaugugagaaagcagug

SEQ ID NO: 1157308 - RNA, 19 nt, Artificial Sequence
  Description of Artificial Sequence: Synthetic oligonucleotide
cuucugguguggccuaggc

SEQ ID NO: 1157309 - RNA, 19 nt, Artificial Sequence
  Description of Artificial Sequence: Synthetic oligonucleotide
guacuugagguagucgcug

SEQ ID NO: 1157310 - RNA, 19 nt, Artificial Sequence
  Description of Artificial Sequence: Synthetic oligonucleotide
gacugaguauucccugaca

SEQ ID NO: 1157311 - RNA, 19 nt, Artificial Sequence
  Description of Artificial Sequence: Synthetic oligonucleotide
gaacgaggugaacuccuca

SEQ ID NO: 1157312 - RNA, 19 nt, Artificial Sequence
  Description of Artificial Sequence: Synthetic oligonucleotide
auaggcucaaccacuacua

SEQ ID NO: 1157313 - RNA, 19 nt, Artificial Sequence
  Description of Artificial Sequence: Synthetic oligonucleotide
agucgccuuuucuccauug

SEQ ID NO: 1157314 - RNA, 19 nt, Artificial Sequence
  Description of Artificial Sequence: Synthetic oligonucleotide
auggagaauagcacauugu

SEQ ID NO: 1157315 - RNA, 19 nt, Artificial Sequence
  Description of Artificial Sequence: Synthetic oligonucleotide
acauagugggacaccagga

SEQ ID NO: 1157316 - RNA, 19 nt, Artificial Sequence
  Description of Artificial Sequence: Synthetic oligonucleotide
cuuugucuuucugccgucc

SEQ ID NO: 1157317 - RNA, 19 nt, Artificial Sequence
  Description of Artificial Sequence: Synthetic oligonucleotide
gcgugcacacucaagaacc

SEQ ID NO: 1157318 - RNA, 19 nt, Artificial Sequence
  Description of Artificial Sequence: Synthetic oligonucleotide
caggcacuaagcacagcug

SEQ ID NO: 1157319 - RNA, 19 nt, Artificial Sequence
  Description of Artificial Sequence: Synthetic oligonucleotide
gcucuauugucccagucuc

SEQ ID NO: 1157320 - RNA, 19 nt, Artificial Sequence
  Description of Artificial Sequence: Synthetic oligonucleotide
ucagcucgaguagcaaugu

SEQ ID NO: 1157321 - RNA, 19 nt, Artificial Sequence
  Description of Artificial Sequence: Synthetic oligonucleotide
acguagacauccugguaaa

SEQ ID NO: 1157322 - RNA, 19 nt, Artificial Sequence
  Description of Artificial Sequence: Synthetic oligonucleotide
agaacgaggugaacuccuc

SEQ ID NO: 1157323 - RNA, 19 nt, Artificial Sequence
  Description of Artificial Sequence: Synthetic oligonucleotide
gcacccauuuguaucgugg

SEQ ID NO: 1157324 - RNA, 19 nt, Artificial Sequence
  Description of Artificial Sequence: Synthetic oligonucleotide
ccuuacauccucuauagcu

SEQ ID NO: 1157325 - RNA, 19 nt, Artificial Sequence
  Description of Artificial Sequence: Synthetic oligonucleotide
augcauaacugaaaacaau

SEQ ID NO: 1157326 - RNA, 19 nt, Artificial Sequence
  Description of Artificial Sequence: Synthetic oligonucleotide
gcaagauggagaauagcac

SEQ ID NO: 1157327 - RNA, 19 nt, Artificial Sequence
  Description of Artificial Sequence: Synthetic oligonucleotide
cgguguugcagcauuagag

SEQ ID NO: 1157328 - RNA, 19 nt, Artificial Sequence
  Description of Artificial Sequence: Synthetic oligonucleotide
aguagucuaauggcacaca

SEQ ID NO: 1157329 - RNA, 19 nt, Artificial Sequence
  Description of Artificial Sequence: Synthetic oligonucleotide
guaguacugauggugccuc

SEQ ID NO: 1157330 - RNA, 19 nt, Artificial Sequence
  Description of Artificial Sequence: Synthetic oligonucleotide
ugguugacaugugcauaag

SEQ ID NO: 1157331 - RNA, 19 nt, Artificial Sequence
  Description of Artificial Sequence: Synthetic oligonucleotide
aguacugauggugccucca

SEQ ID NO: 1157332 - RNA, 19 nt, Artificial Sequence
  Description of Artificial Sequence: Synthetic oligonucleotide
auguuaaaagccagacuaa

SEQ ID NO: 1157333 - RNA, 19 nt, Artificial Sequence
  Description of Artificial Sequence: Synthetic oligonucleotide
gauaagcauuugcuugcaa

SEQ ID NO: 1157334 - RNA, 19 nt, Artificial Sequence
  Description of Artificial Sequence: Synthetic oligonucleotide
caaagucgccuuuucucca

SEQ ID NO: 1157335 - RNA, 19 nt, Artificial Sequence
  Description of Artificial Sequence: Synthetic oligonucleotide
ccgcacagaauaaaagaug

SEQ ID NO: 1157336 - RNA, 19 nt, Artificial Sequence
  Description of Artificial Sequence: Synthetic oligonucleotide
caaggcguccugguaacug

SEQ ID NO: 1157337 - RNA, 19 nt, Artificial Sequence
  Description of Artificial Sequence: Synthetic oligonucleotide
auaucacgcuccaugcaga

SEQ ID NO: 1157338 - RNA, 19 nt, Artificial Sequence
  Description of Artificial Sequence: Synthetic oligonucleotide
cucuauagcucauaaccau

SEQ ID NO: 1157339 - RNA, 19 nt, Artificial Sequence
  Description of Artificial Sequence: Synthetic oligonucleotide
gugaggguugcugaugguc

SEQ ID NO: 1157340 - RNA, 19 nt, Artificial Sequence
  Description of Artificial Sequence: Synthetic oligonucleotide
uguggccuaggcuguguau

SEQ ID NO: 1157341 - RNA, 19 nt, Artificial Sequence
  Description of Artificial Sequence: Synthetic oligonucleotide
gaacguagacauccuggua

SEQ ID NO: 1157342 - RNA, 19 nt, Artificial Sequence
  Description of Artificial Sequence: Synthetic oligonucleotide
acauaaggccccaaacuuu

SEQ ID NO: 1157343 - RNA, 19 nt, Artificial Sequence
  Description of Artificial Sequence: Synthetic oligonucleotide
uacauccucuauagcucau

SEQ ID NO: 1157344 - RNA, 19 nt, Artificial Sequence
  Description of Artificial Sequence: Synthetic oligonucleotide
gguugacaugugcauaaga

SEQ ID NO: 1157345 - RNA, 19 nt, Artificial Sequence
  Description of Artificial Sequence: Synthetic oligonucleotide
cauccucuauagcucauaa

SEQ ID NO: 1157346 - RNA, 19 nt, Artificial Sequence
  Description of Artificial Sequence: Synthetic oligonucleotide
agaauaggcucaaccacua

SEQ ID NO: 1157347 - RNA, 19 nt, Artificial Sequence
  Description of Artificial Sequence: Synthetic oligonucleotide
ggcgugcacacucaagaac

SEQ ID NO: 1157348 - RNA, 19 nt, Artificial Sequence
  Description of Artificial Sequence: Synthetic oligonucleotide
caugugagaaagcaguguu

SEQ ID NO: 1157349 - RNA, 19 nt, Artificial Sequence
  Description of Artificial Sequence: Synthetic oligonucleotide
uccauugagugggcauuug

SEQ ID NO: 1157350 - RNA, 19 nt, Artificial Sequence
  Description of Artificial Sequence: Synthetic oligonucleotide
agguuaccuucugugccuc

SEQ ID NO: 1157351 - RNA, 19 nt, Artificial Sequence
  Description of Artificial Sequence: Synthetic oligonucleotide
aaauccccuccuggagcag

SEQ ID NO: 1157352 - RNA, 19 nt, Artificial Sequence
  Description of Artificial Sequence: Synthetic oligonucleotide
agauccaagaugagauaaa

SEQ ID NO: 1157353 - RNA, 19 nt, Artificial Sequence
  Description of Artificial Sequence: Synthetic oligonucleotide
ccucuauagcucauaacca

SEQ ID NO: 1157354 - RNA, 19 nt, Artificial Sequence
  Description of Artificial Sequence: Synthetic oligonucleotide
ucucgguguugcagcauua

SEQ ID NO: 1157355 - RNA, 19 nt, Artificial Sequence
  Description of Artificial Sequence: Synthetic oligonucleotide
gaagccuuacauccucuau

SEQ ID NO: 1157356 - RNA, 19 nt, Artificial Sequence
  Description of Artificial Sequence: Synthetic oligonucleotide
aggcgugcacacucaagaa

SEQ ID NO: 1157357 - RNA, 19 nt, Artificial Sequence
  Description of Artificial Sequence: Synthetic oligonucleotide
cucuauugucccagucuca

SEQ ID NO: 1157358 - RNA, 19 nt, Artificial Sequence
  Description of Artificial Sequence: Synthetic oligonucleotide
gcucaauaucuugagugac

SEQ ID NO: 1157359 - RNA, 19 nt, Artificial Sequence
  Description of Artificial Sequence: Synthetic oligonucleotide
gucgccuuuucuccauuga

SEQ ID NO: 1157360 - RNA, 19 nt, Artificial Sequence
  Description of Artificial Sequence: Synthetic oligonucleotide
guaucguggccugcugcag

SEQ ID NO: 1157361 - RNA, 19 nt, Artificial Sequence
  Description of Artificial Sequence: Synthetic oligonucleotide
aagcaguugccugccccga

SEQ ID NO: 1157362 - RNA, 19 nt, Artificial Sequence
  Description of Artificial Sequence: Synthetic oligonucleotide
gagaacgaggugaacuccu

SEQ ID NO: 1157363 - RNA, 19 nt, Artificial Sequence
  Description of Artificial Sequence: Synthetic oligonucleotide
cuuuaccgcacagaauaaa

SEQ ID NO: 1157364 - RNA, 19 nt, Artificial Sequence
  Description of Artificial Sequence: Synthetic oligonucleotide
cugaaaacaauagucuauu

SEQ ID NO: 1157365 - RNA, 19 nt, Artificial Sequence
  Description of Artificial Sequence: Synthetic oligonucleotide
cugcuuccguuccuuaaca

SEQ ID NO: 1157366 - RNA, 19 nt, Artificial Sequence
  Description of Artificial Sequence: Synthetic oligonucleotide
ggauaucacgcuccaugca

SEQ ID NO: 1157367 - RNA, 19 nt, Artificial Sequence
  Description of Artificial Sequence: Synthetic oligonucleotide
guauucccugacagggcug

SEQ ID NO: 1157368 - RNA, 19 nt, Artificial Sequence
  Description of Artificial Sequence: Synthetic oligonucleotide
acuuuaccgcacagaauaa

SEQ ID NO: 1157369 - RNA, 19 nt, Artificial Sequence
  Description of Artificial Sequence: Synthetic oligonucleotide
cagcaacugaacguagaca

SEQ ID NO: 1157370 - RNA, 19 nt, Artificial Sequence
  Description of Artificial Sequence: Synthetic oligonucleotide
guagauugaguagucuaau

SEQ ID NO: 1157371 - RNA, 19 nt, Artificial Sequence
  Description of Artificial Sequence: Synthetic oligonucleotide
auccugguaaagagucaug

SEQ ID NO: 1157372 - RNA, 19 nt, Artificial Sequence
  Description of Artificial Sequence: Synthetic oligonucleotide
guaguagauugaguagucu

SEQ ID NO: 1157373 - RNA, 19 nt, Artificial Sequence
  Description of Artificial Sequence: Synthetic oligonucleotide
gcucaaccacuacuagggc

SEQ ID NO: 1157374 - RNA, 19 nt, Artificial Sequence
  Description of Artificial Sequence: Synthetic oligonucleotide
gugggacaccaggaauggg

SEQ ID NO: 1157375 - RNA, 19 nt, Artificial Sequence
  Description of Artificial Sequence: Synthetic oligonucleotide
cugacagggcuggcaauuc

SEQ ID NO: 1157376 - RNA, 19 nt, Artificial Sequence
  Description of Artificial Sequence: Synthetic oligonucleotide
acauccucuauagcucaua

SEQ ID NO: 1157377 - RNA, 19 nt, Artificial Sequence
  Description of Artificial Sequence: Synthetic oligonucleotide
aaccacuacuagggccaca

SEQ ID NO: 1157378 - RNA, 19 nt, Artificial Sequence
  Description of Artificial Sequence: Synthetic oligonucleotide
gcuguuccugacaagccuc

SEQ ID NO: 1157379 - RNA, 19 nt, Artificial Sequence
  Description of Artificial Sequence: Synthetic oligonucleotide
caggguacaagguuaccuu

SEQ ID NO: 1157380 - RNA, 19 nt, Artificial Sequence
  Description of Artificial Sequence: Synthetic oligonucleotide
ggcacccauuuguaucgug

SEQ ID NO: 1157381 - RNA, 19 nt, Artificial Sequence
  Description of Artificial Sequence: Synthetic oligonucleotide
ggggagaacgaggugaacu

SEQ ID NO: 1157382 - RNA, 19 nt, Artificial Sequence
  Description of Artificial Sequence: Synthetic oligonucleotide
ccagacuaacauggugagg

SEQ ID NO: 1157383 - RNA, 19 nt, Artificial Sequence
  Description of Artificial Sequence: Synthetic oligonucleotide
gacuaacauggugaggguu

SEQ ID NO: 1157384 - RNA, 19 nt, Artificial Sequence
  Description of Artificial Sequence: Synthetic oligonucleotide
ccugccccgaagacucugg

SEQ ID NO: 1157385 - RNA, 19 nt, Artificial Sequence
  Description of Artificial Sequence: Synthetic oligonucleotide
cacgcuccaugcagagauc

SEQ ID NO: 1157386 - RNA, 19 nt, Artificial Sequence
  Description of Artificial Sequence: Synthetic oligonucleotide
ggauaagcauuugcuugca

SEQ ID NO: 1157387 - RNA, 19 nt, Artificial Sequence
  Description of Artificial Sequence: Synthetic oligonucleotide
ggcaauuccuccagcaacu

SEQ ID NO: 1157388 - RNA, 19 nt, Artificial Sequence
  Description of Artificial Sequence: Synthetic oligonucleotide
ccguccuucaugcauaacu

SEQ ID NO: 1157389 - RNA, 19 nt, Artificial Sequence
  Description of Artificial Sequence: Synthetic oligonucleotide
aggcguccugguaacugug

SEQ ID NO: 1157390 - RNA, 19 nt, Artificial Sequence
  Description of Artificial Sequence: Synthetic oligonucleotide
caaccacuacuagggccac

SEQ ID NO: 1157391 - RNA, 19 nt, Artificial Sequence
  Description of Artificial Sequence: Synthetic oligonucleotide
ccaggcgugcacacucaag

SEQ ID NO: 1157392 - RNA, 19 nt, Artificial Sequence
  Description of Artificial Sequence: Synthetic oligonucleotide
ccauugagugggcauuuga

SEQ ID NO: 1157393 - RNA, 19 nt, Artificial Sequence
  Description of Artificial Sequence: Synthetic oligonucleotide
gcaggguacaagguuaccu

SEQ ID NO: 1157394 - RNA, 19 nt, Artificial Sequence
  Description of Artificial Sequence: Synthetic oligonucleotide
caagccucucgguguugca

SEQ ID NO: 1157395 - RNA, 19 nt, Artificial Sequence
  Description of Artificial Sequence: Synthetic oligonucleotide
cucagguaguacugauggu

SEQ ID NO: 1157396 - RNA, 19 nt, Artificial Sequence
  Description of Artificial Sequence: Synthetic oligonucleotide
gguacuugagguagucgcu

SEQ ID NO: 1157397 - RNA, 19 nt, Artificial Sequence
  Description of Artificial Sequence: Synthetic oligonucleotide
gcaacugaacguagacauc

SEQ ID NO: 1157398 - RNA, 19 nt, Artificial Sequence
  Description of Artificial Sequence: Synthetic oligonucleotide
gcuucugguguggccuagg

SEQ ID NO: 1157399 - RNA, 19 nt, Artificial Sequence
  Description of Artificial Sequence: Synthetic oligonucleotide
ggcguccugguaacugugc

SEQ ID NO: 1157400 - RNA, 19 nt, Artificial Sequence
  Description of Artificial Sequence: Synthetic oligonucleotide
ugccugccccgaagacucu

SEQ ID NO: 1157401 - RNA, 19 nt, Artificial Sequence
  Description of Artificial Sequence: Synthetic oligonucleotide
gccccgaagacucuggauu

SEQ ID NO: 1157402 - RNA, 19 nt, Artificial Sequence
  Description of Artificial Sequence: Synthetic oligonucleotide
ggguacaagguuaccuucu

SEQ ID NO: 1157403 - RNA, 19 nt, Artificial Sequence
  Description of Artificial Sequence: Synthetic oligonucleotide
ggcucaggucuacuucuaa

SEQ ID NO: 1157404 - RNA, 19 nt, Artificial Sequence
  Description of Artificial Sequence: Synthetic oligonucleotide
cugccccgaagacucugga

SEQ ID NO: 1157405 - RNA, 19 nt, Artificial Sequence
  Description of Artificial Sequence: Synthetic oligonucleotide
ccgaagacucuggauuuuc

SEQ ID NO: 1157406 - RNA, 19 nt, Artificial Sequence
  Description of Artificial Sequence: Synthetic oligonucleotide
cgaguagcaauguggcuaa

SEQ ID NO: 1157407 - RNA, 19 nt, Artificial Sequence
  Description of Artificial Sequence: Synthetic oligonucleotide
ccgcagaaacuggauauca

SEQ ID NO: 1157408 - RNA, 19 nt, Artificial Sequence
  Description of Artificial Sequence: Synthetic oligonucleotide
ggcccgcagaaacuggaua

SEQ ID NO: 1157409 - RNA, 19 nt, Artificial Sequence
  Description of Artificial Sequence: Synthetic oligonucleotide
ccccaaacuuugacacaac

SEQ ID NO: 1157410 - RNA, 19 nt, Artificial Sequence
  Description of Artificial Sequence: Synthetic oligonucleotide
ggggcacguaugccacagc

SEQ ID NO: 1157411 - RNA, 19 nt, Artificial Sequence
  Description of Artificial Sequence: Synthetic oligonucleotide
gccuggaaagacugaguau

SEQ ID NO: 1157412 - RNA, 19 nt, Artificial Sequence
  Description of Artificial Sequence: Synthetic oligonucleotide
cgugcacacucaagaacca

SEQ ID NO: 1157413 - RNA, 19 nt, Artificial Sequence
  Description of Artificial Sequence: Synthetic oligonucleotide
gcguccugguaacugugcu

SEQ ID NO: 1157414 - RNA, 19 nt, Artificial Sequence
  Description of Artificial Sequence: Synthetic oligonucleotide
ccaugcagagauccaagau

SEQ ID NO: 1157415 - RNA, 19 nt, Artificial Sequence
  Description of Artificial Sequence: Synthetic oligonucleotide
caccaagcucagcuuuagu

SEQ ID NO: 1157416 - RNA, 19 nt, Artificial Sequence
  Description of Artificial Sequence: Synthetic oligonucleotide
cgaguucaagaaagaugga

SEQ ID NO: 1157417 - RNA, 19 nt, Artificial Sequence
  Description of Artificial Sequence: Synthetic oligonucleotide
gccugccccgaagacucug

SEQ ID NO: 1157418 - RNA, 19 nt, Artificial Sequence
  Description of Artificial Sequence: Synthetic oligonucleotide
gguuaccuucugugccucu

SEQ ID NO: 1157419 - RNA, 19 nt, Artificial Sequence
  Description of Artificial Sequence: Synthetic oligonucleotide
gcauuagagcagugacgau

SEQ ID NO: 1157420 - RNA, 19 nt, Artificial Sequence
  Description of Artificial Sequence: Synthetic oligonucleotide
gcaucaccuuagaguggca

SEQ ID NO: 1157421 - RNA, 19 nt, Artificial Sequence
  Description of Artificial Sequence: Synthetic oligonucleotide
cgcuccaugcagagaucca

SEQ ID NO: 1157422 - RNA, 19 nt, Artificial Sequence
  Description of Artificial Sequence: Synthetic oligonucleotide
cgcugugcagauccuuaaa

SEQ ID NO: 1157423 - RNA, 19 nt, Artificial Sequence
  Description of Artificial Sequence: Synthetic oligonucleotide
ccuuaacauaaggccccaa

SEQ ID NO: 1157424 - RNA, 19 nt, Artificial Sequence
  Description of Artificial Sequence: Synthetic oligonucleotide
gccguccuucaugcauaac

SEQ ID NO: 1157425 - RNA, 19 nt, Artificial Sequence
  Description of Artificial Sequence: Synthetic oligonucleotide
gcaaggcguccugguaacu

SEQ ID NO: 1157426 - RNA, 19 nt, Artificial Sequence
  Description of Artificial Sequence: Synthetic oligonucleotide
uuugguagcuagaacaugg

SEQ ID NO: 1157427 - RNA, 19 nt, Artificial Sequence
  Description of Artificial Sequence: Synthetic oligonucleotide
ucauccgucaccaagaaac

SEQ ID NO: 1157428 - RNA, 19 nt, Artificial Sequence
  Description of Artificial Sequence: Synthetic oligonucleotide
acuuggaaaucggugaugc

SEQ ID NO: 1157429 - RNA, 19 nt, Artificial Sequence
  Description of Artificial Sequence: Synthetic oligonucleotide
ucuccgaagucccagaaac

SEQ ID NO: 1157430 - RNA, 19 nt, Artificial Sequence
  Description of Artificial Sequence: Synthetic oligonucleotide
aaagauaaugggugcguca

SEQ ID NO: 1157431 - RNA, 19 nt, Artificial Sequence
  Description of Artificial Sequence: Synthetic oligonucleotide
aggacgaguaccucacucc

SEQ ID NO: 1157432 - RNA, 19 nt, Artificial Sequence
  Description of Artificial Sequence: Synthetic oligonucleotide
caagagagcagcuacccag

SEQ ID NO: 1157433 - RNA, 19 nt, Artificial Sequence
  Description of Artificial Sequence: Synthetic oligonucleotide
aaagacaacuccgaaggcu

SEQ ID NO: 1157434 - RNA, 19 nt, Artificial Sequence
  Description of Artificial Sequence: Synthetic oligonucleotide
guaauagccagcgacacug

SEQ ID NO: 1157435 - RNA, 19 nt, Artificial Sequence
  Description of Artificial Sequence: Synthetic oligonucleotide
guagguucaguguagggug

SEQ ID NO: 1157436 - RNA, 19 nt, Artificial Sequence
  Description of Artificial Sequence: Synthetic oligonucleotide
ucaccaagaaacagucuag

SEQ ID NO: 1157437 - RNA, 19 nt, Artificial Sequence
  Description of Artificial Sequence: Synthetic oligonucleotide
aagagaugcuguagguucc

SEQ ID NO: 1157438 - RNA, 19 nt, Artificial Sequence
  Description of Artificial Sequence: Synthetic oligonucleotide
ggagcuaggauguuaagug

SEQ ID NO: 1157439 - RNA, 19 nt, Artificial Sequence
  Description of Artificial Sequence: Synthetic oligonucleotide
gagcuaggauguuaagugg

SEQ ID NO: 1157440 - RNA, 19 nt, Artificial Sequence
  Description of Artificial Sequence: Synthetic oligonucleotide
gacguggguaacuuggcag

SEQ ID NO: 1157441 - RNA, 19 nt, Artificial Sequence
  Description of Artificial Sequence: Synthetic oligonucleotide
agugcaagaaggaagagaa

SEQ ID NO: 1157442 - RNA, 19 nt, Artificial Sequence
  Description of Artificial Sequence: Synthetic oligonucleotide
acgaguaccucacucccac

SEQ ID NO: 1157443 - RNA, 19 nt, Artificial Sequence
  Description of Artificial Sequence: Synthetic oligonucleotide
aaacccucaugcugacucg

SEQ ID NO: 1157444 - RNA, 19 nt, Artificial Sequence
  Description of Artificial Sequence: Synthetic oligonucleotide
cuugcgcugacccugcucc

SEQ ID NO: 1157445 - RNA, 19 nt, Artificial Sequence
  Description of Artificial Sequence: Synthetic oligonucleotide
aacuuggcagauguaagug

SEQ ID NO: 1157446 - RNA, 19 nt, Artificial Sequence
  Description of Artificial Sequence: Synthetic oligonucleotide
aagacaacuccgaaggcug

SEQ ID NO: 1157447 - RNA, 19 nt, Artificial Sequence
  Description of Artificial Sequence: Synthetic oligonucleotide
aucggugaugccuucuagg

SEQ ID NO: 1157448 - RNA, 19 nt, Artificial Sequence
  Description of Artificial Sequence: Synthetic oligonucleotide
auuuguugagcuugguaca

SEQ ID NO: 1157449 - RNA, 19 nt, Artificial Sequence
  Description of Artificial Sequence: Synthetic oligonucleotide
uacccagagugccucauag

SEQ ID NO: 1157450 - RNA, 19 nt, Artificial Sequence
  Description of Artificial Sequence: Synthetic oligonucleotide
acgacucaaggcuuggguc

SEQ ID NO: 1157451 - RNA, 19 nt, Artificial Sequence
  Description of Artificial Sequence: Synthetic oligonucleotide
uaacuuggcagauguaagu

SEQ ID NO: 1157452 - RNA, 19 nt, Artificial Sequence
  Description of Artificial Sequence: Synthetic oligonucleotide
agugaucuggcagauguag

SEQ ID NO: 1157453 - RNA, 19 nt, Artificial Sequence
  Description of Artificial Sequence: Synthetic oligonucleotide
uccgucaccaagaaacagu

SEQ ID NO: 1157454 - RNA, 19 nt, Artificial Sequence
  Description of Artificial Sequence: Synthetic oligonucleotide
uauuuggaggcaagagagc

SEQ ID NO: 1157455 - RNA, 19 nt, Artificial Sequence
  Description of Artificial Sequence: Synthetic oligonucleotide
uccucucggauccauguca

SEQ ID NO: 1157456 - RNA, 19 nt, Artificial Sequence
  Description of Artificial Sequence: Synthetic oligonucleotide
aucuguaccgaguccacug

SEQ ID NO: 1157457 - RNA, 19 nt, Artificial Sequence
  Description of Artificial Sequence: Synthetic oligonucleotide
uggcaaagaaacucgcugu

SEQ ID NO: 1157458 - RNA, 19 nt, Artificial Sequence
  Description of Artificial Sequence: Synthetic oligonucleotide
ucguccuuuagagugaggu

SEQ ID NO: 1157459 - RNA, 19 nt, Artificial Sequence
  Description of Artificial Sequence: Synthetic oligonucleotide
agcgcccuugcgcugaccc

SEQ ID NO: 1157460 - RNA, 19 nt, Artificial Sequence
  Description of Artificial Sequence: Synthetic oligonucleotide
uguugcugaugaaccaagc

SEQ ID NO: 1157461 - RNA, 19 nt, Artificial Sequence
  Description of Artificial Sequence: Synthetic oligonucleotide
aggauguuaagugggauga

SEQ ID NO: 1157462 - RNA, 19 nt, Artificial Sequence
  Description of Artificial Sequence: Synthetic oligonucleotide
acagaccaggacgaguacc

SEQ ID NO: 1157463 - RNA, 19 nt, Artificial Sequence
  Description of Artificial Sequence: Synthetic oligonucleotide
uagccagcgacacugcaga

SEQ ID NO: 1157464 - RNA, 19 nt, Artificial Sequence
  Description of Artificial Sequence: Synthetic oligonucleotide
aauagccagcgacacugca

SEQ ID NO: 1157465 - RNA, 19 nt, Artificial Sequence
  Description of Artificial Sequence: Synthetic oligonucleotide
gauccccggaugaagagag

SEQ ID NO: 1157466 - RNA, 19 nt, Artificial Sequence
  Description of Artificial Sequence: Synthetic oligonucleotide
ucaaagauaaugggugcgu

SEQ ID NO: 1157467 - RNA, 19 nt, Artificial Sequence
  Description of Artificial Sequence: Synthetic oligonucleotide
agcuguauaccagcuggcc

SEQ ID NO: 1157468 - RNA, 19 nt, Artificial Sequence
  Description of Artificial Sequence: Synthetic oligonucleotide
guagugaucuggcagaugu

SEQ ID NO: 1157469 - RNA, 19 nt, Artificial Sequence
  Description of Artificial Sequence: Synthetic oligonucleotide
agcuaggauguuaaguggg

SEQ ID NO: 1157470 - RNA, 19 nt, Artificial Sequence
  Description of Artificial Sequence: Synthetic oligonucleotide
uguagguucccaucuugcu

SEQ ID NO: 1157471 - RNA, 19 nt, Artificial Sequence
  Description of Artificial Sequence: Synthetic oligonucleotide
aaacagucuaggacuaugu

SEQ ID NO: 1157472 - RNA, 19 nt, Artificial Sequence
  Description of Artificial Sequence: Synthetic oligonucleotide
agaaugcuggcaaagacaa

SEQ ID NO: 1157473 - RNA, 19 nt, Artificial Sequence
  Description of Artificial Sequence: Synthetic oligonucleotide
ucaggccuuuuccaguccc

SEQ ID NO: 1157474 - RNA, 19 nt, Artificial Sequence
  Description of Artificial Sequence: Synthetic oligonucleotide
cagaggguaauagccagcg

SEQ ID NO: 1157475 - RNA, 19 nt, Artificial Sequence
  Description of Artificial Sequence: Synthetic oligonucleotide
uaugucgguggcuugccac

SEQ ID NO: 1157476 - RNA, 19 nt, Artificial Sequence
  Description of Artificial Sequence: Synthetic oligonucleotide
aacaugggaacuccacuuu

SEQ ID NO: 1157477 - RNA, 19 nt, Artificial Sequence
  Description of Artificial Sequence: Synthetic oligonucleotide
uccccuagacaccugcaug

SEQ ID NO: 1157478 - RNA, 19 nt, Artificial Sequence
  Description of Artificial Sequence: Synthetic oligonucleotide
cuguagguucccaucuugc

SEQ ID NO: 1157479 - RNA, 19 nt, Artificial Sequence
  Description of Artificial Sequence: Synthetic oligonucleotide
ccagcuguauaccagcugg

SEQ ID NO: 1157480 - RNA, 19 nt, Artificial Sequence
  Description of Artificial Sequence: Synthetic oligonucleotide
uauaguacccuggggacuc

SEQ ID NO: 1157481 - RNA, 19 nt, Artificial Sequence
  Description of Artificial Sequence: Synthetic oligonucleotide
uggaaaucggugaugccuu

SEQ ID NO: 1157482 - RNA, 19 nt, Artificial Sequence
  Description of Artificial Sequence: Synthetic oligonucleotide
augggugcgucaucuuugg

SEQ ID NO: 1157483 - RNA, 19 nt, Artificial Sequence
  Description of Artificial Sequence: Synthetic oligonucleotide
augucgguggcuugccacg

SEQ ID NO: 1157484 - RNA, 19 nt, Artificial Sequence
  Description of Artificial Sequence: Synthetic oligonucleotide
agagaggcauccccagccg

SEQ ID NO: 1157485 - RNA, 19 nt, Artificial Sequence
  Description of Artificial Sequence: Synthetic oligonucleotide
ucagggguagguucagugu

SEQ ID NO: 1157486 - RNA, 19 nt, Artificial Sequence
  Description of Artificial Sequence: Synthetic oligonucleotide
ugcggucucagcaucuccu

SEQ ID NO: 1157487 - RNA, 19 nt, Artificial Sequence
  Description of Artificial Sequence: Synthetic oligonucleotide
guccccucguccuuuagag

SEQ ID NO: 1157488 - RNA, 19 nt, Artificial Sequence
  Description of Artificial Sequence: Synthetic oligonucleotide
uccgaagucccagaaacaa

SEQ ID NO: 1157489 - RNA, 19 nt, Artificial Sequence
  Description of Artificial Sequence: Synthetic oligonucleotide
aaaucggugaugccuucua

SEQ ID NO: 1157490 - RNA, 19 nt, Artificial Sequence
  Description of Artificial Sequence: Synthetic oligonucleotide
uaaugggugcgucaucuuu

SEQ ID NO: 1157491 - RNA, 19 nt, Artificial Sequence
  Description of Artificial Sequence: Synthetic oligonucleotide
cacgggugcccuuugguag

SEQ ID NO: 1157492 - RNA, 19 nt, Artificial Sequence
  Description of Artificial Sequence: Synthetic oligonucleotide
cucugugugugggaaaacc

SEQ ID NO: 1157493 - RNA, 19 nt, Artificial Sequence
  Description of Artificial Sequence: Synthetic oligonucleotide
uggggaaucuguaccgagu

SEQ ID NO: 1157494 - RNA, 19 nt, Artificial Sequence
  Description of Artificial Sequence: Synthetic oligonucleotide
ugcaguccuuauaguaccc

SEQ ID NO: 1157495 - RNA, 19 nt, Artificial Sequence
  Description of Artificial Sequence: Synthetic oligonucleotide
acuaugucgguggcuugcc

SEQ ID NO: 1157496 - RNA, 19 nt, Artificial Sequence
  Description of Artificial Sequence: Synthetic oligonucleotide
caccaagaaacagucuagg

SEQ ID NO: 1157497 - RNA, 19 nt, Artificial Sequence
  Description of Artificial Sequence: Synthetic oligonucleotide
uagagugagguuggguaag

SEQ ID NO: 1157498 - RNA, 19 nt, Artificial Sequence
  Description of Artificial Sequence: Synthetic oligonucleotide
gauaaugggugcgucaucu

SEQ ID NO: 1157499 - RNA, 19 nt, Artificial Sequence
  Description of Artificial Sequence: Synthetic oligonucleotide
gagauccccggaugaagag

SEQ ID NO: 1157500 - RNA, 19 nt, Artificial Sequence
  Description of Artificial Sequence: Synthetic oligonucleotide
uuggcgagccgcuugugcu

SEQ ID NO: 1157501 - RNA, 19 nt, Artificial Sequence
  Description of Artificial Sequence: Synthetic oligonucleotide
uuauaguacccuggggacu

SEQ ID NO: 1157502 - RNA, 19 nt, Artificial Sequence
  Description of Artificial Sequence: Synthetic oligonucleotide
cuugccacgguccgucugc

SEQ ID NO: 1157503 - RNA, 19 nt, Artificial Sequence
  Description of Artificial Sequence: Synthetic oligonucleotide
caaagacaacuccgaaggc

SEQ ID NO: 1157504 - RNA, 19 nt, Artificial Sequence
  Description of Artificial Sequence: Synthetic oligonucleotide
ccucaugcugacucgaagg

SEQ ID NO: 1157505 - RNA, 19 nt, Artificial Sequence
  Description of Artificial Sequence: Synthetic oligonucleotide
uucaguguagggugccaga

SEQ ID NO: 1157506 - RNA, 19 nt, Artificial Sequence
  Description of Artificial Sequence: Synthetic oligonucleotide
gggugcgucaucuuuggcc

SEQ ID NO: 1157507 - RNA, 19 nt, Artificial Sequence
  Description of Artificial Sequence: Synthetic oligonucleotide
ucacuuggcgagccgcuug

SEQ ID NO: 1157508 - RNA, 19 nt, Artificial Sequence
  Description of Artificial Sequence: Synthetic oligonucleotide
cuuggaaaucggugaugcc

SEQ ID NO: 1157509 - RNA, 19 nt, Artificial Sequence
  Description of Artificial Sequence: Synthetic oligonucleotide
uggagauccccggaugaag

SEQ ID NO: 1157510 - RNA, 19 nt, Artificial Sequence
  Description of Artificial Sequence: Synthetic oligonucleotide
cucgaaggggcucuuccag

SEQ ID NO: 1157511 - RNA, 19 nt, Artificial Sequence
  Description of Artificial Sequence: Synthetic oligonucleotide
agcguagcgcccuugcgcu

SEQ ID NO: 1157512 - RNA, 19 nt, Artificial Sequence
  Description of Artificial Sequence: Synthetic oligonucleotide
gacuaugucgguggcuugc

SEQ ID NO: 1157513 - RNA, 19 nt, Artificial Sequence
  Description of Artificial Sequence: Synthetic oligonucleotide
gagccaaacagagcagcag

SEQ ID NO: 1157514 - RNA, 19 nt, Artificial Sequence
  Description of Artificial Sequence: Synthetic oligonucleotide
caguccuuauaguacccug

SEQ ID NO: 1157515 - RNA, 19 nt, Artificial Sequence
  Description of Artificial Sequence: Synthetic oligonucleotide
agacuugggcuggaauccc

SEQ ID NO: 1157516 - RNA, 19 nt, Artificial Sequence
  Description of Artificial Sequence: Synthetic oligonucleotide
guuccuuggagcucccuca

SEQ ID NO: 1157517 - RNA, 19 nt, Artificial Sequence
  Description of Artificial Sequence: Synthetic oligonucleotide
gugagagaggcauccccag

SEQ ID NO: 1157518 - RNA, 19 nt, Artificial Sequence
  Description of Artificial Sequence: Synthetic oligonucleotide
aaucuguaccgaguccacu

SEQ ID NO: 1157519 - RNA, 19 nt, Artificial Sequence
  Description of Artificial Sequence: Synthetic oligonucleotide
aguaccucacucccacaca

SEQ ID NO: 1157520 - RNA, 19 nt, Artificial Sequence
  Description of Artificial Sequence: Synthetic oligonucleotide
cagggagguagugaucugg

SEQ ID NO: 1157521 - RNA, 19 nt, Artificial Sequence
  Description of Artificial Sequence: Synthetic oligonucleotide
ugucauccgucaccaagaa

SEQ ID NO: 1157522 - RNA, 19 nt, Artificial Sequence
  Description of Artificial Sequence: Synthetic oligonucleotide
cuuggcgagccgcuugugc

SEQ ID NO: 1157523 - RNA, 19 nt, Artificial Sequence
  Description of Artificial Sequence: Synthetic oligonucleotide
acaacuccgaaggcuguuc

SEQ ID NO: 1157524 - RNA, 19 nt, Artificial Sequence
  Description of Artificial Sequence: Synthetic oligonucleotide
ugugugggaaaacccucau

SEQ ID NO: 1157525 - RNA, 19 nt, Artificial Sequence
  Description of Artificial Sequence: Synthetic oligonucleotide
cagcguagcgcccuugcgc

SEQ ID NO: 1157526 - RNA, 19 nt, Artificial Sequence
  Description of Artificial Sequence: Synthetic oligonucleotide
gugaucuggcagauguagg

SEQ ID NO: 1157527 - RNA, 19 nt, Artificial Sequence
  Description of Artificial Sequence: Synthetic oligonucleotide
auagccagcgacacugcag

SEQ ID NO: 1157528 - RNA, 19 nt, Artificial Sequence
  Description of Artificial Sequence: Synthetic oligonucleotide
ugugcucaguucuuucuuu

SEQ ID NO: 1157529 - RNA, 19 nt, Artificial Sequence
  Description of Artificial Sequence: Synthetic oligonucleotide
agucgcuucucuuucgcuu

SEQ ID NO: 1157530 - RNA, 19 nt, Artificial Sequence
  Description of Artificial Sequence: Synthetic oligonucleotide
aagaaacagucuaggacua

SEQ ID NO: 1157531 - RNA, 19 nt, Artificial Sequence
  Description of Artificial Sequence: Synthetic oligonucleotide
ggugcgucaucuuuggcca

SEQ ID NO: 1157532 - RNA, 19 nt, Artificial Sequence
  Description of Artificial Sequence: Synthetic oligonucleotide
gacgguggaccccagcaga

SEQ ID NO: 1157533 - RNA, 19 nt, Artificial Sequence
  Description of Artificial Sequence: Synthetic oligonucleotide
agacguggguaacuuggca

SEQ ID NO: 1157534 - RNA, 19 nt, Artificial Sequence
  Description of Artificial Sequence: Synthetic oligonucleotide
uaccgaguccacugaggcc

SEQ ID NO: 1157535 - RNA, 19 nt, Artificial Sequence
  Description of Artificial Sequence: Synthetic oligonucleotide
auccccagccgcguguagc

SEQ ID NO: 1157536 - RNA, 19 nt, Artificial Sequence
  Description of Artificial Sequence: Synthetic oligonucleotide
gucccagaaacaacagugc

SEQ ID NO: 1157537 - RNA, 19 nt, Artificial Sequence
  Description of Artificial Sequence: Synthetic oligonucleotide
cuuggagcucccucacuug

SEQ ID NO: 1157538 - RNA, 19 nt, Artificial Sequence
  Description of Artificial Sequence: Synthetic oligonucleotide
cuaggacuaugucgguggc

SEQ ID NO: 1157539 - RNA, 19 nt, Artificial Sequence
  Description of Artificial Sequence: Synthetic oligonucleotide
agccgcuugugcucaguuc

SEQ ID NO: 1157540 - RNA, 19 nt, Artificial Sequence
  Description of Artificial Sequence: Synthetic oligonucleotide
agaaacucgcugucuccga

SEQ ID NO: 1157541 - RNA, 19 nt, Artificial Sequence
  Description of Artificial Sequence: Synthetic oligonucleotide
caaagauaaugggugcguc

SEQ ID NO: 1157542 - RNA, 19 nt, Artificial Sequence
  Description of Artificial Sequence: Synthetic oligonucleotide
ugcucugugugugggaaaa

SEQ ID NO: 1157543 - RNA, 19 nt, Artificial Sequence
  Description of Artificial Sequence: Synthetic oligonucleotide
ggacgaguaccucacuccc

SEQ ID NO: 1157544 - RNA, 19 nt, Artificial Sequence
  Description of Artificial Sequence: Synthetic oligonucleotide
ugccuuugugcugcagccg

SEQ ID NO: 1157545 - RNA, 19 nt, Artificial Sequence
  Description of Artificial Sequence: Synthetic oligonucleotide
guucaguguagggugccag

SEQ ID NO: 1157546 - RNA, 19 nt, Artificial Sequence
  Description of Artificial Sequence: Synthetic oligonucleotide
agucaccacaguggaagag

SEQ ID NO: 1157547 - RNA, 19 nt, Artificial Sequence
  Description of Artificial Sequence: Synthetic oligonucleotide
ccuggugccauggagagac

SEQ ID NO: 1157548 - RNA, 19 nt, Artificial Sequence
  Description of Artificial Sequence: Synthetic oligonucleotide
uagcuagaacaugggaacu

SEQ ID NO: 1157549 - RNA, 19 nt, Artificial Sequence
  Description of Artificial Sequence: Synthetic oligonucleotide
acaugggaacuccacuuuu

SEQ ID NO: 1157550 - RNA, 19 nt, Artificial Sequence
  Description of Artificial Sequence: Synthetic oligonucleotide
uggugccauggagagacug

SEQ ID NO: 1157551 - RNA, 19 nt, Artificial Sequence
  Description of Artificial Sequence: Synthetic oligonucleotide
gagacguggguaacuuggc

SEQ ID NO: 1157552 - RNA, 19 nt, Artificial Sequence
  Description of Artificial Sequence: Synthetic oligonucleotide
agugccucauagucuuggu

SEQ ID NO: 1157553 - RNA, 19 nt, Artificial Sequence
  Description of Artificial Sequence: Synthetic oligonucleotide
auccgucaccaagaaacag

SEQ ID NO: 1157554 - RNA, 19 nt, Artificial Sequence
  Description of Artificial Sequence: Synthetic oligonucleotide
gaaucuguaccgaguccac

SEQ ID NO: 1157555 - RNA, 19 nt, Artificial Sequence
  Description of Artificial Sequence: Synthetic oligonucleotide
gcuagaacaugggaacucc

SEQ ID NO: 1157556 - RNA, 19 nt, Artificial Sequence
  Description of Artificial Sequence: Synthetic oligonucleotide
cacguccagaggguaauag

SEQ ID NO: 1157557 - RNA, 19 nt, Artificial Sequence
  Description of Artificial Sequence: Synthetic oligonucleotide
gacgacucaaggcuugggu

SEQ ID NO: 1157558 - RNA, 19 nt, Artificial Sequence
  Description of Artificial Sequence: Synthetic oligonucleotide
ugaugccuucuagggagcc

SEQ ID NO: 1157559 - RNA, 19 nt, Artificial Sequence
  Description of Artificial Sequence: Synthetic oligonucleotide
cuagaacaugggaacucca

SEQ ID NO: 1157560 - RNA, 19 nt, Artificial Sequence
  Description of Artificial Sequence: Synthetic oligonucleotide
ggugcccuuugguagcuag

SEQ ID NO: 1157561 - RNA, 19 nt, Artificial Sequence
  Description of Artificial Sequence: Synthetic oligonucleotide
agcacgggugcccuuuggu

SEQ ID NO: 1157562 - RNA, 19 nt, Artificial Sequence
  Description of Artificial Sequence: Synthetic oligonucleotide
aacccucaugcugacucga

SEQ ID NO: 1157563 - RNA, 19 nt, Artificial Sequence
  Description of Artificial Sequence: Synthetic oligonucleotide
cacagggugucuccuucag

SEQ ID NO: 1157564 - RNA, 19 nt, Artificial Sequence
  Description of Artificial Sequence: Synthetic oligonucleotide
ccccucguccuuuagagug

SEQ ID NO: 1157565 - RNA, 19 nt, Artificial Sequence
  Description of Artificial Sequence: Synthetic oligonucleotide
ggcggcagguccuuguuug

SEQ ID NO: 1157566 - RNA, 19 nt, Artificial Sequence
  Description of Artificial Sequence: Synthetic oligonucleotide
uguauaccagcuggccacu

SEQ ID NO: 1157567 - RNA, 19 nt, Artificial Sequence
  Description of Artificial Sequence: Synthetic oligonucleotide
agagagccaaacagagcag

SEQ ID NO: 1157568 - RNA, 19 nt, Artificial Sequence
  Description of Artificial Sequence: Synthetic oligonucleotide
cccagagugccucauaguc

SEQ ID NO: 1157569 - RNA, 19 nt, Artificial Sequence
  Description of Artificial Sequence: Synthetic oligonucleotide
ggcaaagaaacucgcuguc

SEQ ID NO: 1157570 - RNA, 19 nt, Artificial Sequence
  Description of Artificial Sequence: Synthetic oligonucleotide
gcuguagguucccaucuug

SEQ ID NO: 1157571 - RNA, 19 nt, Artificial Sequence
  Description of Artificial Sequence: Synthetic oligonucleotide
ggcaagagagcagcuaccc

SEQ ID NO: 1157572 - RNA, 19 nt, Artificial Sequence
  Description of Artificial Sequence: Synthetic oligonucleotide
gucuaggacuaugucggug

SEQ ID NO: 1157573 - RNA, 19 nt, Artificial Sequence
  Description of Artificial Sequence: Synthetic oligonucleotide
uccccagccgcguguagcu

SEQ ID NO: 1157574 - RNA, 19 nt, Artificial Sequence
  Description of Artificial Sequence: Synthetic oligonucleotide
ggggaaucuguaccgaguc

SEQ ID NO: 1157575 - RNA, 19 nt, Artificial Sequence
  Description of Artificial Sequence: Synthetic oligonucleotide
cauccgucaccaagaaaca

SEQ ID NO: 1157576 - RNA, 19 nt, Artificial Sequence
  Description of Artificial Sequence: Synthetic oligonucleotide
ucgaugccugucauccguc

SEQ ID NO: 1157577 - RNA, 19 nt, Artificial Sequence
  Description of Artificial Sequence: Synthetic oligonucleotide
ucccucacuuggcgagccg

SEQ ID NO: 1157578 - RNA, 19 nt, Artificial Sequence
  Description of Artificial Sequence: Synthetic oligonucleotide
uugguacagggagguagug

SEQ ID NO: 1157579 - RNA, 19 nt, Artificial Sequence
  Description of Artificial Sequence: Synthetic oligonucleotide
cagauaccagcugggcucc

SEQ ID NO: 1157580 - RNA, 19 nt, Artificial Sequence
  Description of Artificial Sequence: Synthetic oligonucleotide
ucccacaccucagcacggg

SEQ ID NO: 1157581 - RNA, 19 nt, Artificial Sequence
  Description of Artificial Sequence: Synthetic oligonucleotide
agaggguaauagccagcga

SEQ ID NO: 1157582 - RNA, 19 nt, Artificial Sequence
  Description of Artificial Sequence: Synthetic oligonucleotide
ucgguggcuugccacgguc

SEQ ID NO: 1157583 - RNA, 19 nt, Artificial Sequence
  Description of Artificial Sequence: Synthetic oligonucleotide
gugcucacuuggaaaucgg

SEQ ID NO: 1157584 - RNA, 19 nt, Artificial Sequence
  Description of Artificial Sequence: Synthetic oligonucleotide
ucagcacgggugcccuuug

SEQ ID NO: 1157585 - RNA, 19 nt, Artificial Sequence
  Description of Artificial Sequence: Synthetic oligonucleotide
agauccccggaugaagaga

SEQ ID NO: 1157586 - RNA, 19 nt, Artificial Sequence
  Description of Artificial Sequence: Synthetic oligonucleotide
agggguagguucaguguag

SEQ ID NO: 1157587 - RNA, 19 nt, Artificial Sequence
  Description of Artificial Sequence: Synthetic oligonucleotide
agacgacucaaggcuuggg

SEQ ID NO: 1157588 - RNA, 19 nt, Artificial Sequence
  Description of Artificial Sequence: Synthetic oligonucleotide
gccuuugugcugcagccgc

SEQ ID NO: 1157589 - RNA, 19 nt, Artificial Sequence
  Description of Artificial Sequence: Synthetic oligonucleotide
gaccccagcagacgacuca

SEQ ID NO: 1157590 - RNA, 19 nt, Artificial Sequence
  Description of Artificial Sequence: Synthetic oligonucleotide
gggaaucuguaccgagucc

SEQ ID NO: 1157591 - RNA, 19 nt, Artificial Sequence
  Description of Artificial Sequence: Synthetic oligonucleotide
cuggaaucccacccagcuc

SEQ ID NO: 1157592 - RNA, 19 nt, Artificial Sequence
  Description of Artificial Sequence: Synthetic oligonucleotide
ccgucaccaagaaacaguc

SEQ ID NO: 1157593 - RNA, 19 nt, Artificial Sequence
  Description of Artificial Sequence: Synthetic oligonucleotide
gccacuccacaccaaggag

SEQ ID NO: 1157594 - RNA, 19 nt, Artificial Sequence
  Description of Artificial Sequence: Synthetic oligonucleotide
ugggugcgucaucuuuggc

SEQ ID NO: 1157595 - RNA, 19 nt, Artificial Sequence
  Description of Artificial Sequence: Synthetic oligonucleotide
uaggacuaugucgguggcu

SEQ ID NO: 1157596 - RNA, 19 nt, Artificial Sequence
  Description of Artificial Sequence: Synthetic oligonucleotide
cacuuggaaaucggugaug

SEQ ID NO: 1157597 - RNA, 19 nt, Artificial Sequence
  Description of Artificial Sequence: Synthetic oligonucleotide
augccuucuagggagccau

SEQ ID NO: 1157598 - RNA, 19 nt, Artificial Sequence
  Description of Artificial Sequence: Synthetic oligonucleotide
cagacgacucaaggcuugg

SEQ ID NO: 1157599 - RNA, 19 nt, Artificial Sequence
  Description of Artificial Sequence: Synthetic oligonucleotide
gguagguucaguguagggu

SEQ ID NO: 1157600 - RNA, 19 nt, Artificial Sequence
  Description of Artificial Sequence: Synthetic oligonucleotide
cugcggucucagcaucucc

SEQ ID NO: 1157601 - RNA, 19 nt, Artificial Sequence
  Description of Artificial Sequence: Synthetic oligonucleotide
ggugccauggagagacugc

SEQ ID NO: 1157602 - RNA, 19 nt, Artificial Sequence
  Description of Artificial Sequence: Synthetic oligonucleotide
cucguccuuuagagugagg

SEQ ID NO: 1157603 - RNA, 19 nt, Artificial Sequence
  Description of Artificial Sequence: Synthetic oligonucleotide
cagaccaggacgaguaccu

SEQ ID NO: 1157604 - RNA, 19 nt, Artificial Sequence
  Description of Artificial Sequence: Synthetic oligonucleotide
cagggguagguucagugua

SEQ ID NO: 1157605 - RNA, 19 nt, Artificial Sequence
  Description of Artificial Sequence: Synthetic oligonucleotide
gugugugggaaaacccuca

SEQ ID NO: 1157606 - RNA, 19 nt, Artificial Sequence
  Description of Artificial Sequence: Synthetic oligonucleotide
cuuggugggccuuggcaaa

SEQ ID NO: 1157607 - RNA, 19 nt, Artificial Sequence
  Description of Artificial Sequence: Synthetic oligonucleotide
augauuuguugagcuuggu

SEQ ID NO: 1157608 - RNA, 19 nt, Artificial Sequence
  Description of Artificial Sequence: Synthetic oligonucleotide
uggcuugccacgguccguc

SEQ ID NO: 1157609 - RNA, 19 nt, Artificial Sequence
  Description of Artificial Sequence: Synthetic oligonucleotide
agaaacagucuaggacuau

SEQ ID NO: 1157610 - RNA, 19 nt, Artificial Sequence
  Description of Artificial Sequence: Synthetic oligonucleotide
gacgaguaccucacuccca

SEQ ID NO: 1157611 - RNA, 19 nt, Artificial Sequence
  Description of Artificial Sequence: Synthetic oligonucleotide
gcuggaaucccacccagcu

SEQ ID NO: 1157612 - RNA, 19 nt, Artificial Sequence
  Description of Artificial Sequence: Synthetic oligonucleotide
gccgccacuccacaccaag

SEQ ID NO: 1157613 - RNA, 19 nt, Artificial Sequence
  Description of Artificial Sequence: Synthetic oligonucleotide
ggagauccccggaugaaga

SEQ ID NO: 1157614 - RNA, 19 nt, Artificial Sequence
  Description of Artificial Sequence: Synthetic oligonucleotide
gaaaucggugaugccuucu

SEQ ID NO: 1157615 - RNA, 19 nt, Artificial Sequence
  Description of Artificial Sequence: Synthetic oligonucleotide
gcuugugcucaguucuuuc

SEQ ID NO: 1157616 - RNA, 19 nt, Artificial Sequence
  Description of Artificial Sequence: Synthetic oligonucleotide
gucccacaccucagcacgg

SEQ ID NO: 1157617 - RNA, 19 nt, Artificial Sequence
  Description of Artificial Sequence: Synthetic oligonucleotide
cucccucacuuggcgagcc

SEQ ID NO: 1157618 - RNA, 19 nt, Artificial Sequence
  Description of Artificial Sequence: Synthetic oligonucleotide
caguguagggugccagaca

SEQ ID NO: 1157619 - RNA, 19 nt, Artificial Sequence
  Description of Artificial Sequence: Synthetic oligonucleotide
gacuugggcuggaauccca

SEQ ID NO: 1157620 - RNA, 19 nt, Artificial Sequence
  Description of Artificial Sequence: Synthetic oligonucleotide
cagauguaaguggcaccug

SEQ ID NO: 1157621 - RNA, 19 nt, Artificial Sequence
  Description of Artificial Sequence: Synthetic oligonucleotide
cucgaugccugucauccgu

SEQ ID NO: 1157622 - RNA, 19 nt, Artificial Sequence
  Description of Artificial Sequence: Synthetic oligonucleotide
cacgguccgucugcugugg

SEQ ID NO: 1157623 - RNA, 19 nt, Artificial Sequence
  Description of Artificial Sequence: Synthetic oligonucleotide
agggagacguggguaacuu

SEQ ID NO: 1157624 - RNA, 19 nt, Artificial Sequence
  Description of Artificial Sequence: Synthetic oligonucleotide
agacaacuccgaaggcugu

SEQ ID NO: 1157625 - RNA, 19 nt, Artificial Sequence
  Description of Artificial Sequence: Synthetic oligonucleotide
cagcacgggugcccuuugg

SEQ ID NO: 1157626 - RNA, 19 nt, Artificial Sequence
  Description of Artificial Sequence: Synthetic oligonucleotide
gccgcuugugcucaguucu

SEQ ID NO: 1157627 - RNA, 19 nt, Artificial Sequence
  Description of Artificial Sequence: Synthetic oligonucleotide
gcuaggauguuaaguggga

SEQ ID NO: 1157628 - RNA, 19 nt, Artificial Sequence
  Description of Artificial Sequence: Synthetic oligonucleotide
guauaccagcuggccacug

SEQ ID NO: 1157629 - RNA, 19 nt, Artificial Sequence
  Description of Artificial Sequence: Synthetic oligonucleotide
gucauccgucaccaagaaa

SEQ ID NO: 1157630 - RNA, 19 nt, Artificial Sequence
  Description of Artificial Sequence: Synthetic oligonucleotide
uggugggccuuggcaaaga

SEQ ID NO: 1157631 - RNA, 19 nt, Artificial Sequence
  Description of Artificial Sequence: Synthetic oligonucleotide
agcagacgacucaaggcuu

SEQ ID NO: 1157632 - RNA, 19 nt, Artificial Sequence
  Description of Artificial Sequence: Synthetic oligonucleotide
ggaaaucggugaugccuuc

SEQ ID NO: 1157633 - RNA, 19 nt, Artificial Sequence
  Description of Artificial Sequence: Synthetic oligonucleotide
cccucaugcugacucgaag

SEQ ID NO: 1157634 - RNA, 19 nt, Artificial Sequence
  Description of Artificial Sequence: Synthetic oligonucleotide
cuaugucgguggcuugcca

SEQ ID NO: 1157635 - RNA, 19 nt, Artificial Sequence
  Description of Artificial Sequence: Synthetic oligonucleotide
ggacuaugucgguggcuug

SEQ ID NO: 1157636 - RNA, 19 nt, Artificial Sequence
  Description of Artificial Sequence: Synthetic oligonucleotide
gccauggagagacugcagu

SEQ ID NO: 1157637 - RNA, 19 nt, Artificial Sequence
  Description of Artificial Sequence: Synthetic oligonucleotide
accucagcacgggugcccu

SEQ ID NO: 1157638 - RNA, 19 nt, Artificial Sequence
  Description of Artificial Sequence: Synthetic oligonucleotide
gagguuggguaaggugaga

SEQ ID NO: 1157639 - RNA, 19 nt, Artificial Sequence
  Description of Artificial Sequence: Synthetic oligonucleotide
gguaauagccagcgacacu

SEQ ID NO: 1157640 - RNA, 19 nt, Artificial Sequence
  Description of Artificial Sequence: Synthetic oligonucleotide
gggagcuaggauguuaagu

SEQ ID NO: 1157641 - RNA, 19 nt, Artificial Sequence
  Description of Artificial Sequence: Synthetic oligonucleotide
gguccccucguccuuuaga

SEQ ID NO: 1157642 - RNA, 19 nt, Artificial Sequence
  Description of Artificial Sequence: Synthetic oligonucleotide
ggacucagggguagguuca

SEQ ID NO: 1157643 - RNA, 19 nt, Artificial Sequence
  Description of Artificial Sequence: Synthetic oligonucleotide
aggcuccucgaugccuguc

SEQ ID NO: 1157644 - RNA, 19 nt, Artificial Sequence
  Description of Artificial Sequence: Synthetic oligonucleotide
cagcgacacugcagaugag

SEQ ID NO: 1157645 - RNA, 19 nt, Artificial Sequence
  Description of Artificial Sequence: Synthetic oligonucleotide
ccucgaugccugucauccg

SEQ ID NO: 1157646 - RNA, 19 nt, Artificial Sequence
  Description of Artificial Sequence: Synthetic oligonucleotide
gugcgucaucuuuggccac

SEQ ID NO: 1157647 - RNA, 19 nt, Artificial Sequence
  Description of Artificial Sequence: Synthetic oligonucleotide
cuaggauguuaagugggau

SEQ ID NO: 1157648 - RNA, 19 nt, Artificial Sequence
  Description of Artificial Sequence: Synthetic oligonucleotide
agcugcggucucagcaucu

SEQ ID NO: 1157649 - RNA, 19 nt, Artificial Sequence
  Description of Artificial Sequence: Synthetic oligonucleotide
auaguacccuggggacuca

SEQ ID NO: 1157650 - RNA, 19 nt, Artificial Sequence
  Description of Artificial Sequence: Synthetic oligonucleotide
agccagcgacacugcagau

SEQ ID NO: 1157651 - RNA, 19 nt, Artificial Sequence
  Description of Artificial Sequence: Synthetic oligonucleotide
uagguccccucguccuuua

SEQ ID NO: 1157652 - RNA, 19 nt, Artificial Sequence
  Description of Artificial Sequence: Synthetic oligonucleotide
caacuccgaaggcuguucu

SEQ ID NO: 1157653 - RNA, 19 nt, Artificial Sequence
  Description of Artificial Sequence: Synthetic oligonucleotide
gagggcggcagguccuugu

SEQ ID NO: 1157654 - RNA, 19 nt, Artificial Sequence
  Description of Artificial Sequence: Synthetic oligonucleotide
gaaucccacccagcuccuc

SEQ ID NO: 1157655 - RNA, 19 nt, Artificial Sequence
  Description of Artificial Sequence: Synthetic oligonucleotide
gagugagguuggguaaggu

SEQ ID NO: 1157656 - RNA, 19 nt, Artificial Sequence
  Description of Artificial Sequence: Synthetic oligonucleotide
aggcuccagcguagcgccc

SEQ ID NO: 1157657 - RNA, 19 nt, Artificial Sequence
  Description of Artificial Sequence: Synthetic oligonucleotide
gcggcagguccuuguuugc

SEQ ID NO: 1157658 - RNA, 19 nt, Artificial Sequence
  Description of Artificial Sequence: Synthetic oligonucleotide
gccccagagagagccaaac

SEQ ID NO: 1157659 - RNA, 19 nt, Artificial Sequence
  Description of Artificial Sequence: Synthetic oligonucleotide
gugcccuuugguagcuaga

SEQ ID NO: 1157660 - RNA, 19 nt, Artificial Sequence
  Description of Artificial Sequence: Synthetic oligonucleotide
gguucaguguagggugcca

SEQ ID NO: 1157661 - RNA, 19 nt, Artificial Sequence
  Description of Artificial Sequence: Synthetic oligonucleotide
ccucguccuuuagagugag

SEQ ID NO: 1157662 - RNA, 19 nt, Artificial Sequence
  Description of Artificial Sequence: Synthetic oligonucleotide
ccagagugccucauagucu

SEQ ID NO: 1157663 - RNA, 19 nt, Artificial Sequence
  Description of Artificial Sequence: Synthetic oligonucleotide
guagcgcccuugcgcugac

SEQ ID NO: 1157664 - RNA, 19 nt, Artificial Sequence
  Description of Artificial Sequence: Synthetic oligonucleotide
ccugucuuccagcuguaua

SEQ ID NO: 1157665 - RNA, 19 nt, Artificial Sequence
  Description of Artificial Sequence: Synthetic oligonucleotide
gacaacuccgaaggcuguu

SEQ ID NO: 1157666 - RNA, 19 nt, Artificial Sequence
  Description of Artificial Sequence: Synthetic oligonucleotide
cacuuggcgagccgcuugu

SEQ ID NO: 1157667 - RNA, 19 nt, Artificial Sequence
  Description of Artificial Sequence: Synthetic oligonucleotide
ccacgguccgucugcugug

SEQ ID NO: 1157668 - RNA, 19 nt, Artificial Sequence
  Description of Artificial Sequence: Synthetic oligonucleotide
cagucgcuucucuuucgcu

SEQ ID NO: 1157669 - RNA, 19 nt, Artificial Sequence
  Description of Artificial Sequence: Synthetic oligonucleotide
cgguccgucugcugugggg

SEQ ID NO: 1157670 - RNA, 19 nt, Artificial Sequence
  Description of Artificial Sequence: Synthetic oligonucleotide
cgguggcuugccacggucc

SEQ ID NO: 1157671 - RNA, 19 nt, Artificial Sequence
  Description of Artificial Sequence: Synthetic oligonucleotide
gaggcauccccagccgcgu

SEQ ID NO: 1157672 - RNA, 19 nt, Artificial Sequence
  Description of Artificial Sequence: Synthetic oligonucleotide
acccucaugcugacucgaa

SEQ ID NO: 1157673 - RNA, 19 nt, Artificial Sequence
  Description of Artificial Sequence: Synthetic oligonucleotide
gagccgcuugugcucaguu

SEQ ID NO: 1157674 - RNA, 19 nt, Artificial Sequence
  Description of Artificial Sequence: Synthetic oligonucleotide
gcgucaucuuuggccacug

SEQ ID NO: 1157675 - RNA, 19 nt, Artificial Sequence
  Description of Artificial Sequence: Synthetic oligonucleotide
cccucguccuuuagaguga

SEQ ID NO: 1157676 - RNA, 19 nt, Artificial Sequence
  Description of Artificial Sequence: Synthetic oligonucleotide
gcugaugaaccaagcugcu

SEQ ID NO: 1157677 - RNA, 19 nt, Artificial Sequence
  Description of Artificial Sequence: Synthetic oligonucleotide
uagcgcccuugcgcugacc

SEQ ID NO: 1157678 - RNA, 19 nt, Artificial Sequence
  Description of Artificial Sequence: Synthetic oligonucleotide
ggcgagccgcuugugcuca

SEQ ID NO: 1157679 - RNA, 19 nt, Artificial Sequence
  Description of Artificial Sequence: Synthetic oligonucleotide
gcugcggucucagcaucuc

SEQ ID NO: 1157680 - RNA, 19 nt, Artificial Sequence
  Description of Artificial Sequence: Synthetic oligonucleotide
ggcuugggucucugauguc

SEQ ID NO: 1157681 - RNA, 19 nt, Artificial Sequence
  Description of Artificial Sequence: Synthetic oligonucleotide
gcaguccuuauaguacccu

SEQ ID NO: 1157682 - RNA, 19 nt, Artificial Sequence
  Description of Artificial Sequence: Synthetic oligonucleotide
gcggucucagcaucuccua

SEQ ID NO: 1157683 - RNA, 19 nt, Artificial Sequence
  Description of Artificial Sequence: Synthetic oligonucleotide
guagguccccucguccuuu

SEQ ID NO: 1157684 - RNA, 19 nt, Artificial Sequence
  Description of Artificial Sequence: Synthetic oligonucleotide
cagcaucuccuagagucuu

SEQ ID NO: 1157685 - RNA, 19 nt, Artificial Sequence
  Description of Artificial Sequence: Synthetic oligonucleotide
ggauguuaagugggaugau

SEQ ID NO: 1157686 - RNA, 19 nt, Artificial Sequence
  Description of Artificial Sequence: Synthetic oligonucleotide
cuccaagcccauggaggcu

SEQ ID NO: 1157687 - RNA, 19 nt, Artificial Sequence
  Description of Artificial Sequence: Synthetic oligonucleotide
ccgaguccacugaggccuc

SEQ ID NO: 1157688 - RNA, 19 nt, Artificial Sequence
  Description of Artificial Sequence: Synthetic oligonucleotide
guggcuugccacgguccgu

SEQ ID NO: 1157689 - RNA, 19 nt, Artificial Sequence
  Description of Artificial Sequence: Synthetic oligonucleotide
gcgagccgcuugugcucag

SEQ ID NO: 1157690 - RNA, 19 nt, Artificial Sequence
  Description of Artificial Sequence: Synthetic oligonucleotide
ggcuccagcguagcgcccu

SEQ ID NO: 1157691 - RNA, 19 nt, Artificial Sequence
  Description of Artificial Sequence: Synthetic oligonucleotide
ggguaacuuggcagaugua

SEQ ID NO: 1157692 - RNA, 19 nt, Artificial Sequence
  Description of Artificial Sequence: Synthetic oligonucleotide
ccucacuuggcgagccgcu

SEQ ID NO: 1157693 - RNA, 19 nt, Artificial Sequence
  Description of Artificial Sequence: Synthetic oligonucleotide
cucacuuggcgagccgcuu

SEQ ID NO: 1157694 - RNA, 19 nt, Artificial Sequence
  Description of Artificial Sequence: Synthetic oligonucleotide
ccccggaugaagagagggu

SEQ ID NO: 1157695 - RNA, 19 nt, Artificial Sequence
  Description of Artificial Sequence: Synthetic oligonucleotide
ggaaucccacccagcuccu

SEQ ID NO: 1157696 - RNA, 19 nt, Artificial Sequence
  Description of Artificial Sequence: Synthetic oligonucleotide
cguagcgcccuugcgcuga

SEQ ID NO: 1157697 - RNA, 19 nt, Artificial Sequence
  Description of Artificial Sequence: Synthetic oligonucleotide
cgaguaccucacucccaca

SEQ ID NO: 1157698 - RNA, 19 nt, Artificial Sequence
  Description of Artificial Sequence: Synthetic oligonucleotide
cugaggccucaaagauaau

SEQ ID NO: 1157699 - RNA, 19 nt, Artificial Sequence
  Description of Artificial Sequence: Synthetic oligonucleotide
gcgcuggagauccccggau

SEQ ID NO: 1157700 - RNA, 19 nt, Artificial Sequence
  Description of Artificial Sequence: Synthetic oligonucleotide
ggcuugccacgguccgucu

SEQ ID NO: 1157701 - RNA, 19 nt, Artificial Sequence
  Description of Artificial Sequence: Synthetic oligonucleotide
ccagagacuugggcuggaa

SEQ ID NO: 1157702 - RNA, 19 nt, Artificial Sequence
  Description of Artificial Sequence: Synthetic oligonucleotide
gcgcccuugcgcugacccu

SEQ ID NO: 1157703 - RNA, 19 nt, Artificial Sequence
  Description of Artificial Sequence: Synthetic oligonucleotide
ccccagccgcguguagcug

SEQ ID NO: 1157704 - RNA, 19 nt, Artificial Sequence
  Description of Artificial Sequence: Synthetic oligonucleotide
cccacaccucagcacgggu

SEQ ID NO: 1157705 - RNA, 19 nt, Artificial Sequence
  Description of Artificial Sequence: Synthetic oligonucleotide
cugacucgaaggggcucuu

SEQ ID NO: 1157706 - RNA, 19 nt, Artificial Sequence
  Description of Artificial Sequence: Synthetic oligonucleotide
cuguggggccaggcucagu

SEQ ID NO: 1157707 - RNA, 19 nt, Artificial Sequence
  Description of Artificial Sequence: Synthetic oligonucleotide
ccgcuugugcucaguucuu

SEQ ID NO: 1157708 - RNA, 19 nt, Artificial Sequence
  Description of Artificial Sequence: Synthetic oligonucleotide
cccuagacaccugcauguu

SEQ ID NO: 1157709 - RNA, 19 nt, Artificial Sequence
  Description of Artificial Sequence: Synthetic oligonucleotide
cgcuugugcucaguucuuu

SEQ ID NO: 1157710 - RNA, 19 nt, Artificial Sequence
  Description of Artificial Sequence: Synthetic oligonucleotide
cccuugcgcugacccugcu

SEQ ID NO: 1157711 - RNA, 19 nt, Artificial Sequence
  Description of Artificial Sequence: Synthetic oligonucleotide
cgagccgcuugugcucagu

SEQ ID NO: 1157712 - RNA, 19 nt, Artificial Sequence
  Description of Artificial Sequence: Synthetic oligonucleotide
aaaaguacccugcuaaucc

SEQ ID NO: 1157713 - RNA, 19 nt, Artificial Sequence
  Description of Artificial Sequence: Synthetic oligonucleotide
aacugcgucauucacaugc

SEQ ID NO: 1157714 - RNA, 19 nt, Artificial Sequence
  Description of Artificial Sequence: Synthetic oligonucleotide
uuuaaagaggugaagaacc

SEQ ID NO: 1157715 - RNA, 19 nt, Artificial Sequence
  Description of Artificial Sequence: Synthetic oligonucleotide
uuucucauuaauuaauggg

SEQ ID NO: 1157716 - RNA, 19 nt, Artificial Sequence
  Description of Artificial Sequence: Synthetic oligonucleotide
aguaaaggaaauuuuggac

SEQ ID NO: 1157717 - RNA, 19 nt, Artificial Sequence
  Description of Artificial Sequence: Synthetic oligonucleotide
aaauuuuggacaccagugg

SEQ ID NO: 1157718 - RNA, 19 nt, Artificial Sequence
  Description of Artificial Sequence: Synthetic oligonucleotide
ucaaagacaaugaauggag

SEQ ID NO: 1157719 - RNA, 19 nt, Artificial Sequence
  Description of Artificial Sequence: Synthetic oligonucleotide
ucaaacuugacaacuggcg

SEQ ID NO: 1157720 - RNA, 19 nt, Artificial Sequence
  Description of Artificial Sequence: Synthetic oligonucleotide
agucauaccauuuacgaag

SEQ ID NO: 1157721 - RNA, 19 nt, Artificial Sequence
  Description of Artificial Sequence: Synthetic oligonucleotide
aauacgacgagcuuccucu

SEQ ID NO: 1157722 - RNA, 19 nt, Artificial Sequence
  Description of Artificial Sequence: Synthetic oligonucleotide
auacuugaccuccagauac

SEQ ID NO: 1157723 - RNA, 19 nt, Artificial Sequence
  Description of Artificial Sequence: Synthetic oligonucleotide
aauuaaugggcccugaguu

SEQ ID NO: 1157724 - RNA, 19 nt, Artificial Sequence
  Description of Artificial Sequence: Synthetic oligonucleotide
aagggcugaauacagaacu

SEQ ID NO: 1157725 - RNA, 19 nt, Artificial Sequence
  Description of Artificial Sequence: Synthetic oligonucleotide
ugcuaauccaacaucagcu

SEQ ID NO: 1157726 - RNA, 19 nt, Artificial Sequence
  Description of Artificial Sequence: Synthetic oligonucleotide
ucucauuaauuaaugggcc

SEQ ID NO: 1157727 - RNA, 19 nt, Artificial Sequence
  Description of Artificial Sequence: Synthetic oligonucleotide
aaugaauggagcaaggcca

SEQ ID NO: 1157728 - RNA, 19 nt, Artificial Sequence
  Description of Artificial Sequence: Synthetic oligonucleotide
auaaauacgacgagcuucc

SEQ ID NO: 1157729 - RNA, 19 nt, Artificial Sequence
  Description of Artificial Sequence: Synthetic oligonucleotide
uggaucaguacauagugcc

SEQ ID NO: 1157730 - RNA, 19 nt, Artificial Sequence
  Description of Artificial Sequence: Synthetic oligonucleotide
aguacauagugccucuccc

SEQ ID NO: 1157731 - RNA, 19 nt, Artificial Sequence
  Description of Artificial Sequence: Synthetic oligonucleotide
aguaaaaguacccugcuaa

SEQ ID NO: 1157732 - RNA, 19 nt, Artificial Sequence
  Description of Artificial Sequence: Synthetic oligonucleotide
aauuuuggacaccagugga

SEQ ID NO: 1157733 - RNA, 19 nt, Artificial Sequence
  Description of Artificial Sequence: Synthetic oligonucleotide
aguggaucaguacauagug

SEQ ID NO: 1157734 - RNA, 19 nt, Artificial Sequence
  Description of Artificial Sequence: Synthetic oligonucleotide
aaagcggguccccauggcc

SEQ ID NO: 1157735 - RNA, 19 nt, Artificial Sequence
  Description of Artificial Sequence: Synthetic oligonucleotide
auugcggccacaccaaugg

SEQ ID NO: 1157736 - RNA, 19 nt, Artificial Sequence
  Description of Artificial Sequence: Synthetic oligonucleotide
uuuacaaaggaaucauaga

SEQ ID NO: 1157737 - RNA, 19 nt, Artificial Sequence
  Description of Artificial Sequence: Synthetic oligonucleotide
acuaagaaucuguuugcac

SEQ ID NO: 1157738 - RNA, 19 nt, Artificial Sequence
  Description of Artificial Sequence: Synthetic oligonucleotide
gaacuccucuccuugaccg

SEQ ID NO: 1157739 - RNA, 19 nt, Artificial Sequence
  Description of Artificial Sequence: Synthetic oligonucleotide
uuaaagaggugaagaaccc

SEQ ID NO: 1157740 - RNA, 19 nt, Artificial Sequence
  Description of Artificial Sequence: Synthetic oligonucleotide
aaauacgacgagcuuccuc

SEQ ID NO: 1157741 - RNA, 19 nt, Artificial Sequence
  Description of Artificial Sequence: Synthetic oligonucleotide
cuugagaguaaaaguaccc

SEQ ID NO: 1157742 - RNA, 19 nt, Artificial Sequence
  Description of Artificial Sequence: Synthetic oligonucleotide
agaaucuguuugcacaaac

SEQ ID NO: 1157743 - RNA, 19 nt, Artificial Sequence
  Description of Artificial Sequence: Synthetic oligonucleotide
gaugauugcggccacacca

SEQ ID NO: 1157744 - RNA, 19 nt, Artificial Sequence
  Description of Artificial Sequence: Synthetic oligonucleotide
gaaacuccgcagcagaaag

SEQ ID NO: 1157745 - RNA, 19 nt, Artificial Sequence
  Description of Artificial Sequence: Synthetic oligonucleotide
ugaagaacccuacaagccu

SEQ ID NO: 1157746 - RNA, 19 nt, Artificial Sequence
  Description of Artificial Sequence: Synthetic oligonucleotide
gaggcaagggacuagcaag

SEQ ID NO: 1157747 - RNA, 19 nt, Artificial Sequence
  Description of Artificial Sequence: Synthetic oligonucleotide
uuaauuaaugggcccugag

SEQ ID NO: 1157748 - RNA, 19 nt, Artificial Sequence
  Description of Artificial Sequence: Synthetic oligonucleotide
aacuccgcagcagaaagcg

SEQ ID NO: 1157749 - RNA, 19 nt, Artificial Sequence
  Description of Artificial Sequence: Synthetic oligonucleotide
ucaauaccauacuuggacc

SEQ ID NO: 1157750 - RNA, 19 nt, Artificial Sequence
  Description of Artificial Sequence: Synthetic oligonucleotide
auagauaccccguuguacu

SEQ ID NO: 1157751 - RNA, 19 nt, Artificial Sequence
  Description of Artificial Sequence: Synthetic oligonucleotide
uucucuaccuuuucuacug

SEQ ID NO: 1157752 - RNA, 19 nt, Artificial Sequence
  Description of Artificial Sequence: Synthetic oligonucleotide
acuuggacccuucucgccc

SEQ ID NO: 1157753 - RNA, 19 nt, Artificial Sequence
  Description of Artificial Sequence: Synthetic oligonucleotide
caagggacuagcaagcgag

SEQ ID NO: 1157754 - RNA, 19 nt, Artificial Sequence
  Description of Artificial Sequence: Synthetic oligonucleotide
aguagggugugucuuccgc

SEQ ID NO: 1157755 - RNA, 19 nt, Artificial Sequence
  Description of Artificial Sequence: Synthetic oligonucleotide
ucauucacgccaaccaugc

SEQ ID NO: 1157756 - RNA, 19 nt, Artificial Sequence
  Description of Artificial Sequence: Synthetic oligonucleotide
ucgugcaccgggaaggugg

SEQ ID NO: 1157757 - RNA, 19 nt, Artificial Sequence
  Description of Artificial Sequence: Synthetic oligonucleotide
agacgcgcggcccagaaac

SEQ ID NO: 1157758 - RNA, 19 nt, Artificial Sequence
  Description of Artificial Sequence: Synthetic oligonucleotide
uuacgaaguaaugaacucc

SEQ ID NO: 1157759 - RNA, 19 nt, Artificial Sequence
  Description of Artificial Sequence: Synthetic oligonucleotide
auacuuggacccuucucgc

SEQ ID NO: 1157760 - RNA, 19 nt, Artificial Sequence
  Description of Artificial Sequence: Synthetic oligonucleotide
aguuauuccuuccucaaau

SEQ ID NO: 1157761 - RNA, 19 nt, Artificial Sequence
  Description of Artificial Sequence: Synthetic oligonucleotide
caaacuugacaacuggcgc

SEQ ID NO: 1157762 - RNA, 19 nt, Artificial Sequence
  Description of Artificial Sequence: Synthetic oligonucleotide
uuuacgaaguaaugaacuc

SEQ ID NO: 1157763 - RNA, 19 nt, Artificial Sequence
  Description of Artificial Sequence: Synthetic oligonucleotide
auuuacgaaguaaugaacu

SEQ ID NO: 1157764 - RNA, 19 nt, Artificial Sequence
  Description of Artificial Sequence: Synthetic oligonucleotide
caauaccauacuuggaccc

SEQ ID NO: 1157765 - RNA, 19 nt, Artificial Sequence
  Description of Artificial Sequence: Synthetic oligonucleotide
agguauagaugaugucucc

SEQ ID NO: 1157766 - RNA, 19 nt, Artificial Sequence
  Description of Artificial Sequence: Synthetic oligonucleotide
accgagaccccuuuccagc

SEQ ID NO: 1157767 - RNA, 19 nt, Artificial Sequence
  Description of Artificial Sequence: Synthetic oligonucleotide
uccaucauuaagucauacc

SEQ ID NO: 1157768 - RNA, 19 nt, Artificial Sequence
  Description of Artificial Sequence: Synthetic oligonucleotide
ggugaagaacccuacaagc

SEQ ID NO: 1157769 - RNA, 19 nt, Artificial Sequence
  Description of Artificial Sequence: Synthetic oligonucleotide
cauuuacgaaguaaugaac

SEQ ID NO: 1157770 - RNA, 19 nt, Artificial Sequence
  Description of Artificial Sequence: Synthetic oligonucleotide
uccugcgacagccuggucc

SEQ ID NO: 1157771 - RNA, 19 nt, Artificial Sequence
  Description of Artificial Sequence: Synthetic oligonucleotide
auuugcugcauggugcagc

SEQ ID NO: 1157772 - RNA, 19 nt, Artificial Sequence
  Description of Artificial Sequence: Synthetic oligonucleotide
aaaguacccugcuaaucca

SEQ ID NO: 1157773 - RNA, 19 nt, Artificial Sequence
  Description of Artificial Sequence: Synthetic oligonucleotide
aguaaugaacuccucuccu

SEQ ID NO: 1157774 - RNA, 19 nt, Artificial Sequence
  Description of Artificial Sequence: Synthetic oligonucleotide
ucuccauaaauacgacgag

SEQ ID NO: 1157775 - RNA, 19 nt, Artificial Sequence
  Description of Artificial Sequence: Synthetic oligonucleotide
aaacuuggaugccauugcu

SEQ ID NO: 1157776 - RNA, 19 nt, Artificial Sequence
  Description of Artificial Sequence: Synthetic oligonucleotide
cacggugugaugauugcgg

SEQ ID NO: 1157777 - RNA, 19 nt, Artificial Sequence
  Description of Artificial Sequence: Synthetic oligonucleotide
ucauuaauuaaugggcccu

SEQ ID NO: 1157778 - RNA, 19 nt, Artificial Sequence
  Description of Artificial Sequence: Synthetic oligonucleotide
cuaauccaacaucagcugc

SEQ ID NO: 1157779 - RNA, 19 nt, Artificial Sequence
  Description of Artificial Sequence: Synthetic oligonucleotide
ugccguugaaccaguaaag

SEQ ID NO: 1157780 - RNA, 19 nt, Artificial Sequence
  Description of Artificial Sequence: Synthetic oligonucleotide
uugaccgagaccccuuucc

SEQ ID NO: 1157781 - RNA, 19 nt, Artificial Sequence
  Description of Artificial Sequence: Synthetic oligonucleotide
aucauagauaccccguugu

SEQ ID NO: 1157782 - RNA, 19 nt, Artificial Sequence
  Description of Artificial Sequence: Synthetic oligonucleotide
acuaggaaaauuccacggu

SEQ ID NO: 1157783 - RNA, 19 nt, Artificial Sequence
  Description of Artificial Sequence: Synthetic oligonucleotide
aaugaacuccucuccuuga

SEQ ID NO: 1157784 - RNA, 19 nt, Artificial Sequence
  Description of Artificial Sequence: Synthetic oligonucleotide
uugacaacuggcgccaggg

SEQ ID NO: 1157785 - RNA, 19 nt, Artificial Sequence
  Description of Artificial Sequence: Synthetic oligonucleotide
acaccaguggaucaguaca

SEQ ID NO: 1157786 - RNA, 19 nt, Artificial Sequence
  Description of Artificial Sequence: Synthetic oligonucleotide
uaccauuuacgaaguaaug

SEQ ID NO: 1157787 - RNA, 19 nt, Artificial Sequence
  Description of Artificial Sequence: Synthetic oligonucleotide
ugcucugccacucuccaga

SEQ ID NO: 1157788 - RNA, 19 nt, Artificial Sequence
  Description of Artificial Sequence: Synthetic oligonucleotide
ucuaaguagcuuuauuauu

SEQ ID NO: 1157789 - RNA, 19 nt, Artificial Sequence
  Description of Artificial Sequence: Synthetic oligonucleotide
accauuuacgaaguaauga

SEQ ID NO: 1157790 - RNA, 19 nt, Artificial Sequence
  Description of Artificial Sequence: Synthetic oligonucleotide
ugucccuacagaucuaagu

SEQ ID NO: 1157791 - RNA, 19 nt, Artificial Sequence
  Description of Artificial Sequence: Synthetic oligonucleotide
ucguccuuauuuuccauca

SEQ ID NO: 1157792 - RNA, 19 nt, Artificial Sequence
  Description of Artificial Sequence: Synthetic oligonucleotide
agcaguuaugaucuuggca

SEQ ID NO: 1157793 - RNA, 19 nt, Artificial Sequence
  Description of Artificial Sequence: Synthetic oligonucleotide
ugagaaccauucuaggaaa

SEQ ID NO: 1157794 - RNA, 19 nt, Artificial Sequence
  Description of Artificial Sequence: Synthetic oligonucleotide
ccauccuaaacuuggaugc

SEQ ID NO: 1157795 - RNA, 19 nt, Artificial Sequence
  Description of Artificial Sequence: Synthetic oligonucleotide
acggugugaugauugcggc

SEQ ID NO: 1157796 - RNA, 19 nt, Artificial Sequence
  Description of Artificial Sequence: Synthetic oligonucleotide
ccaguaaaggaaauuuugg

SEQ ID NO: 1157797 - RNA, 19 nt, Artificial Sequence
  Description of Artificial Sequence: Synthetic oligonucleotide
ucagugaugcagagcaugu

SEQ ID NO: 1157798 - RNA, 19 nt, Artificial Sequence
  Description of Artificial Sequence: Synthetic oligonucleotide
augaacuccucuccuugac

SEQ ID NO: 1157799 - RNA, 19 nt, Artificial Sequence
  Description of Artificial Sequence: Synthetic oligonucleotide
agaaagcggguccccaugg

SEQ ID NO: 1157800 - RNA, 19 nt, Artificial Sequence
  Description of Artificial Sequence: Synthetic oligonucleotide
uuccacggugugaugauug

SEQ ID NO: 1157801 - RNA, 19 nt, Artificial Sequence
  Description of Artificial Sequence: Synthetic oligonucleotide
uugagaguaaaaguacccu

SEQ ID NO: 1157802 - RNA, 19 nt, Artificial Sequence
  Description of Artificial Sequence: Synthetic oligonucleotide
uccucugagaaccauucua

SEQ ID NO: 1157803 - RNA, 19 nt, Artificial Sequence
  Description of Artificial Sequence: Synthetic oligonucleotide
uccagauacucgucaauac

SEQ ID NO: 1157804 - RNA, 19 nt, Artificial Sequence
  Description of Artificial Sequence: Synthetic oligonucleotide
uugguucuagagcagggaa

SEQ ID NO: 1157805 - RNA, 19 nt, Artificial Sequence
  Description of Artificial Sequence: Synthetic oligonucleotide
aauaccauacuuggacccu

SEQ ID NO: 1157806 - RNA, 19 nt, Artificial Sequence
  Description of Artificial Sequence: Synthetic oligonucleotide
aaugggcccugaguuauuc

SEQ ID NO: 1157807 - RNA, 19 nt, Artificial Sequence
  Description of Artificial Sequence: Synthetic oligonucleotide
cagauacucgucaauacca

SEQ ID NO: 1157808 - RNA, 19 nt, Artificial Sequence
  Description of Artificial Sequence: Synthetic oligonucleotide
aguuaugaucuuggcaagg

SEQ ID NO: 1157809 - RNA, 19 nt, Artificial Sequence
  Description of Artificial Sequence: Synthetic oligonucleotide
agaguagggugugucuucc

SEQ ID NO: 1157810 - RNA, 19 nt, Artificial Sequence
  Description of Artificial Sequence: Synthetic oligonucleotide
gaguaggucggccgggagg

SEQ ID NO: 1157811 - RNA, 19 nt, Artificial Sequence
  Description of Artificial Sequence: Synthetic oligonucleotide
gauaccccguuguacuaag

SEQ ID NO: 1157812 - RNA, 19 nt, Artificial Sequence
  Description of Artificial Sequence: Synthetic oligonucleotide
gugaagaacccuacaagcc

SEQ ID NO: 1157813 - RNA, 19 nt, Artificial Sequence
  Description of Artificial Sequence: Synthetic oligonucleotide
aaacacaagucugcccauc

SEQ ID NO: 1157814 - RNA, 19 nt, Artificial Sequence
  Description of Artificial Sequence: Synthetic oligonucleotide
uaaaaguacccugcuaauc

SEQ ID NO: 1157815 - RNA, 19 nt, Artificial Sequence
  Description of Artificial Sequence: Synthetic oligonucleotide
uuuggacaccaguggauca

SEQ ID NO: 1157816 - RNA, 19 nt, Artificial Sequence
  Description of Artificial Sequence: Synthetic oligonucleotide
gaucauggcacuaggaaaa

SEQ ID NO: 1157817 - RNA, 19 nt, Artificial Sequence
  Description of Artificial Sequence: Synthetic oligonucleotide
aauuccacggugugaugau

SEQ ID NO: 1157818 - RNA, 19 nt, Artificial Sequence
  Description of Artificial Sequence: Synthetic oligonucleotide
aaagaggugaagaacccua

SEQ ID NO: 1157819 - RNA, 19 nt, Artificial Sequence
  Description of Artificial Sequence: Synthetic oligonucleotide
cauagauaccccguuguac

SEQ ID NO: 1157820 - RNA, 19 nt, Artificial Sequence
  Description of Artificial Sequence: Synthetic oligonucleotide
ucgggcaccccgcagucgg

SEQ ID NO: 1157821 - RNA, 19 nt, Artificial Sequence
  Description of Artificial Sequence: Synthetic oligonucleotide
gaugccauugcuccugcga

SEQ ID NO: 1157822 - RNA, 19 nt, Artificial Sequence
  Description of Artificial Sequence: Synthetic oligonucleotide
cuccauaaauacgacgagc

SEQ ID NO: 1157823 - RNA, 19 nt, Artificial Sequence
  Description of Artificial Sequence: Synthetic oligonucleotide
gaauacagaacuucucccu

SEQ ID NO: 1157824 - RNA, 19 nt, Artificial Sequence
  Description of Artificial Sequence: Synthetic oligonucleotide
auuacccacacgcaggcuu

SEQ ID NO: 1157825 - RNA, 19 nt, Artificial Sequence
  Description of Artificial Sequence: Synthetic oligonucleotide
gaucaguacauagugccuc

SEQ ID NO: 1157826 - RNA, 19 nt, Artificial Sequence
  Description of Artificial Sequence: Synthetic oligonucleotide
gaggugaagaacccuacaa

SEQ ID NO: 1157827 - RNA, 19 nt, Artificial Sequence
  Description of Artificial Sequence: Synthetic oligonucleotide
uacucgucaauaccauacu

SEQ ID NO: 1157828 - RNA, 19 nt, Artificial Sequence
  Description of Artificial Sequence: Synthetic oligonucleotide
uuuuggacaccaguggauc

SEQ ID NO: 1157829 - RNA, 19 nt, Artificial Sequence
  Description of Artificial Sequence: Synthetic oligonucleotide
cugagaaccauucuaggaa

SEQ ID NO: 1157830 - RNA, 19 nt, Artificial Sequence
  Description of Artificial Sequence: Synthetic oligonucleotide
auaccauuuacgaaguaau

SEQ ID NO: 1157831 - RNA, 19 nt, Artificial Sequence
  Description of Artificial Sequence: Synthetic oligonucleotide
uuaaugggcccugaguuau

SEQ ID NO: 1157832 - RNA, 19 nt, Artificial Sequence
  Description of Artificial Sequence: Synthetic oligonucleotide
uuugguucuagagcaggga

SEQ ID NO: 1157833 - RNA, 19 nt, Artificial Sequence
  Description of Artificial Sequence: Synthetic oligonucleotide
ugugucuuccgcagguuuc

SEQ ID NO: 1157834 - RNA, 19 nt, Artificial Sequence
  Description of Artificial Sequence: Synthetic oligonucleotide
guccccgcggaguaggucg

SEQ ID NO: 1157835 - RNA, 19 nt, Artificial Sequence
  Description of Artificial Sequence: Synthetic oligonucleotide
gaaucuguuugcacaaaca

SEQ ID NO: 1157836 - RNA, 19 nt, Artificial Sequence
  Description of Artificial Sequence: Synthetic oligonucleotide
acugucaaagacaaugaau

SEQ ID NO: 1157837 - RNA, 19 nt, Artificial Sequence
  Description of Artificial Sequence: Synthetic oligonucleotide
uaccccguuguacuaagaa

SEQ ID NO: 1157838 - RNA, 19 nt, Artificial Sequence
  Description of Artificial Sequence: Synthetic oligonucleotide
ugacaacuggcgccagggg

SEQ ID NO: 1157839 - RNA, 19 nt, Artificial Sequence
  Description of Artificial Sequence: Synthetic oligonucleotide
gcacuaggaaaauuccacg

SEQ ID NO: 1157840 - RNA, 19 nt, Artificial Sequence
  Description of Artificial Sequence: Synthetic oligonucleotide
acccugcuaauccaacauc

SEQ ID NO: 1157841 - RNA, 19 nt, Artificial Sequence
  Description of Artificial Sequence: Synthetic oligonucleotide
gaaaauuccacggugugau

SEQ ID NO: 1157842 - RNA, 19 nt, Artificial Sequence
  Description of Artificial Sequence: Synthetic oligonucleotide
cuucggaggacgccgggcg

SEQ ID NO: 1157843 - RNA, 19 nt, Artificial Sequence
  Description of Artificial Sequence: Synthetic oligonucleotide
uacccugcuaauccaacau

SEQ ID NO: 1157844 - RNA, 19 nt, Artificial Sequence
  Description of Artificial Sequence: Synthetic oligonucleotide
gggaaugacauuauaggac

SEQ ID NO: 1157845 - RNA, 19 nt, Artificial Sequence
  Description of Artificial Sequence: Synthetic oligonucleotide
aauccauuacccacacgca

SEQ ID NO: 1157846 - RNA, 19 nt, Artificial Sequence
  Description of Artificial Sequence: Synthetic oligonucleotide
cacacgcaggcuuuucugc

SEQ ID NO: 1157847 - RNA, 19 nt, Artificial Sequence
  Description of Artificial Sequence: Synthetic oligonucleotide
aggaccuuuccuguugccg

SEQ ID NO: 1157848 - RNA, 19 nt, Artificial Sequence
  Description of Artificial Sequence: Synthetic oligonucleotide
acgacgagcuuccucugag

SEQ ID NO: 1157849 - RNA, 19 nt, Artificial Sequence
  Description of Artificial Sequence: Synthetic oligonucleotide
auuaaugggcccugaguua

SEQ ID NO: 1157850 - RNA, 19 nt, Artificial Sequence
  Description of Artificial Sequence: Synthetic oligonucleotide
ugaugauugcggccacacc

SEQ ID NO: 1157851 - RNA, 19 nt, Artificial Sequence
  Description of Artificial Sequence: Synthetic oligonucleotide
ucauagauaccccguugua

SEQ ID NO: 1157852 - RNA, 19 nt, Artificial Sequence
  Description of Artificial Sequence: Synthetic oligonucleotide
aucaguacauagugccucu

SEQ ID NO: 1157853 - RNA, 19 nt, Artificial Sequence
  Description of Artificial Sequence: Synthetic oligonucleotide
uccuaaacuuggaugccau

SEQ ID NO: 1157854 - RNA, 19 nt, Artificial Sequence
  Description of Artificial Sequence: Synthetic oligonucleotide
ugaccgagaccccuuucca

SEQ ID NO: 1157855 - RNA, 19 nt, Artificial Sequence
  Description of Artificial Sequence: Synthetic oligonucleotide
agaucuaaguagcuuuauu

SEQ ID NO: 1157856 - RNA, 19 nt, Artificial Sequence
  Description of Artificial Sequence: Synthetic oligonucleotide
uuggacaccaguggaucag

SEQ ID NO: 1157857 - RNA, 19 nt, Artificial Sequence
  Description of Artificial Sequence: Synthetic oligonucleotide
cugaguuauuccuuccuca

SEQ ID NO: 1157858 - RNA, 19 nt, Artificial Sequence
  Description of Artificial Sequence: Synthetic oligonucleotide
uuguacuaagaaucuguuu

SEQ ID NO: 1157859 - RNA, 19 nt, Artificial Sequence
  Description of Artificial Sequence: Synthetic oligonucleotide
augggcccugaguuauucc

SEQ ID NO: 1157860 - RNA, 19 nt, Artificial Sequence
  Description of Artificial Sequence: Synthetic oligonucleotide
ucgcuucacagaauuugcu

SEQ ID NO: 1157861 - RNA, 19 nt, Artificial Sequence
  Description of Artificial Sequence: Synthetic oligonucleotide
uacaagccuccauaacaca

SEQ ID NO: 1157862 - RNA, 19 nt, Artificial Sequence
  Description of Artificial Sequence: Synthetic oligonucleotide
agaggcaagggacuagcaa

SEQ ID NO: 1157863 - RNA, 19 nt, Artificial Sequence
  Description of Artificial Sequence: Synthetic oligonucleotide
uugaaccaguaaaggaaau

SEQ ID NO: 1157864 - RNA, 19 nt, Artificial Sequence
  Description of Artificial Sequence: Synthetic oligonucleotide
gucccuacagaucuaagua

SEQ ID NO: 1157865 - RNA, 19 nt, Artificial Sequence
  Description of Artificial Sequence: Synthetic oligonucleotide
cauuaauuaaugggcccug

SEQ ID NO: 1157866 - RNA, 19 nt, Artificial Sequence
  Description of Artificial Sequence: Synthetic oligonucleotide
gaagaacccuacaagccuc

SEQ ID NO: 1157867 - RNA, 19 nt, Artificial Sequence
  Description of Artificial Sequence: Synthetic oligonucleotide
agacucgcuucacagaauu

SEQ ID NO: 1157868 - RNA, 19 nt, Artificial Sequence
  Description of Artificial Sequence: Synthetic oligonucleotide
agaggugaagaacccuaca

SEQ ID NO: 1157869 - RNA, 19 nt, Artificial Sequence
  Description of Artificial Sequence: Synthetic oligonucleotide
gaccgagaccccuuuccag

SEQ ID NO: 1157870 - RNA, 19 nt, Artificial Sequence
  Description of Artificial Sequence: Synthetic oligonucleotide
aguacccugcuaauccaac

SEQ ID NO: 1157871 - RNA, 19 nt, Artificial Sequence
  Description of Artificial Sequence: Synthetic oligonucleotide
ccagauacucgucaauacc

SEQ ID NO: 1157872 - RNA, 19 nt, Artificial Sequence
  Description of Artificial Sequence: Synthetic oligonucleotide
uccacggugugaugauugc

SEQ ID NO: 1157873 - RNA, 19 nt, Artificial Sequence
  Description of Artificial Sequence: Synthetic oligonucleotide
auuaauuaaugggcccuga

SEQ ID NO: 1157874 - RNA, 19 nt, Artificial Sequence
  Description of Artificial Sequence: Synthetic oligonucleotide
cuuuggugucgcuucccgc

SEQ ID NO: 1157875 - RNA, 19 nt, Artificial Sequence
  Description of Artificial Sequence: Synthetic oligonucleotide
aauuugcugcauggugcag

SEQ ID NO: 1157876 - RNA, 19 nt, Artificial Sequence
  Description of Artificial Sequence: Synthetic oligonucleotide
uucggaggacgccgggcgg

SEQ ID NO: 1157877 - RNA, 19 nt, Artificial Sequence
  Description of Artificial Sequence: Synthetic oligonucleotide
aucuuggcaaggucguccu

SEQ ID NO: 1157878 - RNA, 19 nt, Artificial Sequence
  Description of Artificial Sequence: Synthetic oligonucleotide
guugaaccaguaaaggaaa

SEQ ID NO: 1157879 - RNA, 19 nt, Artificial Sequence
  Description of Artificial Sequence: Synthetic oligonucleotide
gacgagcuuccucugagaa

SEQ ID NO: 1157880 - RNA, 19 nt, Artificial Sequence
  Description of Artificial Sequence: Synthetic oligonucleotide
gaaagcggguccccauggc

SEQ ID NO: 1157881 - RNA, 19 nt, Artificial Sequence
  Description of Artificial Sequence: Synthetic oligonucleotide
ccccguuguacuaagaauc

SEQ ID NO: 1157882 - RNA, 19 nt, Artificial Sequence
  Description of Artificial Sequence: Synthetic oligonucleotide
uacgacgagcuuccucuga

SEQ ID NO: 1157883 - RNA, 19 nt, Artificial Sequence
  Description of Artificial Sequence: Synthetic oligonucleotide
ccuacaagccuccauaaca

SEQ ID NO: 1157884 - RNA, 19 nt, Artificial Sequence
  Description of Artificial Sequence: Synthetic oligonucleotide
caaggucguccuuauuuuc

SEQ ID NO: 1157885 - RNA, 19 nt, Artificial Sequence
  Description of Artificial Sequence: Synthetic oligonucleotide
ugucgcuucccgccuguca

SEQ ID NO: 1157886 - RNA, 19 nt, Artificial Sequence
  Description of Artificial Sequence: Synthetic oligonucleotide
acucgucaauaccauacuu

SEQ ID NO: 1157887 - RNA, 19 nt, Artificial Sequence
  Description of Artificial Sequence: Synthetic oligonucleotide
acacgcaggcuuuucugca

SEQ ID NO: 1157888 - RNA, 19 nt, Artificial Sequence
  Description of Artificial Sequence: Synthetic oligonucleotide
augucuccauaaauacgac

SEQ ID NO: 1157889 - RNA, 19 nt, Artificial Sequence
  Description of Artificial Sequence: Synthetic oligonucleotide
gauugcggccacaccaaug

SEQ ID NO: 1157890 - RNA, 19 nt, Artificial Sequence
  Description of Artificial Sequence: Synthetic oligonucleotide
cauccuaaacuuggaugcc

SEQ ID NO: 1157891 - RNA, 19 nt, Artificial Sequence
  Description of Artificial Sequence: Synthetic oligonucleotide
ggucuugagaguaaaagua

SEQ ID NO: 1157892 - RNA, 19 nt, Artificial Sequence
  Description of Artificial Sequence: Synthetic oligonucleotide
gucgcuucccgccugucac

SEQ ID NO: 1157893 - RNA, 19 nt, Artificial Sequence
  Description of Artificial Sequence: Synthetic oligonucleotide
accccguuguacuaagaau

SEQ ID NO: 1157894 - RNA, 19 nt, Artificial Sequence
  Description of Artificial Sequence: Synthetic oligonucleotide
guggaucaguacauagugc

SEQ ID NO: 1157895 - RNA, 19 nt, Artificial Sequence
  Description of Artificial Sequence: Synthetic oligonucleotide
gucguccuuauuuuccauc

SEQ ID NO: 1157896 - RNA, 19 nt, Artificial Sequence
  Description of Artificial Sequence: Synthetic oligonucleotide
auuuuggacaccaguggau

SEQ ID NO: 1157897 - RNA, 19 nt, Artificial Sequence
  Description of Artificial Sequence: Synthetic oligonucleotide
ccaguggaucaguacauag

SEQ ID NO: 1157898 - RNA, 19 nt, Artificial Sequence
  Description of Artificial Sequence: Synthetic oligonucleotide
ccauuuacgaaguaaugaa

SEQ ID NO: 1157899 - RNA, 19 nt, Artificial Sequence
  Description of Artificial Sequence: Synthetic oligonucleotide
gaguuauuccuuccucaaa

SEQ ID NO: 1157900 - RNA, 19 nt, Artificial Sequence
  Description of Artificial Sequence: Synthetic oligonucleotide
cacgaagcuguccccgcgg

SEQ ID NO: 1157901 - RNA, 19 nt, Artificial Sequence
  Description of Artificial Sequence: Synthetic oligonucleotide
ggagacucgcuucacagaa

SEQ ID NO: 1157902 - RNA, 19 nt, Artificial Sequence
  Description of Artificial Sequence: Synthetic oligonucleotide
cauugcugagcaggguggg

SEQ ID NO: 1157903 - RNA, 19 nt, Artificial Sequence
  Description of Artificial Sequence: Synthetic oligonucleotide
auccuaaacuuggaugcca

SEQ ID NO: 1157904 - RNA, 19 nt, Artificial Sequence
  Description of Artificial Sequence: Synthetic oligonucleotide
guagggugugucuuccgca

SEQ ID NO: 1157905 - RNA, 19 nt, Artificial Sequence
  Description of Artificial Sequence: Synthetic oligonucleotide
ugcgacgcugagcuucgga

SEQ ID NO: 1157906 - RNA, 19 nt, Artificial Sequence
  Description of Artificial Sequence: Synthetic oligonucleotide
gccguugaaccaguaaagg

SEQ ID NO: 1157907 - RNA, 19 nt, Artificial Sequence
  Description of Artificial Sequence: Synthetic oligonucleotide
ccauaacacacauacuuga

SEQ ID NO: 1157908 - RNA, 19 nt, Artificial Sequence
  Description of Artificial Sequence: Synthetic oligonucleotide
gugaugauugcggccacac

SEQ ID NO: 1157909 - RNA, 19 nt, Artificial Sequence
  Description of Artificial Sequence: Synthetic oligonucleotide
guacccugcuaauccaaca

SEQ ID NO: 1157910 - RNA, 19 nt, Artificial Sequence
  Description of Artificial Sequence: Synthetic oligonucleotide
accucggccccuuuggcaa

SEQ ID NO: 1157911 - RNA, 19 nt, Artificial Sequence
  Description of Artificial Sequence: Synthetic oligonucleotide
gaaucauagauaccccguu

SEQ ID NO: 1157912 - RNA, 19 nt, Artificial Sequence
  Description of Artificial Sequence: Synthetic oligonucleotide
uagauaccccguuguacua

SEQ ID NO: 1157913 - RNA, 19 nt, Artificial Sequence
  Description of Artificial Sequence: Synthetic oligonucleotide
agaaacuccgcagcagaaa

SEQ ID NO: 1157914 - RNA, 19 nt, Artificial Sequence
  Description of Artificial Sequence: Synthetic oligonucleotide
ccccguuuauccuuggcag

SEQ ID NO: 1157915 - RNA, 19 nt, Artificial Sequence
  Description of Artificial Sequence: Synthetic oligonucleotide
ucauaccauuuacgaagua

SEQ ID NO: 1157916 - RNA, 19 nt, Artificial Sequence
  Description of Artificial Sequence: Synthetic oligonucleotide
cauggccccgcaguggcgg

SEQ ID NO: 1157917 - RNA, 19 nt, Artificial Sequence
  Description of Artificial Sequence: Synthetic oligonucleotide
uuggcaaggucguccuuau

SEQ ID NO: 1157918 - RNA, 19 nt, Artificial Sequence
  Description of Artificial Sequence: Synthetic oligonucleotide
cacccagcuccauggagac

SEQ ID NO: 1157919 - RNA, 19 nt, Artificial Sequence
  Description of Artificial Sequence: Synthetic oligonucleotide
ccucccacgaagcuguccc

SEQ ID NO: 1157920 - RNA, 19 nt, Artificial Sequence
  Description of Artificial Sequence: Synthetic oligonucleotide
ucgugggcggcgcgcacag

SEQ ID NO: 1157921 - RNA, 19 nt, Artificial Sequence
  Description of Artificial Sequence: Synthetic oligonucleotide
ucccgccugguuugcaagc

SEQ ID NO: 1157922 - RNA, 19 nt, Artificial Sequence
  Description of Artificial Sequence: Synthetic oligonucleotide
auacgacgagcuuccucug

SEQ ID NO: 1157923 - RNA, 19 nt, Artificial Sequence
  Description of Artificial Sequence: Synthetic oligonucleotide
aaguacccugcuaauccaa

SEQ ID NO: 1157924 - RNA, 19 nt, Artificial Sequence
  Description of Artificial Sequence: Synthetic oligonucleotide
gcgacgcugagcuucggag

SEQ ID NO: 1157925 - RNA, 19 nt, Artificial Sequence
  Description of Artificial Sequence: Synthetic oligonucleotide
agcgccagacgcgcggccc

SEQ ID NO: 1157926 - RNA, 19 nt, Artificial Sequence
  Description of Artificial Sequence: Synthetic oligonucleotide
acgaaguaaugaacuccuc

SEQ ID NO: 1157927 - RNA, 19 nt, Artificial Sequence
  Description of Artificial Sequence: Synthetic oligonucleotide
agauacucgucaauaccau

SEQ ID NO: 1157928 - RNA, 19 nt, Artificial Sequence
  Description of Artificial Sequence: Synthetic oligonucleotide
ggcgccaggggcccaaagg

SEQ ID NO: 1157929 - RNA, 19 nt, Artificial Sequence
  Description of Artificial Sequence: Synthetic oligonucleotide
ugggcggcgcgcacagcgg

SEQ ID NO: 1157930 - RNA, 19 nt, Artificial Sequence
  Description of Artificial Sequence: Synthetic oligonucleotide
gggucgugcaccgggaagg

SEQ ID NO: 1157931 - RNA, 19 nt, Artificial Sequence
  Description of Artificial Sequence: Synthetic oligonucleotide
uccccgcggaguaggucgg

SEQ ID NO: 1157932 - RNA, 19 nt, Artificial Sequence
  Description of Artificial Sequence: Synthetic oligonucleotide
aagcuguccccgcggagua

SEQ ID NO: 1157933 - RNA, 19 nt, Artificial Sequence
  Description of Artificial Sequence: Synthetic oligonucleotide
ugauugcggccacaccaau

SEQ ID NO: 1157934 - RNA, 19 nt, Artificial Sequence
  Description of Artificial Sequence: Synthetic oligonucleotide
guaaaaguacccugcuaau

SEQ ID NO: 1157935 - RNA, 19 nt, Artificial Sequence
  Description of Artificial Sequence: Synthetic oligonucleotide
cauacuugaccuccagaua

SEQ ID NO: 1157936 - RNA, 19 nt, Artificial Sequence
  Description of Artificial Sequence: Synthetic oligonucleotide
cauucacgccaaccaugcc

SEQ ID NO: 1157937 - RNA, 19 nt, Artificial Sequence
  Description of Artificial Sequence: Synthetic oligonucleotide
auucccgccugguuugcaa

SEQ ID NO: 1157938 - RNA, 19 nt, Artificial Sequence
  Description of Artificial Sequence: Synthetic oligonucleotide
ugggccucuuucaguggcu

SEQ ID NO: 1157939 - RNA, 19 nt, Artificial Sequence
  Description of Artificial Sequence: Synthetic oligonucleotide
gggauucccgccugguuug

SEQ ID NO: 1157940 - RNA, 19 nt, Artificial Sequence
  Description of Artificial Sequence: Synthetic oligonucleotide
cacugucaaagacaaugaa

SEQ ID NO: 1157941 - RNA, 19 nt, Artificial Sequence
  Description of Artificial Sequence: Synthetic oligonucleotide
cacaaccucggccccuuug

SEQ ID NO: 1157942 - RNA, 19 nt, Artificial Sequence
  Description of Artificial Sequence: Synthetic oligonucleotide
caaccucggccccuuuggc

SEQ ID NO: 1157943 - RNA, 19 nt, Artificial Sequence
  Description of Artificial Sequence: Synthetic oligonucleotide
gacacuccacugaagagau

SEQ ID NO: 1157944 - RNA, 19 nt, Artificial Sequence
  Description of Artificial Sequence: Synthetic oligonucleotide
ccuguugccguugaaccag

SEQ ID NO: 1157945 - RNA, 19 nt, Artificial Sequence
  Description of Artificial Sequence: Synthetic oligonucleotide
cugagcuucggaggacgcc

SEQ ID NO: 1157946 - RNA, 19 nt, Artificial Sequence
  Description of Artificial Sequence: Synthetic oligonucleotide
acgaagcuguccccgcgga

SEQ ID NO: 1157947 - RNA, 19 nt, Artificial Sequence
  Description of Artificial Sequence: Synthetic oligonucleotide
cacuuuccgggugaucaug

SEQ ID NO: 1157948 - RNA, 19 nt, Artificial Sequence
  Description of Artificial Sequence: Synthetic oligonucleotide
cccugcuaauccaacauca

SEQ ID NO: 1157949 - RNA, 19 nt, Artificial Sequence
  Description of Artificial Sequence: Synthetic oligonucleotide
cuuccgcagguuucaccac

SEQ ID NO: 1157950 - RNA, 19 nt, Artificial Sequence
  Description of Artificial Sequence: Synthetic oligonucleotide
auggccccgcaguggcggc

SEQ ID NO: 1157951 - RNA, 19 nt, Artificial Sequence
  Description of Artificial Sequence: Synthetic oligonucleotide
agauaccccguuguacuaa

SEQ ID NO: 1157952 - RNA, 19 nt, Artificial Sequence
  Description of Artificial Sequence: Synthetic oligonucleotide
caguggaucaguacauagu

SEQ ID NO: 1157953 - RNA, 19 nt, Artificial Sequence
  Description of Artificial Sequence: Synthetic oligonucleotide
uaaauacgacgagcuuccu

SEQ ID NO: 1157954 - RNA, 19 nt, Artificial Sequence
  Description of Artificial Sequence: Synthetic oligonucleotide
uccuugaccgagaccccuu

SEQ ID NO: 1157955 - RNA, 19 nt, Artificial Sequence
  Description of Artificial Sequence: Synthetic oligonucleotide
cuugaccgagaccccuuuc

SEQ ID NO: 1157956 - RNA, 19 nt, Artificial Sequence
  Description of Artificial Sequence: Synthetic oligonucleotide
gcaacugcgucauucacau

SEQ ID NO: 1157957 - RNA, 19 nt, Artificial Sequence
  Description of Artificial Sequence: Synthetic oligonucleotide
ccgccugucacaaccucgg

SEQ ID NO: 1157958 - RNA, 19 nt, Artificial Sequence
  Description of Artificial Sequence: Synthetic oligonucleotide
augauugcggccacaccaa

SEQ ID NO: 1157959 - RNA, 19 nt, Artificial Sequence
  Description of Artificial Sequence: Synthetic oligonucleotide
ugcgacagccugguccaca

SEQ ID NO: 1157960 - RNA, 19 nt, Artificial Sequence
  Description of Artificial Sequence: Synthetic oligonucleotide
ugucacaaccucggccccu

SEQ ID NO: 1157961 - RNA, 19 nt, Artificial Sequence
  Description of Artificial Sequence: Synthetic oligonucleotide
guggcggcgacagaggcaa

SEQ ID NO: 1157962 - RNA, 19 nt, Artificial Sequence
  Description of Artificial Sequence: Synthetic oligonucleotide
cuuggacccuucucgccca

SEQ ID NO: 1157963 - RNA, 19 nt, Artificial Sequence
  Description of Artificial Sequence: Synthetic oligonucleotide
cagaaacuccgcagcagaa

SEQ ID NO: 1157964 - RNA, 19 nt, Artificial Sequence
  Description of Artificial Sequence: Synthetic oligonucleotide
ccguuuauccuuggcagag

SEQ ID NO: 1157965 - RNA, 19 nt, Artificial Sequence
  Description of Artificial Sequence: Synthetic oligonucleotide
uguugccguugaaccagua

SEQ ID NO: 1157966 - RNA, 19 nt, Artificial Sequence
  Description of Artificial Sequence: Synthetic oligonucleotide
ccauucuaggaaaagggcu

SEQ ID NO: 1157967 - RNA, 19 nt, Artificial Sequence
  Description of Artificial Sequence: Synthetic oligonucleotide
gcaggaccuuuccuguugc

SEQ ID NO: 1157968 - RNA, 19 nt, Artificial Sequence
  Description of Artificial Sequence: Synthetic oligonucleotide
ccguugaaccaguaaagga

SEQ ID NO: 1157969 - RNA, 19 nt, Artificial Sequence
  Description of Artificial Sequence: Synthetic oligonucleotide
cccgccugucacaaccucg

SEQ ID NO: 1157970 - RNA, 19 nt, Artificial Sequence
  Description of Artificial Sequence: Synthetic oligonucleotide
agcggccucccacgaagcu

SEQ ID NO: 1157971 - RNA, 19 nt, Artificial Sequence
  Description of Artificial Sequence: Synthetic oligonucleotide
gaacuucucccugggccuc

SEQ ID NO: 1157972 - RNA, 19 nt, Artificial Sequence
  Description of Artificial Sequence: Synthetic oligonucleotide
ccagcggccucccacgaag

SEQ ID NO: 1157973 - RNA, 19 nt, Artificial Sequence
  Description of Artificial Sequence: Synthetic oligonucleotide
uaaugggcccugaguuauu

SEQ ID NO: 1157974 - RNA, 19 nt, Artificial Sequence
  Description of Artificial Sequence: Synthetic oligonucleotide
ggcggcgacagaggcaagg

SEQ ID NO: 1157975 - RNA, 19 nt, Artificial Sequence
  Description of Artificial Sequence: Synthetic oligonucleotide
ggugaucauggcacuagga

SEQ ID NO: 1157976 - RNA, 19 nt, Artificial Sequence
  Description of Artificial Sequence: Synthetic oligonucleotide
ggccgggucgugcaccggg

SEQ ID NO: 1157977 - RNA, 19 nt, Artificial Sequence
  Description of Artificial Sequence: Synthetic oligonucleotide
cagugaugcagagcauguc

SEQ ID NO: 1157978 - RNA, 19 nt, Artificial Sequence
  Description of Artificial Sequence: Synthetic oligonucleotide
cccgcagucggccacggug

SEQ ID NO: 1157979 - RNA, 19 nt, Artificial Sequence
  Description of Artificial Sequence: Synthetic oligonucleotide
uggcgccaggggcccaaag

SEQ ID NO: 1157980 - RNA, 19 nt, Artificial Sequence
  Description of Artificial Sequence: Synthetic oligonucleotide
acgcugagcuucggaggac

SEQ ID NO: 1157981 - RNA, 19 nt, Artificial Sequence
  Description of Artificial Sequence: Synthetic oligonucleotide
cagcggccucccacgaagc

SEQ ID NO: 1157982 - RNA, 19 nt, Artificial Sequence
  Description of Artificial Sequence: Synthetic oligonucleotide
agaacccuacaagccucca

SEQ ID NO: 1157983 - RNA, 19 nt, Artificial Sequence
  Description of Artificial Sequence: Synthetic oligonucleotide
cucuaccuuuucuacugcu

SEQ ID NO: 1157984 - RNA, 19 nt, Artificial Sequence
  Description of Artificial Sequence: Synthetic oligonucleotide
ggcgccgcuggccgggucg

SEQ ID NO: 1157985 - RNA, 19 nt, Artificial Sequence
  Description of Artificial Sequence: Synthetic oligonucleotide
agggcugaauacagaacuu

SEQ ID NO: 1157986 - RNA, 19 nt, Artificial Sequence
  Description of Artificial Sequence: Synthetic oligonucleotide
caacuggcgccaggggccc

SEQ ID NO: 1157987 - RNA, 19 nt, Artificial Sequence
  Description of Artificial Sequence: Synthetic oligonucleotide
ccgcagucggccacggugc

SEQ ID NO: 1157988 - RNA, 19 nt, Artificial Sequence
  Description of Artificial Sequence: Synthetic oligonucleotide
acccacacgcaggcuuuuc

SEQ ID NO: 1157989 - RNA, 19 nt, Artificial Sequence
  Description of Artificial Sequence: Synthetic oligonucleotide
cguuguacuaagaaucugu

SEQ ID NO: 1157990 - RNA, 19 nt, Artificial Sequence
  Description of Artificial Sequence: Synthetic oligonucleotide
gcggcgacagaggcaaggg

SEQ ID NO: 1157991 - RNA, 19 nt, Artificial Sequence
  Description of Artificial Sequence: Synthetic oligonucleotide
ccacggugugaugauugcg

SEQ ID NO: 1157992 - RNA, 19 nt, Artificial Sequence
  Description of Artificial Sequence: Synthetic oligonucleotide
ccacccagcuccauggaga

SEQ ID NO: 1157993 - RNA, 19 nt, Artificial Sequence
  Description of Artificial Sequence: Synthetic oligonucleotide
gcccugaguuauuccuucc

SEQ ID NO: 1157994 - RNA, 19 nt, Artificial Sequence
  Description of Artificial Sequence: Synthetic oligonucleotide
caacugcgucauucacaug

SEQ ID NO: 1157995 - RNA, 19 nt, Artificial Sequence
  Description of Artificial Sequence: Synthetic oligonucleotide
gaagguggcggggccggga

SEQ ID NO: 1157996 - RNA, 19 nt, Artificial Sequence
  Description of Artificial Sequence: Synthetic oligonucleotide
gcaguggcggcgacagagg

SEQ ID NO: 1157997 - RNA, 19 nt, Artificial Sequence
  Description of Artificial Sequence: Synthetic oligonucleotide
ucacgccaaccaugcccac

SEQ ID NO: 1157998 - RNA, 19 nt, Artificial Sequence
  Description of Artificial Sequence: Synthetic oligonucleotide
acacuccacugaagagauc

SEQ ID NO: 1157999 - RNA, 19 nt, Artificial Sequence
  Description of Artificial Sequence: Synthetic oligonucleotide
aucgugggcggcgcgcaca

SEQ ID NO: 1158000 - RNA, 19 nt, Artificial Sequence
  Description of Artificial Sequence: Synthetic oligonucleotide
gauucccgccugguuugca

SEQ ID NO: 1158001 - RNA, 19 nt, Artificial Sequence
  Description of Artificial Sequence: Synthetic oligonucleotide
auaccccguuguacuaaga

SEQ ID NO: 1158002 - RNA, 19 nt, Artificial Sequence
  Description of Artificial Sequence: Synthetic oligonucleotide
ccgcggaguaggucggccg

SEQ ID NO: 1158003 - RNA, 19 nt, Artificial Sequence
  Description of Artificial Sequence: Synthetic oligonucleotide
agcuguccccgcggaguag

SEQ ID NO: 1158004 - RNA, 19 nt, Artificial Sequence
  Description of Artificial Sequence: Synthetic oligonucleotide
cugcauuugcgauggcaau

SEQ ID NO: 1158005 - RNA, 19 nt, Artificial Sequence
  Description of Artificial Sequence: Synthetic oligonucleotide
gcaaggucguccuuauuuu

SEQ ID NO: 1158006 - RNA, 19 nt, Artificial Sequence
  Description of Artificial Sequence: Synthetic oligonucleotide
ggggauucccgccugguuu

SEQ ID NO: 1158007 - RNA, 19 nt, Artificial Sequence
  Description of Artificial Sequence: Synthetic oligonucleotide
uggcggggccgggagccag

SEQ ID NO: 1158008 - RNA, 19 nt, Artificial Sequence
  Description of Artificial Sequence: Synthetic oligonucleotide
ccguuguacuaagaaucug

SEQ ID NO: 1158009 - RNA, 19 nt, Artificial Sequence
  Description of Artificial Sequence: Synthetic oligonucleotide
ccuacagaucuaaguagcu

SEQ ID NO: 1158010 - RNA, 19 nt, Artificial Sequence
  Description of Artificial Sequence: Synthetic oligonucleotide
guccuucauucacgccaac

SEQ ID NO: 1158011 - RNA, 19 nt, Artificial Sequence
  Description of Artificial Sequence: Synthetic oligonucleotide
caccccgcagucggccacg

SEQ ID NO: 1158012 - RNA, 19 nt, Artificial Sequence
  Description of Artificial Sequence: Synthetic oligonucleotide
ggaucaguacauagugccu

SEQ ID NO: 1158013 - RNA, 19 nt, Artificial Sequence
  Description of Artificial Sequence: Synthetic oligonucleotide
caucgugggcggcgcgcac

SEQ ID NO: 1158014 - RNA, 19 nt, Artificial Sequence
  Description of Artificial Sequence: Synthetic oligonucleotide
cgcggaguaggucggccgg

SEQ ID NO: 1158015 - RNA, 19 nt, Artificial Sequence
  Description of Artificial Sequence: Synthetic oligonucleotide
cagcgccagacgcgcggcc

SEQ ID NO: 1158016 - RNA, 19 nt, Artificial Sequence
  Description of Artificial Sequence: Synthetic oligonucleotide
cccguuguacuaagaaucu

SEQ ID NO: 1158017 - RNA, 19 nt, Artificial Sequence
  Description of Artificial Sequence: Synthetic oligonucleotide
gugcaccgggaagguggcg

SEQ ID NO: 1158018 - RNA, 19 nt, Artificial Sequence
  Description of Artificial Sequence: Synthetic oligonucleotide
ucggccccuuuggcaacug

SEQ ID NO: 1158019 - RNA, 19 nt, Artificial Sequence
  Description of Artificial Sequence: Synthetic oligonucleotide
gcggccucccacgaagcug

SEQ ID NO: 1158020 - RNA, 19 nt, Artificial Sequence
  Description of Artificial Sequence: Synthetic oligonucleotide
gcggaguaggucggccggg

SEQ ID NO: 1158021 - RNA, 19 nt, Artificial Sequence
  Description of Artificial Sequence: Synthetic oligonucleotide
cgucaauaccauacuugga

SEQ ID NO: 1158022 - RNA, 19 nt, Artificial Sequence
  Description of Artificial Sequence: Synthetic oligonucleotide
gcggcccagaaacuccgca

SEQ ID NO: 1158023 - RNA, 19 nt, Artificial Sequence
  Description of Artificial Sequence: Synthetic oligonucleotide
guaggucggccgggaggcc

SEQ ID NO: 1158024 - RNA, 19 nt, Artificial Sequence
  Description of Artificial Sequence: Synthetic oligonucleotide
gcgccaggggcccaaaggu

SEQ ID NO: 1158025 - RNA, 19 nt, Artificial Sequence
  Description of Artificial Sequence: Synthetic oligonucleotide
gcuggccgggucgugcacc

SEQ ID NO: 1158026 - RNA, 19 nt, Artificial Sequence
  Description of Artificial Sequence: Synthetic oligonucleotide
accccgcagucggccacgg

SEQ ID NO: 1158027 - RNA, 19 nt, Artificial Sequence
  Description of Artificial Sequence: Synthetic oligonucleotide
cagaucuaaguagcuuuau

SEQ ID NO: 1158028 - RNA, 19 nt, Artificial Sequence
  Description of Artificial Sequence: Synthetic oligonucleotide
agaccccuuuccagcugca

SEQ ID NO: 1158029 - RNA, 19 nt, Artificial Sequence
  Description of Artificial Sequence: Synthetic oligonucleotide
gagacucgcuucacagaau

SEQ ID NO: 1158030 - RNA, 19 nt, Artificial Sequence
  Description of Artificial Sequence: Synthetic oligonucleotide
uacccacacgcaggcuuuu

SEQ ID NO: 1158031 - RNA, 19 nt, Artificial Sequence
  Description of Artificial Sequence: Synthetic oligonucleotide
ggauucccgccugguuugc

SEQ ID NO: 1158032 - RNA, 19 nt, Artificial Sequence
  Description of Artificial Sequence: Synthetic oligonucleotide
ccauggccccgcaguggcg

SEQ ID NO: 1158033 - RNA, 19 nt, Artificial Sequence
  Description of Artificial Sequence: Synthetic oligonucleotide
cacgcaggcuuuucugcau

SEQ ID NO: 1158034 - RNA, 19 nt, Artificial Sequence
  Description of Artificial Sequence: Synthetic oligonucleotide
cacucucagcaguuaugau

SEQ ID NO: 1158035 - RNA, 19 nt, Artificial Sequence
  Description of Artificial Sequence: Synthetic oligonucleotide
cuguugccguugaaccagu

SEQ ID NO: 1158036 - RNA, 19 nt, Artificial Sequence
  Description of Artificial Sequence: Synthetic oligonucleotide
gacucgcuucacagaauuu

SEQ ID NO: 1158037 - RNA, 19 nt, Artificial Sequence
  Description of Artificial Sequence: Synthetic oligonucleotide
cgcagguuucaccaccaca

SEQ ID NO: 1158038 - RNA, 19 nt, Artificial Sequence
  Description of Artificial Sequence: Synthetic oligonucleotide
cuccuugaccgagaccccu

SEQ ID NO: 1158039 - RNA, 19 nt, Artificial Sequence
  Description of Artificial Sequence: Synthetic oligonucleotide
gcgacagaggcaagggacu

SEQ ID NO: 1158040 - RNA, 19 nt, Artificial Sequence
  Description of Artificial Sequence: Synthetic oligonucleotide
gcagaaagcggguccccau

SEQ ID NO: 1158041 - RNA, 19 nt, Artificial Sequence
  Description of Artificial Sequence: Synthetic oligonucleotide
gggcaccccgcagucggcc

SEQ ID NO: 1158042 - RNA, 19 nt, Artificial Sequence
  Description of Artificial Sequence: Synthetic oligonucleotide
cgggucgugcaccgggaag

SEQ ID NO: 1158043 - RNA, 19 nt, Artificial Sequence
  Description of Artificial Sequence: Synthetic oligonucleotide
gcgcgcacagcggcgcggg

SEQ ID NO: 1158044 - RNA, 19 nt, Artificial Sequence
  Description of Artificial Sequence: Synthetic oligonucleotide
gccgcuggccgggucgugc

SEQ ID NO: 1158045 - RNA, 19 nt, Artificial Sequence
  Description of Artificial Sequence: Synthetic oligonucleotide
ggucguccuuauuuuccau

SEQ ID NO: 1158046 - RNA, 19 nt, Artificial Sequence
  Description of Artificial Sequence: Synthetic oligonucleotide
cgcgggcauagcugcgacg

SEQ ID NO: 1158047 - RNA, 19 nt, Artificial Sequence
  Description of Artificial Sequence: Synthetic oligonucleotide
cagacgcgcggcccagaaa

SEQ ID NO: 1158048 - RNA, 19 nt, Artificial Sequence
  Description of Artificial Sequence: Synthetic oligonucleotide
cccugaguuauuccuuccu

SEQ ID NO: 1158049 - RNA, 19 nt, Artificial Sequence
  Description of Artificial Sequence: Synthetic oligonucleotide
ccauaaauacgacgagcuu

SEQ ID NO: 1158050 - RNA, 19 nt, Artificial Sequence
  Description of Artificial Sequence: Synthetic oligonucleotide
gcuucccgccugucacaac

SEQ ID NO: 1158051 - RNA, 19 nt, Artificial Sequence
  Description of Artificial Sequence: Synthetic oligonucleotide
cuccugcgacagccugguc

SEQ ID NO: 1158052 - RNA, 19 nt, Artificial Sequence
  Description of Artificial Sequence: Synthetic oligonucleotide
ccucggccccuuuggcaac

SEQ ID NO: 1158053 - RNA, 19 nt, Artificial Sequence
  Description of Artificial Sequence: Synthetic oligonucleotide
gcgacagccugguccacau

SEQ ID NO: 1158054 - RNA, 19 nt, Artificial Sequence
  Description of Artificial Sequence: Synthetic oligonucleotide
gucacaaccucggccccuu

SEQ ID NO: 1158055 - RNA, 19 nt, Artificial Sequence
  Description of Artificial Sequence: Synthetic oligonucleotide
cugcgucauucacaugcuu

SEQ ID NO: 1158056 - RNA, 19 nt, Artificial Sequence
  Description of Artificial Sequence: Synthetic oligonucleotide
cauggugcagcaggaccuu

SEQ ID NO: 1158057 - RNA, 19 nt, Artificial Sequence
  Description of Artificial Sequence: Synthetic oligonucleotide
cagaucugggcugggucuu

SEQ ID NO: 1158058 - RNA, 19 nt, Artificial Sequence
  Description of Artificial Sequence: Synthetic oligonucleotide
cgccugucacaaccucggc

SEQ ID NO: 1158059 - RNA, 19 nt, Artificial Sequence
  Description of Artificial Sequence: Synthetic oligonucleotide
cccacacgcaggcuuuucu

SEQ ID NO: 1158060 - RNA, 19 nt, Artificial Sequence
  Description of Artificial Sequence: Synthetic oligonucleotide
ccgagaccccuuuccagcu

SEQ ID NO: 1158061 - RNA, 19 nt, Artificial Sequence
  Description of Artificial Sequence: Synthetic oligonucleotide
cgacgagcuuccucugaga

SEQ ID NO: 1158062 - RNA, 19 nt, Artificial Sequence
  Description of Artificial Sequence: Synthetic oligonucleotide
cuguccccgcggaguaggu

SEQ ID NO: 1158063 - RNA, 19 nt, Artificial Sequence
  Description of Artificial Sequence: Synthetic oligonucleotide
gcucugccacucuccagau

SEQ ID NO: 1158064 - RNA, 19 nt, Artificial Sequence
  Description of Artificial Sequence: Synthetic oligonucleotide
ccagacgcgcggcccagaa

SEQ ID NO: 1158065 - RNA, 19 nt, Artificial Sequence
  Description of Artificial Sequence: Synthetic oligonucleotide
ccuaaacuuggaugccauu

SEQ ID NO: 1158066 - RNA, 19 nt, Artificial Sequence
  Description of Artificial Sequence: Synthetic oligonucleotide
ggucgugcaccgggaaggu

SEQ ID NO: 1158067 - RNA, 19 nt, Artificial Sequence
  Description of Artificial Sequence: Synthetic oligonucleotide
ggcggggccgggagccagc

SEQ ID NO: 1158068 - RNA, 19 nt, Artificial Sequence
  Description of Artificial Sequence: Synthetic oligonucleotide
cgccugguuugcaagcugu

SEQ ID NO: 1158069 - RNA, 19 nt, Artificial Sequence
  Description of Artificial Sequence: Synthetic oligonucleotide
gccagcggccucccacgaa

SEQ ID NO: 1158070 - RNA, 19 nt, Artificial Sequence
  Description of Artificial Sequence: Synthetic oligonucleotide
cucggccccuuuggcaacu

SEQ ID NO: 1158071 - RNA, 19 nt, Artificial Sequence
  Description of Artificial Sequence: Synthetic oligonucleotide
gccgggucgugcaccggga

SEQ ID NO: 1158072 - RNA, 19 nt, Artificial Sequence
  Description of Artificial Sequence: Synthetic oligonucleotide
caggggcccaaaggucucu

SEQ ID NO: 1158073 - RNA, 19 nt, Artificial Sequence
  Description of Artificial Sequence: Synthetic oligonucleotide
cggccggcaggcggcagcg

SEQ ID NO: 1158074 - RNA, 19 nt, Artificial Sequence
  Description of Artificial Sequence: Synthetic oligonucleotide
cgggcaccccgcagucggc

SEQ ID NO: 1158075 - RNA, 19 nt, Artificial Sequence
  Description of Artificial Sequence: Synthetic oligonucleotide
cggcagcgccagacgcgcg

SEQ ID NO: 1158076 - RNA, 19 nt, Artificial Sequence
  Description of Artificial Sequence: Synthetic oligonucleotide
gggccucuuucaguggcuu

SEQ ID NO: 1158077 - RNA, 19 nt, Artificial Sequence
  Description of Artificial Sequence: Synthetic oligonucleotide
ccuugaccgagaccccuuu

SEQ ID NO: 1158078 - RNA, 19 nt, Artificial Sequence
  Description of Artificial Sequence: Synthetic oligonucleotide
ccccgcggaguaggucggc

SEQ ID NO: 1158079 - RNA, 19 nt, Artificial Sequence
  Description of Artificial Sequence: Synthetic oligonucleotide
cccgccugguuugcaagcu

SEQ ID NO: 1158080 - RNA, 19 nt, Artificial Sequence
  Description of Artificial Sequence: Synthetic oligonucleotide
cgcuggccgggucgugcac

SEQ ID NO: 1158081 - RNA, 19 nt, Artificial Sequence
  Description of Artificial Sequence: Synthetic oligonucleotide
cgcuucccgccugucacaa

SEQ ID NO: 1158082 - RNA, 19 nt, Artificial Sequence
  Description of Artificial Sequence: Synthetic oligonucleotide
ccccucuuuggugucgcuu

SEQ ID NO: 1158083 - RNA, 19 nt, Artificial Sequence
  Description of Artificial Sequence: Synthetic oligonucleotide
cgugggcggcgcgcacagc

SEQ ID NO: 1158084 - RNA, 19 nt, Artificial Sequence
  Description of Artificial Sequence: Synthetic oligonucleotide
ccccgcaguggcggcgaca

SEQ ID NO: 1158085 - RNA, 19 nt, Artificial Sequence
  Description of Artificial Sequence: Synthetic oligonucleotide
ccgcaguggcggcgacaga

SEQ ID NO: 1158086 - RNA, 19 nt, Artificial Sequence
  Description of Artificial Sequence: Synthetic oligonucleotide
gcgccgcuggccgggucgu

SEQ ID NO: 1158087 - RNA, 19 nt, Artificial Sequence
  Description of Artificial Sequence: Synthetic oligonucleotide
cgccgcuggccgggucgug

SEQ ID NO: 1158088 - RNA, 19 nt, Artificial Sequence
  Description of Artificial Sequence: Synthetic oligonucleotide
ccccgcagucggccacggu

SEQ ID NO: 1158089 - RNA, 19 nt, Artificial Sequence
  Description of Artificial Sequence: Synthetic oligonucleotide
aaucauuugaucucgaugg

SEQ ID NO: 1158090 - RNA, 19 nt, Artificial Sequence
  Description of Artificial Sequence: Synthetic oligonucleotide
auucauuucaccuuggugc

SEQ ID NO: 1158091 - RNA, 19 nt, Artificial Sequence
  Description of Artificial Sequence: Synthetic oligonucleotide
uguucaaugaaucuaauug

SEQ ID NO: 1158092 - RNA, 19 nt, Artificial Sequence
  Description of Artificial Sequence: Synthetic oligonucleotide
agauugucuaaauuuagcc

SEQ ID NO: 1158093 - RNA, 19 nt, Artificial Sequence
  Description of Artificial Sequence: Synthetic oligonucleotide
aauuauuuugucucgaggu

SEQ ID NO: 1158094 - RNA, 19 nt, Artificial Sequence
  Description of Artificial Sequence: Synthetic oligonucleotide
ucugagaugacaaaacucc

SEQ ID NO: 1158095 - RNA, 19 nt, Artificial Sequence
  Description of Artificial Sequence: Synthetic oligonucleotide
aaauuuagccucugggacc

SEQ ID NO: 1158096 - RNA, 19 nt, Artificial Sequence
  Description of Artificial Sequence: Synthetic oligonucleotide
uuuuauaucuguuaacugu

SEQ ID NO: 1158097 - RNA, 19 nt, Artificial Sequence
  Description of Artificial Sequence: Synthetic oligonucleotide
uuuuaaagcugccagguca

SEQ ID NO: 1158098 - RNA, 19 nt, Artificial Sequence
  Description of Artificial Sequence: Synthetic oligonucleotide
uuaaaggcauuucuguagg

SEQ ID NO: 1158099 - RNA, 19 nt, Artificial Sequence
  Description of Artificial Sequence: Synthetic oligonucleotide
uugguaaucacucucuuga

SEQ ID NO: 1158100 - RNA, 19 nt, Artificial Sequence
  Description of Artificial Sequence: Synthetic oligonucleotide
uuucuguagauccagcugc

SEQ ID NO: 1158101 - RNA, 19 nt, Artificial Sequence
  Description of Artificial Sequence: Synthetic oligonucleotide
uaauuguugcugaagugcg

SEQ ID NO: 1158102 - RNA, 19 nt, Artificial Sequence
  Description of Artificial Sequence: Synthetic oligonucleotide
ugauuuaaagcugagguca

SEQ ID NO: 1158103 - RNA, 19 nt, Artificial Sequence
  Description of Artificial Sequence: Synthetic oligonucleotide
aguaagauugucuaaauuu

SEQ ID NO: 1158104 - RNA, 19 nt, Artificial Sequence
  Description of Artificial Sequence: Synthetic oligonucleotide
uuuaauaaccgguugguaa

SEQ ID NO: 1158105 - RNA, 19 nt, Artificial Sequence
  Description of Artificial Sequence: Synthetic oligonucleotide
uccacucaaaccuuguugg

SEQ ID NO: 1158106 - RNA, 19 nt, Artificial Sequence
  Description of Artificial Sequence: Synthetic oligonucleotide
ugcuauuucgguuucuagg

SEQ ID NO: 1158107 - RNA, 19 nt, Artificial Sequence
  Description of Artificial Sequence: Synthetic oligonucleotide
auacgauuuauauuccgac

SEQ ID NO: 1158108 - RNA, 19 nt, Artificial Sequence
  Description of Artificial Sequence: Synthetic oligonucleotide
ucuauaaaagcauccauau

SEQ ID NO: 1158109 - RNA, 19 nt, Artificial Sequence
  Description of Artificial Sequence: Synthetic oligonucleotide
ucuaauuucuucuacuaaa

SEQ ID NO: 1158110 - RNA, 19 nt, Artificial Sequence
  Description of Artificial Sequence: Synthetic oligonucleotide
aagugcgucuaauuccugc

SEQ ID NO: 1158111 - RNA, 19 nt, Artificial Sequence
  Description of Artificial Sequence: Synthetic oligonucleotide
uuuauaucuguuaacuguc

SEQ ID NO: 1158112 - RNA, 19 nt, Artificial Sequence
  Description of Artificial Sequence: Synthetic oligonucleotide
uaagauugucuaaauuuag

SEQ ID NO: 1158113 - RNA, 19 nt, Artificial Sequence
  Description of Artificial Sequence: Synthetic oligonucleotide
uuauauuccgacugcaaug

SEQ ID NO: 1158114 - RNA, 19 nt, Artificial Sequence
  Description of Artificial Sequence: Synthetic oligonucleotide
aagauaguaagauugucua

SEQ ID NO: 1158115 - RNA, 19 nt, Artificial Sequence
  Description of Artificial Sequence: Synthetic oligonucleotide
ucaguuauugguauugagu

SEQ ID NO: 1158116 - RNA, 19 nt, Artificial Sequence
  Description of Artificial Sequence: Synthetic oligonucleotide
ucuaccaacauguuguagu

SEQ ID NO: 1158117 - RNA, 19 nt, Artificial Sequence
  Description of Artificial Sequence: Synthetic oligonucleotide
uuuugauaaugccaucugc

SEQ ID NO: 1158118 - RNA, 19 nt, Artificial Sequence
  Description of Artificial Sequence: Synthetic oligonucleotide
acgauuuuaaagcugccag

SEQ ID NO: 1158119 - RNA, 19 nt, Artificial Sequence
  Description of Artificial Sequence: Synthetic oligonucleotide
aaaagucucuauaaaagca

SEQ ID NO: 1158120 - RNA, 19 nt, Artificial Sequence
  Description of Artificial Sequence: Synthetic oligonucleotide
uguuucucgaucauuuuga

SEQ ID NO: 1158121 - RNA, 19 nt, Artificial Sequence
  Description of Artificial Sequence: Synthetic oligonucleotide
aaauuuguaagcugagcau

SEQ ID NO: 1158122 - RNA, 19 nt, Artificial Sequence
  Description of Artificial Sequence: Synthetic oligonucleotide
acgauuuauauuccgacug

SEQ ID NO: 1158123 - RNA, 19 nt, Artificial Sequence
  Description of Artificial Sequence: Synthetic oligonucleotide
ugcuuaagcaaucucuccc

SEQ ID NO: 1158124 - RNA, 19 nt, Artificial Sequence
  Description of Artificial Sequence: Synthetic oligonucleotide
aguuuaucuaccaacaugu

SEQ ID NO: 1158125 - RNA, 19 nt, Artificial Sequence
  Description of Artificial Sequence: Synthetic oligonucleotide
gagaugacaaaacuccacc

SEQ ID NO: 1158126 - RNA, 19 nt, Artificial Sequence
  Description of Artificial Sequence: Synthetic oligonucleotide
ccuaagaaguccaagauag

SEQ ID NO: 1158127 - RNA, 19 nt, Artificial Sequence
  Description of Artificial Sequence: Synthetic oligonucleotide
ucaguugauuuaaagcuga

SEQ ID NO: 1158128 - RNA, 19 nt, Artificial Sequence
  Description of Artificial Sequence: Synthetic oligonucleotide
ucauacgauuuauauuccg

SEQ ID NO: 1158129 - RNA, 19 nt, Artificial Sequence
  Description of Artificial Sequence: Synthetic oligonucleotide
guugauuuaaagcugaggu

SEQ ID NO: 1158130 - RNA, 19 nt, Artificial Sequence
  Description of Artificial Sequence: Synthetic oligonucleotide
cuuguuggguuacaggacg

SEQ ID NO: 1158131 - RNA, 19 nt, Artificial Sequence
  Description of Artificial Sequence: Synthetic oligonucleotide
uauauuccgacugcaaugc

SEQ ID NO: 1158132 - RNA, 19 nt, Artificial Sequence
  Description of Artificial Sequence: Synthetic oligonucleotide
cagacgauuuuaaagcugc

SEQ ID NO: 1158133 - RNA, 19 nt, Artificial Sequence
  Description of Artificial Sequence: Synthetic oligonucleotide
uccaccccgaagaaaauag

SEQ ID NO: 1158134 - RNA, 19 nt, Artificial Sequence
  Description of Artificial Sequence: Synthetic oligonucleotide
uguagguugauaacacugu

SEQ ID NO: 1158135 - RNA, 19 nt, Artificial Sequence
  Description of Artificial Sequence: Synthetic oligonucleotide
ucuaacagggcgacaaugu

SEQ ID NO: 1158136 - RNA, 19 nt, Artificial Sequence
  Description of Artificial Sequence: Synthetic oligonucleotide
aucuaauuguugcugaagu

SEQ ID NO: 1158137 - RNA, 19 nt, Artificial Sequence
  Description of Artificial Sequence: Synthetic oligonucleotide
guaaucacucucuugacuc

SEQ ID NO: 1158138 - RNA, 19 nt, Artificial Sequence
  Description of Artificial Sequence: Synthetic oligonucleotide
uuaagcauguuguagucau

SEQ ID NO: 1158139 - RNA, 19 nt, Artificial Sequence
  Description of Artificial Sequence: Synthetic oligonucleotide
ucuaaauccaugucaaguu

SEQ ID NO: 1158140 - RNA, 19 nt, Artificial Sequence
  Description of Artificial Sequence: Synthetic oligonucleotide
uguaagcugagcauguguc

SEQ ID NO: 1158141 - RNA, 19 nt, Artificial Sequence
  Description of Artificial Sequence: Synthetic oligonucleotide
uuauuuugucucgaggugc

SEQ ID NO: 1158142 - RNA, 19 nt, Artificial Sequence
  Description of Artificial Sequence: Synthetic oligonucleotide
ugguauugaguuuaucuac

SEQ ID NO: 1158143 - RNA, 19 nt, Artificial Sequence
  Description of Artificial Sequence: Synthetic oligonucleotide
ucuaauuguugcugaagug

SEQ ID NO: 1158144 - RNA, 19 nt, Artificial Sequence
  Description of Artificial Sequence: Synthetic oligonucleotide
aaucuaauuguugcugaag

SEQ ID NO: 1158145 - RNA, 19 nt, Artificial Sequence
  Description of Artificial Sequence: Synthetic oligonucleotide
cugaagugcgucuaauucc

SEQ ID NO: 1158146 - RNA, 19 nt, Artificial Sequence
  Description of Artificial Sequence: Synthetic oligonucleotide
uuaauaaccgguugguaau

SEQ ID NO: 1158147 - RNA, 19 nt, Artificial Sequence
  Description of Artificial Sequence: Synthetic oligonucleotide
cauuugaucucgaugggac

SEQ ID NO: 1158148 - RNA, 19 nt, Artificial Sequence
  Description of Artificial Sequence: Synthetic oligonucleotide
uuguguagagcauccauga

SEQ ID NO: 1158149 - RNA, 19 nt, Artificial Sequence
  Description of Artificial Sequence: Synthetic oligonucleotide
aucucgaugggacucuaac

SEQ ID NO: 1158150 - RNA, 19 nt, Artificial Sequence
  Description of Artificial Sequence: Synthetic oligonucleotide
uuacaggacgaucagcaac

SEQ ID NO: 1158151 - RNA, 19 nt, Artificial Sequence
  Description of Artificial Sequence: Synthetic oligonucleotide
uacaggacgaucagcaacu

SEQ ID NO: 1158152 - RNA, 19 nt, Artificial Sequence
  Description of Artificial Sequence: Synthetic oligonucleotide
uccauuggcgaucccaugc

SEQ ID NO: 1158153 - RNA, 19 nt, Artificial Sequence
  Description of Artificial Sequence: Synthetic oligonucleotide
auaucuguuaacugucucu

SEQ ID NO: 1158154 - RNA, 19 nt, Artificial Sequence
  Description of Artificial Sequence: Synthetic oligonucleotide
cucgaacauuuccagaugg

SEQ ID NO: 1158155 - RNA, 19 nt, Artificial Sequence
  Description of Artificial Sequence: Synthetic oligonucleotide
accuuguuggguuacagga

SEQ ID NO: 1158156 - RNA, 19 nt, Artificial Sequence
  Description of Artificial Sequence: Synthetic oligonucleotide
cuaaauuuagccucuggga

SEQ ID NO: 1158157 - RNA, 19 nt, Artificial Sequence
  Description of Artificial Sequence: Synthetic oligonucleotide
cuguagguugauaacacug

SEQ ID NO: 1158158 - RNA, 19 nt, Artificial Sequence
  Description of Artificial Sequence: Synthetic oligonucleotide
ugucaaguugucuaauuuc

SEQ ID NO: 1158159 - RNA, 19 nt, Artificial Sequence
  Description of Artificial Sequence: Synthetic oligonucleotide
ucgaacauuuccagauggg

SEQ ID NO: 1158160 - RNA, 19 nt, Artificial Sequence
  Description of Artificial Sequence: Synthetic oligonucleotide
uguucuuucuugaugcaau

SEQ ID NO: 1158161 - RNA, 19 nt, Artificial Sequence
  Description of Artificial Sequence: Synthetic oligonucleotide
uaagggaccgccucgagaa

SEQ ID NO: 1158162 - RNA, 19 nt, Artificial Sequence
  Description of Artificial Sequence: Synthetic oligonucleotide
gauaguaagauugucuaaa

SEQ ID NO: 1158163 - RNA, 19 nt, Artificial Sequence
  Description of Artificial Sequence: Synthetic oligonucleotide
uccauuucaguuauuggua

SEQ ID NO: 1158164 - RNA, 19 nt, Artificial Sequence
  Description of Artificial Sequence: Synthetic oligonucleotide
uugauuuaaagcugagguc

SEQ ID NO: 1158165 - RNA, 19 nt, Artificial Sequence
  Description of Artificial Sequence: Synthetic oligonucleotide
aggauaucuguuucauacg

SEQ ID NO: 1158166 - RNA, 19 nt, Artificial Sequence
  Description of Artificial Sequence: Synthetic oligonucleotide
aagucucuauaaaagcauc

SEQ ID NO: 1158167 - RNA, 19 nt, Artificial Sequence
  Description of Artificial Sequence: Synthetic oligonucleotide
cauuuugagcuuuuaagca

SEQ ID NO: 1158168 - RNA, 19 nt, Artificial Sequence
  Description of Artificial Sequence: Synthetic oligonucleotide
caaucauuugaucucgaug

SEQ ID NO: 1158169 - RNA, 19 nt, Artificial Sequence
  Description of Artificial Sequence: Synthetic oligonucleotide
uuuuaagcauguuguaguc

SEQ ID NO: 1158170 - RNA, 19 nt, Artificial Sequence
  Description of Artificial Sequence: Synthetic oligonucleotide
ggggucuuauuccagaagg

SEQ ID NO: 1158171 - RNA, 19 nt, Artificial Sequence
  Description of Artificial Sequence: Synthetic oligonucleotide
gucacuguaugucuccagg

SEQ ID NO: 1158172 - RNA, 19 nt, Artificial Sequence
  Description of Artificial Sequence: Synthetic oligonucleotide
uguuaacugucucuccaug

SEQ ID NO: 1158173 - RNA, 19 nt, Artificial Sequence
  Description of Artificial Sequence: Synthetic oligonucleotide
aauuuagccucugggaccu

SEQ ID NO: 1158174 - RNA, 19 nt, Artificial Sequence
  Description of Artificial Sequence: Synthetic oligonucleotide
aucuguuaacugucucucc

SEQ ID NO: 1158175 - RNA, 19 nt, Artificial Sequence
  Description of Artificial Sequence: Synthetic oligonucleotide
uacgauuuauauuccgacu

SEQ ID NO: 1158176 - RNA, 19 nt, Artificial Sequence
  Description of Artificial Sequence: Synthetic oligonucleotide
aguugauuuaaagcugagg

SEQ ID NO: 1158177 - RNA, 19 nt, Artificial Sequence
  Description of Artificial Sequence: Synthetic oligonucleotide
cugggagugugcuauuucg

SEQ ID NO: 1158178 - RNA, 19 nt, Artificial Sequence
  Description of Artificial Sequence: Synthetic oligonucleotide
gacaauguuggcuucuauc

SEQ ID NO: 1158179 - RNA, 19 nt, Artificial Sequence
  Description of Artificial Sequence: Synthetic oligonucleotide
uuauaucuguuaacugucu

SEQ ID NO: 1158180 - RNA, 19 nt, Artificial Sequence
  Description of Artificial Sequence: Synthetic oligonucleotide
aaccgguugguaaucacuc

SEQ ID NO: 1158181 - RNA, 19 nt, Artificial Sequence
  Description of Artificial Sequence: Synthetic oligonucleotide
caccccgaagaaaauaggg

SEQ ID NO: 1158182 - RNA, 19 nt, Artificial Sequence
  Description of Artificial Sequence: Synthetic oligonucleotide
uguuuucagugccucauaa

SEQ ID NO: 1158183 - RNA, 19 nt, Artificial Sequence
  Description of Artificial Sequence: Synthetic oligonucleotide
uucauuucaccuuggugcu

SEQ ID NO: 1158184 - RNA, 19 nt, Artificial Sequence
  Description of Artificial Sequence: Synthetic oligonucleotide
aggacgaucagcaacuuug

SEQ ID NO: 1158185 - RNA, 19 nt, Artificial Sequence
  Description of Artificial Sequence: Synthetic oligonucleotide
gcuauuucgguuucuaggc

SEQ ID NO: 1158186 - RNA, 19 nt, Artificial Sequence
  Description of Artificial Sequence: Synthetic oligonucleotide
cucgaugggacucuaacuc

SEQ ID NO: 1158187 - RNA, 19 nt, Artificial Sequence
  Description of Artificial Sequence: Synthetic oligonucleotide
auaaccgguugguaaucac

SEQ ID NO: 1158188 - RNA, 19 nt, Artificial Sequence
  Description of Artificial Sequence: Synthetic oligonucleotide
aucugagaugacaaaacuc

SEQ ID NO: 1158189 - RNA, 19 nt, Artificial Sequence
  Description of Artificial Sequence: Synthetic oligonucleotide
auaucuguuucauacgauu

SEQ ID NO: 1158190 - RNA, 19 nt, Artificial Sequence
  Description of Artificial Sequence: Synthetic oligonucleotide
ucuuaaaggcauuucugua

SEQ ID NO: 1158191 - RNA, 19 nt, Artificial Sequence
  Description of Artificial Sequence: Synthetic oligonucleotide
uccucugucaucuuacuuu

SEQ ID NO: 1158192 - RNA, 19 nt, Artificial Sequence
  Description of Artificial Sequence: Synthetic oligonucleotide
uuguaagcugagcaugugu

SEQ ID NO: 1158193 - RNA, 19 nt, Artificial Sequence
  Description of Artificial Sequence: Synthetic oligonucleotide
agaugacaaaacuccacca

SEQ ID NO: 1158194 - RNA, 19 nt, Artificial Sequence
  Description of Artificial Sequence: Synthetic oligonucleotide
aagaaguccaagauaguaa

SEQ ID NO: 1158195 - RNA, 19 nt, Artificial Sequence
  Description of Artificial Sequence: Synthetic oligonucleotide
uauguacuugacuuguuuu

SEQ ID NO: 1158196 - RNA, 19 nt, Artificial Sequence
  Description of Artificial Sequence: Synthetic oligonucleotide
uauuucgguuucuaggcuc

SEQ ID NO: 1158197 - RNA, 19 nt, Artificial Sequence
  Description of Artificial Sequence: Synthetic oligonucleotide
accccgaagaaaauagggc

SEQ ID NO: 1158198 - RNA, 19 nt, Artificial Sequence
  Description of Artificial Sequence: Synthetic oligonucleotide
uguauucugaaaucugcuu

SEQ ID NO: 1158199 - RNA, 19 nt, Artificial Sequence
  Description of Artificial Sequence: Synthetic oligonucleotide
cuaacccuauuccaccccg

SEQ ID NO: 1158200 - RNA, 19 nt, Artificial Sequence
  Description of Artificial Sequence: Synthetic oligonucleotide
uaaccgguugguaaucacu

SEQ ID NO: 1158201 - RNA, 19 nt, Artificial Sequence
  Description of Artificial Sequence: Synthetic oligonucleotide
cagaaggaggccuuccugc

SEQ ID NO: 1158202 - RNA, 19 nt, Artificial Sequence
  Description of Artificial Sequence: Synthetic oligonucleotide
uuguagucauucauuuacu

SEQ ID NO: 1158203 - RNA, 19 nt, Artificial Sequence
  Description of Artificial Sequence: Synthetic oligonucleotide
uuaagcaaucucucccucu

SEQ ID NO: 1158204 - RNA, 19 nt, Artificial Sequence
  Description of Artificial Sequence: Synthetic oligonucleotide
uccuaagaaguccaagaua

SEQ ID NO: 1158205 - RNA, 19 nt, Artificial Sequence
  Description of Artificial Sequence: Synthetic oligonucleotide
uuuaagcauguuguaguca

SEQ ID NO: 1158206 - RNA, 19 nt, Artificial Sequence
  Description of Artificial Sequence: Synthetic oligonucleotide
ucacuuauuuugcuccuaa

SEQ ID NO: 1158207 - RNA, 19 nt, Artificial Sequence
  Description of Artificial Sequence: Synthetic oligonucleotide
cauacgauuuauauuccga

SEQ ID NO: 1158208 - RNA, 19 nt, Artificial Sequence
  Description of Artificial Sequence: Synthetic oligonucleotide
gucuaaauuuagccucugg

SEQ ID NO: 1158209 - RNA, 19 nt, Artificial Sequence
  Description of Artificial Sequence: Synthetic oligonucleotide
uguagucugcuaguugucc

SEQ ID NO: 1158210 - RNA, 19 nt, Artificial Sequence
  Description of Artificial Sequence: Synthetic oligonucleotide
ugaguuuaucuaccaacau

SEQ ID NO: 1158211 - RNA, 19 nt, Artificial Sequence
  Description of Artificial Sequence: Synthetic oligonucleotide
uaucuguuaacugucucuc

SEQ ID NO: 1158212 - RNA, 19 nt, Artificial Sequence
  Description of Artificial Sequence: Synthetic oligonucleotide
uuucaguaaauaugacauc

SEQ ID NO: 1158213 - RNA, 19 nt, Artificial Sequence
  Description of Artificial Sequence: Synthetic oligonucleotide
cuccaaauuuguaagcuga

SEQ ID NO: 1158214 - RNA, 19 nt, Artificial Sequence
  Description of Artificial Sequence: Synthetic oligonucleotide
gaggccuuccugcuaaccc

SEQ ID NO: 1158215 - RNA, 19 nt, Artificial Sequence
  Description of Artificial Sequence: Synthetic oligonucleotide
uguagucauucauuuacuu

SEQ ID NO: 1158216 - RNA, 19 nt, Artificial Sequence
  Description of Artificial Sequence: Synthetic oligonucleotide
cuaucugugccuuccguuc

SEQ ID NO: 1158217 - RNA, 19 nt, Artificial Sequence
  Description of Artificial Sequence: Synthetic oligonucleotide
aauaaccgguugguaauca

SEQ ID NO: 1158218 - RNA, 19 nt, Artificial Sequence
  Description of Artificial Sequence: Synthetic oligonucleotide
ucucgaugggacucuaacu

SEQ ID NO: 1158219 - RNA, 19 nt, Artificial Sequence
  Description of Artificial Sequence: Synthetic oligonucleotide
ucuguagguugauaacacu

SEQ ID NO: 1158220 - RNA, 19 nt, Artificial Sequence
  Description of Artificial Sequence: Synthetic oligonucleotide
auguuguagucauucauuu

SEQ ID NO: 1158221 - RNA, 19 nt, Artificial Sequence
  Description of Artificial Sequence: Synthetic oligonucleotide
uuuucuucggcagacgauu

SEQ ID NO: 1158222 - RNA, 19 nt, Artificial Sequence
  Description of Artificial Sequence: Synthetic oligonucleotide
ugcaaugcucuaacagggc

SEQ ID NO: 1158223 - RNA, 19 nt, Artificial Sequence
  Description of Artificial Sequence: Synthetic oligonucleotide
auccaugucaaguugucua

SEQ ID NO: 1158224 - RNA, 19 nt, Artificial Sequence
  Description of Artificial Sequence: Synthetic oligonucleotide
ugcgucuaauuccugcaac

SEQ ID NO: 1158225 - RNA, 19 nt, Artificial Sequence
  Description of Artificial Sequence: Synthetic oligonucleotide
cuguaugucuccaggucag

SEQ ID NO: 1158226 - RNA, 19 nt, Artificial Sequence
  Description of Artificial Sequence: Synthetic oligonucleotide
guuucucgaucauuuugag

SEQ ID NO: 1158227 - RNA, 19 nt, Artificial Sequence
  Description of Artificial Sequence: Synthetic oligonucleotide
gccucugggaccuucaucc

SEQ ID NO: 1158228 - RNA, 19 nt, Artificial Sequence
  Description of Artificial Sequence: Synthetic oligonucleotide
agugcgucuaauuccugca

SEQ ID NO: 1158229 - RNA, 19 nt, Artificial Sequence
  Description of Artificial Sequence: Synthetic oligonucleotide
cuaccaacauguuguaguc

SEQ ID NO: 1158230 - RNA, 19 nt, Artificial Sequence
  Description of Artificial Sequence: Synthetic oligonucleotide
agugccucauaaucuguug

SEQ ID NO: 1158231 - RNA, 19 nt, Artificial Sequence
  Description of Artificial Sequence: Synthetic oligonucleotide
gcaaugcucuaacagggcg

SEQ ID NO: 1158232 - RNA, 19 nt, Artificial Sequence
  Description of Artificial Sequence: Synthetic oligonucleotide
ccccgaagaaaauagggcg

SEQ ID NO: 1158233 - RNA, 19 nt, Artificial Sequence
  Description of Artificial Sequence: Synthetic oligonucleotide
caacuuugaucugagauga

SEQ ID NO: 1158234 - RNA, 19 nt, Artificial Sequence
  Description of Artificial Sequence: Synthetic oligonucleotide
uucaucccaguuucauucc

SEQ ID NO: 1158235 - RNA, 19 nt, Artificial Sequence
  Description of Artificial Sequence: Synthetic oligonucleotide
ugugucucauucucuugca

SEQ ID NO: 1158236 - RNA, 19 nt, Artificial Sequence
  Description of Artificial Sequence: Synthetic oligonucleotide
ucuugguugcuaugaacuc

SEQ ID NO: 1158237 - RNA, 19 nt, Artificial Sequence
  Description of Artificial Sequence: Synthetic oligonucleotide
cugcaaucauuugaucucg

SEQ ID NO: 1158238 - RNA, 19 nt, Artificial Sequence
  Description of Artificial Sequence: Synthetic oligonucleotide
agauaguaagauugucuaa

SEQ ID NO: 1158239 - RNA, 19 nt, Artificial Sequence
  Description of Artificial Sequence: Synthetic oligonucleotide
ucccuaagggaccgccucg

SEQ ID NO: 1158240 - RNA, 19 nt, Artificial Sequence
  Description of Artificial Sequence: Synthetic oligonucleotide
caagauaguaagauugucu

SEQ ID NO: 1158241 - RNA, 19 nt, Artificial Sequence
  Description of Artificial Sequence: Synthetic oligonucleotide
aauccaugucaaguugucu

SEQ ID NO: 1158242 - RNA, 19 nt, Artificial Sequence
  Description of Artificial Sequence: Synthetic oligonucleotide
gagcaugugucucauucuc

SEQ ID NO: 1158243 - RNA, 19 nt, Artificial Sequence
  Description of Artificial Sequence: Synthetic oligonucleotide
ucgguuucuaggcucuccu

SEQ ID NO: 1158244 - RNA, 19 nt, Artificial Sequence
  Description of Artificial Sequence: Synthetic oligonucleotide
caguuguguuuucagugcc

SEQ ID NO: 1158245 - RNA, 19 nt, Artificial Sequence
  Description of Artificial Sequence: Synthetic oligonucleotide
uugguugcuaugaacucuu

SEQ ID NO: 1158246 - RNA, 19 nt, Artificial Sequence
  Description of Artificial Sequence: Synthetic oligonucleotide
gguauugaguuuaucuacc

SEQ ID NO: 1158247 - RNA, 19 nt, Artificial Sequence
  Description of Artificial Sequence: Synthetic oligonucleotide
ggauaucuguuucauacga

SEQ ID NO: 1158248 - RNA, 19 nt, Artificial Sequence
  Description of Artificial Sequence: Synthetic oligonucleotide
uuaccugggagugugcuau

SEQ ID NO: 1158249 - RNA, 19 nt, Artificial Sequence
  Description of Artificial Sequence: Synthetic oligonucleotide
uucuaucugugccuuccgu

SEQ ID NO: 1158250 - RNA, 19 nt, Artificial Sequence
  Description of Artificial Sequence: Synthetic oligonucleotide
aguuauugguauugaguuu

SEQ ID NO: 1158251 - RNA, 19 nt, Artificial Sequence
  Description of Artificial Sequence: Synthetic oligonucleotide
acucgaacauuuccagaug

SEQ ID NO: 1158252 - RNA, 19 nt, Artificial Sequence
  Description of Artificial Sequence: Synthetic oligonucleotide
gacgauuuuaaagcugcca

SEQ ID NO: 1158253 - RNA, 19 nt, Artificial Sequence
  Description of Artificial Sequence: Synthetic oligonucleotide
uguuguagucauucauuua

SEQ ID NO: 1158254 - RNA, 19 nt, Artificial Sequence
  Description of Artificial Sequence: Synthetic oligonucleotide
accugcuuaagcaaucucu

SEQ ID NO: 1158255 - RNA, 19 nt, Artificial Sequence
  Description of Artificial Sequence: Synthetic oligonucleotide
ugccucauaaucuguuguc

SEQ ID NO: 1158256 - RNA, 19 nt, Artificial Sequence
  Description of Artificial Sequence: Synthetic oligonucleotide
auuccgacugcaaugcucu

SEQ ID NO: 1158257 - RNA, 19 nt, Artificial Sequence
  Description of Artificial Sequence: Synthetic oligonucleotide
auuuaaagcugaggucauc

SEQ ID NO: 1158258 - RNA, 19 nt, Artificial Sequence
  Description of Artificial Sequence: Synthetic oligonucleotide
agggcgacaauguuggcuu

SEQ ID NO: 1158259 - RNA, 19 nt, Artificial Sequence
  Description of Artificial Sequence: Synthetic oligonucleotide
uuguuggguuacaggacga

SEQ ID NO: 1158260 - RNA, 19 nt, Artificial Sequence
  Description of Artificial Sequence: Synthetic oligonucleotide
uccuugaaaguuucacuua

SEQ ID NO: 1158261 - RNA, 19 nt, Artificial Sequence
  Description of Artificial Sequence: Synthetic oligonucleotide
aguaaauaugacauccaua

SEQ ID NO: 1158262 - RNA, 19 nt, Artificial Sequence
  Description of Artificial Sequence: Synthetic oligonucleotide
cuuuaaccugcuuaagcaa

SEQ ID NO: 1158263 - RNA, 19 nt, Artificial Sequence
  Description of Artificial Sequence: Synthetic oligonucleotide
ugucucgaggugcugccac

SEQ ID NO: 1158264 - RNA, 19 nt, Artificial Sequence
  Description of Artificial Sequence: Synthetic oligonucleotide
ugguaaucacucucuugac

SEQ ID NO: 1158265 - RNA, 19 nt, Artificial Sequence
  Description of Artificial Sequence: Synthetic oligonucleotide
uuagcucuugguuggugau

SEQ ID NO: 1158266 - RNA, 19 nt, Artificial Sequence
  Description of Artificial Sequence: Synthetic oligonucleotide
cauacucuguguuucucga

SEQ ID NO: 1158267 - RNA, 19 nt, Artificial Sequence
  Description of Artificial Sequence: Synthetic oligonucleotide
ugcuccuaagaaguccaag

SEQ ID NO: 1158268 - RNA, 19 nt, Artificial Sequence
  Description of Artificial Sequence: Synthetic oligonucleotide
caugcuggcuauuuccuga

SEQ ID NO: 1158269 - RNA, 19 nt, Artificial Sequence
  Description of Artificial Sequence: Synthetic oligonucleotide
augggacucuaacucauaa

SEQ ID NO: 1158270 - RNA, 19 nt, Artificial Sequence
  Description of Artificial Sequence: Synthetic oligonucleotide
guagauccagcugcagacg

SEQ ID NO: 1158271 - RNA, 19 nt, Artificial Sequence
  Description of Artificial Sequence: Synthetic oligonucleotide
ugcaaucauuugaucucga

SEQ ID NO: 1158272 - RNA, 19 nt, Artificial Sequence
  Description of Artificial Sequence: Synthetic oligonucleotide
agacgauuuuaaagcugcc

SEQ ID NO: 1158273 - RNA, 19 nt, Artificial Sequence
  Description of Artificial Sequence: Synthetic oligonucleotide
caugugucucauucucuug

SEQ ID NO: 1158274 - RNA, 19 nt, Artificial Sequence
  Description of Artificial Sequence: Synthetic oligonucleotide
cuuaagcaaucucucccuc

SEQ ID NO: 1158275 - RNA, 19 nt, Artificial Sequence
  Description of Artificial Sequence: Synthetic oligonucleotide
caguuauugguauugaguu

SEQ ID NO: 1158276 - RNA, 19 nt, Artificial Sequence
  Description of Artificial Sequence: Synthetic oligonucleotide
uucgcuugucuuucaguaa

SEQ ID NO: 1158277 - RNA, 19 nt, Artificial Sequence
  Description of Artificial Sequence: Synthetic oligonucleotide
cuucgcuugucuuucagua

SEQ ID NO: 1158278 - RNA, 19 nt, Artificial Sequence
  Description of Artificial Sequence: Synthetic oligonucleotide
uaaccugcuuaagcaaucu

SEQ ID NO: 1158279 - RNA, 19 nt, Artificial Sequence
  Description of Artificial Sequence: Synthetic oligonucleotide
agacugcuguuccucuguc

SEQ ID NO: 1158280 - RNA, 19 nt, Artificial Sequence
  Description of Artificial Sequence: Synthetic oligonucleotide
cucuaacagggcgacaaug

SEQ ID NO: 1158281 - RNA, 19 nt, Artificial Sequence
  Description of Artificial Sequence: Synthetic oligonucleotide
uuuaagcuccuuguauuuu

SEQ ID NO: 1158282 - RNA, 19 nt, Artificial Sequence
  Description of Artificial Sequence: Synthetic oligonucleotide
auuuauauuccgacugcaa

SEQ ID NO: 1158283 - RNA, 19 nt, Artificial Sequence
  Description of Artificial Sequence: Synthetic oligonucleotide
cugagaugacaaaacucca

SEQ ID NO: 1158284 - RNA, 19 nt, Artificial Sequence
  Description of Artificial Sequence: Synthetic oligonucleotide
ucgaggugcugccacuuuc

SEQ ID NO: 1158285 - RNA, 19 nt, Artificial Sequence
  Description of Artificial Sequence: Synthetic oligonucleotide
ccauacucuguguuucucg

SEQ ID NO: 1158286 - RNA, 19 nt, Artificial Sequence
  Description of Artificial Sequence: Synthetic oligonucleotide
ucuauguacuugacuuguu

SEQ ID NO: 1158287 - RNA, 19 nt, Artificial Sequence
  Description of Artificial Sequence: Synthetic oligonucleotide
uucggcagacgauuuuaaa

SEQ ID NO: 1158288 - RNA, 19 nt, Artificial Sequence
  Description of Artificial Sequence: Synthetic oligonucleotide
ucuucggcagacgauuuua

SEQ ID NO: 1158289 - RNA, 19 nt, Artificial Sequence
  Description of Artificial Sequence: Synthetic oligonucleotide
uaauaaccgguugguaauc

SEQ ID NO: 1158290 - RNA, 19 nt, Artificial Sequence
  Description of Artificial Sequence: Synthetic oligonucleotide
gugucucauucucuugcag

SEQ ID NO: 1158291 - RNA, 19 nt, Artificial Sequence
  Description of Artificial Sequence: Synthetic oligonucleotide
cggcagacgauuuuaaagc

SEQ ID NO: 1158292 - RNA, 19 nt, Artificial Sequence
  Description of Artificial Sequence: Synthetic oligonucleotide
uccauauuuuccucccguu

SEQ ID NO: 1158293 - RNA, 19 nt, Artificial Sequence
  Description of Artificial Sequence: Synthetic oligonucleotide
acccuauuccaccccgaag

SEQ ID NO: 1158294 - RNA, 19 nt, Artificial Sequence
  Description of Artificial Sequence: Synthetic oligonucleotide
gcuccuaagaaguccaaga

SEQ ID NO: 1158295 - RNA, 19 nt, Artificial Sequence
  Description of Artificial Sequence: Synthetic oligonucleotide
uuuaccugggagugugcua

SEQ ID NO: 1158296 - RNA, 19 nt, Artificial Sequence
  Description of Artificial Sequence: Synthetic oligonucleotide
ucuacacuucugauuuguu

SEQ ID NO: 1158297 - RNA, 19 nt, Artificial Sequence
  Description of Artificial Sequence: Synthetic oligonucleotide
uucgguuucuaggcucucc

SEQ ID NO: 1158298 - RNA, 19 nt, Artificial Sequence
  Description of Artificial Sequence: Synthetic oligonucleotide
agcuuuuaagcauguugua

SEQ ID NO: 1158299 - RNA, 19 nt, Artificial Sequence
  Description of Artificial Sequence: Synthetic oligonucleotide
gaaaucugcuucaucacau

SEQ ID NO: 1158300 - RNA, 19 nt, Artificial Sequence
  Description of Artificial Sequence: Synthetic oligonucleotide
acgcugacugucugagguc

SEQ ID NO: 1158301 - RNA, 19 nt, Artificial Sequence
  Description of Artificial Sequence: Synthetic oligonucleotide
uuucuucggcagacgauuu

SEQ ID NO: 1158302 - RNA, 19 nt, Artificial Sequence
  Description of Artificial Sequence: Synthetic oligonucleotide
auuucgguuucuaggcucu

SEQ ID NO: 1158303 - RNA, 19 nt, Artificial Sequence
  Description of Artificial Sequence: Synthetic oligonucleotide
gaaguccaagauaguaaga

SEQ ID NO: 1158304 - RNA, 19 nt, Artificial Sequence
  Description of Artificial Sequence: Synthetic oligonucleotide
ugcugaagugcgucuaauu

SEQ ID NO: 1158305 - RNA, 19 nt, Artificial Sequence
  Description of Artificial Sequence: Synthetic oligonucleotide
cucuaaauccaugucaagu

SEQ ID NO: 1158306 - RNA, 19 nt, Artificial Sequence
  Description of Artificial Sequence: Synthetic oligonucleotide
aucuaccaacauguuguag

SEQ ID NO: 1158307 - RNA, 19 nt, Artificial Sequence
  Description of Artificial Sequence: Synthetic oligonucleotide
cuguagauccagcugcaga

SEQ ID NO: 1158308 - RNA, 19 nt, Artificial Sequence
  Description of Artificial Sequence: Synthetic oligonucleotide
gugacuucugcauuucagu

SEQ ID NO: 1158309 - RNA, 19 nt, Artificial Sequence
  Description of Artificial Sequence: Synthetic oligonucleotide
uauugguauugaguuuauc

SEQ ID NO: 1158310 - RNA, 19 nt, Artificial Sequence
  Description of Artificial Sequence: Synthetic oligonucleotide
uguaugucuccaggucagc

SEQ ID NO: 1158311 - RNA, 19 nt, Artificial Sequence
  Description of Artificial Sequence: Synthetic oligonucleotide
auuccacucaaaccuuguu

SEQ ID NO: 1158312 - RNA, 19 nt, Artificial Sequence
  Description of Artificial Sequence: Synthetic oligonucleotide
gaucagcaacuuugaucug

SEQ ID NO: 1158313 - RNA, 19 nt, Artificial Sequence
  Description of Artificial Sequence: Synthetic oligonucleotide
cacucgaacauuuccagau

SEQ ID NO: 1158314 - RNA, 19 nt, Artificial Sequence
  Description of Artificial Sequence: Synthetic oligonucleotide
accgguugguaaucacucu

SEQ ID NO: 1158315 - RNA, 19 nt, Artificial Sequence
  Description of Artificial Sequence: Synthetic oligonucleotide
gagugugcuauuucgguuu

SEQ ID NO: 1158316 - RNA, 19 nt, Artificial Sequence
  Description of Artificial Sequence: Synthetic oligonucleotide
uaagcauguuguagucauu

SEQ ID NO: 1158317 - RNA, 19 nt, Artificial Sequence
  Description of Artificial Sequence: Synthetic oligonucleotide
gaccgccucgagaaccugg

SEQ ID NO: 1158318 - RNA, 19 nt, Artificial Sequence
  Description of Artificial Sequence: Synthetic oligonucleotide
auacucuguguuucucgau

SEQ ID NO: 1158319 - RNA, 19 nt, Artificial Sequence
  Description of Artificial Sequence: Synthetic oligonucleotide
uuuagccucugggaccuuc

SEQ ID NO: 1158320 - RNA, 19 nt, Artificial Sequence
  Description of Artificial Sequence: Synthetic oligonucleotide
cgaacauuuccagaugggg

SEQ ID NO: 1158321 - RNA, 19 nt, Artificial Sequence
  Description of Artificial Sequence: Synthetic oligonucleotide
uucuucggcagacgauuuu

SEQ ID NO: 1158322 - RNA, 19 nt, Artificial Sequence
  Description of Artificial Sequence: Synthetic oligonucleotide
guaagcugagcaugugucu

SEQ ID NO: 1158323 - RNA, 19 nt, Artificial Sequence
  Description of Artificial Sequence: Synthetic oligonucleotide
auugcaguugccacucgaa

SEQ ID NO: 1158324 - RNA, 19 nt, Artificial Sequence
  Description of Artificial Sequence: Synthetic oligonucleotide
cuaagggaccgccucgaga

SEQ ID NO: 1158325 - RNA, 19 nt, Artificial Sequence
  Description of Artificial Sequence: Synthetic oligonucleotide
cccuauuccaccccgaaga

SEQ ID NO: 1158326 - RNA, 19 nt, Artificial Sequence
  Description of Artificial Sequence: Synthetic oligonucleotide
guuggguuacaggacgauc

SEQ ID NO: 1158327 - RNA, 19 nt, Artificial Sequence
  Description of Artificial Sequence: Synthetic oligonucleotide
uuaaagcugccaggucacu

SEQ ID NO: 1158328 - RNA, 19 nt, Artificial Sequence
  Description of Artificial Sequence: Synthetic oligonucleotide
agcagucauuugcuuaauu

SEQ ID NO: 1158329 - RNA, 19 nt, Artificial Sequence
  Description of Artificial Sequence: Synthetic oligonucleotide
uucacuuauuuugcuccua

SEQ ID NO: 1158330 - RNA, 19 nt, Artificial Sequence
  Description of Artificial Sequence: Synthetic oligonucleotide
uguuggguuacaggacgau

SEQ ID NO: 1158331 - RNA, 19 nt, Artificial Sequence
  Description of Artificial Sequence: Synthetic oligonucleotide
gguaaucacucucuugacu

SEQ ID NO: 1158332 - RNA, 19 nt, Artificial Sequence
  Description of Artificial Sequence: Synthetic oligonucleotide
guagucugcuaguuguccu

SEQ ID NO: 1158333 - RNA, 19 nt, Artificial Sequence
  Description of Artificial Sequence: Synthetic oligonucleotide
gucccuaagggaccgccuc

SEQ ID NO: 1158334 - RNA, 19 nt, Artificial Sequence
  Description of Artificial Sequence: Synthetic oligonucleotide
auguuggcuucuaucugug

SEQ ID NO: 1158335 - RNA, 19 nt, Artificial Sequence
  Description of Artificial Sequence: Synthetic oligonucleotide
cuguguuucucgaucauuu

SEQ ID NO: 1158336 - RNA, 19 nt, Artificial Sequence
  Description of Artificial Sequence: Synthetic oligonucleotide
gcagacgauuuuaaagcug

SEQ ID NO: 1158337 - RNA, 19 nt, Artificial Sequence
  Description of Artificial Sequence: Synthetic oligonucleotide
uugcuccuaagaaguccaa

SEQ ID NO: 1158338 - RNA, 19 nt, Artificial Sequence
  Description of Artificial Sequence: Synthetic oligonucleotide
gcuaacccuauuccacccc

SEQ ID NO: 1158339 - RNA, 19 nt, Artificial Sequence
  Description of Artificial Sequence: Synthetic oligonucleotide
ccacucaaaccuuguuggg

SEQ ID NO: 1158340 - RNA, 19 nt, Artificial Sequence
  Description of Artificial Sequence: Synthetic oligonucleotide
cagucccuaagggaccgcc

SEQ ID NO: 1158341 - RNA, 19 nt, Artificial Sequence
  Description of Artificial Sequence: Synthetic oligonucleotide
aggaggccuuccugcuaac

SEQ ID NO: 1158342 - RNA, 19 nt, Artificial Sequence
  Description of Artificial Sequence: Synthetic oligonucleotide
cuccauuggcgaucccaug

SEQ ID NO: 1158343 - RNA, 19 nt, Artificial Sequence
  Description of Artificial Sequence: Synthetic oligonucleotide
gauaucuguuucauacgau

SEQ ID NO: 1158344 - RNA, 19 nt, Artificial Sequence
  Description of Artificial Sequence: Synthetic oligonucleotide
auuggcgaucccaugcuuu

SEQ ID NO: 1158345 - RNA, 19 nt, Artificial Sequence
  Description of Artificial Sequence: Synthetic oligonucleotide
ccgaagaaaauagggcgag

SEQ ID NO: 1158346 - RNA, 19 nt, Artificial Sequence
  Description of Artificial Sequence: Synthetic oligonucleotide
ccgacugcaaugcucuaac

SEQ ID NO: 1158347 - RNA, 19 nt, Artificial Sequence
  Description of Artificial Sequence: Synthetic oligonucleotide
ccaccccgaagaaaauagg

SEQ ID NO: 1158348 - RNA, 19 nt, Artificial Sequence
  Description of Artificial Sequence: Synthetic oligonucleotide
cuauguacuugacuuguuu

SEQ ID NO: 1158349 - RNA, 19 nt, Artificial Sequence
  Description of Artificial Sequence: Synthetic oligonucleotide
cuguuucauacgauuuaua

SEQ ID NO: 1158350 - RNA, 19 nt, Artificial Sequence
  Description of Artificial Sequence: Synthetic oligonucleotide
ugggaccuucaucccaguu

SEQ ID NO: 1158351 - RNA, 19 nt, Artificial Sequence
  Description of Artificial Sequence: Synthetic oligonucleotide
cuccuaagaaguccaagau

SEQ ID NO: 1158352 - RNA, 19 nt, Artificial Sequence
  Description of Artificial Sequence: Synthetic oligonucleotide
cuucggcagacgauuuuaa

SEQ ID NO: 1158353 - RNA, 19 nt, Artificial Sequence
  Description of Artificial Sequence: Synthetic oligonucleotide
gcuuaagcaaucucucccu

SEQ ID NO: 1158354 - RNA, 19 nt, Artificial Sequence
  Description of Artificial Sequence: Synthetic oligonucleotide
ucauuucaccuuggugcuc

SEQ ID NO: 1158355 - RNA, 19 nt, Artificial Sequence
  Description of Artificial Sequence: Synthetic oligonucleotide
cuaagaaguccaagauagu

SEQ ID NO: 1158356 - RNA, 19 nt, Artificial Sequence
  Description of Artificial Sequence: Synthetic oligonucleotide
ggcagacgauuuuaaagcu

SEQ ID NO: 1158357 - RNA, 19 nt, Artificial Sequence
  Description of Artificial Sequence: Synthetic oligonucleotide
agcuucuguuggucauugu

SEQ ID NO: 1158358 - RNA, 19 nt, Artificial Sequence
  Description of Artificial Sequence: Synthetic oligonucleotide
cuauuucgguuucuaggcu

SEQ ID NO: 1158359 - RNA, 19 nt, Artificial Sequence
  Description of Artificial Sequence: Synthetic oligonucleotide
cccgaagaaaauagggcga

SEQ ID NO: 1158360 - RNA, 19 nt, Artificial Sequence
  Description of Artificial Sequence: Synthetic oligonucleotide
uugguuggugauggaggau

SEQ ID NO: 1158361 - RNA, 19 nt, Artificial Sequence
  Description of Artificial Sequence: Synthetic oligonucleotide
cuauaaaagcauccauauu

SEQ ID NO: 1158362 - RNA, 19 nt, Artificial Sequence
  Description of Artificial Sequence: Synthetic oligonucleotide
cuuuucuucggcagacgau

SEQ ID NO: 1158363 - RNA, 19 nt, Artificial Sequence
  Description of Artificial Sequence: Synthetic oligonucleotide
ccgguugguaaucacucuc

SEQ ID NO: 1158364 - RNA, 19 nt, Artificial Sequence
  Description of Artificial Sequence: Synthetic oligonucleotide
gugcgucuaauuccugcaa

SEQ ID NO: 1158365 - RNA, 19 nt, Artificial Sequence
  Description of Artificial Sequence: Synthetic oligonucleotide
cauuccacucaaaccuugu

SEQ ID NO: 1158366 - RNA, 19 nt, Artificial Sequence
  Description of Artificial Sequence: Synthetic oligonucleotide
ugguugcuaugaacucuuu

SEQ ID NO: 1158367 - RNA, 19 nt, Artificial Sequence
  Description of Artificial Sequence: Synthetic oligonucleotide
cuggcuauuuccugauuau

SEQ ID NO: 1158368 - RNA, 19 nt, Artificial Sequence
  Description of Artificial Sequence: Synthetic oligonucleotide
ucccuucgcuugucuuuca

SEQ ID NO: 1158369 - RNA, 19 nt, Artificial Sequence
  Description of Artificial Sequence: Synthetic oligonucleotide
ucucgaggugcugccacuu

SEQ ID NO: 1158370 - RNA, 19 nt, Artificial Sequence
  Description of Artificial Sequence: Synthetic oligonucleotide
ugcuggcuauuuccugauu

SEQ ID NO: 1158371 - RNA, 19 nt, Artificial Sequence
  Description of Artificial Sequence: Synthetic oligonucleotide
gacgaucagcaacuuugau

SEQ ID NO: 1158372 - RNA, 19 nt, Artificial Sequence
  Description of Artificial Sequence: Synthetic oligonucleotide
cgucuaauuccugcaacag

SEQ ID NO: 1158373 - RNA, 19 nt, Artificial Sequence
  Description of Artificial Sequence: Synthetic oligonucleotide
caacauguuguagucugcu

SEQ ID NO: 1158374 - RNA, 19 nt, Artificial Sequence
  Description of Artificial Sequence: Synthetic oligonucleotide
gucugugacuucugcauuu

SEQ ID NO: 1158375 - RNA, 19 nt, Artificial Sequence
  Description of Artificial Sequence: Synthetic oligonucleotide
gaugggacucuaacucaua

SEQ ID NO: 1158376 - RNA, 19 nt, Artificial Sequence
  Description of Artificial Sequence: Synthetic oligonucleotide
cuaauuccugcaacaguuu

SEQ ID NO: 1158377 - RNA, 19 nt, Artificial Sequence
  Description of Artificial Sequence: Synthetic oligonucleotide
gggagugugcuauuucggu

SEQ ID NO: 1158378 - RNA, 19 nt, Artificial Sequence
  Description of Artificial Sequence: Synthetic oligonucleotide
gguuucuaggcucuccuuu

SEQ ID NO: 1158379 - RNA, 19 nt, Artificial Sequence
  Description of Artificial Sequence: Synthetic oligonucleotide
accgccucgagaaccuggu

SEQ ID NO: 1158380 - RNA, 19 nt, Artificial Sequence
  Description of Artificial Sequence: Synthetic oligonucleotide
uuucgguuucuaggcucuc

SEQ ID NO: 1158381 - RNA, 19 nt, Artificial Sequence
  Description of Artificial Sequence: Synthetic oligonucleotide
gggucuuauuccagaagga

SEQ ID NO: 1158382 - RNA, 19 nt, Artificial Sequence
  Description of Artificial Sequence: Synthetic oligonucleotide
caaaccuuguuggguuaca

SEQ ID NO: 1158383 - RNA, 19 nt, Artificial Sequence
  Description of Artificial Sequence: Synthetic oligonucleotide
gugcuccucuaaauccaug

SEQ ID NO: 1158384 - RNA, 19 nt, Artificial Sequence
  Description of Artificial Sequence: Synthetic oligonucleotide
cuaacagggcgacaauguu

SEQ ID NO: 1158385 - RNA, 19 nt, Artificial Sequence
  Description of Artificial Sequence: Synthetic oligonucleotide
ggacgaucagcaacuuuga

SEQ ID NO: 1158386 - RNA, 19 nt, Artificial Sequence
  Description of Artificial Sequence: Synthetic oligonucleotide
cauaaucuguugucagcuu

SEQ ID NO: 1158387 - RNA, 19 nt, Artificial Sequence
  Description of Artificial Sequence: Synthetic oligonucleotide
gaucucgaugggacucuaa

SEQ ID NO: 1158388 - RNA, 19 nt, Artificial Sequence
  Description of Artificial Sequence: Synthetic oligonucleotide
ggaggccuuccugcuaacc

SEQ ID NO: 1158389 - RNA, 19 nt, Artificial Sequence
  Description of Artificial Sequence: Synthetic oligonucleotide
gcaaucauuugaucucgau

SEQ ID NO: 1158390 - RNA, 19 nt, Artificial Sequence
  Description of Artificial Sequence: Synthetic oligonucleotide
ggcgaucccaugcuuuugu

SEQ ID NO: 1158391 - RNA, 19 nt, Artificial Sequence
  Description of Artificial Sequence: Synthetic oligonucleotide
ggagugugcuauuucgguu

SEQ ID NO: 1158392 - RNA, 19 nt, Artificial Sequence
  Description of Artificial Sequence: Synthetic oligonucleotide
caccuuggugcuccucuaa

SEQ ID NO: 1158393 - RNA, 19 nt, Artificial Sequence
  Description of Artificial Sequence: Synthetic oligonucleotide
cugacugucugaggucaaa

SEQ ID NO: 1158394 - RNA, 19 nt, Artificial Sequence
  Description of Artificial Sequence: Synthetic oligonucleotide
ccuaagggaccgccucgag

SEQ ID NO: 1158395 - RNA, 19 nt, Artificial Sequence
  Description of Artificial Sequence: Synthetic oligonucleotide
acaggacgaucagcaacuu

SEQ ID NO: 1158396 - RNA, 19 nt, Artificial Sequence
  Description of Artificial Sequence: Synthetic oligonucleotide
ccacucgaacauuuccaga

SEQ ID NO: 1158397 - RNA, 19 nt, Artificial Sequence
  Description of Artificial Sequence: Synthetic oligonucleotide
ccauuucaguuauugguau

SEQ ID NO: 1158398 - RNA, 19 nt, Artificial Sequence
  Description of Artificial Sequence: Synthetic oligonucleotide
gcgaucccaugcuuuuguc

SEQ ID NO: 1158399 - RNA, 19 nt, Artificial Sequence
  Description of Artificial Sequence: Synthetic oligonucleotide
ccuauuccaccccgaagaa

SEQ ID NO: 1158400 - RNA, 19 nt, Artificial Sequence
  Description of Artificial Sequence: Synthetic oligonucleotide
gguugguaaucacucucuu

SEQ ID NO: 1158401 - RNA, 19 nt, Artificial Sequence
  Description of Artificial Sequence: Synthetic oligonucleotide
augcucuaacagggcgaca

SEQ ID NO: 1158402 - RNA, 19 nt, Artificial Sequence
  Description of Artificial Sequence: Synthetic oligonucleotide
gucucgaggugcugccacu

SEQ ID NO: 1158403 - RNA, 19 nt, Artificial Sequence
  Description of Artificial Sequence: Synthetic oligonucleotide
gcuuuaccugggagugugc

SEQ ID NO: 1158404 - RNA, 19 nt, Artificial Sequence
  Description of Artificial Sequence: Synthetic oligonucleotide
agcauccaugaugguuuua

SEQ ID NO: 1158405 - RNA, 19 nt, Artificial Sequence
  Description of Artificial Sequence: Synthetic oligonucleotide
cucgaucauuuugagcuuu

SEQ ID NO: 1158406 - RNA, 19 nt, Artificial Sequence
  Description of Artificial Sequence: Synthetic oligonucleotide
cauuggcgaucccaugcuu

SEQ ID NO: 1158407 - RNA, 19 nt, Artificial Sequence
  Description of Artificial Sequence: Synthetic oligonucleotide
caggacgaucagcaacuuu

SEQ ID NO: 1158408 - RNA, 19 nt, Artificial Sequence
  Description of Artificial Sequence: Synthetic oligonucleotide
ggucagcagucauuugcuu

SEQ ID NO: 1158409 - RNA, 19 nt, Artificial Sequence
  Description of Artificial Sequence: Synthetic oligonucleotide
ccauuggcgaucccaugcu

SEQ ID NO: 1158410 - RNA, 19 nt, Artificial Sequence
  Description of Artificial Sequence: Synthetic oligonucleotide
cugugccuuccguuccagu

SEQ ID NO: 1158411 - RNA, 19 nt, Artificial Sequence
  Description of Artificial Sequence: Synthetic oligonucleotide
cgguugguaaucacucucu

SEQ ID NO: 1158412 - RNA, 19 nt, Artificial Sequence
  Description of Artificial Sequence: Synthetic oligonucleotide
cgaucccaugcuuuugucu

SEQ ID NO: 1158413 - RNA, 19 nt, Artificial Sequence
  Description of Artificial Sequence: Synthetic oligonucleotide
gcgacaauguuggcuucua

SEQ ID NO: 1158414 - RNA, 19 nt, Artificial Sequence
  Description of Artificial Sequence: Synthetic oligonucleotide
ggccuuccugcuaacccua

SEQ ID NO: 1158415 - RNA, 19 nt, Artificial Sequence
  Description of Artificial Sequence: Synthetic oligonucleotide
auuuagccucugggaccuu

SEQ ID NO: 1158416 - RNA, 19 nt, Artificial Sequence
  Description of Artificial Sequence: Synthetic oligonucleotide
cgccucgagaaccuggucu

SEQ ID NO: 1158417 - RNA, 19 nt, Artificial Sequence
  Description of Artificial Sequence: Synthetic oligonucleotide
ggaccgccucgagaaccug

SEQ ID NO: 1158418 - RNA, 19 nt, Artificial Sequence
  Description of Artificial Sequence: Synthetic oligonucleotide
gcucuaacagggcgacaau

SEQ ID NO: 1158419 - RNA, 19 nt, Artificial Sequence
  Description of Artificial Sequence: Synthetic oligonucleotide
cccuaagggaccgccucga

SEQ ID NO: 1158420 - RNA, 19 nt, Artificial Sequence
  Description of Artificial Sequence: Synthetic oligonucleotide
cucgaggugcugccacuuu

SEQ ID NO: 1158421 - RNA, 19 nt, Artificial Sequence
  Description of Artificial Sequence: Synthetic oligonucleotide
ccagucccuaagggaccgc

SEQ ID NO: 1158422 - RNA, 19 nt, Artificial Sequence
  Description of Artificial Sequence: Synthetic oligonucleotide
ccgccucgagaaccugguc

SEQ ID NO: 1158423 - RNA, 19 nt, Artificial Sequence
  Description of Artificial Sequence: Synthetic oligonucleotide
cgaucauuuugagcuuuua

SEQ ID NO: 1158424 - RNA, 19 nt, Artificial Sequence
  Description of Artificial Sequence: Synthetic oligonucleotide
cgacaauguuggcuucuau

SEQ ID NO: 1158425 - RNA, 19 nt, Artificial Sequence
  Description of Artificial Sequence: Synthetic oligonucleotide
gccuuccugcuaacccuau

SEQ ID NO: 1158426 - RNA, 19 nt, Artificial Sequence
  Description of Artificial Sequence: Synthetic oligonucleotide
aacaacaggcauuaaaacc

SEQ ID NO: 1158427 - RNA, 19 nt, Artificial Sequence
  Description of Artificial Sequence: Synthetic oligonucleotide
uugacgauaacucacaggc

SEQ ID NO: 1158428 - RNA, 19 nt, Artificial Sequence
  Description of Artificial Sequence: Synthetic oligonucleotide
aacuaugucaagcacuccc

SEQ ID NO: 1158429 - RNA, 19 nt, Artificial Sequence
  Description of Artificial Sequence: Synthetic oligonucleotide
auuaguaaaagucacaagu

SEQ ID NO: 1158430 - RNA, 19 nt, Artificial Sequence
  Description of Artificial Sequence: Synthetic oligonucleotide
aaaauagagagauaaauua

SEQ ID NO: 1158431 - RNA, 19 nt, Artificial Sequence
  Description of Artificial Sequence: Synthetic oligonucleotide
uguguggugagaaagagag

SEQ ID NO: 1158432 - RNA, 19 nt, Artificial Sequence
  Description of Artificial Sequence: Synthetic oligonucleotide
auguguaugccauucaucc

SEQ ID NO: 1158433 - RNA, 19 nt, Artificial Sequence
  Description of Artificial Sequence: Synthetic oligonucleotide
cuuaccaagaaacacagcc

SEQ ID NO: 1158434 - RNA, 19 nt, Artificial Sequence
  Description of Artificial Sequence: Synthetic oligonucleotide
gagagauaaauuauaaugg

SEQ ID NO: 1158435 - RNA, 19 nt, Artificial Sequence
  Description of Artificial Sequence: Synthetic oligonucleotide
uguuacauuccaaagagga

SEQ ID NO: 1158436 - RNA, 19 nt, Artificial Sequence
  Description of Artificial Sequence: Synthetic oligonucleotide
aauacuaagcauguggguc

SEQ ID NO: 1158437 - RNA, 19 nt, Artificial Sequence
  Description of Artificial Sequence: Synthetic oligonucleotide
agaacguuggcucugcugc

SEQ ID NO: 1158438 - RNA, 19 nt, Artificial Sequence
  Description of Artificial Sequence: Synthetic oligonucleotide
acuaagguaagauaaacca

SEQ ID NO: 1158439 - RNA, 19 nt, Artificial Sequence
  Description of Artificial Sequence: Synthetic oligonucleotide
uaaauuauaaugguaaccu

SEQ ID NO: 1158440 - RNA, 19 nt, Artificial Sequence
  Description of Artificial Sequence: Synthetic oligonucleotide
uaagguaagauaaaccaug

SEQ ID NO: 1158441 - RNA, 19 nt, Artificial Sequence
  Description of Artificial Sequence: Synthetic oligonucleotide
ugcaucagacaucacaucg

SEQ ID NO: 1158442 - RNA, 19 nt, Artificial Sequence
  Description of Artificial Sequence: Synthetic oligonucleotide
aagucugucuaguaaagag

SEQ ID NO: 1158443 - RNA, 19 nt, Artificial Sequence
  Description of Artificial Sequence: Synthetic oligonucleotide
uacuagaagaagaugagga

SEQ ID NO: 1158444 - RNA, 19 nt, Artificial Sequence
  Description of Artificial Sequence: Synthetic oligonucleotide
uuagcugaggacaacaugu

SEQ ID NO: 1158445 - RNA, 19 nt, Artificial Sequence
  Description of Artificial Sequence: Synthetic oligonucleotide
auuagaguaaacuagcaaa

SEQ ID NO: 1158446 - RNA, 19 nt, Artificial Sequence
  Description of Artificial Sequence: Synthetic oligonucleotide
uuaguuauuagaguaaacu

SEQ ID NO: 1158447 - RNA, 19 nt, Artificial Sequence
  Description of Artificial Sequence: Synthetic oligonucleotide
aacuaagguaagauaaacc

SEQ ID NO: 1158448 - RNA, 19 nt, Artificial Sequence
  Description of Artificial Sequence: Synthetic oligonucleotide
uaguaaaagucacaaguag

SEQ ID NO: 1158449 - RNA, 19 nt, Artificial Sequence
  Description of Artificial Sequence: Synthetic oligonucleotide
uaaacuagcaaacggccag

SEQ ID NO: 1158450 - RNA, 19 nt, Artificial Sequence
  Description of Artificial Sequence: Synthetic oligonucleotide
agauaaaccauguacagaa

SEQ ID NO: 1158451 - RNA, 19 nt, Artificial Sequence
  Description of Artificial Sequence: Synthetic oligonucleotide
uauccaauaacuguuagac

SEQ ID NO: 1158452 - RNA, 19 nt, Artificial Sequence
  Description of Artificial Sequence: Synthetic oligonucleotide
uuaaaacccacugacaccc

SEQ ID NO: 1158453 - RNA, 19 nt, Artificial Sequence
  Description of Artificial Sequence: Synthetic oligonucleotide
aacagugaaauagaagguc

SEQ ID NO: 1158454 - RNA, 19 nt, Artificial Sequence
  Description of Artificial Sequence: Synthetic oligonucleotide
uuuaaauccagcuuaccaa

SEQ ID NO: 1158455 - RNA, 19 nt, Artificial Sequence
  Description of Artificial Sequence: Synthetic oligonucleotide
gacgauaacucacaggcag

SEQ ID NO: 1158456 - RNA, 19 nt, Artificial Sequence
  Description of Artificial Sequence: Synthetic oligonucleotide
uuagaguaaacuagcaaac

SEQ ID NO: 1158457 - RNA, 19 nt, Artificial Sequence
  Description of Artificial Sequence: Synthetic oligonucleotide
uguuagacuucugagagag

SEQ ID NO: 1158458 - RNA, 19 nt, Artificial Sequence
  Description of Artificial Sequence: Synthetic oligonucleotide
uccaauaacuguuagacuu

SEQ ID NO: 1158459 - RNA, 19 nt, Artificial Sequence
  Description of Artificial Sequence: Synthetic oligonucleotide
aguaaacuagcaaacggcc

SEQ ID NO: 1158460 - RNA, 19 nt, Artificial Sequence
  Description of Artificial Sequence: Synthetic oligonucleotide
uaggaaaagguuuacuggc

SEQ ID NO: 1158461 - RNA, 19 nt, Artificial Sequence
  Description of Artificial Sequence: Synthetic oligonucleotide
gaggcaaaagcacaccugg

SEQ ID NO: 1158462 - RNA, 19 nt, Artificial Sequence
  Description of Artificial Sequence: Synthetic oligonucleotide
gaggacaacaugucggucg

SEQ ID NO: 1158463 - RNA, 19 nt, Artificial Sequence
  Description of Artificial Sequence: Synthetic oligonucleotide
augucaagcacucccaagg

SEQ ID NO: 1158464 - RNA, 19 nt, Artificial Sequence
  Description of Artificial Sequence: Synthetic oligonucleotide
auuaguucaaauagcugcc

SEQ ID NO: 1158465 - RNA, 19 nt, Artificial Sequence
  Description of Artificial Sequence: Synthetic oligonucleotide
uuauaaauaugcccggggu

SEQ ID NO: 1158466 - RNA, 19 nt, Artificial Sequence
  Description of Artificial Sequence: Synthetic oligonucleotide
aaaugucucuauuaauaca

SEQ ID NO: 1158467 - RNA, 19 nt, Artificial Sequence
  Description of Artificial Sequence: Synthetic oligonucleotide
agagauaaauuauaauggu

SEQ ID NO: 1158468 - RNA, 19 nt, Artificial Sequence
  Description of Artificial Sequence: Synthetic oligonucleotide
uuauagggagggcagauac

SEQ ID NO: 1158469 - RNA, 19 nt, Artificial Sequence
  Description of Artificial Sequence: Synthetic oligonucleotide
aguaaaagucacaaguagg

SEQ ID NO: 1158470 - RNA, 19 nt, Artificial Sequence
  Description of Artificial Sequence: Synthetic oligonucleotide
aauuaucuugauaaccaag

SEQ ID NO: 1158471 - RNA, 19 nt, Artificial Sequence
  Description of Artificial Sequence: Synthetic oligonucleotide
uuaguaaaagucacaagua

SEQ ID NO: 1158472 - RNA, 19 nt, Artificial Sequence
  Description of Artificial Sequence: Synthetic oligonucleotide
aaaccauguacagaaguag

SEQ ID NO: 1158473 - RNA, 19 nt, Artificial Sequence
  Description of Artificial Sequence: Synthetic oligonucleotide
caugaaggcaaucacaauc

SEQ ID NO: 1158474 - RNA, 19 nt, Artificial Sequence
  Description of Artificial Sequence: Synthetic oligonucleotide
aaugguaaccuugauugug

SEQ ID NO: 1158475 - RNA, 19 nt, Artificial Sequence
  Description of Artificial Sequence: Synthetic oligonucleotide
aaauagcugccucucagca

SEQ ID NO: 1158476 - RNA, 19 nt, Artificial Sequence
  Description of Artificial Sequence: Synthetic oligonucleotide
agauacuagaagaagauga

SEQ ID NO: 1158477 - RNA, 19 nt, Artificial Sequence
  Description of Artificial Sequence: Synthetic oligonucleotide
ugggcuuaagagaaaaugu

SEQ ID NO: 1158478 - RNA, 19 nt, Artificial Sequence
  Description of Artificial Sequence: Synthetic oligonucleotide
gauacacuuacaccucacg

SEQ ID NO: 1158479 - RNA, 19 nt, Artificial Sequence
  Description of Artificial Sequence: Synthetic oligonucleotide
uucaaagcugcccacauua

SEQ ID NO: 1158480 - RNA, 19 nt, Artificial Sequence
  Description of Artificial Sequence: Synthetic oligonucleotide
agagaaacuaugucaagca

SEQ ID NO: 1158481 - RNA, 19 nt, Artificial Sequence
  Description of Artificial Sequence: Synthetic oligonucleotide
uuguuuagaacguuggcuc

SEQ ID NO: 1158482 - RNA, 19 nt, Artificial Sequence
  Description of Artificial Sequence: Synthetic oligonucleotide
auaaaccauguacagaagu

SEQ ID NO: 1158483 - RNA, 19 nt, Artificial Sequence
  Description of Artificial Sequence: Synthetic oligonucleotide
aaauacuaagcaugugggu

SEQ ID NO: 1158484 - RNA, 19 nt, Artificial Sequence
  Description of Artificial Sequence: Synthetic oligonucleotide
ucaggauuggcucaacuaa

SEQ ID NO: 1158485 - RNA, 19 nt, Artificial Sequence
  Description of Artificial Sequence: Synthetic oligonucleotide
aucacaaucuuucugggau

SEQ ID NO: 1158486 - RNA, 19 nt, Artificial Sequence
  Description of Artificial Sequence: Synthetic oligonucleotide
aaauuaucuugauaaccaa

SEQ ID NO: 1158487 - RNA, 19 nt, Artificial Sequence
  Description of Artificial Sequence: Synthetic oligonucleotide
uaguuauuagaguaaacua

SEQ ID NO: 1158488 - RNA, 19 nt, Artificial Sequence
  Description of Artificial Sequence: Synthetic oligonucleotide
uguuuaguuauuagaguaa

SEQ ID NO: 1158489 - RNA, 19 nt, Artificial Sequence
  Description of Artificial Sequence: Synthetic oligonucleotide
uuaccaagaaacacagcca

SEQ ID NO: 1158490 - RNA, 19 nt, Artificial Sequence
  Description of Artificial Sequence: Synthetic oligonucleotide
uggaaauacuaacagugaa

SEQ ID NO: 1158491 - RNA, 19 nt, Artificial Sequence
  Description of Artificial Sequence: Synthetic oligonucleotide
aguccuaguucaaagcugc

SEQ ID NO: 1158492 - RNA, 19 nt, Artificial Sequence
  Description of Artificial Sequence: Synthetic oligonucleotide
cucaacuaagguaagauaa

SEQ ID NO: 1158493 - RNA, 19 nt, Artificial Sequence
  Description of Artificial Sequence: Synthetic oligonucleotide
uagaguaaacuagcaaacg

SEQ ID NO: 1158494 - RNA, 19 nt, Artificial Sequence
  Description of Artificial Sequence: Synthetic oligonucleotide
uguguugcaucagacauca

SEQ ID NO: 1158495 - RNA, 19 nt, Artificial Sequence
  Description of Artificial Sequence: Synthetic oligonucleotide
gaguaaacuagcaaacggc

SEQ ID NO: 1158496 - RNA, 19 nt, Artificial Sequence
  Description of Artificial Sequence: Synthetic oligonucleotide
cguauuugcauucacagcg

SEQ ID NO: 1158497 - RNA, 19 nt, Artificial Sequence
  Description of Artificial Sequence: Synthetic oligonucleotide
auagggagggcagauacac

SEQ ID NO: 1158498 - RNA, 19 nt, Artificial Sequence
  Description of Artificial Sequence: Synthetic oligonucleotide
gagagaaacuaugucaagc

SEQ ID NO: 1158499 - RNA, 19 nt, Artificial Sequence
  Description of Artificial Sequence: Synthetic oligonucleotide
guguaugccauucauccag

SEQ ID NO: 1158500 - RNA, 19 nt, Artificial Sequence
  Description of Artificial Sequence: Synthetic oligonucleotide
auuaucuugauaaccaagu

SEQ ID NO: 1158501 - RNA, 19 nt, Artificial Sequence
  Description of Artificial Sequence: Synthetic oligonucleotide
aacccacugacacccaguc

SEQ ID NO: 1158502 - RNA, 19 nt, Artificial Sequence
  Description of Artificial Sequence: Synthetic oligonucleotide
uuugcauucacagcguaga

SEQ ID NO: 1158503 - RNA, 19 nt, Artificial Sequence
  Description of Artificial Sequence: Synthetic oligonucleotide
uacauuccaaagaggaugu

SEQ ID NO: 1158504 - RNA, 19 nt, Artificial Sequence
  Description of Artificial Sequence: Synthetic oligonucleotide
uuagugauguagucagugc

SEQ ID NO: 1158505 - RNA, 19 nt, Artificial Sequence
  Description of Artificial Sequence: Synthetic oligonucleotide
uacaagucugucuaguaaa

SEQ ID NO: 1158506 - RNA, 19 nt, Artificial Sequence
  Description of Artificial Sequence: Synthetic oligonucleotide
aaauuauaaugguaaccuu

SEQ ID NO: 1158507 - RNA, 19 nt, Artificial Sequence
  Description of Artificial Sequence: Synthetic oligonucleotide
acacuuacaccucacgucu

SEQ ID NO: 1158508 - RNA, 19 nt, Artificial Sequence
  Description of Artificial Sequence: Synthetic oligonucleotide
uuacaagucugucuaguaa

SEQ ID NO: 1158509 - RNA, 19 nt, Artificial Sequence
  Description of Artificial Sequence: Synthetic oligonucleotide
ucugauucccaguuagcug

SEQ ID NO: 1158510 - RNA, 19 nt, Artificial Sequence
  Description of Artificial Sequence: Synthetic oligonucleotide
cuugacgauaacucacagg

SEQ ID NO: 1158511 - RNA, 19 nt, Artificial Sequence
  Description of Artificial Sequence: Synthetic oligonucleotide
uucaaaauucuuggcggcg

SEQ ID NO: 1158512 - RNA, 19 nt, Artificial Sequence
  Description of Artificial Sequence: Synthetic oligonucleotide
cucuauuaauacauuaaca

SEQ ID NO: 1158513 - RNA, 19 nt, Artificial Sequence
  Description of Artificial Sequence: Synthetic oligonucleotide
ggcauuaaaacccacugac

SEQ ID NO: 1158514 - RNA, 19 nt, Artificial Sequence
  Description of Artificial Sequence: Synthetic oligonucleotide
auacacuuacaccucacgu

SEQ ID NO: 1158515 - RNA, 19 nt, Artificial Sequence
  Description of Artificial Sequence: Synthetic oligonucleotide
auacuaagcaugugggucu

SEQ ID NO: 1158516 - RNA, 19 nt, Artificial Sequence
  Description of Artificial Sequence: Synthetic oligonucleotide
caaaagucauguguggagg

SEQ ID NO: 1158517 - RNA, 19 nt, Artificial Sequence
  Description of Artificial Sequence: Synthetic oligonucleotide
auacuagaagaagaugagg

SEQ ID NO: 1158518 - RNA, 19 nt, Artificial Sequence
  Description of Artificial Sequence: Synthetic oligonucleotide
auuggcucaacuaagguaa

SEQ ID NO: 1158519 - RNA, 19 nt, Artificial Sequence
  Description of Artificial Sequence: Synthetic oligonucleotide
augucggucgaagacagac

SEQ ID NO: 1158520 - RNA, 19 nt, Artificial Sequence
  Description of Artificial Sequence: Synthetic oligonucleotide
uuaagagaaaaugucuuua

SEQ ID NO: 1158521 - RNA, 19 nt, Artificial Sequence
  Description of Artificial Sequence: Synthetic oligonucleotide
agucacaaguaggaaaagg

SEQ ID NO: 1158522 - RNA, 19 nt, Artificial Sequence
  Description of Artificial Sequence: Synthetic oligonucleotide
gagagcuuguuccaggcac

SEQ ID NO: 1158523 - RNA, 19 nt, Artificial Sequence
  Description of Artificial Sequence: Synthetic oligonucleotide
ucacaucgcacgaaacaag

SEQ ID NO: 1158524 - RNA, 19 nt, Artificial Sequence
  Description of Artificial Sequence: Synthetic oligonucleotide
ucucuuuauagggagggca

SEQ ID NO: 1158525 - RNA, 19 nt, Artificial Sequence
  Description of Artificial Sequence: Synthetic oligonucleotide
gaaucuuagugauguaguc

SEQ ID NO: 1158526 - RNA, 19 nt, Artificial Sequence
  Description of Artificial Sequence: Synthetic oligonucleotide
agcguagacaguaugcuuc

SEQ ID NO: 1158527 - RNA, 19 nt, Artificial Sequence
  Description of Artificial Sequence: Synthetic oligonucleotide
uguggaggcuagcacacug

SEQ ID NO: 1158528 - RNA, 19 nt, Artificial Sequence
  Description of Artificial Sequence: Synthetic oligonucleotide
augggcguuggcaaaaggc

SEQ ID NO: 1158529 - RNA, 19 nt, Artificial Sequence
  Description of Artificial Sequence: Synthetic oligonucleotide
cuuagugauguagucagug

SEQ ID NO: 1158530 - RNA, 19 nt, Artificial Sequence
  Description of Artificial Sequence: Synthetic oligonucleotide
aacaugucggucgaagaca

SEQ ID NO: 1158531 - RNA, 19 nt, Artificial Sequence
  Description of Artificial Sequence: Synthetic oligonucleotide
agaaacuaugucaagcacu

SEQ ID NO: 1158532 - RNA, 19 nt, Artificial Sequence
  Description of Artificial Sequence: Synthetic oligonucleotide
aaguccuuagagauacuag

SEQ ID NO: 1158533 - RNA, 19 nt, Artificial Sequence
  Description of Artificial Sequence: Synthetic oligonucleotide
cacagcguagacaguaugc

SEQ ID NO: 1158534 - RNA, 19 nt, Artificial Sequence
  Description of Artificial Sequence: Synthetic oligonucleotide
gauguguugcaucagacau

SEQ ID NO: 1158535 - RNA, 19 nt, Artificial Sequence
  Description of Artificial Sequence: Synthetic oligonucleotide
cagaaucuuagugauguag

SEQ ID NO: 1158536 - RNA, 19 nt, Artificial Sequence
  Description of Artificial Sequence: Synthetic oligonucleotide
ucaagcacucccaaggcuu

SEQ ID NO: 1158537 - RNA, 19 nt, Artificial Sequence
  Description of Artificial Sequence: Synthetic oligonucleotide
uagagagauaaauuauaau

SEQ ID NO: 1158538 - RNA, 19 nt, Artificial Sequence
  Description of Artificial Sequence: Synthetic oligonucleotide
ugucaagcacucccaaggc

SEQ ID NO: 1158539 - RNA, 19 nt, Artificial Sequence
  Description of Artificial Sequence: Synthetic oligonucleotide
guguuuaguuauuagagua

SEQ ID NO: 1158540 - RNA, 19 nt, Artificial Sequence
  Description of Artificial Sequence: Synthetic oligonucleotide
uuuucuagucaccuugauu

SEQ ID NO: 1158541 - RNA, 19 nt, Artificial Sequence
  Description of Artificial Sequence: Synthetic oligonucleotide
ucguauuugcauucacagc

SEQ ID NO: 1158542 - RNA, 19 nt, Artificial Sequence
  Description of Artificial Sequence: Synthetic oligonucleotide
aaacuaugucaagcacucc

SEQ ID NO: 1158543 - RNA, 19 nt, Artificial Sequence
  Description of Artificial Sequence: Synthetic oligonucleotide
ucaaaauucuuggcggcgc

SEQ ID NO: 1158544 - RNA, 19 nt, Artificial Sequence
  Description of Artificial Sequence: Synthetic oligonucleotide
uuaucuugauaaccaaguu

SEQ ID NO: 1158545 - RNA, 19 nt, Artificial Sequence
  Description of Artificial Sequence: Synthetic oligonucleotide
gaaauacuaacagugaaau

SEQ ID NO: 1158546 - RNA, 19 nt, Artificial Sequence
  Description of Artificial Sequence: Synthetic oligonucleotide
cuuagagauacuagaagaa

SEQ ID NO: 1158547 - RNA, 19 nt, Artificial Sequence
  Description of Artificial Sequence: Synthetic oligonucleotide
aggacuugacgauaacuca

SEQ ID NO: 1158548 - RNA, 19 nt, Artificial Sequence
  Description of Artificial Sequence: Synthetic oligonucleotide
guuagcugaggacaacaug

SEQ ID NO: 1158549 - RNA, 19 nt, Artificial Sequence
  Description of Artificial Sequence: Synthetic oligonucleotide
gacaacaugucggucgaag

SEQ ID NO: 1158550 - RNA, 19 nt, Artificial Sequence
  Description of Artificial Sequence: Synthetic oligonucleotide
uggauguguugcaucagac

SEQ ID NO: 1158551 - RNA, 19 nt, Artificial Sequence
  Description of Artificial Sequence: Synthetic oligonucleotide
auguguggaggcuagcaca

SEQ ID NO: 1158552 - RNA, 19 nt, Artificial Sequence
  Description of Artificial Sequence: Synthetic oligonucleotide
gucugucuaguaaagagac

SEQ ID NO: 1158553 - RNA, 19 nt, Artificial Sequence
  Description of Artificial Sequence: Synthetic oligonucleotide
uucaggauuggcucaacua

SEQ ID NO: 1158554 - RNA, 19 nt, Artificial Sequence
  Description of Artificial Sequence: Synthetic oligonucleotide
aaagcugcccacauuaguu

SEQ ID NO: 1158555 - RNA, 19 nt, Artificial Sequence
  Description of Artificial Sequence: Synthetic oligonucleotide
auagagagauaaauuauaa

SEQ ID NO: 1158556 - RNA, 19 nt, Artificial Sequence
  Description of Artificial Sequence: Synthetic oligonucleotide
gauuggcucaacuaaggua

SEQ ID NO: 1158557 - RNA, 19 nt, Artificial Sequence
  Description of Artificial Sequence: Synthetic oligonucleotide
aaccaaguugcuguguggu

SEQ ID NO: 1158558 - RNA, 19 nt, Artificial Sequence
  Description of Artificial Sequence: Synthetic oligonucleotide
gagauacuagaagaagaug

SEQ ID NO: 1158559 - RNA, 19 nt, Artificial Sequence
  Description of Artificial Sequence: Synthetic oligonucleotide
agcuuaccaagaaacacag

SEQ ID NO: 1158560 - RNA, 19 nt, Artificial Sequence
  Description of Artificial Sequence: Synthetic oligonucleotide
caacaugucggucgaagac

SEQ ID NO: 1158561 - RNA, 19 nt, Artificial Sequence
  Description of Artificial Sequence: Synthetic oligonucleotide
ugcaaaagucaugugugga

SEQ ID NO: 1158562 - RNA, 19 nt, Artificial Sequence
  Description of Artificial Sequence: Synthetic oligonucleotide
caggauuggcucaacuaag

SEQ ID NO: 1158563 - RNA, 19 nt, Artificial Sequence
  Description of Artificial Sequence: Synthetic oligonucleotide
guacagaaguagaaggccc

SEQ ID NO: 1158564 - RNA, 19 nt, Artificial Sequence
  Description of Artificial Sequence: Synthetic oligonucleotide
aauagaaggucugguguau

SEQ ID NO: 1158565 - RNA, 19 nt, Artificial Sequence
  Description of Artificial Sequence: Synthetic oligonucleotide
aaccauguacagaaguaga

SEQ ID NO: 1158566 - RNA, 19 nt, Artificial Sequence
  Description of Artificial Sequence: Synthetic oligonucleotide
gcaaaagucauguguggag

SEQ ID NO: 1158567 - RNA, 19 nt, Artificial Sequence
  Description of Artificial Sequence: Synthetic oligonucleotide
accuuguuuagaacguugg

SEQ ID NO: 1158568 - RNA, 19 nt, Artificial Sequence
  Description of Artificial Sequence: Synthetic oligonucleotide
ucuugauaaccaaguugcu

SEQ ID NO: 1158569 - RNA, 19 nt, Artificial Sequence
  Description of Artificial Sequence: Synthetic oligonucleotide
ucuucguauuugcauucac

SEQ ID NO: 1158570 - RNA, 19 nt, Artificial Sequence
  Description of Artificial Sequence: Synthetic oligonucleotide
ugcuguguggugagaaaga

SEQ ID NO: 1158571 - RNA, 19 nt, Artificial Sequence
  Description of Artificial Sequence: Synthetic oligonucleotide
acacccagucaauucuuuc

SEQ ID NO: 1158572 - RNA, 19 nt, Artificial Sequence
  Description of Artificial Sequence: Synthetic oligonucleotide
caacuuugagccugccucc

SEQ ID NO: 1158573 - RNA, 19 nt, Artificial Sequence
  Description of Artificial Sequence: Synthetic oligonucleotide
uaguucaaauagcugccuc

SEQ ID NO: 1158574 - RNA, 19 nt, Artificial Sequence
  Description of Artificial Sequence: Synthetic oligonucleotide
acaacaugucggucgaaga

SEQ ID NO: 1158575 - RNA, 19 nt, Artificial Sequence
  Description of Artificial Sequence: Synthetic oligonucleotide
gacaguaugcuuccacauc

SEQ ID NO: 1158576 - RNA, 19 nt, Artificial Sequence
  Description of Artificial Sequence: Synthetic oligonucleotide
aguauguguaugccauuca

SEQ ID NO: 1158577 - RNA, 19 nt, Artificial Sequence
  Description of Artificial Sequence: Synthetic oligonucleotide
agaggauguaggaagaaaa

SEQ ID NO: 1158578 - RNA, 19 nt, Artificial Sequence
  Description of Artificial Sequence: Synthetic oligonucleotide
gaagcuuccagcgcugcug

SEQ ID NO: 1158579 - RNA, 19 nt, Artificial Sequence
  Description of Artificial Sequence: Synthetic oligonucleotide
aggcccaaaauagagagau

SEQ ID NO: 1158580 - RNA, 19 nt, Artificial Sequence
  Description of Artificial Sequence: Synthetic oligonucleotide
uuauaaugguaaccuugau

SEQ ID NO: 1158581 - RNA, 19 nt, Artificial Sequence
  Description of Artificial Sequence: Synthetic oligonucleotide
uaaugguaaccuugauugu

SEQ ID NO: 1158582 - RNA, 19 nt, Artificial Sequence
  Description of Artificial Sequence: Synthetic oligonucleotide
ucugucuaguaaagagacu

SEQ ID NO: 1158583 - RNA, 19 nt, Artificial Sequence
  Description of Artificial Sequence: Synthetic oligonucleotide
aggcauuaaaacccacuga

SEQ ID NO: 1158584 - RNA, 19 nt, Artificial Sequence
  Description of Artificial Sequence: Synthetic oligonucleotide
ugcauucacagcguagaca

SEQ ID NO: 1158585 - RNA, 19 nt, Artificial Sequence
  Description of Artificial Sequence: Synthetic oligonucleotide
aaaugcugaccaguaugug

SEQ ID NO: 1158586 - RNA, 19 nt, Artificial Sequence
  Description of Artificial Sequence: Synthetic oligonucleotide
acgauaacucacaggcagc

SEQ ID NO: 1158587 - RNA, 19 nt, Artificial Sequence
  Description of Artificial Sequence: Synthetic oligonucleotide
caaaauucuuggcggcgcc

SEQ ID NO: 1158588 - RNA, 19 nt, Artificial Sequence
  Description of Artificial Sequence: Synthetic oligonucleotide
aggauuggcucaacuaagg

SEQ ID NO: 1158589 - RNA, 19 nt, Artificial Sequence
  Description of Artificial Sequence: Synthetic oligonucleotide
gaacguuggcucugcugcg

SEQ ID NO: 1158590 - RNA, 19 nt, Artificial Sequence
  Description of Artificial Sequence: Synthetic oligonucleotide
ugacgauaacucacaggca

SEQ ID NO: 1158591 - RNA, 19 nt, Artificial Sequence
  Description of Artificial Sequence: Synthetic oligonucleotide
uuggcaaaaggcuggugau

SEQ ID NO: 1158592 - RNA, 19 nt, Artificial Sequence
  Description of Artificial Sequence: Synthetic oligonucleotide
gaacuccaguccuaguuca

SEQ ID NO: 1158593 - RNA, 19 nt, Artificial Sequence
  Description of Artificial Sequence: Synthetic oligonucleotide
caaacggccaguuuguucu

SEQ ID NO: 1158594 - RNA, 19 nt, Artificial Sequence
  Description of Artificial Sequence: Synthetic oligonucleotide
agguuuacuggcugacuug

SEQ ID NO: 1158595 - RNA, 19 nt, Artificial Sequence
  Description of Artificial Sequence: Synthetic oligonucleotide
auccaauaacuguuagacu

SEQ ID NO: 1158596 - RNA, 19 nt, Artificial Sequence
  Description of Artificial Sequence: Synthetic oligonucleotide
ucuagucaccuugauucug

SEQ ID NO: 1158597 - RNA, 19 nt, Artificial Sequence
  Description of Artificial Sequence: Synthetic oligonucleotide
aacguuggcucugcugcgg

SEQ ID NO: 1158598 - RNA, 19 nt, Artificial Sequence
  Description of Artificial Sequence: Synthetic oligonucleotide
cuucguauuugcauucaca

SEQ ID NO: 1158599 - RNA, 19 nt, Artificial Sequence
  Description of Artificial Sequence: Synthetic oligonucleotide
cagcuuaccaagaaacaca

SEQ ID NO: 1158600 - RNA, 19 nt, Artificial Sequence
  Description of Artificial Sequence: Synthetic oligonucleotide
uuaguucaaauagcugccu

SEQ ID NO: 1158601 - RNA, 19 nt, Artificial Sequence
  Description of Artificial Sequence: Synthetic oligonucleotide
caucacaucgcacgaaaca

SEQ ID NO: 1158602 - RNA, 19 nt, Artificial Sequence
  Description of Artificial Sequence: Synthetic oligonucleotide
acaccucacgucuucaaaa

SEQ ID NO: 1158603 - RNA, 19 nt, Artificial Sequence
  Description of Artificial Sequence: Synthetic oligonucleotide
uacaccucacgucuucaaa

SEQ ID NO: 1158604 - RNA, 19 nt, Artificial Sequence
  Description of Artificial Sequence: Synthetic oligonucleotide
ucgcacgaaacaagucugc

SEQ ID NO: 1158605 - RNA, 19 nt, Artificial Sequence
  Description of Artificial Sequence: Synthetic oligonucleotide
caaguugcuguguggugag

SEQ ID NO: 1158606 - RNA, 19 nt, Artificial Sequence
  Description of Artificial Sequence: Synthetic oligonucleotide
gacaucacaucgcacgaaa

SEQ ID NO: 1158607 - RNA, 19 nt, Artificial Sequence
  Description of Artificial Sequence: Synthetic oligonucleotide
aagaccacacacacugugu

SEQ ID NO: 1158608 - RNA, 19 nt, Artificial Sequence
  Description of Artificial Sequence: Synthetic oligonucleotide
aucacaucgcacgaaacaa

SEQ ID NO: 1158609 - RNA, 19 nt, Artificial Sequence
  Description of Artificial Sequence: Synthetic oligonucleotide
cauguguggaggcuagcac

SEQ ID NO: 1158610 - RNA, 19 nt, Artificial Sequence
  Description of Artificial Sequence: Synthetic oligonucleotide
agucugucuaguaaagaga

SEQ ID NO: 1158611 - RNA, 19 nt, Artificial Sequence
  Description of Artificial Sequence: Synthetic oligonucleotide
uccaaagaggcgccgcuuc

SEQ ID NO: 1158612 - RNA, 19 nt, Artificial Sequence
  Description of Artificial Sequence: Synthetic oligonucleotide
aggccuccgugccacagac

SEQ ID NO: 1158613 - RNA, 19 nt, Artificial Sequence
  Description of Artificial Sequence: Synthetic oligonucleotide
ugauguagucagugcaaaa

SEQ ID NO: 1158614 - RNA, 19 nt, Artificial Sequence
  Description of Artificial Sequence: Synthetic oligonucleotide
ugcaacagcugugaguguc

SEQ ID NO: 1158615 - RNA, 19 nt, Artificial Sequence
  Description of Artificial Sequence: Synthetic oligonucleotide
auuugcauucacagcguag

SEQ ID NO: 1158616 - RNA, 19 nt, Artificial Sequence
  Description of Artificial Sequence: Synthetic oligonucleotide
cuaguucaaagcugcccac

SEQ ID NO: 1158617 - RNA, 19 nt, Artificial Sequence
  Description of Artificial Sequence: Synthetic oligonucleotide
agauacacuuacaccucac

SEQ ID NO: 1158618 - RNA, 19 nt, Artificial Sequence
  Description of Artificial Sequence: Synthetic oligonucleotide
auugugacugagcuucuuu

SEQ ID NO: 1158619 - RNA, 19 nt, Artificial Sequence
  Description of Artificial Sequence: Synthetic oligonucleotide
aaaauucuuggcggcgccu

SEQ ID NO: 1158620 - RNA, 19 nt, Artificial Sequence
  Description of Artificial Sequence: Synthetic oligonucleotide
auucacagcguagacagua

SEQ ID NO: 1158621 - RNA, 19 nt, Artificial Sequence
  Description of Artificial Sequence: Synthetic oligonucleotide
ucuuuauagggagggcaga

SEQ ID NO: 1158622 - RNA, 19 nt, Artificial Sequence
  Description of Artificial Sequence: Synthetic oligonucleotide
uuggcucaacuaagguaag

SEQ ID NO: 1158623 - RNA, 19 nt, Artificial Sequence
  Description of Artificial Sequence: Synthetic oligonucleotide
ggguucucuuuauagggag

SEQ ID NO: 1158624 - RNA, 19 nt, Artificial Sequence
  Description of Artificial Sequence: Synthetic oligonucleotide
acagcguagacaguaugcu

SEQ ID NO: 1158625 - RNA, 19 nt, Artificial Sequence
  Description of Artificial Sequence: Synthetic oligonucleotide
ucuuagugauguagucagu

SEQ ID NO: 1158626 - RNA, 19 nt, Artificial Sequence
  Description of Artificial Sequence: Synthetic oligonucleotide
aaacuagcaaacggccagu

SEQ ID NO: 1158627 - RNA, 19 nt, Artificial Sequence
  Description of Artificial Sequence: Synthetic oligonucleotide
aaauaugcccgggguucuc

SEQ ID NO: 1158628 - RNA, 19 nt, Artificial Sequence
  Description of Artificial Sequence: Synthetic oligonucleotide
ugucggucgaagacagacu

SEQ ID NO: 1158629 - RNA, 19 nt, Artificial Sequence
  Description of Artificial Sequence: Synthetic oligonucleotide
aggacaacaugucggucga

SEQ ID NO: 1158630 - RNA, 19 nt, Artificial Sequence
  Description of Artificial Sequence: Synthetic oligonucleotide
agcucgggauccuccgccc

SEQ ID NO: 1158631 - RNA, 19 nt, Artificial Sequence
  Description of Artificial Sequence: Synthetic oligonucleotide
ucagcacgacaggaaaugc

SEQ ID NO: 1158632 - RNA, 19 nt, Artificial Sequence
  Description of Artificial Sequence: Synthetic oligonucleotide
acaugucggucgaagacag

SEQ ID NO: 1158633 - RNA, 19 nt, Artificial Sequence
  Description of Artificial Sequence: Synthetic oligonucleotide
gaccaguauguguaugcca

SEQ ID NO: 1158634 - RNA, 19 nt, Artificial Sequence
  Description of Artificial Sequence: Synthetic oligonucleotide
cuccgugccacagacuugc

SEQ ID NO: 1158635 - RNA, 19 nt, Artificial Sequence
  Description of Artificial Sequence: Synthetic oligonucleotide
aauaugcccgggguucucu

SEQ ID NO: 1158636 - RNA, 19 nt, Artificial Sequence
  Description of Artificial Sequence: Synthetic oligonucleotide
aucgcacgaaacaagucug

SEQ ID NO: 1158637 - RNA, 19 nt, Artificial Sequence
  Description of Artificial Sequence: Synthetic oligonucleotide
uuccaguugucugucgugu

SEQ ID NO: 1158638 - RNA, 19 nt, Artificial Sequence
  Description of Artificial Sequence: Synthetic oligonucleotide
ccaaccagaaucuuaguga

SEQ ID NO: 1158639 - RNA, 19 nt, Artificial Sequence
  Description of Artificial Sequence: Synthetic oligonucleotide
ggauauguucuuauuauaa

SEQ ID NO: 1158640 - RNA, 19 nt, Artificial Sequence
  Description of Artificial Sequence: Synthetic oligonucleotide
gaggcaauccgaacuccag

SEQ ID NO: 1158641 - RNA, 19 nt, Artificial Sequence
  Description of Artificial Sequence: Synthetic oligonucleotide
ggucugguguauuuacaag

SEQ ID NO: 1158642 - RNA, 19 nt, Artificial Sequence
  Description of Artificial Sequence: Synthetic oligonucleotide
acuaugucaagcacuccca

SEQ ID NO: 1158643 - RNA, 19 nt, Artificial Sequence
  Description of Artificial Sequence: Synthetic oligonucleotide
gucacaaguaggaaaaggu

SEQ ID NO: 1158644 - RNA, 19 nt, Artificial Sequence
  Description of Artificial Sequence: Synthetic oligonucleotide
agcugugaguguccaaaga

SEQ ID NO: 1158645 - RNA, 19 nt, Artificial Sequence
  Description of Artificial Sequence: Synthetic oligonucleotide
gacuugacgauaacucaca

SEQ ID NO: 1158646 - RNA, 19 nt, Artificial Sequence
  Description of Artificial Sequence: Synthetic oligonucleotide
cagacuuccgcuguuccug

SEQ ID NO: 1158647 - RNA, 19 nt, Artificial Sequence
  Description of Artificial Sequence: Synthetic oligonucleotide
guaaacuagcaaacggcca

SEQ ID NO: 1158648 - RNA, 19 nt, Artificial Sequence
  Description of Artificial Sequence: Synthetic oligonucleotide
auguguugcaucagacauc

SEQ ID NO: 1158649 - RNA, 19 nt, Artificial Sequence
  Description of Artificial Sequence: Synthetic oligonucleotide
ccucacgucuucaaaauuc

SEQ ID NO: 1158650 - RNA, 19 nt, Artificial Sequence
  Description of Artificial Sequence: Synthetic oligonucleotide
agcugcccacauuaguuca

SEQ ID NO: 1158651 - RNA, 19 nt, Artificial Sequence
  Description of Artificial Sequence: Synthetic oligonucleotide
agaccacacacacuguguu

SEQ ID NO: 1158652 - RNA, 19 nt, Artificial Sequence
  Description of Artificial Sequence: Synthetic oligonucleotide
uucacagcguagacaguau

SEQ ID NO: 1158653 - RNA, 19 nt, Artificial Sequence
  Description of Artificial Sequence: Synthetic oligonucleotide
ugaagcuuccagcgcugcu

SEQ ID NO: 1158654 - RNA, 19 nt, Artificial Sequence
  Description of Artificial Sequence: Synthetic oligonucleotide
aggcaauccgaacuccagu

SEQ ID NO: 1158655 - RNA, 19 nt, Artificial Sequence
  Description of Artificial Sequence: Synthetic oligonucleotide
agaggcaaaagcacaccug

SEQ ID NO: 1158656 - RNA, 19 nt, Artificial Sequence
  Description of Artificial Sequence: Synthetic oligonucleotide
caguauguguaugccauuc

SEQ ID NO: 1158657 - RNA, 19 nt, Artificial Sequence
  Description of Artificial Sequence: Synthetic oligonucleotide
augguaaccuugauuguga

SEQ ID NO: 1158658 - RNA, 19 nt, Artificial Sequence
  Description of Artificial Sequence: Synthetic oligonucleotide
ucacaaucuuucugggaua

SEQ ID NO: 1158659 - RNA, 19 nt, Artificial Sequence
  Description of Artificial Sequence: Synthetic oligonucleotide
ccaccaggcauuuuaaauc

SEQ ID NO: 1158660 - RNA, 19 nt, Artificial Sequence
  Description of Artificial Sequence: Synthetic oligonucleotide
cugcgguaacagcagcacg

SEQ ID NO: 1158661 - RNA, 19 nt, Artificial Sequence
  Description of Artificial Sequence: Synthetic oligonucleotide
gaaguagaaggcccaaaau

SEQ ID NO: 1158662 - RNA, 19 nt, Artificial Sequence
  Description of Artificial Sequence: Synthetic oligonucleotide
caucgcacgaaacaagucu

SEQ ID NO: 1158663 - RNA, 19 nt, Artificial Sequence
  Description of Artificial Sequence: Synthetic oligonucleotide
uuacaccucacgucuucaa

SEQ ID NO: 1158664 - RNA, 19 nt, Artificial Sequence
  Description of Artificial Sequence: Synthetic oligonucleotide
uucuucguauuugcauuca

SEQ ID NO: 1158665 - RNA, 19 nt, Artificial Sequence
  Description of Artificial Sequence: Synthetic oligonucleotide
cuaagguaagauaaaccau

SEQ ID NO: 1158666 - RNA, 19 nt, Artificial Sequence
  Description of Artificial Sequence: Synthetic oligonucleotide
uuuauagggagggcagaua

SEQ ID NO: 1158667 - RNA, 19 nt, Artificial Sequence
  Description of Artificial Sequence: Synthetic oligonucleotide
cuuugagccugccuccauc

SEQ ID NO: 1158668 - RNA, 19 nt, Artificial Sequence
  Description of Artificial Sequence: Synthetic oligonucleotide
acaucgcacgaaacaaguc

SEQ ID NO: 1158669 - RNA, 19 nt, Artificial Sequence
  Description of Artificial Sequence: Synthetic oligonucleotide
ugauugugacugagcuucu

SEQ ID NO: 1158670 - RNA, 19 nt, Artificial Sequence
  Description of Artificial Sequence: Synthetic oligonucleotide
ggaaauacuaacagugaaa

SEQ ID NO: 1158671 - RNA, 19 nt, Artificial Sequence
  Description of Artificial Sequence: Synthetic oligonucleotide
agugauguagucagugcaa

SEQ ID NO: 1158672 - RNA, 19 nt, Artificial Sequence
  Description of Artificial Sequence: Synthetic oligonucleotide
accauguacagaaguagaa

SEQ ID NO: 1158673 - RNA, 19 nt, Artificial Sequence
  Description of Artificial Sequence: Synthetic oligonucleotide
cugccuccauccaguaagg

SEQ ID NO: 1158674 - RNA, 19 nt, Artificial Sequence
  Description of Artificial Sequence: Synthetic oligonucleotide
aaacccacugacacccagu

SEQ ID NO: 1158675 - RNA, 19 nt, Artificial Sequence
  Description of Artificial Sequence: Synthetic oligonucleotide
cuucucccgccauagaaaa

SEQ ID NO: 1158676 - RNA, 19 nt, Artificial Sequence
  Description of Artificial Sequence: Synthetic oligonucleotide
acguuggcucugcugcggg

SEQ ID NO: 1158677 - RNA, 19 nt, Artificial Sequence
  Description of Artificial Sequence: Synthetic oligonucleotide
cuuggcggcgccugucagc

SEQ ID NO: 1158678 - RNA, 19 nt, Artificial Sequence
  Description of Artificial Sequence: Synthetic oligonucleotide
cgggguucucuuuauaggg

SEQ ID NO: 1158679 - RNA, 19 nt, Artificial Sequence
  Description of Artificial Sequence: Synthetic oligonucleotide
caccuugauucugauuccc

SEQ ID NO: 1158680 - RNA, 19 nt, Artificial Sequence
  Description of Artificial Sequence: Synthetic oligonucleotide
agucauguguggaggcuag

SEQ ID NO: 1158681 - RNA, 19 nt, Artificial Sequence
  Description of Artificial Sequence: Synthetic oligonucleotide
agguaagauaaaccaugua

SEQ ID NO: 1158682 - RNA, 19 nt, Artificial Sequence
  Description of Artificial Sequence: Synthetic oligonucleotide
aguguccaaagaggcgccg

SEQ ID NO: 1158683 - RNA, 19 nt, Artificial Sequence
  Description of Artificial Sequence: Synthetic oligonucleotide
uuggcggcgccugucagcu

SEQ ID NO: 1158684 - RNA, 19 nt, Artificial Sequence
  Description of Artificial Sequence: Synthetic oligonucleotide
gacuugagagaaacuaugu

SEQ ID NO: 1158685 - RNA, 19 nt, Artificial Sequence
  Description of Artificial Sequence: Synthetic oligonucleotide
ggauguguugcaucagaca

SEQ ID NO: 1158686 - RNA, 19 nt, Artificial Sequence
  Description of Artificial Sequence: Synthetic oligonucleotide
cagcugugaguguccaaag

SEQ ID NO: 1158687 - RNA, 19 nt, Artificial Sequence
  Description of Artificial Sequence: Synthetic oligonucleotide
ggacuugacgauaacucac

SEQ ID NO: 1158688 - RNA, 19 nt, Artificial Sequence
  Description of Artificial Sequence: Synthetic oligonucleotide
ucaugggcguuggcaaaag

SEQ ID NO: 1158689 - RNA, 19 nt, Artificial Sequence
  Description of Artificial Sequence: Synthetic oligonucleotide
ccuuguuuagaacguuggc

SEQ ID NO: 1158690 - RNA, 19 nt, Artificial Sequence
  Description of Artificial Sequence: Synthetic oligonucleotide
cuuggauguguugcaucag

SEQ ID NO: 1158691 - RNA, 19 nt, Artificial Sequence
  Description of Artificial Sequence: Synthetic oligonucleotide
aggcuugggcuuaagagaa

SEQ ID NO: 1158692 - RNA, 19 nt, Artificial Sequence
  Description of Artificial Sequence: Synthetic oligonucleotide
caagccaaccagaaucuua

SEQ ID NO: 1158693 - RNA, 19 nt, Artificial Sequence
  Description of Artificial Sequence: Synthetic oligonucleotide
gggcuuaagagaaaauguc

SEQ ID NO: 1158694 - RNA, 19 nt, Artificial Sequence
  Description of Artificial Sequence: Synthetic oligonucleotide
gcaauccgaacuccagucc

SEQ ID NO: 1158695 - RNA, 19 nt, Artificial Sequence
  Description of Artificial Sequence: Synthetic oligonucleotide
ccagcuuaccaagaaacac

SEQ ID NO: 1158696 - RNA, 19 nt, Artificial Sequence
  Description of Artificial Sequence: Synthetic oligonucleotide
caguuauccaauaacuguu

SEQ ID NO: 1158697 - RNA, 19 nt, Artificial Sequence
  Description of Artificial Sequence: Synthetic oligonucleotide
ucggucgaagacagacuuc

SEQ ID NO: 1158698 - RNA, 19 nt, Artificial Sequence
  Description of Artificial Sequence: Synthetic oligonucleotide
acggacagcgccaggcagg

SEQ ID NO: 1158699 - RNA, 19 nt, Artificial Sequence
  Description of Artificial Sequence: Synthetic oligonucleotide
ggagggcagauacacuuac

SEQ ID NO: 1158700 - RNA, 19 nt, Artificial Sequence
  Description of Artificial Sequence: Synthetic oligonucleotide
guccuuagagauacuagaa

SEQ ID NO: 1158701 - RNA, 19 nt, Artificial Sequence
  Description of Artificial Sequence: Synthetic oligonucleotide
guauguguaugccauucau

SEQ ID NO: 1158702 - RNA, 19 nt, Artificial Sequence
  Description of Artificial Sequence: Synthetic oligonucleotide
cagacaucacaucgcacga

SEQ ID NO: 1158703 - RNA, 19 nt, Artificial Sequence
  Description of Artificial Sequence: Synthetic oligonucleotide
cacggacagcgccaggcag

SEQ ID NO: 1158704 - RNA, 19 nt, Artificial Sequence
  Description of Artificial Sequence: Synthetic oligonucleotide
cacgaaacaagucugcauu

SEQ ID NO: 1158705 - RNA, 19 nt, Artificial Sequence
  Description of Artificial Sequence: Synthetic oligonucleotide
ccgggguucucuuuauagg

SEQ ID NO: 1158706 - RNA, 19 nt, Artificial Sequence
  Description of Artificial Sequence: Synthetic oligonucleotide
aggcuagcacacugaugag

SEQ ID NO: 1158707 - RNA, 19 nt, Artificial Sequence
  Description of Artificial Sequence: Synthetic oligonucleotide
aacuagcaaacggccaguu

SEQ ID NO: 1158708 - RNA, 19 nt, Artificial Sequence
  Description of Artificial Sequence: Synthetic oligonucleotide
agacuuccgcuguuccuga

SEQ ID NO: 1158709 - RNA, 19 nt, Artificial Sequence
  Description of Artificial Sequence: Synthetic oligonucleotide
cucacgucuucaaaauucu

SEQ ID NO: 1158710 - RNA, 19 nt, Artificial Sequence
  Description of Artificial Sequence: Synthetic oligonucleotide
cacaucgcacgaaacaagu

SEQ ID NO: 1158711 - RNA, 19 nt, Artificial Sequence
  Description of Artificial Sequence: Synthetic oligonucleotide
agcgggccagcacaucaug

SEQ ID NO: 1158712 - RNA, 19 nt, Artificial Sequence
  Description of Artificial Sequence: Synthetic oligonucleotide
gcguagacaguaugcuucc

SEQ ID NO: 1158713 - RNA, 19 nt, Artificial Sequence
  Description of Artificial Sequence: Synthetic oligonucleotide
cccgggguucucuuuauag

SEQ ID NO: 1158714 - RNA, 19 nt, Artificial Sequence
  Description of Artificial Sequence: Synthetic oligonucleotide
cacaagccaaccagaaucu

SEQ ID NO: 1158715 - RNA, 19 nt, Artificial Sequence
  Description of Artificial Sequence: Synthetic oligonucleotide
accucacgucuucaaaauu

SEQ ID NO: 1158716 - RNA, 19 nt, Artificial Sequence
  Description of Artificial Sequence: Synthetic oligonucleotide
caguuagcugaggacaaca

SEQ ID NO: 1158717 - RNA, 19 nt, Artificial Sequence
  Description of Artificial Sequence: Synthetic oligonucleotide
cacuggaaauacuaacagu

SEQ ID NO: 1158718 - RNA, 19 nt, Artificial Sequence
  Description of Artificial Sequence: Synthetic oligonucleotide
cucgggauccuccgcccgc

SEQ ID NO: 1158719 - RNA, 19 nt, Artificial Sequence
  Description of Artificial Sequence: Synthetic oligonucleotide
aucgcgggagccagccgcc

SEQ ID NO: 1158720 - RNA, 19 nt, Artificial Sequence
  Description of Artificial Sequence: Synthetic oligonucleotide
ugcccacauuaguucaaau

SEQ ID NO: 1158721 - RNA, 19 nt, Artificial Sequence
  Description of Artificial Sequence: Synthetic oligonucleotide
cacucugcaacagcuguga

SEQ ID NO: 1158722 - RNA, 19 nt, Artificial Sequence
  Description of Artificial Sequence: Synthetic oligonucleotide
aaacggccaguuuguucuu

SEQ ID NO: 1158723 - RNA, 19 nt, Artificial Sequence
  Description of Artificial Sequence: Synthetic oligonucleotide
caauccgaacuccaguccu

SEQ ID NO: 1158724 - RNA, 19 nt, Artificial Sequence
  Description of Artificial Sequence: Synthetic oligonucleotide
gggauauguucuuauuaua

SEQ ID NO: 1158725 - RNA, 19 nt, Artificial Sequence
  Description of Artificial Sequence: Synthetic oligonucleotide
gugauguagucagugcaaa

SEQ ID NO: 1158726 - RNA, 19 nt, Artificial Sequence
  Description of Artificial Sequence: Synthetic oligonucleotide
cccacugacacccagucaa

SEQ ID NO: 1158727 - RNA, 19 nt, Artificial Sequence
  Description of Artificial Sequence: Synthetic oligonucleotide
acaaucuuucugggauaug

SEQ ID NO: 1158728 - RNA, 19 nt, Artificial Sequence
  Description of Artificial Sequence: Synthetic oligonucleotide
cugaggacaacaugucggu

SEQ ID NO: 1158729 - RNA, 19 nt, Artificial Sequence
  Description of Artificial Sequence: Synthetic oligonucleotide
uccgaacuccaguccuagu

SEQ ID NO: 1158730 - RNA, 19 nt, Artificial Sequence
  Description of Artificial Sequence: Synthetic oligonucleotide
gucggucgaagacagacuu

SEQ ID NO: 1158731 - RNA, 19 nt, Artificial Sequence
  Description of Artificial Sequence: Synthetic oligonucleotide
cugaagcuuccagcgcugc

SEQ ID NO: 1158732 - RNA, 19 nt, Artificial Sequence
  Description of Artificial Sequence: Synthetic oligonucleotide
gcauuaaaacccacugaca

SEQ ID NO: 1158733 - RNA, 19 nt, Artificial Sequence
  Description of Artificial Sequence: Synthetic oligonucleotide
agccaccaggcauuuuaaa

SEQ ID NO: 1158734 - RNA, 19 nt, Artificial Sequence
  Description of Artificial Sequence: Synthetic oligonucleotide
gcccacauuaguucaaaua

SEQ ID NO: 1158735 - RNA, 19 nt, Artificial Sequence
  Description of Artificial Sequence: Synthetic oligonucleotide
gucaagcacucccaaggcu

SEQ ID NO: 1158736 - RNA, 19 nt, Artificial Sequence
  Description of Artificial Sequence: Synthetic oligonucleotide
aacucacaggcagcuuaau

SEQ ID NO: 1158737 - RNA, 19 nt, Artificial Sequence
  Description of Artificial Sequence: Synthetic oligonucleotide
ccuugauugugacugagcu

SEQ ID NO: 1158738 - RNA, 19 nt, Artificial Sequence
  Description of Artificial Sequence: Synthetic oligonucleotide
gcucaacuaagguaagaua

SEQ ID NO: 1158739 - RNA, 19 nt, Artificial Sequence
  Description of Artificial Sequence: Synthetic oligonucleotide
cggucgaagacagacuucc

SEQ ID NO: 1158740 - RNA, 19 nt, Artificial Sequence
  Description of Artificial Sequence: Synthetic oligonucleotide
uaugcccgggguucucuuu

SEQ ID NO: 1158741 - RNA, 19 nt, Artificial Sequence
  Description of Artificial Sequence: Synthetic oligonucleotide
agacaucacaucgcacgaa

SEQ ID NO: 1158742 - RNA, 19 nt, Artificial Sequence
  Description of Artificial Sequence: Synthetic oligonucleotide
gagggcagauacacuuaca

SEQ ID NO: 1158743 - RNA, 19 nt, Artificial Sequence
  Description of Artificial Sequence: Synthetic oligonucleotide
caauaacuguuagacuucu

SEQ ID NO: 1158744 - RNA, 19 nt, Artificial Sequence
  Description of Artificial Sequence: Synthetic oligonucleotide
gcagauacacuuacaccuc

SEQ ID NO: 1158745 - RNA, 19 nt, Artificial Sequence
  Description of Artificial Sequence: Synthetic oligonucleotide
ggucgaagacagacuuccg

SEQ ID NO: 1158746 - RNA, 19 nt, Artificial Sequence
  Description of Artificial Sequence: Synthetic oligonucleotide
auacuccaccuuguuuaga

SEQ ID NO: 1158747 - RNA, 19 nt, Artificial Sequence
  Description of Artificial Sequence: Synthetic oligonucleotide
auaugcccgggguucucuu

SEQ ID NO: 1158748 - RNA, 19 nt, Artificial Sequence
  Description of Artificial Sequence: Synthetic oligonucleotide
cauccaguaaggguuugua

SEQ ID NO: 1158749 - RNA, 19 nt, Artificial Sequence
  Description of Artificial Sequence: Synthetic oligonucleotide
ucgggauccuccgcccgca

SEQ ID NO: 1158750 - RNA, 19 nt, Artificial Sequence
  Description of Artificial Sequence: Synthetic oligonucleotide
gcugcgguaacagcagcac

SEQ ID NO: 1158751 - RNA, 19 nt, Artificial Sequence
  Description of Artificial Sequence: Synthetic oligonucleotide
cuuuauagggagggcagau

SEQ ID NO: 1158752 - RNA, 19 nt, Artificial Sequence
  Description of Artificial Sequence: Synthetic oligonucleotide
cagcacgacaggaaaugcu

SEQ ID NO: 1158753 - RNA, 19 nt, Artificial Sequence
  Description of Artificial Sequence: Synthetic oligonucleotide
gucauguguggaggcuagc

SEQ ID NO: 1158754 - RNA, 19 nt, Artificial Sequence
  Description of Artificial Sequence: Synthetic oligonucleotide
gcuugggcuuaagagaaaa

SEQ ID NO: 1158755 - RNA, 19 nt, Artificial Sequence
  Description of Artificial Sequence: Synthetic oligonucleotide
gggguucucuuuauaggga

SEQ ID NO: 1158756 - RNA, 19 nt, Artificial Sequence
  Description of Artificial Sequence: Synthetic oligonucleotide
cagcaggccuccgugccac

SEQ ID NO: 1158757 - RNA, 19 nt, Artificial Sequence
  Description of Artificial Sequence: Synthetic oligonucleotide
gagccaccaggcauuuuaa

SEQ ID NO: 1158758 - RNA, 19 nt, Artificial Sequence
  Description of Artificial Sequence: Synthetic oligonucleotide
gcucgggauccuccgcccg

SEQ ID NO: 1158759 - RNA, 19 nt, Artificial Sequence
  Description of Artificial Sequence: Synthetic oligonucleotide
caccucacgucuucaaaau

SEQ ID NO: 1158760 - RNA, 19 nt, Artificial Sequence
  Description of Artificial Sequence: Synthetic oligonucleotide
ggcucaacuaagguaagau

SEQ ID NO: 1158761 - RNA, 19 nt, Artificial Sequence
  Description of Artificial Sequence: Synthetic oligonucleotide
gcuuaccaagaaacacagc

SEQ ID NO: 1158762 - RNA, 19 nt, Artificial Sequence
  Description of Artificial Sequence: Synthetic oligonucleotide
ugcccgggguucucuuuau

SEQ ID NO: 1158763 - RNA, 19 nt, Artificial Sequence
  Description of Artificial Sequence: Synthetic oligonucleotide
cacaaucuuucugggauau

SEQ ID NO: 1158764 - RNA, 19 nt, Artificial Sequence
  Description of Artificial Sequence: Synthetic oligonucleotide
gcgggagcgggccagcaca

SEQ ID NO: 1158765 - RNA, 19 nt, Artificial Sequence
  Description of Artificial Sequence: Synthetic oligonucleotide
cagaaguagaaggcccaaa

SEQ ID NO: 1158766 - RNA, 19 nt, Artificial Sequence
  Description of Artificial Sequence: Synthetic oligonucleotide
cagcgagccccgagccccg

SEQ ID NO: 1158767 - RNA, 19 nt, Artificial Sequence
  Description of Artificial Sequence: Synthetic oligonucleotide
caugucggucgaagacaga

SEQ ID NO: 1158768 - RNA, 19 nt, Artificial Sequence
  Description of Artificial Sequence: Synthetic oligonucleotide
gacuuccgcuguuccugaa

SEQ ID NO: 1158769 - RNA, 19 nt, Artificial Sequence
  Description of Artificial Sequence: Synthetic oligonucleotide
gccaucgcgggagccagcc

SEQ ID NO: 1158770 - RNA, 19 nt, Artificial Sequence
  Description of Artificial Sequence: Synthetic oligonucleotide
gauaacucacaggcagcuu

SEQ ID NO: 1158771 - RNA, 19 nt, Artificial Sequence
  Description of Artificial Sequence: Synthetic oligonucleotide
gcacgaaacaagucugcau

SEQ ID NO: 1158772 - RNA, 19 nt, Artificial Sequence
  Description of Artificial Sequence: Synthetic oligonucleotide
ccagcgcugcugugcauac

SEQ ID NO: 1158773 - RNA, 19 nt, Artificial Sequence
  Description of Artificial Sequence: Synthetic oligonucleotide
cccaguuagcugaggacaa

SEQ ID NO: 1158774 - RNA, 19 nt, Artificial Sequence
  Description of Artificial Sequence: Synthetic oligonucleotide
gccuccgugccacagacuu

SEQ ID NO: 1158775 - RNA, 19 nt, Artificial Sequence
  Description of Artificial Sequence: Synthetic oligonucleotide
gauugugacugagcuucuu

SEQ ID NO: 1158776 - RNA, 19 nt, Artificial Sequence
  Description of Artificial Sequence: Synthetic oligonucleotide
cugcccacauuaguucaaa

SEQ ID NO: 1158777 - RNA, 19 nt, Artificial Sequence
  Description of Artificial Sequence: Synthetic oligonucleotide
gcacaggacuugacgauaa

SEQ ID NO: 1158778 - RNA, 19 nt, Artificial Sequence
  Description of Artificial Sequence: Synthetic oligonucleotide
gacacccagucaauucuuu

SEQ ID NO: 1158779 - RNA, 19 nt, Artificial Sequence
  Description of Artificial Sequence: Synthetic oligonucleotide
ggcacaggacuugacgaua

SEQ ID NO: 1158780 - RNA, 19 nt, Artificial Sequence
  Description of Artificial Sequence: Synthetic oligonucleotide
aggcgccgcuucaggauug

SEQ ID NO: 1158781 - RNA, 19 nt, Artificial Sequence
  Description of Artificial Sequence: Synthetic oligonucleotide
cagcguagacaguaugcuu

SEQ ID NO: 1158782 - RNA, 19 nt, Artificial Sequence
  Description of Artificial Sequence: Synthetic oligonucleotide
gcacggacagcgccaggca

SEQ ID NO: 1158783 - RNA, 19 nt, Artificial Sequence
  Description of Artificial Sequence: Synthetic oligonucleotide
agcaggccuccgugccaca

SEQ ID NO: 1158784 - RNA, 19 nt, Artificial Sequence
  Description of Artificial Sequence: Synthetic oligonucleotide
gcgguaacagcagcacgga

SEQ ID NO: 1158785 - RNA, 19 nt, Artificial Sequence
  Description of Artificial Sequence: Synthetic oligonucleotide
gugggucugcuuccaacuu

SEQ ID NO: 1158786 - RNA, 19 nt, Artificial Sequence
  Description of Artificial Sequence: Synthetic oligonucleotide
ccuccgugccacagacuug

SEQ ID NO: 1158787 - RNA, 19 nt, Artificial Sequence
  Description of Artificial Sequence: Synthetic oligonucleotide
ggcgccgcuucaggauugg

SEQ ID NO: 1158788 - RNA, 19 nt, Artificial Sequence
  Description of Artificial Sequence: Synthetic oligonucleotide
guggugagaaagagagcuu

SEQ ID NO: 1158789 - RNA, 19 nt, Artificial Sequence
  Description of Artificial Sequence: Synthetic oligonucleotide
ccgaacuccaguccuaguu

SEQ ID NO: 1158790 - RNA, 19 nt, Artificial Sequence
  Description of Artificial Sequence: Synthetic oligonucleotide
gcuggccacacuggaaaua

SEQ ID NO: 1158791 - RNA, 19 nt, Artificial Sequence
  Description of Artificial Sequence: Synthetic oligonucleotide
cacuuacaccucacgucuu

SEQ ID NO: 1158792 - RNA, 19 nt, Artificial Sequence
  Description of Artificial Sequence: Synthetic oligonucleotide
ccgugccacagacuugcca

SEQ ID NO: 1158793 - RNA, 19 nt, Artificial Sequence
  Description of Artificial Sequence: Synthetic oligonucleotide
cgcacgaaacaagucugca

SEQ ID NO: 1158794 - RNA, 19 nt, Artificial Sequence
  Description of Artificial Sequence: Synthetic oligonucleotide
cgauaacucacaggcagcu

SEQ ID NO: 1158795 - RNA, 19 nt, Artificial Sequence
  Description of Artificial Sequence: Synthetic oligonucleotide
ggcccaaaauagagagaua

SEQ ID NO: 1158796 - RNA, 19 nt, Artificial Sequence
  Description of Artificial Sequence: Synthetic oligonucleotide
guguggaggcuagcacacu

SEQ ID NO: 1158797 - RNA, 19 nt, Artificial Sequence
  Description of Artificial Sequence: Synthetic oligonucleotide
gggauccuccgcccgcacu

SEQ ID NO: 1158798 - RNA, 19 nt, Artificial Sequence
  Description of Artificial Sequence: Synthetic oligonucleotide
ggcugacuuggaacugugu

SEQ ID NO: 1158799 - RNA, 19 nt, Artificial Sequence
  Description of Artificial Sequence: Synthetic oligonucleotide
cugcgggagcgggccagca

SEQ ID NO: 1158800 - RNA, 19 nt, Artificial Sequence
  Description of Artificial Sequence: Synthetic oligonucleotide
ggacaacaugucggucgaa

SEQ ID NO: 1158801 - RNA, 19 nt, Artificial Sequence
  Description of Artificial Sequence: Synthetic oligonucleotide
cgccgcuucaggauuggcu

SEQ ID NO: 1158802 - RNA, 19 nt, Artificial Sequence
  Description of Artificial Sequence: Synthetic oligonucleotide
gcgccgcuucaggauuggc

SEQ ID NO: 1158803 - RNA, 19 nt, Artificial Sequence
  Description of Artificial Sequence: Synthetic oligonucleotide
gcccgggguucucuuuaua

SEQ ID NO: 1158804 - RNA, 19 nt, Artificial Sequence
  Description of Artificial Sequence: Synthetic oligonucleotide
ccauccaguaaggguuugu

SEQ ID NO: 1158805 - RNA, 19 nt, Artificial Sequence
  Description of Artificial Sequence: Synthetic oligonucleotide
ccgcucccggcucgggauc

SEQ ID NO: 1158806 - RNA, 19 nt, Artificial Sequence
  Description of Artificial Sequence: Synthetic oligonucleotide
cgccugucagcugcgguaa

SEQ ID NO: 1158807 - RNA, 19 nt, Artificial Sequence
  Description of Artificial Sequence: Synthetic oligonucleotide
cgggauccuccgcccgcac

SEQ ID NO: 1158808 - RNA, 19 nt, Artificial Sequence
  Description of Artificial Sequence: Synthetic oligonucleotide
ccgagccccgcucccggcu

SEQ ID NO: 1158809 - RNA, 19 nt, Artificial Sequence
  Description of Artificial Sequence: Synthetic oligonucleotide
ccgccccagcgagccccga

SEQ ID NO: 1158810 - RNA, 19 nt, Artificial Sequence
  Description of Artificial Sequence: Synthetic oligonucleotide
auuuaugagacacugcgcc

SEQ ID NO: 1158811 - RNA, 19 nt, Artificial Sequence
  Description of Artificial Sequence: Synthetic oligonucleotide
uuuaucaaaaguuauugca

SEQ ID NO: 1158812 - RNA, 19 nt, Artificial Sequence
  Description of Artificial Sequence: Synthetic oligonucleotide
aaauacaagcucuugagca

SEQ ID NO: 1158813 - RNA, 19 nt, Artificial Sequence
  Description of Artificial Sequence: Synthetic oligonucleotide
acauuuaugagacacugcg

SEQ ID NO: 1158814 - RNA, 19 nt, Artificial Sequence
  Description of Artificial Sequence: Synthetic oligonucleotide
aaaauccuaaauuuuauaa

SEQ ID NO: 1158815 - RNA, 19 nt, Artificial Sequence
  Description of Artificial Sequence: Synthetic oligonucleotide
aaaauauugacaccugugu

SEQ ID NO: 1158816 - RNA, 19 nt, Artificial Sequence
  Description of Artificial Sequence: Synthetic oligonucleotide
ugauauuucauuagcagug

SEQ ID NO: 1158817 - RNA, 19 nt, Artificial Sequence
  Description of Artificial Sequence: Synthetic oligonucleotide
uugaaguucuuauugagag

SEQ ID NO: 1158818 - RNA, 19 nt, Artificial Sequence
  Description of Artificial Sequence: Synthetic oligonucleotide
aacauaguuaaugaugccg

SEQ ID NO: 1158819 - RNA, 19 nt, Artificial Sequence
  Description of Artificial Sequence: Synthetic oligonucleotide
uaagacuuaauacauacau

SEQ ID NO: 1158820 - RNA, 19 nt, Artificial Sequence
  Description of Artificial Sequence: Synthetic oligonucleotide
auagguaagacuuaauaca

SEQ ID NO: 1158821 - RNA, 19 nt, Artificial Sequence
  Description of Artificial Sequence: Synthetic oligonucleotide
cuguguaacaauaagauga

SEQ ID NO: 1158822 - RNA, 19 nt, Artificial Sequence
  Description of Artificial Sequence: Synthetic oligonucleotide
ugcaacauaguauuauuag

SEQ ID NO: 1158823 - RNA, 19 nt, Artificial Sequence
  Description of Artificial Sequence: Synthetic oligonucleotide
aagguaauuuuauugggcu

SEQ ID NO: 1158824 - RNA, 19 nt, Artificial Sequence
  Description of Artificial Sequence: Synthetic oligonucleotide
auuguguccguuuauuuuc

SEQ ID NO: 1158825 - RNA, 19 nt, Artificial Sequence
  Description of Artificial Sequence: Synthetic oligonucleotide
ugacuucuaagucagauuc

SEQ ID NO: 1158826 - RNA, 19 nt, Artificial Sequence
  Description of Artificial Sequence: Synthetic oligonucleotide
uauagcauauucaagucuc

SEQ ID NO: 1158827 - RNA, 19 nt, Artificial Sequence
  Description of Artificial Sequence: Synthetic oligonucleotide
ugguuagucagguugaggc

SEQ ID NO: 1158828 - RNA, 19 nt, Artificial Sequence
  Description of Artificial Sequence: Synthetic oligonucleotide
cauagguaagacuuaauac

SEQ ID NO: 1158829 - RNA, 19 nt, Artificial Sequence
  Description of Artificial Sequence: Synthetic oligonucleotide
aaacaaagcguucauuccu

SEQ ID NO: 1158830 - RNA, 19 nt, Artificial Sequence
  Description of Artificial Sequence: Synthetic oligonucleotide
ccuaagauuaguaagagug

SEQ ID NO: 1158831 - RNA, 19 nt, Artificial Sequence
  Description of Artificial Sequence: Synthetic oligonucleotide
uuaacaaccccgacugugg

SEQ ID NO: 1158832 - RNA, 19 nt, Artificial Sequence
  Description of Artificial Sequence: Synthetic oligonucleotide
aucuuaacaaccccgacug

SEQ ID NO: 1158833 - RNA, 19 nt, Artificial Sequence
  Description of Artificial Sequence: Synthetic oligonucleotide
ugaauucucaguccaaaca

SEQ ID NO: 1158834 - RNA, 19 nt, Artificial Sequence
  Description of Artificial Sequence: Synthetic oligonucleotide
ucugagagaauaaaauccu

SEQ ID NO: 1158835 - RNA, 19 nt, Artificial Sequence
  Description of Artificial Sequence: Synthetic oligonucleotide
aagagugcaacauaguauu

SEQ ID NO: 1158836 - RNA, 19 nt, Artificial Sequence
  Description of Artificial Sequence: Synthetic oligonucleotide
ucugcaugugagacgaucg

SEQ ID NO: 1158837 - RNA, 19 nt, Artificial Sequence
  Description of Artificial Sequence: Synthetic oligonucleotide
uguaccucaccaaaguccc

SEQ ID NO: 1158838 - RNA, 19 nt, Artificial Sequence
  Description of Artificial Sequence: Synthetic oligonucleotide
acaaccgccagucaugagg

SEQ ID NO: 1158839 - RNA, 19 nt, Artificial Sequence
  Description of Artificial Sequence: Synthetic oligonucleotide
uuaucuuugcuccagggau

SEQ ID NO: 1158840 - RNA, 19 nt, Artificial Sequence
  Description of Artificial Sequence: Synthetic oligonucleotide
uugauauuucauuagcagu

SEQ ID NO: 1158841 - RNA, 19 nt, Artificial Sequence
  Description of Artificial Sequence: Synthetic oligonucleotide
uggaggaaaccacugaccc

SEQ ID NO: 1158842 - RNA, 19 nt, Artificial Sequence
  Description of Artificial Sequence: Synthetic oligonucleotide
agauuaguaagagugcaac

SEQ ID NO: 1158843 - RNA, 19 nt, Artificial Sequence
  Description of Artificial Sequence: Synthetic oligonucleotide
ucauacuccaugaacggca

SEQ ID NO: 1158844 - RNA, 19 nt, Artificial Sequence
  Description of Artificial Sequence: Synthetic oligonucleotide
aaguuauugcaacugcugu

SEQ ID NO: 1158845 - RNA, 19 nt, Artificial Sequence
  Description of Artificial Sequence: Synthetic oligonucleotide
uccaaguucuauaccaaag

SEQ ID NO: 1158846 - RNA, 19 nt, Artificial Sequence
  Description of Artificial Sequence: Synthetic oligonucleotide
auuagcaguggguacuugg

SEQ ID NO: 1158847 - RNA, 19 nt, Artificial Sequence
  Description of Artificial Sequence: Synthetic oligonucleotide
gauuaacucgucuucgggc

SEQ ID NO: 1158848 - RNA, 19 nt, Artificial Sequence
  Description of Artificial Sequence: Synthetic oligonucleotide
cuaagauuaguaagagugc

SEQ ID NO: 1158849 - RNA, 19 nt, Artificial Sequence
  Description of Artificial Sequence: Synthetic oligonucleotide
agucccuaagauuaguaag

SEQ ID NO: 1158850 - RNA, 19 nt, Artificial Sequence
  Description of Artificial Sequence: Synthetic oligonucleotide
ugugagacgaucgugcugc

SEQ ID NO: 1158851 - RNA, 19 nt, Artificial Sequence
  Description of Artificial Sequence: Synthetic oligonucleotide
uuuauugggcuaacaagga

SEQ ID NO: 1158852 - RNA, 19 nt, Artificial Sequence
  Description of Artificial Sequence: Synthetic oligonucleotide
aaccgucacagcuuuagug

SEQ ID NO: 1158853 - RNA, 19 nt, Artificial Sequence
  Description of Artificial Sequence: Synthetic oligonucleotide
uauaccaaagaguguaccu

SEQ ID NO: 1158854 - RNA, 19 nt, Artificial Sequence
  Description of Artificial Sequence: Synthetic oligonucleotide
aaauauugacaccugugua

SEQ ID NO: 1158855 - RNA, 19 nt, Artificial Sequence
  Description of Artificial Sequence: Synthetic oligonucleotide
agauucacgcacaaagacc

SEQ ID NO: 1158856 - RNA, 19 nt, Artificial Sequence
  Description of Artificial Sequence: Synthetic oligonucleotide
ucauuuccaaguucuauac

SEQ ID NO: 1158857 - RNA, 19 nt, Artificial Sequence
  Description of Artificial Sequence: Synthetic oligonucleotide
agcgauuccggaaauuucc

SEQ ID NO: 1158858 - RNA, 19 nt, Artificial Sequence
  Description of Artificial Sequence: Synthetic oligonucleotide
uagguaagacuuaauacau

SEQ ID NO: 1158859 - RNA, 19 nt, Artificial Sequence
  Description of Artificial Sequence: Synthetic oligonucleotide
ucuucguuaucuguagagg

SEQ ID NO: 1158860 - RNA, 19 nt, Artificial Sequence
  Description of Artificial Sequence: Synthetic oligonucleotide
uucuauaccaaagagugua

SEQ ID NO: 1158861 - RNA, 19 nt, Artificial Sequence
  Description of Artificial Sequence: Synthetic oligonucleotide
cacuacuugaauacaauuc

SEQ ID NO: 1158862 - RNA, 19 nt, Artificial Sequence
  Description of Artificial Sequence: Synthetic oligonucleotide
auuaacucgucuucgggca

SEQ ID NO: 1158863 - RNA, 19 nt, Artificial Sequence
  Description of Artificial Sequence: Synthetic oligonucleotide
aacggcaggagauuacuga

SEQ ID NO: 1158864 - RNA, 19 nt, Artificial Sequence
  Description of Artificial Sequence: Synthetic oligonucleotide
aggaauuugauauuucauu

SEQ ID NO: 1158865 - RNA, 19 nt, Artificial Sequence
  Description of Artificial Sequence: Synthetic oligonucleotide
gauucacgcacaaagacca

SEQ ID NO: 1158866 - RNA, 19 nt, Artificial Sequence
  Description of Artificial Sequence: Synthetic oligonucleotide
agucaugagguaccccucc

SEQ ID NO: 1158867 - RNA, 19 nt, Artificial Sequence
  Description of Artificial Sequence: Synthetic oligonucleotide
aacuugcacaagguggagc

SEQ ID NO: 1158868 - RNA, 19 nt, Artificial Sequence
  Description of Artificial Sequence: Synthetic oligonucleotide
aagaguguaccucaccaaa

SEQ ID NO: 1158869 - RNA, 19 nt, Artificial Sequence
  Description of Artificial Sequence: Synthetic oligonucleotide
cuaagucagauucacgcac

SEQ ID NO: 1158870 - RNA, 19 nt, Artificial Sequence
  Description of Artificial Sequence: Synthetic oligonucleotide
acucuuaccgaugugaaca

SEQ ID NO: 1158871 - RNA, 19 nt, Artificial Sequence
  Description of Artificial Sequence: Synthetic oligonucleotide
ucuaagucagauucacgca

SEQ ID NO: 1158872 - RNA, 19 nt, Artificial Sequence
  Description of Artificial Sequence: Synthetic oligonucleotide
uggauuaacucgucuucgg

SEQ ID NO: 1158873 - RNA, 19 nt, Artificial Sequence
  Description of Artificial Sequence: Synthetic oligonucleotide
auuaguaagagugcaacau

SEQ ID NO: 1158874 - RNA, 19 nt, Artificial Sequence
  Description of Artificial Sequence: Synthetic oligonucleotide
aguguaccucaccaaaguc

SEQ ID NO: 1158875 - RNA, 19 nt, Artificial Sequence
  Description of Artificial Sequence: Synthetic oligonucleotide
aaaacaaccgccagucaug

SEQ ID NO: 1158876 - RNA, 19 nt, Artificial Sequence
  Description of Artificial Sequence: Synthetic oligonucleotide
uccguuuauuuucuucugc

SEQ ID NO: 1158877 - RNA, 19 nt, Artificial Sequence
  Description of Artificial Sequence: Synthetic oligonucleotide
gugaacaucuguauuuccg

SEQ ID NO: 1158878 - RNA, 19 nt, Artificial Sequence
  Description of Artificial Sequence: Synthetic oligonucleotide
agacgcuaagcccaucaac

SEQ ID NO: 1158879 - RNA, 19 nt, Artificial Sequence
  Description of Artificial Sequence: Synthetic oligonucleotide
aggucgacgguauuuucac

SEQ ID NO: 1158880 - RNA, 19 nt, Artificial Sequence
  Description of Artificial Sequence: Synthetic oligonucleotide
gauuacugauagcuguggc

SEQ ID NO: 1158881 - RNA, 19 nt, Artificial Sequence
  Description of Artificial Sequence: Synthetic oligonucleotide
uuaguaagagugcaacaua

SEQ ID NO: 1158882 - RNA, 19 nt, Artificial Sequence
  Description of Artificial Sequence: Synthetic oligonucleotide
ugugacuguaaccuggauu

SEQ ID NO: 1158883 - RNA, 19 nt, Artificial Sequence
  Description of Artificial Sequence: Synthetic oligonucleotide
ugggcuaacaaggaauuug

SEQ ID NO: 1158884 - RNA, 19 nt, Artificial Sequence
  Description of Artificial Sequence: Synthetic oligonucleotide
uccggaaauuuccaucacc

SEQ ID NO: 1158885 - RNA, 19 nt, Artificial Sequence
  Description of Artificial Sequence: Synthetic oligonucleotide
gugacuguaaccuggauua

SEQ ID NO: 1158886 - RNA, 19 nt, Artificial Sequence
  Description of Artificial Sequence: Synthetic oligonucleotide
ucaaccgucacagcuuuag

SEQ ID NO: 1158887 - RNA, 19 nt, Artificial Sequence
  Description of Artificial Sequence: Synthetic oligonucleotide
acaccuguguaacaauaag

SEQ ID NO: 1158888 - RNA, 19 nt, Artificial Sequence
  Description of Artificial Sequence: Synthetic oligonucleotide
uaagucagauucacgcaca

SEQ ID NO: 1158889 - RNA, 19 nt, Artificial Sequence
  Description of Artificial Sequence: Synthetic oligonucleotide
aaagaguguaccucaccaa

SEQ ID NO: 1158890 - RNA, 19 nt, Artificial Sequence
  Description of Artificial Sequence: Synthetic oligonucleotide
cuguggaacuugcacaagg

SEQ ID NO: 1158891 - RNA, 19 nt, Artificial Sequence
  Description of Artificial Sequence: Synthetic oligonucleotide
cucgucuucgggcagagac

SEQ ID NO: 1158892 - RNA, 19 nt, Artificial Sequence
  Description of Artificial Sequence: Synthetic oligonucleotide
agccaagccucuucuagac

SEQ ID NO: 1158893 - RNA, 19 nt, Artificial Sequence
  Description of Artificial Sequence: Synthetic oligonucleotide
cuugaugugacagccaguc

SEQ ID NO: 1158894 - RNA, 19 nt, Artificial Sequence
  Description of Artificial Sequence: Synthetic oligonucleotide
uugacaguaggcugcugag

SEQ ID NO: 1158895 - RNA, 19 nt, Artificial Sequence
  Description of Artificial Sequence: Synthetic oligonucleotide
uaagcgacauaaccuugcc

SEQ ID NO: 1158896 - RNA, 19 nt, Artificial Sequence
  Description of Artificial Sequence: Synthetic oligonucleotide
cucggauucuccaugaaga

SEQ ID NO: 1158897 - RNA, 19 nt, Artificial Sequence
  Description of Artificial Sequence: Synthetic oligonucleotide
ugaucggaguuugaaauac

SEQ ID NO: 1158898 - RNA, 19 nt, Artificial Sequence
  Description of Artificial Sequence: Synthetic oligonucleotide
guucauuccuuugaguuug

SEQ ID NO: 1158899 - RNA, 19 nt, Artificial Sequence
  Description of Artificial Sequence: Synthetic oligonucleotide
acaaccccgacuguggaac

SEQ ID NO: 1158900 - RNA, 19 nt, Artificial Sequence
  Description of Artificial Sequence: Synthetic oligonucleotide
ucuauaccaaagaguguac

SEQ ID NO: 1158901 - RNA, 19 nt, Artificial Sequence
  Description of Artificial Sequence: Synthetic oligonucleotide
uuaugagacacugcgccug

SEQ ID NO: 1158902 - RNA, 19 nt, Artificial Sequence
  Description of Artificial Sequence: Synthetic oligonucleotide
uucucacccacugugaccu

SEQ ID NO: 1158903 - RNA, 19 nt, Artificial Sequence
  Description of Artificial Sequence: Synthetic oligonucleotide
uuuaugagacacugcgccu

SEQ ID NO: 1158904 - RNA, 19 nt, Artificial Sequence
  Description of Artificial Sequence: Synthetic oligonucleotide
ugcgucaccacugacauuu

SEQ ID NO: 1158905 - RNA, 19 nt, Artificial Sequence
  Description of Artificial Sequence: Synthetic oligonucleotide
uaggucgacgguauuuuca

SEQ ID NO: 1158906 - RNA, 19 nt, Artificial Sequence
  Description of Artificial Sequence: Synthetic oligonucleotide
guagugacuuuucaacaug

SEQ ID NO: 1158907 - RNA, 19 nt, Artificial Sequence
  Description of Artificial Sequence: Synthetic oligonucleotide
uuauugggcuaacaaggaa

SEQ ID NO: 1158908 - RNA, 19 nt, Artificial Sequence
  Description of Artificial Sequence: Synthetic oligonucleotide
cuuacucggauucuccaug

SEQ ID NO: 1158909 - RNA, 19 nt, Artificial Sequence
  Description of Artificial Sequence: Synthetic oligonucleotide
ucuuauugagagcuugguu

SEQ ID NO: 1158910 - RNA, 19 nt, Artificial Sequence
  Description of Artificial Sequence: Synthetic oligonucleotide
ugaccugaauucucagucc

SEQ ID NO: 1158911 - RNA, 19 nt, Artificial Sequence
  Description of Artificial Sequence: Synthetic oligonucleotide
gaagacacacugcuucaug

SEQ ID NO: 1158912 - RNA, 19 nt, Artificial Sequence
  Description of Artificial Sequence: Synthetic oligonucleotide
agauuacugauagcugugg

SEQ ID NO: 1158913 - RNA, 19 nt, Artificial Sequence
  Description of Artificial Sequence: Synthetic oligonucleotide
cauaguuaaugaugccgag

SEQ ID NO: 1158914 - RNA, 19 nt, Artificial Sequence
  Description of Artificial Sequence: Synthetic oligonucleotide
ucuguagaggcucucugua

SEQ ID NO: 1158915 - RNA, 19 nt, Artificial Sequence
  Description of Artificial Sequence: Synthetic oligonucleotide
guuaaugaugccgagauau

SEQ ID NO: 1158916 - RNA, 19 nt, Artificial Sequence
  Description of Artificial Sequence: Synthetic oligonucleotide
guguaccucaccaaagucc

SEQ ID NO: 1158917 - RNA, 19 nt, Artificial Sequence
  Description of Artificial Sequence: Synthetic oligonucleotide
ucccuaagauuaguaagag

SEQ ID NO: 1158918 - RNA, 19 nt, Artificial Sequence
  Description of Artificial Sequence: Synthetic oligonucleotide
uuaacucgucuucgggcag

SEQ ID NO: 1158919 - RNA, 19 nt, Artificial Sequence
  Description of Artificial Sequence: Synthetic oligonucleotide
acugcgucaccacugacau

SEQ ID NO: 1158920 - RNA, 19 nt, Artificial Sequence
  Description of Artificial Sequence: Synthetic oligonucleotide
cuauaccaaagaguguacc

SEQ ID NO: 1158921 - RNA, 19 nt, Artificial Sequence
  Description of Artificial Sequence: Synthetic oligonucleotide
uuaccgaugugaacaucug

SEQ ID NO: 1158922 - RNA, 19 nt, Artificial Sequence
  Description of Artificial Sequence: Synthetic oligonucleotide
ggagagaagugguuucucg

SEQ ID NO: 1158923 - RNA, 19 nt, Artificial Sequence
  Description of Artificial Sequence: Synthetic oligonucleotide
cuggauuaacucgucuucg

SEQ ID NO: 1158924 - RNA, 19 nt, Artificial Sequence
  Description of Artificial Sequence: Synthetic oligonucleotide
ucacuacuugaauacaauu

SEQ ID NO: 1158925 - RNA, 19 nt, Artificial Sequence
  Description of Artificial Sequence: Synthetic oligonucleotide
acgguauuuucacuacuug

SEQ ID NO: 1158926 - RNA, 19 nt, Artificial Sequence
  Description of Artificial Sequence: Synthetic oligonucleotide
accuguguaacaauaagau

SEQ ID NO: 1158927 - RNA, 19 nt, Artificial Sequence
  Description of Artificial Sequence: Synthetic oligonucleotide
ugccgagauauuuuguuau

SEQ ID NO: 1158928 - RNA, 19 nt, Artificial Sequence
  Description of Artificial Sequence: Synthetic oligonucleotide
ggaauuugauauuucauua

SEQ ID NO: 1158929 - RNA, 19 nt, Artificial Sequence
  Description of Artificial Sequence: Synthetic oligonucleotide
cugguucuuacucggauuc

SEQ ID NO: 1158930 - RNA, 19 nt, Artificial Sequence
  Description of Artificial Sequence: Synthetic oligonucleotide
ggauuaacucgucuucggg

SEQ ID NO: 1158931 - RNA, 19 nt, Artificial Sequence
  Description of Artificial Sequence: Synthetic oligonucleotide
cugaauucucaguccaaac

SEQ ID NO: 1158932 - RNA, 19 nt, Artificial Sequence
  Description of Artificial Sequence: Synthetic oligonucleotide
gagagaagugguuucucga

SEQ ID NO: 1158933 - RNA, 19 nt, Artificial Sequence
  Description of Artificial Sequence: Synthetic oligonucleotide
uuacucggauucuccauga

SEQ ID NO: 1158934 - RNA, 19 nt, Artificial Sequence
  Description of Artificial Sequence: Synthetic oligonucleotide
guuaucuuugcuccaggga

SEQ ID NO: 1158935 - RNA, 19 nt, Artificial Sequence
  Description of Artificial Sequence: Synthetic oligonucleotide
uucauacuccaugaacggc

SEQ ID NO: 1158936 - RNA, 19 nt, Artificial Sequence
  Description of Artificial Sequence: Synthetic oligonucleotide
gggacuugcuuucucaacc

SEQ ID NO: 1158937 - RNA, 19 nt, Artificial Sequence
  Description of Artificial Sequence: Synthetic oligonucleotide
cauacuccaugaacggcag

SEQ ID NO: 1158938 - RNA, 19 nt, Artificial Sequence
  Description of Artificial Sequence: Synthetic oligonucleotide
ccggaaauuuccaucaccc

SEQ ID NO: 1158939 - RNA, 19 nt, Artificial Sequence
  Description of Artificial Sequence: Synthetic oligonucleotide
aaacaaccgccagucauga

SEQ ID NO: 1158940 - RNA, 19 nt, Artificial Sequence
  Description of Artificial Sequence: Synthetic oligonucleotide
aaccuggauuaacucgucu

SEQ ID NO: 1158941 - RNA, 19 nt, Artificial Sequence
  Description of Artificial Sequence: Synthetic oligonucleotide
gacauuuaugagacacugc

SEQ ID NO: 1158942 - RNA, 19 nt, Artificial Sequence
  Description of Artificial Sequence: Synthetic oligonucleotide
auacaagcucuugagcaag

SEQ ID NO: 1158943 - RNA, 19 nt, Artificial Sequence
  Description of Artificial Sequence: Synthetic oligonucleotide
auaguuaaugaugccgaga

SEQ ID NO: 1158944 - RNA, 19 nt, Artificial Sequence
  Description of Artificial Sequence: Synthetic oligonucleotide
uucuuauugagagcuuggu

SEQ ID NO: 1158945 - RNA, 19 nt, Artificial Sequence
  Description of Artificial Sequence: Synthetic oligonucleotide
gaugugacagccagucaug

SEQ ID NO: 1158946 - RNA, 19 nt, Artificial Sequence
  Description of Artificial Sequence: Synthetic oligonucleotide
uuguguccguuuauuuucu

SEQ ID NO: 1158947 - RNA, 19 nt, Artificial Sequence
  Description of Artificial Sequence: Synthetic oligonucleotide
uaccgaugugaacaucugu

SEQ ID NO: 1158948 - RNA, 19 nt, Artificial Sequence
  Description of Artificial Sequence: Synthetic oligonucleotide
ucuuacucggauucuccau

SEQ ID NO: 1158949 - RNA, 19 nt, Artificial Sequence
  Description of Artificial Sequence: Synthetic oligonucleotide
ugaacggcaggagauuacu

SEQ ID NO: 1158950 - RNA, 19 nt, Artificial Sequence
  Description of Artificial Sequence: Synthetic oligonucleotide
cuuaccgaugugaacaucu

SEQ ID NO: 1158951 - RNA, 19 nt, Artificial Sequence
  Description of Artificial Sequence: Synthetic oligonucleotide
agaaagcggagucaucuua

SEQ ID NO: 1158952 - RNA, 19 nt, Artificial Sequence
  Description of Artificial Sequence: Synthetic oligonucleotide
gaagugguuucucgaauaa

SEQ ID NO: 1158953 - RNA, 19 nt, Artificial Sequence
  Description of Artificial Sequence: Synthetic oligonucleotide
aagucagauucacgcacaa

SEQ ID NO: 1158954 - RNA, 19 nt, Artificial Sequence
  Description of Artificial Sequence: Synthetic oligonucleotide
ccggcauugguaaagcugc

SEQ ID NO: 1158955 - RNA, 19 nt, Artificial Sequence
  Description of Artificial Sequence: Synthetic oligonucleotide
ucacccaugggacuugcuu

SEQ ID NO: 1158956 - RNA, 19 nt, Artificial Sequence
  Description of Artificial Sequence: Synthetic oligonucleotide
ucgacgguauuuucacuac

SEQ ID NO: 1158957 - RNA, 19 nt, Artificial Sequence
  Description of Artificial Sequence: Synthetic oligonucleotide
aucaguugaguguggacuu

SEQ ID NO: 1158958 - RNA, 19 nt, Artificial Sequence
  Description of Artificial Sequence: Synthetic oligonucleotide
ggacuugcuuucucaaccg

SEQ ID NO: 1158959 - RNA, 19 nt, Artificial Sequence
  Description of Artificial Sequence: Synthetic oligonucleotide
aagaaagcggagucaucuu

SEQ ID NO: 1158960 - RNA, 19 nt, Artificial Sequence
  Description of Artificial Sequence: Synthetic oligonucleotide
ucgucuucgggcagagaca

SEQ ID NO: 1158961 - RNA, 19 nt, Artificial Sequence
  Description of Artificial Sequence: Synthetic oligonucleotide
ucguuaucuguagaggcuc

SEQ ID NO: 1158962 - RNA, 19 nt, Artificial Sequence
  Description of Artificial Sequence: Synthetic oligonucleotide
ggagucaucuuaacaaccc

SEQ ID NO: 1158963 - RNA, 19 nt, Artificial Sequence
  Description of Artificial Sequence: Synthetic oligonucleotide
gucccuaagauuaguaaga

SEQ ID NO: 1158964 - RNA, 19 nt, Artificial Sequence
  Description of Artificial Sequence: Synthetic oligonucleotide
guucucacccacugugacc

SEQ ID NO: 1158965 - RNA, 19 nt, Artificial Sequence
  Description of Artificial Sequence: Synthetic oligonucleotide
guagaggcucucuguagug

SEQ ID NO: 1158966 - RNA, 19 nt, Artificial Sequence
  Description of Artificial Sequence: Synthetic oligonucleotide
cuguauuuccgauguccac

SEQ ID NO: 1158967 - RNA, 19 nt, Artificial Sequence
  Description of Artificial Sequence: Synthetic oligonucleotide
accuggauuaacucgucuu

SEQ ID NO: 1158968 - RNA, 19 nt, Artificial Sequence
  Description of Artificial Sequence: Synthetic oligonucleotide
gacuguaaccuggauuaac

SEQ ID NO: 1158969 - RNA, 19 nt, Artificial Sequence
  Description of Artificial Sequence: Synthetic oligonucleotide
aacaaccccgacuguggaa

SEQ ID NO: 1158970 - RNA, 19 nt, Artificial Sequence
  Description of Artificial Sequence: Synthetic oligonucleotide
ucuuaacaaccccgacugu

SEQ ID NO: 1158971 - RNA, 19 nt, Artificial Sequence
  Description of Artificial Sequence: Synthetic oligonucleotide
uucugcaugugagacgauc

SEQ ID NO: 1158972 - RNA, 19 nt, Artificial Sequence
  Description of Artificial Sequence: Synthetic oligonucleotide
ggcaguugacaguaggcug

SEQ ID NO: 1158973 - RNA, 19 nt, Artificial Sequence
  Description of Artificial Sequence: Synthetic oligonucleotide
aacaaccgccagucaugag

SEQ ID NO: 1158974 - RNA, 19 nt, Artificial Sequence
  Description of Artificial Sequence: Synthetic oligonucleotide
cuugaauacaauucacaau

SEQ ID NO: 1158975 - RNA, 19 nt, Artificial Sequence
  Description of Artificial Sequence: Synthetic oligonucleotide
augugagacgaucgugcug

SEQ ID NO: 1158976 - RNA, 19 nt, Artificial Sequence
  Description of Artificial Sequence: Synthetic oligonucleotide
cauugaucggaguuugaaa

SEQ ID NO: 1158977 - RNA, 19 nt, Artificial Sequence
  Description of Artificial Sequence: Synthetic oligonucleotide
agagcgauuccggaaauuu

SEQ ID NO: 1158978 - RNA, 19 nt, Artificial Sequence
  Description of Artificial Sequence: Synthetic oligonucleotide
gcuggcaguugacaguagg

SEQ ID NO: 1158979 - RNA, 19 nt, Artificial Sequence
  Description of Artificial Sequence: Synthetic oligonucleotide
agguuguaacuucuccagu

SEQ ID NO: 1158980 - RNA, 19 nt, Artificial Sequence
  Description of Artificial Sequence: Synthetic oligonucleotide
gucgacgguauuuucacua

SEQ ID NO: 1158981 - RNA, 19 nt, Artificial Sequence
  Description of Artificial Sequence: Synthetic oligonucleotide
acugauagcuguggcguug

SEQ ID NO: 1158982 - RNA, 19 nt, Artificial Sequence
  Description of Artificial Sequence: Synthetic oligonucleotide
guauuuccgauguccacaa

SEQ ID NO: 1158983 - RNA, 19 nt, Artificial Sequence
  Description of Artificial Sequence: Synthetic oligonucleotide
gcauagguaagacuuaaua

SEQ ID NO: 1158984 - RNA, 19 nt, Artificial Sequence
  Description of Artificial Sequence: Synthetic oligonucleotide
gaugccgagauauuuuguu

SEQ ID NO: 1158985 - RNA, 19 nt, Artificial Sequence
  Description of Artificial Sequence: Synthetic oligonucleotide
ggacacgacagcauucccg

SEQ ID NO: 1158986 - RNA, 19 nt, Artificial Sequence
  Description of Artificial Sequence: Synthetic oligonucleotide
agcguucauuccuuugagu

SEQ ID NO: 1158987 - RNA, 19 nt, Artificial Sequence
  Description of Artificial Sequence: Synthetic oligonucleotide
aggagauuacugauagcug

SEQ ID NO: 1158988 - RNA, 19 nt, Artificial Sequence
  Description of Artificial Sequence: Synthetic oligonucleotide
acauguucucacccacugu

SEQ ID NO: 1158989 - RNA, 19 nt, Artificial Sequence
  Description of Artificial Sequence: Synthetic oligonucleotide
guaaccuggauuaacucgu

SEQ ID NO: 1158990 - RNA, 19 nt, Artificial Sequence
  Description of Artificial Sequence: Synthetic oligonucleotide
augaacggcaggagauuac

SEQ ID NO: 1158991 - RNA, 19 nt, Artificial Sequence
  Description of Artificial Sequence: Synthetic oligonucleotide
gucaucuuaacaaccccga

SEQ ID NO: 1158992 - RNA, 19 nt, Artificial Sequence
  Description of Artificial Sequence: Synthetic oligonucleotide
gcaugugagacgaucgugc

SEQ ID NO: 1158993 - RNA, 19 nt, Artificial Sequence
  Description of Artificial Sequence: Synthetic oligonucleotide
guggagcagagcgauuccg

SEQ ID NO: 1158994 - RNA, 19 nt, Artificial Sequence
  Description of Artificial Sequence: Synthetic oligonucleotide
uaaccuggauuaacucguc

SEQ ID NO: 1158995 - RNA, 19 nt, Artificial Sequence
  Description of Artificial Sequence: Synthetic oligonucleotide
accgaugugaacaucugua

SEQ ID NO: 1158996 - RNA, 19 nt, Artificial Sequence
  Description of Artificial Sequence: Synthetic oligonucleotide
augccgagauauuuuguua

SEQ ID NO: 1158997 - RNA, 19 nt, Artificial Sequence
  Description of Artificial Sequence: Synthetic oligonucleotide
cugauagcuguggcguugg

SEQ ID NO: 1158998 - RNA, 19 nt, Artificial Sequence
  Description of Artificial Sequence: Synthetic oligonucleotide
gacaguaggcugcugaguu

SEQ ID NO: 1158999 - RNA, 19 nt, Artificial Sequence
  Description of Artificial Sequence: Synthetic oligonucleotide
caucuuaacaaccccgacu

SEQ ID NO: 1159000 - RNA, 19 nt, Artificial Sequence
  Description of Artificial Sequence: Synthetic oligonucleotide
gcaguugacaguaggcugc

SEQ ID NO: 1159001 - RNA, 19 nt, Artificial Sequence
  Description of Artificial Sequence: Synthetic oligonucleotide
aacucgucuucgggcagag

SEQ ID NO: 1159002 - RNA, 19 nt, Artificial Sequence
  Description of Artificial Sequence: Synthetic oligonucleotide
acgugagcucuuaccaugg

SEQ ID NO: 1159003 - RNA, 19 nt, Artificial Sequence
  Description of Artificial Sequence: Synthetic oligonucleotide
uucauuccuuugaguuuga

SEQ ID NO: 1159004 - RNA, 19 nt, Artificial Sequence
  Description of Artificial Sequence: Synthetic oligonucleotide
uagcauauucaagucucau

SEQ ID NO: 1159005 - RNA, 19 nt, Artificial Sequence
  Description of Artificial Sequence: Synthetic oligonucleotide
caaaacaaccgccagucau

SEQ ID NO: 1159006 - RNA, 19 nt, Artificial Sequence
  Description of Artificial Sequence: Synthetic oligonucleotide
caggggucauugaucggag

SEQ ID NO: 1159007 - RNA, 19 nt, Artificial Sequence
  Description of Artificial Sequence: Synthetic oligonucleotide
auagcauauucaagucuca

SEQ ID NO: 1159008 - RNA, 19 nt, Artificial Sequence
  Description of Artificial Sequence: Synthetic oligonucleotide
gacaccuguguaacaauaa

SEQ ID NO: 1159009 - RNA, 19 nt, Artificial Sequence
  Description of Artificial Sequence: Synthetic oligonucleotide
gaacggcaggagauuacug

SEQ ID NO: 1159010 - RNA, 19 nt, Artificial Sequence
  Description of Artificial Sequence: Synthetic oligonucleotide
ggaggaaaccacugacccc

SEQ ID NO: 1159011 - RNA, 19 nt, Artificial Sequence
  Description of Artificial Sequence: Synthetic oligonucleotide
ugaagacacacugcuucau

SEQ ID NO: 1159012 - RNA, 19 nt, Artificial Sequence
  Description of Artificial Sequence: Synthetic oligonucleotide
cacugcgucaccacugaca

SEQ ID NO: 1159013 - RNA, 19 nt, Artificial Sequence
  Description of Artificial Sequence: Synthetic oligonucleotide
ugacaguaggcugcugagu

SEQ ID NO: 1159014 - RNA, 19 nt, Artificial Sequence
  Description of Artificial Sequence: Synthetic oligonucleotide
cuaggucgacgguauuuuc

SEQ ID NO: 1159015 - RNA, 19 nt, Artificial Sequence
  Description of Artificial Sequence: Synthetic oligonucleotide
acgcuaagcccaucaacau

SEQ ID NO: 1159016 - RNA, 19 nt, Artificial Sequence
  Description of Artificial Sequence: Synthetic oligonucleotide
cugagagaauaaaauccua

SEQ ID NO: 1159017 - RNA, 19 nt, Artificial Sequence
  Description of Artificial Sequence: Synthetic oligonucleotide
aagccucuucuagacaauu

SEQ ID NO: 1159018 - RNA, 19 nt, Artificial Sequence
  Description of Artificial Sequence: Synthetic oligonucleotide
auucacgcacaaagaccac

SEQ ID NO: 1159019 - RNA, 19 nt, Artificial Sequence
  Description of Artificial Sequence: Synthetic oligonucleotide
uguggacuucauacuccau

SEQ ID NO: 1159020 - RNA, 19 nt, Artificial Sequence
  Description of Artificial Sequence: Synthetic oligonucleotide
uacucggauucuccaugaa

SEQ ID NO: 1159021 - RNA, 19 nt, Artificial Sequence
  Description of Artificial Sequence: Synthetic oligonucleotide
gagcgauuccggaaauuuc

SEQ ID NO: 1159022 - RNA, 19 nt, Artificial Sequence
  Description of Artificial Sequence: Synthetic oligonucleotide
uccuaggucgacgguauuu

SEQ ID NO: 1159023 - RNA, 19 nt, Artificial Sequence
  Description of Artificial Sequence: Synthetic oligonucleotide
uaacucgucuucgggcaga

SEQ ID NO: 1159024 - RNA, 19 nt, Artificial Sequence
  Description of Artificial Sequence: Synthetic oligonucleotide
augugacagccagucauga

SEQ ID NO: 1159025 - RNA, 19 nt, Artificial Sequence
  Description of Artificial Sequence: Synthetic oligonucleotide
cucagucugaccacucuua

SEQ ID NO: 1159026 - RNA, 19 nt, Artificial Sequence
  Description of Artificial Sequence: Synthetic oligonucleotide
guaggacacgacagcauuc

SEQ ID NO: 1159027 - RNA, 19 nt, Artificial Sequence
  Description of Artificial Sequence: Synthetic oligonucleotide
gcggagucaucuuaacaac

SEQ ID NO: 1159028 - RNA, 19 nt, Artificial Sequence
  Description of Artificial Sequence: Synthetic oligonucleotide
caguggguacuuggcauag

SEQ ID NO: 1159029 - RNA, 19 nt, Artificial Sequence
  Description of Artificial Sequence: Synthetic oligonucleotide
cagucaugagguaccccuc

SEQ ID NO: 1159030 - RNA, 19 nt, Artificial Sequence
  Description of Artificial Sequence: Synthetic oligonucleotide
ccaaagaguguaccucacc

SEQ ID NO: 1159031 - RNA, 19 nt, Artificial Sequence
  Description of Artificial Sequence: Synthetic oligonucleotide
ugguucuuacucggauucu

SEQ ID NO: 1159032 - RNA, 19 nt, Artificial Sequence
  Description of Artificial Sequence: Synthetic oligonucleotide
ucuuaccgaugugaacauc

SEQ ID NO: 1159033 - RNA, 19 nt, Artificial Sequence
  Description of Artificial Sequence: Synthetic oligonucleotide
gggcuaacaaggaauuuga

SEQ ID NO: 1159034 - RNA, 19 nt, Artificial Sequence
  Description of Artificial Sequence: Synthetic oligonucleotide
cggagucaucuuaacaacc

SEQ ID NO: 1159035 - RNA, 19 nt, Artificial Sequence
  Description of Artificial Sequence: Synthetic oligonucleotide
uacugauagcuguggcguu

SEQ ID NO: 1159036 - RNA, 19 nt, Artificial Sequence
  Description of Artificial Sequence: Synthetic oligonucleotide
gacauaaccuugccugaau

SEQ ID NO: 1159037 - RNA, 19 nt, Artificial Sequence
  Description of Artificial Sequence: Synthetic oligonucleotide
gucuguaaggccugguuuu

SEQ ID NO: 1159038 - RNA, 19 nt, Artificial Sequence
  Description of Artificial Sequence: Synthetic oligonucleotide
caaagaccacugcgucacc

SEQ ID NO: 1159039 - RNA, 19 nt, Artificial Sequence
  Description of Artificial Sequence: Synthetic oligonucleotide
gcagacgcuaagcccauca

SEQ ID NO: 1159040 - RNA, 19 nt, Artificial Sequence
  Description of Artificial Sequence: Synthetic oligonucleotide
ccgucacagcuuuaguggc

SEQ ID NO: 1159041 - RNA, 19 nt, Artificial Sequence
  Description of Artificial Sequence: Synthetic oligonucleotide
ucccggagagaagugguuu

SEQ ID NO: 1159042 - RNA, 19 nt, Artificial Sequence
  Description of Artificial Sequence: Synthetic oligonucleotide
gcgccugguucuuacucgg

SEQ ID NO: 1159043 - RNA, 19 nt, Artificial Sequence
  Description of Artificial Sequence: Synthetic oligonucleotide
uguguccguuuauuuucuu

SEQ ID NO: 1159044 - RNA, 19 nt, Artificial Sequence
  Description of Artificial Sequence: Synthetic oligonucleotide
aggggucauugaucggagu

SEQ ID NO: 1159045 - RNA, 19 nt, Artificial Sequence
  Description of Artificial Sequence: Synthetic oligonucleotide
gcgaucuggaugccucccg

SEQ ID NO: 1159046 - RNA, 19 nt, Artificial Sequence
  Description of Artificial Sequence: Synthetic oligonucleotide
aaguucuuauugagagcuu

SEQ ID NO: 1159047 - RNA, 19 nt, Artificial Sequence
  Description of Artificial Sequence: Synthetic oligonucleotide
gacgguauuuucacuacuu

SEQ ID NO: 1159048 - RNA, 19 nt, Artificial Sequence
  Description of Artificial Sequence: Synthetic oligonucleotide
cauucccgcccagugcggc

SEQ ID NO: 1159049 - RNA, 19 nt, Artificial Sequence
  Description of Artificial Sequence: Synthetic oligonucleotide
aguucacauggcacaggca

SEQ ID NO: 1159050 - RNA, 19 nt, Artificial Sequence
  Description of Artificial Sequence: Synthetic oligonucleotide
caugugagacgaucgugcu

SEQ ID NO: 1159051 - RNA, 19 nt, Artificial Sequence
  Description of Artificial Sequence: Synthetic oligonucleotide
gcaggggucauugaucgga

SEQ ID NO: 1159052 - RNA, 19 nt, Artificial Sequence
  Description of Artificial Sequence: Synthetic oligonucleotide
guggcguuggcuucugccu

SEQ ID NO: 1159053 - RNA, 19 nt, Artificial Sequence
  Description of Artificial Sequence: Synthetic oligonucleotide
agacgaucgugcugcucau

SEQ ID NO: 1159054 - RNA, 19 nt, Artificial Sequence
  Description of Artificial Sequence: Synthetic oligonucleotide
accccgacuguggaacuug

SEQ ID NO: 1159055 - RNA, 19 nt, Artificial Sequence
  Description of Artificial Sequence: Synthetic oligonucleotide
caucacccaugggacuugc

SEQ ID NO: 1159056 - RNA, 19 nt, Artificial Sequence
  Description of Artificial Sequence: Synthetic oligonucleotide
agucagauucacgcacaaa

SEQ ID NO: 1159057 - RNA, 19 nt, Artificial Sequence
  Description of Artificial Sequence: Synthetic oligonucleotide
caauuguguccguuuauuu

SEQ ID NO: 1159058 - RNA, 19 nt, Artificial Sequence
  Description of Artificial Sequence: Synthetic oligonucleotide
gcgacauaaccuugccuga

SEQ ID NO: 1159059 - RNA, 19 nt, Artificial Sequence
  Description of Artificial Sequence: Synthetic oligonucleotide
ccagucaugagguaccccu

SEQ ID NO: 1159060 - RNA, 19 nt, Artificial Sequence
  Description of Artificial Sequence: Synthetic oligonucleotide
agagugcaacauaguauua

SEQ ID NO: 1159061 - RNA, 19 nt, Artificial Sequence
  Description of Artificial Sequence: Synthetic oligonucleotide
gcugcuaaguagaccccug

SEQ ID NO: 1159062 - RNA, 19 nt, Artificial Sequence
  Description of Artificial Sequence: Synthetic oligonucleotide
caacauguucucacccacu

SEQ ID NO: 1159063 - RNA, 19 nt, Artificial Sequence
  Description of Artificial Sequence: Synthetic oligonucleotide
aguugaguguggacuucau

SEQ ID NO: 1159064 - RNA, 19 nt, Artificial Sequence
  Description of Artificial Sequence: Synthetic oligonucleotide
aaccccgacuguggaacuu

SEQ ID NO: 1159065 - RNA, 19 nt, Artificial Sequence
  Description of Artificial Sequence: Synthetic oligonucleotide
uuccuaggucgacgguauu

SEQ ID NO: 1159066 - RNA, 19 nt, Artificial Sequence
  Description of Artificial Sequence: Synthetic oligonucleotide
caccaaagucccuaagauu

SEQ ID NO: 1159067 - RNA, 19 nt, Artificial Sequence
  Description of Artificial Sequence: Synthetic oligonucleotide
augggcuuuuguggucugu

SEQ ID NO: 1159068 - RNA, 19 nt, Artificial Sequence
  Description of Artificial Sequence: Synthetic oligonucleotide
caagguggagcagagcgau

SEQ ID NO: 1159069 - RNA, 19 nt, Artificial Sequence
  Description of Artificial Sequence: Synthetic oligonucleotide
cagacgcuaagcccaucaa

SEQ ID NO: 1159070 - RNA, 19 nt, Artificial Sequence
  Description of Artificial Sequence: Synthetic oligonucleotide
cgcuaagcccaucaacaug

SEQ ID NO: 1159071 - RNA, 19 nt, Artificial Sequence
  Description of Artificial Sequence: Synthetic oligonucleotide
caaagucccuaagauuagu

SEQ ID NO: 1159072 - RNA, 19 nt, Artificial Sequence
  Description of Artificial Sequence: Synthetic oligonucleotide
cacccaugggacuugcuuu

SEQ ID NO: 1159073 - RNA, 19 nt, Artificial Sequence
  Description of Artificial Sequence: Synthetic oligonucleotide
cugcaugugagacgaucgu

SEQ ID NO: 1159074 - RNA, 19 nt, Artificial Sequence
  Description of Artificial Sequence: Synthetic oligonucleotide
ggggucauugaucggaguu

SEQ ID NO: 1159075 - RNA, 19 nt, Artificial Sequence
  Description of Artificial Sequence: Synthetic oligonucleotide
cucuuaccgaugugaacau

SEQ ID NO: 1159076 - RNA, 19 nt, Artificial Sequence
  Description of Artificial Sequence: Synthetic oligonucleotide
acaugacuucuaagucaga

SEQ ID NO: 1159077 - RNA, 19 nt, Artificial Sequence
  Description of Artificial Sequence: Synthetic oligonucleotide
cugcuaaguagaccccugu

SEQ ID NO: 1159078 - RNA, 19 nt, Artificial Sequence
  Description of Artificial Sequence: Synthetic oligonucleotide
cgucuucgggcagagacac

SEQ ID NO: 1159079 - RNA, 19 nt, Artificial Sequence
  Description of Artificial Sequence: Synthetic oligonucleotide
gcgauuccggaaauuucca

SEQ ID NO: 1159080 - RNA, 19 nt, Artificial Sequence
  Description of Artificial Sequence: Synthetic oligonucleotide
gccaagccucuucuagaca

SEQ ID NO: 1159081 - RNA, 19 nt, Artificial Sequence
  Description of Artificial Sequence: Synthetic oligonucleotide
aucacccaugggacuugcu

SEQ ID NO: 1159082 - RNA, 19 nt, Artificial Sequence
  Description of Artificial Sequence: Synthetic oligonucleotide
cggaaauuuccaucaccca

SEQ ID NO: 1159083 - RNA, 19 nt, Artificial Sequence
  Description of Artificial Sequence: Synthetic oligonucleotide
caaccgucacagcuuuagu

SEQ ID NO: 1159084 - RNA, 19 nt, Artificial Sequence
  Description of Artificial Sequence: Synthetic oligonucleotide
caagccucuucuagacaau

SEQ ID NO: 1159085 - RNA, 19 nt, Artificial Sequence
  Description of Artificial Sequence: Synthetic oligonucleotide
ccaugggacuugcuuucuc

SEQ ID NO: 1159086 - RNA, 19 nt, Artificial Sequence
  Description of Artificial Sequence: Synthetic oligonucleotide
ucccagcgaucuggaugcc

SEQ ID NO: 1159087 - RNA, 19 nt, Artificial Sequence
  Description of Artificial Sequence: Synthetic oligonucleotide
ccgagauauuuuguuaucu

SEQ ID NO: 1159088 - RNA, 19 nt, Artificial Sequence
  Description of Artificial Sequence: Synthetic oligonucleotide
gcauucccgcccagugcgg

SEQ ID NO: 1159089 - RNA, 19 nt, Artificial Sequence
  Description of Artificial Sequence: Synthetic oligonucleotide
gcacaagguggagcagagc

SEQ ID NO: 1159090 - RNA, 19 nt, Artificial Sequence
  Description of Artificial Sequence: Synthetic oligonucleotide
cccuaagauuaguaagagu

SEQ ID NO: 1159091 - RNA, 19 nt, Artificial Sequence
  Description of Artificial Sequence: Synthetic oligonucleotide
ggucgacgguauuuucacu

SEQ ID NO: 1159092 - RNA, 19 nt, Artificial Sequence
  Description of Artificial Sequence: Synthetic oligonucleotide
ccgaugugaacaucuguau

SEQ ID NO: 1159093 - RNA, 19 nt, Artificial Sequence
  Description of Artificial Sequence: Synthetic oligonucleotide
ugcggccacgugagcucuu

SEQ ID NO: 1159094 - RNA, 19 nt, Artificial Sequence
  Description of Artificial Sequence: Synthetic oligonucleotide
caguugacaguaggcugcu

SEQ ID NO: 1159095 - RNA, 19 nt, Artificial Sequence
  Description of Artificial Sequence: Synthetic oligonucleotide
caaccccgacuguggaacu

SEQ ID NO: 1159096 - RNA, 19 nt, Artificial Sequence
  Description of Artificial Sequence: Synthetic oligonucleotide
cucuuccuaggucgacggu

SEQ ID NO: 1159097 - RNA, 19 nt, Artificial Sequence
  Description of Artificial Sequence: Synthetic oligonucleotide
ccaucacccaugggacuug

SEQ ID NO: 1159098 - RNA, 19 nt, Artificial Sequence
  Description of Artificial Sequence: Synthetic oligonucleotide
gcugcucauaggagccauc

SEQ ID NO: 1159099 - RNA, 19 nt, Artificial Sequence
  Description of Artificial Sequence: Synthetic oligonucleotide
ccacugcgucaccacugac

SEQ ID NO: 1159100 - RNA, 19 nt, Artificial Sequence
  Description of Artificial Sequence: Synthetic oligonucleotide
guaccucaccaaagucccu

SEQ ID NO: 1159101 - RNA, 19 nt, Artificial Sequence
  Description of Artificial Sequence: Synthetic oligonucleotide
cguucauuccuuugaguuu

SEQ ID NO: 1159102 - RNA, 19 nt, Artificial Sequence
  Description of Artificial Sequence: Synthetic oligonucleotide
acacugcgccugguucuua

SEQ ID NO: 1159103 - RNA, 19 nt, Artificial Sequence
  Description of Artificial Sequence: Synthetic oligonucleotide
ccuaggucgacgguauuuu

SEQ ID NO: 1159104 - RNA, 19 nt, Artificial Sequence
  Description of Artificial Sequence: Synthetic oligonucleotide
cuucugcaugugagacgau

SEQ ID NO: 1159105 - RNA, 19 nt, Artificial Sequence
  Description of Artificial Sequence: Synthetic oligonucleotide
cgacauaaccuugccugaa

SEQ ID NO: 1159106 - RNA, 19 nt, Artificial Sequence
  Description of Artificial Sequence: Synthetic oligonucleotide
ggcagacgcuaagcccauc

SEQ ID NO: 1159107 - RNA, 19 nt, Artificial Sequence
  Description of Artificial Sequence: Synthetic oligonucleotide
cgacgguauuuucacuacu

SEQ ID NO: 1159108 - RNA, 19 nt, Artificial Sequence
  Description of Artificial Sequence: Synthetic oligonucleotide
ccggagagaagugguuucu

SEQ ID NO: 1159109 - RNA, 19 nt, Artificial Sequence
  Description of Artificial Sequence: Synthetic oligonucleotide
cugcgucaccacugacauu

SEQ ID NO: 1159110 - RNA, 19 nt, Artificial Sequence
  Description of Artificial Sequence: Synthetic oligonucleotide
cggccacgugagcucuuac

SEQ ID NO: 1159111 - RNA, 19 nt, Artificial Sequence
  Description of Artificial Sequence: Synthetic oligonucleotide
cgucaccacugacauuuau

SEQ ID NO: 1159112 - RNA, 19 nt, Artificial Sequence
  Description of Artificial Sequence: Synthetic oligonucleotide
cccagcgaucuggaugccu

SEQ ID NO: 1159113 - RNA, 19 nt, Artificial Sequence
  Description of Artificial Sequence: Synthetic oligonucleotide
cccaugggacuugcuuucu

SEQ ID NO: 1159114 - RNA, 19 nt, Artificial Sequence
  Description of Artificial Sequence: Synthetic oligonucleotide
ccgcccagugcggccacgu

SEQ ID NO: 1159115 - RNA, 19 nt, Artificial Sequence
  Description of Artificial Sequence: Synthetic oligonucleotide
aaucacuagggacacagcc

SEQ ID NO: 1159116 - RNA, 19 nt, Artificial Sequence
  Description of Artificial Sequence: Synthetic oligonucleotide
uccaauacggucaauauug

SEQ ID NO: 1159117 - RNA, 19 nt, Artificial Sequence
  Description of Artificial Sequence: Synthetic oligonucleotide
aauauugcucaguacuggc

SEQ ID NO: 1159118 - RNA, 19 nt, Artificial Sequence
  Description of Artificial Sequence: Synthetic oligonucleotide
gacauuaucacagagcagg

SEQ ID NO: 1159119 - RNA, 19 nt, Artificial Sequence
  Description of Artificial Sequence: Synthetic oligonucleotide
aaucacaucaugucccagc

SEQ ID NO: 1159120 - RNA, 19 nt, Artificial Sequence
  Description of Artificial Sequence: Synthetic oligonucleotide
aauacggucaauauugcuc

SEQ ID NO: 1159121 - RNA, 19 nt, Artificial Sequence
  Description of Artificial Sequence: Synthetic oligonucleotide
aaauccaacuuuuauucug

SEQ ID NO: 1159122 - RNA, 19 nt, Artificial Sequence
  Description of Artificial Sequence: Synthetic oligonucleotide
aaaaucacuagggacacag

SEQ ID NO: 1159123 - RNA, 19 nt, Artificial Sequence
  Description of Artificial Sequence: Synthetic oligonucleotide
cuuaaucacaucauguccc

SEQ ID NO: 1159124 - RNA, 19 nt, Artificial Sequence
  Description of Artificial Sequence: Synthetic oligonucleotide
auuaucacagagcagguug

SEQ ID NO: 1159125 - RNA, 19 nt, Artificial Sequence
  Description of Artificial Sequence: Synthetic oligonucleotide
uuucucuagauacagcgug

SEQ ID NO: 1159126 - RNA, 19 nt, Artificial Sequence
  Description of Artificial Sequence: Synthetic oligonucleotide
ugugacauuaucacagagc

SEQ ID NO: 1159127 - RNA, 19 nt, Artificial Sequence
  Description of Artificial Sequence: Synthetic oligonucleotide
aauguauuucugaacauug

SEQ ID NO: 1159128 - RNA, 19 nt, Artificial Sequence
  Description of Artificial Sequence: Synthetic oligonucleotide
uaucgaguuguccaugggg

SEQ ID NO: 1159129 - RNA, 19 nt, Artificial Sequence
  Description of Artificial Sequence: Synthetic oligonucleotide
ugucuuaaucacaucaugu

SEQ ID NO: 1159130 - RNA, 19 nt, Artificial Sequence
  Description of Artificial Sequence: Synthetic oligonucleotide
uauugcucaguacuggccc

SEQ ID NO: 1159131 - RNA, 19 nt, Artificial Sequence
  Description of Artificial Sequence: Synthetic oligonucleotide
agugauuauccacauccgg

SEQ ID NO: 1159132 - RNA, 19 nt, Artificial Sequence
  Description of Artificial Sequence: Synthetic oligonucleotide
ugauuauccacauccggcc

SEQ ID NO: 1159133 - RNA, 19 nt, Artificial Sequence
  Description of Artificial Sequence: Synthetic oligonucleotide
aacuacauucacacggacc

SEQ ID NO: 1159134 - RNA, 19 nt, Artificial Sequence
  Description of Artificial Sequence: Synthetic oligonucleotide
ugcugaaaugcuuacauau

SEQ ID NO: 1159135 - RNA, 19 nt, Artificial Sequence
  Description of Artificial Sequence: Synthetic oligonucleotide
uaaacuugguuggaggagg

SEQ ID NO: 1159136 - RNA, 19 nt, Artificial Sequence
  Description of Artificial Sequence: Synthetic oligonucleotide
agaugugacauuaucacag

SEQ ID NO: 1159137 - RNA, 19 nt, Artificial Sequence
  Description of Artificial Sequence: Synthetic oligonucleotide
ugugugauggugagugugg

SEQ ID NO: 1159138 - RNA, 19 nt, Artificial Sequence
  Description of Artificial Sequence: Synthetic oligonucleotide
aaaugcuuacauaucuggg

SEQ ID NO: 1159139 - RNA, 19 nt, Artificial Sequence
  Description of Artificial Sequence: Synthetic oligonucleotide
auuauccacauccggccgc

SEQ ID NO: 1159140 - RNA, 19 nt, Artificial Sequence
  Description of Artificial Sequence: Synthetic oligonucleotide
ugaggagccugugagaggg

SEQ ID NO: 1159141 - RNA, 19 nt, Artificial Sequence
  Description of Artificial Sequence: Synthetic oligonucleotide
acaugguccgcuccaauac

SEQ ID NO: 1159142 - RNA, 19 nt, Artificial Sequence
  Description of Artificial Sequence: Synthetic oligonucleotide
guugaggggagccaggucc

SEQ ID NO: 1159143 - RNA, 19 nt, Artificial Sequence
  Description of Artificial Sequence: Synthetic oligonucleotide
ucuagauacagcguggggu

SEQ ID NO: 1159144 - RNA, 19 nt, Artificial Sequence
  Description of Artificial Sequence: Synthetic oligonucleotide
ugcgcaucagguaaaugag

SEQ ID NO: 1159145 - RNA, 19 nt, Artificial Sequence
  Description of Artificial Sequence: Synthetic oligonucleotide
cugauugucggguggaggg

SEQ ID NO: 1159146 - RNA, 19 nt, Artificial Sequence
  Description of Artificial Sequence: Synthetic oligonucleotide
augcgcaucagguaaauga

SEQ ID NO: 1159147 - RNA, 19 nt, Artificial Sequence
  Description of Artificial Sequence: Synthetic oligonucleotide
gauaaacuugguuggagga

SEQ ID NO: 1159148 - RNA, 19 nt, Artificial Sequence
  Description of Artificial Sequence: Synthetic oligonucleotide
ccagugauuauccacaucc

SEQ ID NO: 1159149 - RNA, 19 nt, Artificial Sequence
  Description of Artificial Sequence: Synthetic oligonucleotide
auacggucaauauugcuca

SEQ ID NO: 1159150 - RNA, 19 nt, Artificial Sequence
  Description of Artificial Sequence: Synthetic oligonucleotide
ugaggaacuuacuguacag

SEQ ID NO: 1159151 - RNA, 19 nt, Artificial Sequence
  Description of Artificial Sequence: Synthetic oligonucleotide
gagaccagcuucacgaugg

SEQ ID NO: 1159152 - RNA, 19 nt, Artificial Sequence
  Description of Artificial Sequence: Synthetic oligonucleotide
cauaucgaguuguccaugg

SEQ ID NO: 1159153 - RNA, 19 nt, Artificial Sequence
  Description of Artificial Sequence: Synthetic oligonucleotide
uguucugaacuacauucac

SEQ ID NO: 1159154 - RNA, 19 nt, Artificial Sequence
  Description of Artificial Sequence: Synthetic oligonucleotide
ugaagguacugaagcgugg

SEQ ID NO: 1159155 - RNA, 19 nt, Artificial Sequence
  Description of Artificial Sequence: Synthetic oligonucleotide
aaaggucuuggugauccgg

SEQ ID NO: 1159156 - RNA, 19 nt, Artificial Sequence
  Description of Artificial Sequence: Synthetic oligonucleotide
gucaauauugcucaguacu

SEQ ID NO: 1159157 - RNA, 19 nt, Artificial Sequence
  Description of Artificial Sequence: Synthetic oligonucleotide
ugaacgcugggaacugugg

SEQ ID NO: 1159158 - RNA, 19 nt, Artificial Sequence
  Description of Artificial Sequence: Synthetic oligonucleotide
uuaaucacaucauguccca

SEQ ID NO: 1159159 - RNA, 19 nt, Artificial Sequence
  Description of Artificial Sequence: Synthetic oligonucleotide
agacauagcugucugcuca

SEQ ID NO: 1159160 - RNA, 19 nt, Artificial Sequence
  Description of Artificial Sequence: Synthetic oligonucleotide
cuucacgaugggcugaacg

SEQ ID NO: 1159161 - RNA, 19 nt, Artificial Sequence
  Description of Artificial Sequence: Synthetic oligonucleotide
uuaucacagagcagguuga

SEQ ID NO: 1159162 - RNA, 19 nt, Artificial Sequence
  Description of Artificial Sequence: Synthetic oligonucleotide
gauaggaccugcuguguug

SEQ ID NO: 1159163 - RNA, 19 nt, Artificial Sequence
  Description of Artificial Sequence: Synthetic oligonucleotide
agcucgugcacauauuucu

SEQ ID NO: 1159164 - RNA, 19 nt, Artificial Sequence
  Description of Artificial Sequence: Synthetic oligonucleotide
agaacgggagaucagcaga

SEQ ID NO: 1159165 - RNA, 19 nt, Artificial Sequence
  Description of Artificial Sequence: Synthetic oligonucleotide
auaagccagggguacgagg

SEQ ID NO: 1159166 - RNA, 19 nt, Artificial Sequence
  Description of Artificial Sequence: Synthetic oligonucleotide
aauccaacuuuuauucuga

SEQ ID NO: 1159167 - RNA, 19 nt, Artificial Sequence
  Description of Artificial Sequence: Synthetic oligonucleotide
ugucuggacaggcaaggca

SEQ ID NO: 1159168 - RNA, 19 nt, Artificial Sequence
  Description of Artificial Sequence: Synthetic oligonucleotide
gugauuauccacauccggc

SEQ ID NO: 1159169 - RNA, 19 nt, Artificial Sequence
  Description of Artificial Sequence: Synthetic oligonucleotide
uuccacagacagcucgugg

SEQ ID NO: 1159170 - RNA, 19 nt, Artificial Sequence
  Description of Artificial Sequence: Synthetic oligonucleotide
aaaucacuagggacacagc

SEQ ID NO: 1159171 - RNA, 19 nt, Artificial Sequence
  Description of Artificial Sequence: Synthetic oligonucleotide
uucaauaagccagggguac

SEQ ID NO: 1159172 - RNA, 19 nt, Artificial Sequence
  Description of Artificial Sequence: Synthetic oligonucleotide
gagaccacaauguauuucu

SEQ ID NO: 1159173 - RNA, 19 nt, Artificial Sequence
  Description of Artificial Sequence: Synthetic oligonucleotide
aauucuccucgguaggcau

SEQ ID NO: 1159174 - RNA, 19 nt, Artificial Sequence
  Description of Artificial Sequence: Synthetic oligonucleotide
aggaacuuacuguacagua

SEQ ID NO: 1159175 - RNA, 19 nt, Artificial Sequence
  Description of Artificial Sequence: Synthetic oligonucleotide
agcucguggaugcugcggg

SEQ ID NO: 1159176 - RNA, 19 nt, Artificial Sequence
  Description of Artificial Sequence: Synthetic oligonucleotide
gagggcgcagcuuugccag

SEQ ID NO: 1159177 - RNA, 19 nt, Artificial Sequence
  Description of Artificial Sequence: Synthetic oligonucleotide
acauaucugggccacuaga

SEQ ID NO: 1159178 - RNA, 19 nt, Artificial Sequence
  Description of Artificial Sequence: Synthetic oligonucleotide
aggacaucacgauaaacuu

SEQ ID NO: 1159179 - RNA, 19 nt, Artificial Sequence
  Description of Artificial Sequence: Synthetic oligonucleotide
gugagugugguccuguuga

SEQ ID NO: 1159180 - RNA, 19 nt, Artificial Sequence
  Description of Artificial Sequence: Synthetic oligonucleotide
uacagcgugggguugucca

SEQ ID NO: 1159181 - RNA, 19 nt, Artificial Sequence
  Description of Artificial Sequence: Synthetic oligonucleotide
ugcagaacgggagaucagc

SEQ ID NO: 1159182 - RNA, 19 nt, Artificial Sequence
  Description of Artificial Sequence: Synthetic oligonucleotide
auaucgaguuguccauggg

SEQ ID NO: 1159183 - RNA, 19 nt, Artificial Sequence
  Description of Artificial Sequence: Synthetic oligonucleotide
gauugucggguggagggcg

SEQ ID NO: 1159184 - RNA, 19 nt, Artificial Sequence
  Description of Artificial Sequence: Synthetic oligonucleotide
cagugauuauccacauccg

SEQ ID NO: 1159185 - RNA, 19 nt, Artificial Sequence
  Description of Artificial Sequence: Synthetic oligonucleotide
ucagcucgugcacauauuu

SEQ ID NO: 1159186 - RNA, 19 nt, Artificial Sequence
  Description of Artificial Sequence: Synthetic oligonucleotide
agagggucagugugggccg

SEQ ID NO: 1159187 - RNA, 19 nt, Artificial Sequence
  Description of Artificial Sequence: Synthetic oligonucleotide
gagaucagcagaugugaca

SEQ ID NO: 1159188 - RNA, 19 nt, Artificial Sequence
  Description of Artificial Sequence: Synthetic oligonucleotide
gucauuacugcugggauca

SEQ ID NO: 1159189 - RNA, 19 nt, Artificial Sequence
  Description of Artificial Sequence: Synthetic oligonucleotide
cacuagacgggcagcaaag

SEQ ID NO: 1159190 - RNA, 19 nt, Artificial Sequence
  Description of Artificial Sequence: Synthetic oligonucleotide
ugggccacuagacgggcag

SEQ ID NO: 1159191 - RNA, 19 nt, Artificial Sequence
  Description of Artificial Sequence: Synthetic oligonucleotide
cugauagagucccgggucc

SEQ ID NO: 1159192 - RNA, 19 nt, Artificial Sequence
  Description of Artificial Sequence: Synthetic oligonucleotide
uccucgguaggcauccuga

SEQ ID NO: 1159193 - RNA, 19 nt, Artificial Sequence
  Description of Artificial Sequence: Synthetic oligonucleotide
ucggagaugaagguacuga

SEQ ID NO: 1159194 - RNA, 19 nt, Artificial Sequence
  Description of Artificial Sequence: Synthetic oligonucleotide
aaauucuccucgguaggca

SEQ ID NO: 1159195 - RNA, 19 nt, Artificial Sequence
  Description of Artificial Sequence: Synthetic oligonucleotide
aauaagccagggguacgag

SEQ ID NO: 1159196 - RNA, 19 nt, Artificial Sequence
  Description of Artificial Sequence: Synthetic oligonucleotide
uaaaggucuuggugauccg

SEQ ID NO: 1159197 - RNA, 19 nt, Artificial Sequence
  Description of Artificial Sequence: Synthetic oligonucleotide
uuugccaguacuggggcac

SEQ ID NO: 1159198 - RNA, 19 nt, Artificial Sequence
  Description of Artificial Sequence: Synthetic oligonucleotide
cugugagagggucagugug

SEQ ID NO: 1159199 - RNA, 19 nt, Artificial Sequence
  Description of Artificial Sequence: Synthetic oligonucleotide
ucuugguaaaggucuuggu

SEQ ID NO: 1159200 - RNA, 19 nt, Artificial Sequence
  Description of Artificial Sequence: Synthetic oligonucleotide
caugguccgcuccaauacg

SEQ ID NO: 1159201 - RNA, 19 nt, Artificial Sequence
  Description of Artificial Sequence: Synthetic oligonucleotide
uggaaccauaucgaguugu

SEQ ID NO: 1159202 - RNA, 19 nt, Artificial Sequence
  Description of Artificial Sequence: Synthetic oligonucleotide
agagucccggguccguggc

SEQ ID NO: 1159203 - RNA, 19 nt, Artificial Sequence
  Description of Artificial Sequence: Synthetic oligonucleotide
ugcuuacauaucugggcca

SEQ ID NO: 1159204 - RNA, 19 nt, Artificial Sequence
  Description of Artificial Sequence: Synthetic oligonucleotide
cauccggccgcagacauag

SEQ ID NO: 1159205 - RNA, 19 nt, Artificial Sequence
  Description of Artificial Sequence: Synthetic oligonucleotide
acgggagaucagcagaugu

SEQ ID NO: 1159206 - RNA, 19 nt, Artificial Sequence
  Description of Artificial Sequence: Synthetic oligonucleotide
cauccugauugucgggugg

SEQ ID NO: 1159207 - RNA, 19 nt, Artificial Sequence
  Description of Artificial Sequence: Synthetic oligonucleotide
uccggccgcagacauagcu

SEQ ID NO: 1159208 - RNA, 19 nt, Artificial Sequence
  Description of Artificial Sequence: Synthetic oligonucleotide
ugauagagucccggguccg

SEQ ID NO: 1159209 - RNA, 19 nt, Artificial Sequence
  Description of Artificial Sequence: Synthetic oligonucleotide
cagaacgggagaucagcag

SEQ ID NO: 1159210 - RNA, 19 nt, Artificial Sequence
  Description of Artificial Sequence: Synthetic oligonucleotide
caaauucuccucgguaggc

SEQ ID NO: 1159211 - RNA, 19 nt, Artificial Sequence
  Description of Artificial Sequence: Synthetic oligonucleotide
gaacuacauucacacggac

SEQ ID NO: 1159212 - RNA, 19 nt, Artificial Sequence
  Description of Artificial Sequence: Synthetic oligonucleotide
gguacugaagcgugguagc

SEQ ID NO: 1159213 - RNA, 19 nt, Artificial Sequence
  Description of Artificial Sequence: Synthetic oligonucleotide
guugugcugaaaugcuuac

SEQ ID NO: 1159214 - RNA, 19 nt, Artificial Sequence
  Description of Artificial Sequence: Synthetic oligonucleotide
guaaaugagcaaggccagg

SEQ ID NO: 1159215 - RNA, 19 nt, Artificial Sequence
  Description of Artificial Sequence: Synthetic oligonucleotide
aagggagaccacaauguau

SEQ ID NO: 1159216 - RNA, 19 nt, Artificial Sequence
  Description of Artificial Sequence: Synthetic oligonucleotide
uucuccucgguaggcaucc

SEQ ID NO: 1159217 - RNA, 19 nt, Artificial Sequence
  Description of Artificial Sequence: Synthetic oligonucleotide
accauaucgaguuguccau

SEQ ID NO: 1159218 - RNA, 19 nt, Artificial Sequence
  Description of Artificial Sequence: Synthetic oligonucleotide
gggacccaaauucuccucg

SEQ ID NO: 1159219 - RNA, 19 nt, Artificial Sequence
  Description of Artificial Sequence: Synthetic oligonucleotide
auagcugucugcucacaau

SEQ ID NO: 1159220 - RNA, 19 nt, Artificial Sequence
  Description of Artificial Sequence: Synthetic oligonucleotide
cuagacgggcagcaaaguc

SEQ ID NO: 1159221 - RNA, 19 nt, Artificial Sequence
  Description of Artificial Sequence: Synthetic oligonucleotide
cucacacguucuuugugug

SEQ ID NO: 1159222 - RNA, 19 nt, Artificial Sequence
  Description of Artificial Sequence: Synthetic oligonucleotide
agggaggugcuuucuucuc

SEQ ID NO: 1159223 - RNA, 19 nt, Artificial Sequence
  Description of Artificial Sequence: Synthetic oligonucleotide
gaugaggcacuggaagaug

SEQ ID NO: 1159224 - RNA, 19 nt, Artificial Sequence
  Description of Artificial Sequence: Synthetic oligonucleotide
agggacccaaauucuccuc

SEQ ID NO: 1159225 - RNA, 19 nt, Artificial Sequence
  Description of Artificial Sequence: Synthetic oligonucleotide
agcagcucuagcagacacc

SEQ ID NO: 1159226 - RNA, 19 nt, Artificial Sequence
  Description of Artificial Sequence: Synthetic oligonucleotide
ggcugugugauggugagug

SEQ ID NO: 1159227 - RNA, 19 nt, Artificial Sequence
  Description of Artificial Sequence: Synthetic oligonucleotide
ugaggacaucacgauaaac

SEQ ID NO: 1159228 - RNA, 19 nt, Artificial Sequence
  Description of Artificial Sequence: Synthetic oligonucleotide
agguccgguaggcugggag

SEQ ID NO: 1159229 - RNA, 19 nt, Artificial Sequence
  Description of Artificial Sequence: Synthetic oligonucleotide
cugaacgcugggaacugug

SEQ ID NO: 1159230 - RNA, 19 nt, Artificial Sequence
  Description of Artificial Sequence: Synthetic oligonucleotide
cagaugugacauuaucaca

SEQ ID NO: 1159231 - RNA, 19 nt, Artificial Sequence
  Description of Artificial Sequence: Synthetic oligonucleotide
cgauaaacuugguuggagg

SEQ ID NO: 1159232 - RNA, 19 nt, Artificial Sequence
  Description of Artificial Sequence: Synthetic oligonucleotide
ugguagagccugagccagg

SEQ ID NO: 1159233 - RNA, 19 nt, Artificial Sequence
  Description of Artificial Sequence: Synthetic oligonucleotide
agggguacgagggccuggc

SEQ ID NO: 1159234 - RNA, 19 nt, Artificial Sequence
  Description of Artificial Sequence: Synthetic oligonucleotide
cugugugauggugagugug

SEQ ID NO: 1159235 - RNA, 19 nt, Artificial Sequence
  Description of Artificial Sequence: Synthetic oligonucleotide
augguccgcuccaauacgg

SEQ ID NO: 1159236 - RNA, 19 nt, Artificial Sequence
  Description of Artificial Sequence: Synthetic oligonucleotide
agggagaccacaauguauu

SEQ ID NO: 1159237 - RNA, 19 nt, Artificial Sequence
  Description of Artificial Sequence: Synthetic oligonucleotide
ugaagcgugguagcaucug

SEQ ID NO: 1159238 - RNA, 19 nt, Artificial Sequence
  Description of Artificial Sequence: Synthetic oligonucleotide
ucgugcacauauuucucua

SEQ ID NO: 1159239 - RNA, 19 nt, Artificial Sequence
  Description of Artificial Sequence: Synthetic oligonucleotide
gaagggagaccacaaugua

SEQ ID NO: 1159240 - RNA, 19 nt, Artificial Sequence
  Description of Artificial Sequence: Synthetic oligonucleotide
ucaccacaugggagcagag

SEQ ID NO: 1159241 - RNA, 19 nt, Artificial Sequence
  Description of Artificial Sequence: Synthetic oligonucleotide
uacggucaauauugcucag

SEQ ID NO: 1159242 - RNA, 19 nt, Artificial Sequence
  Description of Artificial Sequence: Synthetic oligonucleotide
ugauugucggguggagggc

SEQ ID NO: 1159243 - RNA, 19 nt, Artificial Sequence
  Description of Artificial Sequence: Synthetic oligonucleotide
agaccagcuucacgauggg

SEQ ID NO: 1159244 - RNA, 19 nt, Artificial Sequence
  Description of Artificial Sequence: Synthetic oligonucleotide
ugcggauccguuccccuuc

SEQ ID NO: 1159245 - RNA, 19 nt, Artificial Sequence
  Description of Artificial Sequence: Synthetic oligonucleotide
ucccggagugcccagugau

SEQ ID NO: 1159246 - RNA, 19 nt, Artificial Sequence
  Description of Artificial Sequence: Synthetic oligonucleotide
uggagggcgcagcuuugcc

SEQ ID NO: 1159247 - RNA, 19 nt, Artificial Sequence
  Description of Artificial Sequence: Synthetic oligonucleotide
ucgaguuguccaugggguc

SEQ ID NO: 1159248 - RNA, 19 nt, Artificial Sequence
  Description of Artificial Sequence: Synthetic oligonucleotide
acagcucguggaugcugcg

SEQ ID NO: 1159249 - RNA, 19 nt, Artificial Sequence
  Description of Artificial Sequence: Synthetic oligonucleotide
ggaccuucaauaagccagg

SEQ ID NO: 1159250 - RNA, 19 nt, Artificial Sequence
  Description of Artificial Sequence: Synthetic oligonucleotide
ggacccaaauucuccucgg

SEQ ID NO: 1159251 - RNA, 19 nt, Artificial Sequence
  Description of Artificial Sequence: Synthetic oligonucleotide
gcaucugauagagucccgg

SEQ ID NO: 1159252 - RNA, 19 nt, Artificial Sequence
  Description of Artificial Sequence: Synthetic oligonucleotide
cagcagcucuagcagacac

SEQ ID NO: 1159253 - RNA, 19 nt, Artificial Sequence
  Description of Artificial Sequence: Synthetic oligonucleotide
uccgcuccaauacggucaa

SEQ ID NO: 1159254 - RNA, 19 nt, Artificial Sequence
  Description of Artificial Sequence: Synthetic oligonucleotide
agugcccagugauuaucca

SEQ ID NO: 1159255 - RNA, 19 nt, Artificial Sequence
  Description of Artificial Sequence: Synthetic oligonucleotide
ggcaaggcaauggagccag

SEQ ID NO: 1159256 - RNA, 19 nt, Artificial Sequence
  Description of Artificial Sequence: Synthetic oligonucleotide
ucuggacaggcaaggcaau

SEQ ID NO: 1159257 - RNA, 19 nt, Artificial Sequence
  Description of Artificial Sequence: Synthetic oligonucleotide
ucucuuggccucacaggau

SEQ ID NO: 1159258 - RNA, 19 nt, Artificial Sequence
  Description of Artificial Sequence: Synthetic oligonucleotide
auugucggguggagggcgc

SEQ ID NO: 1159259 - RNA, 19 nt, Artificial Sequence
  Description of Artificial Sequence: Synthetic oligonucleotide
cucacaaugcaggucauua

SEQ ID NO: 1159260 - RNA, 19 nt, Artificial Sequence
  Description of Artificial Sequence: Synthetic oligonucleotide
gguacgagggccuggcuga

SEQ ID NO: 1159261 - RNA, 19 nt, Artificial Sequence
  Description of Artificial Sequence: Synthetic oligonucleotide
guaggcugggagccauuag

SEQ ID NO: 1159262 - RNA, 19 nt, Artificial Sequence
  Description of Artificial Sequence: Synthetic oligonucleotide
auacagcgugggguugucc

SEQ ID NO: 1159263 - RNA, 19 nt, Artificial Sequence
  Description of Artificial Sequence: Synthetic oligonucleotide
aucugcagaacgggagauc

SEQ ID NO: 1159264 - RNA, 19 nt, Artificial Sequence
  Description of Artificial Sequence: Synthetic oligonucleotide
ugaggugcugagggauagg

SEQ ID NO: 1159265 - RNA, 19 nt, Artificial Sequence
  Description of Artificial Sequence: Synthetic oligonucleotide
cccucggagaugaagguac

SEQ ID NO: 1159266 - RNA, 19 nt, Artificial Sequence
  Description of Artificial Sequence: Synthetic oligonucleotide
aggcauccugauugucggg

SEQ ID NO: 1159267 - RNA, 19 nt, Artificial Sequence
  Description of Artificial Sequence: Synthetic oligonucleotide
acauuaucacagagcaggu

SEQ ID NO: 1159268 - RNA, 19 nt, Artificial Sequence
  Description of Artificial Sequence: Synthetic oligonucleotide
caauggaaccauaucgagu

SEQ ID NO: 1159269 - RNA, 19 nt, Artificial Sequence
  Description of Artificial Sequence: Synthetic oligonucleotide
ggucaauauugcucaguac

SEQ ID NO: 1159270 - RNA, 19 nt, Artificial Sequence
  Description of Artificial Sequence: Synthetic oligonucleotide
gucuggacaggcaaggcaa

SEQ ID NO: 1159271 - RNA, 19 nt, Artificial Sequence
  Description of Artificial Sequence: Synthetic oligonucleotide
ucaggcggaaaggggcucc

SEQ ID NO: 1159272 - RNA, 19 nt, Artificial Sequence
  Description of Artificial Sequence: Synthetic oligonucleotide
ugguccgcuccaauacggu

SEQ ID NO: 1159273 - RNA, 19 nt, Artificial Sequence
  Description of Artificial Sequence: Synthetic oligonucleotide
uagauacagcgugggguug

SEQ ID NO: 1159274 - RNA, 19 nt, Artificial Sequence
  Description of Artificial Sequence: Synthetic oligonucleotide
uuugccuuucaggggucca

SEQ ID NO: 1159275 - RNA, 19 nt, Artificial Sequence
  Description of Artificial Sequence: Synthetic oligonucleotide
ccaauacggucaauauugc

SEQ ID NO: 1159276 - RNA, 19 nt, Artificial Sequence
  Description of Artificial Sequence: Synthetic oligonucleotide
agucccggagugcccagug

SEQ ID NO: 1159277 - RNA, 19 nt, Artificial Sequence
  Description of Artificial Sequence: Synthetic oligonucleotide
aucuacccagcucuuggua

SEQ ID NO: 1159278 - RNA, 19 nt, Artificial Sequence
  Description of Artificial Sequence: Synthetic oligonucleotide
uccuguugaccugcugagc

SEQ ID NO: 1159279 - RNA, 19 nt, Artificial Sequence
  Description of Artificial Sequence: Synthetic oligonucleotide
agauacagcgugggguugu

SEQ ID NO: 1159280 - RNA, 19 nt, Artificial Sequence
  Description of Artificial Sequence: Synthetic oligonucleotide
augaggacaucacgauaaa

SEQ ID NO: 1159281 - RNA, 19 nt, Artificial Sequence
  Description of Artificial Sequence: Synthetic oligonucleotide
ccacaauguauuucugaac

SEQ ID NO: 1159282 - RNA, 19 nt, Artificial Sequence
  Description of Artificial Sequence: Synthetic oligonucleotide
agcgugguagcaucugaua

SEQ ID NO: 1159283 - RNA, 19 nt, Artificial Sequence
  Description of Artificial Sequence: Synthetic oligonucleotide
gauccgggacuggauguug

SEQ ID NO: 1159284 - RNA, 19 nt, Artificial Sequence
  Description of Artificial Sequence: Synthetic oligonucleotide
acacguucuuugugugugu

SEQ ID NO: 1159285 - RNA, 19 nt, Artificial Sequence
  Description of Artificial Sequence: Synthetic oligonucleotide
uccugauugucggguggag

SEQ ID NO: 1159286 - RNA, 19 nt, Artificial Sequence
  Description of Artificial Sequence: Synthetic oligonucleotide
ggcacaguguuucaggagu

SEQ ID NO: 1159287 - RNA, 19 nt, Artificial Sequence
  Description of Artificial Sequence: Synthetic oligonucleotide
agcgugggguuguccauca

SEQ ID NO: 1159288 - RNA, 19 nt, Artificial Sequence
  Description of Artificial Sequence: Synthetic oligonucleotide
gguccgguaggcugggagc

SEQ ID NO: 1159289 - RNA, 19 nt, Artificial Sequence
  Description of Artificial Sequence: Synthetic oligonucleotide
cuuuggagucccuggagcu

SEQ ID NO: 1159290 - RNA, 19 nt, Artificial Sequence
  Description of Artificial Sequence: Synthetic oligonucleotide
cugcagaacgggagaucag

SEQ ID NO: 1159291 - RNA, 19 nt, Artificial Sequence
  Description of Artificial Sequence: Synthetic oligonucleotide
gaacgcugggaacuguggu

SEQ ID NO: 1159292 - RNA, 19 nt, Artificial Sequence
  Description of Artificial Sequence: Synthetic oligonucleotide
ggagaccagcuucacgaug

SEQ ID NO: 1159293 - RNA, 19 nt, Artificial Sequence
  Description of Artificial Sequence: Synthetic oligonucleotide
acuagacgggcagcaaagu

SEQ ID NO: 1159294 - RNA, 19 nt, Artificial Sequence
  Description of Artificial Sequence: Synthetic oligonucleotide
cugcaaccuuggcagaauc

SEQ ID NO: 1159295 - RNA, 19 nt, Artificial Sequence
  Description of Artificial Sequence: Synthetic oligonucleotide
acgaugggcugaacgcugg

SEQ ID NO: 1159296 - RNA, 19 nt, Artificial Sequence
  Description of Artificial Sequence: Synthetic oligonucleotide
guccgcuccaauacgguca

SEQ ID NO: 1159297 - RNA, 19 nt, Artificial Sequence
  Description of Artificial Sequence: Synthetic oligonucleotide
uggagaccagcuucacgau

SEQ ID NO: 1159298 - RNA, 19 nt, Artificial Sequence
  Description of Artificial Sequence: Synthetic oligonucleotide
cuagauacagcgugggguu

SEQ ID NO: 1159299 - RNA, 19 nt, Artificial Sequence
  Description of Artificial Sequence: Synthetic oligonucleotide
guccgguaggcugggagcc

SEQ ID NO: 1159300 - RNA, 19 nt, Artificial Sequence
  Description of Artificial Sequence: Synthetic oligonucleotide
ggucuuggugauccgggac

SEQ ID NO: 1159301 - RNA, 19 nt, Artificial Sequence
  Description of Artificial Sequence: Synthetic oligonucleotide
gcugaaaugcuuacauauc

SEQ ID NO: 1159302 - RNA, 19 nt, Artificial Sequence
  Description of Artificial Sequence: Synthetic oligonucleotide
aaggggcucccuccagcaa

SEQ ID NO: 1159303 - RNA, 19 nt, Artificial Sequence
  Description of Artificial Sequence: Synthetic oligonucleotide
gcucaguacuggcccaucc

SEQ ID NO: 1159304 - RNA, 19 nt, Artificial Sequence
  Description of Artificial Sequence: Synthetic oligonucleotide
caauacggucaauauugcu

SEQ ID NO: 1159305 - RNA, 19 nt, Artificial Sequence
  Description of Artificial Sequence: Synthetic oligonucleotide
auccugauugucgggugga

SEQ ID NO: 1159306 - RNA, 19 nt, Artificial Sequence
  Description of Artificial Sequence: Synthetic oligonucleotide
gcuuacauaucugggccac

SEQ ID NO: 1159307 - RNA, 19 nt, Artificial Sequence
  Description of Artificial Sequence: Synthetic oligonucleotide
cucgugcacauauuucucu

SEQ ID NO: 1159308 - RNA, 19 nt, Artificial Sequence
  Description of Artificial Sequence: Synthetic oligonucleotide
cuccucgguaggcauccug

SEQ ID NO: 1159309 - RNA, 19 nt, Artificial Sequence
  Description of Artificial Sequence: Synthetic oligonucleotide
guuccacagacagcucgug

SEQ ID NO: 1159310 - RNA, 19 nt, Artificial Sequence
  Description of Artificial Sequence: Synthetic oligonucleotide
cagcucguggaugcugcgg

SEQ ID NO: 1159311 - RNA, 19 nt, Artificial Sequence
  Description of Artificial Sequence: Synthetic oligonucleotide
caugcgcaucagguaaaug

SEQ ID NO: 1159312 - RNA, 19 nt, Artificial Sequence
  Description of Artificial Sequence: Synthetic oligonucleotide
ugccaguacuggggcacag

SEQ ID NO: 1159313 - RNA, 19 nt, Artificial Sequence
  Description of Artificial Sequence: Synthetic oligonucleotide
ccugauugucggguggagg

SEQ ID NO: 1159314 - RNA, 19 nt, Artificial Sequence
  Description of Artificial Sequence: Synthetic oligonucleotide
gugucuggacaggcaaggc

SEQ ID NO: 1159315 - RNA, 19 nt, Artificial Sequence
  Description of Artificial Sequence: Synthetic oligonucleotide
gcauccugauugucgggug

SEQ ID NO: 1159316 - RNA, 19 nt, Artificial Sequence
  Description of Artificial Sequence: Synthetic oligonucleotide
gauacagcgugggguuguc

SEQ ID NO: 1159317 - RNA, 19 nt, Artificial Sequence
  Description of Artificial Sequence: Synthetic oligonucleotide
ggggcacaguguuucagga

SEQ ID NO: 1159318 - RNA, 19 nt, Artificial Sequence
  Description of Artificial Sequence: Synthetic oligonucleotide
gggucuucucaucuaccca

SEQ ID NO: 1159319 - RNA, 19 nt, Artificial Sequence
  Description of Artificial Sequence: Synthetic oligonucleotide
aggccugcaauggaaccau

SEQ ID NO: 1159320 - RNA, 19 nt, Artificial Sequence
  Description of Artificial Sequence: Synthetic oligonucleotide
ggaaccauaucgaguuguc

SEQ ID NO: 1159321 - RNA, 19 nt, Artificial Sequence
  Description of Artificial Sequence: Synthetic oligonucleotide
gacccaaauucuccucggu

SEQ ID NO: 1159322 - RNA, 19 nt, Artificial Sequence
  Description of Artificial Sequence: Synthetic oligonucleotide
uucaggcggaaaggggcuc

SEQ ID NO: 1159323 - RNA, 19 nt, Artificial Sequence
  Description of Artificial Sequence: Synthetic oligonucleotide
gguccgcuccaauacgguc

SEQ ID NO: 1159324 - RNA, 19 nt, Artificial Sequence
  Description of Artificial Sequence: Synthetic oligonucleotide
uugccaguacuggggcaca

SEQ ID NO: 1159325 - RNA, 19 nt, Artificial Sequence
  Description of Artificial Sequence: Synthetic oligonucleotide
gaacgggagaucagcagau

SEQ ID NO: 1159326 - RNA, 19 nt, Artificial Sequence
  Description of Artificial Sequence: Synthetic oligonucleotide
cacugcggauccguucccc

SEQ ID NO: 1159327 - RNA, 19 nt, Artificial Sequence
  Description of Artificial Sequence: Synthetic oligonucleotide
cugggcccuggccuucacc

SEQ ID NO: 1159328 - RNA, 19 nt, Artificial Sequence
  Description of Artificial Sequence: Synthetic oligonucleotide
caggaucccacacaggcuu

SEQ ID NO: 1159329 - RNA, 19 nt, Artificial Sequence
  Description of Artificial Sequence: Synthetic oligonucleotide
cuucaggcggaaaggggcu

SEQ ID NO: 1159330 - RNA, 19 nt, Artificial Sequence
  Description of Artificial Sequence: Synthetic oligonucleotide
aagucccggagugcccagu

SEQ ID NO: 1159331 - RNA, 19 nt, Artificial Sequence
  Description of Artificial Sequence: Synthetic oligonucleotide
caucacgauaaacuugguu

SEQ ID NO: 1159332 - RNA, 19 nt, Artificial Sequence
  Description of Artificial Sequence: Synthetic oligonucleotide
uugcucaguacuggcccau

SEQ ID NO: 1159333 - RNA, 19 nt, Artificial Sequence
  Description of Artificial Sequence: Synthetic oligonucleotide
cauggggucuucucaucua

SEQ ID NO: 1159334 - RNA, 19 nt, Artificial Sequence
  Description of Artificial Sequence: Synthetic oligonucleotide
gcgcaucagguaaaugagc

SEQ ID NO: 1159335 - RNA, 19 nt, Artificial Sequence
  Description of Artificial Sequence: Synthetic oligonucleotide
cuccaauacggucaauauu

SEQ ID NO: 1159336 - RNA, 19 nt, Artificial Sequence
  Description of Artificial Sequence: Synthetic oligonucleotide
agcuucacgaugggcugaa

SEQ ID NO: 1159337 - RNA, 19 nt, Artificial Sequence
  Description of Artificial Sequence: Synthetic oligonucleotide
cgugguagcaucugauaga

SEQ ID NO: 1159338 - RNA, 19 nt, Artificial Sequence
  Description of Artificial Sequence: Synthetic oligonucleotide
cagggguacgagggccugg

SEQ ID NO: 1159339 - RNA, 19 nt, Artificial Sequence
  Description of Artificial Sequence: Synthetic oligonucleotide
ggaacuuacuguacaguau

SEQ ID NO: 1159340 - RNA, 19 nt, Artificial Sequence
  Description of Artificial Sequence: Synthetic oligonucleotide
acaucacgauaaacuuggu

SEQ ID NO: 1159341 - RNA, 19 nt, Artificial Sequence
  Description of Artificial Sequence: Synthetic oligonucleotide
ugcucaguacuggcccauc

SEQ ID NO: 1159342 - RNA, 19 nt, Artificial Sequence
  Description of Artificial Sequence: Synthetic oligonucleotide
caucuacccagcucuuggu

SEQ ID NO: 1159343 - RNA, 19 nt, Artificial Sequence
  Description of Artificial Sequence: Synthetic oligonucleotide
ccggccgcagacauagcug

SEQ ID NO: 1159344 - RNA, 19 nt, Artificial Sequence
  Description of Artificial Sequence: Synthetic oligonucleotide
ggaguaggcucugcacaug

SEQ ID NO: 1159345 - RNA, 19 nt, Artificial Sequence
  Description of Artificial Sequence: Synthetic oligonucleotide
cguggcaaugcucugcaga

SEQ ID NO: 1159346 - RNA, 19 nt, Artificial Sequence
  Description of Artificial Sequence: Synthetic oligonucleotide
accaugcgcaucagguaaa

SEQ ID NO: 1159347 - RNA, 19 nt, Artificial Sequence
  Description of Artificial Sequence: Synthetic oligonucleotide
gauagagucccggguccgu

SEQ ID NO: 1159348 - RNA, 19 nt, Artificial Sequence
  Description of Artificial Sequence: Synthetic oligonucleotide
caggcggaaaggggcuccc

SEQ ID NO: 1159349 - RNA, 19 nt, Artificial Sequence
  Description of Artificial Sequence: Synthetic oligonucleotide
gguaaaggucuuggugauc

SEQ ID NO: 1159350 - RNA, 19 nt, Artificial Sequence
  Description of Artificial Sequence: Synthetic oligonucleotide
gguugaggggagccagguc

SEQ ID NO: 1159351 - RNA, 19 nt, Artificial Sequence
  Description of Artificial Sequence: Synthetic oligonucleotide
cccucacacguucuuugug

SEQ ID NO: 1159352 - RNA, 19 nt, Artificial Sequence
  Description of Artificial Sequence: Synthetic oligonucleotide
ccauaucgaguuguccaug

SEQ ID NO: 1159353 - RNA, 19 nt, Artificial Sequence
  Description of Artificial Sequence: Synthetic oligonucleotide
uuccgcucucuuggccuca

SEQ ID NO: 1159354 - RNA, 19 nt, Artificial Sequence
  Description of Artificial Sequence: Synthetic oligonucleotide
gcucgugcacauauuucuc

SEQ ID NO: 1159355 - RNA, 19 nt, Artificial Sequence
  Description of Artificial Sequence: Synthetic oligonucleotide
auuagccuuuggagucccu

SEQ ID NO: 1159356 - RNA, 19 nt, Artificial Sequence
  Description of Artificial Sequence: Synthetic oligonucleotide
ccuuuaccuuccccuguug

SEQ ID NO: 1159357 - RNA, 19 nt, Artificial Sequence
  Description of Artificial Sequence: Synthetic oligonucleotide
ggcugaacgcugggaacug

SEQ ID NO: 1159358 - RNA, 19 nt, Artificial Sequence
  Description of Artificial Sequence: Synthetic oligonucleotide
agggcgcagcuuugccagu

SEQ ID NO: 1159359 - RNA, 19 nt, Artificial Sequence
  Description of Artificial Sequence: Synthetic oligonucleotide
cuccuuuaccuuccccugu

SEQ ID NO: 1159360 - RNA, 19 nt, Artificial Sequence
  Description of Artificial Sequence: Synthetic oligonucleotide
gucccggagugcccaguga

SEQ ID NO: 1159361 - RNA, 19 nt, Artificial Sequence
  Description of Artificial Sequence: Synthetic oligonucleotide
cgcagacauagcugucugc

SEQ ID NO: 1159362 - RNA, 19 nt, Artificial Sequence
  Description of Artificial Sequence: Synthetic oligonucleotide
cugagggauaggaccugcu

SEQ ID NO: 1159363 - RNA, 19 nt, Artificial Sequence
  Description of Artificial Sequence: Synthetic oligonucleotide
gaucagcagaugugacauu

SEQ ID NO: 1159364 - RNA, 19 nt, Artificial Sequence
  Description of Artificial Sequence: Synthetic oligonucleotide
gcggauccguuccccuucc

SEQ ID NO: 1159365 - RNA, 19 nt, Artificial Sequence
  Description of Artificial Sequence: Synthetic oligonucleotide
cacguucuuugugugugua

SEQ ID NO: 1159366 - RNA, 19 nt, Artificial Sequence
  Description of Artificial Sequence: Synthetic oligonucleotide
ggcauccugauugucgggu

SEQ ID NO: 1159367 - RNA, 19 nt, Artificial Sequence
  Description of Artificial Sequence: Synthetic oligonucleotide
cauuaucacagagcagguu

SEQ ID NO: 1159368 - RNA, 19 nt, Artificial Sequence
  Description of Artificial Sequence: Synthetic oligonucleotide
cacauccggccgcagacau

SEQ ID NO: 1159369 - RNA, 19 nt, Artificial Sequence
  Description of Artificial Sequence: Synthetic oligonucleotide
ccacuagacgggcagcaaa

SEQ ID NO: 1159370 - RNA, 19 nt, Artificial Sequence
  Description of Artificial Sequence: Synthetic oligonucleotide
auccggccgcagacauagc

SEQ ID NO: 1159371 - RNA, 19 nt, Artificial Sequence
  Description of Artificial Sequence: Synthetic oligonucleotide
ucuccucgguaggcauccu

SEQ ID NO: 1159372 - RNA, 19 nt, Artificial Sequence
  Description of Artificial Sequence: Synthetic oligonucleotide
cggucaauauugcucagua

SEQ ID NO: 1159373 - RNA, 19 nt, Artificial Sequence
  Description of Artificial Sequence: Synthetic oligonucleotide
gguaggcugggagccauua

SEQ ID NO: 1159374 - RNA, 19 nt, Artificial Sequence
  Description of Artificial Sequence: Synthetic oligonucleotide
cuuacauaucugggccacu

SEQ ID NO: 1159375 - RNA, 19 nt, Artificial Sequence
  Description of Artificial Sequence: Synthetic oligonucleotide
gggcugaacgcugggaacu

SEQ ID NO: 1159376 - RNA, 19 nt, Artificial Sequence
  Description of Artificial Sequence: Synthetic oligonucleotide
gcugccccuugaccuuugc

SEQ ID NO: 1159377 - RNA, 19 nt, Artificial Sequence
  Description of Artificial Sequence: Synthetic oligonucleotide
cccggguccguggcaaugc

SEQ ID NO: 1159378 - RNA, 19 nt, Artificial Sequence
  Description of Artificial Sequence: Synthetic oligonucleotide
gccuuucagggguccaucu

SEQ ID NO: 1159379 - RNA, 19 nt, Artificial Sequence
  Description of Artificial Sequence: Synthetic oligonucleotide
cucgguaggcauccugauu

SEQ ID NO: 1159380 - RNA, 19 nt, Artificial Sequence
  Description of Artificial Sequence: Synthetic oligonucleotide
ccgaggcugugugauggug

SEQ ID NO: 1159381 - RNA, 19 nt, Artificial Sequence
  Description of Artificial Sequence: Synthetic oligonucleotide
gcacaguguuucaggagua

SEQ ID NO: 1159382 - RNA, 19 nt, Artificial Sequence
  Description of Artificial Sequence: Synthetic oligonucleotide
gcugugugauggugagugu

SEQ ID NO: 1159383 - RNA, 19 nt, Artificial Sequence
  Description of Artificial Sequence: Synthetic oligonucleotide
acauccggccgcagacaua

SEQ ID NO: 1159384 - RNA, 19 nt, Artificial Sequence
  Description of Artificial Sequence: Synthetic oligonucleotide
ccggagugcccagugauua

SEQ ID NO: 1159385 - RNA, 19 nt, Artificial Sequence
  Description of Artificial Sequence: Synthetic oligonucleotide
cugcggauccguuccccuu

SEQ ID NO: 1159386 - RNA, 19 nt, Artificial Sequence
  Description of Artificial Sequence: Synthetic oligonucleotide
cuccagcaagggaggugcu

SEQ ID NO: 1159387 - RNA, 19 nt, Artificial Sequence
  Description of Artificial Sequence: Synthetic oligonucleotide
gaggagccugugagagggu

SEQ ID NO: 1159388 - RNA, 19 nt, Artificial Sequence
  Description of Artificial Sequence: Synthetic oligonucleotide
ggaucagcucgugcacaua

SEQ ID NO: 1159389 - RNA, 19 nt, Artificial Sequence
  Description of Artificial Sequence: Synthetic oligonucleotide
gccacuagacgggcagcaa

SEQ ID NO: 1159390 - RNA, 19 nt, Artificial Sequence
  Description of Artificial Sequence: Synthetic oligonucleotide
gugugggccgaggcugugu

SEQ ID NO: 1159391 - RNA, 19 nt, Artificial Sequence
  Description of Artificial Sequence: Synthetic oligonucleotide
ggccgcagacauagcuguc

SEQ ID NO: 1159392 - RNA, 19 nt, Artificial Sequence
  Description of Artificial Sequence: Synthetic oligonucleotide
gcuucacgaugggcugaac

SEQ ID NO: 1159393 - RNA, 19 nt, Artificial Sequence
  Description of Artificial Sequence: Synthetic oligonucleotide
cgaguuguccauggggucu

SEQ ID NO: 1159394 - RNA, 19 nt, Artificial Sequence
  Description of Artificial Sequence: Synthetic oligonucleotide
gcugaacgcugggaacugu

SEQ ID NO: 1159395 - RNA, 19 nt, Artificial Sequence
  Description of Artificial Sequence: Synthetic oligonucleotide
cggccgcagacauagcugu

SEQ ID NO: 1159396 - RNA, 19 nt, Artificial Sequence
  Description of Artificial Sequence: Synthetic oligonucleotide
ccuuucagggguccaucuu

SEQ ID NO: 1159397 - RNA, 19 nt, Artificial Sequence
  Description of Artificial Sequence: Synthetic oligonucleotide
gccgaggcugugugauggu

SEQ ID NO: 1159398 - RNA, 19 nt, Artificial Sequence
  Description of Artificial Sequence: Synthetic oligonucleotide
gggguacgagggccuggcu

SEQ ID NO: 1159399 - RNA, 19 nt, Artificial Sequence
  Description of Artificial Sequence: Synthetic oligonucleotide
ccccucggagaugaaggua

SEQ ID NO: 1159400 - RNA, 19 nt, Artificial Sequence
  Description of Artificial Sequence: Synthetic oligonucleotide
cagguccgguaggcuggga

SEQ ID NO: 1159401 - RNA, 19 nt, Artificial Sequence
  Description of Artificial Sequence: Synthetic oligonucleotide
ccaugcgcaucagguaaau

SEQ ID NO: 1159402 - RNA, 19 nt, Artificial Sequence
  Description of Artificial Sequence: Synthetic oligonucleotide
cccggagugcccagugauu

SEQ ID NO: 1159403 - RNA, 19 nt, Artificial Sequence
  Description of Artificial Sequence: Synthetic oligonucleotide
ccccuugaccuuugccuuu

SEQ ID NO: 1159404 - RNA, 19 nt, Artificial Sequence
  Description of Artificial Sequence: Synthetic oligonucleotide
ccgcucucuuggccucaca

SEQ ID NO: 1159405 - RNA, 19 nt, Artificial Sequence
  Description of Artificial Sequence: Synthetic oligonucleotide
ccggguccguggcaaugcu

SEQ ID NO: 1159406 - RNA, 19 nt, Artificial Sequence
  Description of Artificial Sequence: Synthetic oligonucleotide
cggagugcccagugauuau

SEQ ID NO: 1159407 - RNA, 19 nt, Artificial Sequence
  Description of Artificial Sequence: Synthetic oligonucleotide
cggauccguuccccuuccu

SEQ ID NO: 1159408 - RNA, 19 nt, Artificial Sequence
  Description of Artificial Sequence: Synthetic oligonucleotide
ccgcuccaauacggucaau

SEQ ID NO: 1159409 - RNA, 19 nt, Artificial Sequence
  Description of Artificial Sequence: Synthetic oligonucleotide
gacagauaugcauagaugg

SEQ ID NO: 1159410 - RNA, 19 nt, Artificial Sequence
  Description of Artificial Sequence: Synthetic oligonucleotide
ugauaaugaaccaagagcu

SEQ ID NO: 1159411 - RNA, 19 nt, Artificial Sequence
  Description of Artificial Sequence: Synthetic oligonucleotide
auuggaaacggcuauaaac

SEQ ID NO: 1159412 - RNA, 19 nt, Artificial Sequence
  Description of Artificial Sequence: Synthetic oligonucleotide
ugagguauuucucagagag

SEQ ID NO: 1159413 - RNA, 19 nt, Artificial Sequence
  Description of Artificial Sequence: Synthetic oligonucleotide
uacuuaaucaugaaguucc

SEQ ID NO: 1159414 - RNA, 19 nt, Artificial Sequence
  Description of Artificial Sequence: Synthetic oligonucleotide
uaugguaugaguucacugg

SEQ ID NO: 1159415 - RNA, 19 nt, Artificial Sequence
  Description of Artificial Sequence: Synthetic oligonucleotide
ugcauuaacagucauuacc

SEQ ID NO: 1159416 - RNA, 19 nt, Artificial Sequence
  Description of Artificial Sequence: Synthetic oligonucleotide
uugucguauaacuuuaugg

SEQ ID NO: 1159417 - RNA, 19 nt, Artificial Sequence
  Description of Artificial Sequence: Synthetic oligonucleotide
gauuauaguuaucugaaug

SEQ ID NO: 1159418 - RNA, 19 nt, Artificial Sequence
  Description of Artificial Sequence: Synthetic oligonucleotide
agacauaauauccucguac

SEQ ID NO: 1159419 - RNA, 19 nt, Artificial Sequence
  Description of Artificial Sequence: Synthetic oligonucleotide
agaauuagauaauacagca

SEQ ID NO: 1159420 - RNA, 19 nt, Artificial Sequence
  Description of Artificial Sequence: Synthetic oligonucleotide
cuuauugacaguuugaaga

SEQ ID NO: 1159421 - RNA, 19 nt, Artificial Sequence
  Description of Artificial Sequence: Synthetic oligonucleotide
aaugagauuuaacugugug

SEQ ID NO: 1159422 - RNA, 19 nt, Artificial Sequence
  Description of Artificial Sequence: Synthetic oligonucleotide
cugauaaugaaccaagagc

SEQ ID NO: 1159423 - RNA, 19 nt, Artificial Sequence
  Description of Artificial Sequence: Synthetic oligonucleotide
agucauuuaacuugguuuc

SEQ ID NO: 1159424 - RNA, 19 nt, Artificial Sequence
  Description of Artificial Sequence: Synthetic oligonucleotide
aaagaaguaccuucuaugu

SEQ ID NO: 1159425 - RNA, 19 nt, Artificial Sequence
  Description of Artificial Sequence: Synthetic oligonucleotide
agaaauuuacucuucuauc

SEQ ID NO: 1159426 - RNA, 19 nt, Artificial Sequence
  Description of Artificial Sequence: Synthetic oligonucleotide
uccucugagaauuagauaa

SEQ ID NO: 1159427 - RNA, 19 nt, Artificial Sequence
  Description of Artificial Sequence: Synthetic oligonucleotide
aaucgagccacacuaagug

SEQ ID NO: 1159428 - RNA, 19 nt, Artificial Sequence
  Description of Artificial Sequence: Synthetic oligonucleotide
aagcauaccgcuuagccug

SEQ ID NO: 1159429 - RNA, 19 nt, Artificial Sequence
  Description of Artificial Sequence: Synthetic oligonucleotide
aaaccuacuguauuguucu

SEQ ID NO: 1159430 - RNA, 19 nt, Artificial Sequence
  Description of Artificial Sequence: Synthetic oligonucleotide
ucguauaacuuuauggaag

SEQ ID NO: 1159431 - RNA, 19 nt, Artificial Sequence
  Description of Artificial Sequence: Synthetic oligonucleotide
uuacccauagccuucuugg

SEQ ID NO: 1159432 - RNA, 19 nt, Artificial Sequence
  Description of Artificial Sequence: Synthetic oligonucleotide
uuagcaaagacauaauauc

SEQ ID NO: 1159433 - RNA, 19 nt, Artificial Sequence
  Description of Artificial Sequence: Synthetic oligonucleotide
aaagacauaauauccucgu

SEQ ID NO: 1159434 - RNA, 19 nt, Artificial Sequence
  Description of Artificial Sequence: Synthetic oligonucleotide
auaugcauagaugggaucc

SEQ ID NO: 1159435 - RNA, 19 nt, Artificial Sequence
  Description of Artificial Sequence: Synthetic oligonucleotide
ugucguauaacuuuaugga

SEQ ID NO: 1159436 - RNA, 19 nt, Artificial Sequence
  Description of Artificial Sequence: Synthetic oligonucleotide
auaauauccucguacagug

SEQ ID NO: 1159437 - RNA, 19 nt, Artificial Sequence
  Description of Artificial Sequence: Synthetic oligonucleotide
gaaaggaugaagcuaauga

SEQ ID NO: 1159438 - RNA, 19 nt, Artificial Sequence
  Description of Artificial Sequence: Synthetic oligonucleotide
uuuuaauagaacaccuuca

SEQ ID NO: 1159439 - RNA, 19 nt, Artificial Sequence
  Description of Artificial Sequence: Synthetic oligonucleotide
cuuugaguauuccugaggg

SEQ ID NO: 1159440 - RNA, 19 nt, Artificial Sequence
  Description of Artificial Sequence: Synthetic oligonucleotide
uuuaacugugugcuggcgg

SEQ ID NO: 1159441 - RNA, 19 nt, Artificial Sequence
  Description of Artificial Sequence: Synthetic oligonucleotide
aguauuaagaaccauccau

SEQ ID NO: 1159442 - RNA, 19 nt, Artificial Sequence
  Description of Artificial Sequence: Synthetic oligonucleotide
uaaugauugagguauuucu

SEQ ID NO: 1159443 - RNA, 19 nt, Artificial Sequence
  Description of Artificial Sequence: Synthetic oligonucleotide
gaaagcauaccgcuuagcc

SEQ ID NO: 1159444 - RNA, 19 nt, Artificial Sequence
  Description of Artificial Sequence: Synthetic oligonucleotide
auaacuuauugacaguuug

SEQ ID NO: 1159445 - RNA, 19 nt, Artificial Sequence
  Description of Artificial Sequence: Synthetic oligonucleotide
uuuccugagguucaaacac

SEQ ID NO: 1159446 - RNA, 19 nt, Artificial Sequence
  Description of Artificial Sequence: Synthetic oligonucleotide
acuggcggaaaguagaguc

SEQ ID NO: 1159447 - RNA, 19 nt, Artificial Sequence
  Description of Artificial Sequence: Synthetic oligonucleotide
uaucucguaacuccaaggc

SEQ ID NO: 1159448 - RNA, 19 nt, Artificial Sequence
  Description of Artificial Sequence: Synthetic oligonucleotide
uuuauuuggaguguuggug

SEQ ID NO: 1159449 - RNA, 19 nt, Artificial Sequence
  Description of Artificial Sequence: Synthetic oligonucleotide
aaugauugagguauuucuc

SEQ ID NO: 1159450 - RNA, 19 nt, Artificial Sequence
  Description of Artificial Sequence: Synthetic oligonucleotide
uuuaauagaacaccuucau

SEQ ID NO: 1159451 - RNA, 19 nt, Artificial Sequence
  Description of Artificial Sequence: Synthetic oligonucleotide
ugcgauguacauuuggugc

SEQ ID NO: 1159452 - RNA, 19 nt, Artificial Sequence
  Description of Artificial Sequence: Synthetic oligonucleotide
auuaagaaccauccauaac

SEQ ID NO: 1159453 - RNA, 19 nt, Artificial Sequence
  Description of Artificial Sequence: Synthetic oligonucleotide
gcauaaagaaagcauaccg

SEQ ID NO: 1159454 - RNA, 19 nt, Artificial Sequence
  Description of Artificial Sequence: Synthetic oligonucleotide
aaaguaaaauaugaguuau

SEQ ID NO: 1159455 - RNA, 19 nt, Artificial Sequence
  Description of Artificial Sequence: Synthetic oligonucleotide
augguaugaguucacuggc

SEQ ID NO: 1159456 - RNA, 19 nt, Artificial Sequence
  Description of Artificial Sequence: Synthetic oligonucleotide
uugaguauuccugagggag

SEQ ID NO: 1159457 - RNA, 19 nt, Artificial Sequence
  Description of Artificial Sequence: Synthetic oligonucleotide
ugaagcuaaugauugaggu

SEQ ID NO: 1159458 - RNA, 19 nt, Artificial Sequence
  Description of Artificial Sequence: Synthetic oligonucleotide
ggaaaguagagucaggugc

SEQ ID NO: 1159459 - RNA, 19 nt, Artificial Sequence
  Description of Artificial Sequence: Synthetic oligonucleotide
ucuauugggguuuauugcu

SEQ ID NO: 1159460 - RNA, 19 nt, Artificial Sequence
  Description of Artificial Sequence: Synthetic oligonucleotide
gagaauuagauaauacagc

SEQ ID NO: 1159461 - RNA, 19 nt, Artificial Sequence
  Description of Artificial Sequence: Synthetic oligonucleotide
aagguuggagugcauuaac

SEQ ID NO: 1159462 - RNA, 19 nt, Artificial Sequence
  Description of Artificial Sequence: Synthetic oligonucleotide
caaagacauaauauccucg

SEQ ID NO: 1159463 - RNA, 19 nt, Artificial Sequence
  Description of Artificial Sequence: Synthetic oligonucleotide
agauuuaacugugugcugg

SEQ ID NO: 1159464 - RNA, 19 nt, Artificial Sequence
  Description of Artificial Sequence: Synthetic oligonucleotide
cuucacgaagguuacagag

SEQ ID NO: 1159465 - RNA, 19 nt, Artificial Sequence
  Description of Artificial Sequence: Synthetic oligonucleotide
uccgguaugaaauccagac

SEQ ID NO: 1159466 - RNA, 19 nt, Artificial Sequence
  Description of Artificial Sequence: Synthetic oligonucleotide
aagcaaaccuacuguauug

SEQ ID NO: 1159467 - RNA, 19 nt, Artificial Sequence
  Description of Artificial Sequence: Synthetic oligonucleotide
uuacucaaagaucuccuca

SEQ ID NO: 1159468 - RNA, 19 nt, Artificial Sequence
  Description of Artificial Sequence: Synthetic oligonucleotide
uguauagcaaauaucuguu

SEQ ID NO: 1159469 - RNA, 19 nt, Artificial Sequence
  Description of Artificial Sequence: Synthetic oligonucleotide
aacuuacuggaacagcuga

SEQ ID NO: 1159470 - RNA, 19 nt, Artificial Sequence
  Description of Artificial Sequence: Synthetic oligonucleotide
ucugcauaugguaugaguu

SEQ ID NO: 1159471 - RNA, 19 nt, Artificial Sequence
  Description of Artificial Sequence: Synthetic oligonucleotide
gacauugacagcuaaucga

SEQ ID NO: 1159472 - RNA, 19 nt, Artificial Sequence
  Description of Artificial Sequence: Synthetic oligonucleotide
aaguuuagcaauguuggga

SEQ ID NO: 1159473 - RNA, 19 nt, Artificial Sequence
  Description of Artificial Sequence: Synthetic oligonucleotide
agcuguauagcaaauaucu

SEQ ID NO: 1159474 - RNA, 19 nt, Artificial Sequence
  Description of Artificial Sequence: Synthetic oligonucleotide
aaaucucuaagagaaucug

SEQ ID NO: 1159475 - RNA, 19 nt, Artificial Sequence
  Description of Artificial Sequence: Synthetic oligonucleotide
aauaugaguuauaauccug

SEQ ID NO: 1159476 - RNA, 19 nt, Artificial Sequence
  Description of Artificial Sequence: Synthetic oligonucleotide
uguacauuuggugcaacag

SEQ ID NO: 1159477 - RNA, 19 nt, Artificial Sequence
  Description of Artificial Sequence: Synthetic oligonucleotide
ucuaucucguaacuccaag

SEQ ID NO: 1159478 - RNA, 19 nt, Artificial Sequence
  Description of Artificial Sequence: Synthetic oligonucleotide
aggacuguuagcaaaguuc

SEQ ID NO: 1159479 - RNA, 19 nt, Artificial Sequence
  Description of Artificial Sequence: Synthetic oligonucleotide
ucuuacucaaagaucuccu

SEQ ID NO: 1159480 - RNA, 19 nt, Artificial Sequence
  Description of Artificial Sequence: Synthetic oligonucleotide
gacauaauauccucguaca

SEQ ID NO: 1159481 - RNA, 19 nt, Artificial Sequence
  Description of Artificial Sequence: Synthetic oligonucleotide
uggggcaucagucugucca

SEQ ID NO: 1159482 - RNA, 19 nt, Artificial Sequence
  Description of Artificial Sequence: Synthetic oligonucleotide
uuuagcaauguugggaucu

SEQ ID NO: 1159483 - RNA, 19 nt, Artificial Sequence
  Description of Artificial Sequence: Synthetic oligonucleotide
uggccuauuugaauuagca

SEQ ID NO: 1159484 - RNA, 19 nt, Artificial Sequence
  Description of Artificial Sequence: Synthetic oligonucleotide
aaccauccauaacuuauug

SEQ ID NO: 1159485 - RNA, 19 nt, Artificial Sequence
  Description of Artificial Sequence: Synthetic oligonucleotide
acuuauugacaguuugaag

SEQ ID NO: 1159486 - RNA, 19 nt, Artificial Sequence
  Description of Artificial Sequence: Synthetic oligonucleotide
uucgauguuaguacuucug

SEQ ID NO: 1159487 - RNA, 19 nt, Artificial Sequence
  Description of Artificial Sequence: Synthetic oligonucleotide
uucauauucgauguuagua

SEQ ID NO: 1159488 - RNA, 19 nt, Artificial Sequence
  Description of Artificial Sequence: Synthetic oligonucleotide
uucuauguuggcuacuuaa

SEQ ID NO: 1159489 - RNA, 19 nt, Artificial Sequence
  Description of Artificial Sequence: Synthetic oligonucleotide
ucaucaguaggcaaacaaa

SEQ ID NO: 1159490 - RNA, 19 nt, Artificial Sequence
  Description of Artificial Sequence: Synthetic oligonucleotide
aggaucuaucaucaaauca

SEQ ID NO: 1159491 - RNA, 19 nt, Artificial Sequence
  Description of Artificial Sequence: Synthetic oligonucleotide
caacaggcaacagauaagg

SEQ ID NO: 1159492 - RNA, 19 nt, Artificial Sequence
  Description of Artificial Sequence: Synthetic oligonucleotide
agagagcaaaagaaguacc

SEQ ID NO: 1159493 - RNA, 19 nt, Artificial Sequence
  Description of Artificial Sequence: Synthetic oligonucleotide
cuaucucguaacuccaagg

SEQ ID NO: 1159494 - RNA, 19 nt, Artificial Sequence
  Description of Artificial Sequence: Synthetic oligonucleotide
aaguucacauggauagccc

SEQ ID NO: 1159495 - RNA, 19 nt, Artificial Sequence
  Description of Artificial Sequence: Synthetic oligonucleotide
uggcauaaagaaagcauac

SEQ ID NO: 1159496 - RNA, 19 nt, Artificial Sequence
  Description of Artificial Sequence: Synthetic oligonucleotide
auaaugaaccaagagcucu

SEQ ID NO: 1159497 - RNA, 19 nt, Artificial Sequence
  Description of Artificial Sequence: Synthetic oligonucleotide
agcugguucauauucgaug

SEQ ID NO: 1159498 - RNA, 19 nt, Artificial Sequence
  Description of Artificial Sequence: Synthetic oligonucleotide
uggguuggcaccuuuugcc

SEQ ID NO: 1159499 - RNA, 19 nt, Artificial Sequence
  Description of Artificial Sequence: Synthetic oligonucleotide
acgaagguuacagagcagg

SEQ ID NO: 1159500 - RNA, 19 nt, Artificial Sequence
  Description of Artificial Sequence: Synthetic oligonucleotide
ugagguucaaacacuguau

SEQ ID NO: 1159501 - RNA, 19 nt, Artificial Sequence
  Description of Artificial Sequence: Synthetic oligonucleotide
uuaacugugugcuggcgga

SEQ ID NO: 1159502 - RNA, 19 nt, Artificial Sequence
  Description of Artificial Sequence: Synthetic oligonucleotide
acauaauauccucguacag

SEQ ID NO: 1159503 - RNA, 19 nt, Artificial Sequence
  Description of Artificial Sequence: Synthetic oligonucleotide
aacuuauugacaguuugaa

SEQ ID NO: 1159504 - RNA, 19 nt, Artificial Sequence
  Description of Artificial Sequence: Synthetic oligonucleotide
aacagucauuacccauagc

SEQ ID NO: 1159505 - RNA, 19 nt, Artificial Sequence
  Description of Artificial Sequence: Synthetic oligonucleotide
uucuuacucaaagaucucc

SEQ ID NO: 1159506 - RNA, 19 nt, Artificial Sequence
  Description of Artificial Sequence: Synthetic oligonucleotide
uaauauccucguacagugg

SEQ ID NO: 1159507 - RNA, 19 nt, Artificial Sequence
  Description of Artificial Sequence: Synthetic oligonucleotide
cacuucaugauuggaaacg

SEQ ID NO: 1159508 - RNA, 19 nt, Artificial Sequence
  Description of Artificial Sequence: Synthetic oligonucleotide
ugguaaugcauacuggaua

SEQ ID NO: 1159509 - RNA, 19 nt, Artificial Sequence
  Description of Artificial Sequence: Synthetic oligonucleotide
uucaguagcugguucauau

SEQ ID NO: 1159510 - RNA, 19 nt, Artificial Sequence
  Description of Artificial Sequence: Synthetic oligonucleotide
uguaagacgugugaugacu

SEQ ID NO: 1159511 - RNA, 19 nt, Artificial Sequence
  Description of Artificial Sequence: Synthetic oligonucleotide
caucaaaucauucugggua

SEQ ID NO: 1159512 - RNA, 19 nt, Artificial Sequence
  Description of Artificial Sequence: Synthetic oligonucleotide
aaguuccuaacagaggacu

SEQ ID NO: 1159513 - RNA, 19 nt, Artificial Sequence
  Description of Artificial Sequence: Synthetic oligonucleotide
agcuaaucgagccacacua

SEQ ID NO: 1159514 - RNA, 19 nt, Artificial Sequence
  Description of Artificial Sequence: Synthetic oligonucleotide
ucuauguuggcuacuuaau

SEQ ID NO: 1159515 - RNA, 19 nt, Artificial Sequence
  Description of Artificial Sequence: Synthetic oligonucleotide
agugaacaaguuuagcaau

SEQ ID NO: 1159516 - RNA, 19 nt, Artificial Sequence
  Description of Artificial Sequence: Synthetic oligonucleotide
agggucaggaguaacaaag

SEQ ID NO: 1159517 - RNA, 19 nt, Artificial Sequence
  Description of Artificial Sequence: Synthetic oligonucleotide
acauugacagcuaaucgag

SEQ ID NO: 1159518 - RNA, 19 nt, Artificial Sequence
  Description of Artificial Sequence: Synthetic oligonucleotide
uaaucgagccacacuaagu

SEQ ID NO: 1159519 - RNA, 19 nt, Artificial Sequence
  Description of Artificial Sequence: Synthetic oligonucleotide
aaguucccaugacauugac

SEQ ID NO: 1159520 - RNA, 19 nt, Artificial Sequence
  Description of Artificial Sequence: Synthetic oligonucleotide
auggauagcccugaaagug

SEQ ID NO: 1159521 - RNA, 19 nt, Artificial Sequence
  Description of Artificial Sequence: Synthetic oligonucleotide
ucgagccacacuaagugac

SEQ ID NO: 1159522 - RNA, 19 nt, Artificial Sequence
  Description of Artificial Sequence: Synthetic oligonucleotide
caaaccuacuguauuguuc

SEQ ID NO: 1159523 - RNA, 19 nt, Artificial Sequence
  Description of Artificial Sequence: Synthetic oligonucleotide
uuaucugaaugcauacuua

SEQ ID NO: 1159524 - RNA, 19 nt, Artificial Sequence
  Description of Artificial Sequence: Synthetic oligonucleotide
gauuuaacugugugcuggc

SEQ ID NO: 1159525 - RNA, 19 nt, Artificial Sequence
  Description of Artificial Sequence: Synthetic oligonucleotide
augagguagggucaggagu

SEQ ID NO: 1159526 - RNA, 19 nt, Artificial Sequence
  Description of Artificial Sequence: Synthetic oligonucleotide
ugaaugcauacuuaaucau

SEQ ID NO: 1159527 - RNA, 19 nt, Artificial Sequence
  Description of Artificial Sequence: Synthetic oligonucleotide
uggguauauuuuguugucg

SEQ ID NO: 1159528 - RNA, 19 nt, Artificial Sequence
  Description of Artificial Sequence: Synthetic oligonucleotide
auuacccauagccuucuug

SEQ ID NO: 1159529 - RNA, 19 nt, Artificial Sequence
  Description of Artificial Sequence: Synthetic oligonucleotide
aagcuccgguaugaaaucc

SEQ ID NO: 1159530 - RNA, 19 nt, Artificial Sequence
  Description of Artificial Sequence: Synthetic oligonucleotide
agaauucuccguggaaccc

SEQ ID NO: 1159531 - RNA, 19 nt, Artificial Sequence
  Description of Artificial Sequence: Synthetic oligonucleotide
caaguuuagcaauguuggg

SEQ ID NO: 1159532 - RNA, 19 nt, Artificial Sequence
  Description of Artificial Sequence: Synthetic oligonucleotide
uauccucguacaguggagg

SEQ ID NO: 1159533 - RNA, 19 nt, Artificial Sequence
  Description of Artificial Sequence: Synthetic oligonucleotide
uggauagcccugaaaguga

SEQ ID NO: 1159534 - RNA, 19 nt, Artificial Sequence
  Description of Artificial Sequence: Synthetic oligonucleotide
cuaaucgagccacacuaag

SEQ ID NO: 1159535 - RNA, 19 nt, Artificial Sequence
  Description of Artificial Sequence: Synthetic oligonucleotide
uugacagcuaaucgagcca

SEQ ID NO: 1159536 - RNA, 19 nt, Artificial Sequence
  Description of Artificial Sequence: Synthetic oligonucleotide
ucaucaaaucauucugggu

SEQ ID NO: 1159537 - RNA, 19 nt, Artificial Sequence
  Description of Artificial Sequence: Synthetic oligonucleotide
auagcccugaaagugaaca

SEQ ID NO: 1159538 - RNA, 19 nt, Artificial Sequence
  Description of Artificial Sequence: Synthetic oligonucleotide
guuguaagacgugugauga

SEQ ID NO: 1159539 - RNA, 19 nt, Artificial Sequence
  Description of Artificial Sequence: Synthetic oligonucleotide
auaagcuccgguaugaaau

SEQ ID NO: 1159540 - RNA, 19 nt, Artificial Sequence
  Description of Artificial Sequence: Synthetic oligonucleotide
uaacagaggacugcaaacu

SEQ ID NO: 1159541 - RNA, 19 nt, Artificial Sequence
  Description of Artificial Sequence: Synthetic oligonucleotide
guuaggacuguuagcaaag

SEQ ID NO: 1159542 - RNA, 19 nt, Artificial Sequence
  Description of Artificial Sequence: Synthetic oligonucleotide
gcauuaacagucauuaccc

SEQ ID NO: 1159543 - RNA, 19 nt, Artificial Sequence
  Description of Artificial Sequence: Synthetic oligonucleotide
ucacaccucaagacaauga

SEQ ID NO: 1159544 - RNA, 19 nt, Artificial Sequence
  Description of Artificial Sequence: Synthetic oligonucleotide
uaagaaccauccauaacuu

SEQ ID NO: 1159545 - RNA, 19 nt, Artificial Sequence
  Description of Artificial Sequence: Synthetic oligonucleotide
auaugaguuauaauccuga

SEQ ID NO: 1159546 - RNA, 19 nt, Artificial Sequence
  Description of Artificial Sequence: Synthetic oligonucleotide
agucauuacccauagccuu

SEQ ID NO: 1159547 - RNA, 19 nt, Artificial Sequence
  Description of Artificial Sequence: Synthetic oligonucleotide
uuauugcucuaaaaugcau

SEQ ID NO: 1159548 - RNA, 19 nt, Artificial Sequence
  Description of Artificial Sequence: Synthetic oligonucleotide
acuuuauggaagguuggag

SEQ ID NO: 1159549 - RNA, 19 nt, Artificial Sequence
  Description of Artificial Sequence: Synthetic oligonucleotide
aggagaccaacuuggaaga

SEQ ID NO: 1159550 - RNA, 19 nt, Artificial Sequence
  Description of Artificial Sequence: Synthetic oligonucleotide
ucuccuugugaacccuccg

SEQ ID NO: 1159551 - RNA, 19 nt, Artificial Sequence
  Description of Artificial Sequence: Synthetic oligonucleotide
uuugaguauuccugaggga

SEQ ID NO: 1159552 - RNA, 19 nt, Artificial Sequence
  Description of Artificial Sequence: Synthetic oligonucleotide
augaagcuaaugauugagg

SEQ ID NO: 1159553 - RNA, 19 nt, Artificial Sequence
  Description of Artificial Sequence: Synthetic oligonucleotide
guugucguauaacuuuaug

SEQ ID NO: 1159554 - RNA, 19 nt, Artificial Sequence
  Description of Artificial Sequence: Synthetic oligonucleotide
agaaccauccauaacuuau

SEQ ID NO: 1159555 - RNA, 19 nt, Artificial Sequence
  Description of Artificial Sequence: Synthetic oligonucleotide
uccugauaaugaaccaaga

SEQ ID NO: 1159556 - RNA, 19 nt, Artificial Sequence
  Description of Artificial Sequence: Synthetic oligonucleotide
uauucgauguuaguacuuc

SEQ ID NO: 1159557 - RNA, 19 nt, Artificial Sequence
  Description of Artificial Sequence: Synthetic oligonucleotide
gaugacuggaucaaugucu

SEQ ID NO: 1159558 - RNA, 19 nt, Artificial Sequence
  Description of Artificial Sequence: Synthetic oligonucleotide
cuguauagcaaauaucugu

SEQ ID NO: 1159559 - RNA, 19 nt, Artificial Sequence
  Description of Artificial Sequence: Synthetic oligonucleotide
aguaccuucuauguuggcu

SEQ ID NO: 1159560 - RNA, 19 nt, Artificial Sequence
  Description of Artificial Sequence: Synthetic oligonucleotide
auccugauaaugaaccaag

SEQ ID NO: 1159561 - RNA, 19 nt, Artificial Sequence
  Description of Artificial Sequence: Synthetic oligonucleotide
gccuauuugaauuagcaaa

SEQ ID NO: 1159562 - RNA, 19 nt, Artificial Sequence
  Description of Artificial Sequence: Synthetic oligonucleotide
uaugaguuauaauccugau

SEQ ID NO: 1159563 - RNA, 19 nt, Artificial Sequence
  Description of Artificial Sequence: Synthetic oligonucleotide
agcaaagacauaauauccu

SEQ ID NO: 1159564 - RNA, 19 nt, Artificial Sequence
  Description of Artificial Sequence: Synthetic oligonucleotide
acgugugaugacuggauca

SEQ ID NO: 1159565 - RNA, 19 nt, Artificial Sequence
  Description of Artificial Sequence: Synthetic oligonucleotide
caguaggcaaacaaaucuc

SEQ ID NO: 1159566 - RNA, 19 nt, Artificial Sequence
  Description of Artificial Sequence: Synthetic oligonucleotide
ugggcaauaagcuccggua

SEQ ID NO: 1159567 - RNA, 19 nt, Artificial Sequence
  Description of Artificial Sequence: Synthetic oligonucleotide
uccuugugaacccuccggu

SEQ ID NO: 1159568 - RNA, 19 nt, Artificial Sequence
  Description of Artificial Sequence: Synthetic oligonucleotide
uuguugucguauaacuuua

SEQ ID NO: 1159569 - RNA, 19 nt, Artificial Sequence
  Description of Artificial Sequence: Synthetic oligonucleotide
ucgacaaaaggagaccaac

SEQ ID NO: 1159570 - RNA, 19 nt, Artificial Sequence
  Description of Artificial Sequence: Synthetic oligonucleotide
uguauuguucugggaaggc

SEQ ID NO: 1159571 - RNA, 19 nt, Artificial Sequence
  Description of Artificial Sequence: Synthetic oligonucleotide
gauaugcauagaugggauc

SEQ ID NO: 1159572 - RNA, 19 nt, Artificial Sequence
  Description of Artificial Sequence: Synthetic oligonucleotide
auauuuuguugucguauaa

SEQ ID NO: 1159573 - RNA, 19 nt, Artificial Sequence
  Description of Artificial Sequence: Synthetic oligonucleotide
uggugguaaugacacuuug

SEQ ID NO: 1159574 - RNA, 19 nt, Artificial Sequence
  Description of Artificial Sequence: Synthetic oligonucleotide
agaggaucuaucaucaaau

SEQ ID NO: 1159575 - RNA, 19 nt, Artificial Sequence
  Description of Artificial Sequence: Synthetic oligonucleotide
uuggccuauuugaauuagc

SEQ ID NO: 1159576 - RNA, 19 nt, Artificial Sequence
  Description of Artificial Sequence: Synthetic oligonucleotide
acagcuaaucgagccacac

SEQ ID NO: 1159577 - RNA, 19 nt, Artificial Sequence
  Description of Artificial Sequence: Synthetic oligonucleotide
cuuacucaaagaucuccuc

SEQ ID NO: 1159578 - RNA, 19 nt, Artificial Sequence
  Description of Artificial Sequence: Synthetic oligonucleotide
augcucgacaaaaggagac

SEQ ID NO: 1159579 - RNA, 19 nt, Artificial Sequence
  Description of Artificial Sequence: Synthetic oligonucleotide
ugauuauaguuaucugaau

SEQ ID NO: 1159580 - RNA, 19 nt, Artificial Sequence
  Description of Artificial Sequence: Synthetic oligonucleotide
agaaagcauaccgcuuagc

SEQ ID NO: 1159581 - RNA, 19 nt, Artificial Sequence
  Description of Artificial Sequence: Synthetic oligonucleotide
cguauaacuuuauggaagg

SEQ ID NO: 1159582 - RNA, 19 nt, Artificial Sequence
  Description of Artificial Sequence: Synthetic oligonucleotide
uccaagcaaaccuacugua

SEQ ID NO: 1159583 - RNA, 19 nt, Artificial Sequence
  Description of Artificial Sequence: Synthetic oligonucleotide
aagacauaauauccucgua

SEQ ID NO: 1159584 - RNA, 19 nt, Artificial Sequence
  Description of Artificial Sequence: Synthetic oligonucleotide
cuaaugauugagguauuuc

SEQ ID NO: 1159585 - RNA, 19 nt, Artificial Sequence
  Description of Artificial Sequence: Synthetic oligonucleotide
gaagcuaaugauugaggua

SEQ ID NO: 1159586 - RNA, 19 nt, Artificial Sequence
  Description of Artificial Sequence: Synthetic oligonucleotide
uccggucacaccucaagac

SEQ ID NO: 1159587 - RNA, 19 nt, Artificial Sequence
  Description of Artificial Sequence: Synthetic oligonucleotide
gaggaucuaucaucaaauc

SEQ ID NO: 1159588 - RNA, 19 nt, Artificial Sequence
  Description of Artificial Sequence: Synthetic oligonucleotide
aguaggcaaacaaaucucu

SEQ ID NO: 1159589 - RNA, 19 nt, Artificial Sequence
  Description of Artificial Sequence: Synthetic oligonucleotide
ucaaugucucuagucugag

SEQ ID NO: 1159590 - RNA, 19 nt, Artificial Sequence
  Description of Artificial Sequence: Synthetic oligonucleotide
cauugacagcuaaucgagc

SEQ ID NO: 1159591 - RNA, 19 nt, Artificial Sequence
  Description of Artificial Sequence: Synthetic oligonucleotide
auucgauguuaguacuucu

SEQ ID NO: 1159592 - RNA, 19 nt, Artificial Sequence
  Description of Artificial Sequence: Synthetic oligonucleotide
gauaaugaaccaagagcuc

SEQ ID NO: 1159593 - RNA, 19 nt, Artificial Sequence
  Description of Artificial Sequence: Synthetic oligonucleotide
auuuaacugugugcuggcg

SEQ ID NO: 1159594 - RNA, 19 nt, Artificial Sequence
  Description of Artificial Sequence: Synthetic oligonucleotide
aagaaccauccauaacuua

SEQ ID NO: 1159595 - RNA, 19 nt, Artificial Sequence
  Description of Artificial Sequence: Synthetic oligonucleotide
cuuuauggaagguuggagu

SEQ ID NO: 1159596 - RNA, 19 nt, Artificial Sequence
  Description of Artificial Sequence: Synthetic oligonucleotide
aagacgugugaugacugga

SEQ ID NO: 1159597 - RNA, 19 nt, Artificial Sequence
  Description of Artificial Sequence: Synthetic oligonucleotide
agacagauaugcauagaug

SEQ ID NO: 1159598 - RNA, 19 nt, Artificial Sequence
  Description of Artificial Sequence: Synthetic oligonucleotide
gucguauaacuuuauggaa

SEQ ID NO: 1159599 - RNA, 19 nt, Artificial Sequence
  Description of Artificial Sequence: Synthetic oligonucleotide
uaagcuccgguaugaaauc

SEQ ID NO: 1159600 - RNA, 19 nt, Artificial Sequence
  Description of Artificial Sequence: Synthetic oligonucleotide
cugcgauguacauuuggug

SEQ ID NO: 1159601 - RNA, 19 nt, Artificial Sequence
  Description of Artificial Sequence: Synthetic oligonucleotide
ugacagcuaaucgagccac

SEQ ID NO: 1159602 - RNA, 19 nt, Artificial Sequence
  Description of Artificial Sequence: Synthetic oligonucleotide
cuaagugacuuugguaaug

SEQ ID NO: 1159603 - RNA, 19 nt, Artificial Sequence
  Description of Artificial Sequence: Synthetic oligonucleotide
auguuaguacuucugcaua

SEQ ID NO: 1159604 - RNA, 19 nt, Artificial Sequence
  Description of Artificial Sequence: Synthetic oligonucleotide
uggcggaaaguagagucag

SEQ ID NO: 1159605 - RNA, 19 nt, Artificial Sequence
  Description of Artificial Sequence: Synthetic oligonucleotide
cuugugaacccuccgguca

SEQ ID NO: 1159606 - RNA, 19 nt, Artificial Sequence
  Description of Artificial Sequence: Synthetic oligonucleotide
uccguggaaccccugaauu

SEQ ID NO: 1159607 - RNA, 19 nt, Artificial Sequence
  Description of Artificial Sequence: Synthetic oligonucleotide
ugauacaucuaugcacuuc

SEQ ID NO: 1159608 - RNA, 19 nt, Artificial Sequence
  Description of Artificial Sequence: Synthetic oligonucleotide
gugugaacuuacuggaaca

SEQ ID NO: 1159609 - RNA, 19 nt, Artificial Sequence
  Description of Artificial Sequence: Synthetic oligonucleotide
cuauugggguuuauugcuc

SEQ ID NO: 1159610 - RNA, 19 nt, Artificial Sequence
  Description of Artificial Sequence: Synthetic oligonucleotide
cuggguauauuuuguuguc

SEQ ID NO: 1159611 - RNA, 19 nt, Artificial Sequence
  Description of Artificial Sequence: Synthetic oligonucleotide
aguuaucugaaugcauacu

SEQ ID NO: 1159612 - RNA, 19 nt, Artificial Sequence
  Description of Artificial Sequence: Synthetic oligonucleotide
uucuccguggaaccccuga

SEQ ID NO: 1159613 - RNA, 19 nt, Artificial Sequence
  Description of Artificial Sequence: Synthetic oligonucleotide
gcaaagacauaauauccuc

SEQ ID NO: 1159614 - RNA, 19 nt, Artificial Sequence
  Description of Artificial Sequence: Synthetic oligonucleotide
agaugggaucccagcaacc

SEQ ID NO: 1159615 - RNA, 19 nt, Artificial Sequence
  Description of Artificial Sequence: Synthetic oligonucleotide
ugcucgacaaaaggagacc

SEQ ID NO: 1159616 - RNA, 19 nt, Artificial Sequence
  Description of Artificial Sequence: Synthetic oligonucleotide
guaagacgugugaugacug

SEQ ID NO: 1159617 - RNA, 19 nt, Artificial Sequence
  Description of Artificial Sequence: Synthetic oligonucleotide
aggcagucauuuaacuugg

SEQ ID NO: 1159618 - RNA, 19 nt, Artificial Sequence
  Description of Artificial Sequence: Synthetic oligonucleotide
uggaaacggcuauaaacuu

SEQ ID NO: 1159619 - RNA, 19 nt, Artificial Sequence
  Description of Artificial Sequence: Synthetic oligonucleotide
uacccauagccuucuuggc

SEQ ID NO: 1159620 - RNA, 19 nt, Artificial Sequence
  Description of Artificial Sequence: Synthetic oligonucleotide
gaacccuccggucacaccu

SEQ ID NO: 1159621 - RNA, 19 nt, Artificial Sequence
  Description of Artificial Sequence: Synthetic oligonucleotide
guggcaacaucagaggcac

SEQ ID NO: 1159622 - RNA, 19 nt, Artificial Sequence
  Description of Artificial Sequence: Synthetic oligonucleotide
ucaagacaaugagaggauc

SEQ ID NO: 1159623 - RNA, 19 nt, Artificial Sequence
  Description of Artificial Sequence: Synthetic oligonucleotide
cagcuguauagcaaauauc

SEQ ID NO: 1159624 - RNA, 19 nt, Artificial Sequence
  Description of Artificial Sequence: Synthetic oligonucleotide
uuguuguaagacgugugau

SEQ ID NO: 1159625 - RNA, 19 nt, Artificial Sequence
  Description of Artificial Sequence: Synthetic oligonucleotide
aucgagccacacuaaguga

SEQ ID NO: 1159626 - RNA, 19 nt, Artificial Sequence
  Description of Artificial Sequence: Synthetic oligonucleotide
uuguaagacgugugaugac

SEQ ID NO: 1159627 - RNA, 19 nt, Artificial Sequence
  Description of Artificial Sequence: Synthetic oligonucleotide
uguugucguauaacuuuau

SEQ ID NO: 1159628 - RNA, 19 nt, Artificial Sequence
  Description of Artificial Sequence: Synthetic oligonucleotide
ucucuagucugaguggcaa

SEQ ID NO: 1159629 - RNA, 19 nt, Artificial Sequence
  Description of Artificial Sequence: Synthetic oligonucleotide
gacgugugaugacuggauc

SEQ ID NO: 1159630 - RNA, 19 nt, Artificial Sequence
  Description of Artificial Sequence: Synthetic oligonucleotide
cauuuggugcaacaggcaa

SEQ ID NO: 1159631 - RNA, 19 nt, Artificial Sequence
  Description of Artificial Sequence: Synthetic oligonucleotide
gaaaguagagucaggugcu

SEQ ID NO: 1159632 - RNA, 19 nt, Artificial Sequence
  Description of Artificial Sequence: Synthetic oligonucleotide
agauaugcauagaugggau

SEQ ID NO: 1159633 - RNA, 19 nt, Artificial Sequence
  Description of Artificial Sequence: Synthetic oligonucleotide
aaaugagaaagcagcugua

SEQ ID NO: 1159634 - RNA, 19 nt, Artificial Sequence
  Description of Artificial Sequence: Synthetic oligonucleotide
uggcggaaaggaugaagcu

SEQ ID NO: 1159635 - RNA, 19 nt, Artificial Sequence
  Description of Artificial Sequence: Synthetic oligonucleotide
ggaucaaugucucuagucu

SEQ ID NO: 1159636 - RNA, 19 nt, Artificial Sequence
  Description of Artificial Sequence: Synthetic oligonucleotide
aggccuaucuugcucugcu

SEQ ID NO: 1159637 - RNA, 19 nt, Artificial Sequence
  Description of Artificial Sequence: Synthetic oligonucleotide
agcaaaccuacuguauugu

SEQ ID NO: 1159638 - RNA, 19 nt, Artificial Sequence
  Description of Artificial Sequence: Synthetic oligonucleotide
gugacuuugguaaugcaua

SEQ ID NO: 1159639 - RNA, 19 nt, Artificial Sequence
  Description of Artificial Sequence: Synthetic oligonucleotide
ggcauaaagaaagcauacc

SEQ ID NO: 1159640 - RNA, 19 nt, Artificial Sequence
  Description of Artificial Sequence: Synthetic oligonucleotide
cagaggacugcaaacucca

SEQ ID NO: 1159641 - RNA, 19 nt, Artificial Sequence
  Description of Artificial Sequence: Synthetic oligonucleotide
cauuaacagucauuaccca

SEQ ID NO: 1159642 - RNA, 19 nt, Artificial Sequence
  Description of Artificial Sequence: Synthetic oligonucleotide
ggaaacggcuauaaacuug

SEQ ID NO: 1159643 - RNA, 19 nt, Artificial Sequence
  Description of Artificial Sequence: Synthetic oligonucleotide
uauugacaguuugaagaau

SEQ ID NO: 1159644 - RNA, 19 nt, Artificial Sequence
  Description of Artificial Sequence: Synthetic oligonucleotide
cauauucgauguuaguacu

SEQ ID NO: 1159645 - RNA, 19 nt, Artificial Sequence
  Description of Artificial Sequence: Synthetic oligonucleotide
auagccuucuuggcaucac

SEQ ID NO: 1159646 - RNA, 19 nt, Artificial Sequence
  Description of Artificial Sequence: Synthetic oligonucleotide
ccuggguuaggacuguuag

SEQ ID NO: 1159647 - RNA, 19 nt, Artificial Sequence
  Description of Artificial Sequence: Synthetic oligonucleotide
caucaguaggcaaacaaau

SEQ ID NO: 1159648 - RNA, 19 nt, Artificial Sequence
  Description of Artificial Sequence: Synthetic oligonucleotide
aguuccuaacagaggacug

SEQ ID NO: 1159649 - RNA, 19 nt, Artificial Sequence
  Description of Artificial Sequence: Synthetic oligonucleotide
cauaauauccucguacagu

SEQ ID NO: 1159650 - RNA, 19 nt, Artificial Sequence
  Description of Artificial Sequence: Synthetic oligonucleotide
ucauuacccauagccuucu

SEQ ID NO: 1159651 - RNA, 19 nt, Artificial Sequence
  Description of Artificial Sequence: Synthetic oligonucleotide
uaccgcuuagccuggguua

SEQ ID NO: 1159652 - RNA, 19 nt, Artificial Sequence
  Description of Artificial Sequence: Synthetic oligonucleotide
guauauuuuguugucguau

SEQ ID NO: 1159653 - RNA, 19 nt, Artificial Sequence
  Description of Artificial Sequence: Synthetic oligonucleotide
ggaucuaucaucaaaucau

SEQ ID NO: 1159654 - RNA, 19 nt, Artificial Sequence
  Description of Artificial Sequence: Synthetic oligonucleotide
guuggcauaaagaaagcau

SEQ ID NO: 1159655 - RNA, 19 nt, Artificial Sequence
  Description of Artificial Sequence: Synthetic oligonucleotide
auaccgcuuagccuggguu

SEQ ID NO: 1159656 - RNA, 19 nt, Artificial Sequence
  Description of Artificial Sequence: Synthetic oligonucleotide
auccucguacaguggagga

SEQ ID NO: 1159657 - RNA, 19 nt, Artificial Sequence
  Description of Artificial Sequence: Synthetic oligonucleotide
ucuccguggaaccccugaa

SEQ ID NO: 1159658 - RNA, 19 nt, Artificial Sequence
  Description of Artificial Sequence: Synthetic oligonucleotide
gaaggccuaucuugcucug

SEQ ID NO: 1159659 - RNA, 19 nt, Artificial Sequence
  Description of Artificial Sequence: Synthetic oligonucleotide
uagggucaggaguaacaaa

SEQ ID NO: 1159660 - RNA, 19 nt, Artificial Sequence
  Description of Artificial Sequence: Synthetic oligonucleotide
auauccucguacaguggag

SEQ ID NO: 1159661 - RNA, 19 nt, Artificial Sequence
  Description of Artificial Sequence: Synthetic oligonucleotide
gaagguuggagugcauuaa

SEQ ID NO: 1159662 - RNA, 19 nt, Artificial Sequence
  Description of Artificial Sequence: Synthetic oligonucleotide
ucaguagcugguucauauu

SEQ ID NO: 1159663 - RNA, 19 nt, Artificial Sequence
  Description of Artificial Sequence: Synthetic oligonucleotide
uagcugguucauauucgau

SEQ ID NO: 1159664 - RNA, 19 nt, Artificial Sequence
  Description of Artificial Sequence: Synthetic oligonucleotide
gaaucuggacagcugcacu

SEQ ID NO: 1159665 - RNA, 19 nt, Artificial Sequence
  Description of Artificial Sequence: Synthetic oligonucleotide
gucauuacccauagccuuc

SEQ ID NO: 1159666 - RNA, 19 nt, Artificial Sequence
  Description of Artificial Sequence: Synthetic oligonucleotide
gucacaccucaagacaaug

SEQ ID NO: 1159667 - RNA, 19 nt, Artificial Sequence
  Description of Artificial Sequence: Synthetic oligonucleotide
acaccucaagacaaugaga

SEQ ID NO: 1159668 - RNA, 19 nt, Artificial Sequence
  Description of Artificial Sequence: Synthetic oligonucleotide
cuuacuggaacagcugaaa

SEQ ID NO: 1159669 - RNA, 19 nt, Artificial Sequence
  Description of Artificial Sequence: Synthetic oligonucleotide
accgcuuagccuggguuag

SEQ ID NO: 1159670 - RNA, 19 nt, Artificial Sequence
  Description of Artificial Sequence: Synthetic oligonucleotide
cuggcggaaaguagaguca

SEQ ID NO: 1159671 - RNA, 19 nt, Artificial Sequence
  Description of Artificial Sequence: Synthetic oligonucleotide
gcuguauagcaaauaucug

SEQ ID NO: 1159672 - RNA, 19 nt, Artificial Sequence
  Description of Artificial Sequence: Synthetic oligonucleotide
cagucauuacccauagccu

SEQ ID NO: 1159673 - RNA, 19 nt, Artificial Sequence
  Description of Artificial Sequence: Synthetic oligonucleotide
gccacacuaagugacuuug

SEQ ID NO: 1159674 - RNA, 19 nt, Artificial Sequence
  Description of Artificial Sequence: Synthetic oligonucleotide
caugauuggaaacggcuau

SEQ ID NO: 1159675 - RNA, 19 nt, Artificial Sequence
  Description of Artificial Sequence: Synthetic oligonucleotide
auauucgauguuaguacuu

SEQ ID NO: 1159676 - RNA, 19 nt, Artificial Sequence
  Description of Artificial Sequence: Synthetic oligonucleotide
ggugcaacaggcaacagau

SEQ ID NO: 1159677 - RNA, 19 nt, Artificial Sequence
  Description of Artificial Sequence: Synthetic oligonucleotide
cauggauagcccugaaagu

SEQ ID NO: 1159678 - RNA, 19 nt, Artificial Sequence
  Description of Artificial Sequence: Synthetic oligonucleotide
uccucguacaguggaggaa

SEQ ID NO: 1159679 - RNA, 19 nt, Artificial Sequence
  Description of Artificial Sequence: Synthetic oligonucleotide
acuuacuggaacagcugaa

SEQ ID NO: 1159680 - RNA, 19 nt, Artificial Sequence
  Description of Artificial Sequence: Synthetic oligonucleotide
ggugguaaugacacuuuga

SEQ ID NO: 1159681 - RNA, 19 nt, Artificial Sequence
  Description of Artificial Sequence: Synthetic oligonucleotide
caauguugggaucugcgau

SEQ ID NO: 1159682 - RNA, 19 nt, Artificial Sequence
  Description of Artificial Sequence: Synthetic oligonucleotide
gcaauaagcuccgguauga

SEQ ID NO: 1159683 - RNA, 19 nt, Artificial Sequence
  Description of Artificial Sequence: Synthetic oligonucleotide
gagaccaacuuggaagagu

SEQ ID NO: 1159684 - RNA, 19 nt, Artificial Sequence
  Description of Artificial Sequence: Synthetic oligonucleotide
agacgugugaugacuggau

SEQ ID NO: 1159685 - RNA, 19 nt, Artificial Sequence
  Description of Artificial Sequence: Synthetic oligonucleotide
gaauuagcaaagacauaau

SEQ ID NO: 1159686 - RNA, 19 nt, Artificial Sequence
  Description of Artificial Sequence: Synthetic oligonucleotide
agcauaccgcuuagccugg

SEQ ID NO: 1159687 - RNA, 19 nt, Artificial Sequence
  Description of Artificial Sequence: Synthetic oligonucleotide
cucgacaaaaggagaccaa

SEQ ID NO: 1159688 - RNA, 19 nt, Artificial Sequence
  Description of Artificial Sequence: Synthetic oligonucleotide
ggcuauaaacuuguuuuaa

SEQ ID NO: 1159689 - RNA, 19 nt, Artificial Sequence
  Description of Artificial Sequence: Synthetic oligonucleotide
gcggaaaggaugaagcuaa

SEQ ID NO: 1159690 - RNA, 19 nt, Artificial Sequence
  Description of Artificial Sequence: Synthetic oligonucleotide
agccacacuaagugacuuu

SEQ ID NO: 1159691 - RNA, 19 nt, Artificial Sequence
  Description of Artificial Sequence: Synthetic oligonucleotide
guggaaccccugaauucag

SEQ ID NO: 1159692 - RNA, 19 nt, Artificial Sequence
  Description of Artificial Sequence: Synthetic oligonucleotide
agcuccgguaugaaaucca

SEQ ID NO: 1159693 - RNA, 19 nt, Artificial Sequence
  Description of Artificial Sequence: Synthetic oligonucleotide
augauuggaaacggcuaua

SEQ ID NO: 1159694 - RNA, 19 nt, Artificial Sequence
  Description of Artificial Sequence: Synthetic oligonucleotide
guaggcaaacaaaucucua

SEQ ID NO: 1159695 - RNA, 19 nt, Artificial Sequence
  Description of Artificial Sequence: Synthetic oligonucleotide
ugugaacccuccggucaca

SEQ ID NO: 1159696 - RNA, 19 nt, Artificial Sequence
  Description of Artificial Sequence: Synthetic oligonucleotide
uuggugcaacaggcaacag

SEQ ID NO: 1159697 - RNA, 19 nt, Artificial Sequence
  Description of Artificial Sequence: Synthetic oligonucleotide
ccuaacagaggacugcaaa

SEQ ID NO: 1159698 - RNA, 19 nt, Artificial Sequence
  Description of Artificial Sequence: Synthetic oligonucleotide
ucguaacuccaaggcaguc

SEQ ID NO: 1159699 - RNA, 19 nt, Artificial Sequence
  Description of Artificial Sequence: Synthetic oligonucleotide
gggguuuauugcucuaaaa

SEQ ID NO: 1159700 - RNA, 19 nt, Artificial Sequence
  Description of Artificial Sequence: Synthetic oligonucleotide
cuccgguaugaaauccaga

SEQ ID NO: 1159701 - RNA, 19 nt, Artificial Sequence
  Description of Artificial Sequence: Synthetic oligonucleotide
gcucgacaaaaggagacca

SEQ ID NO: 1159702 - RNA, 19 nt, Artificial Sequence
  Description of Artificial Sequence: Synthetic oligonucleotide
uuggaguguuggugguaau

SEQ ID NO: 1159703 - RNA, 19 nt, Artificial Sequence
  Description of Artificial Sequence: Synthetic oligonucleotide
gcuccgguaugaaauccag

SEQ ID NO: 1159704 - RNA, 19 nt, Artificial Sequence
  Description of Artificial Sequence: Synthetic oligonucleotide
guacuucugcauaugguau

SEQ ID NO: 1159705 - RNA, 19 nt, Artificial Sequence
  Description of Artificial Sequence: Synthetic oligonucleotide
gacuuugguaaugcauacu

SEQ ID NO: 1159706 - RNA, 19 nt, Artificial Sequence
  Description of Artificial Sequence: Synthetic oligonucleotide
ccuugugaacccuccgguc

SEQ ID NO: 1159707 - RNA, 19 nt, Artificial Sequence
  Description of Artificial Sequence: Synthetic oligonucleotide
ggagaccaacuuggaagag

SEQ ID NO: 1159708 - RNA, 19 nt, Artificial Sequence
  Description of Artificial Sequence: Synthetic oligonucleotide
ggcggaaaguagagucagg

SEQ ID NO: 1159709 - RNA, 19 nt, Artificial Sequence
  Description of Artificial Sequence: Synthetic oligonucleotide
ccguggaaccccugaauuc

SEQ ID NO: 1159710 - RNA, 19 nt, Artificial Sequence
  Description of Artificial Sequence: Synthetic oligonucleotide
cucguaacuccaaggcagu

SEQ ID NO: 1159711 - RNA, 19 nt, Artificial Sequence
  Description of Artificial Sequence: Synthetic oligonucleotide
ggcggaaaggaugaagcua

SEQ ID NO: 1159712 - RNA, 19 nt, Artificial Sequence
  Description of Artificial Sequence: Synthetic oligonucleotide
ggccuaucuugcucugcug

SEQ ID NO: 1159713 - RNA, 19 nt, Artificial Sequence
  Description of Artificial Sequence: Synthetic oligonucleotide
gugaacccuccggucacac

SEQ ID NO: 1159714 - RNA, 19 nt, Artificial Sequence
  Description of Artificial Sequence: Synthetic oligonucleotide
guuggcaccuuuugccuuu

SEQ ID NO: 1159715 - RNA, 19 nt, Artificial Sequence
  Description of Artificial Sequence: Synthetic oligonucleotide
gcggaaaguagagucaggu

SEQ ID NO: 1159716 - RNA, 19 nt, Artificial Sequence
  Description of Artificial Sequence: Synthetic oligonucleotide
cgucagagacagaaguuca

SEQ ID NO: 1159717 - RNA, 19 nt, Artificial Sequence
  Description of Artificial Sequence: Synthetic oligonucleotide
cuguccaagcaaaccuacu

SEQ ID NO: 1159718 - RNA, 19 nt, Artificial Sequence
  Description of Artificial Sequence: Synthetic oligonucleotide
agagcucuauugggguuua

SEQ ID NO: 1159719 - RNA, 19 nt, Artificial Sequence
  Description of Artificial Sequence: Synthetic oligonucleotide
ccaagagcucuauuggggu

SEQ ID NO: 1159720 - RNA, 19 nt, Artificial Sequence
  Description of Artificial Sequence: Synthetic oligonucleotide
cagcuaaucgagccacacu

SEQ ID NO: 1159721 - RNA, 19 nt, Artificial Sequence
  Description of Artificial Sequence: Synthetic oligonucleotide
gcuaaucgagccacacuaa

SEQ ID NO: 1159722 - RNA, 19 nt, Artificial Sequence
  Description of Artificial Sequence: Synthetic oligonucleotide
caagagcucuauugggguu

SEQ ID NO: 1159723 - RNA, 19 nt, Artificial Sequence
  Description of Artificial Sequence: Synthetic oligonucleotide
cguggaaccccugaauuca

SEQ ID NO: 1159724 - RNA, 19 nt, Artificial Sequence
  Description of Artificial Sequence: Synthetic oligonucleotide
ccucguacaguggaggaaa

SEQ ID NO: 1159725 - RNA, 19 nt, Artificial Sequence
  Description of Artificial Sequence: Synthetic oligonucleotide
aucaugcaugauacaucua

SEQ ID NO: 1159726 - RNA, 19 nt, Artificial Sequence
  Description of Artificial Sequence: Synthetic oligonucleotide
auucuccguggaaccccug

SEQ ID NO: 1159727 - RNA, 19 nt, Artificial Sequence
  Description of Artificial Sequence: Synthetic oligonucleotide
cauaccgcuuagccugggu

SEQ ID NO: 1159728 - RNA, 19 nt, Artificial Sequence
  Description of Artificial Sequence: Synthetic oligonucleotide
cuccguggaaccccugaau

SEQ ID NO: 1159729 - RNA, 19 nt, Artificial Sequence
  Description of Artificial Sequence: Synthetic oligonucleotide
cucguacaguggaggaaau

SEQ ID NO: 1159730 - RNA, 19 nt, Artificial Sequence
  Description of Artificial Sequence: Synthetic oligonucleotide
gcauaccgcuuagccuggg

SEQ ID NO: 1159731 - RNA, 19 nt, Artificial Sequence
  Description of Artificial Sequence: Synthetic oligonucleotide
gugugaugacuggaucaau

SEQ ID NO: 1159732 - RNA, 19 nt, Artificial Sequence
  Description of Artificial Sequence: Synthetic oligonucleotide
cggcuauaaacuuguuuua

SEQ ID NO: 1159733 - RNA, 19 nt, Artificial Sequence
  Description of Artificial Sequence: Synthetic oligonucleotide
cacuggcggaaaguagagu

SEQ ID NO: 1159734 - RNA, 19 nt, Artificial Sequence
  Description of Artificial Sequence: Synthetic oligonucleotide
gggaucugcgauguacauu

SEQ ID NO: 1159735 - RNA, 19 nt, Artificial Sequence
  Description of Artificial Sequence: Synthetic oligonucleotide
ccgcuuagccuggguuagg

SEQ ID NO: 1159736 - RNA, 19 nt, Artificial Sequence
  Description of Artificial Sequence: Synthetic oligonucleotide
ggucacaccucaagacaau

SEQ ID NO: 1159737 - RNA, 19 nt, Artificial Sequence
  Description of Artificial Sequence: Synthetic oligonucleotide
gccuggguuaggacuguua

SEQ ID NO: 1159738 - RNA, 19 nt, Artificial Sequence
  Description of Artificial Sequence: Synthetic oligonucleotide
cgcuuagccuggguuagga

SEQ ID NO: 1159739 - RNA, 19 nt, Artificial Sequence
  Description of Artificial Sequence: Synthetic oligonucleotide
cauuacccauagccuucuu

SEQ ID NO: 1159740 - RNA, 19 nt, Artificial Sequence
  Description of Artificial Sequence: Synthetic oligonucleotide
cccuccggucacaccucaa

SEQ ID NO: 1159741 - RNA, 19 nt, Artificial Sequence
  Description of Artificial Sequence: Synthetic oligonucleotide
agaucugucauauauacac

SEQ ID NO: 1159742 - RNA, 19 nt, Artificial Sequence
  Description of Artificial Sequence: Synthetic oligonucleotide
aaugucgaaagucaguguc

SEQ ID NO: 1159743 - RNA, 19 nt, Artificial Sequence
  Description of Artificial Sequence: Synthetic oligonucleotide
ucauggaggaacuugacgg

SEQ ID NO: 1159744 - RNA, 19 nt, Artificial Sequence
  Description of Artificial Sequence: Synthetic oligonucleotide
aguaccgacgaucauauac

SEQ ID NO: 1159745 - RNA, 19 nt, Artificial Sequence
  Description of Artificial Sequence: Synthetic oligonucleotide
agcacguugauuucuaggc

SEQ ID NO: 1159746 - RNA, 19 nt, Artificial Sequence
  Description of Artificial Sequence: Synthetic oligonucleotide
aaucagaucgaagagcugg

SEQ ID NO: 1159747 - RNA, 19 nt, Artificial Sequence
  Description of Artificial Sequence: Synthetic oligonucleotide
caaguuguuaucauggagg

SEQ ID NO: 1159748 - RNA, 19 nt, Artificial Sequence
  Description of Artificial Sequence: Synthetic oligonucleotide
uguacaaaaucccuuauaa

SEQ ID NO: 1159749 - RNA, 19 nt, Artificial Sequence
  Description of Artificial Sequence: Synthetic oligonucleotide
uguaaauagcaguauauac

SEQ ID NO: 1159750 - RNA, 19 nt, Artificial Sequence
  Description of Artificial Sequence: Synthetic oligonucleotide
agaugaaugaucaucauag

SEQ ID NO: 1159751 - RNA, 19 nt, Artificial Sequence
  Description of Artificial Sequence: Synthetic oligonucleotide
agggauaggacccaggauc

SEQ ID NO: 1159752 - RNA, 19 nt, Artificial Sequence
  Description of Artificial Sequence: Synthetic oligonucleotide
uguagugauagguacaaga

SEQ ID NO: 1159753 - RNA, 19 nt, Artificial Sequence
  Description of Artificial Sequence: Synthetic oligonucleotide
uguuggguggcucaguccg

SEQ ID NO: 1159754 - RNA, 19 nt, Artificial Sequence
  Description of Artificial Sequence: Synthetic oligonucleotide
uaguacucaaagaugauac

SEQ ID NO: 1159755 - RNA, 19 nt, Artificial Sequence
  Description of Artificial Sequence: Synthetic oligonucleotide
ucgaaagucagugucauag

SEQ ID NO: 1159756 - RNA, 19 nt, Artificial Sequence
  Description of Artificial Sequence: Synthetic oligonucleotide
ucuagcauacuuucaauca

SEQ ID NO: 1159757 - RNA, 19 nt, Artificial Sequence
  Description of Artificial Sequence: Synthetic oligonucleotide
aggagauacacauguggcc

SEQ ID NO: 1159758 - RNA, 19 nt, Artificial Sequence
  Description of Artificial Sequence: Synthetic oligonucleotide
uagguuguaggugaguucg

SEQ ID NO: 1159759 - RNA, 19 nt, Artificial Sequence
  Description of Artificial Sequence: Synthetic oligonucleotide
caagaucugucauauauac

SEQ ID NO: 1159760 - RNA, 19 nt, Artificial Sequence
  Description of Artificial Sequence: Synthetic oligonucleotide
uucaccuaaggucagccgc

SEQ ID NO: 1159761 - RNA, 19 nt, Artificial Sequence
  Description of Artificial Sequence: Synthetic oligonucleotide
guagucugaauucacaaac

SEQ ID NO: 1159762 - RNA, 19 nt, Artificial Sequence
  Description of Artificial Sequence: Synthetic oligonucleotide
aaguuguuaucauggagga

SEQ ID NO: 1159763 - RNA, 19 nt, Artificial Sequence
  Description of Artificial Sequence: Synthetic oligonucleotide
uauuucacaaagacuguac

SEQ ID NO: 1159764 - RNA, 19 nt, Artificial Sequence
  Description of Artificial Sequence: Synthetic oligonucleotide
ucaaaccagucaaacaucu

SEQ ID NO: 1159765 - RNA, 19 nt, Artificial Sequence
  Description of Artificial Sequence: Synthetic oligonucleotide
aauagugcuaugguguuca

SEQ ID NO: 1159766 - RNA, 19 nt, Artificial Sequence
  Description of Artificial Sequence: Synthetic oligonucleotide
acaacuugguguugggugg

SEQ ID NO: 1159767 - RNA, 19 nt, Artificial Sequence
  Description of Artificial Sequence: Synthetic oligonucleotide
aggucagccgcuuagcagg

SEQ ID NO: 1159768 - RNA, 19 nt, Artificial Sequence
  Description of Artificial Sequence: Synthetic oligonucleotide
guaaauagcaguauauaca

SEQ ID NO: 1159769 - RNA, 19 nt, Artificial Sequence
  Description of Artificial Sequence: Synthetic oligonucleotide
gaacuugacggccuggcag

SEQ ID NO: 1159770 - RNA, 19 nt, Artificial Sequence
  Description of Artificial Sequence: Synthetic oligonucleotide
ucagauaccgccgcagugg

SEQ ID NO: 1159771 - RNA, 19 nt, Artificial Sequence
  Description of Artificial Sequence: Synthetic oligonucleotide
ugggguagacaccaccugg

SEQ ID NO: 1159772 - RNA, 19 nt, Artificial Sequence
  Description of Artificial Sequence: Synthetic oligonucleotide
uugucaccgacugauaucc

SEQ ID NO: 1159773 - RNA, 19 nt, Artificial Sequence
  Description of Artificial Sequence: Synthetic oligonucleotide
agcgucguccucuacacuc

SEQ ID NO: 1159774 - RNA, 19 nt, Artificial Sequence
  Description of Artificial Sequence: Synthetic oligonucleotide
agaugauacagccuaugcu

SEQ ID NO: 1159775 - RNA, 19 nt, Artificial Sequence
  Description of Artificial Sequence: Synthetic oligonucleotide
ucauauacccgccggucag

SEQ ID NO: 1159776 - RNA, 19 nt, Artificial Sequence
  Description of Artificial Sequence: Synthetic oligonucleotide
aaacaugggguagacacca

SEQ ID NO: 1159777 - RNA, 19 nt, Artificial Sequence
  Description of Artificial Sequence: Synthetic oligonucleotide
acaugggguagacaccacc

SEQ ID NO: 1159778 - RNA, 19 nt, Artificial Sequence
  Description of Artificial Sequence: Synthetic oligonucleotide
cuagcauacuuucaaucag

SEQ ID NO: 1159779 - RNA, 19 nt, Artificial Sequence
  Description of Artificial Sequence: Synthetic oligonucleotide
uagcaguauauacaaggca

SEQ ID NO: 1159780 - RNA, 19 nt, Artificial Sequence
  Description of Artificial Sequence: Synthetic oligonucleotide
agacaauagugcuauggug

SEQ ID NO: 1159781 - RNA, 19 nt, Artificial Sequence
  Description of Artificial Sequence: Synthetic oligonucleotide
aaggucagccgcuuagcag

SEQ ID NO: 1159782 - RNA, 19 nt, Artificial Sequence
  Description of Artificial Sequence: Synthetic oligonucleotide
auacccgccggucagauga

SEQ ID NO: 1159783 - RNA, 19 nt, Artificial Sequence
  Description of Artificial Sequence: Synthetic oligonucleotide
aguucucacgaacguagcg

SEQ ID NO: 1159784 - RNA, 19 nt, Artificial Sequence
  Description of Artificial Sequence: Synthetic oligonucleotide
agguauaaaggagccaugg

SEQ ID NO: 1159785 - RNA, 19 nt, Artificial Sequence
  Description of Artificial Sequence: Synthetic oligonucleotide
auaaaggagccaugggcag

SEQ ID NO: 1159786 - RNA, 19 nt, Artificial Sequence
  Description of Artificial Sequence: Synthetic oligonucleotide
guuaucauggaggaacuug

SEQ ID NO: 1159787 - RNA, 19 nt, Artificial Sequence
  Description of Artificial Sequence: Synthetic oligonucleotide
acgaucauauacccgccgg

SEQ ID NO: 1159788 - RNA, 19 nt, Artificial Sequence
  Description of Artificial Sequence: Synthetic oligonucleotide
uucucacgaacguagcgcc

SEQ ID NO: 1159789 - RNA, 19 nt, Artificial Sequence
  Description of Artificial Sequence: Synthetic oligonucleotide
aagucgaccacccgcacau

SEQ ID NO: 1159790 - RNA, 19 nt, Artificial Sequence
  Description of Artificial Sequence: Synthetic oligonucleotide
ugaguucguagucugaauu

SEQ ID NO: 1159791 - RNA, 19 nt, Artificial Sequence
  Description of Artificial Sequence: Synthetic oligonucleotide
uucguagucugaauucaca

SEQ ID NO: 1159792 - RNA, 19 nt, Artificial Sequence
  Description of Artificial Sequence: Synthetic oligonucleotide
aacuugacggccuggcaga

SEQ ID NO: 1159793 - RNA, 19 nt, Artificial Sequence
  Description of Artificial Sequence: Synthetic oligonucleotide
uagugauagguacaagauc

SEQ ID NO: 1159794 - RNA, 19 nt, Artificial Sequence
  Description of Artificial Sequence: Synthetic oligonucleotide
cauaggaaugucgaaaguc

SEQ ID NO: 1159795 - RNA, 19 nt, Artificial Sequence
  Description of Artificial Sequence: Synthetic oligonucleotide
aagaguguaaauagcagua

SEQ ID NO: 1159796 - RNA, 19 nt, Artificial Sequence
  Description of Artificial Sequence: Synthetic oligonucleotide
ucacaauuucauaucgcuc

SEQ ID NO: 1159797 - RNA, 19 nt, Artificial Sequence
  Description of Artificial Sequence: Synthetic oligonucleotide
ucauacucuagcauacuuu

SEQ ID NO: 1159798 - RNA, 19 nt, Artificial Sequence
  Description of Artificial Sequence: Synthetic oligonucleotide
gaagaguguaaauagcagu

SEQ ID NO: 1159799 - RNA, 19 nt, Artificial Sequence
  Description of Artificial Sequence: Synthetic oligonucleotide
acugcuacacaagaagcag

SEQ ID NO: 1159800 - RNA, 19 nt, Artificial Sequence
  Description of Artificial Sequence: Synthetic oligonucleotide
guuguaggugaguucguag

SEQ ID NO: 1159801 - RNA, 19 nt, Artificial Sequence
  Description of Artificial Sequence: Synthetic oligonucleotide
uauaaaacaugggguagac

SEQ ID NO: 1159802 - RNA, 19 nt, Artificial Sequence
  Description of Artificial Sequence: Synthetic oligonucleotide
ucgguaauggcgaguggag

SEQ ID NO: 1159803 - RNA, 19 nt, Artificial Sequence
  Description of Artificial Sequence: Synthetic oligonucleotide
acaacucggccaaagguac

SEQ ID NO: 1159804 - RNA, 19 nt, Artificial Sequence
  Description of Artificial Sequence: Synthetic oligonucleotide
uugauuucuaggcgagcug

SEQ ID NO: 1159805 - RNA, 19 nt, Artificial Sequence
  Description of Artificial Sequence: Synthetic oligonucleotide
acagguauaaaggagccau

SEQ ID NO: 1159806 - RNA, 19 nt, Artificial Sequence
  Description of Artificial Sequence: Synthetic oligonucleotide
gucaccgacugauaucccg

SEQ ID NO: 1159807 - RNA, 19 nt, Artificial Sequence
  Description of Artificial Sequence: Synthetic oligonucleotide
gacgaucauauacccgccg

SEQ ID NO: 1159808 - RNA, 19 nt, Artificial Sequence
  Description of Artificial Sequence: Synthetic oligonucleotide
uuguuaucauggaggaacu

SEQ ID NO: 1159809 - RNA, 19 nt, Artificial Sequence
  Description of Artificial Sequence: Synthetic oligonucleotide
cucuagcauacuuucaauc

SEQ ID NO: 1159810 - RNA, 19 nt, Artificial Sequence
  Description of Artificial Sequence: Synthetic oligonucleotide
aaagucgaccacccgcaca

SEQ ID NO: 1159811 - RNA, 19 nt, Artificial Sequence
  Description of Artificial Sequence: Synthetic oligonucleotide
ucguagucugaauucacaa

SEQ ID NO: 1159812 - RNA, 19 nt, Artificial Sequence
  Description of Artificial Sequence: Synthetic oligonucleotide
accacccgcacaucugugc

SEQ ID NO: 1159813 - RNA, 19 nt, Artificial Sequence
  Description of Artificial Sequence: Synthetic oligonucleotide
auggaggaacuugacggcc

SEQ ID NO: 1159814 - RNA, 19 nt, Artificial Sequence
  Description of Artificial Sequence: Synthetic oligonucleotide
aguacucaaagaugauaca

SEQ ID NO: 1159815 - RNA, 19 nt, Artificial Sequence
  Description of Artificial Sequence: Synthetic oligonucleotide
gaguucguagucugaauuc

SEQ ID NO: 1159816 - RNA, 19 nt, Artificial Sequence
  Description of Artificial Sequence: Synthetic oligonucleotide
aguguaaauagcaguauau

SEQ ID NO: 1159817 - RNA, 19 nt, Artificial Sequence
  Description of Artificial Sequence: Synthetic oligonucleotide
cauggaggaacuugacggc

SEQ ID NO: 1159818 - RNA, 19 nt, Artificial Sequence
  Description of Artificial Sequence: Synthetic oligonucleotide
uucauacucuagcauacuu

SEQ ID NO: 1159819 - RNA, 19 nt, Artificial Sequence
  Description of Artificial Sequence: Synthetic oligonucleotide
ucauaggaaugucgaaagu

SEQ ID NO: 1159820 - RNA, 19 nt, Artificial Sequence
  Description of Artificial Sequence: Synthetic oligonucleotide
gucagaugaaugaucauca

SEQ ID NO: 1159821 - RNA, 19 nt, Artificial Sequence
  Description of Artificial Sequence: Synthetic oligonucleotide
ggaaugucgaaagucagug

SEQ ID NO: 1159822 - RNA, 19 nt, Artificial Sequence
  Description of Artificial Sequence: Synthetic oligonucleotide
uggcgaguggagacaauag

SEQ ID NO: 1159823 - RNA, 19 nt, Artificial Sequence
  Description of Artificial Sequence: Synthetic oligonucleotide
agguucauacucuagcaua

SEQ ID NO: 1159824 - RNA, 19 nt, Artificial Sequence
  Description of Artificial Sequence: Synthetic oligonucleotide
ugugaagaugagcggcuga

SEQ ID NO: 1159825 - RNA, 19 nt, Artificial Sequence
  Description of Artificial Sequence: Synthetic oligonucleotide
aucauauacccgccgguca

SEQ ID NO: 1159826 - RNA, 19 nt, Artificial Sequence
  Description of Artificial Sequence: Synthetic oligonucleotide
guuugcaguucucacgaac

SEQ ID NO: 1159827 - RNA, 19 nt, Artificial Sequence
  Description of Artificial Sequence: Synthetic oligonucleotide
gaagagggugaagccaacg

SEQ ID NO: 1159828 - RNA, 19 nt, Artificial Sequence
  Description of Artificial Sequence: Synthetic oligonucleotide
ccgacgaucauauacccgc

SEQ ID NO: 1159829 - RNA, 19 nt, Artificial Sequence
  Description of Artificial Sequence: Synthetic oligonucleotide
guucucacgaacguagcgc

SEQ ID NO: 1159830 - RNA, 19 nt, Artificial Sequence
  Description of Artificial Sequence: Synthetic oligonucleotide
gccaacguaguacucaaag

SEQ ID NO: 1159831 - RNA, 19 nt, Artificial Sequence
  Description of Artificial Sequence: Synthetic oligonucleotide
ucaguccgaaggcaggcga

SEQ ID NO: 1159832 - RNA, 19 nt, Artificial Sequence
  Description of Artificial Sequence: Synthetic oligonucleotide
aagccaacguaguacucaa

SEQ ID NO: 1159833 - RNA, 19 nt, Artificial Sequence
  Description of Artificial Sequence: Synthetic oligonucleotide
ucaccuaaggucagccgcu

SEQ ID NO: 1159834 - RNA, 19 nt, Artificial Sequence
  Description of Artificial Sequence: Synthetic oligonucleotide
ugugucaaguuguuaucau

SEQ ID NO: 1159835 - RNA, 19 nt, Artificial Sequence
  Description of Artificial Sequence: Synthetic oligonucleotide
cuucaccuaaggucagccg

SEQ ID NO: 1159836 - RNA, 19 nt, Artificial Sequence
  Description of Artificial Sequence: Synthetic oligonucleotide
gguaauggcgaguggagac

SEQ ID NO: 1159837 - RNA, 19 nt, Artificial Sequence
  Description of Artificial Sequence: Synthetic oligonucleotide
ucccacaacuugguguugg

SEQ ID NO: 1159838 - RNA, 19 nt, Artificial Sequence
  Description of Artificial Sequence: Synthetic oligonucleotide
ucuagcacguugauuucua

SEQ ID NO: 1159839 - RNA, 19 nt, Artificial Sequence
  Description of Artificial Sequence: Synthetic oligonucleotide
aguucguagucugaauuca

SEQ ID NO: 1159840 - RNA, 19 nt, Artificial Sequence
  Description of Artificial Sequence: Synthetic oligonucleotide
gagacaauagugcuauggu

SEQ ID NO: 1159841 - RNA, 19 nt, Artificial Sequence
  Description of Artificial Sequence: Synthetic oligonucleotide
uuagcagguucauacucua

SEQ ID NO: 1159842 - RNA, 19 nt, Artificial Sequence
  Description of Artificial Sequence: Synthetic oligonucleotide
uugcaguucucacgaacgu

SEQ ID NO: 1159843 - RNA, 19 nt, Artificial Sequence
  Description of Artificial Sequence: Synthetic oligonucleotide
gaguguaaauagcaguaua

SEQ ID NO: 1159844 - RNA, 19 nt, Artificial Sequence
  Description of Artificial Sequence: Synthetic oligonucleotide
gaacguagcgccccgcuga

SEQ ID NO: 1159845 - RNA, 19 nt, Artificial Sequence
  Description of Artificial Sequence: Synthetic oligonucleotide
aagaucugucauauauaca

SEQ ID NO: 1159846 - RNA, 19 nt, Artificial Sequence
  Description of Artificial Sequence: Synthetic oligonucleotide
auggcuagauguucucugu

SEQ ID NO: 1159847 - RNA, 19 nt, Artificial Sequence
  Description of Artificial Sequence: Synthetic oligonucleotide
ucggaucauccgagaaggg

SEQ ID NO: 1159848 - RNA, 19 nt, Artificial Sequence
  Description of Artificial Sequence: Synthetic oligonucleotide
acaauagugcuaugguguu

SEQ ID NO: 1159849 - RNA, 19 nt, Artificial Sequence
  Description of Artificial Sequence: Synthetic oligonucleotide
uggcgcacuugguggaugg

SEQ ID NO: 1159850 - RNA, 19 nt, Artificial Sequence
  Description of Artificial Sequence: Synthetic oligonucleotide
uguccuggacuggacaccc

SEQ ID NO: 1159851 - RNA, 19 nt, Artificial Sequence
  Description of Artificial Sequence: Synthetic oligonucleotide
cuggacuggacacccacug

SEQ ID NO: 1159852 - RNA, 19 nt, Artificial Sequence
  Description of Artificial Sequence: Synthetic oligonucleotide
gaucauauacccgccgguc

SEQ ID NO: 1159853 - RNA, 19 nt, Artificial Sequence
  Description of Artificial Sequence: Synthetic oligonucleotide
ucagaugaaugaucaucau

SEQ ID NO: 1159854 - RNA, 19 nt, Artificial Sequence
  Description of Artificial Sequence: Synthetic oligonucleotide
cuagguuguaggugaguuc

SEQ ID NO: 1159855 - RNA, 19 nt, Artificial Sequence
  Description of Artificial Sequence: Synthetic oligonucleotide
ggugaagccaacguaguac

SEQ ID NO: 1159856 - RNA, 19 nt, Artificial Sequence
  Description of Artificial Sequence: Synthetic oligonucleotide
cacugcuacacaagaagca

SEQ ID NO: 1159857 - RNA, 19 nt, Artificial Sequence
  Description of Artificial Sequence: Synthetic oligonucleotide
gccaaagucgaccacccgc

SEQ ID NO: 1159858 - RNA, 19 nt, Artificial Sequence
  Description of Artificial Sequence: Synthetic oligonucleotide
gcuauagucauugcgucug

SEQ ID NO: 1159859 - RNA, 19 nt, Artificial Sequence
  Description of Artificial Sequence: Synthetic oligonucleotide
ggcacucauaggaaugucg

SEQ ID NO: 1159860 - RNA, 19 nt, Artificial Sequence
  Description of Artificial Sequence: Synthetic oligonucleotide
cuagcacguugauuucuag

SEQ ID NO: 1159861 - RNA, 19 nt, Artificial Sequence
  Description of Artificial Sequence: Synthetic oligonucleotide
acucuagcauacuuucaau

SEQ ID NO: 1159862 - RNA, 19 nt, Artificial Sequence
  Description of Artificial Sequence: Synthetic oligonucleotide
gauugucaccgacugauau

SEQ ID NO: 1159863 - RNA, 19 nt, Artificial Sequence
  Description of Artificial Sequence: Synthetic oligonucleotide
ucucacgaacguagcgccc

SEQ ID NO: 1159864 - RNA, 19 nt, Artificial Sequence
  Description of Artificial Sequence: Synthetic oligonucleotide
ucuucucuagcacguugau

SEQ ID NO: 1159865 - RNA, 19 nt, Artificial Sequence
  Description of Artificial Sequence: Synthetic oligonucleotide
ugucgaaagucagugucau

SEQ ID NO: 1159866 - RNA, 19 nt, Artificial Sequence
  Description of Artificial Sequence: Synthetic oligonucleotide
ucgaccacccgcacaucug

SEQ ID NO: 1159867 - RNA, 19 nt, Artificial Sequence
  Description of Artificial Sequence: Synthetic oligonucleotide
cucacgaacguagcgcccc

SEQ ID NO: 1159868 - RNA, 19 nt, Artificial Sequence
  Description of Artificial Sequence: Synthetic oligonucleotide
cacgcugcgcucaucucgc

SEQ ID NO: 1159869 - RNA, 19 nt, Artificial Sequence
  Description of Artificial Sequence: Synthetic oligonucleotide
ccgagaagggauaggaccc

SEQ ID NO: 1159870 - RNA, 19 nt, Artificial Sequence
  Description of Artificial Sequence: Synthetic oligonucleotide
augggguagacaccaccug

SEQ ID NO: 1159871 - RNA, 19 nt, Artificial Sequence
  Description of Artificial Sequence: Synthetic oligonucleotide
uucgguaacugcuguucuc

SEQ ID NO: 1159872 - RNA, 19 nt, Artificial Sequence
  Description of Artificial Sequence: Synthetic oligonucleotide
ggcuagauguucucuguug

SEQ ID NO: 1159873 - RNA, 19 nt, Artificial Sequence
  Description of Artificial Sequence: Synthetic oligonucleotide
gaaggugcggcuacgucuc

SEQ ID NO: 1159874 - RNA, 19 nt, Artificial Sequence
  Description of Artificial Sequence: Synthetic oligonucleotide
uccacggucccggcuauag

SEQ ID NO: 1159875 - RNA, 19 nt, Artificial Sequence
  Description of Artificial Sequence: Synthetic oligonucleotide
cuaaggucagccgcuuagc

SEQ ID NO: 1159876 - RNA, 19 nt, Artificial Sequence
  Description of Artificial Sequence: Synthetic oligonucleotide
acgugguagaugagguggc

SEQ ID NO: 1159877 - RNA, 19 nt, Artificial Sequence
  Description of Artificial Sequence: Synthetic oligonucleotide
agaguguaaauagcaguau

SEQ ID NO: 1159878 - RNA, 19 nt, Artificial Sequence
  Description of Artificial Sequence: Synthetic oligonucleotide
cacaacucggccaaaggua

SEQ ID NO: 1159879 - RNA, 19 nt, Artificial Sequence
  Description of Artificial Sequence: Synthetic oligonucleotide
gucuuucggaucauccgag

SEQ ID NO: 1159880 - RNA, 19 nt, Artificial Sequence
  Description of Artificial Sequence: Synthetic oligonucleotide
guagcugccacaguaccga

SEQ ID NO: 1159881 - RNA, 19 nt, Artificial Sequence
  Description of Artificial Sequence: Synthetic oligonucleotide
ucagaucgaagagcuggug

SEQ ID NO: 1159882 - RNA, 19 nt, Artificial Sequence
  Description of Artificial Sequence: Synthetic oligonucleotide
ugaagccaacguaguacuc

SEQ ID NO: 1159883 - RNA, 19 nt, Artificial Sequence
  Description of Artificial Sequence: Synthetic oligonucleotide
cagguauaaaggagccaug

SEQ ID NO: 1159884 - RNA, 19 nt, Artificial Sequence
  Description of Artificial Sequence: Synthetic oligonucleotide
uaauggcgaguggagacaa

SEQ ID NO: 1159885 - RNA, 19 nt, Artificial Sequence
  Description of Artificial Sequence: Synthetic oligonucleotide
ugccacaguaccgacgauc

SEQ ID NO: 1159886 - RNA, 19 nt, Artificial Sequence
  Description of Artificial Sequence: Synthetic oligonucleotide
cauccgagaagggauagga

SEQ ID NO: 1159887 - RNA, 19 nt, Artificial Sequence
  Description of Artificial Sequence: Synthetic oligonucleotide
cuuagcagguucauacucu

SEQ ID NO: 1159888 - RNA, 19 nt, Artificial Sequence
  Description of Artificial Sequence: Synthetic oligonucleotide
ccuuauaaaacauggggua

SEQ ID NO: 1159889 - RNA, 19 nt, Artificial Sequence
  Description of Artificial Sequence: Synthetic oligonucleotide
guaguacucaaagaugaua

SEQ ID NO: 1159890 - RNA, 19 nt, Artificial Sequence
  Description of Artificial Sequence: Synthetic oligonucleotide
gcgaguggagacaauagug

SEQ ID NO: 1159891 - RNA, 19 nt, Artificial Sequence
  Description of Artificial Sequence: Synthetic oligonucleotide
auccgagaagggauaggac

SEQ ID NO: 1159892 - RNA, 19 nt, Artificial Sequence
  Description of Artificial Sequence: Synthetic oligonucleotide
aggcgaagaaaggaugcug

SEQ ID NO: 1159893 - RNA, 19 nt, Artificial Sequence
  Description of Artificial Sequence: Synthetic oligonucleotide
aggcugaagaguguaaaua

SEQ ID NO: 1159894 - RNA, 19 nt, Artificial Sequence
  Description of Artificial Sequence: Synthetic oligonucleotide
guguaaauagcaguauaua

SEQ ID NO: 1159895 - RNA, 19 nt, Artificial Sequence
  Description of Artificial Sequence: Synthetic oligonucleotide
cacuugguggaugggguag

SEQ ID NO: 1159896 - RNA, 19 nt, Artificial Sequence
  Description of Artificial Sequence: Synthetic oligonucleotide
agggcaacucuugcuccgc

SEQ ID NO: 1159897 - RNA, 19 nt, Artificial Sequence
  Description of Artificial Sequence: Synthetic oligonucleotide
acguugauuucuaggcgag

SEQ ID NO: 1159898 - RNA, 19 nt, Artificial Sequence
  Description of Artificial Sequence: Synthetic oligonucleotide
ugauugucaccgacugaua

SEQ ID NO: 1159899 - RNA, 19 nt, Artificial Sequence
  Description of Artificial Sequence: Synthetic oligonucleotide
gcuuagcagguucauacuc

SEQ ID NO: 1159900 - RNA, 19 nt, Artificial Sequence
  Description of Artificial Sequence: Synthetic oligonucleotide
ugcgucuguagcugccaca

SEQ ID NO: 1159901 - RNA, 19 nt, Artificial Sequence
  Description of Artificial Sequence: Synthetic oligonucleotide
aggaaugucgaaagucagu

SEQ ID NO: 1159902 - RNA, 19 nt, Artificial Sequence
  Description of Artificial Sequence: Synthetic oligonucleotide
ccgacugauaucccgacug

SEQ ID NO: 1159903 - RNA, 19 nt, Artificial Sequence
  Description of Artificial Sequence: Synthetic oligonucleotide
ucuccuccgccgucuaugu

SEQ ID NO: 1159904 - RNA, 19 nt, Artificial Sequence
  Description of Artificial Sequence: Synthetic oligonucleotide
augucgaaagucaguguca

SEQ ID NO: 1159905 - RNA, 19 nt, Artificial Sequence
  Description of Artificial Sequence: Synthetic oligonucleotide
ggcuacgucuccuccgccg

SEQ ID NO: 1159906 - RNA, 19 nt, Artificial Sequence
  Description of Artificial Sequence: Synthetic oligonucleotide
accgacgaucauauacccg

SEQ ID NO: 1159907 - RNA, 19 nt, Artificial Sequence
  Description of Artificial Sequence: Synthetic oligonucleotide
ugucaccgacugauauccc

SEQ ID NO: 1159908 - RNA, 19 nt, Artificial Sequence
  Description of Artificial Sequence: Synthetic oligonucleotide
gccugauugucaccgacug

SEQ ID NO: 1159909 - RNA, 19 nt, Artificial Sequence
  Description of Artificial Sequence: Synthetic oligonucleotide
caacucaagaaugacuucu

SEQ ID NO: 1159910 - RNA, 19 nt, Artificial Sequence
  Description of Artificial Sequence: Synthetic oligonucleotide
gggguccaaggccugauug

SEQ ID NO: 1159911 - RNA, 19 nt, Artificial Sequence
  Description of Artificial Sequence: Synthetic oligonucleotide
uugcgucuguagcugccac

SEQ ID NO: 1159912 - RNA, 19 nt, Artificial Sequence
  Description of Artificial Sequence: Synthetic oligonucleotide
caacucggccaaagguacc

SEQ ID NO: 1159913 - RNA, 19 nt, Artificial Sequence
  Description of Artificial Sequence: Synthetic oligonucleotide
cccggcuauagucauugcg

SEQ ID NO: 1159914 - RNA, 19 nt, Artificial Sequence
  Description of Artificial Sequence: Synthetic oligonucleotide
aacguagcgccccgcugau

SEQ ID NO: 1159915 - RNA, 19 nt, Artificial Sequence
  Description of Artificial Sequence: Synthetic oligonucleotide
uguucucccgauggcacuc

SEQ ID NO: 1159916 - RNA, 19 nt, Artificial Sequence
  Description of Artificial Sequence: Synthetic oligonucleotide
gaaugucgaaagucagugu

SEQ ID NO: 1159917 - RNA, 19 nt, Artificial Sequence
  Description of Artificial Sequence: Synthetic oligonucleotide
cucggccaaagguaccuuc

SEQ ID NO: 1159918 - RNA, 19 nt, Artificial Sequence
  Description of Artificial Sequence: Synthetic oligonucleotide
guucguagucugaauucac

SEQ ID NO: 1159919 - RNA, 19 nt, Artificial Sequence
  Description of Artificial Sequence: Synthetic oligonucleotide
gacugauaucccgacugga

SEQ ID NO: 1159920 - RNA, 19 nt, Artificial Sequence
  Description of Artificial Sequence: Synthetic oligonucleotide
guaauggcgaguggagaca

SEQ ID NO: 1159921 - RNA, 19 nt, Artificial Sequence
  Description of Artificial Sequence: Synthetic oligonucleotide
aguccgaaggcaggcgaag

SEQ ID NO: 1159922 - RNA, 19 nt, Artificial Sequence
  Description of Artificial Sequence: Synthetic oligonucleotide
acgaacguagcgccccgcu

SEQ ID NO: 1159923 - RNA, 19 nt, Artificial Sequence
  Description of Artificial Sequence: Synthetic oligonucleotide
uauacccgccggucagaug

SEQ ID NO: 1159924 - RNA, 19 nt, Artificial Sequence
  Description of Artificial Sequence: Synthetic oligonucleotide
cucaguccgaaggcaggcg

SEQ ID NO: 1159925 - RNA, 19 nt, Artificial Sequence
  Description of Artificial Sequence: Synthetic oligonucleotide
accgacugauaucccgacu

SEQ ID NO: 1159926 - RNA, 19 nt, Artificial Sequence
  Description of Artificial Sequence: Synthetic oligonucleotide
uccgccgucuauguuuccu

SEQ ID NO: 1159927 - RNA, 19 nt, Artificial Sequence
  Description of Artificial Sequence: Synthetic oligonucleotide
ggcgcugccaaagucgacc

SEQ ID NO: 1159928 - RNA, 19 nt, Artificial Sequence
  Description of Artificial Sequence: Synthetic oligonucleotide
aucagaucgaagagcuggu

SEQ ID NO: 1159929 - RNA, 19 nt, Artificial Sequence
  Description of Artificial Sequence: Synthetic oligonucleotide
gauaccgccgcagugguuu

SEQ ID NO: 1159930 - RNA, 19 nt, Artificial Sequence
  Description of Artificial Sequence: Synthetic oligonucleotide
gcaggcgaagaaaggaugc

SEQ ID NO: 1159931 - RNA, 19 nt, Artificial Sequence
  Description of Artificial Sequence: Synthetic oligonucleotide
gaagcucaaaggagauaca

SEQ ID NO: 1159932 - RNA, 19 nt, Artificial Sequence
  Description of Artificial Sequence: Synthetic oligonucleotide
auggcgaguggagacaaua

SEQ ID NO: 1159933 - RNA, 19 nt, Artificial Sequence
  Description of Artificial Sequence: Synthetic oligonucleotide
ggcgaagaaaggaugcuga

SEQ ID NO: 1159934 - RNA, 19 nt, Artificial Sequence
  Description of Artificial Sequence: Synthetic oligonucleotide
gccgucuauguuuccuccg

SEQ ID NO: 1159935 - RNA, 19 nt, Artificial Sequence
  Description of Artificial Sequence: Synthetic oligonucleotide
cacaguaccgacgaucaua

SEQ ID NO: 1159936 - RNA, 19 nt, Artificial Sequence
  Description of Artificial Sequence: Synthetic oligonucleotide
ccgucuauguuuccuccgg

SEQ ID NO: 1159937 - RNA, 19 nt, Artificial Sequence
  Description of Artificial Sequence: Synthetic oligonucleotide
ugagguccgugugugucaa

SEQ ID NO: 1159938 - RNA, 19 nt, Artificial Sequence
  Description of Artificial Sequence: Synthetic oligonucleotide
cugcacaacucggccaaag

SEQ ID NO: 1159939 - RNA, 19 nt, Artificial Sequence
  Description of Artificial Sequence: Synthetic oligonucleotide
caauagugcuaugguguuc

SEQ ID NO: 1159940 - RNA, 19 nt, Artificial Sequence
  Description of Artificial Sequence: Synthetic oligonucleotide
acccgcacaucugugcucu

SEQ ID NO: 1159941 - RNA, 19 nt, Artificial Sequence
  Description of Artificial Sequence: Synthetic oligonucleotide
ggcucgguaauggcgagug

SEQ ID NO: 1159942 - RNA, 19 nt, Artificial Sequence
  Description of Artificial Sequence: Synthetic oligonucleotide
ccggucagaugaaugauca

SEQ ID NO: 1159943 - RNA, 19 nt, Artificial Sequence
  Description of Artificial Sequence: Synthetic oligonucleotide
gcucacaauuucauaucgc

SEQ ID NO: 1159944 - RNA, 19 nt, Artificial Sequence
  Description of Artificial Sequence: Synthetic oligonucleotide
caucccaauccaggugacc

SEQ ID NO: 1159945 - RNA, 19 nt, Artificial Sequence
  Description of Artificial Sequence: Synthetic oligonucleotide
gcacucauaggaaugucga

SEQ ID NO: 1159946 - RNA, 19 nt, Artificial Sequence
  Description of Artificial Sequence: Synthetic oligonucleotide
cccuuauaaaacauggggu

SEQ ID NO: 1159947 - RNA, 19 nt, Artificial Sequence
  Description of Artificial Sequence: Synthetic oligonucleotide
gcauacuuucaaucagauc

SEQ ID NO: 1159948 - RNA, 19 nt, Artificial Sequence
  Description of Artificial Sequence: Synthetic oligonucleotide
gcuacacaagaagcagggg

SEQ ID NO: 1159949 - RNA, 19 nt, Artificial Sequence
  Description of Artificial Sequence: Synthetic oligonucleotide
uccaggugaccccgauaaa

SEQ ID NO: 1159950 - RNA, 19 nt, Artificial Sequence
  Description of Artificial Sequence: Synthetic oligonucleotide
ugucaggaucuuucucauu

SEQ ID NO: 1159951 - RNA, 19 nt, Artificial Sequence
  Description of Artificial Sequence: Synthetic oligonucleotide
uucacgcugcgcucaucuc

SEQ ID NO: 1159952 - RNA, 19 nt, Artificial Sequence
  Description of Artificial Sequence: Synthetic oligonucleotide
gcuagauguucucuguugu

SEQ ID NO: 1159953 - RNA, 19 nt, Artificial Sequence
  Description of Artificial Sequence: Synthetic oligonucleotide
cuucacgcugcgcucaucu

SEQ ID NO: 1159954 - RNA, 19 nt, Artificial Sequence
  Description of Artificial Sequence: Synthetic oligonucleotide
ucucccgauggcacucaua

SEQ ID NO: 1159955 - RNA, 19 nt, Artificial Sequence
  Description of Artificial Sequence: Synthetic oligonucleotide
agggugaagccaacguagu

SEQ ID NO: 1159956 - RNA, 19 nt, Artificial Sequence
  Description of Artificial Sequence: Synthetic oligonucleotide
cuggacacccacugcuaca

SEQ ID NO: 1159957 - RNA, 19 nt, Artificial Sequence
  Description of Artificial Sequence: Synthetic oligonucleotide
acuugacggccuggcagag

SEQ ID NO: 1159958 - RNA, 19 nt, Artificial Sequence
  Description of Artificial Sequence: Synthetic oligonucleotide
gggguagacaccaccuggc

SEQ ID NO: 1159959 - RNA, 19 nt, Artificial Sequence
  Description of Artificial Sequence: Synthetic oligonucleotide
cccgacgugguagaugagg

SEQ ID NO: 1159960 - RNA, 19 nt, Artificial Sequence
  Description of Artificial Sequence: Synthetic oligonucleotide
auauacccgccggucagau

SEQ ID NO: 1159961 - RNA, 19 nt, Artificial Sequence
  Description of Artificial Sequence: Synthetic oligonucleotide
gagauacacauguggccau

SEQ ID NO: 1159962 - RNA, 19 nt, Artificial Sequence
  Description of Artificial Sequence: Synthetic oligonucleotide
caacuccacaugaggggca

SEQ ID NO: 1159963 - RNA, 19 nt, Artificial Sequence
  Description of Artificial Sequence: Synthetic oligonucleotide
auaccgccgcagugguuug

SEQ ID NO: 1159964 - RNA, 19 nt, Artificial Sequence
  Description of Artificial Sequence: Synthetic oligonucleotide
ucuaggcgagcugcuuccu

SEQ ID NO: 1159965 - RNA, 19 nt, Artificial Sequence
  Description of Artificial Sequence: Synthetic oligonucleotide
ggacuggacacccacugcu

SEQ ID NO: 1159966 - RNA, 19 nt, Artificial Sequence
  Description of Artificial Sequence: Synthetic oligonucleotide
ucuccacggucccggcuau

SEQ ID NO: 1159967 - RNA, 19 nt, Artificial Sequence
  Description of Artificial Sequence: Synthetic oligonucleotide
acggucccggcuauaguca

SEQ ID NO: 1159968 - RNA, 19 nt, Artificial Sequence
  Description of Artificial Sequence: Synthetic oligonucleotide
cuugacggccuggcagagc

SEQ ID NO: 1159969 - RNA, 19 nt, Artificial Sequence
  Description of Artificial Sequence: Synthetic oligonucleotide
acggcugugaccagcccaa

SEQ ID NO: 1159970 - RNA, 19 nt, Artificial Sequence
  Description of Artificial Sequence: Synthetic oligonucleotide
gucgaccacccgcacaucu

SEQ ID NO: 1159971 - RNA, 19 nt, Artificial Sequence
  Description of Artificial Sequence: Synthetic oligonucleotide
ucccgacuggagucccaca

SEQ ID NO: 1159972 - RNA, 19 nt, Artificial Sequence
  Description of Artificial Sequence: Synthetic oligonucleotide
cuucgguaacugcuguucu

SEQ ID NO: 1159973 - RNA, 19 nt, Artificial Sequence
  Description of Artificial Sequence: Synthetic oligonucleotide
gcggcuacgucuccuccgc

SEQ ID NO: 1159974 - RNA, 19 nt, Artificial Sequence
  Description of Artificial Sequence: Synthetic oligonucleotide
aauggcgaguggagacaau

SEQ ID NO: 1159975 - RNA, 19 nt, Artificial Sequence
  Description of Artificial Sequence: Synthetic oligonucleotide
cgacugauaucccgacugg

SEQ ID NO: 1159976 - RNA, 19 nt, Artificial Sequence
  Description of Artificial Sequence: Synthetic oligonucleotide
gaccacccgcacaucugug

SEQ ID NO: 1159977 - RNA, 19 nt, Artificial Sequence
  Description of Artificial Sequence: Synthetic oligonucleotide
guggcgcugccaaagucga

SEQ ID NO: 1159978 - RNA, 19 nt, Artificial Sequence
  Description of Artificial Sequence: Synthetic oligonucleotide
guagcgccccgcugaugug

SEQ ID NO: 1159979 - RNA, 19 nt, Artificial Sequence
  Description of Artificial Sequence: Synthetic oligonucleotide
ggcgaguggagacaauagu

SEQ ID NO: 1159980 - RNA, 19 nt, Artificial Sequence
  Description of Artificial Sequence: Synthetic oligonucleotide
uguggcgcacuugguggau

SEQ ID NO: 1159981 - RNA, 19 nt, Artificial Sequence
  Description of Artificial Sequence: Synthetic oligonucleotide
ccggcuauagucauugcgu

SEQ ID NO: 1159982 - RNA, 19 nt, Artificial Sequence
  Description of Artificial Sequence: Synthetic oligonucleotide
ggcuauagucauugcgucu

SEQ ID NO: 1159983 - RNA, 19 nt, Artificial Sequence
  Description of Artificial Sequence: Synthetic oligonucleotide
accuaaggucagccgcuua

SEQ ID NO: 1159984 - RNA, 19 nt, Artificial Sequence
  Description of Artificial Sequence: Synthetic oligonucleotide
gcgaagaaaggaugcugaa

SEQ ID NO: 1159985 - RNA, 19 nt, Artificial Sequence
  Description of Artificial Sequence: Synthetic oligonucleotide
guccccgacgugguagaug

SEQ ID NO: 1159986 - RNA, 19 nt, Artificial Sequence
  Description of Artificial Sequence: Synthetic oligonucleotide
uggcgcugccaaagucgac

SEQ ID NO: 1159987 - RNA, 19 nt, Artificial Sequence
  Description of Artificial Sequence: Synthetic oligonucleotide
cauauacccgccggucaga

SEQ ID NO: 1159988 - RNA, 19 nt, Artificial Sequence
  Description of Artificial Sequence: Synthetic oligonucleotide
cagccgcuuagcagguuca

SEQ ID NO: 1159989 - RNA, 19 nt, Artificial Sequence
  Description of Artificial Sequence: Synthetic oligonucleotide
ccaguccccgacgugguag

SEQ ID NO: 1159990 - RNA, 19 nt, Artificial Sequence
  Description of Artificial Sequence: Synthetic oligonucleotide
agucgaccacccgcacauc

SEQ ID NO: 1159991 - RNA, 19 nt, Artificial Sequence
  Description of Artificial Sequence: Synthetic oligonucleotide
cuacgucuccuccgccguc

SEQ ID NO: 1159992 - RNA, 19 nt, Artificial Sequence
  Description of Artificial Sequence: Synthetic oligonucleotide
uugcuccgccccugcgaug

SEQ ID NO: 1159993 - RNA, 19 nt, Artificial Sequence
  Description of Artificial Sequence: Synthetic oligonucleotide
accgccgcagugguuugca

SEQ ID NO: 1159994 - RNA, 19 nt, Artificial Sequence
  Description of Artificial Sequence: Synthetic oligonucleotide
caguccgaaggcaggcgaa

SEQ ID NO: 1159995 - RNA, 19 nt, Artificial Sequence
  Description of Artificial Sequence: Synthetic oligonucleotide
cugcgcuggcuucgguaac

SEQ ID NO: 1159996 - RNA, 19 nt, Artificial Sequence
  Description of Artificial Sequence: Synthetic oligonucleotide
cacgaacguagcgccccgc

SEQ ID NO: 1159997 - RNA, 19 nt, Artificial Sequence
  Description of Artificial Sequence: Synthetic oligonucleotide
uacccgccggucagaugaa

SEQ ID NO: 1159998 - RNA, 19 nt, Artificial Sequence
  Description of Artificial Sequence: Synthetic oligonucleotide
cgacgaucauauacccgcc

SEQ ID NO: 1159999 - RNA, 19 nt, Artificial Sequence
  Description of Artificial Sequence: Synthetic oligonucleotide
gucgaaagucagugucaua

SEQ ID NO: 1160000 - RNA, 19 nt, Artificial Sequence
  Description of Artificial Sequence: Synthetic oligonucleotide
cuauagucauugcgucugu

SEQ ID NO: 1160001 - RNA, 19 nt, Artificial Sequence
  Description of Artificial Sequence: Synthetic oligonucleotide
cgucuauguuuccuccggc

SEQ ID NO: 1160002 - RNA, 19 nt, Artificial Sequence
  Description of Artificial Sequence: Synthetic oligonucleotide
cguagucugaauucacaaa

SEQ ID NO: 1160003 - RNA, 19 nt, Artificial Sequence
  Description of Artificial Sequence: Synthetic oligonucleotide
cggcuauagucauugcguc

SEQ ID NO: 1160004 - RNA, 19 nt, Artificial Sequence
  Description of Artificial Sequence: Synthetic oligonucleotide
cucuagcacguugauuucu

SEQ ID NO: 1160005 - RNA, 19 nt, Artificial Sequence
  Description of Artificial Sequence: Synthetic oligonucleotide
ucuucacgcugcgcucauc

SEQ ID NO: 1160006 - RNA, 19 nt, Artificial Sequence
  Description of Artificial Sequence: Synthetic oligonucleotide
ccuccgccgucuauguuuc

SEQ ID NO: 1160007 - RNA, 19 nt, Artificial Sequence
  Description of Artificial Sequence: Synthetic oligonucleotide
ggcuucaccuaaggucagc

SEQ ID NO: 1160008 - RNA, 19 nt, Artificial Sequence
  Description of Artificial Sequence: Synthetic oligonucleotide
cagauaccgccgcaguggu

SEQ ID NO: 1160009 - RNA, 19 nt, Artificial Sequence
  Description of Artificial Sequence: Synthetic oligonucleotide
ccgacuggagucccacaac

SEQ ID NO: 1160010 - RNA, 19 nt, Artificial Sequence
  Description of Artificial Sequence: Synthetic oligonucleotide
cgccgucuauguuuccucc

SEQ ID NO: 1160011 - RNA, 19 nt, Artificial Sequence
  Description of Artificial Sequence: Synthetic oligonucleotide
gugcuaugguguucauggu

SEQ ID NO: 1160012 - RNA, 19 nt, Artificial Sequence
  Description of Artificial Sequence: Synthetic oligonucleotide
ccuaaggugcucacaauuu

SEQ ID NO: 1160013 - RNA, 19 nt, Artificial Sequence
  Description of Artificial Sequence: Synthetic oligonucleotide
ggcgcacuugguggauggg

SEQ ID NO: 1160014 - RNA, 19 nt, Artificial Sequence
  Description of Artificial Sequence: Synthetic oligonucleotide
gccccgcugauguguuucc

SEQ ID NO: 1160015 - RNA, 19 nt, Artificial Sequence
  Description of Artificial Sequence: Synthetic oligonucleotide
ggggcagaugaggcugaag

SEQ ID NO: 1160016 - RNA, 19 nt, Artificial Sequence
  Description of Artificial Sequence: Synthetic oligonucleotide
caggcgaagaaaggaugcu

SEQ ID NO: 1160017 - RNA, 19 nt, Artificial Sequence
  Description of Artificial Sequence: Synthetic oligonucleotide
acgcugcgcucaucucgcu

SEQ ID NO: 1160018 - RNA, 19 nt, Artificial Sequence
  Description of Artificial Sequence: Synthetic oligonucleotide
ccugauugucaccgacuga

SEQ ID NO: 1160019 - RNA, 19 nt, Artificial Sequence
  Description of Artificial Sequence: Synthetic oligonucleotide
ccgauggcacucauaggaa

SEQ ID NO: 1160020 - RNA, 19 nt, Artificial Sequence
  Description of Artificial Sequence: Synthetic oligonucleotide
agccaacguaguacucaaa

SEQ ID NO: 1160021 - RNA, 19 nt, Artificial Sequence
  Description of Artificial Sequence: Synthetic oligonucleotide
gcuacgucuccuccgccgu

SEQ ID NO: 1160022 - RNA, 19 nt, Artificial Sequence
  Description of Artificial Sequence: Synthetic oligonucleotide
ccgacgugguagaugaggu

SEQ ID NO: 1160023 - RNA, 19 nt, Artificial Sequence
  Description of Artificial Sequence: Synthetic oligonucleotide
cccgacuggagucccacaa

SEQ ID NO: 1160024 - RNA, 19 nt, Artificial Sequence
  Description of Artificial Sequence: Synthetic oligonucleotide
gcccaacucaagaaugacu

SEQ ID NO: 1160025 - RNA, 19 nt, Artificial Sequence
  Description of Artificial Sequence: Synthetic oligonucleotide
gggcuucaccuaaggucag

SEQ ID NO: 1160026 - RNA, 19 nt, Artificial Sequence
  Description of Artificial Sequence: Synthetic oligonucleotide
acguagcgccccgcugaug

SEQ ID NO: 1160027 - RNA, 19 nt, Artificial Sequence
  Description of Artificial Sequence: Synthetic oligonucleotide
caauccaggugaccccgau

SEQ ID NO: 1160028 - RNA, 19 nt, Artificial Sequence
  Description of Artificial Sequence: Synthetic oligonucleotide
aguccccgacgugguagau

SEQ ID NO: 1160029 - RNA, 19 nt, Artificial Sequence
  Description of Artificial Sequence: Synthetic oligonucleotide
caucuccacggucccggcu

SEQ ID NO: 1160030 - RNA, 19 nt, Artificial Sequence
  Description of Artificial Sequence: Synthetic oligonucleotide
ggccugauugucaccgacu

SEQ ID NO: 1160031 - RNA, 19 nt, Artificial Sequence
  Description of Artificial Sequence: Synthetic oligonucleotide
agauaccgccgcagugguu

SEQ ID NO: 1160032 - RNA, 19 nt, Artificial Sequence
  Description of Artificial Sequence: Synthetic oligonucleotide
gguccgugugugucaaguu

SEQ ID NO: 1160033 - RNA, 19 nt, Artificial Sequence
  Description of Artificial Sequence: Synthetic oligonucleotide
guccuggacuggacaccca

SEQ ID NO: 1160034 - RNA, 19 nt, Artificial Sequence
  Description of Artificial Sequence: Synthetic oligonucleotide
cggccaaagguaccuucuc

SEQ ID NO: 1160035 - RNA, 19 nt, Artificial Sequence
  Description of Artificial Sequence: Synthetic oligonucleotide
cuaggcgagcugcuuccuu

SEQ ID NO: 1160036 - RNA, 19 nt, Artificial Sequence
  Description of Artificial Sequence: Synthetic oligonucleotide
agcgccccgcugauguguu

SEQ ID NO: 1160037 - RNA, 19 nt, Artificial Sequence
  Description of Artificial Sequence: Synthetic oligonucleotide
cgaaagucagugucauagu

SEQ ID NO: 1160038 - RNA, 19 nt, Artificial Sequence
  Description of Artificial Sequence: Synthetic oligonucleotide
acccgccggucagaugaau

SEQ ID NO: 1160039 - RNA, 19 nt, Artificial Sequence
  Description of Artificial Sequence: Synthetic oligonucleotide
gcugaaggugcggcuacgu

SEQ ID NO: 1160040 - RNA, 19 nt, Artificial Sequence
  Description of Artificial Sequence: Synthetic oligonucleotide
ccaauccaggugaccccga

SEQ ID NO: 1160041 - RNA, 19 nt, Artificial Sequence
  Description of Artificial Sequence: Synthetic oligonucleotide
gcggcugaaggugcggcua

SEQ ID NO: 1160042 - RNA, 19 nt, Artificial Sequence
  Description of Artificial Sequence: Synthetic oligonucleotide
cgaucauauacccgccggu

SEQ ID NO: 1160043 - RNA, 19 nt, Artificial Sequence
  Description of Artificial Sequence: Synthetic oligonucleotide
ccgccgcagugguuugcag

SEQ ID NO: 1160044 - RNA, 19 nt, Artificial Sequence
  Description of Artificial Sequence: Synthetic oligonucleotide
ggauaggacccaggauccu

SEQ ID NO: 1160045 - RNA, 19 nt, Artificial Sequence
  Description of Artificial Sequence: Synthetic oligonucleotide
gccgcuuagcagguucaua

SEQ ID NO: 1160046 - RNA, 19 nt, Artificial Sequence
  Description of Artificial Sequence: Synthetic oligonucleotide
cagcgucguccucuacacu

SEQ ID NO: 1160047 - RNA, 19 nt, Artificial Sequence
  Description of Artificial Sequence: Synthetic oligonucleotide
cgcagugguuugcaguucu

SEQ ID NO: 1160048 - RNA, 19 nt, Artificial Sequence
  Description of Artificial Sequence: Synthetic oligonucleotide
ggucagccgcuuagcaggu

SEQ ID NO: 1160049 - RNA, 19 nt, Artificial Sequence
  Description of Artificial Sequence: Synthetic oligonucleotide
ccccgacgugguagaugag

SEQ ID NO: 1160050 - RNA, 19 nt, Artificial Sequence
  Description of Artificial Sequence: Synthetic oligonucleotide
cgccccgcugauguguuuc

SEQ ID NO: 1160051 - RNA, 19 nt, Artificial Sequence
  Description of Artificial Sequence: Synthetic oligonucleotide
cccugcgaugguccacaca

SEQ ID NO: 1160052 - RNA, 19 nt, Artificial Sequence
  Description of Artificial Sequence: Synthetic oligonucleotide
cccgcugauguguuuccau

SEQ ID NO: 1160053 - RNA, 19 nt, Artificial Sequence
  Description of Artificial Sequence: Synthetic oligonucleotide
ccgcagugguuugcaguuc

SEQ ID NO: 1160054 - RNA, 19 nt, Artificial Sequence
  Description of Artificial Sequence: Synthetic oligonucleotide
ccacaacuugguguugggu

SEQ ID NO: 1160055 - RNA, 19 nt, Artificial Sequence
  Description of Artificial Sequence: Synthetic oligonucleotide
cggcuacgucuccuccgcc

SEQ ID NO: 1160056 - RNA, 19 nt, Artificial Sequence
  Description of Artificial Sequence: Synthetic oligonucleotide
gccaguccccgacguggua

SEQ ID NO: 1160057 - RNA, 19 nt, Artificial Sequence
  Description of Artificial Sequence: Synthetic oligonucleotide
cgaccacccgcacaucugu

SEQ ID NO: 1160058 - RNA, 19 nt, Artificial Sequence
  Description of Artificial Sequence: Synthetic oligonucleotide
cuccacggucccggcuaua

SEQ ID NO: 1160059 - RNA, 19 nt, Artificial Sequence
  Description of Artificial Sequence: Synthetic oligonucleotide
ccacggucccggcuauagu

SEQ ID NO: 1160060 - RNA, 19 nt, Artificial Sequence
  Description of Artificial Sequence: Synthetic oligonucleotide
ggucccggcuauagucauu

SEQ ID NO: 1160061 - RNA, 19 nt, Artificial Sequence
  Description of Artificial Sequence: Synthetic oligonucleotide
cgccccugcgaugguccac

SEQ ID NO: 1160062 - RNA, 19 nt, Artificial Sequence
  Description of Artificial Sequence: Synthetic oligonucleotide
cggucccggcuauagucau

SEQ ID NO: 1160063 - RNA, 19 nt, Artificial Sequence
  Description of Artificial Sequence: Synthetic oligonucleotide
cgucguccucuacacucuu

SEQ ID NO: 1160064 - RNA, 19 nt, Artificial Sequence
  Description of Artificial Sequence: Synthetic oligonucleotide
cgcugcgcucaucucgcuu

SEQ ID NO: 1160065 - RNA, 19 nt, Artificial Sequence
  Description of Artificial Sequence: Synthetic oligonucleotide
gcgccccgcugauguguuu

SEQ ID NO: 1160066 - RNA, 19 nt, Artificial Sequence
  Description of Artificial Sequence: Synthetic oligonucleotide
ucuaccuuggaaaagauga

SEQ ID NO: 1160067 - RNA, 19 nt, Artificial Sequence
  Description of Artificial Sequence: Synthetic oligonucleotide
aagcaaauauagcuuagcc

SEQ ID NO: 1160068 - RNA, 19 nt, Artificial Sequence
  Description of Artificial Sequence: Synthetic oligonucleotide
ugaucaagcaaauauagcu

SEQ ID NO: 1160069 - RNA, 19 nt, Artificial Sequence
  Description of Artificial Sequence: Synthetic oligonucleotide
uauagcuuagccuauaacu

SEQ ID NO: 1160070 - RNA, 19 nt, Artificial Sequence
  Description of Artificial Sequence: Synthetic oligonucleotide
cuuaucaccauccuggucc

SEQ ID NO: 1160071 - RNA, 19 nt, Artificial Sequence
  Description of Artificial Sequence: Synthetic oligonucleotide
aucuccuuagcgcugaucc

SEQ ID NO: 1160072 - RNA, 19 nt, Artificial Sequence
  Description of Artificial Sequence: Synthetic oligonucleotide
uagaauguuagcaacugag

SEQ ID NO: 1160073 - RNA, 19 nt, Artificial Sequence
  Description of Artificial Sequence: Synthetic oligonucleotide
ucuaguuucaccccguuca

SEQ ID NO: 1160074 - RNA, 19 nt, Artificial Sequence
  Description of Artificial Sequence: Synthetic oligonucleotide
acugagagagauuugauca

SEQ ID NO: 1160075 - RNA, 19 nt, Artificial Sequence
  Description of Artificial Sequence: Synthetic oligonucleotide
aacugagagagauuugauc

SEQ ID NO: 1160076 - RNA, 19 nt, Artificial Sequence
  Description of Artificial Sequence: Synthetic oligonucleotide
aaaguguaguuuguuuucc

SEQ ID NO: 1160077 - RNA, 19 nt, Artificial Sequence
  Description of Artificial Sequence: Synthetic oligonucleotide
  modified_base (16)..(16): a, c, u, g, unknown or other
aagaaagaaagaaaanaaa

SEQ ID NO: 1160078 - RNA, 19 nt, Artificial Sequence
  Description of Artificial Sequence: Synthetic oligonucleotide
uccucaugcacauugcggg

SEQ ID NO: 1160079 - RNA, 19 nt, Artificial Sequence
  Description of Artificial Sequence: Synthetic oligonucleotide
aagaugaccaucagcuucc

SEQ ID NO: 1160080 - RNA, 19 nt, Artificial Sequence
  Description of Artificial Sequence: Synthetic oligonucleotide
auaccagcgaccuuugagg

SEQ ID NO: 1160081 - RNA, 19 nt, Artificial Sequence
  Description of Artificial Sequence: Synthetic oligonucleotide
auuucccucucauuguggc

SEQ ID NO: 1160082 - RNA, 19 nt, Artificial Sequence
  Description of Artificial Sequence: Synthetic oligonucleotide
ucucccucaagauauagga

SEQ ID NO: 1160083 - RNA, 19 nt, Artificial Sequence
  Description of Artificial Sequence: Synthetic oligonucleotide
agagcauacgaacacagca

SEQ ID NO: 1160084 - RNA, 19 nt, Artificial Sequence
  Description of Artificial Sequence: Synthetic oligonucleotide
gauaccagcgaccuuugag

SEQ ID NO: 1160085 - RNA, 19 nt, Artificial Sequence
  Description of Artificial Sequence: Synthetic oligonucleotide
aaacaccccaaacaguucu

SEQ ID NO: 1160086 - RNA, 19 nt, Artificial Sequence
  Description of Artificial Sequence: Synthetic oligonucleotide
uguugcaucuccuuagcgc

SEQ ID NO: 1160087 - RNA, 19 nt, Artificial Sequence
  Description of Artificial Sequence: Synthetic oligonucleotide
ucugggacagcacucuuag

SEQ ID NO: 1160088 - RNA, 19 nt, Artificial Sequence
  Description of Artificial Sequence: Synthetic oligonucleotide
uagcuuagccuauaacugg

SEQ ID NO: 1160089 - RNA, 19 nt, Artificial Sequence
  Description of Artificial Sequence: Synthetic oligonucleotide
agcaaauauagcuuagccu

SEQ ID NO: 1160090 - RNA, 19 nt, Artificial Sequence
  Description of Artificial Sequence: Synthetic oligonucleotide
auauagcuuagccuauaac

SEQ ID NO: 1160091 - RNA, 19 nt, Artificial Sequence
  Description of Artificial Sequence: Synthetic oligonucleotide
gacacauagccuauuaagc

SEQ ID NO: 1160092 - RNA, 19 nt, Artificial Sequence
  Description of Artificial Sequence: Synthetic oligonucleotide
uugaucaagcaaauauagc

SEQ ID NO: 1160093 - RNA, 19 nt, Artificial Sequence
  Description of Artificial Sequence: Synthetic oligonucleotide
gguagagcauuucagaacc

SEQ ID NO: 1160094 - RNA, 19 nt, Artificial Sequence
  Description of Artificial Sequence: Synthetic oligonucleotide
ugcucagaauuccucaugc

SEQ ID NO: 1160095 - RNA, 19 nt, Artificial Sequence
  Description of Artificial Sequence: Synthetic oligonucleotide
uagccuauuaagcacauuu

SEQ ID NO: 1160096 - RNA, 19 nt, Artificial Sequence
  Description of Artificial Sequence: Synthetic oligonucleotide
ucaaccacaggucucacua

SEQ ID NO: 1160097 - RNA, 19 nt, Artificial Sequence
  Description of Artificial Sequence: Synthetic oligonucleotide
ucaagcaaauauagcuuag

SEQ ID NO: 1160098 - RNA, 19 nt, Artificial Sequence
  Description of Artificial Sequence: Synthetic oligonucleotide
agagauuugaucaagcaaa

SEQ ID NO: 1160099 - RNA, 19 nt, Artificial Sequence
  Description of Artificial Sequence: Synthetic oligonucleotide
acacauagccuauuaagca

SEQ ID NO: 1160100 - RNA, 19 nt, Artificial Sequence
  Description of Artificial Sequence: Synthetic oligonucleotide
aguguugcaucuccuuagc

SEQ ID NO: 1160101 - RNA, 19 nt, Artificial Sequence
  Description of Artificial Sequence: Synthetic oligonucleotide
cacuuugaguuccucaugg

SEQ ID NO: 1160102 - RNA, 19 nt, Artificial Sequence
  Description of Artificial Sequence: Synthetic oligonucleotide
gugauucugguucucgucg

SEQ ID NO: 1160103 - RNA, 19 nt, Artificial Sequence
  Description of Artificial Sequence: Synthetic oligonucleotide
ugaaccaaacaccccaaac

SEQ ID NO: 1160104 - RNA, 19 nt, Artificial Sequence
  Description of Artificial Sequence: Synthetic oligonucleotide
auacgaacacagcagaaga

SEQ ID NO: 1160105 - RNA, 19 nt, Artificial Sequence
  Description of Artificial Sequence: Synthetic oligonucleotide
uagccuauaacugguacag

SEQ ID NO: 1160106 - RNA, 19 nt, Artificial Sequence
  Description of Artificial Sequence: Synthetic oligonucleotide
aauauagcuuagccuauaa

SEQ ID NO: 1160107 - RNA, 19 nt, Artificial Sequence
  Description of Artificial Sequence: Synthetic oligonucleotide
ugagccagagcauacgaac

SEQ ID NO: 1160108 - RNA, 19 nt, Artificial Sequence
  Description of Artificial Sequence: Synthetic oligonucleotide
cacauugcgggcauagucc

SEQ ID NO: 1160109 - RNA, 19 nt, Artificial Sequence
  Description of Artificial Sequence: Synthetic oligonucleotide
auaagucugggccaugcug

SEQ ID NO: 1160110 - RNA, 19 nt, Artificial Sequence
  Description of Artificial Sequence: Synthetic oligonucleotide
gauauaggaagggucagac

SEQ ID NO: 1160111 - RNA, 19 nt, Artificial Sequence
  Description of Artificial Sequence: Synthetic oligonucleotide
aacucgcuauacuugagaa

SEQ ID NO: 1160112 - RNA, 19 nt, Artificial Sequence
  Description of Artificial Sequence: Synthetic oligonucleotide
cucgcuauacuugagaauc

SEQ ID NO: 1160113 - RNA, 19 nt, Artificial Sequence
  Description of Artificial Sequence: Synthetic oligonucleotide
gaugcauccaucaggagga

SEQ ID NO: 1160114 - RNA, 19 nt, Artificial Sequence
  Description of Artificial Sequence: Synthetic oligonucleotide
auagcuuagccuauaacug

SEQ ID NO: 1160115 - RNA, 19 nt, Artificial Sequence
  Description of Artificial Sequence: Synthetic oligonucleotide
agagagauuugaucaagca

SEQ ID NO: 1160116 - RNA, 19 nt, Artificial Sequence
  Description of Artificial Sequence: Synthetic oligonucleotide
aguuucaccccguucaagu

SEQ ID NO: 1160117 - RNA, 19 nt, Artificial Sequence
  Description of Artificial Sequence: Synthetic oligonucleotide
aaagaagguucugggacag

SEQ ID NO: 1160118 - RNA, 19 nt, Artificial Sequence
  Description of Artificial Sequence: Synthetic oligonucleotide
cacccaauugucaucaaug

SEQ ID NO: 1160119 - RNA, 19 nt, Artificial Sequence
  Description of Artificial Sequence: Synthetic oligonucleotide
auuccucaugcacauugcg

SEQ ID NO: 1160120 - RNA, 19 nt, Artificial Sequence
  Description of Artificial Sequence: Synthetic oligonucleotide
uuucccgaguggaugagug

SEQ ID NO: 1160121 - RNA, 19 nt, Artificial Sequence
  Description of Artificial Sequence: Synthetic oligonucleotide
ggacacauagccuauuaag

SEQ ID NO: 1160122 - RNA, 19 nt, Artificial Sequence
  Description of Artificial Sequence: Synthetic oligonucleotide
acugguacagaagggcugc

SEQ ID NO: 1160123 - RNA, 19 nt, Artificial Sequence
  Description of Artificial Sequence: Synthetic oligonucleotide
uagggaucaugguaguucc

SEQ ID NO: 1160124 - RNA, 19 nt, Artificial Sequence
  Description of Artificial Sequence: Synthetic oligonucleotide
caagucccgaacaaucucc

SEQ ID NO: 1160125 - RNA, 19 nt, Artificial Sequence
  Description of Artificial Sequence: Synthetic oligonucleotide
agugaagaacucgcuauac

SEQ ID NO: 1160126 - RNA, 19 nt, Artificial Sequence
  Description of Artificial Sequence: Synthetic oligonucleotide
gcaaauauagcuuagccua

SEQ ID NO: 1160127 - RNA, 19 nt, Artificial Sequence
  Description of Artificial Sequence: Synthetic oligonucleotide
cacauagccuauuaagcac

SEQ ID NO: 1160128 - RNA, 19 nt, Artificial Sequence
  Description of Artificial Sequence: Synthetic oligonucleotide
ugauucugguucucgucgg

SEQ ID NO: 1160129 - RNA, 19 nt, Artificial Sequence
  Description of Artificial Sequence: Synthetic oligonucleotide
aagauauaggaagggucag

SEQ ID NO: 1160130 - RNA, 19 nt, Artificial Sequence
  Description of Artificial Sequence: Synthetic oligonucleotide
aguagaauguuagcaacug

SEQ ID NO: 1160131 - RNA, 19 nt, Artificial Sequence
  Description of Artificial Sequence: Synthetic oligonucleotide
uugcugguucucaacagug

SEQ ID NO: 1160132 - RNA, 19 nt, Artificial Sequence
  Description of Artificial Sequence: Synthetic oligonucleotide
ugagagagauuugaucaag

SEQ ID NO: 1160133 - RNA, 19 nt, Artificial Sequence
  Description of Artificial Sequence: Synthetic oligonucleotide
gucucacuagaccacaggc

SEQ ID NO: 1160134 - RNA, 19 nt, Artificial Sequence
  Description of Artificial Sequence: Synthetic oligonucleotide
uuagggaucaugguaguuc

SEQ ID NO: 1160135 - RNA, 19 nt, Artificial Sequence
  Description of Artificial Sequence: Synthetic oligonucleotide
aucaagcaaauauagcuua

SEQ ID NO: 1160136 - RNA, 19 nt, Artificial Sequence
  Description of Artificial Sequence: Synthetic oligonucleotide
aauaagucugggccaugcu

SEQ ID NO: 1160137 - RNA, 19 nt, Artificial Sequence
  Description of Artificial Sequence: Synthetic oligonucleotide
uccauggucacaaucccau

SEQ ID NO: 1160138 - RNA, 19 nt, Artificial Sequence
  Description of Artificial Sequence: Synthetic oligonucleotide
gagagauuugaucaagcaa

SEQ ID NO: 1160139 - RNA, 19 nt, Artificial Sequence
  Description of Artificial Sequence: Synthetic oligonucleotide
aaucccaucaugguuggaa

SEQ ID NO: 1160140 - RNA, 19 nt, Artificial Sequence
  Description of Artificial Sequence: Synthetic oligonucleotide
uuuaauaagucugggccau

SEQ ID NO: 1160141 - RNA, 19 nt, Artificial Sequence
  Description of Artificial Sequence: Synthetic oligonucleotide
uccaucagcuugcugccag

SEQ ID NO: 1160142 - RNA, 19 nt, Artificial Sequence
  Description of Artificial Sequence: Synthetic oligonucleotide
aaccacaggucucacuaga

SEQ ID NO: 1160143 - RNA, 19 nt, Artificial Sequence
  Description of Artificial Sequence: Synthetic oligonucleotide
uguccauccaucucuaguu

SEQ ID NO: 1160144 - RNA, 19 nt, Artificial Sequence
  Description of Artificial Sequence: Synthetic oligonucleotide
gagacugguggccuggccc

SEQ ID NO: 1160145 - RNA, 19 nt, Artificial Sequence
  Description of Artificial Sequence: Synthetic oligonucleotide
uuucugaugcgccgggucu

SEQ ID NO: 1160146 - RNA, 19 nt, Artificial Sequence
  Description of Artificial Sequence: Synthetic oligonucleotide
agggaacucugccuggacg

SEQ ID NO: 1160147 - RNA, 19 nt, Artificial Sequence
  Description of Artificial Sequence: Synthetic oligonucleotide
agcauacgaacacagcaga

SEQ ID NO: 1160148 - RNA, 19 nt, Artificial Sequence
  Description of Artificial Sequence: Synthetic oligonucleotide
uaauaagucugggccaugc

SEQ ID NO: 1160149 - RNA, 19 nt, Artificial Sequence
  Description of Artificial Sequence: Synthetic oligonucleotide
ucuccauaauccaguguug

SEQ ID NO: 1160150 - RNA, 19 nt, Artificial Sequence
  Description of Artificial Sequence: Synthetic oligonucleotide
gagcauacgaacacagcag

SEQ ID NO: 1160151 - RNA, 19 nt, Artificial Sequence
  Description of Artificial Sequence: Synthetic oligonucleotide
guagguagagcauuucaga

SEQ ID NO: 1160152 - RNA, 19 nt, Artificial Sequence
  Description of Artificial Sequence: Synthetic oligonucleotide
ucagggugaaggaaugaaa

SEQ ID NO: 1160153 - RNA, 19 nt, Artificial Sequence
  Description of Artificial Sequence: Synthetic oligonucleotide
ugauccuccggucaguguu

SEQ ID NO: 1160154 - RNA, 19 nt, Artificial Sequence
  Description of Artificial Sequence: Synthetic oligonucleotide
aaguguucugcuguuuucu

SEQ ID NO: 1160155 - RNA, 19 nt, Artificial Sequence
  Description of Artificial Sequence: Synthetic oligonucleotide
acccaauugucaucaaugu

SEQ ID NO: 1160156 - RNA, 19 nt, Artificial Sequence
  Description of Artificial Sequence: Synthetic oligonucleotide
cugcuaagcaacgaaucgg

SEQ ID NO: 1160157 - RNA, 19 nt, Artificial Sequence
  Description of Artificial Sequence: Synthetic oligonucleotide
acuggcaaggagaugaacu

SEQ ID NO: 1160158 - RNA, 19 nt, Artificial Sequence
  Description of Artificial Sequence: Synthetic oligonucleotide
auugagggcauuguauuca

SEQ ID NO: 1160159 - RNA, 19 nt, Artificial Sequence
  Description of Artificial Sequence: Synthetic oligonucleotide
auaauccaguguugcaucu

SEQ ID NO: 1160160 - RNA, 19 nt, Artificial Sequence
  Description of Artificial Sequence: Synthetic oligonucleotide
uacgaacacagcagaagaa

SEQ ID NO: 1160161 - RNA, 19 nt, Artificial Sequence
  Description of Artificial Sequence: Synthetic oligonucleotide
uugagcaugccccggcugu

SEQ ID NO: 1160162 - RNA, 19 nt, Artificial Sequence
  Description of Artificial Sequence: Synthetic oligonucleotide
gagagagauuugaucaagc

SEQ ID NO: 1160163 - RNA, 19 nt, Artificial Sequence
  Description of Artificial Sequence: Synthetic oligonucleotide
gggaacucugccuggacgg

SEQ ID NO: 1160164 - RNA, 19 nt, Artificial Sequence
  Description of Artificial Sequence: Synthetic oligonucleotide
uagcaacugagagagauuu

SEQ ID NO: 1160165 - RNA, 19 nt, Artificial Sequence
  Description of Artificial Sequence: Synthetic oligonucleotide
aacugguacagaagggcug

SEQ ID NO: 1160166 - RNA, 19 nt, Artificial Sequence
  Description of Artificial Sequence: Synthetic oligonucleotide
cuaccuuggaaaagaugac

SEQ ID NO: 1160167 - RNA, 19 nt, Artificial Sequence
  Description of Artificial Sequence: Synthetic oligonucleotide
cgaacaaucuccuugacca

SEQ ID NO: 1160168 - RNA, 19 nt, Artificial Sequence
  Description of Artificial Sequence: Synthetic oligonucleotide
auugcgggcauaguccauc

SEQ ID NO: 1160169 - RNA, 19 nt, Artificial Sequence
  Description of Artificial Sequence: Synthetic oligonucleotide
gaaguguucugcuguuuuc

SEQ ID NO: 1160170 - RNA, 19 nt, Artificial Sequence
  Description of Artificial Sequence: Synthetic oligonucleotide
uugucggccugauaccagc

SEQ ID NO: 1160171 - RNA, 19 nt, Artificial Sequence
  Description of Artificial Sequence: Synthetic oligonucleotide
gguagguagagcauuucag

SEQ ID NO: 1160172 - RNA, 19 nt, Artificial Sequence
  Description of Artificial Sequence: Synthetic oligonucleotide
agccaaaccaugggacucc

SEQ ID NO: 1160173 - RNA, 19 nt, Artificial Sequence
  Description of Artificial Sequence: Synthetic oligonucleotide
uagagcauuucagaaccac

SEQ ID NO: 1160174 - RNA, 19 nt, Artificial Sequence
  Description of Artificial Sequence: Synthetic oligonucleotide
uucccgaguggaugagugg

SEQ ID NO: 1160175 - RNA, 19 nt, Artificial Sequence
  Description of Artificial Sequence: Synthetic oligonucleotide
guguugcaucuccuuagcg

SEQ ID NO: 1160176 - RNA, 19 nt, Artificial Sequence
  Description of Artificial Sequence: Synthetic oligonucleotide
ucacccaauugucaucaau

SEQ ID NO: 1160177 - RNA, 19 nt, Artificial Sequence
  Description of Artificial Sequence: Synthetic oligonucleotide
guugcaucuccuuagcgcu

SEQ ID NO: 1160178 - RNA, 19 nt, Artificial Sequence
  Description of Artificial Sequence: Synthetic oligonucleotide
guuucaccccguucaagug

SEQ ID NO: 1160179 - RNA, 19 nt, Artificial Sequence
  Description of Artificial Sequence: Synthetic oligonucleotide
gaccauagagggaacucug

SEQ ID NO: 1160180 - RNA, 19 nt, Artificial Sequence
  Description of Artificial Sequence: Synthetic oligonucleotide
ccuauaacugguacagaag

SEQ ID NO: 1160181 - RNA, 19 nt, Artificial Sequence
  Description of Artificial Sequence: Synthetic oligonucleotide
guacagaagggcugcugcc

SEQ ID NO: 1160182 - RNA, 19 nt, Artificial Sequence
  Description of Artificial Sequence: Synthetic oligonucleotide
aaauauagcuuagccuaua

SEQ ID NO: 1160183 - RNA, 19 nt, Artificial Sequence
  Description of Artificial Sequence: Synthetic oligonucleotide
uuagcaacugagagagauu

SEQ ID NO: 1160184 - RNA, 19 nt, Artificial Sequence
  Description of Artificial Sequence: Synthetic oligonucleotide
ucgcuauacuugagaaucu

SEQ ID NO: 1160185 - RNA, 19 nt, Artificial Sequence
  Description of Artificial Sequence: Synthetic oligonucleotide
uaccagcgaccuuugaggu

SEQ ID NO: 1160186 - RNA, 19 nt, Artificial Sequence
  Description of Artificial Sequence: Synthetic oligonucleotide
agaccauagagggaacucu

SEQ ID NO: 1160187 - RNA, 19 nt, Artificial Sequence
  Description of Artificial Sequence: Synthetic oligonucleotide
caagucaaccacaggucuc

SEQ ID NO: 1160188 - RNA, 19 nt, Artificial Sequence
  Description of Artificial Sequence: Synthetic oligonucleotide
cccucaagauauaggaagg

SEQ ID NO: 1160189 - RNA, 19 nt, Artificial Sequence
  Description of Artificial Sequence: Synthetic oligonucleotide
agccagaccauagagggaa

SEQ ID NO: 1160190 - RNA, 19 nt, Artificial Sequence
  Description of Artificial Sequence: Synthetic oligonucleotide
gauugucggccugauacca

SEQ ID NO: 1160191 - RNA, 19 nt, Artificial Sequence
  Description of Artificial Sequence: Synthetic oligonucleotide
ucgucggcaauggcgauca

SEQ ID NO: 1160192 - RNA, 19 nt, Artificial Sequence
  Description of Artificial Sequence: Synthetic oligonucleotide
ugccuggacggcauugcca

SEQ ID NO: 1160193 - RNA, 19 nt, Artificial Sequence
  Description of Artificial Sequence: Synthetic oligonucleotide
cuuucugaugcgccggguc

SEQ ID NO: 1160194 - RNA, 19 nt, Artificial Sequence
  Description of Artificial Sequence: Synthetic oligonucleotide
aggacacauagccuauuaa

SEQ ID NO: 1160195 - RNA, 19 nt, Artificial Sequence
  Description of Artificial Sequence: Synthetic oligonucleotide
gaucugccugaccuucacc

SEQ ID NO: 1160196 - RNA, 19 nt, Artificial Sequence
  Description of Artificial Sequence: Synthetic oligonucleotide
ucccgaguggaugaguggu

SEQ ID NO: 1160197 - RNA, 19 nt, Artificial Sequence
  Description of Artificial Sequence: Synthetic oligonucleotide
agauauaggaagggucaga

SEQ ID NO: 1160198 - RNA, 19 nt, Artificial Sequence
  Description of Artificial Sequence: Synthetic oligonucleotide
cauagccgucaccaucagg

SEQ ID NO: 1160199 - RNA, 19 nt, Artificial Sequence
  Description of Artificial Sequence: Synthetic oligonucleotide
caaacucuuuucuccuguc

SEQ ID NO: 1160200 - RNA, 19 nt, Artificial Sequence
  Description of Artificial Sequence: Synthetic oligonucleotide
ggucucacuagaccacagg

SEQ ID NO: 1160201 - RNA, 19 nt, Artificial Sequence
  Description of Artificial Sequence: Synthetic oligonucleotide
agugcccacuggcaaggag

SEQ ID NO: 1160202 - RNA, 19 nt, Artificial Sequence
  Description of Artificial Sequence: Synthetic oligonucleotide
ucugaugcgccgggucugg

SEQ ID NO: 1160203 - RNA, 19 nt, Artificial Sequence
  Description of Artificial Sequence: Synthetic oligonucleotide
acucgcuauacuugagaau

SEQ ID NO: 1160204 - RNA, 19 nt, Artificial Sequence
  Description of Artificial Sequence: Synthetic oligonucleotide
uuaauaagucugggccaug

SEQ ID NO: 1160205 - RNA, 19 nt, Artificial Sequence
  Description of Artificial Sequence: Synthetic oligonucleotide
aucccaucaugguuggaau

SEQ ID NO: 1160206 - RNA, 19 nt, Artificial Sequence
  Description of Artificial Sequence: Synthetic oligonucleotide
agcacucuuagggaucaug

SEQ ID NO: 1160207 - RNA, 19 nt, Artificial Sequence
  Description of Artificial Sequence: Synthetic oligonucleotide
auauucaucccaggacaca

SEQ ID NO: 1160208 - RNA, 19 nt, Artificial Sequence
  Description of Artificial Sequence: Synthetic oligonucleotide
ucacuagaccacaggccuc

SEQ ID NO: 1160209 - RNA, 19 nt, Artificial Sequence
  Description of Artificial Sequence: Synthetic oligonucleotide
caaccacaggucucacuag

SEQ ID NO: 1160210 - RNA, 19 nt, Artificial Sequence
  Description of Artificial Sequence: Synthetic oligonucleotide
gaucaagcaaauauagcuu

SEQ ID NO: 1160211 - RNA, 19 nt, Artificial Sequence
  Description of Artificial Sequence: Synthetic oligonucleotide
gcuauacuugagaaucucc

SEQ ID NO: 1160212 - RNA, 19 nt, Artificial Sequence
  Description of Artificial Sequence: Synthetic oligonucleotide
cugcagguggauugucggc

SEQ ID NO: 1160213 - RNA, 19 nt, Artificial Sequence
  Description of Artificial Sequence: Synthetic oligonucleotide
ugcccacuggcaaggagau

SEQ ID NO: 1160214 - RNA, 19 nt, Artificial Sequence
  Description of Artificial Sequence: Synthetic oligonucleotide
aucuaccuuggaaaagaug

SEQ ID NO: 1160215 - RNA, 19 nt, Artificial Sequence
  Description of Artificial Sequence: Synthetic oligonucleotide
caccccaaacaguucucag

SEQ ID NO: 1160216 - RNA, 19 nt, Artificial Sequence
  Description of Artificial Sequence: Synthetic oligonucleotide
agcuuagccuauaacuggu

SEQ ID NO: 1160217 - RNA, 19 nt, Artificial Sequence
  Description of Artificial Sequence: Synthetic oligonucleotide
ccauagagggaacucugcc

SEQ ID NO: 1160218 - RNA, 19 nt, Artificial Sequence
  Description of Artificial Sequence: Synthetic oligonucleotide
ugauaccagcgaccuuuga

SEQ ID NO: 1160219 - RNA, 19 nt, Artificial Sequence
  Description of Artificial Sequence: Synthetic oligonucleotide
ggauugucggccugauacc

SEQ ID NO: 1160220 - RNA, 19 nt, Artificial Sequence
  Description of Artificial Sequence: Synthetic oligonucleotide
aucccaggacacauagccg

SEQ ID NO: 1160221 - RNA, 19 nt, Artificial Sequence
  Description of Artificial Sequence: Synthetic oligonucleotide
gaugcgccgggucugggaa

SEQ ID NO: 1160222 - RNA, 19 nt, Artificial Sequence
  Description of Artificial Sequence: Synthetic oligonucleotide
gucacaaucccaucauggu

SEQ ID NO: 1160223 - RNA, 19 nt, Artificial Sequence
  Description of Artificial Sequence: Synthetic oligonucleotide
gagugguuggcaggucuag

SEQ ID NO: 1160224 - RNA, 19 nt, Artificial Sequence
  Description of Artificial Sequence: Synthetic oligonucleotide
cucuuucccgaguggauga

SEQ ID NO: 1160225 - RNA, 19 nt, Artificial Sequence
  Description of Artificial Sequence: Synthetic oligonucleotide
cuugagcaugccccggcug

SEQ ID NO: 1160226 - RNA, 19 nt, Artificial Sequence
  Description of Artificial Sequence: Synthetic oligonucleotide
acggcauugccaccagcca

SEQ ID NO: 1160227 - RNA, 19 nt, Artificial Sequence
  Description of Artificial Sequence: Synthetic oligonucleotide
cauagagggaacucugccu

SEQ ID NO: 1160228 - RNA, 19 nt, Artificial Sequence
  Description of Artificial Sequence: Synthetic oligonucleotide
cucuaguuucaccccguuc

SEQ ID NO: 1160229 - RNA, 19 nt, Artificial Sequence
  Description of Artificial Sequence: Synthetic oligonucleotide
uucugaugcgccgggucug

SEQ ID NO: 1160230 - RNA, 19 nt, Artificial Sequence
  Description of Artificial Sequence: Synthetic oligonucleotide
ugaugcgccgggucuggga

SEQ ID NO: 1160231 - RNA, 19 nt, Artificial Sequence
  Description of Artificial Sequence: Synthetic oligonucleotide
ugguacagaagggcugcug

SEQ ID NO: 1160232 - RNA, 19 nt, Artificial Sequence
  Description of Artificial Sequence: Synthetic oligonucleotide
ggugauucugguucucguc

SEQ ID NO: 1160233 - RNA, 19 nt, Artificial Sequence
  Description of Artificial Sequence: Synthetic oligonucleotide
cugagagagauuugaucaa

SEQ ID NO: 1160234 - RNA, 19 nt, Artificial Sequence
  Description of Artificial Sequence: Synthetic oligonucleotide
cagaccauagagggaacuc

SEQ ID NO: 1160235 - RNA, 19 nt, Artificial Sequence
  Description of Artificial Sequence: Synthetic oligonucleotide
uggacggcauugccaccag

SEQ ID NO: 1160236 - RNA, 19 nt, Artificial Sequence
  Description of Artificial Sequence: Synthetic oligonucleotide
cauugccaccagccaaacc

SEQ ID NO: 1160237 - RNA, 19 nt, Artificial Sequence
  Description of Artificial Sequence: Synthetic oligonucleotide
ccgaacaaucuccuugacc

SEQ ID NO: 1160238 - RNA, 19 nt, Artificial Sequence
  Description of Artificial Sequence: Synthetic oligonucleotide
aggguagguagagcauuuc

SEQ ID NO: 1160239 - RNA, 19 nt, Artificial Sequence
  Description of Artificial Sequence: Synthetic oligonucleotide
acauagccgucaccaucag

SEQ ID NO: 1160240 - RNA, 19 nt, Artificial Sequence
  Description of Artificial Sequence: Synthetic oligonucleotide
auugucggccugauaccag

SEQ ID NO: 1160241 - RNA, 19 nt, Artificial Sequence
  Description of Artificial Sequence: Synthetic oligonucleotide
ccucaagauauaggaaggg

SEQ ID NO: 1160242 - RNA, 19 nt, Artificial Sequence
  Description of Artificial Sequence: Synthetic oligonucleotide
ggguagguagagcauuuca

SEQ ID NO: 1160243 - RNA, 19 nt, Artificial Sequence
  Description of Artificial Sequence: Synthetic oligonucleotide
gguuccugauggcaucagc

SEQ ID NO: 1160244 - RNA, 19 nt, Artificial Sequence
  Description of Artificial Sequence: Synthetic oligonucleotide
ggacccaagucaaccacag

SEQ ID NO: 1160245 - RNA, 19 nt, Artificial Sequence
  Description of Artificial Sequence: Synthetic oligonucleotide
ccugucuuucacccaauug

SEQ ID NO: 1160246 - RNA, 19 nt, Artificial Sequence
  Description of Artificial Sequence: Synthetic oligonucleotide
gagggaacucugccuggac

SEQ ID NO: 1160247 - RNA, 19 nt, Artificial Sequence
  Description of Artificial Sequence: Synthetic oligonucleotide
gcuggaaaggacacauagc

SEQ ID NO: 1160248 - RNA, 19 nt, Artificial Sequence
  Description of Artificial Sequence: Synthetic oligonucleotide
uggccuggccccaguugag

SEQ ID NO: 1160249 - RNA, 19 nt, Artificial Sequence
  Description of Artificial Sequence: Synthetic oligonucleotide
uagccgucaccaucagggu

SEQ ID NO: 1160250 - RNA, 19 nt, Artificial Sequence
  Description of Artificial Sequence: Synthetic oligonucleotide
ugcgccgggucugggaagc

SEQ ID NO: 1160251 - RNA, 19 nt, Artificial Sequence
  Description of Artificial Sequence: Synthetic oligonucleotide
cugccugaccuucaccuga

SEQ ID NO: 1160252 - RNA, 19 nt, Artificial Sequence
  Description of Artificial Sequence: Synthetic oligonucleotide
cagccaaaccaugggacuc

SEQ ID NO: 1160253 - RNA, 19 nt, Artificial Sequence
  Description of Artificial Sequence: Synthetic oligonucleotide
cugggacccaagucaacca

SEQ ID NO: 1160254 - RNA, 19 nt, Artificial Sequence
  Description of Artificial Sequence: Synthetic oligonucleotide
ugagcaugccccggcugug

SEQ ID NO: 1160255 - RNA, 19 nt, Artificial Sequence
  Description of Artificial Sequence: Synthetic oligonucleotide
gggguaggaucucauuuuc

SEQ ID NO: 1160256 - RNA, 19 nt, Artificial Sequence
  Description of Artificial Sequence: Synthetic oligonucleotide
agccuauuaagcacauuuu

SEQ ID NO: 1160257 - RNA, 19 nt, Artificial Sequence
  Description of Artificial Sequence: Synthetic oligonucleotide
agcaacugagagagauuug

SEQ ID NO: 1160258 - RNA, 19 nt, Artificial Sequence
  Description of Artificial Sequence: Synthetic oligonucleotide
aggccucucccucaagaua

SEQ ID NO: 1160259 - RNA, 19 nt, Artificial Sequence
  Description of Artificial Sequence: Synthetic oligonucleotide
cucccucaagauauaggaa

SEQ ID NO: 1160260 - RNA, 19 nt, Artificial Sequence
  Description of Artificial Sequence: Synthetic oligonucleotide
caaauauagcuuagccuau

SEQ ID NO: 1160261 - RNA, 19 nt, Artificial Sequence
  Description of Artificial Sequence: Synthetic oligonucleotide
caccagccaaaccauggga

SEQ ID NO: 1160262 - RNA, 19 nt, Artificial Sequence
  Description of Artificial Sequence: Synthetic oligonucleotide
cccaauugucaucaauguc

SEQ ID NO: 1160263 - RNA, 19 nt, Artificial Sequence
  Description of Artificial Sequence: Synthetic oligonucleotide
caacagugcccacuggcaa

SEQ ID NO: 1160264 - RNA, 19 nt, Artificial Sequence
  Description of Artificial Sequence: Synthetic oligonucleotide
ccaccagccaaaccauggg

SEQ ID NO: 1160265 - RNA, 19 nt, Artificial Sequence
  Description of Artificial Sequence: Synthetic oligonucleotide
gauccuccggucaguguuc

SEQ ID NO: 1160266 - RNA, 19 nt, Artificial Sequence
  Description of Artificial Sequence: Synthetic oligonucleotide
ggggcaugcucagaauucc

SEQ ID NO: 1160267 - RNA, 19 nt, Artificial Sequence
  Description of Artificial Sequence: Synthetic oligonucleotide
gaacucugccuggacggca

SEQ ID NO: 1160268 - RNA, 19 nt, Artificial Sequence
  Description of Artificial Sequence: Synthetic oligonucleotide
cugagccagagcauacgaa

SEQ ID NO: 1160269 - RNA, 19 nt, Artificial Sequence
  Description of Artificial Sequence: Synthetic oligonucleotide
agcaugccccggcugugcu

SEQ ID NO: 1160270 - RNA, 19 nt, Artificial Sequence
  Description of Artificial Sequence: Synthetic oligonucleotide
gcugagccagagcauacga

SEQ ID NO: 1160271 - RNA, 19 nt, Artificial Sequence
  Description of Artificial Sequence: Synthetic oligonucleotide
cagacacaggguagguaga

SEQ ID NO: 1160272 - RNA, 19 nt, Artificial Sequence
  Description of Artificial Sequence: Synthetic oligonucleotide
aggucucacuagaccacag

SEQ ID NO: 1160273 - RNA, 19 nt, Artificial Sequence
  Description of Artificial Sequence: Synthetic oligonucleotide
cuggacggcauugccacca

SEQ ID NO: 1160274 - RNA, 19 nt, Artificial Sequence
  Description of Artificial Sequence: Synthetic oligonucleotide
guggccuuugcuugcuaaa

SEQ ID NO: 1160275 - RNA, 19 nt, Artificial Sequence
  Description of Artificial Sequence: Synthetic oligonucleotide
agccuccuggaaguguucu

SEQ ID NO: 1160276 - RNA, 19 nt, Artificial Sequence
  Description of Artificial Sequence: Synthetic oligonucleotide
ggcugagccagagcauacg

SEQ ID NO: 1160277 - RNA, 19 nt, Artificial Sequence
  Description of Artificial Sequence: Synthetic oligonucleotide
gagcaugccccggcugugc

SEQ ID NO: 1160278 - RNA, 19 nt, Artificial Sequence
  Description of Artificial Sequence: Synthetic oligonucleotide
caugccccggcugugcuca

SEQ ID NO: 1160279 - RNA, 19 nt, Artificial Sequence
  Description of Artificial Sequence: Synthetic oligonucleotide
cacuggcaaggagaugaac

SEQ ID NO: 1160280 - RNA, 19 nt, Artificial Sequence
  Description of Artificial Sequence: Synthetic oligonucleotide
ccccaaacaguucucagaa

SEQ ID NO: 1160281 - RNA, 19 nt, Artificial Sequence
  Description of Artificial Sequence: Synthetic oligonucleotide
accagcgaccuuugagguu

SEQ ID NO: 1160282 - RNA, 19 nt, Artificial Sequence
  Description of Artificial Sequence: Synthetic oligonucleotide
augcgccgggucugggaag

SEQ ID NO: 1160283 - RNA, 19 nt, Artificial Sequence
  Description of Artificial Sequence: Synthetic oligonucleotide
agaaccacccugggaccca

SEQ ID NO: 1160284 - RNA, 19 nt, Artificial Sequence
  Description of Artificial Sequence: Synthetic oligonucleotide
agucccgaacaaucuccuu

SEQ ID NO: 1160285 - RNA, 19 nt, Artificial Sequence
  Description of Artificial Sequence: Synthetic oligonucleotide
ggcaugcucagaauuccuc

SEQ ID NO: 1160286 - RNA, 19 nt, Artificial Sequence
  Description of Artificial Sequence: Synthetic oligonucleotide
ccuuguucagguguccauc

SEQ ID NO: 1160287 - RNA, 19 nt, Artificial Sequence
  Description of Artificial Sequence: Synthetic oligonucleotide
caacugagagagauuugau

SEQ ID NO: 1160288 - RNA, 19 nt, Artificial Sequence
  Description of Artificial Sequence: Synthetic oligonucleotide
auccaguguugcaucuccu

SEQ ID NO: 1160289 - RNA, 19 nt, Artificial Sequence
  Description of Artificial Sequence: Synthetic oligonucleotide
caggucucacuagaccaca

SEQ ID NO: 1160290 - RNA, 19 nt, Artificial Sequence
  Description of Artificial Sequence: Synthetic oligonucleotide
cauagccuauuaagcacau

SEQ ID NO: 1160291 - RNA, 19 nt, Artificial Sequence
  Description of Artificial Sequence: Synthetic oligonucleotide
ggaaguguucugcuguuuu

SEQ ID NO: 1160292 - RNA, 19 nt, Artificial Sequence
  Description of Artificial Sequence: Synthetic oligonucleotide
ggucugggaagccgcucug

SEQ ID NO: 1160293 - RNA, 19 nt, Artificial Sequence
  Description of Artificial Sequence: Synthetic oligonucleotide
guuggcaggucuagcagau

SEQ ID NO: 1160294 - RNA, 19 nt, Artificial Sequence
  Description of Artificial Sequence: Synthetic oligonucleotide
caucuaccuuggaaaagau

SEQ ID NO: 1160295 - RNA, 19 nt, Artificial Sequence
  Description of Artificial Sequence: Synthetic oligonucleotide
ggccaugagcagccagacc

SEQ ID NO: 1160296 - RNA, 19 nt, Artificial Sequence
  Description of Artificial Sequence: Synthetic oligonucleotide
ccgaguggaugagugguug

SEQ ID NO: 1160297 - RNA, 19 nt, Artificial Sequence
  Description of Artificial Sequence: Synthetic oligonucleotide
ucaccccguucaagugguc

SEQ ID NO: 1160298 - RNA, 19 nt, Artificial Sequence
  Description of Artificial Sequence: Synthetic oligonucleotide
cugaugcgccgggucuggg

SEQ ID NO: 1160299 - RNA, 19 nt, Artificial Sequence
  Description of Artificial Sequence: Synthetic oligonucleotide
gggacccaagucaaccaca

SEQ ID NO: 1160300 - RNA, 19 nt, Artificial Sequence
  Description of Artificial Sequence: Synthetic oligonucleotide
ccccguucaaguggucugg

SEQ ID NO: 1160301 - RNA, 19 nt, Artificial Sequence
  Description of Artificial Sequence: Synthetic oligonucleotide
agcgaccuuugagguucuc

SEQ ID NO: 1160302 - RNA, 19 nt, Artificial Sequence
  Description of Artificial Sequence: Synthetic oligonucleotide
ggucuagcagaugcaucca

SEQ ID NO: 1160303 - RNA, 19 nt, Artificial Sequence
  Description of Artificial Sequence: Synthetic oligonucleotide
cgaccuuugagguucucaa

SEQ ID NO: 1160304 - RNA, 19 nt, Artificial Sequence
  Description of Artificial Sequence: Synthetic oligonucleotide
ggccucucccucaagauau

SEQ ID NO: 1160305 - RNA, 19 nt, Artificial Sequence
  Description of Artificial Sequence: Synthetic oligonucleotide
ggacggcauugccaccagc

SEQ ID NO: 1160306 - RNA, 19 nt, Artificial Sequence
  Description of Artificial Sequence: Synthetic oligonucleotide
gcgaccuuugagguucuca

SEQ ID NO: 1160307 - RNA, 19 nt, Artificial Sequence
  Description of Artificial Sequence: Synthetic oligonucleotide
ccaguguugcaucuccuua

SEQ ID NO: 1160308 - RNA, 19 nt, Artificial Sequence
  Description of Artificial Sequence: Synthetic oligonucleotide
gccaaaccaugggacuccc

SEQ ID NO: 1160309 - RNA, 19 nt, Artificial Sequence
  Description of Artificial Sequence: Synthetic oligonucleotide
ccauaauccaguguugcau

SEQ ID NO: 1160310 - RNA, 19 nt, Artificial Sequence
  Description of Artificial Sequence: Synthetic oligonucleotide
cccguucaaguggucuggg

SEQ ID NO: 1160311 - RNA, 19 nt, Artificial Sequence
  Description of Artificial Sequence: Synthetic oligonucleotide
augcuggaaaggacacaua

SEQ ID NO: 1160312 - RNA, 19 nt, Artificial Sequence
  Description of Artificial Sequence: Synthetic oligonucleotide
cuuucccgaguggaugagu

SEQ ID NO: 1160313 - RNA, 19 nt, Artificial Sequence
  Description of Artificial Sequence: Synthetic oligonucleotide
gcauugccaccagccaaac

SEQ ID NO: 1160314 - RNA, 19 nt, Artificial Sequence
  Description of Artificial Sequence: Synthetic oligonucleotide
caccccguucaaguggucu

SEQ ID NO: 1160315 - RNA, 19 nt, Artificial Sequence
  Description of Artificial Sequence: Synthetic oligonucleotide
augccccggcugugcucag

SEQ ID NO: 1160316 - RNA, 19 nt, Artificial Sequence
  Description of Artificial Sequence: Synthetic oligonucleotide
ccuuggaaaagaugaccau

SEQ ID NO: 1160317 - RNA, 19 nt, Artificial Sequence
  Description of Artificial Sequence: Synthetic oligonucleotide
guucugggacagcacucuu

SEQ ID NO: 1160318 - RNA, 19 nt, Artificial Sequence
  Description of Artificial Sequence: Synthetic oligonucleotide
gcuuagccuauaacuggua

SEQ ID NO: 1160319 - RNA, 19 nt, Artificial Sequence
  Description of Artificial Sequence: Synthetic oligonucleotide
gguccaagucccgaacaau

SEQ ID NO: 1160320 - RNA, 19 nt, Artificial Sequence
  Description of Artificial Sequence: Synthetic oligonucleotide
caaucccaucaugguugga

SEQ ID NO: 1160321 - RNA, 19 nt, Artificial Sequence
  Description of Artificial Sequence: Synthetic oligonucleotide
cauugcgggcauaguccau

SEQ ID NO: 1160322 - RNA, 19 nt, Artificial Sequence
  Description of Artificial Sequence: Synthetic oligonucleotide
gcaugccccggcugugcuc

SEQ ID NO: 1160323 - RNA, 19 nt, Artificial Sequence
  Description of Artificial Sequence: Synthetic oligonucleotide
caauggcgaucaucuguuu

SEQ ID NO: 1160324 - RNA, 19 nt, Artificial Sequence
  Description of Artificial Sequence: Synthetic oligonucleotide
gccagaccauagagggaac

SEQ ID NO: 1160325 - RNA, 19 nt, Artificial Sequence
  Description of Artificial Sequence: Synthetic oligonucleotide
gggcaugcucagaauuccu

SEQ ID NO: 1160326 - RNA, 19 nt, Artificial Sequence
  Description of Artificial Sequence: Synthetic oligonucleotide
ccacuggcaaggagaugaa

SEQ ID NO: 1160327 - RNA, 19 nt, Artificial Sequence
  Description of Artificial Sequence: Synthetic oligonucleotide
cugguacagaagggcugcu

SEQ ID NO: 1160328 - RNA, 19 nt, Artificial Sequence
  Description of Artificial Sequence: Synthetic oligonucleotide
cagccccaaaguguaguuu

SEQ ID NO: 1160329 - RNA, 19 nt, Artificial Sequence
  Description of Artificial Sequence: Synthetic oligonucleotide
gcccacuggcaaggagaug

SEQ ID NO: 1160330 - RNA, 19 nt, Artificial Sequence
  Description of Artificial Sequence: Synthetic oligonucleotide
cagcgaccuuugagguucu

SEQ ID NO: 1160331 - RNA, 19 nt, Artificial Sequence
  Description of Artificial Sequence: Synthetic oligonucleotide
ccgcucugcuaagcaacga

SEQ ID NO: 1160332 - RNA, 19 nt, Artificial Sequence
  Description of Artificial Sequence: Synthetic oligonucleotide
gcgccgggucugggaagcc

SEQ ID NO: 1160333 - RNA, 19 nt, Artificial Sequence
  Description of Artificial Sequence: Synthetic oligonucleotide
cccgaguggaugagugguu

SEQ ID NO: 1160334 - RNA, 19 nt, Artificial Sequence
  Description of Artificial Sequence: Synthetic oligonucleotide
ccgucaccaucagggucca

SEQ ID NO: 1160335 - RNA, 19 nt, Artificial Sequence
  Description of Artificial Sequence: Synthetic oligonucleotide
gccugauaccagcgaccuu

SEQ ID NO: 1160336 - RNA, 19 nt, Artificial Sequence
  Description of Artificial Sequence: Synthetic oligonucleotide
cagcacucuuagggaucau

SEQ ID NO: 1160337 - RNA, 19 nt, Artificial Sequence
  Description of Artificial Sequence: Synthetic oligonucleotide
cgucggcaauggcgaucau

SEQ ID NO: 1160338 - RNA, 19 nt, Artificial Sequence
  Description of Artificial Sequence: Synthetic oligonucleotide
ugagcaacaaucuugacag

SEQ ID NO: 1160339 - RNA, 19 nt, Artificial Sequence
  Description of Artificial Sequence: Synthetic oligonucleotide
aaugagacccuucccagcc

SEQ ID NO: 1160340 - RNA, 19 nt, Artificial Sequence
  Description of Artificial Sequence: Synthetic oligonucleotide
aaaacguucuucuuccccg

SEQ ID NO: 1160341 - RNA, 19 nt, Artificial Sequence
  Description of Artificial Sequence: Synthetic oligonucleotide
ucucacauaaacaaugagc

SEQ ID NO: 1160342 - RNA, 19 nt, Artificial Sequence
  Description of Artificial Sequence: Synthetic oligonucleotide
auaguaggagucuucagac

SEQ ID NO: 1160343 - RNA, 19 nt, Artificial Sequence
  Description of Artificial Sequence: Synthetic oligonucleotide
uguauuauccuuuggguca

SEQ ID NO: 1160344 - RNA, 19 nt, Artificial Sequence
  Description of Artificial Sequence: Synthetic oligonucleotide
auaaacaaugagcuccgcc

SEQ ID NO: 1160345 - RNA, 19 nt, Artificial Sequence
  Description of Artificial Sequence: Synthetic oligonucleotide
ugcaagagacgacaaaacg

SEQ ID NO: 1160346 - RNA, 19 nt, Artificial Sequence
  Description of Artificial Sequence: Synthetic oligonucleotide
auaggcaucagauaccaag

SEQ ID NO: 1160347 - RNA, 19 nt, Artificial Sequence
  Description of Artificial Sequence: Synthetic oligonucleotide
augacgguggucuuggagc

SEQ ID NO: 1160348 - RNA, 19 nt, Artificial Sequence
  Description of Artificial Sequence: Synthetic oligonucleotide
uguuugggcccuaagagug

SEQ ID NO: 1160349 - RNA, 19 nt, Artificial Sequence
  Description of Artificial Sequence: Synthetic oligonucleotide
acuauuguucauccugagc

SEQ ID NO: 1160350 - RNA, 19 nt, Artificial Sequence
  Description of Artificial Sequence: Synthetic oligonucleotide
auugucgucacugggaugg

SEQ ID NO: 1160351 - RNA, 19 nt, Artificial Sequence
  Description of Artificial Sequence: Synthetic oligonucleotide
gauaacagcagaggaaggg

SEQ ID NO: 1160352 - RNA, 19 nt, Artificial Sequence
  Description of Artificial Sequence: Synthetic oligonucleotide
uguaucagaggcagugugg

SEQ ID NO: 1160353 - RNA, 19 nt, Artificial Sequence
  Description of Artificial Sequence: Synthetic oligonucleotide
gagauaacagcagaggaag

SEQ ID NO: 1160354 - RNA, 19 nt, Artificial Sequence
  Description of Artificial Sequence: Synthetic oligonucleotide
uugacacucagccuuuccg

SEQ ID NO: 1160355 - RNA, 19 nt, Artificial Sequence
  Description of Artificial Sequence: Synthetic oligonucleotide
cauaccauugggaaugacc

SEQ ID NO: 1160356 - RNA, 19 nt, Artificial Sequence
  Description of Artificial Sequence: Synthetic oligonucleotide
ugaaucgucaucuuccgac

SEQ ID NO: 1160357 - RNA, 19 nt, Artificial Sequence
  Description of Artificial Sequence: Synthetic oligonucleotide
accggugcuacccaggggc

SEQ ID NO: 1160358 - RNA, 19 nt, Artificial Sequence
  Description of Artificial Sequence: Synthetic oligonucleotide
ugugcuauugucgucacug

SEQ ID NO: 1160359 - RNA, 19 nt, Artificial Sequence
  Description of Artificial Sequence: Synthetic oligonucleotide
aaacguucuucuuccccgc

SEQ ID NO: 1160360 - RNA, 19 nt, Artificial Sequence
  Description of Artificial Sequence: Synthetic oligonucleotide
ugggcuaccccucugagca

SEQ ID NO: 1160361 - RNA, 19 nt, Artificial Sequence
  Description of Artificial Sequence: Synthetic oligonucleotide
acaaucuugacaguccugg

SEQ ID NO: 1160362 - RNA, 19 nt, Artificial Sequence
  Description of Artificial Sequence: Synthetic oligonucleotide
caauuuguccauuucaauc

SEQ ID NO: 1160363 - RNA, 19 nt, Artificial Sequence
  Description of Artificial Sequence: Synthetic oligonucleotide
uguaguucauauccauucc

SEQ ID NO: 1160364 - RNA, 19 nt, Artificial Sequence
  Description of Artificial Sequence: Synthetic oligonucleotide
agucgucuucuccauaggc

SEQ ID NO: 1160365 - RNA, 19 nt, Artificial Sequence
  Description of Artificial Sequence: Synthetic oligonucleotide
uucuccauaggcaucagau

SEQ ID NO: 1160366 - RNA, 19 nt, Artificial Sequence
  Description of Artificial Sequence: Synthetic oligonucleotide
ucuuguaagugauuugaac

SEQ ID NO: 1160367 - RNA, 19 nt, Artificial Sequence
  Description of Artificial Sequence: Synthetic oligonucleotide
gacccuuucagaaaaggag

SEQ ID NO: 1160368 - RNA, 19 nt, Artificial Sequence
  Description of Artificial Sequence: Synthetic oligonucleotide
ucucuuuugggcaucugca

SEQ ID NO: 1160369 - RNA, 19 nt, Artificial Sequence
  Description of Artificial Sequence: Synthetic oligonucleotide
cuuggugcccguuacaaac

SEQ ID NO: 1160370 - RNA, 19 nt, Artificial Sequence
  Description of Artificial Sequence: Synthetic oligonucleotide
ucaauuuugguucgcuccu

SEQ ID NO: 1160371 - RNA, 19 nt, Artificial Sequence
  Description of Artificial Sequence: Synthetic oligonucleotide
uuguaagugauuugaacau

SEQ ID NO: 1160372 - RNA, 19 nt, Artificial Sequence
  Description of Artificial Sequence: Synthetic oligonucleotide
ugcauaacugcacccaaga

SEQ ID NO: 1160373 - RNA, 19 nt, Artificial Sequence
  Description of Artificial Sequence: Synthetic oligonucleotide
gaaaugacgguggucuugg

SEQ ID NO: 1160374 - RNA, 19 nt, Artificial Sequence
  Description of Artificial Sequence: Synthetic oligonucleotide
aaacaaugagcuccgcccu

SEQ ID NO: 1160375 - RNA, 19 nt, Artificial Sequence
  Description of Artificial Sequence: Synthetic oligonucleotide
auugccugagaauugcuga

SEQ ID NO: 1160376 - RNA, 19 nt, Artificial Sequence
  Description of Artificial Sequence: Synthetic oligonucleotide
uacaaacucaauuuugguu

SEQ ID NO: 1160377 - RNA, 19 nt, Artificial Sequence
  Description of Artificial Sequence: Synthetic oligonucleotide
agcaacaaucuugacaguc

SEQ ID NO: 1160378 - RNA, 19 nt, Artificial Sequence
  Description of Artificial Sequence: Synthetic oligonucleotide
ugagaauugcugagauccg

SEQ ID NO: 1160379 - RNA, 19 nt, Artificial Sequence
  Description of Artificial Sequence: Synthetic oligonucleotide
aacugcacccaagagagca

SEQ ID NO: 1160380 - RNA, 19 nt, Artificial Sequence
  Description of Artificial Sequence: Synthetic oligonucleotide
cuugcgcucauaaagcuuc

SEQ ID NO: 1160381 - RNA, 19 nt, Artificial Sequence
  Description of Artificial Sequence: Synthetic oligonucleotide
gagaaagucgucuucucca

SEQ ID NO: 1160382 - RNA, 19 nt, Artificial Sequence
  Description of Artificial Sequence: Synthetic oligonucleotide
uuccgcauaaacugcaaga

SEQ ID NO: 1160383 - RNA, 19 nt, Artificial Sequence
  Description of Artificial Sequence: Synthetic oligonucleotide
uccugagcaacaaucuuga

SEQ ID NO: 1160384 - RNA, 19 nt, Artificial Sequence
  Description of Artificial Sequence: Synthetic oligonucleotide
gaggccacuaauuccuggg

SEQ ID NO: 1160385 - RNA, 19 nt, Artificial Sequence
  Description of Artificial Sequence: Synthetic oligonucleotide
gaucuugucuuguaaguga

SEQ ID NO: 1160386 - RNA, 19 nt, Artificial Sequence
  Description of Artificial Sequence: Synthetic oligonucleotide
uaccaagccaccuuucucu

SEQ ID NO: 1160387 - RNA, 19 nt, Artificial Sequence
  Description of Artificial Sequence: Synthetic oligonucleotide
agggcucucacauaaacaa

SEQ ID NO: 1160388 - RNA, 19 nt, Artificial Sequence
  Description of Artificial Sequence: Synthetic oligonucleotide
auaccauugggaaugacca

SEQ ID NO: 1160389 - RNA, 19 nt, Artificial Sequence
  Description of Artificial Sequence: Synthetic oligonucleotide
cauaacugcacccaagaga

SEQ ID NO: 1160390 - RNA, 19 nt, Artificial Sequence
  Description of Artificial Sequence: Synthetic oligonucleotide
cuguauuauccuuuggguc

SEQ ID NO: 1160391 - RNA, 19 nt, Artificial Sequence
  Description of Artificial Sequence: Synthetic oligonucleotide
gucacacuauuguucaucc

SEQ ID NO: 1160392 - RNA, 19 nt, Artificial Sequence
  Description of Artificial Sequence: Synthetic oligonucleotide
acucaauuuugguucgcuc

SEQ ID NO: 1160393 - RNA, 19 nt, Artificial Sequence
  Description of Artificial Sequence: Synthetic oligonucleotide
gcuagagccucauaguagg

SEQ ID NO: 1160394 - RNA, 19 nt, Artificial Sequence
  Description of Artificial Sequence: Synthetic oligonucleotide
acaaaacguucuucuuccc

SEQ ID NO: 1160395 - RNA, 19 nt, Artificial Sequence
  Description of Artificial Sequence: Synthetic oligonucleotide
caaaacguucuucuucccc

SEQ ID NO: 1160396 - RNA, 19 nt, Artificial Sequence
  Description of Artificial Sequence: Synthetic oligonucleotide
uccauaggcaucagauacc

SEQ ID NO: 1160397 - RNA, 19 nt, Artificial Sequence
  Description of Artificial Sequence: Synthetic oligonucleotide
gagaauugcugagauccgg

SEQ ID NO: 1160398 - RNA, 19 nt, Artificial Sequence
  Description of Artificial Sequence: Synthetic oligonucleotide
uuccgggucaggaaagcag

SEQ ID NO: 1160399 - RNA, 19 nt, Artificial Sequence
  Description of Artificial Sequence: Synthetic oligonucleotide
uggaucuugucuuguaagu

SEQ ID NO: 1160400 - RNA, 19 nt, Artificial Sequence
  Description of Artificial Sequence: Synthetic oligonucleotide
acccuuucagaaaaggagg

SEQ ID NO: 1160401 - RNA, 19 nt, Artificial Sequence
  Description of Artificial Sequence: Synthetic oligonucleotide
cuggaucuugucuuguaag

SEQ ID NO: 1160402 - RNA, 19 nt, Artificial Sequence
  Description of Artificial Sequence: Synthetic oligonucleotide
acauaaacaaugagcuccg

SEQ ID NO: 1160403 - RNA, 19 nt, Artificial Sequence
  Description of Artificial Sequence: Synthetic oligonucleotide
aagucgucuucuccauagg

SEQ ID NO: 1160404 - RNA, 19 nt, Artificial Sequence
  Description of Artificial Sequence: Synthetic oligonucleotide
uuugacacucagccuuucc

SEQ ID NO: 1160405 - RNA, 19 nt, Artificial Sequence
  Description of Artificial Sequence: Synthetic oligonucleotide
uuuccgcugagugggaagg

SEQ ID NO: 1160406 - RNA, 19 nt, Artificial Sequence
  Description of Artificial Sequence: Synthetic oligonucleotide
gucguggugccuuucuugg

SEQ ID NO: 1160407 - RNA, 19 nt, Artificial Sequence
  Description of Artificial Sequence: Synthetic oligonucleotide
ucuuccgacugcuugcugu

SEQ ID NO: 1160408 - RNA, 19 nt, Artificial Sequence
  Description of Artificial Sequence: Synthetic oligonucleotide
uucggacccuuucagaaaa

SEQ ID NO: 1160409 - RNA, 19 nt, Artificial Sequence
  Description of Artificial Sequence: Synthetic oligonucleotide
aaaggccuggguguguauc

SEQ ID NO: 1160410 - RNA, 19 nt, Artificial Sequence
  Description of Artificial Sequence: Synthetic oligonucleotide
cacagcgucgacuccagcc

SEQ ID NO: 1160411 - RNA, 19 nt, Artificial Sequence
  Description of Artificial Sequence: Synthetic oligonucleotide
ucaauggcacagaacugga

SEQ ID NO: 1160412 - RNA, 19 nt, Artificial Sequence
  Description of Artificial Sequence: Synthetic oligonucleotide
agagccucauaguaggagu

SEQ ID NO: 1160413 - RNA, 19 nt, Artificial Sequence
  Description of Artificial Sequence: Synthetic oligonucleotide
cuggccugauuucaaaggc

SEQ ID NO: 1160414 - RNA, 19 nt, Artificial Sequence
  Description of Artificial Sequence: Synthetic oligonucleotide
aggugacauguuucggacc

SEQ ID NO: 1160415 - RNA, 19 nt, Artificial Sequence
  Description of Artificial Sequence: Synthetic oligonucleotide
uguccaacugacuccuuca

SEQ ID NO: 1160416 - RNA, 19 nt, Artificial Sequence
  Description of Artificial Sequence: Synthetic oligonucleotide
aacaaugagcuccgcccug

SEQ ID NO: 1160417 - RNA, 19 nt, Artificial Sequence
  Description of Artificial Sequence: Synthetic oligonucleotide
cugagcaacaaucuugaca

SEQ ID NO: 1160418 - RNA, 19 nt, Artificial Sequence
  Description of Artificial Sequence: Synthetic oligonucleotide
agccuuuccgcugaguggg

SEQ ID NO: 1160419 - RNA, 19 nt, Artificial Sequence
  Description of Artificial Sequence: Synthetic oligonucleotide
ugcuauugccugagaauug

SEQ ID NO: 1160420 - RNA, 19 nt, Artificial Sequence
  Description of Artificial Sequence: Synthetic oligonucleotide
aggcauaccauugggaaug

SEQ ID NO: 1160421 - RNA, 19 nt, Artificial Sequence
  Description of Artificial Sequence: Synthetic oligonucleotide
auugggaaugaccauggua

SEQ ID NO: 1160422 - RNA, 19 nt, Artificial Sequence
  Description of Artificial Sequence: Synthetic oligonucleotide
uggccugauuucaaaggcc

SEQ ID NO: 1160423 - RNA, 19 nt, Artificial Sequence
  Description of Artificial Sequence: Synthetic oligonucleotide
aagagacgacaaaacguuc

SEQ ID NO: 1160424 - RNA, 19 nt, Artificial Sequence
  Description of Artificial Sequence: Synthetic oligonucleotide
auguuucggacccuuucag

SEQ ID NO: 1160425 - RNA, 19 nt, Artificial Sequence
  Description of Artificial Sequence: Synthetic oligonucleotide
acucuggucacugcuuggc

SEQ ID NO: 1160426 - RNA, 19 nt, Artificial Sequence
  Description of Artificial Sequence: Synthetic oligonucleotide
uauuguucauccugagcaa

SEQ ID NO: 1160427 - RNA, 19 nt, Artificial Sequence
  Description of Artificial Sequence: Synthetic oligonucleotide
uugucuuguaagugauuug

SEQ ID NO: 1160428 - RNA, 19 nt, Artificial Sequence
  Description of Artificial Sequence: Synthetic oligonucleotide
agucuuccgcauaaacugc

SEQ ID NO: 1160429 - RNA, 19 nt, Artificial Sequence
  Description of Artificial Sequence: Synthetic oligonucleotide
gaacccucccaagagcagg

SEQ ID NO: 1160430 - RNA, 19 nt, Artificial Sequence
  Description of Artificial Sequence: Synthetic oligonucleotide
uguuucggacccuuucaga

SEQ ID NO: 1160431 - RNA, 19 nt, Artificial Sequence
  Description of Artificial Sequence: Synthetic oligonucleotide
uguaagugauuugaacauc

SEQ ID NO: 1160432 - RNA, 19 nt, Artificial Sequence
  Description of Artificial Sequence: Synthetic oligonucleotide
ucacauaaacaaugagcuc

SEQ ID NO: 1160433 - RNA, 19 nt, Artificial Sequence
  Description of Artificial Sequence: Synthetic oligonucleotide
aacucaauuuugguucgcu

SEQ ID NO: 1160434 - RNA, 19 nt, Artificial Sequence
  Description of Artificial Sequence: Synthetic oligonucleotide
accuguuugggcccuaaga

SEQ ID NO: 1160435 - RNA, 19 nt, Artificial Sequence
  Description of Artificial Sequence: Synthetic oligonucleotide
ccaacugacuccuucagug

SEQ ID NO: 1160436 - RNA, 19 nt, Artificial Sequence
  Description of Artificial Sequence: Synthetic oligonucleotide
cuuuggauaguuggugccc

SEQ ID NO: 1160437 - RNA, 19 nt, Artificial Sequence
  Description of Artificial Sequence: Synthetic oligonucleotide
cugcaagagacgacaaaac

SEQ ID NO: 1160438 - RNA, 19 nt, Artificial Sequence
  Description of Artificial Sequence: Synthetic oligonucleotide
guuucggacccuuucagaa

SEQ ID NO: 1160439 - RNA, 19 nt, Artificial Sequence
  Description of Artificial Sequence: Synthetic oligonucleotide
aacugcaagagacgacaaa

SEQ ID NO: 1160440 - RNA, 19 nt, Artificial Sequence
  Description of Artificial Sequence: Synthetic oligonucleotide
ucgucaggugacauguuuc

SEQ ID NO: 1160441 - RNA, 19 nt, Artificial Sequence
  Description of Artificial Sequence: Synthetic oligonucleotide
caaucuugacaguccuggg

SEQ ID NO: 1160442 - RNA, 19 nt, Artificial Sequence
  Description of Artificial Sequence: Synthetic oligonucleotide
aucuugcgcucauaaagcu

SEQ ID NO: 1160443 - RNA, 19 nt, Artificial Sequence
  Description of Artificial Sequence: Synthetic oligonucleotide
uggcuagagccucauagua

SEQ ID NO: 1160444 - RNA, 19 nt, Artificial Sequence
  Description of Artificial Sequence: Synthetic oligonucleotide
agagacgacaaaacguucu

SEQ ID NO: 1160445 - RNA, 19 nt, Artificial Sequence
  Description of Artificial Sequence: Synthetic oligonucleotide
acagcgucgacuccagccu

SEQ ID NO: 1160446 - RNA, 19 nt, Artificial Sequence
  Description of Artificial Sequence: Synthetic oligonucleotide
gagggcacaaaaggcaagc

SEQ ID NO: 1160447 - RNA, 19 nt, Artificial Sequence
  Description of Artificial Sequence: Synthetic oligonucleotide
acacucaccgggcaccgag

SEQ ID NO: 1160448 - RNA, 19 nt, Artificial Sequence
  Description of Artificial Sequence: Synthetic oligonucleotide
gaucucgucaggugacaug

SEQ ID NO: 1160449 - RNA, 19 nt, Artificial Sequence
  Description of Artificial Sequence: Synthetic oligonucleotide
caaugagacccuucccagc

SEQ ID NO: 1160450 - RNA, 19 nt, Artificial Sequence
  Description of Artificial Sequence: Synthetic oligonucleotide
ccuguuugggcccuaagag

SEQ ID NO: 1160451 - RNA, 19 nt, Artificial Sequence
  Description of Artificial Sequence: Synthetic oligonucleotide
ugggaaugaccaugguagc

SEQ ID NO: 1160452 - RNA, 19 nt, Artificial Sequence
  Description of Artificial Sequence: Synthetic oligonucleotide
uguacucuggucacugcuu

SEQ ID NO: 1160453 - RNA, 19 nt, Artificial Sequence
  Description of Artificial Sequence: Synthetic oligonucleotide
caucaauggcacagaacug

SEQ ID NO: 1160454 - RNA, 19 nt, Artificial Sequence
  Description of Artificial Sequence: Synthetic oligonucleotide
auagaugcugggguuccgg

SEQ ID NO: 1160455 - RNA, 19 nt, Artificial Sequence
  Description of Artificial Sequence: Synthetic oligonucleotide
gacagugaccacugcuggc

SEQ ID NO: 1160456 - RNA, 19 nt, Artificial Sequence
  Description of Artificial Sequence: Synthetic oligonucleotide
cuuccgcauaaacugcaag

SEQ ID NO: 1160457 - RNA, 19 nt, Artificial Sequence
  Description of Artificial Sequence: Synthetic oligonucleotide
agaaaugacgguggucuug

SEQ ID NO: 1160458 - RNA, 19 nt, Artificial Sequence
  Description of Artificial Sequence: Synthetic oligonucleotide
ugagauccgguuuccgggu

SEQ ID NO: 1160459 - RNA, 19 nt, Artificial Sequence
  Description of Artificial Sequence: Synthetic oligonucleotide
acucaccgggcaccgaggg

SEQ ID NO: 1160460 - RNA, 19 nt, Artificial Sequence
  Description of Artificial Sequence: Synthetic oligonucleotide
guacucuggucacugcuug

SEQ ID NO: 1160461 - RNA, 19 nt, Artificial Sequence
  Description of Artificial Sequence: Synthetic oligonucleotide
aggggcauguguccaacug

SEQ ID NO: 1160462 - RNA, 19 nt, Artificial Sequence
  Description of Artificial Sequence: Synthetic oligonucleotide
uucucuucagccgcgccgc

SEQ ID NO: 1160463 - RNA, 19 nt, Artificial Sequence
  Description of Artificial Sequence: Synthetic oligonucleotide
uccgacugcuugcuguucu

SEQ ID NO: 1160464 - RNA, 19 nt, Artificial Sequence
  Description of Artificial Sequence: Synthetic oligonucleotide
aggaggugauucaucuccc

SEQ ID NO: 1160465 - RNA, 19 nt, Artificial Sequence
  Description of Artificial Sequence: Synthetic oligonucleotide
agcuccuaccugcccacac

SEQ ID NO: 1160466 - RNA, 19 nt, Artificial Sequence
  Description of Artificial Sequence: Synthetic oligonucleotide
gcugagauccgguuuccgg

SEQ ID NO: 1160467 - RNA, 19 nt, Artificial Sequence
  Description of Artificial Sequence: Synthetic oligonucleotide
acaaugagcuccgcccugg

SEQ ID NO: 1160468 - RNA, 19 nt, Artificial Sequence
  Description of Artificial Sequence: Synthetic oligonucleotide
uucacuggccugauuucaa

SEQ ID NO: 1160469 - RNA, 19 nt, Artificial Sequence
  Description of Artificial Sequence: Synthetic oligonucleotide
agugcauaacugcacccaa

SEQ ID NO: 1160470 - RNA, 19 nt, Artificial Sequence
  Description of Artificial Sequence: Synthetic oligonucleotide
cagccuuuccgcugagugg

SEQ ID NO: 1160471 - RNA, 19 nt, Artificial Sequence
  Description of Artificial Sequence: Synthetic oligonucleotide
uuucggacccuuucagaaa

SEQ ID NO: 1160472 - RNA, 19 nt, Artificial Sequence
  Description of Artificial Sequence: Synthetic oligonucleotide
ggcucucacauaaacaaug

SEQ ID NO: 1160473 - RNA, 19 nt, Artificial Sequence
  Description of Artificial Sequence: Synthetic oligonucleotide
uucuuggugcccguuacaa

SEQ ID NO: 1160474 - RNA, 19 nt, Artificial Sequence
  Description of Artificial Sequence: Synthetic oligonucleotide
uggugggaucuugaucucg

SEQ ID NO: 1160475 - RNA, 19 nt, Artificial Sequence
  Description of Artificial Sequence: Synthetic oligonucleotide
gaucccgcuucucugcuuc

SEQ ID NO: 1160476 - RNA, 19 nt, Artificial Sequence
  Description of Artificial Sequence: Synthetic oligonucleotide
uauugucgucacugggaug

SEQ ID NO: 1160477 - RNA, 19 nt, Artificial Sequence
  Description of Artificial Sequence: Synthetic oligonucleotide
ucuugcgcucauaaagcuu

SEQ ID NO: 1160478 - RNA, 19 nt, Artificial Sequence
  Description of Artificial Sequence: Synthetic oligonucleotide
ggcagaacccucccaagag

SEQ ID NO: 1160479 - RNA, 19 nt, Artificial Sequence
  Description of Artificial Sequence: Synthetic oligonucleotide
uuuggaugauguaguucau

SEQ ID NO: 1160480 - RNA, 19 nt, Artificial Sequence
  Description of Artificial Sequence: Synthetic oligonucleotide
gauaccaagccaccuuucu

SEQ ID NO: 1160481 - RNA, 19 nt, Artificial Sequence
  Description of Artificial Sequence: Synthetic oligonucleotide
acgguggucuuggagccgc

SEQ ID NO: 1160482 - RNA, 19 nt, Artificial Sequence
  Description of Artificial Sequence: Synthetic oligonucleotide
uguguaucagaggcagugu

SEQ ID NO: 1160483 - RNA, 19 nt, Artificial Sequence
  Description of Artificial Sequence: Synthetic oligonucleotide
uuugggcccuaagaguggc

SEQ ID NO: 1160484 - RNA, 19 nt, Artificial Sequence
  Description of Artificial Sequence: Synthetic oligonucleotide
uggggaucccgcuucucug

SEQ ID NO: 1160485 - RNA, 19 nt, Artificial Sequence
  Description of Artificial Sequence: Synthetic oligonucleotide
guccaacugacuccuucag

SEQ ID NO: 1160486 - RNA, 19 nt, Artificial Sequence
  Description of Artificial Sequence: Synthetic oligonucleotide
uccgguuuccgggucagga

SEQ ID NO: 1160487 - RNA, 19 nt, Artificial Sequence
  Description of Artificial Sequence: Synthetic oligonucleotide
agaauugcugagauccggu

SEQ ID NO: 1160488 - RNA, 19 nt, Artificial Sequence
  Description of Artificial Sequence: Synthetic oligonucleotide
gggagugcauaacugcacc

SEQ ID NO: 1160489 - RNA, 19 nt, Artificial Sequence
  Description of Artificial Sequence: Synthetic oligonucleotide
ugggguguacucuggucac

SEQ ID NO: 1160490 - RNA, 19 nt, Artificial Sequence
  Description of Artificial Sequence: Synthetic oligonucleotide
gucgucacugggauggcag

SEQ ID NO: 1160491 - RNA, 19 nt, Artificial Sequence
  Description of Artificial Sequence: Synthetic oligonucleotide
caagagacgacaaaacguu

SEQ ID NO: 1160492 - RNA, 19 nt, Artificial Sequence
  Description of Artificial Sequence: Synthetic oligonucleotide
gggcuggugaaccuguuug

SEQ ID NO: 1160493 - RNA, 19 nt, Artificial Sequence
  Description of Artificial Sequence: Synthetic oligonucleotide
ggaucuugucuuguaagug

SEQ ID NO: 1160494 - RNA, 19 nt, Artificial Sequence
  Description of Artificial Sequence: Synthetic oligonucleotide
gcuauugccugagaauugc

SEQ ID NO: 1160495 - RNA, 19 nt, Artificial Sequence
  Description of Artificial Sequence: Synthetic oligonucleotide
aaggggcauguguccaacu

SEQ ID NO: 1160496 - RNA, 19 nt, Artificial Sequence
  Description of Artificial Sequence: Synthetic oligonucleotide
ucggacccuuucagaaaag

SEQ ID NO: 1160497 - RNA, 19 nt, Artificial Sequence
  Description of Artificial Sequence: Synthetic oligonucleotide
ucuuggugcccguuacaaa

SEQ ID NO: 1160498 - RNA, 19 nt, Artificial Sequence
  Description of Artificial Sequence: Synthetic oligonucleotide
ugggcccuaagaguggcca

SEQ ID NO: 1160499 - RNA, 19 nt, Artificial Sequence
  Description of Artificial Sequence: Synthetic oligonucleotide
gucaggugacauguuucgg

SEQ ID NO: 1160500 - RNA, 19 nt, Artificial Sequence
  Description of Artificial Sequence: Synthetic oligonucleotide
uuuccgggucaggaaagca

SEQ ID NO: 1160501 - RNA, 19 nt, Artificial Sequence
  Description of Artificial Sequence: Synthetic oligonucleotide
cagccucgccaucagauuc

SEQ ID NO: 1160502 - RNA, 19 nt, Artificial Sequence
  Description of Artificial Sequence: Synthetic oligonucleotide
agauaccaagccaccuuuc

SEQ ID NO: 1160503 - RNA, 19 nt, Artificial Sequence
  Description of Artificial Sequence: Synthetic oligonucleotide
guuugggcccuaagagugg

SEQ ID NO: 1160504 - RNA, 19 nt, Artificial Sequence
  Description of Artificial Sequence: Synthetic oligonucleotide
acgacaaaacguucuucuu

SEQ ID NO: 1160505 - RNA, 19 nt, Artificial Sequence
  Description of Artificial Sequence: Synthetic oligonucleotide
gcauaacugcacccaagag

SEQ ID NO: 1160506 - RNA, 19 nt, Artificial Sequence
  Description of Artificial Sequence: Synthetic oligonucleotide
cugggcuaccccucugagc

SEQ ID NO: 1160507 - RNA, 19 nt, Artificial Sequence
  Description of Artificial Sequence: Synthetic oligonucleotide
uggugcccguuacaaacuc

SEQ ID NO: 1160508 - RNA, 19 nt, Artificial Sequence
  Description of Artificial Sequence: Synthetic oligonucleotide
guaguggugguggcagccg

SEQ ID NO: 1160509 - RNA, 19 nt, Artificial Sequence
  Description of Artificial Sequence: Synthetic oligonucleotide
ugcugagauccgguuuccg

SEQ ID NO: 1160510 - RNA, 19 nt, Artificial Sequence
  Description of Artificial Sequence: Synthetic oligonucleotide
ugccugagaauugcugaga

SEQ ID NO: 1160511 - RNA, 19 nt, Artificial Sequence
  Description of Artificial Sequence: Synthetic oligonucleotide
ggugaaccuguuugggccc

SEQ ID NO: 1160512 - RNA, 19 nt, Artificial Sequence
  Description of Artificial Sequence: Synthetic oligonucleotide
uucuggaucuugucuugua

SEQ ID NO: 1160513 - RNA, 19 nt, Artificial Sequence
  Description of Artificial Sequence: Synthetic oligonucleotide
gcagaaaugacgguggucu

SEQ ID NO: 1160514 - RNA, 19 nt, Artificial Sequence
  Description of Artificial Sequence: Synthetic oligonucleotide
agauccgguuuccggguca

SEQ ID NO: 1160515 - RNA, 19 nt, Artificial Sequence
  Description of Artificial Sequence: Synthetic oligonucleotide
ucgucacugggauggcaga

SEQ ID NO: 1160516 - RNA, 19 nt, Artificial Sequence
  Description of Artificial Sequence: Synthetic oligonucleotide
ggcaccgagggacuggggc

SEQ ID NO: 1160517 - RNA, 19 nt, Artificial Sequence
  Description of Artificial Sequence: Synthetic oligonucleotide
ggucguggugccuuucuug

SEQ ID NO: 1160518 - RNA, 19 nt, Artificial Sequence
  Description of Artificial Sequence: Synthetic oligonucleotide
uucaggcuccgagucuucc

SEQ ID NO: 1160519 - RNA, 19 nt, Artificial Sequence
  Description of Artificial Sequence: Synthetic oligonucleotide
uugaucucgucaggugaca

SEQ ID NO: 1160520 - RNA, 19 nt, Artificial Sequence
  Description of Artificial Sequence: Synthetic oligonucleotide
ggcuagagccucauaguag

SEQ ID NO: 1160521 - RNA, 19 nt, Artificial Sequence
  Description of Artificial Sequence: Synthetic oligonucleotide
agaugcugggguuccggaa

SEQ ID NO: 1160522 - RNA, 19 nt, Artificial Sequence
  Description of Artificial Sequence: Synthetic oligonucleotide
gugcauaacugcacccaag

SEQ ID NO: 1160523 - RNA, 19 nt, Artificial Sequence
  Description of Artificial Sequence: Synthetic oligonucleotide
cucugcuauugccugagaa

SEQ ID NO: 1160524 - RNA, 19 nt, Artificial Sequence
  Description of Artificial Sequence: Synthetic oligonucleotide
uaccauugggaaugaccau

SEQ ID NO: 1160525 - RNA, 19 nt, Artificial Sequence
  Description of Artificial Sequence: Synthetic oligonucleotide
cagugagcuccuaccugcc

SEQ ID NO: 1160526 - RNA, 19 nt, Artificial Sequence
  Description of Artificial Sequence: Synthetic oligonucleotide
cacucaccgggcaccgagg

SEQ ID NO: 1160527 - RNA, 19 nt, Artificial Sequence
  Description of Artificial Sequence: Synthetic oligonucleotide
cgucaggugacauguuucg

SEQ ID NO: 1160528 - RNA, 19 nt, Artificial Sequence
  Description of Artificial Sequence: Synthetic oligonucleotide
gauccgguuuccgggucag

SEQ ID NO: 1160529 - RNA, 19 nt, Artificial Sequence
  Description of Artificial Sequence: Synthetic oligonucleotide
uugggcccuaagaguggcc

SEQ ID NO: 1160530 - RNA, 19 nt, Artificial Sequence
  Description of Artificial Sequence: Synthetic oligonucleotide
gcuauugucgucacuggga

SEQ ID NO: 1160531 - RNA, 19 nt, Artificial Sequence
  Description of Artificial Sequence: Synthetic oligonucleotide
aucuugggcuggugaaccu

SEQ ID NO: 1160532 - RNA, 19 nt, Artificial Sequence
  Description of Artificial Sequence: Synthetic oligonucleotide
ugaucucgucaggugacau

SEQ ID NO: 1160533 - RNA, 19 nt, Artificial Sequence
  Description of Artificial Sequence: Synthetic oligonucleotide
ccaaggcgggagaaagucg

SEQ ID NO: 1160534 - RNA, 19 nt, Artificial Sequence
  Description of Artificial Sequence: Synthetic oligonucleotide
ggcaagcuuuccccugugg

SEQ ID NO: 1160535 - RNA, 19 nt, Artificial Sequence
  Description of Artificial Sequence: Synthetic oligonucleotide
gguggcagaacccucccaa

SEQ ID NO: 1160536 - RNA, 19 nt, Artificial Sequence
  Description of Artificial Sequence: Synthetic oligonucleotide
auuggucguggugccuuuc

SEQ ID NO: 1160537 - RNA, 19 nt, Artificial Sequence
  Description of Artificial Sequence: Synthetic oligonucleotide
gaaagucgucuucuccaua

SEQ ID NO: 1160538 - RNA, 19 nt, Artificial Sequence
  Description of Artificial Sequence: Synthetic oligonucleotide
uugcugagauccgguuucc

SEQ ID NO: 1160539 - RNA, 19 nt, Artificial Sequence
  Description of Artificial Sequence: Synthetic oligonucleotide
ugcgcucauaaagcuucug

SEQ ID NO: 1160540 - RNA, 19 nt, Artificial Sequence
  Description of Artificial Sequence: Synthetic oligonucleotide
cgacaaaacguucuucuuc

SEQ ID NO: 1160541 - RNA, 19 nt, Artificial Sequence
  Description of Artificial Sequence: Synthetic oligonucleotide
cuauugucgucacugggau

SEQ ID NO: 1160542 - RNA, 19 nt, Artificial Sequence
  Description of Artificial Sequence: Synthetic oligonucleotide
ugcccguuacaaacucaau

SEQ ID NO: 1160543 - RNA, 19 nt, Artificial Sequence
  Description of Artificial Sequence: Synthetic oligonucleotide
gacgguggucuuggagccg

SEQ ID NO: 1160544 - RNA, 19 nt, Artificial Sequence
  Description of Artificial Sequence: Synthetic oligonucleotide
cuguuugggcccuaagagu

SEQ ID NO: 1160545 - RNA, 19 nt, Artificial Sequence
  Description of Artificial Sequence: Synthetic oligonucleotide
agcgucgacuccagccucg

SEQ ID NO: 1160546 - RNA, 19 nt, Artificial Sequence
  Description of Artificial Sequence: Synthetic oligonucleotide
gagacgacaaaacguucuu

SEQ ID NO: 1160547 - RNA, 19 nt, Artificial Sequence
  Description of Artificial Sequence: Synthetic oligonucleotide
gaauugcugagauccgguu

SEQ ID NO: 1160548 - RNA, 19 nt, Artificial Sequence
  Description of Artificial Sequence: Synthetic oligonucleotide
gcuacccaggggcugcugc

SEQ ID NO: 1160549 - RNA, 19 nt, Artificial Sequence
  Description of Artificial Sequence: Synthetic oligonucleotide
ggggcauguguccaacuga

SEQ ID NO: 1160550 - RNA, 19 nt, Artificial Sequence
  Description of Artificial Sequence: Synthetic oligonucleotide
ggacccuuucagaaaagga

SEQ ID NO: 1160551 - RNA, 19 nt, Artificial Sequence
  Description of Artificial Sequence: Synthetic oligonucleotide
ggccacuaauuccugggga

SEQ ID NO: 1160552 - RNA, 19 nt, Artificial Sequence
  Description of Artificial Sequence: Synthetic oligonucleotide
gggcauguguccaacugac

SEQ ID NO: 1160553 - RNA, 19 nt, Artificial Sequence
  Description of Artificial Sequence: Synthetic oligonucleotide
gcuccuaccugcccacacc

SEQ ID NO: 1160554 - RNA, 19 nt, Artificial Sequence
  Description of Artificial Sequence: Synthetic oligonucleotide
acccucccaagagcagggc

SEQ ID NO: 1160555 - RNA, 19 nt, Artificial Sequence
  Description of Artificial Sequence: Synthetic oligonucleotide
ggauaguuggugcccagcu

SEQ ID NO: 1160556 - RNA, 19 nt, Artificial Sequence
  Description of Artificial Sequence: Synthetic oligonucleotide
ggaaagcagacaccaggaa

SEQ ID NO: 1160557 - RNA, 19 nt, Artificial Sequence
  Description of Artificial Sequence: Synthetic oligonucleotide
cugaaucgucaucuuccga

SEQ ID NO: 1160558 - RNA, 19 nt, Artificial Sequence
  Description of Artificial Sequence: Synthetic oligonucleotide
guagcucccugggcuaccc

SEQ ID NO: 1160559 - RNA, 19 nt, Artificial Sequence
  Description of Artificial Sequence: Synthetic oligonucleotide
ggcaucugcaacagcugug

SEQ ID NO: 1160560 - RNA, 19 nt, Artificial Sequence
  Description of Artificial Sequence: Synthetic oligonucleotide
caccggugcuacccagggg

SEQ ID NO: 1160561 - RNA, 19 nt, Artificial Sequence
  Description of Artificial Sequence: Synthetic oligonucleotide
gggagaaagucgucuucuc

SEQ ID NO: 1160562 - RNA, 19 nt, Artificial Sequence
  Description of Artificial Sequence: Synthetic oligonucleotide
cugcuauugccugagaauu

SEQ ID NO: 1160563 - RNA, 19 nt, Artificial Sequence
  Description of Artificial Sequence: Synthetic oligonucleotide
gcagguugggaaucacauc

SEQ ID NO: 1160564 - RNA, 19 nt, Artificial Sequence
  Description of Artificial Sequence: Synthetic oligonucleotide
ccgagucuuccgcauaaac

SEQ ID NO: 1160565 - RNA, 19 nt, Artificial Sequence
  Description of Artificial Sequence: Synthetic oligonucleotide
cuuugacacucagccuuuc

SEQ ID NO: 1160566 - RNA, 19 nt, Artificial Sequence
  Description of Artificial Sequence: Synthetic oligonucleotide
agccccaguuucugucaca

SEQ ID NO: 1160567 - RNA, 19 nt, Artificial Sequence
  Description of Artificial Sequence: Synthetic oligonucleotide
uuccgcugagugggaagga

SEQ ID NO: 1160568 - RNA, 19 nt, Artificial Sequence
  Description of Artificial Sequence: Synthetic oligonucleotide
ccugagaauugcugagauc

SEQ ID NO: 1160569 - RNA, 19 nt, Artificial Sequence
  Description of Artificial Sequence: Synthetic oligonucleotide
ugacaguccugggguguac

SEQ ID NO: 1160570 - RNA, 19 nt, Artificial Sequence
  Description of Artificial Sequence: Synthetic oligonucleotide
ccaagagcagggcucucac

SEQ ID NO: 1160571 - RNA, 19 nt, Artificial Sequence
  Description of Artificial Sequence: Synthetic oligonucleotide
uugucgucacugggauggc

SEQ ID NO: 1160572 - RNA, 19 nt, Artificial Sequence
  Description of Artificial Sequence: Synthetic oligonucleotide
agccucgccaucagauuca

SEQ ID NO: 1160573 - RNA, 19 nt, Artificial Sequence
  Description of Artificial Sequence: Synthetic oligonucleotide
ggcccuaagaguggccacc

SEQ ID NO: 1160574 - RNA, 19 nt, Artificial Sequence
  Description of Artificial Sequence: Synthetic oligonucleotide
ccaccggugcuacccaggg

SEQ ID NO: 1160575 - RNA, 19 nt, Artificial Sequence
  Description of Artificial Sequence: Synthetic oligonucleotide
cuauugccugagaauugcu

SEQ ID NO: 1160576 - RNA, 19 nt, Artificial Sequence
  Description of Artificial Sequence: Synthetic oligonucleotide
gcccuaagaguggccaccg

SEQ ID NO: 1160577 - RNA, 19 nt, Artificial Sequence
  Description of Artificial Sequence: Synthetic oligonucleotide
cccguuacaaacucaauuu

SEQ ID NO: 1160578 - RNA, 19 nt, Artificial Sequence
  Description of Artificial Sequence: Synthetic oligonucleotide
gccacacucaccgggcacc

SEQ ID NO: 1160579 - RNA, 19 nt, Artificial Sequence
  Description of Artificial Sequence: Synthetic oligonucleotide
uguguccaacugacuccuu

SEQ ID NO: 1160580 - RNA, 19 nt, Artificial Sequence
  Description of Artificial Sequence: Synthetic oligonucleotide
cagcgucgacuccagccuc

SEQ ID NO: 1160581 - RNA, 19 nt, Artificial Sequence
  Description of Artificial Sequence: Synthetic oligonucleotide
gggguuccggaacuccuuc

SEQ ID NO: 1160582 - RNA, 19 nt, Artificial Sequence
  Description of Artificial Sequence: Synthetic oligonucleotide
cauaggcaucagauaccaa

SEQ ID NO: 1160583 - RNA, 19 nt, Artificial Sequence
  Description of Artificial Sequence: Synthetic oligonucleotide
gcaucuugggcuggugaac

SEQ ID NO: 1160584 - RNA, 19 nt, Artificial Sequence
  Description of Artificial Sequence: Synthetic oligonucleotide
cuaccccucugagcagccc

SEQ ID NO: 1160585 - RNA, 19 nt, Artificial Sequence
  Description of Artificial Sequence: Synthetic oligonucleotide
guauuauccuuugggucau

SEQ ID NO: 1160586 - RNA, 19 nt, Artificial Sequence
  Description of Artificial Sequence: Synthetic oligonucleotide
gcugggguuccggaacucc

SEQ ID NO: 1160587 - RNA, 19 nt, Artificial Sequence
  Description of Artificial Sequence: Synthetic oligonucleotide
ggccugauuucaaaggccu

SEQ ID NO: 1160588 - RNA, 19 nt, Artificial Sequence
  Description of Artificial Sequence: Synthetic oligonucleotide
gcccguuacaaacucaauu

SEQ ID NO: 1160589 - RNA, 19 nt, Artificial Sequence
  Description of Artificial Sequence: Synthetic oligonucleotide
cuguggcaucuugggcugg

SEQ ID NO: 1160590 - RNA, 19 nt, Artificial Sequence
  Description of Artificial Sequence: Synthetic oligonucleotide
uucagccgcgccgcccaca

SEQ ID NO: 1160591 - RNA, 19 nt, Artificial Sequence
  Description of Artificial Sequence: Synthetic oligonucleotide
gccacuaauuccuggggau

SEQ ID NO: 1160592 - RNA, 19 nt, Artificial Sequence
  Description of Artificial Sequence: Synthetic oligonucleotide
auccgguuuccgggucagg

SEQ ID NO: 1160593 - RNA, 19 nt, Artificial Sequence
  Description of Artificial Sequence: Synthetic oligonucleotide
cuccuuugacacucagccu

SEQ ID NO: 1160594 - RNA, 19 nt, Artificial Sequence
  Description of Artificial Sequence: Synthetic oligonucleotide
ccacuaauuccuggggauc

SEQ ID NO: 1160595 - RNA, 19 nt, Artificial Sequence
  Description of Artificial Sequence: Synthetic oligonucleotide
ccgcccacagcgucgacuc

SEQ ID NO: 1160596 - RNA, 19 nt, Artificial Sequence
  Description of Artificial Sequence: Synthetic oligonucleotide
gacaguccugggguguacu

SEQ ID NO: 1160597 - RNA, 19 nt, Artificial Sequence
  Description of Artificial Sequence: Synthetic oligonucleotide
ccugagcaacaaucuugac

SEQ ID NO: 1160598 - RNA, 19 nt, Artificial Sequence
  Description of Artificial Sequence: Synthetic oligonucleotide
cguggcauuggucguggug

SEQ ID NO: 1160599 - RNA, 19 nt, Artificial Sequence
  Description of Artificial Sequence: Synthetic oligonucleotide
ugcuacccaggggcugcug

SEQ ID NO: 1160600 - RNA, 19 nt, Artificial Sequence
  Description of Artificial Sequence: Synthetic oligonucleotide
ggccacacucaccgggcac

SEQ ID NO: 1160601 - RNA, 19 nt, Artificial Sequence
  Description of Artificial Sequence: Synthetic oligonucleotide
ccuaagaguggccaccggu

SEQ ID NO: 1160602 - RNA, 19 nt, Artificial Sequence
  Description of Artificial Sequence: Synthetic oligonucleotide
cuuucucuuuugggcaucu

SEQ ID NO: 1160603 - RNA, 19 nt, Artificial Sequence
  Description of Artificial Sequence: Synthetic oligonucleotide
ggugggaucuugaucucgu

SEQ ID NO: 1160604 - RNA, 19 nt, Artificial Sequence
  Description of Artificial Sequence: Synthetic oligonucleotide
cucaccgggcaccgaggga

SEQ ID NO: 1160605 - RNA, 19 nt, Artificial Sequence
  Description of Artificial Sequence: Synthetic oligonucleotide
ggugcccguuacaaacuca

SEQ ID NO: 1160606 - RNA, 19 nt, Artificial Sequence
  Description of Artificial Sequence: Synthetic oligonucleotide
gggcccuaagaguggccac

SEQ ID NO: 1160607 - RNA, 19 nt, Artificial Sequence
  Description of Artificial Sequence: Synthetic oligonucleotide
cuuccgacugcuugcuguu

SEQ ID NO: 1160608 - RNA, 19 nt, Artificial Sequence
  Description of Artificial Sequence: Synthetic oligonucleotide
caucuuccgacugcuugcu

SEQ ID NO: 1160609 - RNA, 19 nt, Artificial Sequence
  Description of Artificial Sequence: Synthetic oligonucleotide
ggccuggguguguaucaga

SEQ ID NO: 1160610 - RNA, 19 nt, Artificial Sequence
  Description of Artificial Sequence: Synthetic oligonucleotide
ggauggugggcugugcuau

SEQ ID NO: 1160611 - RNA, 19 nt, Artificial Sequence
  Description of Artificial Sequence: Synthetic oligonucleotide
gcuaccccucugagcagcc

SEQ ID NO: 1160612 - RNA, 19 nt, Artificial Sequence
  Description of Artificial Sequence: Synthetic oligonucleotide
gacauguuucggacccuuu

SEQ ID NO: 1160613 - RNA, 19 nt, Artificial Sequence
  Description of Artificial Sequence: Synthetic oligonucleotide
ccgacugcuugcuguucuc

SEQ ID NO: 1160614 - RNA, 19 nt, Artificial Sequence
  Description of Artificial Sequence: Synthetic oligonucleotide
cagaaaugacgguggucuu

SEQ ID NO: 1160615 - RNA, 19 nt, Artificial Sequence
  Description of Artificial Sequence: Synthetic oligonucleotide
cuccgcccuggccggagca

SEQ ID NO: 1160616 - RNA, 19 nt, Artificial Sequence
  Description of Artificial Sequence: Synthetic oligonucleotide
gcauaccauugggaaugac

SEQ ID NO: 1160617 - RNA, 19 nt, Artificial Sequence
  Description of Artificial Sequence: Synthetic oligonucleotide
ggccucuguucacuggccu

SEQ ID NO: 1160618 - RNA, 19 nt, Artificial Sequence
  Description of Artificial Sequence: Synthetic oligonucleotide
cgcgccgcccacagcgucg

SEQ ID NO: 1160619 - RNA, 19 nt, Artificial Sequence
  Description of Artificial Sequence: Synthetic oligonucleotide
gugacauguuucggacccu

SEQ ID NO: 1160620 - RNA, 19 nt, Artificial Sequence
  Description of Artificial Sequence: Synthetic oligonucleotide
gcuccgagucuuccgcaua

SEQ ID NO: 1160621 - RNA, 19 nt, Artificial Sequence
  Description of Artificial Sequence: Synthetic oligonucleotide
ccgguuuccgggucaggaa

SEQ ID NO: 1160622 - RNA, 19 nt, Artificial Sequence
  Description of Artificial Sequence: Synthetic oligonucleotide
cauuggucguggugccuuu

SEQ ID NO: 1160623 - RNA, 19 nt, Artificial Sequence
  Description of Artificial Sequence: Synthetic oligonucleotide
gcgucgacuccagccucgc

SEQ ID NO: 1160624 - RNA, 19 nt, Artificial Sequence
  Description of Artificial Sequence: Synthetic oligonucleotide
cgggcaccgagggacuggg

SEQ ID NO: 1160625 - RNA, 19 nt, Artificial Sequence
  Description of Artificial Sequence: Synthetic oligonucleotide
gcuccgcccuggccggagc

SEQ ID NO: 1160626 - RNA, 19 nt, Artificial Sequence
  Description of Artificial Sequence: Synthetic oligonucleotide
gcauuggucguggugccuu

SEQ ID NO: 1160627 - RNA, 19 nt, Artificial Sequence
  Description of Artificial Sequence: Synthetic oligonucleotide
cacacucaccgggcaccga

SEQ ID NO: 1160628 - RNA, 19 nt, Artificial Sequence
  Description of Artificial Sequence: Synthetic oligonucleotide
cgucgacuccagccucgcc

SEQ ID NO: 1160629 - RNA, 19 nt, Artificial Sequence
  Description of Artificial Sequence: Synthetic oligonucleotide
cucagccuuuccgcugagu

SEQ ID NO: 1160630 - RNA, 19 nt, Artificial Sequence
  Description of Artificial Sequence: Synthetic oligonucleotide
caccgggcaccgagggacu

SEQ ID NO: 1160631 - RNA, 19 nt, Artificial Sequence
  Description of Artificial Sequence: Synthetic oligonucleotide
cgacugcuugcuguucuca

SEQ ID NO: 1160632 - RNA, 19 nt, Artificial Sequence
  Description of Artificial Sequence: Synthetic oligonucleotide
ccucugcuauugccugaga

SEQ ID NO: 1160633 - RNA, 19 nt, Artificial Sequence
  Description of Artificial Sequence: Synthetic oligonucleotide
ccuggggaucccgcuucuc

SEQ ID NO: 1160634 - RNA, 19 nt, Artificial Sequence
  Description of Artificial Sequence: Synthetic oligonucleotide
ccacaccaccaggcauacc

SEQ ID NO: 1160635 - RNA, 19 nt, Artificial Sequence
  Description of Artificial Sequence: Synthetic oligonucleotide
gccgcccacagcgucgacu

SEQ ID NO: 1160636 - RNA, 19 nt, Artificial Sequence
  Description of Artificial Sequence: Synthetic oligonucleotide
ggaucccgcuucucugcuu

SEQ ID NO: 1160637 - RNA, 19 nt, Artificial Sequence
  Description of Artificial Sequence: Synthetic oligonucleotide
gccuuuccgcugaguggga

SEQ ID NO: 1160638 - RNA, 19 nt, Artificial Sequence
  Description of Artificial Sequence: Synthetic oligonucleotide
gcgccgcccacagcgucga

SEQ ID NO: 1160639 - RNA, 19 nt, Artificial Sequence
  Description of Artificial Sequence: Synthetic oligonucleotide
ccggugcuacccaggggcu

SEQ ID NO: 1160640 - RNA, 19 nt, Artificial Sequence
  Description of Artificial Sequence: Synthetic oligonucleotide
cgacuccagccucgccauc

SEQ ID NO: 1160641 - RNA, 19 nt, Artificial Sequence
  Description of Artificial Sequence: Synthetic oligonucleotide
gccggagcaggaggugauu

SEQ ID NO: 1160642 - RNA, 19 nt, Artificial Sequence
  Description of Artificial Sequence: Synthetic oligonucleotide
ccguggcauuggucguggu

SEQ ID NO: 1160643 - RNA, 19 nt, Artificial Sequence
  Description of Artificial Sequence: Synthetic oligonucleotide
cuccugcccugggcagguu

SEQ ID NO: 1160644 - RNA, 19 nt, Artificial Sequence
  Description of Artificial Sequence: Synthetic oligonucleotide
ugaaacauaaggaagagag

SEQ ID NO: 1160645 - RNA, 19 nt, Artificial Sequence
  Description of Artificial Sequence: Synthetic oligonucleotide
  modified_base (6)..(6): a, c, u, g, unknown or other
aaaaunuauauauauauau

SEQ ID NO: 1160646 - RNA, 19 nt, Artificial Sequence
  Description of Artificial Sequence: Synthetic oligonucleotide
auuucauagaguuacaaac

SEQ ID NO: 1160647 - RNA, 19 nt, Artificial Sequence
  Description of Artificial Sequence: Synthetic oligonucleotide
auauauauauauuucauag

SEQ ID NO: 1160648 - RNA, 19 nt, Artificial Sequence
  Description of Artificial Sequence: Synthetic oligonucleotide
aaccaacucaauuuuaugc

SEQ ID NO: 1160649 - RNA, 19 nt, Artificial Sequence
  Description of Artificial Sequence: Synthetic oligonucleotide
  modified_base (4)..(4): a, c, u, g, unknown or other
aaunuauauauauauauuu

SEQ ID NO: 1160650 - RNA, 19 nt, Artificial Sequence
  Description of Artificial Sequence: Synthetic oligonucleotide
uuuucauagauacagacac

SEQ ID NO: 1160651 - RNA, 19 nt, Artificial Sequence
  Description of Artificial Sequence: Synthetic oligonucleotide
aaagcuuuguuucacagug

SEQ ID NO: 1160652 - RNA, 19 nt, Artificial Sequence
  Description of Artificial Sequence: Synthetic oligonucleotide
uaugcuucuauuuaaaaug

SEQ ID NO: 1160653 - RNA, 19 nt, Artificial Sequence
  Description of Artificial Sequence: Synthetic oligonucleotide
  modified_base (2)..(2): a, c, u, g, unknown or other
unuauauauauauauuuca

SEQ ID NO: 1160654 - RNA, 19 nt, Artificial Sequence
  Description of Artificial Sequence: Synthetic oligonucleotide
gagguaauaaacuagggug

SEQ ID NO: 1160655 - RNA, 19 nt, Artificial Sequence
  Description of Artificial Sequence: Synthetic oligonucleotide
acuauuaccaagcaauauc

SEQ ID NO: 1160656 - RNA, 19 nt, Artificial Sequence
  Description of Artificial Sequence: Synthetic oligonucleotide
uuaccaagcaauaucaucu

SEQ ID NO: 1160657 - RNA, 19 nt, Artificial Sequence
  Description of Artificial Sequence: Synthetic oligonucleotide
uucaagaagaccuagcaga

SEQ ID NO: 1160658 - RNA, 19 nt, Artificial Sequence
  Description of Artificial Sequence: Synthetic oligonucleotide
uguuaaauuguuaauuggu

SEQ ID NO: 1160659 - RNA, 19 nt, Artificial Sequence
  Description of Artificial Sequence: Synthetic oligonucleotide
uaaagcuaguguuaaauug

SEQ ID NO: 1160660 - RNA, 19 nt, Artificial Sequence
  Description of Artificial Sequence: Synthetic oligonucleotide
guuaauugguaucacacag

SEQ ID NO: 1160661 - RNA, 19 nt, Artificial Sequence
  Description of Artificial Sequence: Synthetic oligonucleotide
ucauauaccuucuuuaccu

SEQ ID NO: 1160662 - RNA, 19 nt, Artificial Sequence
  Description of Artificial Sequence: Synthetic oligonucleotide
  modified_base (3)..(3): a, c, u, g, unknown or other
aunuauauauauauauuuc

SEQ ID NO: 1160663 - RNA, 19 nt, Artificial Sequence
  Description of Artificial Sequence: Synthetic oligonucleotide
agaguuacaaacaagauaa

SEQ ID NO: 1160664 - RNA, 19 nt, Artificial Sequence
  Description of Artificial Sequence: Synthetic oligonucleotide
auuaccaagcaauaucauc

SEQ ID NO: 1160665 - RNA, 19 nt, Artificial Sequence
  Description of Artificial Sequence: Synthetic oligonucleotide
uuauuguugccaaacacac

SEQ ID NO: 1160666 - RNA, 19 nt, Artificial Sequence
  Description of Artificial Sequence: Synthetic oligonucleotide
gauaacucagguuucaaca

SEQ ID NO: 1160667 - RNA, 19 nt, Artificial Sequence
  Description of Artificial Sequence: Synthetic oligonucleotide
cagacugcgagguagaugc

SEQ ID NO: 1160668 - RNA, 19 nt, Artificial Sequence
  Description of Artificial Sequence: Synthetic oligonucleotide
cacagugaaacacugacag

SEQ ID NO: 1160669 - RNA, 19 nt, Artificial Sequence
  Description of Artificial Sequence: Synthetic oligonucleotide
aaauuguuaauugguauca

SEQ ID NO: 1160670 - RNA, 19 nt, Artificial Sequence
  Description of Artificial Sequence: Synthetic oligonucleotide
agaaauugcacuauuacca

SEQ ID NO: 1160671 - RNA, 19 nt, Artificial Sequence
  Description of Artificial Sequence: Synthetic oligonucleotide
agugguaugagccgccgcc

SEQ ID NO: 1160672 - RNA, 19 nt, Artificial Sequence
  Description of Artificial Sequence: Synthetic oligonucleotide
cauagaguuacaaacaaga

SEQ ID NO: 1160673 - RNA, 19 nt, Artificial Sequence
  Description of Artificial Sequence: Synthetic oligonucleotide
  modified_base (9)..(9): a, c, u, g, unknown or other
aagccccanacacacacac

SEQ ID NO: 1160674 - RNA, 19 nt, Artificial Sequence
  Description of Artificial Sequence: Synthetic oligonucleotide
uguuuggaagcaaagcccc

SEQ ID NO: 1160675 - RNA, 19 nt, Artificial Sequence
  Description of Artificial Sequence: Synthetic oligonucleotide
aacgguuuucaagaagacc

SEQ ID NO: 1160676 - RNA, 19 nt, Artificial Sequence
  Description of Artificial Sequence: Synthetic oligonucleotide
ucuuuugcaaagucaauga

SEQ ID NO: 1160677 - RNA, 19 nt, Artificial Sequence
  Description of Artificial Sequence: Synthetic oligonucleotide
uauauauauauauuucaua

SEQ ID NO: 1160678 - RNA, 19 nt, Artificial Sequence
  Description of Artificial Sequence: Synthetic oligonucleotide
aacuagggugcucuuuggc

SEQ ID NO: 1160679 - RNA, 19 nt, Artificial Sequence
  Description of Artificial Sequence: Synthetic oligonucleotide
gauuucagaucuuggaaug

SEQ ID NO: 1160680 - RNA, 19 nt, Artificial Sequence
  Description of Artificial Sequence: Synthetic oligonucleotide
cuagucaaagcuuuguuuc

SEQ ID NO: 1160681 - RNA, 19 nt, Artificial Sequence
  Description of Artificial Sequence: Synthetic oligonucleotide
  modified_base (3)..(3): a, c, u, g, unknown or other
canacacacacacacacac

SEQ ID NO: 1160682 - RNA, 19 nt, Artificial Sequence
  Description of Artificial Sequence: Synthetic oligonucleotide
agguaauaaacuagggugc

SEQ ID NO: 1160683 - RNA, 19 nt, Artificial Sequence
  Description of Artificial Sequence: Synthetic oligonucleotide
aaugugugugugugggugg

SEQ ID NO: 1160684 - RNA, 19 nt, Artificial Sequence
  Description of Artificial Sequence: Synthetic oligonucleotide
aaagucaaugaguggccuc

SEQ ID NO: 1160685 - RNA, 19 nt, Artificial Sequence
  Description of Artificial Sequence: Synthetic oligonucleotide
uagaguuacaaacaagaua

SEQ ID NO: 1160686 - RNA, 19 nt, Artificial Sequence
  Description of Artificial Sequence: Synthetic oligonucleotide
aaagcuaguguuaaauugu

SEQ ID NO: 1160687 - RNA, 19 nt, Artificial Sequence
  Description of Artificial Sequence: Synthetic oligonucleotide
ucauagaguuacaaacaag

SEQ ID NO: 1160688 - RNA, 19 nt, Artificial Sequence
  Description of Artificial Sequence: Synthetic oligonucleotide
agcuuuguuucacaguggg

SEQ ID NO: 1160689 - RNA, 19 nt, Artificial Sequence
  Description of Artificial Sequence: Synthetic oligonucleotide
agaccuagcagaaugacag

SEQ ID NO: 1160690 - RNA, 19 nt, Artificial Sequence
  Description of Artificial Sequence: Synthetic oligonucleotide
augauaguagcucaaaaua

SEQ ID NO: 1160691 - RNA, 19 nt, Artificial Sequence
  Description of Artificial Sequence: Synthetic oligonucleotide
aauuguuaauugguaucac

SEQ ID NO: 1160692 - RNA, 19 nt, Artificial Sequence
  Description of Artificial Sequence: Synthetic oligonucleotide
  modified_base (5)..(5): a, c, u, g, unknown or other
aaaunuauauauauauauu

SEQ ID NO: 1160693 - RNA, 19 nt, Artificial Sequence
  Description of Artificial Sequence: Synthetic oligonucleotide
aggacuucacacuuugggg

SEQ ID NO: 1160694 - RNA, 19 nt, Artificial Sequence
  Description of Artificial Sequence: Synthetic oligonucleotide
ugaacaucaagugcacugg

SEQ ID NO: 1160695 - RNA, 19 nt, Artificial Sequence
  Description of Artificial Sequence: Synthetic oligonucleotide
acuagggugcucuuuggcg

SEQ ID NO: 1160696 - RNA, 19 nt, Artificial Sequence
  Description of Artificial Sequence: Synthetic oligonucleotide
ugccugauaacucagguuu

SEQ ID NO: 1160697 - RNA, 19 nt, Artificial Sequence
  Description of Artificial Sequence: Synthetic oligonucleotide
aggcuguucauauaccuuc

SEQ ID NO: 1160698 - RNA, 19 nt, Artificial Sequence
  Description of Artificial Sequence: Synthetic oligonucleotide
acaaauguguguguguggg

SEQ ID NO: 1160699 - RNA, 19 nt, Artificial Sequence
  Description of Artificial Sequence: Synthetic oligonucleotide
uuaauugguaucacacaga

SEQ ID NO: 1160700 - RNA, 19 nt, Artificial Sequence
  Description of Artificial Sequence: Synthetic oligonucleotide
aaaugugugugugugggug

SEQ ID NO: 1160701 - RNA, 19 nt, Artificial Sequence
  Description of Artificial Sequence: Synthetic oligonucleotide
uaauaaacuagggugcucu

SEQ ID NO: 1160702 - RNA, 19 nt, Artificial Sequence
  Description of Artificial Sequence: Synthetic oligonucleotide
cuuuccuacccaaacuugc

SEQ ID NO: 1160703 - RNA, 19 nt, Artificial Sequence
  Description of Artificial Sequence: Synthetic oligonucleotide
ugggcaguaucucagcgcc

SEQ ID NO: 1160704 - RNA, 19 nt, Artificial Sequence
  Description of Artificial Sequence: Synthetic oligonucleotide
uuuuaugcuucuauuuaaa

SEQ ID NO: 1160705 - RNA, 19 nt, Artificial Sequence
  Description of Artificial Sequence: Synthetic oligonucleotide
auuguuaauugguaucaca

SEQ ID NO: 1160706 - RNA, 19 nt, Artificial Sequence
  Description of Artificial Sequence: Synthetic oligonucleotide
  modified_base (10)..(10): a, c, u, g, unknown or other
  modified_base (15)..(15): a, c, u, g, unknown or other
agcgcuuccncccgnagag

SEQ ID NO: 1160707 - RNA, 19 nt, Artificial Sequence
  Description of Artificial Sequence: Synthetic oligonucleotide
  modified_base (13)..(13): a, c, u, g, unknown or other
agcaaagccccanacacac

SEQ ID NO: 1160708 - RNA, 19 nt, Artificial Sequence
  Description of Artificial Sequence: Synthetic oligonucleotide
acgguuuucaagaagaccu

SEQ ID NO: 1160709 - RNA, 19 nt, Artificial Sequence
  Description of Artificial Sequence: Synthetic oligonucleotide
agcucaaaauagaacaaac

SEQ ID NO: 1160710 - RNA, 19 nt, Artificial Sequence
  Description of Artificial Sequence: Synthetic oligonucleotide
aaacuagggugcucuuugg

SEQ ID NO: 1160711 - RNA, 19 nt, Artificial Sequence
  Description of Artificial Sequence: Synthetic oligonucleotide
aagcaauaucaucuuaaaa

SEQ ID NO: 1160712 - RNA, 19 nt, Artificial Sequence
  Description of Artificial Sequence: Synthetic oligonucleotide
uuuccuacccaaacuugcc

SEQ ID NO: 1160713 - RNA, 19 nt, Artificial Sequence
  Description of Artificial Sequence: Synthetic oligonucleotide
gacaaaugugugugugugg

SEQ ID NO: 1160714 - RNA, 19 nt, Artificial Sequence
  Description of Artificial Sequence: Synthetic oligonucleotide
ucugccuuacagagggagg

SEQ ID NO: 1160715 - RNA, 19 nt, Artificial Sequence
  Description of Artificial Sequence: Synthetic oligonucleotide
uuuaugcuuucuuuccuac

SEQ ID NO: 1160716 - RNA, 19 nt, Artificial Sequence
  Description of Artificial Sequence: Synthetic oligonucleotide
gauaguagcucaaaauaga

SEQ ID NO: 1160717 - RNA, 19 nt, Artificial Sequence
  Description of Artificial Sequence: Synthetic oligonucleotide
aacauacaacaguuagaug

SEQ ID NO: 1160718 - RNA, 19 nt, Artificial Sequence
  Description of Artificial Sequence: Synthetic oligonucleotide
ucuuuccuacccaaacuug

SEQ ID NO: 1160719 - RNA, 19 nt, Artificial Sequence
  Description of Artificial Sequence: Synthetic oligonucleotide
acaaacaaccaacucaauu

SEQ ID NO: 1160720 - RNA, 19 nt, Artificial Sequence
  Description of Artificial Sequence: Synthetic oligonucleotide
cacacacacacacacacac

SEQ ID NO: 1160721 - RNA, 19 nt, Artificial Sequence
  Description of Artificial Sequence: Synthetic oligonucleotide
ugauaacucagguuucaac

SEQ ID NO: 1160722 - RNA, 19 nt, Artificial Sequence
  Description of Artificial Sequence: Synthetic oligonucleotide
uucuuuccuacccaaacuu

SEQ ID NO: 1160723 - RNA, 19 nt, Artificial Sequence
  Description of Artificial Sequence: Synthetic oligonucleotide
guguacauugcaaaggcug

SEQ ID NO: 1160724 - RNA, 19 nt, Artificial Sequence
  Description of Artificial Sequence: Synthetic oligonucleotide
cuguaguugccucugcugc

SEQ ID NO: 1160725 - RNA, 19 nt, Artificial Sequence
  Description of Artificial Sequence: Synthetic oligonucleotide
gggagauuaugucuguugg

SEQ ID NO: 1160726 - RNA, 19 nt, Artificial Sequence
  Description of Artificial Sequence: Synthetic oligonucleotide
ucuuggaaugcuccagucu

SEQ ID NO: 1160727 - RNA, 19 nt, Artificial Sequence
  Description of Artificial Sequence: Synthetic oligonucleotide
uauuguugccaaacacacc

SEQ ID NO: 1160728 - RNA, 19 nt, Artificial Sequence
  Description of Artificial Sequence: Synthetic oligonucleotide
agcacuggggaagaagccc

SEQ ID NO: 1160729 - RNA, 19 nt, Artificial Sequence
  Description of Artificial Sequence: Synthetic oligonucleotide
ugcggugcuaggaucgggg

SEQ ID NO: 1160730 - RNA, 19 nt, Artificial Sequence
  Description of Artificial Sequence: Synthetic oligonucleotide
aucucagcgccaaacaaac

SEQ ID NO: 1160731 - RNA, 19 nt, Artificial Sequence
  Description of Artificial Sequence: Synthetic oligonucleotide
gucuuuugcaaagucaaug

SEQ ID NO: 1160732 - RNA, 19 nt, Artificial Sequence
  Description of Artificial Sequence: Synthetic oligonucleotide
ucuuuggcguuucuugcug

SEQ ID NO: 1160733 - RNA, 19 nt, Artificial Sequence
  Description of Artificial Sequence: Synthetic oligonucleotide
aguaucucagcgccaaaca

SEQ ID NO: 1160734 - RNA, 19 nt, Artificial Sequence
  Description of Artificial Sequence: Synthetic oligonucleotide
agagugagguaauaaacua

SEQ ID NO: 1160735 - RNA, 19 nt, Artificial Sequence
  Description of Artificial Sequence: Synthetic oligonucleotide
gaugauaguagcucaaaau

SEQ ID NO: 1160736 - RNA, 19 nt, Artificial Sequence
  Description of Artificial Sequence: Synthetic oligonucleotide
auaacucagguuucaacaa

SEQ ID NO: 1160737 - RNA, 19 nt, Artificial Sequence
  Description of Artificial Sequence: Synthetic oligonucleotide
gaggauagaaauugcacua

SEQ ID NO: 1160738 - RNA, 19 nt, Artificial Sequence
  Description of Artificial Sequence: Synthetic oligonucleotide
aagucaaugaguggccuca

SEQ ID NO: 1160739 - RNA, 19 nt, Artificial Sequence
  Description of Artificial Sequence: Synthetic oligonucleotide
gucuguugguguuuggaag

SEQ ID NO: 1160740 - RNA, 19 nt, Artificial Sequence
  Description of Artificial Sequence: Synthetic oligonucleotide
aaggccgacucgaggaugc

SEQ ID NO: 1160741 - RNA, 19 nt, Artificial Sequence
  Description of Artificial Sequence: Synthetic oligonucleotide
uuaugcuuucuuuccuacc

SEQ ID NO: 1160742 - RNA, 19 nt, Artificial Sequence
  Description of Artificial Sequence: Synthetic oligonucleotide
agauuaugucuguuggugu

SEQ ID NO: 1160743 - RNA, 19 nt, Artificial Sequence
  Description of Artificial Sequence: Synthetic oligonucleotide
agggagauuaugucuguug

SEQ ID NO: 1160744 - RNA, 19 nt, Artificial Sequence
  Description of Artificial Sequence: Synthetic oligonucleotide
aacuagucaaagcuuuguu

SEQ ID NO: 1160745 - RNA, 19 nt, Artificial Sequence
  Description of Artificial Sequence: Synthetic oligonucleotide
agugagccuggagacaacc

SEQ ID NO: 1160746 - RNA, 19 nt, Artificial Sequence
  Description of Artificial Sequence: Synthetic oligonucleotide
uggagacaaccccaucagg

SEQ ID NO: 1160747 - RNA, 19 nt, Artificial Sequence
  Description of Artificial Sequence: Synthetic oligonucleotide
ucagcgccaaacaaacaac

SEQ ID NO: 1160748 - RNA, 19 nt, Artificial Sequence
  Description of Artificial Sequence: Synthetic oligonucleotide
ugcugaaucgccuccugca

SEQ ID NO: 1160749 - RNA, 19 nt, Artificial Sequence
  Description of Artificial Sequence: Synthetic oligonucleotide
uacaacaguuagauggcaa

SEQ ID NO: 1160750 - RNA, 19 nt, Artificial Sequence
  Description of Artificial Sequence: Synthetic oligonucleotide
uguugccaaacacacccac

SEQ ID NO: 1160751 - RNA, 19 nt, Artificial Sequence
  Description of Artificial Sequence: Synthetic oligonucleotide
acaacaguuagauggcaaa

SEQ ID NO: 1160752 - RNA, 19 nt, Artificial Sequence
  Description of Artificial Sequence: Synthetic oligonucleotide
agacaaaugugugugugug

SEQ ID NO: 1160753 - RNA, 19 nt, Artificial Sequence
  Description of Artificial Sequence: Synthetic oligonucleotide
gagggaggaugauaguagc

SEQ ID NO: 1160754 - RNA, 19 nt, Artificial Sequence
  Description of Artificial Sequence: Synthetic oligonucleotide
ugaaucgccuccugcagac

SEQ ID NO: 1160755 - RNA, 19 nt, Artificial Sequence
  Description of Artificial Sequence: Synthetic oligonucleotide
guguuuggaagcaaagccc

SEQ ID NO: 1160756 - RNA, 19 nt, Artificial Sequence
  Description of Artificial Sequence: Synthetic oligonucleotide
ugagcggcagacugcgagg

SEQ ID NO: 1160757 - RNA, 19 nt, Artificial Sequence
  Description of Artificial Sequence: Synthetic oligonucleotide
cagcgccaaacaaacaacc

SEQ ID NO: 1160758 - RNA, 19 nt, Artificial Sequence
  Description of Artificial Sequence: Synthetic oligonucleotide
ugauuguucuguguuugug

SEQ ID NO: 1160759 - RNA, 19 nt, Artificial Sequence
  Description of Artificial Sequence: Synthetic oligonucleotide
uauaugucaugaacaucaa

SEQ ID NO: 1160760 - RNA, 19 nt, Artificial Sequence
  Description of Artificial Sequence: Synthetic oligonucleotide
agagggaggaugauaguag

SEQ ID NO: 1160761 - RNA, 19 nt, Artificial Sequence
  Description of Artificial Sequence: Synthetic oligonucleotide
uuuugggugagcggcagac

SEQ ID NO: 1160762 - RNA, 19 nt, Artificial Sequence
  Description of Artificial Sequence: Synthetic oligonucleotide
guuuucaagaagaccuagc

SEQ ID NO: 1160763 - RNA, 19 nt, Artificial Sequence
  Description of Artificial Sequence: Synthetic oligonucleotide
acauugcaaaggcuguuca

SEQ ID NO: 1160764 - RNA, 19 nt, Artificial Sequence
  Description of Artificial Sequence: Synthetic oligonucleotide
ggcacagugaaacacugac

SEQ ID NO: 1160765 - RNA, 19 nt, Artificial Sequence
  Description of Artificial Sequence: Synthetic oligonucleotide
gaccuuauuguugccaaac

SEQ ID NO: 1160766 - RNA, 19 nt, Artificial Sequence
  Description of Artificial Sequence: Synthetic oligonucleotide
aauaaacuagggugcucuu

SEQ ID NO: 1160767 - RNA, 19 nt, Artificial Sequence
  Description of Artificial Sequence: Synthetic oligonucleotide
uaccucagggucacguuca

SEQ ID NO: 1160768 - RNA, 19 nt, Artificial Sequence
  Description of Artificial Sequence: Synthetic oligonucleotide
  modified_base (7)..(7): a, c, u, g, unknown or other
gccccanacacacacacac

SEQ ID NO: 1160769 - RNA, 19 nt, Artificial Sequence
  Description of Artificial Sequence: Synthetic oligonucleotide
uuaugucuguugguguuug

SEQ ID NO: 1160770 - RNA, 19 nt, Artificial Sequence
  Description of Artificial Sequence: Synthetic oligonucleotide
gaccuagcagaaugacagg

SEQ ID NO: 1160771 - RNA, 19 nt, Artificial Sequence
  Description of Artificial Sequence: Synthetic oligonucleotide
agaaugacagguaaagcua

SEQ ID NO: 1160772 - RNA, 19 nt, Artificial Sequence
  Description of Artificial Sequence: Synthetic oligonucleotide
gugagcggcagacugcgag

SEQ ID NO: 1160773 - RNA, 19 nt, Artificial Sequence
  Description of Artificial Sequence: Synthetic oligonucleotide
aacaucaagugcacuggcu

SEQ ID NO: 1160774 - RNA, 19 nt, Artificial Sequence
  Description of Artificial Sequence: Synthetic oligonucleotide
  modified_base (6)..(6): a, c, u, g, unknown or other
  modified_base (11)..(11): a, c, u, g, unknown or other
cuuccncccgnagagcgcg

SEQ ID NO: 1160775 - RNA, 19 nt, Artificial Sequence
  Description of Artificial Sequence: Synthetic oligonucleotide
gacugcgagguagaugcgg

SEQ ID NO: 1160776 - RNA, 19 nt, Artificial Sequence
  Description of Artificial Sequence: Synthetic oligonucleotide
accuuauuguugccaaaca

SEQ ID NO: 1160777 - RNA, 19 nt, Artificial Sequence
  Description of Artificial Sequence: Synthetic oligonucleotide
caagggaacuugaggucgg

SEQ ID NO: 1160778 - RNA, 19 nt, Artificial Sequence
  Description of Artificial Sequence: Synthetic oligonucleotide
ccaggcagugguaugagcc

SEQ ID NO: 1160779 - RNA, 19 nt, Artificial Sequence
  Description of Artificial Sequence: Synthetic oligonucleotide
cuagcagaaugacagguaa

SEQ ID NO: 1160780 - RNA, 19 nt, Artificial Sequence
  Description of Artificial Sequence: Synthetic oligonucleotide
ugcgagguagaugcggugc

SEQ ID NO: 1160781 - RNA, 19 nt, Artificial Sequence
  Description of Artificial Sequence: Synthetic oligonucleotide
cucagcgccaaacaaacaa

SEQ ID NO: 1160782 - RNA, 19 nt, Artificial Sequence
  Description of Artificial Sequence: Synthetic oligonucleotide
augcuucuauuuaaaaugu

SEQ ID NO: 1160783 - RNA, 19 nt, Artificial Sequence
  Description of Artificial Sequence: Synthetic oligonucleotide
gaacaggccuuccaugcca

SEQ ID NO: 1160784 - RNA, 19 nt, Artificial Sequence
  Description of Artificial Sequence: Synthetic oligonucleotide
  modified_base (17)..(17): a, c, u, g, unknown or other
cugacucagcgcuuccncc

SEQ ID NO: 1160785 - RNA, 19 nt, Artificial Sequence
  Description of Artificial Sequence: Synthetic oligonucleotide
cuuuggcguuucuugcugc

SEQ ID NO: 1160786 - RNA, 19 nt, Artificial Sequence
  Description of Artificial Sequence: Synthetic oligonucleotide
uccugcaacuuccugccau

SEQ ID NO: 1160787 - RNA, 19 nt, Artificial Sequence
  Description of Artificial Sequence: Synthetic oligonucleotide
cagucacucugccuuacag

SEQ ID NO: 1160788 - RNA, 19 nt, Artificial Sequence
  Description of Artificial Sequence: Synthetic oligonucleotide
  modified_base (2)..(2): a, c, u, g, unknown or other
anacacacacacacacaca

SEQ ID NO: 1160789 - RNA, 19 nt, Artificial Sequence
  Description of Artificial Sequence: Synthetic oligonucleotide
  modified_base (2)..(2): a, c, u, g, unknown or other
gnagagcgcgcucucgcac

SEQ ID NO: 1160790 - RNA, 19 nt, Artificial Sequence
  Description of Artificial Sequence: Synthetic oligonucleotide
ggaucggggaagcaggcag

SEQ ID NO: 1160791 - RNA, 19 nt, Artificial Sequence
  Description of Artificial Sequence: Synthetic oligonucleotide
acacacacacacacacacc

SEQ ID NO: 1160792 - RNA, 19 nt, Artificial Sequence
  Description of Artificial Sequence: Synthetic oligonucleotide
uuuggcguuucuugcugcu

SEQ ID NO: 1160793 - RNA, 19 nt, Artificial Sequence
  Description of Artificial Sequence: Synthetic oligonucleotide
uacauugcaaaggcuguuc

SEQ ID NO: 1160794 - RNA, 19 nt, Artificial Sequence
  Description of Artificial Sequence: Synthetic oligonucleotide
auagaguuacaaacaagau

SEQ ID NO: 1160795 - RNA, 19 nt, Artificial Sequence
  Description of Artificial Sequence: Synthetic oligonucleotide
  modified_base (5)..(5): a, c, u, g, unknown or other
cccanacacacacacacac

SEQ ID NO: 1160796 - RNA, 19 nt, Artificial Sequence
  Description of Artificial Sequence: Synthetic oligonucleotide
agagcgcgcucucgcacgc

SEQ ID NO: 1160797 - RNA, 19 nt, Artificial Sequence
  Description of Artificial Sequence: Synthetic oligonucleotide
uaggggaacaggccuucca

SEQ ID NO: 1160798 - RNA, 19 nt, Artificial Sequence
  Description of Artificial Sequence: Synthetic oligonucleotide
accuagcagaaugacaggu

SEQ ID NO: 1160799 - RNA, 19 nt, Artificial Sequence
  Description of Artificial Sequence: Synthetic oligonucleotide
agaguuccaagggaacuug

SEQ ID NO: 1160800 - RNA, 19 nt, Artificial Sequence
  Description of Artificial Sequence: Synthetic oligonucleotide
acugacagucacucugccu

SEQ ID NO: 1160801 - RNA, 19 nt, Artificial Sequence
  Description of Artificial Sequence: Synthetic oligonucleotide
ucucgugauuguucugugu

SEQ ID NO: 1160802 - RNA, 19 nt, Artificial Sequence
  Description of Artificial Sequence: Synthetic oligonucleotide
aauugguaucacacagaga

SEQ ID NO: 1160803 - RNA, 19 nt, Artificial Sequence
  Description of Artificial Sequence: Synthetic oligonucleotide
aacggaaccuggauucaca

SEQ ID NO: 1160804 - RNA, 19 nt, Artificial Sequence
  Description of Artificial Sequence: Synthetic oligonucleotide
ggaggauagaaauugcacu

SEQ ID NO: 1160805 - RNA, 19 nt, Artificial Sequence
  Description of Artificial Sequence: Synthetic oligonucleotide
cagagugagguaauaaacu

SEQ ID NO: 1160806 - RNA, 19 nt, Artificial Sequence
  Description of Artificial Sequence: Synthetic oligonucleotide
  modified_base (10)..(10): a, c, u, g, unknown or other
aaagccccanacacacaca

SEQ ID NO: 1160807 - RNA, 19 nt, Artificial Sequence
  Description of Artificial Sequence: Synthetic oligonucleotide
  modified_base (12)..(12): a, c, u, g, unknown or other
  modified_base (17)..(17): a, c, u, g, unknown or other
ucagcgcuuccncccgnag

SEQ ID NO: 1160808 - RNA, 19 nt, Artificial Sequence
  Description of Artificial Sequence: Synthetic oligonucleotide
guaucucagcgccaaacaa

SEQ ID NO: 1160809 - RNA, 19 nt, Artificial Sequence
  Description of Artificial Sequence: Synthetic oligonucleotide
acagagaacccaaaacaaa

SEQ ID NO: 1160810 - RNA, 19 nt, Artificial Sequence
  Description of Artificial Sequence: Synthetic oligonucleotide
uuuaccucagggucacguu

SEQ ID NO: 1160811 - RNA, 19 nt, Artificial Sequence
  Description of Artificial Sequence: Synthetic oligonucleotide
gagggagaaggacuucaca

SEQ ID NO: 1160812 - RNA, 19 nt, Artificial Sequence
  Description of Artificial Sequence: Synthetic oligonucleotide
gcagagugagguaauaaac

SEQ ID NO: 1160813 - RNA, 19 nt, Artificial Sequence
  Description of Artificial Sequence: Synthetic oligonucleotide
gguuuucaagaagaccuag

SEQ ID NO: 1160814 - RNA, 19 nt, Artificial Sequence
  Description of Artificial Sequence: Synthetic oligonucleotide
gauuaugucuguugguguu

SEQ ID NO: 1160815 - RNA, 19 nt, Artificial Sequence
  Description of Artificial Sequence: Synthetic oligonucleotide
caguaucucagcgccaaac

SEQ ID NO: 1160816 - RNA, 19 nt, Artificial Sequence
  Description of Artificial Sequence: Synthetic oligonucleotide
agaagaccuagcagaauga

SEQ ID NO: 1160817 - RNA, 19 nt, Artificial Sequence
  Description of Artificial Sequence: Synthetic oligonucleotide
ggaggaugauaguagcuca

SEQ ID NO: 1160818 - RNA, 19 nt, Artificial Sequence
  Description of Artificial Sequence: Synthetic oligonucleotide
augcugacucagcgcuucc

SEQ ID NO: 1160819 - RNA, 19 nt, Artificial Sequence
  Description of Artificial Sequence: Synthetic oligonucleotide
auguguguguguggguggg

SEQ ID NO: 1160820 - RNA, 19 nt, Artificial Sequence
  Description of Artificial Sequence: Synthetic oligonucleotide
aacacacccacgggucaag

SEQ ID NO: 1160821 - RNA, 19 nt, Artificial Sequence
  Description of Artificial Sequence: Synthetic oligonucleotide
gccaacggaaccuggauuc

SEQ ID NO: 1160822 - RNA, 19 nt, Artificial Sequence
  Description of Artificial Sequence: Synthetic oligonucleotide
cacacacacacacacaccu

SEQ ID NO: 1160823 - RNA, 19 nt, Artificial Sequence
  Description of Artificial Sequence: Synthetic oligonucleotide
ucucagcgccaaacaaaca

SEQ ID NO: 1160824 - RNA, 19 nt, Artificial Sequence
  Description of Artificial Sequence: Synthetic oligonucleotide
ccaagggaacuugaggucg

SEQ ID NO: 1160825 - RNA, 19 nt, Artificial Sequence
  Description of Artificial Sequence: Synthetic oligonucleotide
uaccaagcaauaucaucuu

SEQ ID NO: 1160826 - RNA, 19 nt, Artificial Sequence
  Description of Artificial Sequence: Synthetic oligonucleotide
aagcuaguguuaaauuguu

SEQ ID NO: 1160827 - RNA, 19 nt, Artificial Sequence
  Description of Artificial Sequence: Synthetic oligonucleotide
uguuugugcaaggccgacu

SEQ ID NO: 1160828 - RNA, 19 nt, Artificial Sequence
  Description of Artificial Sequence: Synthetic oligonucleotide
caaggcguggcacagugaa

SEQ ID NO: 1160829 - RNA, 19 nt, Artificial Sequence
  Description of Artificial Sequence: Synthetic oligonucleotide
gaugcggugcuaggaucgg

SEQ ID NO: 1160830 - RNA, 19 nt, Artificial Sequence
  Description of Artificial Sequence: Synthetic oligonucleotide
guagcucaaaauagaacaa

SEQ ID NO: 1160831 - RNA, 19 nt, Artificial Sequence
  Description of Artificial Sequence: Synthetic oligonucleotide
aggauagaaauugcacuau

SEQ ID NO: 1160832 - RNA, 19 nt, Artificial Sequence
  Description of Artificial Sequence: Synthetic oligonucleotide
gguaucacacagagaaccc

SEQ ID NO: 1160833 - RNA, 19 nt, Artificial Sequence
  Description of Artificial Sequence: Synthetic oligonucleotide
gcuaggaucggggaagcag

SEQ ID NO: 1160834 - RNA, 19 nt, Artificial Sequence
  Description of Artificial Sequence: Synthetic oligonucleotide
guaucacacagagaaccca

SEQ ID NO: 1160835 - RNA, 19 nt, Artificial Sequence
  Description of Artificial Sequence: Synthetic oligonucleotide
gggaggauagaaauugcac

SEQ ID NO: 1160836 - RNA, 19 nt, Artificial Sequence
  Description of Artificial Sequence: Synthetic oligonucleotide
auacaacaguuagauggca

SEQ ID NO: 1160837 - RNA, 19 nt, Artificial Sequence
  Description of Artificial Sequence: Synthetic oligonucleotide
ucgugauuguucuguguuu

SEQ ID NO: 1160838 - RNA, 19 nt, Artificial Sequence
  Description of Artificial Sequence: Synthetic oligonucleotide
aaccacugggaaagggcug

SEQ ID NO: 1160839 - RNA, 19 nt, Artificial Sequence
  Description of Artificial Sequence: Synthetic oligonucleotide
uuggaaugcuccagucuuu

SEQ ID NO: 1160840 - RNA, 19 nt, Artificial Sequence
  Description of Artificial Sequence: Synthetic oligonucleotide
ucaaggcguggcacaguga

SEQ ID NO: 1160841 - RNA, 19 nt, Artificial Sequence
  Description of Artificial Sequence: Synthetic oligonucleotide
acucagguuucaacaauga

SEQ ID NO: 1160842 - RNA, 19 nt, Artificial Sequence
  Description of Artificial Sequence: Synthetic oligonucleotide
cucucgugauuguucugug

SEQ ID NO: 1160843 - RNA, 19 nt, Artificial Sequence
  Description of Artificial Sequence: Synthetic oligonucleotide
cugccaugccugauaacuc

SEQ ID NO: 1160844 - RNA, 19 nt, Artificial Sequence
  Description of Artificial Sequence: Synthetic oligonucleotide
augccugauaacucagguu

SEQ ID NO: 1160845 - RNA, 19 nt, Artificial Sequence
  Description of Artificial Sequence: Synthetic oligonucleotide
accaagcaauaucaucuua

SEQ ID NO: 1160846 - RNA, 19 nt, Artificial Sequence
  Description of Artificial Sequence: Synthetic oligonucleotide
uggccaacggaaccuggau

SEQ ID NO: 1160847 - RNA, 19 nt, Artificial Sequence
  Description of Artificial Sequence: Synthetic oligonucleotide
agggucacguucauuuaug

SEQ ID NO: 1160848 - RNA, 19 nt, Artificial Sequence
  Description of Artificial Sequence: Synthetic oligonucleotide
gugguaugagccgccgccg

SEQ ID NO: 1160849 - RNA, 19 nt, Artificial Sequence
  Description of Artificial Sequence: Synthetic oligonucleotide
aagugagccuggagacaac

SEQ ID NO: 1160850 - RNA, 19 nt, Artificial Sequence
  Description of Artificial Sequence: Synthetic oligonucleotide
cuuggaaugcuccagucuu

SEQ ID NO: 1160851 - RNA, 19 nt, Artificial Sequence
  Description of Artificial Sequence: Synthetic oligonucleotide
  modified_base (5)..(5): a, c, u, g, unknown or other
  modified_base (10)..(10): a, c, u, g, unknown or other
uuccncccgnagagcgcgc

SEQ ID NO: 1160852 - RNA, 19 nt, Artificial Sequence
  Description of Artificial Sequence: Synthetic oligonucleotide
guugcugcugcugcugcug

SEQ ID NO: 1160853 - RNA, 19 nt, Artificial Sequence
  Description of Artificial Sequence: Synthetic oligonucleotide
agggaacuugaggucgggg

SEQ ID NO: 1160854 - RNA, 19 nt, Artificial Sequence
  Description of Artificial Sequence: Synthetic oligonucleotide
ccaaacacacccacggguc

SEQ ID NO: 1160855 - RNA, 19 nt, Artificial Sequence
  Description of Artificial Sequence: Synthetic oligonucleotide
uguaggggaacaggccuuc

SEQ ID NO: 1160856 - RNA, 19 nt, Artificial Sequence
  Description of Artificial Sequence: Synthetic oligonucleotide
cgccaaacaaacaaccaac

SEQ ID NO: 1160857 - RNA, 19 nt, Artificial Sequence
  Description of Artificial Sequence: Synthetic oligonucleotide
ggaugauaguagcucaaaa

SEQ ID NO: 1160858 - RNA, 19 nt, Artificial Sequence
  Description of Artificial Sequence: Synthetic oligonucleotide
caccgcuuggcuugcuuug

SEQ ID NO: 1160859 - RNA, 19 nt, Artificial Sequence
  Description of Artificial Sequence: Synthetic oligonucleotide
gggaggaugauaguagcuc

SEQ ID NO: 1160860 - RNA, 19 nt, Artificial Sequence
  Description of Artificial Sequence: Synthetic oligonucleotide
ucucgcacgccaggcagug

SEQ ID NO: 1160861 - RNA, 19 nt, Artificial Sequence
  Description of Artificial Sequence: Synthetic oligonucleotide
ggaacaggccuuccaugcc

SEQ ID NO: 1160862 - RNA, 19 nt, Artificial Sequence
  Description of Artificial Sequence: Synthetic oligonucleotide
acagucacucugccuuaca

SEQ ID NO: 1160863 - RNA, 19 nt, Artificial Sequence
  Description of Artificial Sequence: Synthetic oligonucleotide
caaacacacccacggguca

SEQ ID NO: 1160864 - RNA, 19 nt, Artificial Sequence
  Description of Artificial Sequence: Synthetic oligonucleotide
aggaugauaguagcucaaa

SEQ ID NO: 1160865 - RNA, 19 nt, Artificial Sequence
  Description of Artificial Sequence: Synthetic oligonucleotide
uugcugcugcugcugcugu

SEQ ID NO: 1160866 - RNA, 19 nt, Artificial Sequence
  Description of Artificial Sequence: Synthetic oligonucleotide
cuagggugcucuuuggcgu

SEQ ID NO: 1160867 - RNA, 19 nt, Artificial Sequence
  Description of Artificial Sequence: Synthetic oligonucleotide
gcgagggagauuaugucug

SEQ ID NO: 1160868 - RNA, 19 nt, Artificial Sequence
  Description of Artificial Sequence: Synthetic oligonucleotide
uggaaugcuccagucuuuu

SEQ ID NO: 1160869 - RNA, 19 nt, Artificial Sequence
  Description of Artificial Sequence: Synthetic oligonucleotide
caugccugauaacucaggu

SEQ ID NO: 1160870 - RNA, 19 nt, Artificial Sequence
  Description of Artificial Sequence: Synthetic oligonucleotide
accuggauucacagucuuc

SEQ ID NO: 1160871 - RNA, 19 nt, Artificial Sequence
  Description of Artificial Sequence: Synthetic oligonucleotide
  modified_base (14)..(14): a, c, u, g, unknown or other
  modified_base (19)..(19): a, c, u, g, unknown or other
acucagcgcuuccncccgn

SEQ ID NO: 1160872 - RNA, 19 nt, Artificial Sequence
  Description of Artificial Sequence: Synthetic oligonucleotide
cagguaaagcuaguguuaa

SEQ ID NO: 1160873 - RNA, 19 nt, Artificial Sequence
  Description of Artificial Sequence: Synthetic oligonucleotide
uaugagccgccgccgccac

SEQ ID NO: 1160874 - RNA, 19 nt, Artificial Sequence
  Description of Artificial Sequence: Synthetic oligonucleotide
cugaaucgccuccugcaga

SEQ ID NO: 1160875 - RNA, 19 nt, Artificial Sequence
  Description of Artificial Sequence: Synthetic oligonucleotide
ugugugggugggaccuuau

SEQ ID NO: 1160876 - RNA, 19 nt, Artificial Sequence
  Description of Artificial Sequence: Synthetic oligonucleotide
gggugagcggcagacugcg

SEQ ID NO: 1160877 - RNA, 19 nt, Artificial Sequence
  Description of Artificial Sequence: Synthetic oligonucleotide
gacagucacucugccuuac

SEQ ID NO: 1160878 - RNA, 19 nt, Artificial Sequence
  Description of Artificial Sequence: Synthetic oligonucleotide
gugagccuggagacaaccc

SEQ ID NO: 1160879 - RNA, 19 nt, Artificial Sequence
  Description of Artificial Sequence: Synthetic oligonucleotide
caacggaaccuggauucac

SEQ ID NO: 1160880 - RNA, 19 nt, Artificial Sequence
  Description of Artificial Sequence: Synthetic oligonucleotide
  modified_base (8)..(8): a, c, u, g, unknown or other
  modified_base (13)..(13): a, c, u, g, unknown or other
cgcuuccncccgnagagcg

SEQ ID NO: 1160881 - RNA, 19 nt, Artificial Sequence
  Description of Artificial Sequence: Synthetic oligonucleotide
cagugguaugagccgccgc

SEQ ID NO: 1160882 - RNA, 19 nt, Artificial Sequence
  Description of Artificial Sequence: Synthetic oligonucleotide
ucuuuaccucagggucacg

SEQ ID NO: 1160883 - RNA, 19 nt, Artificial Sequence
  Description of Artificial Sequence: Synthetic oligonucleotide
gccgccaccgcuuggcuug

SEQ ID NO: 1160884 - RNA, 19 nt, Artificial Sequence
  Description of Artificial Sequence: Synthetic oligonucleotide
gaguuccaagggaacuuga

SEQ ID NO: 1160885 - RNA, 19 nt, Artificial Sequence
  Description of Artificial Sequence: Synthetic oligonucleotide
gaucggggaagcaggcaga

SEQ ID NO: 1160886 - RNA, 19 nt, Artificial Sequence
  Description of Artificial Sequence: Synthetic oligonucleotide
acacacacacacacacaca

SEQ ID NO: 1160887 - RNA, 19 nt, Artificial Sequence
  Description of Artificial Sequence: Synthetic oligonucleotide
ugcugcugcugcugcugca

SEQ ID NO: 1160888 - RNA, 19 nt, Artificial Sequence
  Description of Artificial Sequence: Synthetic oligonucleotide
  modified_base (4)..(4): a, c, u, g, unknown or other
  modified_base (9)..(9): a, c, u, g, unknown or other
uccncccgnagagcgcgcu

SEQ ID NO: 1160889 - RNA, 19 nt, Artificial Sequence
  Description of Artificial Sequence: Synthetic oligonucleotide
cugcugcugcugcugcugc

SEQ ID NO: 1160890 - RNA, 19 nt, Artificial Sequence
  Description of Artificial Sequence: Synthetic oligonucleotide
cucgugauuguucuguguu

SEQ ID NO: 1160891 - RNA, 19 nt, Artificial Sequence
  Description of Artificial Sequence: Synthetic oligonucleotide
cacgccaggcagugguaug

SEQ ID NO: 1160892 - RNA, 19 nt, Artificial Sequence
  Description of Artificial Sequence: Synthetic oligonucleotide
acgccaggcagugguauga

SEQ ID NO: 1160893 - RNA, 19 nt, Artificial Sequence
  Description of Artificial Sequence: Synthetic oligonucleotide
gguaauaaacuagggugcu

SEQ ID NO: 1160894 - RNA, 19 nt, Artificial Sequence
  Description of Artificial Sequence: Synthetic oligonucleotide
uguguguguguggguggga

SEQ ID NO: 1160895 - RNA, 19 nt, Artificial Sequence
  Description of Artificial Sequence: Synthetic oligonucleotide
ggcgagggagauuaugucu

SEQ ID NO: 1160896 - RNA, 19 nt, Artificial Sequence
  Description of Artificial Sequence: Synthetic oligonucleotide
augcggugcuaggaucggg

SEQ ID NO: 1160897 - RNA, 19 nt, Artificial Sequence
  Description of Artificial Sequence: Synthetic oligonucleotide
  modified_base (4)..(4): a, c, u, g, unknown or other
ccgnagagcgcgcucucgc

SEQ ID NO: 1160898 - RNA, 19 nt, Artificial Sequence
  Description of Artificial Sequence: Synthetic oligonucleotide
ggggaggauagaaauugca

SEQ ID NO: 1160899 - RNA, 19 nt, Artificial Sequence
  Description of Artificial Sequence: Synthetic oligonucleotide
  modified_base (4)..(4): a, c, u, g, unknown or other
ccanacacacacacacaca

SEQ ID NO: 1160900 - RNA, 19 nt, Artificial Sequence
  Description of Artificial Sequence: Synthetic oligonucleotide
ugcugcugcugcugcugcu

SEQ ID NO: 1160901 - RNA, 19 nt, Artificial Sequence
  Description of Artificial Sequence: Synthetic oligonucleotide
gcuucuauuuaaaauguuu

SEQ ID NO: 1160902 - RNA, 19 nt, Artificial Sequence
  Description of Artificial Sequence: Synthetic oligonucleotide
ggagauuaugucuguuggu

SEQ ID NO: 1160903 - RNA, 19 nt, Artificial Sequence
  Description of Artificial Sequence: Synthetic oligonucleotide
acucaauuuuaugcuucua

SEQ ID NO: 1160904 - RNA, 19 nt, Artificial Sequence
  Description of Artificial Sequence: Synthetic oligonucleotide
gugggaccuuauuguugcc

SEQ ID NO: 1160905 - RNA, 19 nt, Artificial Sequence
  Description of Artificial Sequence: Synthetic oligonucleotide
gccaaacacacccacgggu

SEQ ID NO: 1160906 - RNA, 19 nt, Artificial Sequence
  Description of Artificial Sequence: Synthetic oligonucleotide
cgugauuguucuguguuug

SEQ ID NO: 1160907 - RNA, 19 nt, Artificial Sequence
  Description of Artificial Sequence: Synthetic oligonucleotide
gugauuguucuguguuugu

SEQ ID NO: 1160908 - RNA, 19 nt, Artificial Sequence
  Description of Artificial Sequence: Synthetic oligonucleotide
uccugccaugccugauaac

SEQ ID NO: 1160909 - RNA, 19 nt, Artificial Sequence
  Description of Artificial Sequence: Synthetic oligonucleotide
cacacacacacacaccuuu

SEQ ID NO: 1160910 - RNA, 19 nt, Artificial Sequence
  Description of Artificial Sequence: Synthetic oligonucleotide
gcugcucucgugauuguuc

SEQ ID NO: 1160911 - RNA, 19 nt, Artificial Sequence
  Description of Artificial Sequence: Synthetic oligonucleotide
gccuuacagagggaggaug

SEQ ID NO: 1160912 - RNA, 19 nt, Artificial Sequence
  Description of Artificial Sequence: Synthetic oligonucleotide
agguggccaacggaaccug

SEQ ID NO: 1160913 - RNA, 19 nt, Artificial Sequence
  Description of Artificial Sequence: Synthetic oligonucleotide
agacugcgagguagaugcg

SEQ ID NO: 1160914 - RNA, 19 nt, Artificial Sequence
  Description of Artificial Sequence: Synthetic oligonucleotide
  modified_base (7)..(7): a, c, u, g, unknown or other
  modified_base (12)..(12): a, c, u, g, unknown or other
gcuuccncccgnagagcgc

SEQ ID NO: 1160915 - RNA, 19 nt, Artificial Sequence
  Description of Artificial Sequence: Synthetic oligonucleotide
gggcgagggagauuauguc

SEQ ID NO: 1160916 - RNA, 19 nt, Artificial Sequence
  Description of Artificial Sequence: Synthetic oligonucleotide
gcagugguaugagccgccg

SEQ ID NO: 1160917 - RNA, 19 nt, Artificial Sequence
  Description of Artificial Sequence: Synthetic oligonucleotide
guggccaacggaaccugga

SEQ ID NO: 1160918 - RNA, 19 nt, Artificial Sequence
  Description of Artificial Sequence: Synthetic oligonucleotide
acacacacacacaccuuuu

SEQ ID NO: 1160919 - RNA, 19 nt, Artificial Sequence
  Description of Artificial Sequence: Synthetic oligonucleotide
caaaugugugugugugggu

SEQ ID NO: 1160920 - RNA, 19 nt, Artificial Sequence
  Description of Artificial Sequence: Synthetic oligonucleotide
gccgacucgaggaugcuga

SEQ ID NO: 1160921 - RNA, 19 nt, Artificial Sequence
  Description of Artificial Sequence: Synthetic oligonucleotide
ggcaguaucucagcgccaa

SEQ ID NO: 1160922 - RNA, 19 nt, Artificial Sequence
  Description of Artificial Sequence: Synthetic oligonucleotide
agcccggaagguggccaac

SEQ ID NO: 1160923 - RNA, 19 nt, Artificial Sequence
  Description of Artificial Sequence: Synthetic oligonucleotide
gcguggcacagugaaacac

SEQ ID NO: 1160924 - RNA, 19 nt, Artificial Sequence
  Description of Artificial Sequence: Synthetic oligonucleotide
cacuauuaccaagcaauau

SEQ ID NO: 1160925 - RNA, 19 nt, Artificial Sequence
  Description of Artificial Sequence: Synthetic oligonucleotide
ccugccaugccugauaacu

SEQ ID NO: 1160926 - RNA, 19 nt, Artificial Sequence
  Description of Artificial Sequence: Synthetic oligonucleotide
ugcugcugcugcugcugua

SEQ ID NO: 1160927 - RNA, 19 nt, Artificial Sequence
  Description of Artificial Sequence: Synthetic oligonucleotide
gcugcugcugcugcugcug

SEQ ID NO: 1160928 - RNA, 19 nt, Artificial Sequence
  Description of Artificial Sequence: Synthetic oligonucleotide
ucggggaagcaggcagagu

SEQ ID NO: 1160929 - RNA, 19 nt, Artificial Sequence
  Description of Artificial Sequence: Synthetic oligonucleotide
ccugauaacucagguuuca

SEQ ID NO: 1160930 - RNA, 19 nt, Artificial Sequence
  Description of Artificial Sequence: Synthetic oligonucleotide
acacacacacacacaccuu

SEQ ID NO: 1160931 - RNA, 19 nt, Artificial Sequence
  Description of Artificial Sequence: Synthetic oligonucleotide
cagggucacguucauuuau

SEQ ID NO: 1160932 - RNA, 19 nt, Artificial Sequence
  Description of Artificial Sequence: Synthetic oligonucleotide
ggaccuuauuguugccaaa

SEQ ID NO: 1160933 - RNA, 19 nt, Artificial Sequence
  Description of Artificial Sequence: Synthetic oligonucleotide
gcugcugcugcugcugcac

SEQ ID NO: 1160934 - RNA, 19 nt, Artificial Sequence
  Description of Artificial Sequence: Synthetic oligonucleotide
ggcguggcacagugaaaca

SEQ ID NO: 1160935 - RNA, 19 nt, Artificial Sequence
  Description of Artificial Sequence: Synthetic oligonucleotide
gagcggcagacugcgaggu

SEQ ID NO: 1160936 - RNA, 19 nt, Artificial Sequence
  Description of Artificial Sequence: Synthetic oligonucleotide
cucgcacgccaggcagugg

SEQ ID NO: 1160937 - RNA, 19 nt, Artificial Sequence
  Description of Artificial Sequence: Synthetic oligonucleotide
cacccacgggucaaggcgu

SEQ ID NO: 1160938 - RNA, 19 nt, Artificial Sequence
  Description of Artificial Sequence: Synthetic oligonucleotide
  modified_base (2)..(2): a, c, u, g, unknown or other
  modified_base (7)..(7): a, c, u, g, unknown or other
cncccgnagagcgcgcucu

SEQ ID NO: 1160939 - RNA, 19 nt, Artificial Sequence
  Description of Artificial Sequence: Synthetic oligonucleotide
ggggcgagggagauuaugu

SEQ ID NO: 1160940 - RNA, 19 nt, Artificial Sequence
  Description of Artificial Sequence: Synthetic oligonucleotide
gccugauaacucagguuuc

SEQ ID NO: 1160941 - RNA, 19 nt, Artificial Sequence
  Description of Artificial Sequence: Synthetic oligonucleotide
gggcugcugcugcugcugc

SEQ ID NO: 1160942 - RNA, 19 nt, Artificial Sequence
  Description of Artificial Sequence: Synthetic oligonucleotide
guacauugcaaaggcuguu

SEQ ID NO: 1160943 - RNA, 19 nt, Artificial Sequence
  Description of Artificial Sequence: Synthetic oligonucleotide
agcggcagacugcgaggua

SEQ ID NO: 1160944 - RNA, 19 nt, Artificial Sequence
  Description of Artificial Sequence: Synthetic oligonucleotide
  modified_base (9)..(9): a, c, u, g, unknown or other
  modified_base (14)..(14): a, c, u, g, unknown or other
gcgcuuccncccgnagagc

SEQ ID NO: 1160945 - RNA, 19 nt, Artificial Sequence
  Description of Artificial Sequence: Synthetic oligonucleotide
ccacgggucaaggcguggc

SEQ ID NO: 1160946 - RNA, 19 nt, Artificial Sequence
  Description of Artificial Sequence: Synthetic oligonucleotide
cuugggucacugccucucu

SEQ ID NO: 1160947 - RNA, 19 nt, Artificial Sequence
  Description of Artificial Sequence: Synthetic oligonucleotide
  modified_base (5)..(5): a, c, u, g, unknown or other
cccgnagagcgcgcucucg

SEQ ID NO: 1160948 - RNA, 19 nt, Artificial Sequence
  Description of Artificial Sequence: Synthetic oligonucleotide
  modified_base (6)..(6): a, c, u, g, unknown or other
ccccanacacacacacaca

SEQ ID NO: 1160949 - RNA, 19 nt, Artificial Sequence
  Description of Artificial Sequence: Synthetic oligonucleotide
gcggugcuaggaucgggga

SEQ ID NO: 1160950 - RNA, 19 nt, Artificial Sequence
  Description of Artificial Sequence: Synthetic oligonucleotide
acccacgggucaaggcgug

SEQ ID NO: 1160951 - RNA, 19 nt, Artificial Sequence
  Description of Artificial Sequence: Synthetic oligonucleotide
gagcgcgcucucgcacgcc

SEQ ID NO: 1160952 - RNA, 19 nt, Artificial Sequence
  Description of Artificial Sequence: Synthetic oligonucleotide
caagugcacuggcuugggu

SEQ ID NO: 1160953 - RNA, 19 nt, Artificial Sequence
  Description of Artificial Sequence: Synthetic oligonucleotide
ccgacucgaggaugcugac

SEQ ID NO: 1160954 - RNA, 19 nt, Artificial Sequence
  Description of Artificial Sequence: Synthetic oligonucleotide
gaaucgccuccugcagacu

SEQ ID NO: 1160955 - RNA, 19 nt, Artificial Sequence
  Description of Artificial Sequence: Synthetic oligonucleotide
ccggaagguggccaacgga

SEQ ID NO: 1160956 - RNA, 19 nt, Artificial Sequence
  Description of Artificial Sequence: Synthetic oligonucleotide
ggccaacggaaccuggauu

SEQ ID NO: 1160957 - RNA, 19 nt, Artificial Sequence
  Description of Artificial Sequence: Synthetic oligonucleotide
aggccgacucgaggaugcu

SEQ ID NO: 1160958 - RNA, 19 nt, Artificial Sequence
  Description of Artificial Sequence: Synthetic oligonucleotide
  modified_base (3)..(3): a, c, u, g, unknown or other
cgnagagcgcgcucucgca

SEQ ID NO: 1160959 - RNA, 19 nt, Artificial Sequence
  Description of Artificial Sequence: Synthetic oligonucleotide
cgcgcucucgcacgccagg

SEQ ID NO: 1160960 - RNA, 19 nt, Artificial Sequence
  Description of Artificial Sequence: Synthetic oligonucleotide
gcgcucucgcacgccaggc

SEQ ID NO: 1160961 - RNA, 19 nt, Artificial Sequence
  Description of Artificial Sequence: Synthetic oligonucleotide
gcaguaucucagcgccaaa

SEQ ID NO: 1160962 - RNA, 19 nt, Artificial Sequence
  Description of Artificial Sequence: Synthetic oligonucleotide
ccaacggaaccuggauuca

SEQ ID NO: 1160963 - RNA, 19 nt, Artificial Sequence
  Description of Artificial Sequence: Synthetic oligonucleotide
  modified_base (3)..(3): a, c, u, g, unknown or other
  modified_base (8)..(8): a, c, u, g, unknown or other
ccncccgnagagcgcgcuc

SEQ ID NO: 1160964 - RNA, 19 nt, Artificial Sequence
  Description of Artificial Sequence: Synthetic oligonucleotide
cccacgggucaaggcgugg

SEQ ID NO: 1160965 - RNA, 19 nt, Artificial Sequence
  Description of Artificial Sequence: Synthetic oligonucleotide
gggcaguaucucagcgcca

SEQ ID NO: 1160966 - RNA, 19 nt, Artificial Sequence
  Description of Artificial Sequence: Synthetic oligonucleotide
ggugagcggcagacugcga

SEQ ID NO: 1160967 - RNA, 19 nt, Artificial Sequence
  Description of Artificial Sequence: Synthetic oligonucleotide
ggcugcugcugcugcugcu

SEQ ID NO: 1160968 - RNA, 19 nt, Artificial Sequence
  Description of Artificial Sequence: Synthetic oligonucleotide
ggucaaggcguggcacagu

SEQ ID NO: 1160969 - RNA, 19 nt, Artificial Sequence
  Description of Artificial Sequence: Synthetic oligonucleotide
ccaccgcuuggcuugcuuu

SEQ ID NO: 1160970 - RNA, 19 nt, Artificial Sequence
  Description of Artificial Sequence: Synthetic oligonucleotide
gccaccgcuuggcuugcuu

SEQ ID NO: 1160971 - RNA, 19 nt, Artificial Sequence
  Description of Artificial Sequence: Synthetic oligonucleotide
ccgccaccgcuuggcuugc

SEQ ID NO: 1160972 - RNA, 19 nt, Artificial Sequence
  Description of Artificial Sequence: Synthetic oligonucleotide
cgacucgaggaugcugacu

SEQ ID NO: 1160973 - RNA, 19 nt, Artificial Sequence
  Description of Artificial Sequence: Synthetic oligonucleotide
  modified_base (1)..(1): a, c, u, g, unknown or other
nacacacacacacacacac

SEQ ID NO: 1160974 - RNA, 19 nt, Artificial Sequence
  Description of Artificial Sequence: Synthetic oligonucleotide
  modified_base (1)..(1): a, c, u, g, unknown or other
nuauauauauauauuucau

SEQ ID NO: 1160975 - RNA, 19 nt, Artificial Sequence
  Description of Artificial Sequence: Synthetic oligonucleotide
  modified_base (1)..(1): a, c, u, g, unknown or other
  modified_base (6)..(6): a, c, u, g, unknown or other
ncccgnagagcgcgcucuc

SEQ ID NO: 1160976 - RNA, 19 nt, Artificial Sequence
  Description of Artificial Sequence: Synthetic oligonucleotide
aauuaaaacacacuaaauc

SEQ ID NO: 1160977 - RNA, 19 nt, Artificial Sequence
  Description of Artificial Sequence: Synthetic oligonucleotide
auuaaauuaauuuucuggc

SEQ ID NO: 1160978 - RNA, 19 nt, Artificial Sequence
  Description of Artificial Sequence: Synthetic oligonucleotide
aauguaauguuccacaguc

SEQ ID NO: 1160979 - RNA, 19 nt, Artificial Sequence
  Description of Artificial Sequence: Synthetic oligonucleotide
uucaauuguaguaacgugg

SEQ ID NO: 1160980 - RNA, 19 nt, Artificial Sequence
  Description of Artificial Sequence: Synthetic oligonucleotide
aaaaccaagucuuuacaac

SEQ ID NO: 1160981 - RNA, 19 nt, Artificial Sequence
  Description of Artificial Sequence: Synthetic oligonucleotide
auaggauuaaauuuuaucu

SEQ ID NO: 1160982 - RNA, 19 nt, Artificial Sequence
  Description of Artificial Sequence: Synthetic oligonucleotide
aagacgauaguuccggggc

SEQ ID NO: 1160983 - RNA, 19 nt, Artificial Sequence
  Description of Artificial Sequence: Synthetic oligonucleotide
aucuauagaauauacauca

SEQ ID NO: 1160984 - RNA, 19 nt, Artificial Sequence
  Description of Artificial Sequence: Synthetic oligonucleotide
uugguuaugauccuguaag

SEQ ID NO: 1160985 - RNA, 19 nt, Artificial Sequence
  Description of Artificial Sequence: Synthetic oligonucleotide
uacaucauauaacagaucu

SEQ ID NO: 1160986 - RNA, 19 nt, Artificial Sequence
  Description of Artificial Sequence: Synthetic oligonucleotide
aaagcuucaacuuuggaau

SEQ ID NO: 1160987 - RNA, 19 nt, Artificial Sequence
  Description of Artificial Sequence: Synthetic oligonucleotide
aacagaucuauauaucuag

SEQ ID NO: 1160988 - RNA, 19 nt, Artificial Sequence
  Description of Artificial Sequence: Synthetic oligonucleotide
ucauuaaacguuaaaguug

SEQ ID NO: 1160989 - RNA, 19 nt, Artificial Sequence
  Description of Artificial Sequence: Synthetic oligonucleotide
aacuuugguugauagacac

SEQ ID NO: 1160990 - RNA, 19 nt, Artificial Sequence
  Description of Artificial Sequence: Synthetic oligonucleotide
ucuauaugcaauuaauggc

SEQ ID NO: 1160991 - RNA, 19 nt, Artificial Sequence
  Description of Artificial Sequence: Synthetic oligonucleotide
cucuauaugcaauuaaugg

SEQ ID NO: 1160992 - RNA, 19 nt, Artificial Sequence
  Description of Artificial Sequence: Synthetic oligonucleotide
uuuauaucacaaauucacg

SEQ ID NO: 1160993 - RNA, 19 nt, Artificial Sequence
  Description of Artificial Sequence: Synthetic oligonucleotide
cauuaaacguuaaaguugg

SEQ ID NO: 1160994 - RNA, 19 nt, Artificial Sequence
  Description of Artificial Sequence: Synthetic oligonucleotide
uugaaaucuucauuaaacg

SEQ ID NO: 1160995 - RNA, 19 nt, Artificial Sequence
  Description of Artificial Sequence: Synthetic oligonucleotide
uuucauaacacccauuaac

SEQ ID NO: 1160996 - RNA, 19 nt, Artificial Sequence
  Description of Artificial Sequence: Synthetic oligonucleotide
uaaacguuaaaguuggaug

SEQ ID NO: 1160997 - RNA, 19 nt, Artificial Sequence
  Description of Artificial Sequence: Synthetic oligonucleotide
aaacguuaaaguuggauga

SEQ ID NO: 1160998 - RNA, 19 nt, Artificial Sequence
  Description of Artificial Sequence: Synthetic oligonucleotide
cuuauaagacgauaguucc

SEQ ID NO: 1160999 - RNA, 19 nt, Artificial Sequence
  Description of Artificial Sequence: Synthetic oligonucleotide
cuuuauaaagggcacagcc

SEQ ID NO: 1161000 - RNA, 19 nt, Artificial Sequence
  Description of Artificial Sequence: Synthetic oligonucleotide
ucucucaaagaucauacag

SEQ ID NO: 1161001 - RNA, 19 nt, Artificial Sequence
  Description of Artificial Sequence: Synthetic oligonucleotide
ugaguuuguaaguuguugg

SEQ ID NO: 1161002 - RNA, 19 nt, Artificial Sequence
  Description of Artificial Sequence: Synthetic oligonucleotide
uauaagacgauaguuccgg

SEQ ID NO: 1161003 - RNA, 19 nt, Artificial Sequence
  Description of Artificial Sequence: Synthetic oligonucleotide
uuauaucacaaauucacgu

SEQ ID NO: 1161004 - RNA, 19 nt, Artificial Sequence
  Description of Artificial Sequence: Synthetic oligonucleotide
agcaauccuguucagaaac

SEQ ID NO: 1161005 - RNA, 19 nt, Artificial Sequence
  Description of Artificial Sequence: Synthetic oligonucleotide
uuaucuucaaguuuuccga

SEQ ID NO: 1161006 - RNA, 19 nt, Artificial Sequence
  Description of Artificial Sequence: Synthetic oligonucleotide
ugaggaaugauucccaagu

SEQ ID NO: 1161007 - RNA, 19 nt, Artificial Sequence
  Description of Artificial Sequence: Synthetic oligonucleotide
aguaacguggcuuucaggu

SEQ ID NO: 1161008 - RNA, 19 nt, Artificial Sequence
  Description of Artificial Sequence: Synthetic oligonucleotide
uaugaauggggccauauuc

SEQ ID NO: 1161009 - RNA, 19 nt, Artificial Sequence
  Description of Artificial Sequence: Synthetic oligonucleotide
uggaugaucagcaauccug

SEQ ID NO: 1161010 - RNA, 19 nt, Artificial Sequence
  Description of Artificial Sequence: Synthetic oligonucleotide
uuucaaugugucaaccagg

SEQ ID NO: 1161011 - RNA, 19 nt, Artificial Sequence
  Description of Artificial Sequence: Synthetic oligonucleotide
uuuauaaagggcacagcca

SEQ ID NO: 1161012 - RNA, 19 nt, Artificial Sequence
  Description of Artificial Sequence: Synthetic oligonucleotide
uuauaagacgauaguuccg

SEQ ID NO: 1161013 - RNA, 19 nt, Artificial Sequence
  Description of Artificial Sequence: Synthetic oligonucleotide
aacaucucacuguaaagca

SEQ ID NO: 1161014 - RNA, 19 nt, Artificial Sequence
  Description of Artificial Sequence: Synthetic oligonucleotide
ugaccacagaauaugaaug

SEQ ID NO: 1161015 - RNA, 19 nt, Artificial Sequence
  Description of Artificial Sequence: Synthetic oligonucleotide
uuaaauuaauuuucuggcu

SEQ ID NO: 1161016 - RNA, 19 nt, Artificial Sequence
  Description of Artificial Sequence: Synthetic oligonucleotide
auauaacagaucuauagaa

SEQ ID NO: 1161017 - RNA, 19 nt, Artificial Sequence
  Description of Artificial Sequence: Synthetic oligonucleotide
auaucacaaauucacguug

SEQ ID NO: 1161018 - RNA, 19 nt, Artificial Sequence
  Description of Artificial Sequence: Synthetic oligonucleotide
auaguaucggauguucucc

SEQ ID NO: 1161019 - RNA, 19 nt, Artificial Sequence
  Description of Artificial Sequence: Synthetic oligonucleotide
cuauaugcaauuaauggca

SEQ ID NO: 1161020 - RNA, 19 nt, Artificial Sequence
  Description of Artificial Sequence: Synthetic oligonucleotide
aauguuucgaugaagcuau

SEQ ID NO: 1161021 - RNA, 19 nt, Artificial Sequence
  Description of Artificial Sequence: Synthetic oligonucleotide
ucuagguagauauauuuau

SEQ ID NO: 1161022 - RNA, 19 nt, Artificial Sequence
  Description of Artificial Sequence: Synthetic oligonucleotide
uauaacagaucuauauauc

SEQ ID NO: 1161023 - RNA, 19 nt, Artificial Sequence
  Description of Artificial Sequence: Synthetic oligonucleotide
gaaaucuugauaacgucgc

SEQ ID NO: 1161024 - RNA, 19 nt, Artificial Sequence
  Description of Artificial Sequence: Synthetic oligonucleotide
uccaccaucccuuucacga

SEQ ID NO: 1161025 - RNA, 19 nt, Artificial Sequence
  Description of Artificial Sequence: Synthetic oligonucleotide
aguagcaaggcacuguuca

SEQ ID NO: 1161026 - RNA, 19 nt, Artificial Sequence
  Description of Artificial Sequence: Synthetic oligonucleotide
cuuucaaugugucaaccag

SEQ ID NO: 1161027 - RNA, 19 nt, Artificial Sequence
  Description of Artificial Sequence: Synthetic oligonucleotide
ucuuucuauccacauagac

SEQ ID NO: 1161028 - RNA, 19 nt, Artificial Sequence
  Description of Artificial Sequence: Synthetic oligonucleotide
ugcaauuaauggcacauaa

SEQ ID NO: 1161029 - RNA, 19 nt, Artificial Sequence
  Description of Artificial Sequence: Synthetic oligonucleotide
ugauaggccagucauccgc

SEQ ID NO: 1161030 - RNA, 19 nt, Artificial Sequence
  Description of Artificial Sequence: Synthetic oligonucleotide
uuucaauuguaguaacgug

SEQ ID NO: 1161031 - RNA, 19 nt, Artificial Sequence
  Description of Artificial Sequence: Synthetic oligonucleotide
augaucagcaauccuguuc

SEQ ID NO: 1161032 - RNA, 19 nt, Artificial Sequence
  Description of Artificial Sequence: Synthetic oligonucleotide
uccuguaagugauaaaagu

SEQ ID NO: 1161033 - RNA, 19 nt, Artificial Sequence
  Description of Artificial Sequence: Synthetic oligonucleotide
aaucauuugucauccacuu

SEQ ID NO: 1161034 - RNA, 19 nt, Artificial Sequence
  Description of Artificial Sequence: Synthetic oligonucleotide
aaauucacguugaugaccu

SEQ ID NO: 1161035 - RNA, 19 nt, Artificial Sequence
  Description of Artificial Sequence: Synthetic oligonucleotide
cuugcuucuuauaagacga

SEQ ID NO: 1161036 - RNA, 19 nt, Artificial Sequence
  Description of Artificial Sequence: Synthetic oligonucleotide
uucagaaacuuaugcaaug

SEQ ID NO: 1161037 - RNA, 19 nt, Artificial Sequence
  Description of Artificial Sequence: Synthetic oligonucleotide
agaugucuugguuaugauc

SEQ ID NO: 1161038 - RNA, 19 nt, Artificial Sequence
  Description of Artificial Sequence: Synthetic oligonucleotide
uggaaucaaauuccccacg

SEQ ID NO: 1161039 - RNA, 19 nt, Artificial Sequence
  Description of Artificial Sequence: Synthetic oligonucleotide
ucggcuuucuuguagguca

SEQ ID NO: 1161040 - RNA, 19 nt, Artificial Sequence
  Description of Artificial Sequence: Synthetic oligonucleotide
uucccaaguagcaaggcac

SEQ ID NO: 1161041 - RNA, 19 nt, Artificial Sequence
  Description of Artificial Sequence: Synthetic oligonucleotide
uuucacgauaaacuuuucu

SEQ ID NO: 1161042 - RNA, 19 nt, Artificial Sequence
  Description of Artificial Sequence: Synthetic oligonucleotide
guuaugauccuguaaguga

SEQ ID NO: 1161043 - RNA, 19 nt, Artificial Sequence
  Description of Artificial Sequence: Synthetic oligonucleotide
uaucuagguagauauauuu

SEQ ID NO: 1161044 - RNA, 19 nt, Artificial Sequence
  Description of Artificial Sequence: Synthetic oligonucleotide
uggcuaaauguuucgauga

SEQ ID NO: 1161045 - RNA, 19 nt, Artificial Sequence
  Description of Artificial Sequence: Synthetic oligonucleotide
uggcaucauaggcugaagg

SEQ ID NO: 1161046 - RNA, 19 nt, Artificial Sequence
  Description of Artificial Sequence: Synthetic oligonucleotide
aauuguaguaacguggcuu

SEQ ID NO: 1161047 - RNA, 19 nt, Artificial Sequence
  Description of Artificial Sequence: Synthetic oligonucleotide
aagugauaaaaguuucaau

SEQ ID NO: 1161048 - RNA, 19 nt, Artificial Sequence
  Description of Artificial Sequence: Synthetic oligonucleotide
aucagugaggcauccuuac

SEQ ID NO: 1161049 - RNA, 19 nt, Artificial Sequence
  Description of Artificial Sequence: Synthetic oligonucleotide
aagagauccuuuaaaucag

SEQ ID NO: 1161050 - RNA, 19 nt, Artificial Sequence
  Description of Artificial Sequence: Synthetic oligonucleotide
aguuggaugaucagcaauc

SEQ ID NO: 1161051 - RNA, 19 nt, Artificial Sequence
  Description of Artificial Sequence: Synthetic oligonucleotide
aggugcaucaacuguaaug

SEQ ID NO: 1161052 - RNA, 19 nt, Artificial Sequence
  Description of Artificial Sequence: Synthetic oligonucleotide
auaguuccggggcuugugc

SEQ ID NO: 1161053 - RNA, 19 nt, Artificial Sequence
  Description of Artificial Sequence: Synthetic oligonucleotide
uauaugcaauuaauggcac

SEQ ID NO: 1161054 - RNA, 19 nt, Artificial Sequence
  Description of Artificial Sequence: Synthetic oligonucleotide
uaacagaucuauagaauau

SEQ ID NO: 1161055 - RNA, 19 nt, Artificial Sequence
  Description of Artificial Sequence: Synthetic oligonucleotide
uguaggucaaagcuucaac

SEQ ID NO: 1161056 - RNA, 19 nt, Artificial Sequence
  Description of Artificial Sequence: Synthetic oligonucleotide
aagaucauacaggaguugu

SEQ ID NO: 1161057 - RNA, 19 nt, Artificial Sequence
  Description of Artificial Sequence: Synthetic oligonucleotide
uccgauuuccucuguaagc

SEQ ID NO: 1161058 - RNA, 19 nt, Artificial Sequence
  Description of Artificial Sequence: Synthetic oligonucleotide
uuaauggcacauaaauuua

SEQ ID NO: 1161059 - RNA, 19 nt, Artificial Sequence
  Description of Artificial Sequence: Synthetic oligonucleotide
uguauuugaucucuucuuu

SEQ ID NO: 1161060 - RNA, 19 nt, Artificial Sequence
  Description of Artificial Sequence: Synthetic oligonucleotide
agaucuauauaucuaggua

SEQ ID NO: 1161061 - RNA, 19 nt, Artificial Sequence
  Description of Artificial Sequence: Synthetic oligonucleotide
ugguaaugguggaauaaug

SEQ ID NO: 1161062 - RNA, 19 nt, Artificial Sequence
  Description of Artificial Sequence: Synthetic oligonucleotide
ucaaauuccccacgagaug

SEQ ID NO: 1161063 - RNA, 19 nt, Artificial Sequence
  Description of Artificial Sequence: Synthetic oligonucleotide
ugucuguaaaugcugacuu

SEQ ID NO: 1161064 - RNA, 19 nt, Artificial Sequence
  Description of Artificial Sequence: Synthetic oligonucleotide
ggaaaucuugauaacgucg

SEQ ID NO: 1161065 - RNA, 19 nt, Artificial Sequence
  Description of Artificial Sequence: Synthetic oligonucleotide
gauccuguaagugauaaaa

SEQ ID NO: 1161066 - RNA, 19 nt, Artificial Sequence
  Description of Artificial Sequence: Synthetic oligonucleotide
uuccgauuuccucuguaag

SEQ ID NO: 1161067 - RNA, 19 nt, Artificial Sequence
  Description of Artificial Sequence: Synthetic oligonucleotide
uaugcaauuaauggcacau

SEQ ID NO: 1161068 - RNA, 19 nt, Artificial Sequence
  Description of Artificial Sequence: Synthetic oligonucleotide
uuaaacguuaaaguuggau

SEQ ID NO: 1161069 - RNA, 19 nt, Artificial Sequence
  Description of Artificial Sequence: Synthetic oligonucleotide
ucaauaggauuaaauuuua

SEQ ID NO: 1161070 - RNA, 19 nt, Artificial Sequence
  Description of Artificial Sequence: Synthetic oligonucleotide
ucauccgcuucucaguggc

SEQ ID NO: 1161071 - RNA, 19 nt, Artificial Sequence
  Description of Artificial Sequence: Synthetic oligonucleotide
cuggcgaugccuuucaaug

SEQ ID NO: 1161072 - RNA, 19 nt, Artificial Sequence
  Description of Artificial Sequence: Synthetic oligonucleotide
aaaucuucauuaaacguua

SEQ ID NO: 1161073 - RNA, 19 nt, Artificial Sequence
  Description of Artificial Sequence: Synthetic oligonucleotide
guaucggauguucuccucg

SEQ ID NO: 1161074 - RNA, 19 nt, Artificial Sequence
  Description of Artificial Sequence: Synthetic oligonucleotide
uugguugauagacacuguc

SEQ ID NO: 1161075 - RNA, 19 nt, Artificial Sequence
  Description of Artificial Sequence: Synthetic oligonucleotide
gaggcauccuuacugaaca

SEQ ID NO: 1161076 - RNA, 19 nt, Artificial Sequence
  Description of Artificial Sequence: Synthetic oligonucleotide
cauacucauggacaacagg

SEQ ID NO: 1161077 - RNA, 19 nt, Artificial Sequence
  Description of Artificial Sequence: Synthetic oligonucleotide
uaaagggcacagccaaucc

SEQ ID NO: 1161078 - RNA, 19 nt, Artificial Sequence
  Description of Artificial Sequence: Synthetic oligonucleotide
gauaacgucgccugacuuc

SEQ ID NO: 1161079 - RNA, 19 nt, Artificial Sequence
  Description of Artificial Sequence: Synthetic oligonucleotide
agugaggaaaaccuugaaa

SEQ ID NO: 1161080 - RNA, 19 nt, Artificial Sequence
  Description of Artificial Sequence: Synthetic oligonucleotide
cauaguaucggauguucuc

SEQ ID NO: 1161081 - RNA, 19 nt, Artificial Sequence
  Description of Artificial Sequence: Synthetic oligonucleotide
cuggcuaaauguuucgaug

SEQ ID NO: 1161082 - RNA, 19 nt, Artificial Sequence
  Description of Artificial Sequence: Synthetic oligonucleotide
uaaagcacauacucaugga

SEQ ID NO: 1161083 - RNA, 19 nt, Artificial Sequence
  Description of Artificial Sequence: Synthetic oligonucleotide
auucacguugaugaccugg

SEQ ID NO: 1161084 - RNA, 19 nt, Artificial Sequence
  Description of Artificial Sequence: Synthetic oligonucleotide
uccaugaacucaucuggcc

SEQ ID NO: 1161085 - RNA, 19 nt, Artificial Sequence
  Description of Artificial Sequence: Synthetic oligonucleotide
uggucaaugcagcuggcga

SEQ ID NO: 1161086 - RNA, 19 nt, Artificial Sequence
  Description of Artificial Sequence: Synthetic oligonucleotide
ucgaugaagcuauucauuu

SEQ ID NO: 1161087 - RNA, 19 nt, Artificial Sequence
  Description of Artificial Sequence: Synthetic oligonucleotide
ucuguaagcagaucagcau

SEQ ID NO: 1161088 - RNA, 19 nt, Artificial Sequence
  Description of Artificial Sequence: Synthetic oligonucleotide
uuuucauaacacccauuaa

SEQ ID NO: 1161089 - RNA, 19 nt, Artificial Sequence
  Description of Artificial Sequence: Synthetic oligonucleotide
acguugaugaccuggaaua

SEQ ID NO: 1161090 - RNA, 19 nt, Artificial Sequence
  Description of Artificial Sequence: Synthetic oligonucleotide
agucuuuacaacauauuga

SEQ ID NO: 1161091 - RNA, 19 nt, Artificial Sequence
  Description of Artificial Sequence: Synthetic oligonucleotide
ucauaguaucggauguucu

SEQ ID NO: 1161092 - RNA, 19 nt, Artificial Sequence
  Description of Artificial Sequence: Synthetic oligonucleotide
aguuucaauuguaguaacg

SEQ ID NO: 1161093 - RNA, 19 nt, Artificial Sequence
  Description of Artificial Sequence: Synthetic oligonucleotide
agauuuuauuaaaaccaag

SEQ ID NO: 1161094 - RNA, 19 nt, Artificial Sequence
  Description of Artificial Sequence: Synthetic oligonucleotide
aaacccucuauaugcaauu

SEQ ID NO: 1161095 - RNA, 19 nt, Artificial Sequence
  Description of Artificial Sequence: Synthetic oligonucleotide
uucgaugaagcuauucauu

SEQ ID NO: 1161096 - RNA, 19 nt, Artificial Sequence
  Description of Artificial Sequence: Synthetic oligonucleotide
gucaucguugaaucguucc

SEQ ID NO: 1161097 - RNA, 19 nt, Artificial Sequence
  Description of Artificial Sequence: Synthetic oligonucleotide
cacuuuauaaagggcacag

SEQ ID NO: 1161098 - RNA, 19 nt, Artificial Sequence
  Description of Artificial Sequence: Synthetic oligonucleotide
ucuauagaauauacaucau

SEQ ID NO: 1161099 - RNA, 19 nt, Artificial Sequence
  Description of Artificial Sequence: Synthetic oligonucleotide
caauuaauggcacauaaau

SEQ ID NO: 1161100 - RNA, 19 nt, Artificial Sequence
  Description of Artificial Sequence: Synthetic oligonucleotide
gacacugucucucaaagau

SEQ ID NO: 1161101 - RNA, 19 nt, Artificial Sequence
  Description of Artificial Sequence: Synthetic oligonucleotide
auccacuuuauaaagggca

SEQ ID NO: 1161102 - RNA, 19 nt, Artificial Sequence
  Description of Artificial Sequence: Synthetic oligonucleotide
gcaaaaucauuugucaucc

SEQ ID NO: 1161103 - RNA, 19 nt, Artificial Sequence
  Description of Artificial Sequence: Synthetic oligonucleotide
cuggaaucaaauuccccac

SEQ ID NO: 1161104 - RNA, 19 nt, Artificial Sequence
  Description of Artificial Sequence: Synthetic oligonucleotide
ucuguuuguauuugaucuc

SEQ ID NO: 1161105 - RNA, 19 nt, Artificial Sequence
  Description of Artificial Sequence: Synthetic oligonucleotide
uugauagacacugucucuc

SEQ ID NO: 1161106 - RNA, 19 nt, Artificial Sequence
  Description of Artificial Sequence: Synthetic oligonucleotide
acagaucuauauaucuagg

SEQ ID NO: 1161107 - RNA, 19 nt, Artificial Sequence
  Description of Artificial Sequence: Synthetic oligonucleotide
aaaguuggaugaucagcaa

SEQ ID NO: 1161108 - RNA, 19 nt, Artificial Sequence
  Description of Artificial Sequence: Synthetic oligonucleotide
agugaggcauccuuacuga

SEQ ID NO: 1161109 - RNA, 19 nt, Artificial Sequence
  Description of Artificial Sequence: Synthetic oligonucleotide
ucggcugugucuguaaaug

SEQ ID NO: 1161110 - RNA, 19 nt, Artificial Sequence
  Description of Artificial Sequence: Synthetic oligonucleotide
uguaguaacguggcuuuca

SEQ ID NO: 1161111 - RNA, 19 nt, Artificial Sequence
  Description of Artificial Sequence: Synthetic oligonucleotide
guaguaacguggcuuucag

SEQ ID NO: 1161112 - RNA, 19 nt, Artificial Sequence
  Description of Artificial Sequence: Synthetic oligonucleotide
gcuucuuauaagacgauag

SEQ ID NO: 1161113 - RNA, 19 nt, Artificial Sequence
  Description of Artificial Sequence: Synthetic oligonucleotide
ucgccugacuucaaauuca

SEQ ID NO: 1161114 - RNA, 19 nt, Artificial Sequence
  Description of Artificial Sequence: Synthetic oligonucleotide
uugauaacgucgccugacu

SEQ ID NO: 1161115 - RNA, 19 nt, Artificial Sequence
  Description of Artificial Sequence: Synthetic oligonucleotide
uuuccgauuuccucuguaa

SEQ ID NO: 1161116 - RNA, 19 nt, Artificial Sequence
  Description of Artificial Sequence: Synthetic oligonucleotide
cagggcaaaaucauuuguc

SEQ ID NO: 1161117 - RNA, 19 nt, Artificial Sequence
  Description of Artificial Sequence: Synthetic oligonucleotide
aucaaauuccccacgagau

SEQ ID NO: 1161118 - RNA, 19 nt, Artificial Sequence
  Description of Artificial Sequence: Synthetic oligonucleotide
ugauagacacugucucuca

SEQ ID NO: 1161119 - RNA, 19 nt, Artificial Sequence
  Description of Artificial Sequence: Synthetic oligonucleotide
gguggaauaaugagcgugg

SEQ ID NO: 1161120 - RNA, 19 nt, Artificial Sequence
  Description of Artificial Sequence: Synthetic oligonucleotide
gaaugauucccaaguagca

SEQ ID NO: 1161121 - RNA, 19 nt, Artificial Sequence
  Description of Artificial Sequence: Synthetic oligonucleotide
ccuugcuucuuauaagacg

SEQ ID NO: 1161122 - RNA, 19 nt, Artificial Sequence
  Description of Artificial Sequence: Synthetic oligonucleotide
aguaucggauguucuccuc

SEQ ID NO: 1161123 - RNA, 19 nt, Artificial Sequence
  Description of Artificial Sequence: Synthetic oligonucleotide
ggugcaucaacuguaauga

SEQ ID NO: 1161124 - RNA, 19 nt, Artificial Sequence
  Description of Artificial Sequence: Synthetic oligonucleotide
aaaacccucuauaugcaau

SEQ ID NO: 1161125 - RNA, 19 nt, Artificial Sequence
  Description of Artificial Sequence: Synthetic oligonucleotide
ucugguaaugguggaauaa

SEQ ID NO: 1161126 - RNA, 19 nt, Artificial Sequence
  Description of Artificial Sequence: Synthetic oligonucleotide
auaugcaauuaauggcaca

SEQ ID NO: 1161127 - RNA, 19 nt, Artificial Sequence
  Description of Artificial Sequence: Synthetic oligonucleotide
acaucucacuguaaagcac

SEQ ID NO: 1161128 - RNA, 19 nt, Artificial Sequence
  Description of Artificial Sequence: Synthetic oligonucleotide
uuuguaaguuguugguuuu

SEQ ID NO: 1161129 - RNA, 19 nt, Artificial Sequence
  Description of Artificial Sequence: Synthetic oligonucleotide
ucauggaggaugccacagc

SEQ ID NO: 1161130 - RNA, 19 nt, Artificial Sequence
  Description of Artificial Sequence: Synthetic oligonucleotide
caaccaaaggaaaucuuga

SEQ ID NO: 1161131 - RNA, 19 nt, Artificial Sequence
  Description of Artificial Sequence: Synthetic oligonucleotide
aucuauauaucuagguaga

SEQ ID NO: 1161132 - RNA, 19 nt, Artificial Sequence
  Description of Artificial Sequence: Synthetic oligonucleotide
cuguaaaugcugacuugag

SEQ ID NO: 1161133 - RNA, 19 nt, Artificial Sequence
  Description of Artificial Sequence: Synthetic oligonucleotide
cugaguuuguaaguuguug

SEQ ID NO: 1161134 - RNA, 19 nt, Artificial Sequence
  Description of Artificial Sequence: Synthetic oligonucleotide
uuggaugaucagcaauccu

SEQ ID NO: 1161135 - RNA, 19 nt, Artificial Sequence
  Description of Artificial Sequence: Synthetic oligonucleotide
ugugucaaccaggucuucc

SEQ ID NO: 1161136 - RNA, 19 nt, Artificial Sequence
  Description of Artificial Sequence: Synthetic oligonucleotide
cuaaaucucuuucuaucca

SEQ ID NO: 1161137 - RNA, 19 nt, Artificial Sequence
  Description of Artificial Sequence: Synthetic oligonucleotide
ucuugauaacgucgccuga

SEQ ID NO: 1161138 - RNA, 19 nt, Artificial Sequence
  Description of Artificial Sequence: Synthetic oligonucleotide
ucguugaaucguuccacca

SEQ ID NO: 1161139 - RNA, 19 nt, Artificial Sequence
  Description of Artificial Sequence: Synthetic oligonucleotide
ugguuaugauccuguaagu

SEQ ID NO: 1161140 - RNA, 19 nt, Artificial Sequence
  Description of Artificial Sequence: Synthetic oligonucleotide
ccacagaauaugaaugggg

SEQ ID NO: 1161141 - RNA, 19 nt, Artificial Sequence
  Description of Artificial Sequence: Synthetic oligonucleotide
auaacgucgccugacuuca

SEQ ID NO: 1161142 - RNA, 19 nt, Artificial Sequence
  Description of Artificial Sequence: Synthetic oligonucleotide
cuugauaacgucgccugac

SEQ ID NO: 1161143 - RNA, 19 nt, Artificial Sequence
  Description of Artificial Sequence: Synthetic oligonucleotide
ugugucuguaaaugcugac

SEQ ID NO: 1161144 - RNA, 19 nt, Artificial Sequence
  Description of Artificial Sequence: Synthetic oligonucleotide
gugaggaaugauucccaag

SEQ ID NO: 1161145 - RNA, 19 nt, Artificial Sequence
  Description of Artificial Sequence: Synthetic oligonucleotide
ccacagucaaauauguaag

SEQ ID NO: 1161146 - RNA, 19 nt, Artificial Sequence
  Description of Artificial Sequence: Synthetic oligonucleotide
acguuaaaguuggaugauc

SEQ ID NO: 1161147 - RNA, 19 nt, Artificial Sequence
  Description of Artificial Sequence: Synthetic oligonucleotide
uaaugagcgugggaugugc

SEQ ID NO: 1161148 - RNA, 19 nt, Artificial Sequence
  Description of Artificial Sequence: Synthetic oligonucleotide
guaggucaaagcuucaacu

SEQ ID NO: 1161149 - RNA, 19 nt, Artificial Sequence
  Description of Artificial Sequence: Synthetic oligonucleotide
guuucaauuguaguaacgu

SEQ ID NO: 1161150 - RNA, 19 nt, Artificial Sequence
  Description of Artificial Sequence: Synthetic oligonucleotide
auagacacugucucucaaa

SEQ ID NO: 1161151 - RNA, 19 nt, Artificial Sequence
  Description of Artificial Sequence: Synthetic oligonucleotide
uagauucucugagauauuu

SEQ ID NO: 1161152 - RNA, 19 nt, Artificial Sequence
  Description of Artificial Sequence: Synthetic oligonucleotide
ucccaaguagcaaggcacu

SEQ ID NO: 1161153 - RNA, 19 nt, Artificial Sequence
  Description of Artificial Sequence: Synthetic oligonucleotide
aggaguugucaauaggauu

SEQ ID NO: 1161154 - RNA, 19 nt, Artificial Sequence
  Description of Artificial Sequence: Synthetic oligonucleotide
augccuuucaaugugucaa

SEQ ID NO: 1161155 - RNA, 19 nt, Artificial Sequence
  Description of Artificial Sequence: Synthetic oligonucleotide
uaguaucggauguucuccu

SEQ ID NO: 1161156 - RNA, 19 nt, Artificial Sequence
  Description of Artificial Sequence: Synthetic oligonucleotide
aacguuaaaguuggaugau

SEQ ID NO: 1161157 - RNA, 19 nt, Artificial Sequence
  Description of Artificial Sequence: Synthetic oligonucleotide
acuccucucauggaggaug

SEQ ID NO: 1161158 - RNA, 19 nt, Artificial Sequence
  Description of Artificial Sequence: Synthetic oligonucleotide
gucgccugacuucaaauuc

SEQ ID NO: 1161159 - RNA, 19 nt, Artificial Sequence
  Description of Artificial Sequence: Synthetic oligonucleotide
guaacguggcuuucaggug

SEQ ID NO: 1161160 - RNA, 19 nt, Artificial Sequence
  Description of Artificial Sequence: Synthetic oligonucleotide
agaucauacaggaguuguc

SEQ ID NO: 1161161 - RNA, 19 nt, Artificial Sequence
  Description of Artificial Sequence: Synthetic oligonucleotide
gguaaugguggaauaauga

SEQ ID NO: 1161162 - RNA, 19 nt, Artificial Sequence
  Description of Artificial Sequence: Synthetic oligonucleotide
gucuguaaaugcugacuug

SEQ ID NO: 1161163 - RNA, 19 nt, Artificial Sequence
  Description of Artificial Sequence: Synthetic oligonucleotide
uuuuccgauuuccucugua

SEQ ID NO: 1161164 - RNA, 19 nt, Artificial Sequence
  Description of Artificial Sequence: Synthetic oligonucleotide
ucuauauaucuagguagau

SEQ ID NO: 1161165 - RNA, 19 nt, Artificial Sequence
  Description of Artificial Sequence: Synthetic oligonucleotide
gguuaugauccuguaagug

SEQ ID NO: 1161166 - RNA, 19 nt, Artificial Sequence
  Description of Artificial Sequence: Synthetic oligonucleotide
aauuccccacgagaugucu

SEQ ID NO: 1161167 - RNA, 19 nt, Artificial Sequence
  Description of Artificial Sequence: Synthetic oligonucleotide
auacaucauauaacagauc

SEQ ID NO: 1161168 - RNA, 19 nt, Artificial Sequence
  Description of Artificial Sequence: Synthetic oligonucleotide
guaagugauaaaaguuuca

SEQ ID NO: 1161169 - RNA, 19 nt, Artificial Sequence
  Description of Artificial Sequence: Synthetic oligonucleotide
ccucuauaugcaauuaaug

SEQ ID NO: 1161170 - RNA, 19 nt, Artificial Sequence
  Description of Artificial Sequence: Synthetic oligonucleotide
ccaugaacucaucuggccg

SEQ ID NO: 1161171 - RNA, 19 nt, Artificial Sequence
  Description of Artificial Sequence: Synthetic oligonucleotide
aaauuccccacgagauguc

SEQ ID NO: 1161172 - RNA, 19 nt, Artificial Sequence
  Description of Artificial Sequence: Synthetic oligonucleotide
uggccuuacagcacugguc

SEQ ID NO: 1161173 - RNA, 19 nt, Artificial Sequence
  Description of Artificial Sequence: Synthetic oligonucleotide
ugauaacgucgccugacuu

SEQ ID NO: 1161174 - RNA, 19 nt, Artificial Sequence
  Description of Artificial Sequence: Synthetic oligonucleotide
uucagggcauuguuagcac

SEQ ID NO: 1161175 - RNA, 19 nt, Artificial Sequence
  Description of Artificial Sequence: Synthetic oligonucleotide
ugaauggggccauauucuu

SEQ ID NO: 1161176 - RNA, 19 nt, Artificial Sequence
  Description of Artificial Sequence: Synthetic oligonucleotide
uccucugaugcugaccaca

SEQ ID NO: 1161177 - RNA, 19 nt, Artificial Sequence
  Description of Artificial Sequence: Synthetic oligonucleotide
uguuucgaugaagcuauuc

SEQ ID NO: 1161178 - RNA, 19 nt, Artificial Sequence
  Description of Artificial Sequence: Synthetic oligonucleotide
uuguuagcacauuccacuu

SEQ ID NO: 1161179 - RNA, 19 nt, Artificial Sequence
  Description of Artificial Sequence: Synthetic oligonucleotide
ggaguugucaauaggauua

SEQ ID NO: 1161180 - RNA, 19 nt, Artificial Sequence
  Description of Artificial Sequence: Synthetic oligonucleotide
aauucacguugaugaccug

SEQ ID NO: 1161181 - RNA, 19 nt, Artificial Sequence
  Description of Artificial Sequence: Synthetic oligonucleotide
gauaguuccggggcuugug

SEQ ID NO: 1161182 - RNA, 19 nt, Artificial Sequence
  Description of Artificial Sequence: Synthetic oligonucleotide
uggaauaccugaguuugua

SEQ ID NO: 1161183 - RNA, 19 nt, Artificial Sequence
  Description of Artificial Sequence: Synthetic oligonucleotide
cucugagauauuuugucua

SEQ ID NO: 1161184 - RNA, 19 nt, Artificial Sequence
  Description of Artificial Sequence: Synthetic oligonucleotide
uuguagauucucugagaua

SEQ ID NO: 1161185 - RNA, 19 nt, Artificial Sequence
  Description of Artificial Sequence: Synthetic oligonucleotide
cacuuccaaaucguccucg

SEQ ID NO: 1161186 - RNA, 19 nt, Artificial Sequence
  Description of Artificial Sequence: Synthetic oligonucleotide
ggccuuacagcacugguca

SEQ ID NO: 1161187 - RNA, 19 nt, Artificial Sequence
  Description of Artificial Sequence: Synthetic oligonucleotide
aacgucgccugacuucaaa

SEQ ID NO: 1161188 - RNA, 19 nt, Artificial Sequence
  Description of Artificial Sequence: Synthetic oligonucleotide
augauccuguaagugauaa

SEQ ID NO: 1161189 - RNA, 19 nt, Artificial Sequence
  Description of Artificial Sequence: Synthetic oligonucleotide
cuuaugcaaugccuuccug

SEQ ID NO: 1161190 - RNA, 19 nt, Artificial Sequence
  Description of Artificial Sequence: Synthetic oligonucleotide
uguccaucagugaggcauc

SEQ ID NO: 1161191 - RNA, 19 nt, Artificial Sequence
  Description of Artificial Sequence: Synthetic oligonucleotide
aucggcuuucuuguagguc

SEQ ID NO: 1161192 - RNA, 19 nt, Artificial Sequence
  Description of Artificial Sequence: Synthetic oligonucleotide
gcaucggcuuucuuguagg

SEQ ID NO: 1161193 - RNA, 19 nt, Artificial Sequence
  Description of Artificial Sequence: Synthetic oligonucleotide
ggcauuguuagcacauucc

SEQ ID NO: 1161194 - RNA, 19 nt, Artificial Sequence
  Description of Artificial Sequence: Synthetic oligonucleotide
uguuuguauuugaucucuu

SEQ ID NO: 1161195 - RNA, 19 nt, Artificial Sequence
  Description of Artificial Sequence: Synthetic oligonucleotide
gguuaucauugacaaagga

SEQ ID NO: 1161196 - RNA, 19 nt, Artificial Sequence
  Description of Artificial Sequence: Synthetic oligonucleotide
cauccuuacugaacacuuc

SEQ ID NO: 1161197 - RNA, 19 nt, Artificial Sequence
  Description of Artificial Sequence: Synthetic oligonucleotide
uaguuccggggcuugugca

SEQ ID NO: 1161198 - RNA, 19 nt, Artificial Sequence
  Description of Artificial Sequence: Synthetic oligonucleotide
agacgauaguuccggggcu

SEQ ID NO: 1161199 - RNA, 19 nt, Artificial Sequence
  Description of Artificial Sequence: Synthetic oligonucleotide
acauacucauggacaacag

SEQ ID NO: 1161200 - RNA, 19 nt, Artificial Sequence
  Description of Artificial Sequence: Synthetic oligonucleotide
gaaggucagucugugaugu

SEQ ID NO: 1161201 - RNA, 19 nt, Artificial Sequence
  Description of Artificial Sequence: Synthetic oligonucleotide
cuugguuaugauccuguaa

SEQ ID NO: 1161202 - RNA, 19 nt, Artificial Sequence
  Description of Artificial Sequence: Synthetic oligonucleotide
ugcuucuuauaagacgaua

SEQ ID NO: 1161203 - RNA, 19 nt, Artificial Sequence
  Description of Artificial Sequence: Synthetic oligonucleotide
auaccugaguuuguaaguu

SEQ ID NO: 1161204 - RNA, 19 nt, Artificial Sequence
  Description of Artificial Sequence: Synthetic oligonucleotide
cagaucuauauaucuaggu

SEQ ID NO: 1161205 - RNA, 19 nt, Artificial Sequence
  Description of Artificial Sequence: Synthetic oligonucleotide
aucuagguagauauauuua

SEQ ID NO: 1161206 - RNA, 19 nt, Artificial Sequence
  Description of Artificial Sequence: Synthetic oligonucleotide
cacgauaaacuuuucuggu

SEQ ID NO: 1161207 - RNA, 19 nt, Artificial Sequence
  Description of Artificial Sequence: Synthetic oligonucleotide
cugugucuguaaaugcuga

SEQ ID NO: 1161208 - RNA, 19 nt, Artificial Sequence
  Description of Artificial Sequence: Synthetic oligonucleotide
ugcggguuucuaugaaguc

SEQ ID NO: 1161209 - RNA, 19 nt, Artificial Sequence
  Description of Artificial Sequence: Synthetic oligonucleotide
caucauaggcugaaggagu

SEQ ID NO: 1161210 - RNA, 19 nt, Artificial Sequence
  Description of Artificial Sequence: Synthetic oligonucleotide
cuucuuauaagacgauagu

SEQ ID NO: 1161211 - RNA, 19 nt, Artificial Sequence
  Description of Artificial Sequence: Synthetic oligonucleotide
ccagucauccgcuucucag

SEQ ID NO: 1161212 - RNA, 19 nt, Artificial Sequence
  Description of Artificial Sequence: Synthetic oligonucleotide
agaauaugaauggggccau

SEQ ID NO: 1161213 - RNA, 19 nt, Artificial Sequence
  Description of Artificial Sequence: Synthetic oligonucleotide
gucaaugcagcuggcgaug

SEQ ID NO: 1161214 - RNA, 19 nt, Artificial Sequence
  Description of Artificial Sequence: Synthetic oligonucleotide
gaggaugccacagcucuga

SEQ ID NO: 1161215 - RNA, 19 nt, Artificial Sequence
  Description of Artificial Sequence: Synthetic oligonucleotide
auaaugagcgugggaugug

SEQ ID NO: 1161216 - RNA, 19 nt, Artificial Sequence
  Description of Artificial Sequence: Synthetic oligonucleotide
aaucuucauuaaacguuaa

SEQ ID NO: 1161217 - RNA, 19 nt, Artificial Sequence
  Description of Artificial Sequence: Synthetic oligonucleotide
caaauuccccacgagaugu

SEQ ID NO: 1161218 - RNA, 19 nt, Artificial Sequence
  Description of Artificial Sequence: Synthetic oligonucleotide
aagucaucguugaaucguu

SEQ ID NO: 1161219 - RNA, 19 nt, Artificial Sequence
  Description of Artificial Sequence: Synthetic oligonucleotide
uuggcaucauaggcugaag

SEQ ID NO: 1161220 - RNA, 19 nt, Artificial Sequence
  Description of Artificial Sequence: Synthetic oligonucleotide
agucaucguugaaucguuc

SEQ ID NO: 1161221 - RNA, 19 nt, Artificial Sequence
  Description of Artificial Sequence: Synthetic oligonucleotide
auaucuagguagauauauu

SEQ ID NO: 1161222 - RNA, 19 nt, Artificial Sequence
  Description of Artificial Sequence: Synthetic oligonucleotide
uccccacgagaugucuugg

SEQ ID NO: 1161223 - RNA, 19 nt, Artificial Sequence
  Description of Artificial Sequence: Synthetic oligonucleotide
aacccucuauaugcaauua

SEQ ID NO: 1161224 - RNA, 19 nt, Artificial Sequence
  Description of Artificial Sequence: Synthetic oligonucleotide
acgucgccugacuucaaau

SEQ ID NO: 1161225 - RNA, 19 nt, Artificial Sequence
  Description of Artificial Sequence: Synthetic oligonucleotide
cuggccgguucuucacucc

SEQ ID NO: 1161226 - RNA, 19 nt, Artificial Sequence
  Description of Artificial Sequence: Synthetic oligonucleotide
uucuauccacauagacaua

SEQ ID NO: 1161227 - RNA, 19 nt, Artificial Sequence
  Description of Artificial Sequence: Synthetic oligonucleotide
acaucauauaacagaucua

SEQ ID NO: 1161228 - RNA, 19 nt, Artificial Sequence
  Description of Artificial Sequence: Synthetic oligonucleotide
cuuguaggucaaagcuuca

SEQ ID NO: 1161229 - RNA, 19 nt, Artificial Sequence
  Description of Artificial Sequence: Synthetic oligonucleotide
gaauccaguucuguuugua

SEQ ID NO: 1161230 - RNA, 19 nt, Artificial Sequence
  Description of Artificial Sequence: Synthetic oligonucleotide
cucuuucuauccacauaga

SEQ ID NO: 1161231 - RNA, 19 nt, Artificial Sequence
  Description of Artificial Sequence: Synthetic oligonucleotide
ccaguuuccccuucaacca

SEQ ID NO: 1161232 - RNA, 19 nt, Artificial Sequence
  Description of Artificial Sequence: Synthetic oligonucleotide
ggaauaccugaguuuguaa

SEQ ID NO: 1161233 - RNA, 19 nt, Artificial Sequence
  Description of Artificial Sequence: Synthetic oligonucleotide
caucagugaggcauccuua

SEQ ID NO: 1161234 - RNA, 19 nt, Artificial Sequence
  Description of Artificial Sequence: Synthetic oligonucleotide
cuguuuguauuugaucucu

SEQ ID NO: 1161235 - RNA, 19 nt, Artificial Sequence
  Description of Artificial Sequence: Synthetic oligonucleotide
cauccgcuucucaguggcc

SEQ ID NO: 1161236 - RNA, 19 nt, Artificial Sequence
  Description of Artificial Sequence: Synthetic oligonucleotide
gugucuguaaaugcugacu

SEQ ID NO: 1161237 - RNA, 19 nt, Artificial Sequence
  Description of Artificial Sequence: Synthetic oligonucleotide
uccucggcugugucuguaa

SEQ ID NO: 1161238 - RNA, 19 nt, Artificial Sequence
  Description of Artificial Sequence: Synthetic oligonucleotide
cugcggguuucuaugaagu

SEQ ID NO: 1161239 - RNA, 19 nt, Artificial Sequence
  Description of Artificial Sequence: Synthetic oligonucleotide
auuaaacguuaaaguugga

SEQ ID NO: 1161240 - RNA, 19 nt, Artificial Sequence
  Description of Artificial Sequence: Synthetic oligonucleotide
uuguaguaacguggcuuuc

SEQ ID NO: 1161241 - RNA, 19 nt, Artificial Sequence
  Description of Artificial Sequence: Synthetic oligonucleotide
aggagauguuggcaucaua

SEQ ID NO: 1161242 - RNA, 19 nt, Artificial Sequence
  Description of Artificial Sequence: Synthetic oligonucleotide
uuccggggcuugugcagug

SEQ ID NO: 1161243 - RNA, 19 nt, Artificial Sequence
  Description of Artificial Sequence: Synthetic oligonucleotide
aguugucaauaggauuaaa

SEQ ID NO: 1161244 - RNA, 19 nt, Artificial Sequence
  Description of Artificial Sequence: Synthetic oligonucleotide
ggggcuugugcagugagga

SEQ ID NO: 1161245 - RNA, 19 nt, Artificial Sequence
  Description of Artificial Sequence: Synthetic oligonucleotide
caauaggauuaaauuuuau

SEQ ID NO: 1161246 - RNA, 19 nt, Artificial Sequence
  Description of Artificial Sequence: Synthetic oligonucleotide
acgauaguuccggggcuug

SEQ ID NO: 1161247 - RNA, 19 nt, Artificial Sequence
  Description of Artificial Sequence: Synthetic oligonucleotide
cacgagaugucuugguuau

SEQ ID NO: 1161248 - RNA, 19 nt, Artificial Sequence
  Description of Artificial Sequence: Synthetic oligonucleotide
ggcuaaauguuucgaugaa

SEQ ID NO: 1161249 - RNA, 19 nt, Artificial Sequence
  Description of Artificial Sequence: Synthetic oligonucleotide
cgauaaacuuuucugguaa

SEQ ID NO: 1161250 - RNA, 19 nt, Artificial Sequence
  Description of Artificial Sequence: Synthetic oligonucleotide
ccuguaagugauaaaaguu

SEQ ID NO: 1161251 - RNA, 19 nt, Artificial Sequence
  Description of Artificial Sequence: Synthetic oligonucleotide
augcaauuaauggcacaua

SEQ ID NO: 1161252 - RNA, 19 nt, Artificial Sequence
  Description of Artificial Sequence: Synthetic oligonucleotide
ucguuccaccaucccuuuc

SEQ ID NO: 1161253 - RNA, 19 nt, Artificial Sequence
  Description of Artificial Sequence: Synthetic oligonucleotide
aucguuccaccaucccuuu

SEQ ID NO: 1161254 - RNA, 19 nt, Artificial Sequence
  Description of Artificial Sequence: Synthetic oligonucleotide
gagaugucuugguuaugau

SEQ ID NO: 1161255 - RNA, 19 nt, Artificial Sequence
  Description of Artificial Sequence: Synthetic oligonucleotide
cauuugucauccacuuuau

SEQ ID NO: 1161256 - RNA, 19 nt, Artificial Sequence
  Description of Artificial Sequence: Synthetic oligonucleotide
gugcaucaacuguaaugaa

SEQ ID NO: 1161257 - RNA, 19 nt, Artificial Sequence
  Description of Artificial Sequence: Synthetic oligonucleotide
ggaugaucagcaauccugu

SEQ ID NO: 1161258 - RNA, 19 nt, Artificial Sequence
  Description of Artificial Sequence: Synthetic oligonucleotide
cagcaauccuguucagaaa

SEQ ID NO: 1161259 - RNA, 19 nt, Artificial Sequence
  Description of Artificial Sequence: Synthetic oligonucleotide
ccuuucacgauaaacuuuu

SEQ ID NO: 1161260 - RNA, 19 nt, Artificial Sequence
  Description of Artificial Sequence: Synthetic oligonucleotide
cagugaggaaaaccuugaa

SEQ ID NO: 1161261 - RNA, 19 nt, Artificial Sequence
  Description of Artificial Sequence: Synthetic oligonucleotide
cauuuugcauguucugcuu

SEQ ID NO: 1161262 - RNA, 19 nt, Artificial Sequence
  Description of Artificial Sequence: Synthetic oligonucleotide
guggccuuacagcacuggu

SEQ ID NO: 1161263 - RNA, 19 nt, Artificial Sequence
  Description of Artificial Sequence: Synthetic oligonucleotide
cagggcauuguuagcacau

SEQ ID NO: 1161264 - RNA, 19 nt, Artificial Sequence
  Description of Artificial Sequence: Synthetic oligonucleotide
uaacgucgccugacuucaa

SEQ ID NO: 1161265 - RNA, 19 nt, Artificial Sequence
  Description of Artificial Sequence: Synthetic oligonucleotide
cugguaaugguggaauaau

SEQ ID NO: 1161266 - RNA, 19 nt, Artificial Sequence
  Description of Artificial Sequence: Synthetic oligonucleotide
gcuugugcagugaggaaaa

SEQ ID NO: 1161267 - RNA, 19 nt, Artificial Sequence
  Description of Artificial Sequence: Synthetic oligonucleotide
ggucaaugcagcuggcgau

SEQ ID NO: 1161268 - RNA, 19 nt, Artificial Sequence
  Description of Artificial Sequence: Synthetic oligonucleotide
gccucugauaggccaguca

SEQ ID NO: 1161269 - RNA, 19 nt, Artificial Sequence
  Description of Artificial Sequence: Synthetic oligonucleotide
cgagaugucuugguuauga

SEQ ID NO: 1161270 - RNA, 19 nt, Artificial Sequence
  Description of Artificial Sequence: Synthetic oligonucleotide
uccggggcuugugcaguga

SEQ ID NO: 1161271 - RNA, 19 nt, Artificial Sequence
  Description of Artificial Sequence: Synthetic oligonucleotide
ccacgagaugucuugguua

SEQ ID NO: 1161272 - RNA, 19 nt, Artificial Sequence
  Description of Artificial Sequence: Synthetic oligonucleotide
cuggaauaccugaguuugu

SEQ ID NO: 1161273 - RNA, 19 nt, Artificial Sequence
  Description of Artificial Sequence: Synthetic oligonucleotide
agggcauuguuagcacauu

SEQ ID NO: 1161274 - RNA, 19 nt, Artificial Sequence
  Description of Artificial Sequence: Synthetic oligonucleotide
guucauaguaucggauguu

SEQ ID NO: 1161275 - RNA, 19 nt, Artificial Sequence
  Description of Artificial Sequence: Synthetic oligonucleotide
cauguccaucagugaggca

SEQ ID NO: 1161276 - RNA, 19 nt, Artificial Sequence
  Description of Artificial Sequence: Synthetic oligonucleotide
ggcauccuuacugaacacu

SEQ ID NO: 1161277 - RNA, 19 nt, Artificial Sequence
  Description of Artificial Sequence: Synthetic oligonucleotide
cgccugacuucaaauucac

SEQ ID NO: 1161278 - RNA, 19 nt, Artificial Sequence
  Description of Artificial Sequence: Synthetic oligonucleotide
caucggcuuucuuguaggu

SEQ ID NO: 1161279 - RNA, 19 nt, Artificial Sequence
  Description of Artificial Sequence: Synthetic oligonucleotide
gacgauaguuccggggcuu

SEQ ID NO: 1161280 - RNA, 19 nt, Artificial Sequence
  Description of Artificial Sequence: Synthetic oligonucleotide
ccacuuuauaaagggcaca

SEQ ID NO: 1161281 - RNA, 19 nt, Artificial Sequence
  Description of Artificial Sequence: Synthetic oligonucleotide
agcgugggaugugcauccu

SEQ ID NO: 1161282 - RNA, 19 nt, Artificial Sequence
  Description of Artificial Sequence: Synthetic oligonucleotide
ccagggcaaaaucauuugu

SEQ ID NO: 1161283 - RNA, 19 nt, Artificial Sequence
  Description of Artificial Sequence: Synthetic oligonucleotide
cggggcuugugcagugagg

SEQ ID NO: 1161284 - RNA, 19 nt, Artificial Sequence
  Description of Artificial Sequence: Synthetic oligonucleotide
ccccuucaaccaaaggaaa

SEQ ID NO: 1161285 - RNA, 19 nt, Artificial Sequence
  Description of Artificial Sequence: Synthetic oligonucleotide
cuuccaagggaaggucagu

SEQ ID NO: 1161286 - RNA, 19 nt, Artificial Sequence
  Description of Artificial Sequence: Synthetic oligonucleotide
gccgguucuucacuccucu

SEQ ID NO: 1161287 - RNA, 19 nt, Artificial Sequence
  Description of Artificial Sequence: Synthetic oligonucleotide
gcaauccuguucagaaacu

SEQ ID NO: 1161288 - RNA, 19 nt, Artificial Sequence
  Description of Artificial Sequence: Synthetic oligonucleotide
cccuucaaccaaaggaaau

SEQ ID NO: 1161289 - RNA, 19 nt, Artificial Sequence
  Description of Artificial Sequence: Synthetic oligonucleotide
auguuucgaugaagcuauu

SEQ ID NO: 1161290 - RNA, 19 nt, Artificial Sequence
  Description of Artificial Sequence: Synthetic oligonucleotide
gaucagcaucggcuuucuu

SEQ ID NO: 1161291 - RNA, 19 nt, Artificial Sequence
  Description of Artificial Sequence: Synthetic oligonucleotide
ccgguucuucacuccucuc

SEQ ID NO: 1161292 - RNA, 19 nt, Artificial Sequence
  Description of Artificial Sequence: Synthetic oligonucleotide
cagcaucggcuuucuugua

SEQ ID NO: 1161293 - RNA, 19 nt, Artificial Sequence
  Description of Artificial Sequence: Synthetic oligonucleotide
gccuuacagcacuggucaa

SEQ ID NO: 1161294 - RNA, 19 nt, Artificial Sequence
  Description of Artificial Sequence: Synthetic oligonucleotide
cauggacaacaggcagcaa

SEQ ID NO: 1161295 - RNA, 19 nt, Artificial Sequence
  Description of Artificial Sequence: Synthetic oligonucleotide
caggugcaucaacuguaau

SEQ ID NO: 1161296 - RNA, 19 nt, Artificial Sequence
  Description of Artificial Sequence: Synthetic oligonucleotide
ccuuccugcggguuucuau

SEQ ID NO: 1161297 - RNA, 19 nt, Artificial Sequence
  Description of Artificial Sequence: Synthetic oligonucleotide
gcaaugccuuccugcgggu

SEQ ID NO: 1161298 - RNA, 19 nt, Artificial Sequence
  Description of Artificial Sequence: Synthetic oligonucleotide
ccuuacagcacuggucaau

SEQ ID NO: 1161299 - RNA, 19 nt, Artificial Sequence
  Description of Artificial Sequence: Synthetic oligonucleotide
ccagcguucccagucugcu

SEQ ID NO: 1161300 - RNA, 19 nt, Artificial Sequence
  Description of Artificial Sequence: Synthetic oligonucleotide
cccacgagaugucuugguu

SEQ ID NO: 1161301 - RNA, 19 nt, Artificial Sequence
  Description of Artificial Sequence: Synthetic oligonucleotide
cgcuucucaguggccuuac

SEQ ID NO: 1161302 - RNA, 19 nt, Artificial Sequence
  Description of Artificial Sequence: Synthetic oligonucleotide
ccaccaucccuuucacgau

SEQ ID NO: 1161303 - RNA, 19 nt, Artificial Sequence
  Description of Artificial Sequence: Synthetic oligonucleotide
cgucgccugacuucaaauu

SEQ ID NO: 1161304 - RNA, 19 nt, Artificial Sequence
  Description of Artificial Sequence: Synthetic oligonucleotide
ccccacgagaugucuuggu

SEQ ID NO: 1161305 - RNA, 19 nt, Artificial Sequence
  Description of Artificial Sequence: Synthetic oligonucleotide
gccuuccugcggguuucua

SEQ ID NO: 1161306 - RNA, 19 nt, Artificial Sequence
  Description of Artificial Sequence: Synthetic oligonucleotide
cgauaguuccggggcuugu

SEQ ID NO: 1161307 - RNA, 19 nt, Artificial Sequence
  Description of Artificial Sequence: Synthetic oligonucleotide
ucuuuaaaggcucagaugc

SEQ ID NO: 1161308 - RNA, 19 nt, Artificial Sequence
  Description of Artificial Sequence: Synthetic oligonucleotide
aaauaugugucuuugccuc

SEQ ID NO: 1161309 - RNA, 19 nt, Artificial Sequence
  Description of Artificial Sequence: Synthetic oligonucleotide
gaugacagaaucuuuauuc

SEQ ID NO: 1161310 - RNA, 19 nt, Artificial Sequence
  Description of Artificial Sequence: Synthetic oligonucleotide
gaccaugggaccuugaucc

SEQ ID NO: 1161311 - RNA, 19 nt, Artificial Sequence
  Description of Artificial Sequence: Synthetic oligonucleotide
ucuucugcgauccauggcc

SEQ ID NO: 1161312 - RNA, 19 nt, Artificial Sequence
  Description of Artificial Sequence: Synthetic oligonucleotide
aauaugugucuuugccucc

SEQ ID NO: 1161313 - RNA, 19 nt, Artificial Sequence
  Description of Artificial Sequence: Synthetic oligonucleotide
uuucaugcagauuaaauau

SEQ ID NO: 1161314 - RNA, 19 nt, Artificial Sequence
  Description of Artificial Sequence: Synthetic oligonucleotide
ugcagauuaaauauguguc

SEQ ID NO: 1161315 - RNA, 19 nt, Artificial Sequence
  Description of Artificial Sequence: Synthetic oligonucleotide
aauauauucugcaugggga

SEQ ID NO: 1161316 - RNA, 19 nt, Artificial Sequence
  Description of Artificial Sequence: Synthetic oligonucleotide
ucggauuugccuauugagg

SEQ ID NO: 1161317 - RNA, 19 nt, Artificial Sequence
  Description of Artificial Sequence: Synthetic oligonucleotide
ucuucagagggucaggggc

SEQ ID NO: 1161318 - RNA, 19 nt, Artificial Sequence
  Description of Artificial Sequence: Synthetic oligonucleotide
aagacuauacagcacaguu

SEQ ID NO: 1161319 - RNA, 19 nt, Artificial Sequence
  Description of Artificial Sequence: Synthetic oligonucleotide
gacuauacagcacaguuuc

SEQ ID NO: 1161320 - RNA, 19 nt, Artificial Sequence
  Description of Artificial Sequence: Synthetic oligonucleotide
acuguggacaauugagggc

SEQ ID NO: 1161321 - RNA, 19 nt, Artificial Sequence
  Description of Artificial Sequence: Synthetic oligonucleotide
ugggaauacagcaccuugg

SEQ ID NO: 1161322 - RNA, 19 nt, Artificial Sequence
  Description of Artificial Sequence: Synthetic oligonucleotide
augcagauuaaauaugugu

SEQ ID NO: 1161323 - RNA, 19 nt, Artificial Sequence
  Description of Artificial Sequence: Synthetic oligonucleotide
guaugcuaagccuugauuc

SEQ ID NO: 1161324 - RNA, 19 nt, Artificial Sequence
  Description of Artificial Sequence: Synthetic oligonucleotide
gacuccggggcuuugaucc

SEQ ID NO: 1161325 - RNA, 19 nt, Artificial Sequence
  Description of Artificial Sequence: Synthetic oligonucleotide
gaucccucaauauauucug

SEQ ID NO: 1161326 - RNA, 19 nt, Artificial Sequence
  Description of Artificial Sequence: Synthetic oligonucleotide
ucuuuugugcaucacuggu

SEQ ID NO: 1161327 - RNA, 19 nt, Artificial Sequence
  Description of Artificial Sequence: Synthetic oligonucleotide
uucaugcagauuaaauaug

SEQ ID NO: 1161328 - RNA, 19 nt, Artificial Sequence
  Description of Artificial Sequence: Synthetic oligonucleotide
caugcucugaacucguucc

SEQ ID NO: 1161329 - RNA, 19 nt, Artificial Sequence
  Description of Artificial Sequence: Synthetic oligonucleotide
cuucauggcauuucagggg

SEQ ID NO: 1161330 - RNA, 19 nt, Artificial Sequence
  Description of Artificial Sequence: Synthetic oligonucleotide
aucauaacccuucaucugu

SEQ ID NO: 1161331 - RNA, 19 nt, Artificial Sequence
  Description of Artificial Sequence: Synthetic oligonucleotide
uauucuucugcgauccaug

SEQ ID NO: 1161332 - RNA, 19 nt, Artificial Sequence
  Description of Artificial Sequence: Synthetic oligonucleotide
uuuacagguccaaggacca

SEQ ID NO: 1161333 - RNA, 19 nt, Artificial Sequence
  Description of Artificial Sequence: Synthetic oligonucleotide
aaaggugccaugacugugg

SEQ ID NO: 1161334 - RNA, 19 nt, Artificial Sequence
  Description of Artificial Sequence: Synthetic oligonucleotide
uguaucuuugacuggcucu

SEQ ID NO: 1161335 - RNA, 19 nt, Artificial Sequence
  Description of Artificial Sequence: Synthetic oligonucleotide
accuguaucuuugacuggc

SEQ ID NO: 1161336 - RNA, 19 nt, Artificial Sequence
  Description of Artificial Sequence: Synthetic oligonucleotide
uucggggauuccuugaaag

SEQ ID NO: 1161337 - RNA, 19 nt, Artificial Sequence
  Description of Artificial Sequence: Synthetic oligonucleotide
uucuuuugugcaucacugg

SEQ ID NO: 1161338 - RNA, 19 nt, Artificial Sequence
  Description of Artificial Sequence: Synthetic oligonucleotide
agugguuguuugcucgugc

SEQ ID NO: 1161339 - RNA, 19 nt, Artificial Sequence
  Description of Artificial Sequence: Synthetic oligonucleotide
gaaucauaacccuucaucu

SEQ ID NO: 1161340 - RNA, 19 nt, Artificial Sequence
  Description of Artificial Sequence: Synthetic oligonucleotide
uaugcuaagccuugauucu

SEQ ID NO: 1161341 - RNA, 19 nt, Artificial Sequence
  Description of Artificial Sequence: Synthetic oligonucleotide
ugucucguggaccaucuug

SEQ ID NO: 1161342 - RNA, 19 nt, Artificial Sequence
  Description of Artificial Sequence: Synthetic oligonucleotide
acuguagcuugucucgugg

SEQ ID NO: 1161343 - RNA, 19 nt, Artificial Sequence
  Description of Artificial Sequence: Synthetic oligonucleotide
uuuaaaggcucagaugcca

SEQ ID NO: 1161344 - RNA, 19 nt, Artificial Sequence
  Description of Artificial Sequence: Synthetic oligonucleotide
aagaugacagaaucuuuau

SEQ ID NO: 1161345 - RNA, 19 nt, Artificial Sequence
  Description of Artificial Sequence: Synthetic oligonucleotide
aaggugccaugacuguggc

SEQ ID NO: 1161346 - RNA, 19 nt, Artificial Sequence
  Description of Artificial Sequence: Synthetic oligonucleotide
cuguggacaauugagggcc

SEQ ID NO: 1161347 - RNA, 19 nt, Artificial Sequence
  Description of Artificial Sequence: Synthetic oligonucleotide
gaccacugggcuuugauuc

SEQ ID NO: 1161348 - RNA, 19 nt, Artificial Sequence
  Description of Artificial Sequence: Synthetic oligonucleotide
gaccuugguccuuuguugg

SEQ ID NO: 1161349 - RNA, 19 nt, Artificial Sequence
  Description of Artificial Sequence: Synthetic oligonucleotide
ggccauugggccuagaucc

SEQ ID NO: 1161350 - RNA, 19 nt, Artificial Sequence
  Description of Artificial Sequence: Synthetic oligonucleotide
cacagaaucauaacccuuc

SEQ ID NO: 1161351 - RNA, 19 nt, Artificial Sequence
  Description of Artificial Sequence: Synthetic oligonucleotide
uucuuuagagguuccggca

SEQ ID NO: 1161352 - RNA, 19 nt, Artificial Sequence
  Description of Artificial Sequence: Synthetic oligonucleotide
ucggggauuccuugaaagg

SEQ ID NO: 1161353 - RNA, 19 nt, Artificial Sequence
  Description of Artificial Sequence: Synthetic oligonucleotide
ugauccuuggcuagugcug

SEQ ID NO: 1161354 - RNA, 19 nt, Artificial Sequence
  Description of Artificial Sequence: Synthetic oligonucleotide
cugaacucguuccuguagg

SEQ ID NO: 1161355 - RNA, 19 nt, Artificial Sequence
  Description of Artificial Sequence: Synthetic oligonucleotide
ggcuacaggaccuugauuc

SEQ ID NO: 1161356 - RNA, 19 nt, Artificial Sequence
  Description of Artificial Sequence: Synthetic oligonucleotide
cuucuuacgcucagggacc

SEQ ID NO: 1161357 - RNA, 19 nt, Artificial Sequence
  Description of Artificial Sequence: Synthetic oligonucleotide
gccgguuuuauuuugauuc

SEQ ID NO: 1161358 - RNA, 19 nt, Artificial Sequence
  Description of Artificial Sequence: Synthetic oligonucleotide
uuuaaggacccugggacca

SEQ ID NO: 1161359 - RNA, 19 nt, Artificial Sequence
  Description of Artificial Sequence: Synthetic oligonucleotide
cuuuaaaggcucagaugcc

SEQ ID NO: 1161360 - RNA, 19 nt, Artificial Sequence
  Description of Artificial Sequence: Synthetic oligonucleotide
gaccacuggaccuugguuc

SEQ ID NO: 1161361 - RNA, 19 nt, Artificial Sequence
  Description of Artificial Sequence: Synthetic oligonucleotide
uugcucgugccccucagag

SEQ ID NO: 1161362 - RNA, 19 nt, Artificial Sequence
  Description of Artificial Sequence: Synthetic oligonucleotide
uuuuccucgugcccuucgg

SEQ ID NO: 1161363 - RNA, 19 nt, Artificial Sequence
  Description of Artificial Sequence: Synthetic oligonucleotide
cuuucggaagcccugggac

SEQ ID NO: 1161364 - RNA, 19 nt, Artificial Sequence
  Description of Artificial Sequence: Synthetic oligonucleotide
agcgacgcaccauccaggc

SEQ ID NO: 1161365 - RNA, 19 nt, Artificial Sequence
  Description of Artificial Sequence: Synthetic oligonucleotide
ucugcauggggaacuguug

SEQ ID NO: 1161366 - RNA, 19 nt, Artificial Sequence
  Description of Artificial Sequence: Synthetic oligonucleotide
gauucuuuacagguccaag

SEQ ID NO: 1161367 - RNA, 19 nt, Artificial Sequence
  Description of Artificial Sequence: Synthetic oligonucleotide
ucccucaauauauucugca

SEQ ID NO: 1161368 - RNA, 19 nt, Artificial Sequence
  Description of Artificial Sequence: Synthetic oligonucleotide
auaugugucuuugccuccc

SEQ ID NO: 1161369 - RNA, 19 nt, Artificial Sequence
  Description of Artificial Sequence: Synthetic oligonucleotide
uuuggcuacaggaccuuga

SEQ ID NO: 1161370 - RNA, 19 nt, Artificial Sequence
  Description of Artificial Sequence: Synthetic oligonucleotide
ugaacugggcacuguagcu

SEQ ID NO: 1161371 - RNA, 19 nt, Artificial Sequence
  Description of Artificial Sequence: Synthetic oligonucleotide
gauuccugcaagacuauac

SEQ ID NO: 1161372 - RNA, 19 nt, Artificial Sequence
  Description of Artificial Sequence: Synthetic oligonucleotide
agcaccuuggucuuuugga

SEQ ID NO: 1161373 - RNA, 19 nt, Artificial Sequence
  Description of Artificial Sequence: Synthetic oligonucleotide
uucggugcgagucaccauc

SEQ ID NO: 1161374 - RNA, 19 nt, Artificial Sequence
  Description of Artificial Sequence: Synthetic oligonucleotide
uguagcuugucucguggac

SEQ ID NO: 1161375 - RNA, 19 nt, Artificial Sequence
  Description of Artificial Sequence: Synthetic oligonucleotide
ucguggaccaucuugucau

SEQ ID NO: 1161376 - RNA, 19 nt, Artificial Sequence
  Description of Artificial Sequence: Synthetic oligonucleotide
uccccuuugaacugggcac

SEQ ID NO: 1161377 - RNA, 19 nt, Artificial Sequence
  Description of Artificial Sequence: Synthetic oligonucleotide
auaacccuucaucugucug

SEQ ID NO: 1161378 - RNA, 19 nt, Artificial Sequence
  Description of Artificial Sequence: Synthetic oligonucleotide
ucucggauuugccuauuga

SEQ ID NO: 1161379 - RNA, 19 nt, Artificial Sequence
  Description of Artificial Sequence: Synthetic oligonucleotide
caugacucugguucuuuag

SEQ ID NO: 1161380 - RNA, 19 nt, Artificial Sequence
  Description of Artificial Sequence: Synthetic oligonucleotide
gugcuacaaacacagaauc

SEQ ID NO: 1161381 - RNA, 19 nt, Artificial Sequence
  Description of Artificial Sequence: Synthetic oligonucleotide
ucaacucuugcugggacca

SEQ ID NO: 1161382 - RNA, 19 nt, Artificial Sequence
  Description of Artificial Sequence: Synthetic oligonucleotide
cuugcugggaccacaugac

SEQ ID NO: 1161383 - RNA, 19 nt, Artificial Sequence
  Description of Artificial Sequence: Synthetic oligonucleotide
gaaucaaggggaucccuca

SEQ ID NO: 1161384 - RNA, 19 nt, Artificial Sequence
  Description of Artificial Sequence: Synthetic oligonucleotide
gcucgugccccucagagcg

SEQ ID NO: 1161385 - RNA, 19 nt, Artificial Sequence
  Description of Artificial Sequence: Synthetic oligonucleotide
uggccuuguugucagcugc

SEQ ID NO: 1161386 - RNA, 19 nt, Artificial Sequence
  Description of Artificial Sequence: Synthetic oligonucleotide
ucaaggggaucccucaaua

SEQ ID NO: 1161387 - RNA, 19 nt, Artificial Sequence
  Description of Artificial Sequence: Synthetic oligonucleotide
uauagggucuugauucuuu

SEQ ID NO: 1161388 - RNA, 19 nt, Artificial Sequence
  Description of Artificial Sequence: Synthetic oligonucleotide
uguggucuugauccuuggc

SEQ ID NO: 1161389 - RNA, 19 nt, Artificial Sequence
  Description of Artificial Sequence: Synthetic oligonucleotide
ggucuugauucuuuacagg

SEQ ID NO: 1161390 - RNA, 19 nt, Artificial Sequence
  Description of Artificial Sequence: Synthetic oligonucleotide
agauuaaauaugugucuuu

SEQ ID NO: 1161391 - RNA, 19 nt, Artificial Sequence
  Description of Artificial Sequence: Synthetic oligonucleotide
gggccuagauccuucacgg

SEQ ID NO: 1161392 - RNA, 19 nt, Artificial Sequence
  Description of Artificial Sequence: Synthetic oligonucleotide
acagaaucauaacccuuca

SEQ ID NO: 1161393 - RNA, 19 nt, Artificial Sequence
  Description of Artificial Sequence: Synthetic oligonucleotide
cuuuagagguuccggcagc

SEQ ID NO: 1161394 - RNA, 19 nt, Artificial Sequence
  Description of Artificial Sequence: Synthetic oligonucleotide
gaccuuucagagguacugg

SEQ ID NO: 1161395 - RNA, 19 nt, Artificial Sequence
  Description of Artificial Sequence: Synthetic oligonucleotide
uuucggaagcccugggacu

SEQ ID NO: 1161396 - RNA, 19 nt, Artificial Sequence
  Description of Artificial Sequence: Synthetic oligonucleotide
uccuuguguggcucuuugg

SEQ ID NO: 1161397 - RNA, 19 nt, Artificial Sequence
  Description of Artificial Sequence: Synthetic oligonucleotide
cugggaauacagcaccuug

SEQ ID NO: 1161398 - RNA, 19 nt, Artificial Sequence
  Description of Artificial Sequence: Synthetic oligonucleotide
aguuucaugcagauuaaau

SEQ ID NO: 1161399 - RNA, 19 nt, Artificial Sequence
  Description of Artificial Sequence: Synthetic oligonucleotide
gaccuugauccuuggcuag

SEQ ID NO: 1161400 - RNA, 19 nt, Artificial Sequence
  Description of Artificial Sequence: Synthetic oligonucleotide
aaucaaggggaucccucaa

SEQ ID NO: 1161401 - RNA, 19 nt, Artificial Sequence
  Description of Artificial Sequence: Synthetic oligonucleotide
ccuauugagggcaucugcc

SEQ ID NO: 1161402 - RNA, 19 nt, Artificial Sequence
  Description of Artificial Sequence: Synthetic oligonucleotide
gcuagugcugggauaaugg

SEQ ID NO: 1161403 - RNA, 19 nt, Artificial Sequence
  Description of Artificial Sequence: Synthetic oligonucleotide
ucauaacccuucaucuguc

SEQ ID NO: 1161404 - RNA, 19 nt, Artificial Sequence
  Description of Artificial Sequence: Synthetic oligonucleotide
aucuguaccuguaucuuug

SEQ ID NO: 1161405 - RNA, 19 nt, Artificial Sequence
  Description of Artificial Sequence: Synthetic oligonucleotide
caugggaccuugauccuug

SEQ ID NO: 1161406 - RNA, 19 nt, Artificial Sequence
  Description of Artificial Sequence: Synthetic oligonucleotide
ugggauuauagggucuuga

SEQ ID NO: 1161407 - RNA, 19 nt, Artificial Sequence
  Description of Artificial Sequence: Synthetic oligonucleotide
uguagaggcuucguauucu

SEQ ID NO: 1161408 - RNA, 19 nt, Artificial Sequence
  Description of Artificial Sequence: Synthetic oligonucleotide
gguucuuuagagguuccgg

SEQ ID NO: 1161409 - RNA, 19 nt, Artificial Sequence
  Description of Artificial Sequence: Synthetic oligonucleotide
cuuauuggccuccccuuug

SEQ ID NO: 1161410 - RNA, 19 nt, Artificial Sequence
  Description of Artificial Sequence: Synthetic oligonucleotide
cggauuugccuauugaggg

SEQ ID NO: 1161411 - RNA, 19 nt, Artificial Sequence
  Description of Artificial Sequence: Synthetic oligonucleotide
ucagagcgacgcaccaucc

SEQ ID NO: 1161412 - RNA, 19 nt, Artificial Sequence
  Description of Artificial Sequence: Synthetic oligonucleotide
uccucgugcccuucggugc

SEQ ID NO: 1161413 - RNA, 19 nt, Artificial Sequence
  Description of Artificial Sequence: Synthetic oligonucleotide
guagcuugucucguggacc

SEQ ID NO: 1161414 - RNA, 19 nt, Artificial Sequence
  Description of Artificial Sequence: Synthetic oligonucleotide
aucccucaauauauucugc

SEQ ID NO: 1161415 - RNA, 19 nt, Artificial Sequence
  Description of Artificial Sequence: Synthetic oligonucleotide
uuggcuacaggaccuugau

SEQ ID NO: 1161416 - RNA, 19 nt, Artificial Sequence
  Description of Artificial Sequence: Synthetic oligonucleotide
agcacaguuucaugcagau

SEQ ID NO: 1161417 - RNA, 19 nt, Artificial Sequence
  Description of Artificial Sequence: Synthetic oligonucleotide
uuuagagguuccggcagca

SEQ ID NO: 1161418 - RNA, 19 nt, Artificial Sequence
  Description of Artificial Sequence: Synthetic oligonucleotide
ugcuaagccuugauucuuc

SEQ ID NO: 1161419 - RNA, 19 nt, Artificial Sequence
  Description of Artificial Sequence: Synthetic oligonucleotide
cuugauccuuggcuagugc

SEQ ID NO: 1161420 - RNA, 19 nt, Artificial Sequence
  Description of Artificial Sequence: Synthetic oligonucleotide
guuggacccggcuccuucg

SEQ ID NO: 1161421 - RNA, 19 nt, Artificial Sequence
  Description of Artificial Sequence: Synthetic oligonucleotide
cuucacuggcucagggacc

SEQ ID NO: 1161422 - RNA, 19 nt, Artificial Sequence
  Description of Artificial Sequence: Synthetic oligonucleotide
ugugucacgcucgucugca

SEQ ID NO: 1161423 - RNA, 19 nt, Artificial Sequence
  Description of Artificial Sequence: Synthetic oligonucleotide
cucagagcgacgcaccauc

SEQ ID NO: 1161424 - RNA, 19 nt, Artificial Sequence
  Description of Artificial Sequence: Synthetic oligonucleotide
uaucuguaccuguaucuuu

SEQ ID NO: 1161425 - RNA, 19 nt, Artificial Sequence
  Description of Artificial Sequence: Synthetic oligonucleotide
ccucaauauauucugcaug

SEQ ID NO: 1161426 - RNA, 19 nt, Artificial Sequence
  Description of Artificial Sequence: Synthetic oligonucleotide
accacuguaucuguaccug

SEQ ID NO: 1161427 - RNA, 19 nt, Artificial Sequence
  Description of Artificial Sequence: Synthetic oligonucleotide
ugauccuuggcuggugcug

SEQ ID NO: 1161428 - RNA, 19 nt, Artificial Sequence
  Description of Artificial Sequence: Synthetic oligonucleotide
uaucuuugacuggcucugg

SEQ ID NO: 1161429 - RNA, 19 nt, Artificial Sequence
  Description of Artificial Sequence: Synthetic oligonucleotide
cuggguaugcuaagccuug

SEQ ID NO: 1161430 - RNA, 19 nt, Artificial Sequence
  Description of Artificial Sequence: Synthetic oligonucleotide
ggucuugauccuuggcugg

SEQ ID NO: 1161431 - RNA, 19 nt, Artificial Sequence
  Description of Artificial Sequence: Synthetic oligonucleotide
ucggauccucaacucuugc

SEQ ID NO: 1161432 - RNA, 19 nt, Artificial Sequence
  Description of Artificial Sequence: Synthetic oligonucleotide
uugaucggcuucacaggcu

SEQ ID NO: 1161433 - RNA, 19 nt, Artificial Sequence
  Description of Artificial Sequence: Synthetic oligonucleotide
uugauucuuuggaggcucu

SEQ ID NO: 1161434 - RNA, 19 nt, Artificial Sequence
  Description of Artificial Sequence: Synthetic oligonucleotide
gccuagauccuucacgggc

SEQ ID NO: 1161435 - RNA, 19 nt, Artificial Sequence
  Description of Artificial Sequence: Synthetic oligonucleotide
uuggacccggcuccuucgg

SEQ ID NO: 1161436 - RNA, 19 nt, Artificial Sequence
  Description of Artificial Sequence: Synthetic oligonucleotide
ucggugcgagucaccaucc

SEQ ID NO: 1161437 - RNA, 19 nt, Artificial Sequence
  Description of Artificial Sequence: Synthetic oligonucleotide
ucugcgauccauggccuug

SEQ ID NO: 1161438 - RNA, 19 nt, Artificial Sequence
  Description of Artificial Sequence: Synthetic oligonucleotide
acucgucaccuccucucgg

SEQ ID NO: 1161439 - RNA, 19 nt, Artificial Sequence
  Description of Artificial Sequence: Synthetic oligonucleotide
ccuagauccuucacgggcc

SEQ ID NO: 1161440 - RNA, 19 nt, Artificial Sequence
  Description of Artificial Sequence: Synthetic oligonucleotide
cuagauccuucacgggccc

SEQ ID NO: 1161441 - RNA, 19 nt, Artificial Sequence
  Description of Artificial Sequence: Synthetic oligonucleotide
gacuucggauccucaacuc

SEQ ID NO: 1161442 - RNA, 19 nt, Artificial Sequence
  Description of Artificial Sequence: Synthetic oligonucleotide
ggauuugccuauugagggc

SEQ ID NO: 1161443 - RNA, 19 nt, Artificial Sequence
  Description of Artificial Sequence: Synthetic oligonucleotide
gggauaauggggucuuggc

SEQ ID NO: 1161444 - RNA, 19 nt, Artificial Sequence
  Description of Artificial Sequence: Synthetic oligonucleotide
uugcugggaccacaugacu

SEQ ID NO: 1161445 - RNA, 19 nt, Artificial Sequence
  Description of Artificial Sequence: Synthetic oligonucleotide
uuugcucgugccccucaga

SEQ ID NO: 1161446 - RNA, 19 nt, Artificial Sequence
  Description of Artificial Sequence: Synthetic oligonucleotide
ugauucuuuacagguccaa

SEQ ID NO: 1161447 - RNA, 19 nt, Artificial Sequence
  Description of Artificial Sequence: Synthetic oligonucleotide
cuguagaggcuucguauuc

SEQ ID NO: 1161448 - RNA, 19 nt, Artificial Sequence
  Description of Artificial Sequence: Synthetic oligonucleotide
aggggaucccucaauauau

SEQ ID NO: 1161449 - RNA, 19 nt, Artificial Sequence
  Description of Artificial Sequence: Synthetic oligonucleotide
ucaggggaaucaaggggau

SEQ ID NO: 1161450 - RNA, 19 nt, Artificial Sequence
  Description of Artificial Sequence: Synthetic oligonucleotide
auagggucuugauucuuua

SEQ ID NO: 1161451 - RNA, 19 nt, Artificial Sequence
  Description of Artificial Sequence: Synthetic oligonucleotide
auugggccuagauccuuca

SEQ ID NO: 1161452 - RNA, 19 nt, Artificial Sequence
  Description of Artificial Sequence: Synthetic oligonucleotide
aucaaggggaucccucaau

SEQ ID NO: 1161453 - RNA, 19 nt, Artificial Sequence
  Description of Artificial Sequence: Synthetic oligonucleotide
uccuucggggauuccuuga

SEQ ID NO: 1161454 - RNA, 19 nt, Artificial Sequence
  Description of Artificial Sequence: Synthetic oligonucleotide
cgacgcaccauccaggccg

SEQ ID NO: 1161455 - RNA, 19 nt, Artificial Sequence
  Description of Artificial Sequence: Synthetic oligonucleotide
uguggacaauugagggccu

SEQ ID NO: 1161456 - RNA, 19 nt, Artificial Sequence
  Description of Artificial Sequence: Synthetic oligonucleotide
uucggaagcccugggacuc

SEQ ID NO: 1161457 - RNA, 19 nt, Artificial Sequence
  Description of Artificial Sequence: Synthetic oligonucleotide
gagcgacgcaccauccagg

SEQ ID NO: 1161458 - RNA, 19 nt, Artificial Sequence
  Description of Artificial Sequence: Synthetic oligonucleotide
cuccuucauggcauuucag

SEQ ID NO: 1161459 - RNA, 19 nt, Artificial Sequence
  Description of Artificial Sequence: Synthetic oligonucleotide
cuguaccuguaucuuugac

SEQ ID NO: 1161460 - RNA, 19 nt, Artificial Sequence
  Description of Artificial Sequence: Synthetic oligonucleotide
uggacaauugagggccucu

SEQ ID NO: 1161461 - RNA, 19 nt, Artificial Sequence
  Description of Artificial Sequence: Synthetic oligonucleotide
gcagauuaaauaugugucu

SEQ ID NO: 1161462 - RNA, 19 nt, Artificial Sequence
  Description of Artificial Sequence: Synthetic oligonucleotide
ugcccuucggugcgaguca

SEQ ID NO: 1161463 - RNA, 19 nt, Artificial Sequence
  Description of Artificial Sequence: Synthetic oligonucleotide
ucuugauccuuggcuggug

SEQ ID NO: 1161464 - RNA, 19 nt, Artificial Sequence
  Description of Artificial Sequence: Synthetic oligonucleotide
acggcgcgcccuuugccac

SEQ ID NO: 1161465 - RNA, 19 nt, Artificial Sequence
  Description of Artificial Sequence: Synthetic oligonucleotide
guuugcucgugccccucag

SEQ ID NO: 1161466 - RNA, 19 nt, Artificial Sequence
  Description of Artificial Sequence: Synthetic oligonucleotide
ccgguuuuauuuugauucc

SEQ ID NO: 1161467 - RNA, 19 nt, Artificial Sequence
  Description of Artificial Sequence: Synthetic oligonucleotide
cuccccuuugaacugggca

SEQ ID NO: 1161468 - RNA, 19 nt, Artificial Sequence
  Description of Artificial Sequence: Synthetic oligonucleotide
gccuauugagggcaucugc

SEQ ID NO: 1161469 - RNA, 19 nt, Artificial Sequence
  Description of Artificial Sequence: Synthetic oligonucleotide
uguaggaccuugguccuuu

SEQ ID NO: 1161470 - RNA, 19 nt, Artificial Sequence
  Description of Artificial Sequence: Synthetic oligonucleotide
uugguccuuuguuggggcu

SEQ ID NO: 1161471 - RNA, 19 nt, Artificial Sequence
  Description of Artificial Sequence: Synthetic oligonucleotide
cacuguagcuugucucgug

SEQ ID NO: 1161472 - RNA, 19 nt, Artificial Sequence
  Description of Artificial Sequence: Synthetic oligonucleotide
uucuuacgcucagggacca

SEQ ID NO: 1161473 - RNA, 19 nt, Artificial Sequence
  Description of Artificial Sequence: Synthetic oligonucleotide
cucguggaccaucuuguca

SEQ ID NO: 1161474 - RNA, 19 nt, Artificial Sequence
  Description of Artificial Sequence: Synthetic oligonucleotide
uccggcagcaaagggcugu

SEQ ID NO: 1161475 - RNA, 19 nt, Artificial Sequence
  Description of Artificial Sequence: Synthetic oligonucleotide
ucgcuguagaggcuucgua

SEQ ID NO: 1161476 - RNA, 19 nt, Artificial Sequence
  Description of Artificial Sequence: Synthetic oligonucleotide
uccucucggauuugccuau

SEQ ID NO: 1161477 - RNA, 19 nt, Artificial Sequence
  Description of Artificial Sequence: Synthetic oligonucleotide
cucucggauuugccuauug

SEQ ID NO: 1161478 - RNA, 19 nt, Artificial Sequence
  Description of Artificial Sequence: Synthetic oligonucleotide
ggacccggcuccuucgggg

SEQ ID NO: 1161479 - RNA, 19 nt, Artificial Sequence
  Description of Artificial Sequence: Synthetic oligonucleotide
agccgguuuuauuuugauu

SEQ ID NO: 1161480 - RNA, 19 nt, Artificial Sequence
  Description of Artificial Sequence: Synthetic oligonucleotide
gcuucacucuucaaaggug

SEQ ID NO: 1161481 - RNA, 19 nt, Artificial Sequence
  Description of Artificial Sequence: Synthetic oligonucleotide
gggaucccucaauauauuc

SEQ ID NO: 1161482 - RNA, 19 nt, Artificial Sequence
  Description of Artificial Sequence: Synthetic oligonucleotide
cuucguauucuucugcgau

SEQ ID NO: 1161483 - RNA, 19 nt, Artificial Sequence
  Description of Artificial Sequence: Synthetic oligonucleotide
gggaccuugauccuuggcu

SEQ ID NO: 1161484 - RNA, 19 nt, Artificial Sequence
  Description of Artificial Sequence: Synthetic oligonucleotide
gacgcaccauccaggccgg

SEQ ID NO: 1161485 - RNA, 19 nt, Artificial Sequence
  Description of Artificial Sequence: Synthetic oligonucleotide
gcccugggaauacagcacc

SEQ ID NO: 1161486 - RNA, 19 nt, Artificial Sequence
  Description of Artificial Sequence: Synthetic oligonucleotide
uccuuuguuggggcuggca

SEQ ID NO: 1161487 - RNA, 19 nt, Artificial Sequence
  Description of Artificial Sequence: Synthetic oligonucleotide
gcuacaaacacagaaucau

SEQ ID NO: 1161488 - RNA, 19 nt, Artificial Sequence
  Description of Artificial Sequence: Synthetic oligonucleotide
accaugggaccuugauccu

SEQ ID NO: 1161489 - RNA, 19 nt, Artificial Sequence
  Description of Artificial Sequence: Synthetic oligonucleotide
agagccgguuuuauuuuga

SEQ ID NO: 1161490 - RNA, 19 nt, Artificial Sequence
  Description of Artificial Sequence: Synthetic oligonucleotide
gggaagcacuuccaucgcc

SEQ ID NO: 1161491 - RNA, 19 nt, Artificial Sequence
  Description of Artificial Sequence: Synthetic oligonucleotide
ugauuccugcaagacuaua

SEQ ID NO: 1161492 - RNA, 19 nt, Artificial Sequence
  Description of Artificial Sequence: Synthetic oligonucleotide
uggcuacaggaccuugauu

SEQ ID NO: 1161493 - RNA, 19 nt, Artificial Sequence
  Description of Artificial Sequence: Synthetic oligonucleotide
uggggucuuggcucuucac

SEQ ID NO: 1161494 - RNA, 19 nt, Artificial Sequence
  Description of Artificial Sequence: Synthetic oligonucleotide
uggguaugcuaagccuuga

SEQ ID NO: 1161495 - RNA, 19 nt, Artificial Sequence
  Description of Artificial Sequence: Synthetic oligonucleotide
ucgucaccuccucucggau

SEQ ID NO: 1161496 - RNA, 19 nt, Artificial Sequence
  Description of Artificial Sequence: Synthetic oligonucleotide
acaguuucaugcagauuaa

SEQ ID NO: 1161497 - RNA, 19 nt, Artificial Sequence
  Description of Artificial Sequence: Synthetic oligonucleotide
gucaccauccaugccgguc

SEQ ID NO: 1161498 - RNA, 19 nt, Artificial Sequence
  Description of Artificial Sequence: Synthetic oligonucleotide
cucgucaccuccucucgga

SEQ ID NO: 1161499 - RNA, 19 nt, Artificial Sequence
  Description of Artificial Sequence: Synthetic oligonucleotide
ggaaucaaggggaucccuc

SEQ ID NO: 1161500 - RNA, 19 nt, Artificial Sequence
  Description of Artificial Sequence: Synthetic oligonucleotide
gaugccauguggucuugau

SEQ ID NO: 1161501 - RNA, 19 nt, Artificial Sequence
  Description of Artificial Sequence: Synthetic oligonucleotide
gggguguagggcuuugguc

SEQ ID NO: 1161502 - RNA, 19 nt, Artificial Sequence
  Description of Artificial Sequence: Synthetic oligonucleotide
uggcuggugcuaagaugac

SEQ ID NO: 1161503 - RNA, 19 nt, Artificial Sequence
  Description of Artificial Sequence: Synthetic oligonucleotide
cuugucucguggaccaucu

SEQ ID NO: 1161504 - RNA, 19 nt, Artificial Sequence
  Description of Artificial Sequence: Synthetic oligonucleotide
gcuaagaugacagaaucuu

SEQ ID NO: 1161505 - RNA, 19 nt, Artificial Sequence
  Description of Artificial Sequence: Synthetic oligonucleotide
cucuggguaugcuaagccu

SEQ ID NO: 1161506 - RNA, 19 nt, Artificial Sequence
  Description of Artificial Sequence: Synthetic oligonucleotide
cuguagcuugucucgugga

SEQ ID NO: 1161507 - RNA, 19 nt, Artificial Sequence
  Description of Artificial Sequence: Synthetic oligonucleotide
gugcccuucggugcgaguc

SEQ ID NO: 1161508 - RNA, 19 nt, Artificial Sequence
  Description of Artificial Sequence: Synthetic oligonucleotide
cuuggcuagugcugggaua

SEQ ID NO: 1161509 - RNA, 19 nt, Artificial Sequence
  Description of Artificial Sequence: Synthetic oligonucleotide
acgcucgucugcaccagag

SEQ ID NO: 1161510 - RNA, 19 nt, Artificial Sequence
  Description of Artificial Sequence: Synthetic oligonucleotide
ugccacggcgcgcccuuug

SEQ ID NO: 1161511 - RNA, 19 nt, Artificial Sequence
  Description of Artificial Sequence: Synthetic oligonucleotide
augcuaagccuugauucuu

SEQ ID NO: 1161512 - RNA, 19 nt, Artificial Sequence
  Description of Artificial Sequence: Synthetic oligonucleotide
gggccauugggccuagauc

SEQ ID NO: 1161513 - RNA, 19 nt, Artificial Sequence
  Description of Artificial Sequence: Synthetic oligonucleotide
ggacuucggauccucaacu

SEQ ID NO: 1161514 - RNA, 19 nt, Artificial Sequence
  Description of Artificial Sequence: Synthetic oligonucleotide
gggaauacagcaccuuggu

SEQ ID NO: 1161515 - RNA, 19 nt, Artificial Sequence
  Description of Artificial Sequence: Synthetic oligonucleotide
cucagaugccauguggucu

SEQ ID NO: 1161516 - RNA, 19 nt, Artificial Sequence
  Description of Artificial Sequence: Synthetic oligonucleotide
ggugcuacaaacacagaau

SEQ ID NO: 1161517 - RNA, 19 nt, Artificial Sequence
  Description of Artificial Sequence: Synthetic oligonucleotide
cagauuaaauaugugucuu

SEQ ID NO: 1161518 - RNA, 19 nt, Artificial Sequence
  Description of Artificial Sequence: Synthetic oligonucleotide
cggggauuccuugaaaggc

SEQ ID NO: 1161519 - RNA, 19 nt, Artificial Sequence
  Description of Artificial Sequence: Synthetic oligonucleotide
ggcuagugcugggauaaug

SEQ ID NO: 1161520 - RNA, 19 nt, Artificial Sequence
  Description of Artificial Sequence: Synthetic oligonucleotide
gacccggcuccuucgggga

SEQ ID NO: 1161521 - RNA, 19 nt, Artificial Sequence
  Description of Artificial Sequence: Synthetic oligonucleotide
ggacaauugagggccucug

SEQ ID NO: 1161522 - RNA, 19 nt, Artificial Sequence
  Description of Artificial Sequence: Synthetic oligonucleotide
uccaugcucugaacucguu

SEQ ID NO: 1161523 - RNA, 19 nt, Artificial Sequence
  Description of Artificial Sequence: Synthetic oligonucleotide
ugccccucagagcgacgca

SEQ ID NO: 1161524 - RNA, 19 nt, Artificial Sequence
  Description of Artificial Sequence: Synthetic oligonucleotide
ccuuugccaccuucgggcc

SEQ ID NO: 1161525 - RNA, 19 nt, Artificial Sequence
  Description of Artificial Sequence: Synthetic oligonucleotide
gcuaagccuugauucuuca

SEQ ID NO: 1161526 - RNA, 19 nt, Artificial Sequence
  Description of Artificial Sequence: Synthetic oligonucleotide
ugggaccaugggaccuuga

SEQ ID NO: 1161527 - RNA, 19 nt, Artificial Sequence
  Description of Artificial Sequence: Synthetic oligonucleotide
cugcggcuugggcauggcc

SEQ ID NO: 1161528 - RNA, 19 nt, Artificial Sequence
  Description of Artificial Sequence: Synthetic oligonucleotide
gcuucguauucuucugcga

SEQ ID NO: 1161529 - RNA, 19 nt, Artificial Sequence
  Description of Artificial Sequence: Synthetic oligonucleotide
ggaucccucaauauauucu

SEQ ID NO: 1161530 - RNA, 19 nt, Artificial Sequence
  Description of Artificial Sequence: Synthetic oligonucleotide
cuuugauccuuguguggcu

SEQ ID NO: 1161531 - RNA, 19 nt, Artificial Sequence
  Description of Artificial Sequence: Synthetic oligonucleotide
cugggauuauagggucuug

SEQ ID NO: 1161532 - RNA, 19 nt, Artificial Sequence
  Description of Artificial Sequence: Synthetic oligonucleotide
uucugcgauccauggccuu

SEQ ID NO: 1161533 - RNA, 19 nt, Artificial Sequence
  Description of Artificial Sequence: Synthetic oligonucleotide
gguaugcuaagccuugauu

SEQ ID NO: 1161534 - RNA, 19 nt, Artificial Sequence
  Description of Artificial Sequence: Synthetic oligonucleotide
gguuggacccggcuccuuc

SEQ ID NO: 1161535 - RNA, 19 nt, Artificial Sequence
  Description of Artificial Sequence: Synthetic oligonucleotide
cacggcgcgcccuuugcca

SEQ ID NO: 1161536 - RNA, 19 nt, Artificial Sequence
  Description of Artificial Sequence: Synthetic oligonucleotide
ucgugccccucagagcgac

SEQ ID NO: 1161537 - RNA, 19 nt, Artificial Sequence
  Description of Artificial Sequence: Synthetic oligonucleotide
cagugggcuuauuggccuc

SEQ ID NO: 1161538 - RNA, 19 nt, Artificial Sequence
  Description of Artificial Sequence: Synthetic oligonucleotide
uuguuggggcuggcaccgg

SEQ ID NO: 1161539 - RNA, 19 nt, Artificial Sequence
  Description of Artificial Sequence: Synthetic oligonucleotide
ccucaacucuugcugggac

SEQ ID NO: 1161540 - RNA, 19 nt, Artificial Sequence
  Description of Artificial Sequence: Synthetic oligonucleotide
cagugguuguuugcucgug

SEQ ID NO: 1161541 - RNA, 19 nt, Artificial Sequence
  Description of Artificial Sequence: Synthetic oligonucleotide
ccaccuucgggcccugcgg

SEQ ID NO: 1161542 - RNA, 19 nt, Artificial Sequence
  Description of Artificial Sequence: Synthetic oligonucleotide
gggauuauagggucuugau

SEQ ID NO: 1161543 - RNA, 19 nt, Artificial Sequence
  Description of Artificial Sequence: Synthetic oligonucleotide
gggcaucugccacggcgcg

SEQ ID NO: 1161544 - RNA, 19 nt, Artificial Sequence
  Description of Artificial Sequence: Synthetic oligonucleotide
cagagcgacgcaccaucca

SEQ ID NO: 1161545 - RNA, 19 nt, Artificial Sequence
  Description of Artificial Sequence: Synthetic oligonucleotide
agucaccauccaugccggu

SEQ ID NO: 1161546 - RNA, 19 nt, Artificial Sequence
  Description of Artificial Sequence: Synthetic oligonucleotide
ccucgugcccuucggugcg

SEQ ID NO: 1161547 - RNA, 19 nt, Artificial Sequence
  Description of Artificial Sequence: Synthetic oligonucleotide
ggugcuaagaugacagaau

SEQ ID NO: 1161548 - RNA, 19 nt, Artificial Sequence
  Description of Artificial Sequence: Synthetic oligonucleotide
gagccgguuuuauuuugau

SEQ ID NO: 1161549 - RNA, 19 nt, Artificial Sequence
  Description of Artificial Sequence: Synthetic oligonucleotide
caaggggaucccucaauau

SEQ ID NO: 1161550 - RNA, 19 nt, Artificial Sequence
  Description of Artificial Sequence: Synthetic oligonucleotide
uugucucguggaccaucuu

SEQ ID NO: 1161551 - RNA, 19 nt, Artificial Sequence
  Description of Artificial Sequence: Synthetic oligonucleotide
cuucugcgauccauggccu

SEQ ID NO: 1161552 - RNA, 19 nt, Artificial Sequence
  Description of Artificial Sequence: Synthetic oligonucleotide
ggggaaucaaggggauccc

SEQ ID NO: 1161553 - RNA, 19 nt, Artificial Sequence
  Description of Artificial Sequence: Synthetic oligonucleotide
ucgugcccuucggugcgag

SEQ ID NO: 1161554 - RNA, 19 nt, Artificial Sequence
  Description of Artificial Sequence: Synthetic oligonucleotide
caguuucaugcagauuaaa

SEQ ID NO: 1161555 - RNA, 19 nt, Artificial Sequence
  Description of Artificial Sequence: Synthetic oligonucleotide
gcgcccuuugccaccuucg

SEQ ID NO: 1161556 - RNA, 19 nt, Artificial Sequence
  Description of Artificial Sequence: Synthetic oligonucleotide
gugucacgcucgucugcac

SEQ ID NO: 1161557 - RNA, 19 nt, Artificial Sequence
  Description of Artificial Sequence: Synthetic oligonucleotide
ggcuuugaucggcuucaca

SEQ ID NO: 1161558 - RNA, 19 nt, Artificial Sequence
  Description of Artificial Sequence: Synthetic oligonucleotide
cuaagccuugauucuucau

SEQ ID NO: 1161559 - RNA, 19 nt, Artificial Sequence
  Description of Artificial Sequence: Synthetic oligonucleotide
ccuugauccuuggcuagug

SEQ ID NO: 1161560 - RNA, 19 nt, Artificial Sequence
  Description of Artificial Sequence: Synthetic oligonucleotide
gccuuguugucagcugcag

SEQ ID NO: 1161561 - RNA, 19 nt, Artificial Sequence
  Description of Artificial Sequence: Synthetic oligonucleotide
gcgagucaccauccaugcc

SEQ ID NO: 1161562 - RNA, 19 nt, Artificial Sequence
  Description of Artificial Sequence: Synthetic oligonucleotide
cucguuccuguaggagcug

SEQ ID NO: 1161563 - RNA, 19 nt, Artificial Sequence
  Description of Artificial Sequence: Synthetic oligonucleotide
gcuguagaggcuucguauu

SEQ ID NO: 1161564 - RNA, 19 nt, Artificial Sequence
  Description of Artificial Sequence: Synthetic oligonucleotide
cagaaucauaacccuucau

SEQ ID NO: 1161565 - RNA, 19 nt, Artificial Sequence
  Description of Artificial Sequence: Synthetic oligonucleotide
guacuggggcuuggcuuug

SEQ ID NO: 1161566 - RNA, 19 nt, Artificial Sequence
  Description of Artificial Sequence: Synthetic oligonucleotide
ggacuccggggcuuugauc

SEQ ID NO: 1161567 - RNA, 19 nt, Artificial Sequence
  Description of Artificial Sequence: Synthetic oligonucleotide
gcuugucucguggaccauc

SEQ ID NO: 1161568 - RNA, 19 nt, Artificial Sequence
  Description of Artificial Sequence: Synthetic oligonucleotide
ccgccuuccugggucaggg

SEQ ID NO: 1161569 - RNA, 19 nt, Artificial Sequence
  Description of Artificial Sequence: Synthetic oligonucleotide
ggugcgagucaccauccau

SEQ ID NO: 1161570 - RNA, 19 nt, Artificial Sequence
  Description of Artificial Sequence: Synthetic oligonucleotide
ccuucggugcgagucacca

SEQ ID NO: 1161571 - RNA, 19 nt, Artificial Sequence
  Description of Artificial Sequence: Synthetic oligonucleotide
gucuugauccuuggcuggu

SEQ ID NO: 1161572 - RNA, 19 nt, Artificial Sequence
  Description of Artificial Sequence: Synthetic oligonucleotide
caggccggccccgccuucc

SEQ ID NO: 1161573 - RNA, 19 nt, Artificial Sequence
  Description of Artificial Sequence: Synthetic oligonucleotide
aucugccacggcgcgcccu

SEQ ID NO: 1161574 - RNA, 19 nt, Artificial Sequence
  Description of Artificial Sequence: Synthetic oligonucleotide
gccacggcgcgcccuuugc

SEQ ID NO: 1161575 - RNA, 19 nt, Artificial Sequence
  Description of Artificial Sequence: Synthetic oligonucleotide
gcgacgcaccauccaggcc

SEQ ID NO: 1161576 - RNA, 19 nt, Artificial Sequence
  Description of Artificial Sequence: Synthetic oligonucleotide
gggaccaugggaccuugau

SEQ ID NO: 1161577 - RNA, 19 nt, Artificial Sequence
  Description of Artificial Sequence: Synthetic oligonucleotide
acgcaccauccaggccggc

SEQ ID NO: 1161578 - RNA, 19 nt, Artificial Sequence
  Description of Artificial Sequence: Synthetic oligonucleotide
uggcuagugcugggauaau

SEQ ID NO: 1161579 - RNA, 19 nt, Artificial Sequence
  Description of Artificial Sequence: Synthetic oligonucleotide
ccuccccuuugaacugggc

SEQ ID NO: 1161580 - RNA, 19 nt, Artificial Sequence
  Description of Artificial Sequence: Synthetic oligonucleotide
gccccucagagcgacgcac

SEQ ID NO: 1161581 - RNA, 19 nt, Artificial Sequence
  Description of Artificial Sequence: Synthetic oligonucleotide
ggaccgccuuccuggguca

SEQ ID NO: 1161582 - RNA, 19 nt, Artificial Sequence
  Description of Artificial Sequence: Synthetic oligonucleotide
cacagggacuugauccuuu

SEQ ID NO: 1161583 - RNA, 19 nt, Artificial Sequence
  Description of Artificial Sequence: Synthetic oligonucleotide
cucgugccccucagagcga

SEQ ID NO: 1161584 - RNA, 19 nt, Artificial Sequence
  Description of Artificial Sequence: Synthetic oligonucleotide
ggcaucugccacggcgcgc

SEQ ID NO: 1161585 - RNA, 19 nt, Artificial Sequence
  Description of Artificial Sequence: Synthetic oligonucleotide
cuccuugugucacgcucgu

SEQ ID NO: 1161586 - RNA, 19 nt, Artificial Sequence
  Description of Artificial Sequence: Synthetic oligonucleotide
ggguaugcuaagccuugau

SEQ ID NO: 1161587 - RNA, 19 nt, Artificial Sequence
  Description of Artificial Sequence: Synthetic oligonucleotide
ccacggcgcgcccuuugcc

SEQ ID NO: 1161588 - RNA, 19 nt, Artificial Sequence
  Description of Artificial Sequence: Synthetic oligonucleotide
ggggccauugggccuagau

SEQ ID NO: 1161589 - RNA, 19 nt, Artificial Sequence
  Description of Artificial Sequence: Synthetic oligonucleotide
cucgcuguagaggcuucgu

SEQ ID NO: 1161590 - RNA, 19 nt, Artificial Sequence
  Description of Artificial Sequence: Synthetic oligonucleotide
cccuucggugcgagucacc

SEQ ID NO: 1161591 - RNA, 19 nt, Artificial Sequence
  Description of Artificial Sequence: Synthetic oligonucleotide
cugggaccacagggacuug

SEQ ID NO: 1161592 - RNA, 19 nt, Artificial Sequence
  Description of Artificial Sequence: Synthetic oligonucleotide
cgcuguagaggcuucguau

SEQ ID NO: 1161593 - RNA, 19 nt, Artificial Sequence
  Description of Artificial Sequence: Synthetic oligonucleotide
cugcgauccauggccuugu

SEQ ID NO: 1161594 - RNA, 19 nt, Artificial Sequence
  Description of Artificial Sequence: Synthetic oligonucleotide
ccacuguaucuguaccugu

SEQ ID NO: 1161595 - RNA, 19 nt, Artificial Sequence
  Description of Artificial Sequence: Synthetic oligonucleotide
ccagugguuguuugcucgu

SEQ ID NO: 1161596 - RNA, 19 nt, Artificial Sequence
  Description of Artificial Sequence: Synthetic oligonucleotide
cccugcggcuugggcaugg

SEQ ID NO: 1161597 - RNA, 19 nt, Artificial Sequence
  Description of Artificial Sequence: Synthetic oligonucleotide
ccugggaccacagggacuu

SEQ ID NO: 1161598 - RNA, 19 nt, Artificial Sequence
  Description of Artificial Sequence: Synthetic oligonucleotide
ggggugaaggugagacugu

SEQ ID NO: 1161599 - RNA, 19 nt, Artificial Sequence
  Description of Artificial Sequence: Synthetic oligonucleotide
uggggccauugggccuaga

SEQ ID NO: 1161600 - RNA, 19 nt, Artificial Sequence
  Description of Artificial Sequence: Synthetic oligonucleotide
ggcucgcuguagaggcuuc

SEQ ID NO: 1161601 - RNA, 19 nt, Artificial Sequence
  Description of Artificial Sequence: Synthetic oligonucleotide
cgugccccucagagcgacg

SEQ ID NO: 1161602 - RNA, 19 nt, Artificial Sequence
  Description of Artificial Sequence: Synthetic oligonucleotide
gccaugacuguggcauucu

SEQ ID NO: 1161603 - RNA, 19 nt, Artificial Sequence
  Description of Artificial Sequence: Synthetic oligonucleotide
cucgugcccuucggugcga

SEQ ID NO: 1161604 - RNA, 19 nt, Artificial Sequence
  Description of Artificial Sequence: Synthetic oligonucleotide
cggauccucaacucuugcu

SEQ ID NO: 1161605 - RNA, 19 nt, Artificial Sequence
  Description of Artificial Sequence: Synthetic oligonucleotide
gccauugggccuagauccu

SEQ ID NO: 1161606 - RNA, 19 nt, Artificial Sequence
  Description of Artificial Sequence: Synthetic oligonucleotide
cccugggaauacagcaccu

SEQ ID NO: 1161607 - RNA, 19 nt, Artificial Sequence
  Description of Artificial Sequence: Synthetic oligonucleotide
cgcgcccuuugccaccuuc

SEQ ID NO: 1161608 - RNA, 19 nt, Artificial Sequence
  Description of Artificial Sequence: Synthetic oligonucleotide
ccugcggcuugggcauggc

SEQ ID NO: 1161609 - RNA, 19 nt, Artificial Sequence
  Description of Artificial Sequence: Synthetic oligonucleotide
cgguuuuauuuugauuccu

SEQ ID NO: 1161610 - RNA, 19 nt, Artificial Sequence
  Description of Artificial Sequence: Synthetic oligonucleotide
ggggaucccucaauauauu

SEQ ID NO: 1161611 - RNA, 19 nt, Artificial Sequence
  Description of Artificial Sequence: Synthetic oligonucleotide
gggaccacaggagcuccau

SEQ ID NO: 1161612 - RNA, 19 nt, Artificial Sequence
  Description of Artificial Sequence: Synthetic oligonucleotide
cggcgcgcccuuugccacc

SEQ ID NO: 1161613 - RNA, 19 nt, Artificial Sequence
  Description of Artificial Sequence: Synthetic oligonucleotide
cuguaggaccuugguccuu

SEQ ID NO: 1161614 - RNA, 19 nt, Artificial Sequence
  Description of Artificial Sequence: Synthetic oligonucleotide
ggcgcgcccuuugccaccu

SEQ ID NO: 1161615 - RNA, 19 nt, Artificial Sequence
  Description of Artificial Sequence: Synthetic oligonucleotide
ccaggccggccccgccuuc

SEQ ID NO: 1161616 - RNA, 19 nt, Artificial Sequence
  Description of Artificial Sequence: Synthetic oligonucleotide
cggugcgagucaccaucca

SEQ ID NO: 1161617 - RNA, 19 nt, Artificial Sequence
  Description of Artificial Sequence: Synthetic oligonucleotide
gcauggccagugguuguuu

SEQ ID NO: 1161618 - RNA, 19 nt, Artificial Sequence
  Description of Artificial Sequence: Synthetic oligonucleotide
ccauugggccuagauccuu

SEQ ID NO: 1161619 - RNA, 19 nt, Artificial Sequence
  Description of Artificial Sequence: Synthetic oligonucleotide
ccucagagcgacgcaccau

SEQ ID NO: 1161620 - RNA, 19 nt, Artificial Sequence
  Description of Artificial Sequence: Synthetic oligonucleotide
gccccgccuuccuccuugu

SEQ ID NO: 1161621 - RNA, 19 nt, Artificial Sequence
  Description of Artificial Sequence: Synthetic oligonucleotide
ccggggcuuugauccuugu

SEQ ID NO: 1161622 - RNA, 19 nt, Artificial Sequence
  Description of Artificial Sequence: Synthetic oligonucleotide
ccucucggauuugccuauu

SEQ ID NO: 1161623 - RNA, 19 nt, Artificial Sequence
  Description of Artificial Sequence: Synthetic oligonucleotide
cugccacggcgcgcccuuu

SEQ ID NO: 1161624 - RNA, 19 nt, Artificial Sequence
  Description of Artificial Sequence: Synthetic oligonucleotide
gcgcgcccuuugccaccuu

SEQ ID NO: 1161625 - RNA, 19 nt, Artificial Sequence
  Description of Artificial Sequence: Synthetic oligonucleotide
uggagugacaucaauaugg

SEQ ID NO: 1161626 - RNA, 19 nt, Artificial Sequence
  Description of Artificial Sequence: Synthetic oligonucleotide
aacuguaggauguagaacu

SEQ ID NO: 1161627 - RNA, 19 nt, Artificial Sequence
  Description of Artificial Sequence: Synthetic oligonucleotide
ucuaaguaaaccccgacag

SEQ ID NO: 1161628 - RNA, 19 nt, Artificial Sequence
  Description of Artificial Sequence: Synthetic oligonucleotide
ugagaaagaguuaaguaag

SEQ ID NO: 1161629 - RNA, 19 nt, Artificial Sequence
  Description of Artificial Sequence: Synthetic oligonucleotide
aaagaguuaaguaagccag

SEQ ID NO: 1161630 - RNA, 19 nt, Artificial Sequence
  Description of Artificial Sequence: Synthetic oligonucleotide
uuugcuagaaaacuagucu

SEQ ID NO: 1161631 - RNA, 19 nt, Artificial Sequence
  Description of Artificial Sequence: Synthetic oligonucleotide
gaaaucagagccuggauag

SEQ ID NO: 1161632 - RNA, 19 nt, Artificial Sequence
  Description of Artificial Sequence: Synthetic oligonucleotide
auuucagcaaaccuggguc

SEQ ID NO: 1161633 - RNA, 19 nt, Artificial Sequence
  Description of Artificial Sequence: Synthetic oligonucleotide
aucaauauggcauuugcug

SEQ ID NO: 1161634 - RNA, 19 nt, Artificial Sequence
  Description of Artificial Sequence: Synthetic oligonucleotide
uuaucuuggagugacauca

SEQ ID NO: 1161635 - RNA, 19 nt, Artificial Sequence
  Description of Artificial Sequence: Synthetic oligonucleotide
ugaggagucacaaugaaua

SEQ ID NO: 1161636 - RNA, 19 nt, Artificial Sequence
  Description of Artificial Sequence: Synthetic oligonucleotide
uugcaugacaucacaaccg

SEQ ID NO: 1161637 - RNA, 19 nt, Artificial Sequence
  Description of Artificial Sequence: Synthetic oligonucleotide
ucugagacuaaacaccuca

SEQ ID NO: 1161638 - RNA, 19 nt, Artificial Sequence
  Description of Artificial Sequence: Synthetic oligonucleotide
agaauugcacuccauguuc

SEQ ID NO: 1161639 - RNA, 19 nt, Artificial Sequence
  Description of Artificial Sequence: Synthetic oligonucleotide
agucggaugagccagcagg

SEQ ID NO: 1161640 - RNA, 19 nt, Artificial Sequence
  Description of Artificial Sequence: Synthetic oligonucleotide
uagucuugaaaauacaaau

SEQ ID NO: 1161641 - RNA, 19 nt, Artificial Sequence
  Description of Artificial Sequence: Synthetic oligonucleotide
aucacaaccgaugucaggg

SEQ ID NO: 1161642 - RNA, 19 nt, Artificial Sequence
  Description of Artificial Sequence: Synthetic oligonucleotide
gaagcaaauucccaagggc

SEQ ID NO: 1161643 - RNA, 19 nt, Artificial Sequence
  Description of Artificial Sequence: Synthetic oligonucleotide
ucuaguagauccuauuuuc

SEQ ID NO: 1161644 - RNA, 19 nt, Artificial Sequence
  Description of Artificial Sequence: Synthetic oligonucleotide
agucacaaugaauagccag

SEQ ID NO: 1161645 - RNA, 19 nt, Artificial Sequence
  Description of Artificial Sequence: Synthetic oligonucleotide
aauggccgguaauggaacc

SEQ ID NO: 1161646 - RNA, 19 nt, Artificial Sequence
  Description of Artificial Sequence: Synthetic oligonucleotide
uaaguaaaccccgacagga

SEQ ID NO: 1161647 - RNA, 19 nt, Artificial Sequence
  Description of Artificial Sequence: Synthetic oligonucleotide
aguaaaccccgacaggacg

SEQ ID NO: 1161648 - RNA, 19 nt, Artificial Sequence
  Description of Artificial Sequence: Synthetic oligonucleotide
agauccuauuuucuaaguc

SEQ ID NO: 1161649 - RNA, 19 nt, Artificial Sequence
  Description of Artificial Sequence: Synthetic oligonucleotide
ucuguuagguugcccaggg

SEQ ID NO: 1161650 - RNA, 19 nt, Artificial Sequence
  Description of Artificial Sequence: Synthetic oligonucleotide
ucaagagagucuuguaugc

SEQ ID NO: 1161651 - RNA, 19 nt, Artificial Sequence
  Description of Artificial Sequence: Synthetic oligonucleotide
ucugaugcgcacuuugaag

SEQ ID NO: 1161652 - RNA, 19 nt, Artificial Sequence
  Description of Artificial Sequence: Synthetic oligonucleotide
ugagacuaaacaccucaag

SEQ ID NO: 1161653 - RNA, 19 nt, Artificial Sequence
  Description of Artificial Sequence: Synthetic oligonucleotide
uguaggauguagaacugga

SEQ ID NO: 1161654 - RNA, 19 nt, Artificial Sequence
  Description of Artificial Sequence: Synthetic oligonucleotide
uucuaaguaaaccccgaca

SEQ ID NO: 1161655 - RNA, 19 nt, Artificial Sequence
  Description of Artificial Sequence: Synthetic oligonucleotide
uggggcaugguucauaggu

SEQ ID NO: 1161656 - RNA, 19 nt, Artificial Sequence
  Description of Artificial Sequence: Synthetic oligonucleotide
ugagcgaacuguucuagag

SEQ ID NO: 1161657 - RNA, 19 nt, Artificial Sequence
  Description of Artificial Sequence: Synthetic oligonucleotide
accaacgcauuccagaucu

SEQ ID NO: 1161658 - RNA, 19 nt, Artificial Sequence
  Description of Artificial Sequence: Synthetic oligonucleotide
cauguugacgauuagagua

SEQ ID NO: 1161659 - RNA, 19 nt, Artificial Sequence
  Description of Artificial Sequence: Synthetic oligonucleotide
aacaccucaagaccuccag

SEQ ID NO: 1161660 - RNA, 19 nt, Artificial Sequence
  Description of Artificial Sequence: Synthetic oligonucleotide
aauacaaauucuaguagau

SEQ ID NO: 1161661 - RNA, 19 nt, Artificial Sequence
  Description of Artificial Sequence: Synthetic oligonucleotide
cucaagagagucuuguaug

SEQ ID NO: 1161662 - RNA, 19 nt, Artificial Sequence
  Description of Artificial Sequence: Synthetic oligonucleotide
ucacaaugaauagccaggg

SEQ ID NO: 1161663 - RNA, 19 nt, Artificial Sequence
  Description of Artificial Sequence: Synthetic oligonucleotide
aauucuaguagauccuauu

SEQ ID NO: 1161664 - RNA, 19 nt, Artificial Sequence
  Description of Artificial Sequence: Synthetic oligonucleotide
acgcauuccagaucugagc

SEQ ID NO: 1161665 - RNA, 19 nt, Artificial Sequence
  Description of Artificial Sequence: Synthetic oligonucleotide
uuaugacugcggaagggag

SEQ ID NO: 1161666 - RNA, 19 nt, Artificial Sequence
  Description of Artificial Sequence: Synthetic oligonucleotide
aaaccugggucuuucuaug

SEQ ID NO: 1161667 - RNA, 19 nt, Artificial Sequence
  Description of Artificial Sequence: Synthetic oligonucleotide
ucagaauggccgguaaugg

SEQ ID NO: 1161668 - RNA, 19 nt, Artificial Sequence
  Description of Artificial Sequence: Synthetic oligonucleotide
gucacaaugaauagccagg

SEQ ID NO: 1161669 - RNA, 19 nt, Artificial Sequence
  Description of Artificial Sequence: Synthetic oligonucleotide
aaugaauagccaggguauc

SEQ ID NO: 1161670 - RNA, 19 nt, Artificial Sequence
  Description of Artificial Sequence: Synthetic oligonucleotide
acugacacuuccuccagag

SEQ ID NO: 1161671 - RNA, 19 nt, Artificial Sequence
  Description of Artificial Sequence: Synthetic oligonucleotide
aagucacugaucugaugag

SEQ ID NO: 1161672 - RNA, 19 nt, Artificial Sequence
  Description of Artificial Sequence: Synthetic oligonucleotide
ugaaucgcagacugcaaca

SEQ ID NO: 1161673 - RNA, 19 nt, Artificial Sequence
  Description of Artificial Sequence: Synthetic oligonucleotide
uggauagacuccucaauga

SEQ ID NO: 1161674 - RNA, 19 nt, Artificial Sequence
  Description of Artificial Sequence: Synthetic oligonucleotide
gauccuauuuucuaagucu

SEQ ID NO: 1161675 - RNA, 19 nt, Artificial Sequence
  Description of Artificial Sequence: Synthetic oligonucleotide
uucauaggugcuucccacg

SEQ ID NO: 1161676 - RNA, 19 nt, Artificial Sequence
  Description of Artificial Sequence: Synthetic oligonucleotide
ugacgauuagaguaucugu

SEQ ID NO: 1161677 - RNA, 19 nt, Artificial Sequence
  Description of Artificial Sequence: Synthetic oligonucleotide
uuuagugacuuaucuugga

SEQ ID NO: 1161678 - RNA, 19 nt, Artificial Sequence
  Description of Artificial Sequence: Synthetic oligonucleotide
ucuagagacccguacugug

SEQ ID NO: 1161679 - RNA, 19 nt, Artificial Sequence
  Description of Artificial Sequence: Synthetic oligonucleotide
ugcaugacaucacaaccga

SEQ ID NO: 1161680 - RNA, 19 nt, Artificial Sequence
  Description of Artificial Sequence: Synthetic oligonucleotide
uuccuauugcauagcaagc

SEQ ID NO: 1161681 - RNA, 19 nt, Artificial Sequence
  Description of Artificial Sequence: Synthetic oligonucleotide
acgaugacccuuuuggcug

SEQ ID NO: 1161682 - RNA, 19 nt, Artificial Sequence
  Description of Artificial Sequence: Synthetic oligonucleotide
aacuggaucauauccccau

SEQ ID NO: 1161683 - RNA, 19 nt, Artificial Sequence
  Description of Artificial Sequence: Synthetic oligonucleotide
ggagucacaaugaauagcc

SEQ ID NO: 1161684 - RNA, 19 nt, Artificial Sequence
  Description of Artificial Sequence: Synthetic oligonucleotide
aggugugcgccacugugcc

SEQ ID NO: 1161685 - RNA, 19 nt, Artificial Sequence
  Description of Artificial Sequence: Synthetic oligonucleotide
uugacgauuagaguaucug

SEQ ID NO: 1161686 - RNA, 19 nt, Artificial Sequence
  Description of Artificial Sequence: Synthetic oligonucleotide
uucuaguagauccuauuuu

SEQ ID NO: 1161687 - RNA, 19 nt, Artificial Sequence
  Description of Artificial Sequence: Synthetic oligonucleotide
cacucugaccaucuggucc

SEQ ID NO: 1161688 - RNA, 19 nt, Artificial Sequence
  Description of Artificial Sequence: Synthetic oligonucleotide
uuggcgagcugacugacac

SEQ ID NO: 1161689 - RNA, 19 nt, Artificial Sequence
  Description of Artificial Sequence: Synthetic oligonucleotide
acuaaacaccucaagaccu

SEQ ID NO: 1161690 - RNA, 19 nt, Artificial Sequence
  Description of Artificial Sequence: Synthetic oligonucleotide
auugcauagcaagcauucc

SEQ ID NO: 1161691 - RNA, 19 nt, Artificial Sequence
  Description of Artificial Sequence: Synthetic oligonucleotide
guuuagugacuuaucuugg

SEQ ID NO: 1161692 - RNA, 19 nt, Artificial Sequence
  Description of Artificial Sequence: Synthetic oligonucleotide
aucauauccccauuccgcu

SEQ ID NO: 1161693 - RNA, 19 nt, Artificial Sequence
  Description of Artificial Sequence: Synthetic oligonucleotide
uuggagugacaucaauaug

SEQ ID NO: 1161694 - RNA, 19 nt, Artificial Sequence
  Description of Artificial Sequence: Synthetic oligonucleotide
auucuaguagauccuauuu

SEQ ID NO: 1161695 - RNA, 19 nt, Artificial Sequence
  Description of Artificial Sequence: Synthetic oligonucleotide
ugacuuaucuuggagugac

SEQ ID NO: 1161696 - RNA, 19 nt, Artificial Sequence
  Description of Artificial Sequence: Synthetic oligonucleotide
uuggcacgcacguuuagug

SEQ ID NO: 1161697 - RNA, 19 nt, Artificial Sequence
  Description of Artificial Sequence: Synthetic oligonucleotide
aaguaaaccccgacaggac

SEQ ID NO: 1161698 - RNA, 19 nt, Artificial Sequence
  Description of Artificial Sequence: Synthetic oligonucleotide
uccuauugcauagcaagca

SEQ ID NO: 1161699 - RNA, 19 nt, Artificial Sequence
  Description of Artificial Sequence: Synthetic oligonucleotide
uacuccugauuuuaagaac

SEQ ID NO: 1161700 - RNA, 19 nt, Artificial Sequence
  Description of Artificial Sequence: Synthetic oligonucleotide
uagaauugcacuccauguu

SEQ ID NO: 1161701 - RNA, 19 nt, Artificial Sequence
  Description of Artificial Sequence: Synthetic oligonucleotide
ucggauucccauuuaugac

SEQ ID NO: 1161702 - RNA, 19 nt, Artificial Sequence
  Description of Artificial Sequence: Synthetic oligonucleotide
cucggauucccauuuauga

SEQ ID NO: 1161703 - RNA, 19 nt, Artificial Sequence
  Description of Artificial Sequence: Synthetic oligonucleotide
aaguaagccaguaacccau

SEQ ID NO: 1161704 - RNA, 19 nt, Artificial Sequence
  Description of Artificial Sequence: Synthetic oligonucleotide
aguggguuggagaaaauga

SEQ ID NO: 1161705 - RNA, 19 nt, Artificial Sequence
  Description of Artificial Sequence: Synthetic oligonucleotide
cacaguacuugaauuccag

SEQ ID NO: 1161706 - RNA, 19 nt, Artificial Sequence
  Description of Artificial Sequence: Synthetic oligonucleotide
aauucccaagggcccggac

SEQ ID NO: 1161707 - RNA, 19 nt, Artificial Sequence
  Description of Artificial Sequence: Synthetic oligonucleotide
gagaaagaguuaaguaagc

SEQ ID NO: 1161708 - RNA, 19 nt, Artificial Sequence
  Description of Artificial Sequence: Synthetic oligonucleotide
ggaaaagucacugaucuga

SEQ ID NO: 1161709 - RNA, 19 nt, Artificial Sequence
  Description of Artificial Sequence: Synthetic oligonucleotide
aguaacccauucuaaguaa

SEQ ID NO: 1161710 - RNA, 19 nt, Artificial Sequence
  Description of Artificial Sequence: Synthetic oligonucleotide
cuagucuugaaaauacaaa

SEQ ID NO: 1161711 - RNA, 19 nt, Artificial Sequence
  Description of Artificial Sequence: Synthetic oligonucleotide
auaggugcuucccacggca

SEQ ID NO: 1161712 - RNA, 19 nt, Artificial Sequence
  Description of Artificial Sequence: Synthetic oligonucleotide
aguaucuguuagguugccc

SEQ ID NO: 1161713 - RNA, 19 nt, Artificial Sequence
  Description of Artificial Sequence: Synthetic oligonucleotide
ggaucauauccccauuccg

SEQ ID NO: 1161714 - RNA, 19 nt, Artificial Sequence
  Description of Artificial Sequence: Synthetic oligonucleotide
cauggggcaugguucauag

SEQ ID NO: 1161715 - RNA, 19 nt, Artificial Sequence
  Description of Artificial Sequence: Synthetic oligonucleotide
aacgcauuccagaucugag

SEQ ID NO: 1161716 - RNA, 19 nt, Artificial Sequence
  Description of Artificial Sequence: Synthetic oligonucleotide
aauauggcauuugcugugu

SEQ ID NO: 1161717 - RNA, 19 nt, Artificial Sequence
  Description of Artificial Sequence: Synthetic oligonucleotide
uccugaggagucacaauga

SEQ ID NO: 1161718 - RNA, 19 nt, Artificial Sequence
  Description of Artificial Sequence: Synthetic oligonucleotide
auagacuccucaaugauuu

SEQ ID NO: 1161719 - RNA, 19 nt, Artificial Sequence
  Description of Artificial Sequence: Synthetic oligonucleotide
cguuuagugacuuaucuug

SEQ ID NO: 1161720 - RNA, 19 nt, Artificial Sequence
  Description of Artificial Sequence: Synthetic oligonucleotide
uggcugagcccuuugagaa

SEQ ID NO: 1161721 - RNA, 19 nt, Artificial Sequence
  Description of Artificial Sequence: Synthetic oligonucleotide
ucugagcgaacuguucuag

SEQ ID NO: 1161722 - RNA, 19 nt, Artificial Sequence
  Description of Artificial Sequence: Synthetic oligonucleotide
uagauccuauuuucuaagu

SEQ ID NO: 1161723 - RNA, 19 nt, Artificial Sequence
  Description of Artificial Sequence: Synthetic oligonucleotide
uuguaugcaggggaaguca

SEQ ID NO: 1161724 - RNA, 19 nt, Artificial Sequence
  Description of Artificial Sequence: Synthetic oligonucleotide
ugcuuuggcacgcacguuu

SEQ ID NO: 1161725 - RNA, 19 nt, Artificial Sequence
  Description of Artificial Sequence: Synthetic oligonucleotide
uagagacccguacugugcu

SEQ ID NO: 1161726 - RNA, 19 nt, Artificial Sequence
  Description of Artificial Sequence: Synthetic oligonucleotide
ugcauugcuuuugaccuug

SEQ ID NO: 1161727 - RNA, 19 nt, Artificial Sequence
  Description of Artificial Sequence: Synthetic oligonucleotide
uagcaagcauuccaucgga

SEQ ID NO: 1161728 - RNA, 19 nt, Artificial Sequence
  Description of Artificial Sequence: Synthetic oligonucleotide
caagcuuggccucggauuc

SEQ ID NO: 1161729 - RNA, 19 nt, Artificial Sequence
  Description of Artificial Sequence: Synthetic oligonucleotide
uccagaucugagcgaacug

SEQ ID NO: 1161730 - RNA, 19 nt, Artificial Sequence
  Description of Artificial Sequence: Synthetic oligonucleotide
ccauuuaugacugcggaag

SEQ ID NO: 1161731 - RNA, 19 nt, Artificial Sequence
  Description of Artificial Sequence: Synthetic oligonucleotide
caucggacuuucauagcag

SEQ ID NO: 1161732 - RNA, 19 nt, Artificial Sequence
  Description of Artificial Sequence: Synthetic oligonucleotide
cuaaacaccucaagaccuc

SEQ ID NO: 1161733 - RNA, 19 nt, Artificial Sequence
  Description of Artificial Sequence: Synthetic oligonucleotide
gugaccaacgcauuccaga

SEQ ID NO: 1161734 - RNA, 19 nt, Artificial Sequence
  Description of Artificial Sequence: Synthetic oligonucleotide
aggcucaagagguggagca

SEQ ID NO: 1161735 - RNA, 19 nt, Artificial Sequence
  Description of Artificial Sequence: Synthetic oligonucleotide
acgauuagaguaucuguua

SEQ ID NO: 1161736 - RNA, 19 nt, Artificial Sequence
  Description of Artificial Sequence: Synthetic oligonucleotide
auuccaucggacuuucaua

SEQ ID NO: 1161737 - RNA, 19 nt, Artificial Sequence
  Description of Artificial Sequence: Synthetic oligonucleotide
guagaaaucagagccugga

SEQ ID NO: 1161738 - RNA, 19 nt, Artificial Sequence
  Description of Artificial Sequence: Synthetic oligonucleotide
uuccagaucugagcgaacu

SEQ ID NO: 1161739 - RNA, 19 nt, Artificial Sequence
  Description of Artificial Sequence: Synthetic oligonucleotide
gaucacgaugacccuuuug

SEQ ID NO: 1161740 - RNA, 19 nt, Artificial Sequence
  Description of Artificial Sequence: Synthetic oligonucleotide
aagaguuaaguaagccagu

SEQ ID NO: 1161741 - RNA, 19 nt, Artificial Sequence
  Description of Artificial Sequence: Synthetic oligonucleotide
cuuggagugacaucaauau

SEQ ID NO: 1161742 - RNA, 19 nt, Artificial Sequence
  Description of Artificial Sequence: Synthetic oligonucleotide
cacaaccgaugucagggcc

SEQ ID NO: 1161743 - RNA, 19 nt, Artificial Sequence
  Description of Artificial Sequence: Synthetic oligonucleotide
cauggagcugacccaagug

SEQ ID NO: 1161744 - RNA, 19 nt, Artificial Sequence
  Description of Artificial Sequence: Synthetic oligonucleotide
uaauggaaccacucuccaa

SEQ ID NO: 1161745 - RNA, 19 nt, Artificial Sequence
  Description of Artificial Sequence: Synthetic oligonucleotide
agcaucgcuacccgagcag

SEQ ID NO: 1161746 - RNA, 19 nt, Artificial Sequence
  Description of Artificial Sequence: Synthetic oligonucleotide
guaaaccccgacaggacgc

SEQ ID NO: 1161747 - RNA, 19 nt, Artificial Sequence
  Description of Artificial Sequence: Synthetic oligonucleotide
aguagaaaucagagccugg

SEQ ID NO: 1161748 - RNA, 19 nt, Artificial Sequence
  Description of Artificial Sequence: Synthetic oligonucleotide
cacuccauguucaaaugga

SEQ ID NO: 1161749 - RNA, 19 nt, Artificial Sequence
  Description of Artificial Sequence: Synthetic oligonucleotide
ucacaaccgaugucagggc

SEQ ID NO: 1161750 - RNA, 19 nt, Artificial Sequence
  Description of Artificial Sequence: Synthetic oligonucleotide
ucuuuguccguggaggcau

SEQ ID NO: 1161751 - RNA, 19 nt, Artificial Sequence
  Description of Artificial Sequence: Synthetic oligonucleotide
guaauggaaccacucucca

SEQ ID NO: 1161752 - RNA, 19 nt, Artificial Sequence
  Description of Artificial Sequence: Synthetic oligonucleotide
aauagccccuugccaggug

SEQ ID NO: 1161753 - RNA, 19 nt, Artificial Sequence
  Description of Artificial Sequence: Synthetic oligonucleotide
gcagauguggguccuuagg

SEQ ID NO: 1161754 - RNA, 19 nt, Artificial Sequence
  Description of Artificial Sequence: Synthetic oligonucleotide
uuuggcacgcacguuuagu

SEQ ID NO: 1161755 - RNA, 19 nt, Artificial Sequence
  Description of Artificial Sequence: Synthetic oligonucleotide
ugauuccucaugccuuggu

SEQ ID NO: 1161756 - RNA, 19 nt, Artificial Sequence
  Description of Artificial Sequence: Synthetic oligonucleotide
aaucgcagacugcaacauu

SEQ ID NO: 1161757 - RNA, 19 nt, Artificial Sequence
  Description of Artificial Sequence: Synthetic oligonucleotide
ccuagaauugcacuccaug

SEQ ID NO: 1161758 - RNA, 19 nt, Artificial Sequence
  Description of Artificial Sequence: Synthetic oligonucleotide
cauuuccuauugcauagca

SEQ ID NO: 1161759 - RNA, 19 nt, Artificial Sequence
  Description of Artificial Sequence: Synthetic oligonucleotide
agaauggccgguaauggaa

SEQ ID NO: 1161760 - RNA, 19 nt, Artificial Sequence
  Description of Artificial Sequence: Synthetic oligonucleotide
cugcccuagaauugcacuc

SEQ ID NO: 1161761 - RNA, 19 nt, Artificial Sequence
  Description of Artificial Sequence: Synthetic oligonucleotide
gucggaugagccagcaggg

SEQ ID NO: 1161762 - RNA, 19 nt, Artificial Sequence
  Description of Artificial Sequence: Synthetic oligonucleotide
agcugacccaaguggaaga

SEQ ID NO: 1161763 - RNA, 19 nt, Artificial Sequence
  Description of Artificial Sequence: Synthetic oligonucleotide
uuuggcgagcugacugaca

SEQ ID NO: 1161764 - RNA, 19 nt, Artificial Sequence
  Description of Artificial Sequence: Synthetic oligonucleotide
uccaucggacuuucauagc

SEQ ID NO: 1161765 - RNA, 19 nt, Artificial Sequence
  Description of Artificial Sequence: Synthetic oligonucleotide
ugcggcagaucugaugcgc

SEQ ID NO: 1161766 - RNA, 19 nt, Artificial Sequence
  Description of Artificial Sequence: Synthetic oligonucleotide
cccauuccgcucaagagag

SEQ ID NO: 1161767 - RNA, 19 nt, Artificial Sequence
  Description of Artificial Sequence: Synthetic oligonucleotide
gaauggccgguaauggaac

SEQ ID NO: 1161768 - RNA, 19 nt, Artificial Sequence
  Description of Artificial Sequence: Synthetic oligonucleotide
ucgcauggggcaugguuca

SEQ ID NO: 1161769 - RNA, 19 nt, Artificial Sequence
  Description of Artificial Sequence: Synthetic oligonucleotide
uggcacgcacguuuaguga

SEQ ID NO: 1161770 - RNA, 19 nt, Artificial Sequence
  Description of Artificial Sequence: Synthetic oligonucleotide
aaaccccgacaggacgcgc

SEQ ID NO: 1161771 - RNA, 19 nt, Artificial Sequence
  Description of Artificial Sequence: Synthetic oligonucleotide
ugacccuuuuggcuguguc

SEQ ID NO: 1161772 - RNA, 19 nt, Artificial Sequence
  Description of Artificial Sequence: Synthetic oligonucleotide
aagaucacgaugacccuuu

SEQ ID NO: 1161773 - RNA, 19 nt, Artificial Sequence
  Description of Artificial Sequence: Synthetic oligonucleotide
cgcauuccagaucugagcg

SEQ ID NO: 1161774 - RNA, 19 nt, Artificial Sequence
  Description of Artificial Sequence: Synthetic oligonucleotide
cgaacuguucuagagaccc

SEQ ID NO: 1161775 - RNA, 19 nt, Artificial Sequence
  Description of Artificial Sequence: Synthetic oligonucleotide
gggcaugguucauaggugc

SEQ ID NO: 1161776 - RNA, 19 nt, Artificial Sequence
  Description of Artificial Sequence: Synthetic oligonucleotide
uaucuuggagugacaucaa

SEQ ID NO: 1161777 - RNA, 19 nt, Artificial Sequence
  Description of Artificial Sequence: Synthetic oligonucleotide
cauaggugcuucccacggc

SEQ ID NO: 1161778 - RNA, 19 nt, Artificial Sequence
  Description of Artificial Sequence: Synthetic oligonucleotide
uuaagaacuguaggaugua

SEQ ID NO: 1161779 - RNA, 19 nt, Artificial Sequence
  Description of Artificial Sequence: Synthetic oligonucleotide
acccgagcaggaauccucc

SEQ ID NO: 1161780 - RNA, 19 nt, Artificial Sequence
  Description of Artificial Sequence: Synthetic oligonucleotide
agucgcauggggcaugguu

SEQ ID NO: 1161781 - RNA, 19 nt, Artificial Sequence
  Description of Artificial Sequence: Synthetic oligonucleotide
ggagugacaucaauauggc

SEQ ID NO: 1161782 - RNA, 19 nt, Artificial Sequence
  Description of Artificial Sequence: Synthetic oligonucleotide
cuaugugaguggguuggag

SEQ ID NO: 1161783 - RNA, 19 nt, Artificial Sequence
  Description of Artificial Sequence: Synthetic oligonucleotide
aucgcagacugcaacauuu

SEQ ID NO: 1161784 - RNA, 19 nt, Artificial Sequence
  Description of Artificial Sequence: Synthetic oligonucleotide
agagacccguacugugcuc

SEQ ID NO: 1161785 - RNA, 19 nt, Artificial Sequence
  Description of Artificial Sequence: Synthetic oligonucleotide
gaggcucaagagguggagc

SEQ ID NO: 1161786 - RNA, 19 nt, Artificial Sequence
  Description of Artificial Sequence: Synthetic oligonucleotide
aagcauuccaucggacuuu

SEQ ID NO: 1161787 - RNA, 19 nt, Artificial Sequence
  Description of Artificial Sequence: Synthetic oligonucleotide
cacguuuagugacuuaucu

SEQ ID NO: 1161788 - RNA, 19 nt, Artificial Sequence
  Description of Artificial Sequence: Synthetic oligonucleotide
gucgcauggggcaugguuc

SEQ ID NO: 1161789 - RNA, 19 nt, Artificial Sequence
  Description of Artificial Sequence: Synthetic oligonucleotide
gcagagucggaugagccag

SEQ ID NO: 1161790 - RNA, 19 nt, Artificial Sequence
  Description of Artificial Sequence: Synthetic oligonucleotide
auccuauuuucuaagucua

SEQ ID NO: 1161791 - RNA, 19 nt, Artificial Sequence
  Description of Artificial Sequence: Synthetic oligonucleotide
gagcgagggcugcugcagg

SEQ ID NO: 1161792 - RNA, 19 nt, Artificial Sequence
  Description of Artificial Sequence: Synthetic oligonucleotide
caaauucccaagggcccgg

SEQ ID NO: 1161793 - RNA, 19 nt, Artificial Sequence
  Description of Artificial Sequence: Synthetic oligonucleotide
uguugacgauuagaguauc

SEQ ID NO: 1161794 - RNA, 19 nt, Artificial Sequence
  Description of Artificial Sequence: Synthetic oligonucleotide
cgauuagaguaucuguuag

SEQ ID NO: 1161795 - RNA, 19 nt, Artificial Sequence
  Description of Artificial Sequence: Synthetic oligonucleotide
gacgauuagaguaucuguu

SEQ ID NO: 1161796 - RNA, 19 nt, Artificial Sequence
  Description of Artificial Sequence: Synthetic oligonucleotide
gcaaauucccaagggcccg

SEQ ID NO: 1161797 - RNA, 19 nt, Artificial Sequence
  Description of Artificial Sequence: Synthetic oligonucleotide
cagaauggccgguaaugga

SEQ ID NO: 1161798 - RNA, 19 nt, Artificial Sequence
  Description of Artificial Sequence: Synthetic oligonucleotide
aucugagcgaacuguucua

SEQ ID NO: 1161799 - RNA, 19 nt, Artificial Sequence
  Description of Artificial Sequence: Synthetic oligonucleotide
cuuuggcacgcacguuuag

SEQ ID NO: 1161800 - RNA, 19 nt, Artificial Sequence
  Description of Artificial Sequence: Synthetic oligonucleotide
caucaauauggcauuugcu

SEQ ID NO: 1161801 - RNA, 19 nt, Artificial Sequence
  Description of Artificial Sequence: Synthetic oligonucleotide
uccgcucaagagagucuug

SEQ ID NO: 1161802 - RNA, 19 nt, Artificial Sequence
  Description of Artificial Sequence: Synthetic oligonucleotide
gucuuguaugcaggggaag

SEQ ID NO: 1161803 - RNA, 19 nt, Artificial Sequence
  Description of Artificial Sequence: Synthetic oligonucleotide
agacccguacugugcucuc

SEQ ID NO: 1161804 - RNA, 19 nt, Artificial Sequence
  Description of Artificial Sequence: Synthetic oligonucleotide
cugaugagccaaggagugc

SEQ ID NO: 1161805 - RNA, 19 nt, Artificial Sequence
  Description of Artificial Sequence: Synthetic oligonucleotide
caugcacccugauuccuca

SEQ ID NO: 1161806 - RNA, 19 nt, Artificial Sequence
  Description of Artificial Sequence: Synthetic oligonucleotide
guaacccauucuaaguaaa

SEQ ID NO: 1161807 - RNA, 19 nt, Artificial Sequence
  Description of Artificial Sequence: Synthetic oligonucleotide
ucgcuacccgagcaggaau

SEQ ID NO: 1161808 - RNA, 19 nt, Artificial Sequence
  Description of Artificial Sequence: Synthetic oligonucleotide
cacgaugacccuuuuggcu

SEQ ID NO: 1161809 - RNA, 19 nt, Artificial Sequence
  Description of Artificial Sequence: Synthetic oligonucleotide
agcaaaccugggucuuucu

SEQ ID NO: 1161810 - RNA, 19 nt, Artificial Sequence
  Description of Artificial Sequence: Synthetic oligonucleotide
uggccgguaauggaaccac

SEQ ID NO: 1161811 - RNA, 19 nt, Artificial Sequence
  Description of Artificial Sequence: Synthetic oligonucleotide
ugcaugcacccugauuccu

SEQ ID NO: 1161812 - RNA, 19 nt, Artificial Sequence
  Description of Artificial Sequence: Synthetic oligonucleotide
gacccuuuuggcugugucu

SEQ ID NO: 1161813 - RNA, 19 nt, Artificial Sequence
  Description of Artificial Sequence: Synthetic oligonucleotide
ucgcagacugcaacauuuu

SEQ ID NO: 1161814 - RNA, 19 nt, Artificial Sequence
  Description of Artificial Sequence: Synthetic oligonucleotide
gccucguuuacaacaguag

SEQ ID NO: 1161815 - RNA, 19 nt, Artificial Sequence
  Description of Artificial Sequence: Synthetic oligonucleotide
cacuggcgaggcucaagag

SEQ ID NO: 1161816 - RNA, 19 nt, Artificial Sequence
  Description of Artificial Sequence: Synthetic oligonucleotide
uuuguccguggaggcauga

SEQ ID NO: 1161817 - RNA, 19 nt, Artificial Sequence
  Description of Artificial Sequence: Synthetic oligonucleotide
accgaugucagggccuugu

SEQ ID NO: 1161818 - RNA, 19 nt, Artificial Sequence
  Description of Artificial Sequence: Synthetic oligonucleotide
gauagacuccucaaugauu

SEQ ID NO: 1161819 - RNA, 19 nt, Artificial Sequence
  Description of Artificial Sequence: Synthetic oligonucleotide
agcgccuggcagauguggg

SEQ ID NO: 1161820 - RNA, 19 nt, Artificial Sequence
  Description of Artificial Sequence: Synthetic oligonucleotide
cugcggcagaucugaugcg

SEQ ID NO: 1161821 - RNA, 19 nt, Artificial Sequence
  Description of Artificial Sequence: Synthetic oligonucleotide
cagagucggaugagccagc

SEQ ID NO: 1161822 - RNA, 19 nt, Artificial Sequence
  Description of Artificial Sequence: Synthetic oligonucleotide
acgcgccugcccuagaauu

SEQ ID NO: 1161823 - RNA, 19 nt, Artificial Sequence
  Description of Artificial Sequence: Synthetic oligonucleotide
gagucacaaugaauagcca

SEQ ID NO: 1161824 - RNA, 19 nt, Artificial Sequence
  Description of Artificial Sequence: Synthetic oligonucleotide
augcgcacuuugaaguucu

SEQ ID NO: 1161825 - RNA, 19 nt, Artificial Sequence
  Description of Artificial Sequence: Synthetic oligonucleotide
uucagcaaaccugggucuu

SEQ ID NO: 1161826 - RNA, 19 nt, Artificial Sequence
  Description of Artificial Sequence: Synthetic oligonucleotide
caugaaucgcagacugcaa

SEQ ID NO: 1161827 - RNA, 19 nt, Artificial Sequence
  Description of Artificial Sequence: Synthetic oligonucleotide
ccaucggacuuucauagca

SEQ ID NO: 1161828 - RNA, 19 nt, Artificial Sequence
  Description of Artificial Sequence: Synthetic oligonucleotide
caagagagucuuguaugca

SEQ ID NO: 1161829 - RNA, 19 nt, Artificial Sequence
  Description of Artificial Sequence: Synthetic oligonucleotide
auggccgguaauggaacca

SEQ ID NO: 1161830 - RNA, 19 nt, Artificial Sequence
  Description of Artificial Sequence: Synthetic oligonucleotide
cagcgccuggcagaugugg

SEQ ID NO: 1161831 - RNA, 19 nt, Artificial Sequence
  Description of Artificial Sequence: Synthetic oligonucleotide
caacgcauuccagaucuga

SEQ ID NO: 1161832 - RNA, 19 nt, Artificial Sequence
  Description of Artificial Sequence: Synthetic oligonucleotide
agccaaggagugccacuug

SEQ ID NO: 1161833 - RNA, 19 nt, Artificial Sequence
  Description of Artificial Sequence: Synthetic oligonucleotide
ccucguuuacaacaguaga

SEQ ID NO: 1161834 - RNA, 19 nt, Artificial Sequence
  Description of Artificial Sequence: Synthetic oligonucleotide
ggcugcuuuggcacgcacg

SEQ ID NO: 1161835 - RNA, 19 nt, Artificial Sequence
  Description of Artificial Sequence: Synthetic oligonucleotide
gaggaguugcugaauugcu

SEQ ID NO: 1161836 - RNA, 19 nt, Artificial Sequence
  Description of Artificial Sequence: Synthetic oligonucleotide
cugagcgaacuguucuaga

SEQ ID NO: 1161837 - RNA, 19 nt, Artificial Sequence
  Description of Artificial Sequence: Synthetic oligonucleotide
cuauugcauagcaagcauu

SEQ ID NO: 1161838 - RNA, 19 nt, Artificial Sequence
  Description of Artificial Sequence: Synthetic oligonucleotide
gugacuuaucuuggaguga

SEQ ID NO: 1161839 - RNA, 19 nt, Artificial Sequence
  Description of Artificial Sequence: Synthetic oligonucleotide
agccucguuuacaacagua

SEQ ID NO: 1161840 - RNA, 19 nt, Artificial Sequence
  Description of Artificial Sequence: Synthetic oligonucleotide
uggcgagcugacugacacu

SEQ ID NO: 1161841 - RNA, 19 nt, Artificial Sequence
  Description of Artificial Sequence: Synthetic oligonucleotide
gcaagcauuccaucggacu

SEQ ID NO: 1161842 - RNA, 19 nt, Artificial Sequence
  Description of Artificial Sequence: Synthetic oligonucleotide
gcucaagagagucuuguau

SEQ ID NO: 1161843 - RNA, 19 nt, Artificial Sequence
  Description of Artificial Sequence: Synthetic oligonucleotide
gaggcaugaaucgcagacu

SEQ ID NO: 1161844 - RNA, 19 nt, Artificial Sequence
  Description of Artificial Sequence: Synthetic oligonucleotide
gacuuaucuuggagugaca

SEQ ID NO: 1161845 - RNA, 19 nt, Artificial Sequence
  Description of Artificial Sequence: Synthetic oligonucleotide
gaaucgcagacugcaacau

SEQ ID NO: 1161846 - RNA, 19 nt, Artificial Sequence
  Description of Artificial Sequence: Synthetic oligonucleotide
gagacccguacugugcucu

SEQ ID NO: 1161847 - RNA, 19 nt, Artificial Sequence
  Description of Artificial Sequence: Synthetic oligonucleotide
acccguacugugcucucuu

SEQ ID NO: 1161848 - RNA, 19 nt, Artificial Sequence
  Description of Artificial Sequence: Synthetic oligonucleotide
cagcaaaccugggucuuuc

SEQ ID NO: 1161849 - RNA, 19 nt, Artificial Sequence
  Description of Artificial Sequence: Synthetic oligonucleotide
cugaggagucacaaugaau

SEQ ID NO: 1161850 - RNA, 19 nt, Artificial Sequence
  Description of Artificial Sequence: Synthetic oligonucleotide
guaugcaggggaagucaga

SEQ ID NO: 1161851 - RNA, 19 nt, Artificial Sequence
  Description of Artificial Sequence: Synthetic oligonucleotide
gagcccuuugagaaagagu

SEQ ID NO: 1161852 - RNA, 19 nt, Artificial Sequence
  Description of Artificial Sequence: Synthetic oligonucleotide
guugacgauuagaguaucu

SEQ ID NO: 1161853 - RNA, 19 nt, Artificial Sequence
  Description of Artificial Sequence: Synthetic oligonucleotide
uuguccguggaggcaugaa

SEQ ID NO: 1161854 - RNA, 19 nt, Artificial Sequence
  Description of Artificial Sequence: Synthetic oligonucleotide
ccaaggagugccacuuguc

SEQ ID NO: 1161855 - RNA, 19 nt, Artificial Sequence
  Description of Artificial Sequence: Synthetic oligonucleotide
ggcaugaaucgcagacugc

SEQ ID NO: 1161856 - RNA, 19 nt, Artificial Sequence
  Description of Artificial Sequence: Synthetic oligonucleotide
ccagcaucgcuacccgagc

SEQ ID NO: 1161857 - RNA, 19 nt, Artificial Sequence
  Description of Artificial Sequence: Synthetic oligonucleotide
cagcaucgcuacccgagca

SEQ ID NO: 1161858 - RNA, 19 nt, Artificial Sequence
  Description of Artificial Sequence: Synthetic oligonucleotide
auauccccauuccgcucaa

SEQ ID NO: 1161859 - RNA, 19 nt, Artificial Sequence
  Description of Artificial Sequence: Synthetic oligonucleotide
agaucacgaugacccuuuu

SEQ ID NO: 1161860 - RNA, 19 nt, Artificial Sequence
  Description of Artificial Sequence: Synthetic oligonucleotide
gcuacccgagcaggaaucc

SEQ ID NO: 1161861 - RNA, 19 nt, Artificial Sequence
  Description of Artificial Sequence: Synthetic oligonucleotide
cucccucuacuccugauuu

SEQ ID NO: 1161862 - RNA, 19 nt, Artificial Sequence
  Description of Artificial Sequence: Synthetic oligonucleotide
gccgguaauggaaccacuc

SEQ ID NO: 1161863 - RNA, 19 nt, Artificial Sequence
  Description of Artificial Sequence: Synthetic oligonucleotide
aaccgaugucagggccuug

SEQ ID NO: 1161864 - RNA, 19 nt, Artificial Sequence
  Description of Artificial Sequence: Synthetic oligonucleotide
caggacgcgccugcccuag

SEQ ID NO: 1161865 - RNA, 19 nt, Artificial Sequence
  Description of Artificial Sequence: Synthetic oligonucleotide
cagaucugagcgaacuguu

SEQ ID NO: 1161866 - RNA, 19 nt, Artificial Sequence
  Description of Artificial Sequence: Synthetic oligonucleotide
cuguuagguugcccaggga

SEQ ID NO: 1161867 - RNA, 19 nt, Artificial Sequence
  Description of Artificial Sequence: Synthetic oligonucleotide
gagccaaggagugccacuu

SEQ ID NO: 1161868 - RNA, 19 nt, Artificial Sequence
  Description of Artificial Sequence: Synthetic oligonucleotide
ccaggguaucuucuaagaa

SEQ ID NO: 1161869 - RNA, 19 nt, Artificial Sequence
  Description of Artificial Sequence: Synthetic oligonucleotide
gcgaacuguucuagagacc

SEQ ID NO: 1161870 - RNA, 19 nt, Artificial Sequence
  Description of Artificial Sequence: Synthetic oligonucleotide
cccauuuaugacugcggaa

SEQ ID NO: 1161871 - RNA, 19 nt, Artificial Sequence
  Description of Artificial Sequence: Synthetic oligonucleotide
augacccuuuuggcugugu

SEQ ID NO: 1161872 - RNA, 19 nt, Artificial Sequence
  Description of Artificial Sequence: Synthetic oligonucleotide
acaggacgcgccugcccua

SEQ ID NO: 1161873 - RNA, 19 nt, Artificial Sequence
  Description of Artificial Sequence: Synthetic oligonucleotide
gcgccugcccuagaauugc

SEQ ID NO: 1161874 - RNA, 19 nt, Artificial Sequence
  Description of Artificial Sequence: Synthetic oligonucleotide
gccaaggagugccacuugu

SEQ ID NO: 1161875 - RNA, 19 nt, Artificial Sequence
  Description of Artificial Sequence: Synthetic oligonucleotide
gcuuugcuagaaaacuagu

SEQ ID NO: 1161876 - RNA, 19 nt, Artificial Sequence
  Description of Artificial Sequence: Synthetic oligonucleotide
acgcacguuuagugacuua

SEQ ID NO: 1161877 - RNA, 19 nt, Artificial Sequence
  Description of Artificial Sequence: Synthetic oligonucleotide
gcaugcacccugauuccuc

SEQ ID NO: 1161878 - RNA, 19 nt, Artificial Sequence
  Description of Artificial Sequence: Synthetic oligonucleotide
gacgcgccugcccuagaau

SEQ ID NO: 1161879 - RNA, 19 nt, Artificial Sequence
  Description of Artificial Sequence: Synthetic oligonucleotide
ccagucgcauggggcaugg

SEQ ID NO: 1161880 - RNA, 19 nt, Artificial Sequence
  Description of Artificial Sequence: Synthetic oligonucleotide
ccauguugacgauuagagu

SEQ ID NO: 1161881 - RNA, 19 nt, Artificial Sequence
  Description of Artificial Sequence: Synthetic oligonucleotide
cgcuacccgagcaggaauc

SEQ ID NO: 1161882 - RNA, 19 nt, Artificial Sequence
  Description of Artificial Sequence: Synthetic oligonucleotide
ggcugagcccuuugagaaa

SEQ ID NO: 1161883 - RNA, 19 nt, Artificial Sequence
  Description of Artificial Sequence: Synthetic oligonucleotide
cccguacugugcucucuug

SEQ ID NO: 1161884 - RNA, 19 nt, Artificial Sequence
  Description of Artificial Sequence: Synthetic oligonucleotide
cgcgccugcccuagaauug

SEQ ID NO: 1161885 - RNA, 19 nt, Artificial Sequence
  Description of Artificial Sequence: Synthetic oligonucleotide
ccagaucugagcgaacugu

SEQ ID NO: 1161886 - RNA, 19 nt, Artificial Sequence
  Description of Artificial Sequence: Synthetic oligonucleotide
ggcgagcugacugacacuu

SEQ ID NO: 1161887 - RNA, 19 nt, Artificial Sequence
  Description of Artificial Sequence: Synthetic oligonucleotide
ggucagaauggccgguaau

SEQ ID NO: 1161888 - RNA, 19 nt, Artificial Sequence
  Description of Artificial Sequence: Synthetic oligonucleotide
cuuucauagcagccucguu

SEQ ID NO: 1161889 - RNA, 19 nt, Artificial Sequence
  Description of Artificial Sequence: Synthetic oligonucleotide
ccaacgcauuccagaucug

SEQ ID NO: 1161890 - RNA, 19 nt, Artificial Sequence
  Description of Artificial Sequence: Synthetic oligonucleotide
aggacgcgccugcccuaga

SEQ ID NO: 1161891 - RNA, 19 nt, Artificial Sequence
  Description of Artificial Sequence: Synthetic oligonucleotide
gcgagggcugcugcaggag

SEQ ID NO: 1161892 - RNA, 19 nt, Artificial Sequence
  Description of Artificial Sequence: Synthetic oligonucleotide
ggacgcgccugcccuagaa

SEQ ID NO: 1161893 - RNA, 19 nt, Artificial Sequence
  Description of Artificial Sequence: Synthetic oligonucleotide
gacccguacugugcucucu

SEQ ID NO: 1161894 - RNA, 19 nt, Artificial Sequence
  Description of Artificial Sequence: Synthetic oligonucleotide
gcggcagaucugaugcgca

SEQ ID NO: 1161895 - RNA, 19 nt, Artificial Sequence
  Description of Artificial Sequence: Synthetic oligonucleotide
ggcaugguucauaggugcu

SEQ ID NO: 1161896 - RNA, 19 nt, Artificial Sequence
  Description of Artificial Sequence: Synthetic oligonucleotide
gccucggauucccauuuau

SEQ ID NO: 1161897 - RNA, 19 nt, Artificial Sequence
  Description of Artificial Sequence: Synthetic oligonucleotide
gcauggggcaugguucaua

SEQ ID NO: 1161898 - RNA, 19 nt, Artificial Sequence
  Description of Artificial Sequence: Synthetic oligonucleotide
ccauggagcugacccaagu

SEQ ID NO: 1161899 - RNA, 19 nt, Artificial Sequence
  Description of Artificial Sequence: Synthetic oligonucleotide
ccgacaggacgcgccugcc

SEQ ID NO: 1161900 - RNA, 19 nt, Artificial Sequence
  Description of Artificial Sequence: Synthetic oligonucleotide
gcgccuggcagaugugggu

SEQ ID NO: 1161901 - RNA, 19 nt, Artificial Sequence
  Description of Artificial Sequence: Synthetic oligonucleotide
gugcgccacugugccuggc

SEQ ID NO: 1161902 - RNA, 19 nt, Artificial Sequence
  Description of Artificial Sequence: Synthetic oligonucleotide
cacgcacguuuagugacuu

SEQ ID NO: 1161903 - RNA, 19 nt, Artificial Sequence
  Description of Artificial Sequence: Synthetic oligonucleotide
ggugugcgccacugugccu

SEQ ID NO: 1161904 - RNA, 19 nt, Artificial Sequence
  Description of Artificial Sequence: Synthetic oligonucleotide
gcgagcugacugacacuuc

SEQ ID NO: 1161905 - RNA, 19 nt, Artificial Sequence
  Description of Artificial Sequence: Synthetic oligonucleotide
gcacgcacguuuagugacu

SEQ ID NO: 1161906 - RNA, 19 nt, Artificial Sequence
  Description of Artificial Sequence: Synthetic oligonucleotide
gcaugacaucacaaccgau

SEQ ID NO: 1161907 - RNA, 19 nt, Artificial Sequence
  Description of Artificial Sequence: Synthetic oligonucleotide
ccgcucaagagagucuugu

SEQ ID NO: 1161908 - RNA, 19 nt, Artificial Sequence
  Description of Artificial Sequence: Synthetic oligonucleotide
ggccucggauucccauuua

SEQ ID NO: 1161909 - RNA, 19 nt, Artificial Sequence
  Description of Artificial Sequence: Synthetic oligonucleotide
gcgccugcacacuguguau

SEQ ID NO: 1161910 - RNA, 19 nt, Artificial Sequence
  Description of Artificial Sequence: Synthetic oligonucleotide
ccgaugucagggccuugua

SEQ ID NO: 1161911 - RNA, 19 nt, Artificial Sequence
  Description of Artificial Sequence: Synthetic oligonucleotide
ccauuccgcucaagagagu

SEQ ID NO: 1161912 - RNA, 19 nt, Artificial Sequence
  Description of Artificial Sequence: Synthetic oligonucleotide
cccgagcaggaauccuccu

SEQ ID NO: 1161913 - RNA, 19 nt, Artificial Sequence
  Description of Artificial Sequence: Synthetic oligonucleotide
cagucgcauggggcauggu

SEQ ID NO: 1161914 - RNA, 19 nt, Artificial Sequence
  Description of Artificial Sequence: Synthetic oligonucleotide
cccggacugcauugcuuuu

SEQ ID NO: 1161915 - RNA, 19 nt, Artificial Sequence
  Description of Artificial Sequence: Synthetic oligonucleotide
aacgcaauaguguuuacac

SEQ ID NO: 1161916 - RNA, 19 nt, Artificial Sequence
  Description of Artificial Sequence: Synthetic oligonucleotide
uguguuuuaaauacugugg

SEQ ID NO: 1161917 - RNA, 19 nt, Artificial Sequence
  Description of Artificial Sequence: Synthetic oligonucleotide
ucauauacaagucuacagg

SEQ ID NO: 1161918 - RNA, 19 nt, Artificial Sequence
  Description of Artificial Sequence: Synthetic oligonucleotide
aauuaaaacuccaugugcg

SEQ ID NO: 1161919 - RNA, 19 nt, Artificial Sequence
  Description of Artificial Sequence: Synthetic oligonucleotide
uaauuaaaacuccaugugc

SEQ ID NO: 1161920 - RNA, 19 nt, Artificial Sequence
  Description of Artificial Sequence: Synthetic oligonucleotide
acaauuguacaucagcauc

SEQ ID NO: 1161921 - RNA, 19 nt, Artificial Sequence
  Description of Artificial Sequence: Synthetic oligonucleotide
uuucuagcguucuuuaugg

SEQ ID NO: 1161922 - RNA, 19 nt, Artificial Sequence
  Description of Artificial Sequence: Synthetic oligonucleotide
aggaacugaguauauagcg

SEQ ID NO: 1161923 - RNA, 19 nt, Artificial Sequence
  Description of Artificial Sequence: Synthetic oligonucleotide
uuagacugagaacugagca

SEQ ID NO: 1161924 - RNA, 19 nt, Artificial Sequence
  Description of Artificial Sequence: Synthetic oligonucleotide
uauauagcggaaaaucucu

SEQ ID NO: 1161925 - RNA, 19 nt, Artificial Sequence
  Description of Artificial Sequence: Synthetic oligonucleotide
ucgacaguagccauugagg

SEQ ID NO: 1161926 - RNA, 19 nt, Artificial Sequence
  Description of Artificial Sequence: Synthetic oligonucleotide
ucauacaguagguugaagu

SEQ ID NO: 1161927 - RNA, 19 nt, Artificial Sequence
  Description of Artificial Sequence: Synthetic oligonucleotide
gucgauaaaauaauguugc

SEQ ID NO: 1161928 - RNA, 19 nt, Artificial Sequence
  Description of Artificial Sequence: Synthetic oligonucleotide
gauugacggugacagaugg

SEQ ID NO: 1161929 - RNA, 19 nt, Artificial Sequence
  Description of Artificial Sequence: Synthetic oligonucleotide
agacugagaacugagcacc

SEQ ID NO: 1161930 - RNA, 19 nt, Artificial Sequence
  Description of Artificial Sequence: Synthetic oligonucleotide
uggaguuaagagcacuggg

SEQ ID NO: 1161931 - RNA, 19 nt, Artificial Sequence
  Description of Artificial Sequence: Synthetic oligonucleotide
uggagcgcaaaacaggcag

SEQ ID NO: 1161932 - RNA, 19 nt, Artificial Sequence
  Description of Artificial Sequence: Synthetic oligonucleotide
uguggagcgcaaaacaggc

SEQ ID NO: 1161933 - RNA, 19 nt, Artificial Sequence
  Description of Artificial Sequence: Synthetic oligonucleotide
agucaguugggauuggaag

SEQ ID NO: 1161934 - RNA, 19 nt, Artificial Sequence
  Description of Artificial Sequence: Synthetic oligonucleotide
aauacuguggagcgcaaaa

SEQ ID NO: 1161935 - RNA, 19 nt, Artificial Sequence
  Description of Artificial Sequence: Synthetic oligonucleotide
uugcacaugacaucacccg

SEQ ID NO: 1161936 - RNA, 19 nt, Artificial Sequence
  Description of Artificial Sequence: Synthetic oligonucleotide
gugugcaccaaguacagcc

SEQ ID NO: 1161937 - RNA, 19 nt, Artificial Sequence
  Description of Artificial Sequence: Synthetic oligonucleotide
acugucuaggacaaugggc

SEQ ID NO: 1161938 - RNA, 19 nt, Artificial Sequence
  Description of Artificial Sequence: Synthetic oligonucleotide
uauagcggaaaaucucucc

SEQ ID NO: 1161939 - RNA, 19 nt, Artificial Sequence
  Description of Artificial Sequence: Synthetic oligonucleotide
aguugagucgacaguagcc

SEQ ID NO: 1161940 - RNA, 19 nt, Artificial Sequence
  Description of Artificial Sequence: Synthetic oligonucleotide
ucuagcguucuuuauggca

SEQ ID NO: 1161941 - RNA, 19 nt, Artificial Sequence
  Description of Artificial Sequence: Synthetic oligonucleotide
guuaagagcacuggguacg

SEQ ID NO: 1161942 - RNA, 19 nt, Artificial Sequence
  Description of Artificial Sequence: Synthetic oligonucleotide
agaacccagauguggacac

SEQ ID NO: 1161943 - RNA, 19 nt, Artificial Sequence
  Description of Artificial Sequence: Synthetic oligonucleotide
uaaaacuccaugugcguga

SEQ ID NO: 1161944 - RNA, 19 nt, Artificial Sequence
  Description of Artificial Sequence: Synthetic oligonucleotide
cugagauaagcuguggugg

SEQ ID NO: 1161945 - RNA, 19 nt, Artificial Sequence
  Description of Artificial Sequence: Synthetic oligonucleotide
gaacugaguauauagcgga

SEQ ID NO: 1161946 - RNA, 19 nt, Artificial Sequence
  Description of Artificial Sequence: Synthetic oligonucleotide
uuuauggcaugaaccagga

SEQ ID NO: 1161947 - RNA, 19 nt, Artificial Sequence
  Description of Artificial Sequence: Synthetic oligonucleotide
cagagauugacggugacag

SEQ ID NO: 1161948 - RNA, 19 nt, Artificial Sequence
  Description of Artificial Sequence: Synthetic oligonucleotide
auuagacugagaacugagc

SEQ ID NO: 1161949 - RNA, 19 nt, Artificial Sequence
  Description of Artificial Sequence: Synthetic oligonucleotide
gaguuuggaguuaagagca

SEQ ID NO: 1161950 - RNA, 19 nt, Artificial Sequence
  Description of Artificial Sequence: Synthetic oligonucleotide
uacuguggagcgcaaaaca

SEQ ID NO: 1161951 - RNA, 19 nt, Artificial Sequence
  Description of Artificial Sequence: Synthetic oligonucleotide
aguauauagcggaaaaucu

SEQ ID NO: 1161952 - RNA, 19 nt, Artificial Sequence
  Description of Artificial Sequence: Synthetic oligonucleotide
uugacggaguugcacauga

SEQ ID NO: 1161953 - RNA, 19 nt, Artificial Sequence
  Description of Artificial Sequence: Synthetic oligonucleotide
auuaaaacuccaugugcgu

SEQ ID NO: 1161954 - RNA, 19 nt, Artificial Sequence
  Description of Artificial Sequence: Synthetic oligonucleotide
auggcaugaaccaggaacg

SEQ ID NO: 1161955 - RNA, 19 nt, Artificial Sequence
  Description of Artificial Sequence: Synthetic oligonucleotide
gacugucuaggacaauggg

SEQ ID NO: 1161956 - RNA, 19 nt, Artificial Sequence
  Description of Artificial Sequence: Synthetic oligonucleotide
agauaagcugugguggccc

SEQ ID NO: 1161957 - RNA, 19 nt, Artificial Sequence
  Description of Artificial Sequence: Synthetic oligonucleotide
acauuggcaggucaggugu

SEQ ID NO: 1161958 - RNA, 19 nt, Artificial Sequence
  Description of Artificial Sequence: Synthetic oligonucleotide
ugagauaagcugugguggc

SEQ ID NO: 1161959 - RNA, 19 nt, Artificial Sequence
  Description of Artificial Sequence: Synthetic oligonucleotide
uuucucgccacugagugca

SEQ ID NO: 1161960 - RNA, 19 nt, Artificial Sequence
  Description of Artificial Sequence: Synthetic oligonucleotide
uuauccggacggcagucgg

SEQ ID NO: 1161961 - RNA, 19 nt, Artificial Sequence
  Description of Artificial Sequence: Synthetic oligonucleotide
accucuuaggcccaguccu

SEQ ID NO: 1161962 - RNA, 19 nt, Artificial Sequence
  Description of Artificial Sequence: Synthetic oligonucleotide
cuguggagcgcaaaacagg

SEQ ID NO: 1161963 - RNA, 19 nt, Artificial Sequence
  Description of Artificial Sequence: Synthetic oligonucleotide
gucgacaguagccauugag

SEQ ID NO: 1161964 - RNA, 19 nt, Artificial Sequence
  Description of Artificial Sequence: Synthetic oligonucleotide
uugacggugacagaugggu

SEQ ID NO: 1161965 - RNA, 19 nt, Artificial Sequence
  Description of Artificial Sequence: Synthetic oligonucleotide
aacggaugacguguguggg

SEQ ID NO: 1161966 - RNA, 19 nt, Artificial Sequence
  Description of Artificial Sequence: Synthetic oligonucleotide
guaaaagcagcgacggucc

SEQ ID NO: 1161967 - RNA, 19 nt, Artificial Sequence
  Description of Artificial Sequence: Synthetic oligonucleotide
gacucggaccaccaggcag

SEQ ID NO: 1161968 - RNA, 19 nt, Artificial Sequence
  Description of Artificial Sequence: Synthetic oligonucleotide
uccggucgauaaaauaaug

SEQ ID NO: 1161969 - RNA, 19 nt, Artificial Sequence
  Description of Artificial Sequence: Synthetic oligonucleotide
ggucgauaaaauaauguug

SEQ ID NO: 1161970 - RNA, 19 nt, Artificial Sequence
  Description of Artificial Sequence: Synthetic oligonucleotide
guacgauugggucucugcc

SEQ ID NO: 1161971 - RNA, 19 nt, Artificial Sequence
  Description of Artificial Sequence: Synthetic oligonucleotide
ucgauaaaauaauguugcu

SEQ ID NO: 1161972 - RNA, 19 nt, Artificial Sequence
  Description of Artificial Sequence: Synthetic oligonucleotide
gacauuggcaggucaggug

SEQ ID NO: 1161973 - RNA, 19 nt, Artificial Sequence
  Description of Artificial Sequence: Synthetic oligonucleotide
gggacccagagauugacgg

SEQ ID NO: 1161974 - RNA, 19 nt, Artificial Sequence
  Description of Artificial Sequence: Synthetic oligonucleotide
guauauagcggaaaaucuc

SEQ ID NO: 1161975 - RNA, 19 nt, Artificial Sequence
  Description of Artificial Sequence: Synthetic oligonucleotide
acuggguacgauugggucu

SEQ ID NO: 1161976 - RNA, 19 nt, Artificial Sequence
  Description of Artificial Sequence: Synthetic oligonucleotide
auacacaaggaggugccgg

SEQ ID NO: 1161977 - RNA, 19 nt, Artificial Sequence
  Description of Artificial Sequence: Synthetic oligonucleotide
gaaacggaugacgugugug

SEQ ID NO: 1161978 - RNA, 19 nt, Artificial Sequence
  Description of Artificial Sequence: Synthetic oligonucleotide
aguugggauuggaagcucc

SEQ ID NO: 1161979 - RNA, 19 nt, Artificial Sequence
  Description of Artificial Sequence: Synthetic oligonucleotide
uccugagauaagcuguggu

SEQ ID NO: 1161980 - RNA, 19 nt, Artificial Sequence
  Description of Artificial Sequence: Synthetic oligonucleotide
uacacaaggaggugccggc

SEQ ID NO: 1161981 - RNA, 19 nt, Artificial Sequence
  Description of Artificial Sequence: Synthetic oligonucleotide
aagagcacuggguacgauu

SEQ ID NO: 1161982 - RNA, 19 nt, Artificial Sequence
  Description of Artificial Sequence: Synthetic oligonucleotide
aaccaggaacgcaauagug

SEQ ID NO: 1161983 - RNA, 19 nt, Artificial Sequence
  Description of Artificial Sequence: Synthetic oligonucleotide
ugggacacaggccguagca

SEQ ID NO: 1161984 - RNA, 19 nt, Artificial Sequence
  Description of Artificial Sequence: Synthetic oligonucleotide
gacaaugggcuccgugccg

SEQ ID NO: 1161985 - RNA, 19 nt, Artificial Sequence
  Description of Artificial Sequence: Synthetic oligonucleotide
ggugacucggaccaccagg

SEQ ID NO: 1161986 - RNA, 19 nt, Artificial Sequence
  Description of Artificial Sequence: Synthetic oligonucleotide
ugcggccacaguuaguugu

SEQ ID NO: 1161987 - RNA, 19 nt, Artificial Sequence
  Description of Artificial Sequence: Synthetic oligonucleotide
ugugcaccaaguacagccu

SEQ ID NO: 1161988 - RNA, 19 nt, Artificial Sequence
  Description of Artificial Sequence: Synthetic oligonucleotide
uuuauccggacggcagucg

SEQ ID NO: 1161989 - RNA, 19 nt, Artificial Sequence
  Description of Artificial Sequence: Synthetic oligonucleotide
ugcgaggaccucuuaggcc

SEQ ID NO: 1161990 - RNA, 19 nt, Artificial Sequence
  Description of Artificial Sequence: Synthetic oligonucleotide
acagaguugagucgacagu

SEQ ID NO: 1161991 - RNA, 19 nt, Artificial Sequence
  Description of Artificial Sequence: Synthetic oligonucleotide
guugcacaugacaucaccc

SEQ ID NO: 1161992 - RNA, 19 nt, Artificial Sequence
  Description of Artificial Sequence: Synthetic oligonucleotide
cagaugggucccuugguag

SEQ ID NO: 1161993 - RNA, 19 nt, Artificial Sequence
  Description of Artificial Sequence: Synthetic oligonucleotide
acuguggagcgcaaaacag

SEQ ID NO: 1161994 - RNA, 19 nt, Artificial Sequence
  Description of Artificial Sequence: Synthetic oligonucleotide
guuugcucaacauuagacu

SEQ ID NO: 1161995 - RNA, 19 nt, Artificial Sequence
  Description of Artificial Sequence: Synthetic oligonucleotide
gacccagagauugacggug

SEQ ID NO: 1161996 - RNA, 19 nt, Artificial Sequence
  Description of Artificial Sequence: Synthetic oligonucleotide
ggguucuugcuuuauccgg

SEQ ID NO: 1161997 - RNA, 19 nt, Artificial Sequence
  Description of Artificial Sequence: Synthetic oligonucleotide
cauugaggggaaacggaug

SEQ ID NO: 1161998 - RNA, 19 nt, Artificial Sequence
  Description of Artificial Sequence: Synthetic oligonucleotide
uauccggacggcagucggg

SEQ ID NO: 1161999 - RNA, 19 nt, Artificial Sequence
  Description of Artificial Sequence: Synthetic oligonucleotide
ugaguauauagcggaaaau

SEQ ID NO: 1162000 - RNA, 19 nt, Artificial Sequence
  Description of Artificial Sequence: Synthetic oligonucleotide
cugucuaggacaaugggcu

SEQ ID NO: 1162001 - RNA, 19 nt, Artificial Sequence
  Description of Artificial Sequence: Synthetic oligonucleotide
agacugucuaggacaaugg

SEQ ID NO: 1162002 - RNA, 19 nt, Artificial Sequence
  Description of Artificial Sequence: Synthetic oligonucleotide
uuuugacguccgcaggaac

SEQ ID NO: 1162003 - RNA, 19 nt, Artificial Sequence
  Description of Artificial Sequence: Synthetic oligonucleotide
agagcacuggguacgauug

SEQ ID NO: 1162004 - RNA, 19 nt, Artificial Sequence
  Description of Artificial Sequence: Synthetic oligonucleotide
aggcuaguugaguaaauuu

SEQ ID NO: 1162005 - RNA, 19 nt, Artificial Sequence
  Description of Artificial Sequence: Synthetic oligonucleotide
gaccucuuaggcccagucc

SEQ ID NO: 1162006 - RNA, 19 nt, Artificial Sequence
  Description of Artificial Sequence: Synthetic oligonucleotide
cuaggguagaugugacaag

SEQ ID NO: 1162007 - RNA, 19 nt, Artificial Sequence
  Description of Artificial Sequence: Synthetic oligonucleotide
acggaugacgugugugggg

SEQ ID NO: 1162008 - RNA, 19 nt, Artificial Sequence
  Description of Artificial Sequence: Synthetic oligonucleotide
auauacaagucuacaggca

SEQ ID NO: 1162009 - RNA, 19 nt, Artificial Sequence
  Description of Artificial Sequence: Synthetic oligonucleotide
agucuacaggcauuauaca

SEQ ID NO: 1162010 - RNA, 19 nt, Artificial Sequence
  Description of Artificial Sequence: Synthetic oligonucleotide
auauagcggaaaaucucuc

SEQ ID NO: 1162011 - RNA, 19 nt, Artificial Sequence
  Description of Artificial Sequence: Synthetic oligonucleotide
gauaagcugugguggcccc

SEQ ID NO: 1162012 - RNA, 19 nt, Artificial Sequence
  Description of Artificial Sequence: Synthetic oligonucleotide
agcacuggguacgauuggg

SEQ ID NO: 1162013 - RNA, 19 nt, Artificial Sequence
  Description of Artificial Sequence: Synthetic oligonucleotide
cacguacucgcugaacugg

SEQ ID NO: 1162014 - RNA, 19 nt, Artificial Sequence
  Description of Artificial Sequence: Synthetic oligonucleotide
gguuugcucaacauuagac

SEQ ID NO: 1162015 - RNA, 19 nt, Artificial Sequence
  Description of Artificial Sequence: Synthetic oligonucleotide
acaaacaauuguacaucag

SEQ ID NO: 1162016 - RNA, 19 nt, Artificial Sequence
  Description of Artificial Sequence: Synthetic oligonucleotide
cuugcuuuauccggacggc

SEQ ID NO: 1162017 - RNA, 19 nt, Artificial Sequence
  Description of Artificial Sequence: Synthetic oligonucleotide
gggguucuugcuuuauccg

SEQ ID NO: 1162018 - RNA, 19 nt, Artificial Sequence
  Description of Artificial Sequence: Synthetic oligonucleotide
cauuauacacaaggaggug

SEQ ID NO: 1162019 - RNA, 19 nt, Artificial Sequence
  Description of Artificial Sequence: Synthetic oligonucleotide
gaacgcaauaguguuuaca

SEQ ID NO: 1162020 - RNA, 19 nt, Artificial Sequence
  Description of Artificial Sequence: Synthetic oligonucleotide
uugacguccgcaggaacug

SEQ ID NO: 1162021 - RNA, 19 nt, Artificial Sequence
  Description of Artificial Sequence: Synthetic oligonucleotide
cuaguccagggguucuugc

SEQ ID NO: 1162022 - RNA, 19 nt, Artificial Sequence
  Description of Artificial Sequence: Synthetic oligonucleotide
aaagcacguacucgcugaa

SEQ ID NO: 1162023 - RNA, 19 nt, Artificial Sequence
  Description of Artificial Sequence: Synthetic oligonucleotide
gguacgauugggucucugc

SEQ ID NO: 1162024 - RNA, 19 nt, Artificial Sequence
  Description of Artificial Sequence: Synthetic oligonucleotide
uccgcaggaacugaguaua

SEQ ID NO: 1162025 - RNA, 19 nt, Artificial Sequence
  Description of Artificial Sequence: Synthetic oligonucleotide
uucuagcguucuuuauggc

SEQ ID NO: 1162026 - RNA, 19 nt, Artificial Sequence
  Description of Artificial Sequence: Synthetic oligonucleotide
ccugagauaagcuguggug

SEQ ID NO: 1162027 - RNA, 19 nt, Artificial Sequence
  Description of Artificial Sequence: Synthetic oligonucleotide
cugaguauauagcggaaaa

SEQ ID NO: 1162028 - RNA, 19 nt, Artificial Sequence
  Description of Artificial Sequence: Synthetic oligonucleotide
agcaguuuugacguccgca

SEQ ID NO: 1162029 - RNA, 19 nt, Artificial Sequence
  Description of Artificial Sequence: Synthetic oligonucleotide
accucgccuccucauacag

SEQ ID NO: 1162030 - RNA, 19 nt, Artificial Sequence
  Description of Artificial Sequence: Synthetic oligonucleotide
uuaagagcacuggguacga

SEQ ID NO: 1162031 - RNA, 19 nt, Artificial Sequence
  Description of Artificial Sequence: Synthetic oligonucleotide
gagcacuggguacgauugg

SEQ ID NO: 1162032 - RNA, 19 nt, Artificial Sequence
  Description of Artificial Sequence: Synthetic oligonucleotide
gggacgacccuccucaaug

SEQ ID NO: 1162033 - RNA, 19 nt, Artificial Sequence
  Description of Artificial Sequence: Synthetic oligonucleotide
aggggaaacggaugacgug

SEQ ID NO: 1162034 - RNA, 19 nt, Artificial Sequence
  Description of Artificial Sequence: Synthetic oligonucleotide
gacgacccuccucaaugag

SEQ ID NO: 1162035 - RNA, 19 nt, Artificial Sequence
  Description of Artificial Sequence: Synthetic oligonucleotide
cacuggguacgauuggguc

SEQ ID NO: 1162036 - RNA, 19 nt, Artificial Sequence
  Description of Artificial Sequence: Synthetic oligonucleotide
ggaaaaucucuccguccgg

SEQ ID NO: 1162037 - RNA, 19 nt, Artificial Sequence
  Description of Artificial Sequence: Synthetic oligonucleotide
agcgacgguccuuguuggc

SEQ ID NO: 1162038 - RNA, 19 nt, Artificial Sequence
  Description of Artificial Sequence: Synthetic oligonucleotide
aguuuggaguuaagagcac

SEQ ID NO: 1162039 - RNA, 19 nt, Artificial Sequence
  Description of Artificial Sequence: Synthetic oligonucleotide
ugagucgacaguagccauu

SEQ ID NO: 1162040 - RNA, 19 nt, Artificial Sequence
  Description of Artificial Sequence: Synthetic oligonucleotide
gugacucggaccaccaggc

SEQ ID NO: 1162041 - RNA, 19 nt, Artificial Sequence
  Description of Artificial Sequence: Synthetic oligonucleotide
aggaacgcaauaguguuua

SEQ ID NO: 1162042 - RNA, 19 nt, Artificial Sequence
  Description of Artificial Sequence: Synthetic oligonucleotide
agaguugagucgacaguag

SEQ ID NO: 1162043 - RNA, 19 nt, Artificial Sequence
  Description of Artificial Sequence: Synthetic oligonucleotide
acugaguauauagcggaaa

SEQ ID NO: 1162044 - RNA, 19 nt, Artificial Sequence
  Description of Artificial Sequence: Synthetic oligonucleotide
acggaguugcacaugacau

SEQ ID NO: 1162045 - RNA, 19 nt, Artificial Sequence
  Description of Artificial Sequence: Synthetic oligonucleotide
cucccggcaaagcacguac

SEQ ID NO: 1162046 - RNA, 19 nt, Artificial Sequence
  Description of Artificial Sequence: Synthetic oligonucleotide
gcagcgacgguccuuguug

SEQ ID NO: 1162047 - RNA, 19 nt, Artificial Sequence
  Description of Artificial Sequence: Synthetic oligonucleotide
ucgccacugagugcaaugc

SEQ ID NO: 1162048 - RNA, 19 nt, Artificial Sequence
  Description of Artificial Sequence: Synthetic oligonucleotide
aaauacuguggagcgcaaa

SEQ ID NO: 1162049 - RNA, 19 nt, Artificial Sequence
  Description of Artificial Sequence: Synthetic oligonucleotide
acgacccuccucaaugagg

SEQ ID NO: 1162050 - RNA, 19 nt, Artificial Sequence
  Description of Artificial Sequence: Synthetic oligonucleotide
uagcguucuuuauggcaug

SEQ ID NO: 1162051 - RNA, 19 nt, Artificial Sequence
  Description of Artificial Sequence: Synthetic oligonucleotide
ugacggugacagauggguc

SEQ ID NO: 1162052 - RNA, 19 nt, Artificial Sequence
  Description of Artificial Sequence: Synthetic oligonucleotide
acgauugggucucugccuu

SEQ ID NO: 1162053 - RNA, 19 nt, Artificial Sequence
  Description of Artificial Sequence: Synthetic oligonucleotide
uugagucgacaguagccau

SEQ ID NO: 1162054 - RNA, 19 nt, Artificial Sequence
  Description of Artificial Sequence: Synthetic oligonucleotide
auccggacggcagucgggg

SEQ ID NO: 1162055 - RNA, 19 nt, Artificial Sequence
  Description of Artificial Sequence: Synthetic oligonucleotide
ccccagcucagcaugaacc

SEQ ID NO: 1162056 - RNA, 19 nt, Artificial Sequence
  Description of Artificial Sequence: Synthetic oligonucleotide
ugucuaggacaaugggcuc

SEQ ID NO: 1162057 - RNA, 19 nt, Artificial Sequence
  Description of Artificial Sequence: Synthetic oligonucleotide
gauguggacacagucaguu

SEQ ID NO: 1162058 - RNA, 19 nt, Artificial Sequence
  Description of Artificial Sequence: Synthetic oligonucleotide
cugacaggcuaguugagua

SEQ ID NO: 1162059 - RNA, 19 nt, Artificial Sequence
  Description of Artificial Sequence: Synthetic oligonucleotide
cggaaaaucucuccguccg

SEQ ID NO: 1162060 - RNA, 19 nt, Artificial Sequence
  Description of Artificial Sequence: Synthetic oligonucleotide
ccauuccugagauaagcug

SEQ ID NO: 1162061 - RNA, 19 nt, Artificial Sequence
  Description of Artificial Sequence: Synthetic oligonucleotide
uugcuuuauccggacggca

SEQ ID NO: 1162062 - RNA, 19 nt, Artificial Sequence
  Description of Artificial Sequence: Synthetic oligonucleotide
ggacaaugggcuccgugcc

SEQ ID NO: 1162063 - RNA, 19 nt, Artificial Sequence
  Description of Artificial Sequence: Synthetic oligonucleotide
aacugaguauauagcggaa

SEQ ID NO: 1162064 - RNA, 19 nt, Artificial Sequence
  Description of Artificial Sequence: Synthetic oligonucleotide
cuagcguucuuuauggcau

SEQ ID NO: 1162065 - RNA, 19 nt, Artificial Sequence
  Description of Artificial Sequence: Synthetic oligonucleotide
caguccuuguuggaguuug

SEQ ID NO: 1162066 - RNA, 19 nt, Artificial Sequence
  Description of Artificial Sequence: Synthetic oligonucleotide
agcgcaaaacaggcaggac

SEQ ID NO: 1162067 - RNA, 19 nt, Artificial Sequence
  Description of Artificial Sequence: Synthetic oligonucleotide
cagcgacgguccuuguugg

SEQ ID NO: 1162068 - RNA, 19 nt, Artificial Sequence
  Description of Artificial Sequence: Synthetic oligonucleotide
ucacccgucucagggacga

SEQ ID NO: 1162069 - RNA, 19 nt, Artificial Sequence
  Description of Artificial Sequence: Synthetic oligonucleotide
cuugccgaccugugcggcc

SEQ ID NO: 1162070 - RNA, 19 nt, Artificial Sequence
  Description of Artificial Sequence: Synthetic oligonucleotide
caagucuacaggcauuaua

SEQ ID NO: 1162071 - RNA, 19 nt, Artificial Sequence
  Description of Artificial Sequence: Synthetic oligonucleotide
cuggguacgauugggucuc

SEQ ID NO: 1162072 - RNA, 19 nt, Artificial Sequence
  Description of Artificial Sequence: Synthetic oligonucleotide
uuauggcaugaaccaggaa

SEQ ID NO: 1162073 - RNA, 19 nt, Artificial Sequence
  Description of Artificial Sequence: Synthetic oligonucleotide
acguacucgcugaacuggg

SEQ ID NO: 1162074 - RNA, 19 nt, Artificial Sequence
  Description of Artificial Sequence: Synthetic oligonucleotide
gguagaagggcccauuccu

SEQ ID NO: 1162075 - RNA, 19 nt, Artificial Sequence
  Description of Artificial Sequence: Synthetic oligonucleotide
gacaggcuaguugaguaaa

SEQ ID NO: 1162076 - RNA, 19 nt, Artificial Sequence
  Description of Artificial Sequence: Synthetic oligonucleotide
uggcaugaaccaggaacgc

SEQ ID NO: 1162077 - RNA, 19 nt, Artificial Sequence
  Description of Artificial Sequence: Synthetic oligonucleotide
cuuuauccggacggcaguc

SEQ ID NO: 1162078 - RNA, 19 nt, Artificial Sequence
  Description of Artificial Sequence: Synthetic oligonucleotide
gacgugugugggguccugg

SEQ ID NO: 1162079 - RNA, 19 nt, Artificial Sequence
  Description of Artificial Sequence: Synthetic oligonucleotide
auugccgcugccagccacg

SEQ ID NO: 1162080 - RNA, 19 nt, Artificial Sequence
  Description of Artificial Sequence: Synthetic oligonucleotide
cacugagugcaaugcguuc

SEQ ID NO: 1162081 - RNA, 19 nt, Artificial Sequence
  Description of Artificial Sequence: Synthetic oligonucleotide
gcuaggguagaugugacaa

SEQ ID NO: 1162082 - RNA, 19 nt, Artificial Sequence
  Description of Artificial Sequence: Synthetic oligonucleotide
acaaugggcuccgugccgu

SEQ ID NO: 1162083 - RNA, 19 nt, Artificial Sequence
  Description of Artificial Sequence: Synthetic oligonucleotide
agguaaaagcagcgacggu

SEQ ID NO: 1162084 - RNA, 19 nt, Artificial Sequence
  Description of Artificial Sequence: Synthetic oligonucleotide
aguaccucgccuccucaua

SEQ ID NO: 1162085 - RNA, 19 nt, Artificial Sequence
  Description of Artificial Sequence: Synthetic oligonucleotide
ucuccguccggucgauaaa

SEQ ID NO: 1162086 - RNA, 19 nt, Artificial Sequence
  Description of Artificial Sequence: Synthetic oligonucleotide
uagcagagugucagauaaa

SEQ ID NO: 1162087 - RNA, 19 nt, Artificial Sequence
  Description of Artificial Sequence: Synthetic oligonucleotide
cucgcgaaccaugggcugc

SEQ ID NO: 1162088 - RNA, 19 nt, Artificial Sequence
  Description of Artificial Sequence: Synthetic oligonucleotide
ggcuaguugaguaaauuua

SEQ ID NO: 1162089 - RNA, 19 nt, Artificial Sequence
  Description of Artificial Sequence: Synthetic oligonucleotide
uaccucgccuccucauaca

SEQ ID NO: 1162090 - RNA, 19 nt, Artificial Sequence
  Description of Artificial Sequence: Synthetic oligonucleotide
augggcuccgugccguuga

SEQ ID NO: 1162091 - RNA, 19 nt, Artificial Sequence
  Description of Artificial Sequence: Synthetic oligonucleotide
augcguucacccaggucgg

SEQ ID NO: 1162092 - RNA, 19 nt, Artificial Sequence
  Description of Artificial Sequence: Synthetic oligonucleotide
cauugccgcugccagccac

SEQ ID NO: 1162093 - RNA, 19 nt, Artificial Sequence
  Description of Artificial Sequence: Synthetic oligonucleotide
uacgccgucgcugcuccug

SEQ ID NO: 1162094 - RNA, 19 nt, Artificial Sequence
  Description of Artificial Sequence: Synthetic oligonucleotide
agcucgcgaaccaugggcu

SEQ ID NO: 1162095 - RNA, 19 nt, Artificial Sequence
  Description of Artificial Sequence: Synthetic oligonucleotide
ucccggcaaagcacguacu

SEQ ID NO: 1162096 - RNA, 19 nt, Artificial Sequence
  Description of Artificial Sequence: Synthetic oligonucleotide
guugacggaguugcacaug

SEQ ID NO: 1162097 - RNA, 19 nt, Artificial Sequence
  Description of Artificial Sequence: Synthetic oligonucleotide
ggagacagcaggucugcga

SEQ ID NO: 1162098 - RNA, 19 nt, Artificial Sequence
  Description of Artificial Sequence: Synthetic oligonucleotide
auugggucucugccuuacu

SEQ ID NO: 1162099 - RNA, 19 nt, Artificial Sequence
  Description of Artificial Sequence: Synthetic oligonucleotide
acgugugugggguccuggu

SEQ ID NO: 1162100 - RNA, 19 nt, Artificial Sequence
  Description of Artificial Sequence: Synthetic oligonucleotide
ggagcgcaaaacaggcagg

SEQ ID NO: 1162101 - RNA, 19 nt, Artificial Sequence
  Description of Artificial Sequence: Synthetic oligonucleotide
guuggaguuuggaguuaag

SEQ ID NO: 1162102 - RNA, 19 nt, Artificial Sequence
  Description of Artificial Sequence: Synthetic oligonucleotide
cugaacugggaggagucca

SEQ ID NO: 1162103 - RNA, 19 nt, Artificial Sequence
  Description of Artificial Sequence: Synthetic oligonucleotide
uccguccggucgauaaaau

SEQ ID NO: 1162104 - RNA, 19 nt, Artificial Sequence
  Description of Artificial Sequence: Synthetic oligonucleotide
uaagcugugguggccccau

SEQ ID NO: 1162105 - RNA, 19 nt, Artificial Sequence
  Description of Artificial Sequence: Synthetic oligonucleotide
caaugcguucacccagguc

SEQ ID NO: 1162106 - RNA, 19 nt, Artificial Sequence
  Description of Artificial Sequence: Synthetic oligonucleotide
cucuccguccggucgauaa

SEQ ID NO: 1162107 - RNA, 19 nt, Artificial Sequence
  Description of Artificial Sequence: Synthetic oligonucleotide
guaguaccucgccuccuca

SEQ ID NO: 1162108 - RNA, 19 nt, Artificial Sequence
  Description of Artificial Sequence: Synthetic oligonucleotide
uugccgaccugugcggcca

SEQ ID NO: 1162109 - RNA, 19 nt, Artificial Sequence
  Description of Artificial Sequence: Synthetic oligonucleotide
agcguucuuuauggcauga

SEQ ID NO: 1162110 - RNA, 19 nt, Artificial Sequence
  Description of Artificial Sequence: Synthetic oligonucleotide
cugccuuacugacaggcua

SEQ ID NO: 1162111 - RNA, 19 nt, Artificial Sequence
  Description of Artificial Sequence: Synthetic oligonucleotide
guuuggaguuaagagcacu

SEQ ID NO: 1162112 - RNA, 19 nt, Artificial Sequence
  Description of Artificial Sequence: Synthetic oligonucleotide
gcagcaguuuugacguccg

SEQ ID NO: 1162113 - RNA, 19 nt, Artificial Sequence
  Description of Artificial Sequence: Synthetic oligonucleotide
gcgcaaaacaggcaggacu

SEQ ID NO: 1162114 - RNA, 19 nt, Artificial Sequence
  Description of Artificial Sequence: Synthetic oligonucleotide
gucaggugugcaccaagua

SEQ ID NO: 1162115 - RNA, 19 nt, Artificial Sequence
  Description of Artificial Sequence: Synthetic oligonucleotide
ugaaugcuggcaggccauc

SEQ ID NO: 1162116 - RNA, 19 nt, Artificial Sequence
  Description of Artificial Sequence: Synthetic oligonucleotide
ucgcgaaccaugggcugca

SEQ ID NO: 1162117 - RNA, 19 nt, Artificial Sequence
  Description of Artificial Sequence: Synthetic oligonucleotide
cguccggucgauaaaauaa

SEQ ID NO: 1162118 - RNA, 19 nt, Artificial Sequence
  Description of Artificial Sequence: Synthetic oligonucleotide
gaguugcacaugacaucac

SEQ ID NO: 1162119 - RNA, 19 nt, Artificial Sequence
  Description of Artificial Sequence: Synthetic oligonucleotide
auaagcugugguggcccca

SEQ ID NO: 1162120 - RNA, 19 nt, Artificial Sequence
  Description of Artificial Sequence: Synthetic oligonucleotide
ccggcaaagcacguacucg

SEQ ID NO: 1162121 - RNA, 19 nt, Artificial Sequence
  Description of Artificial Sequence: Synthetic oligonucleotide
ugacguccgcaggaacuga

SEQ ID NO: 1162122 - RNA, 19 nt, Artificial Sequence
  Description of Artificial Sequence: Synthetic oligonucleotide
aucacccgucucagggacg

SEQ ID NO: 1162123 - RNA, 19 nt, Artificial Sequence
  Description of Artificial Sequence: Synthetic oligonucleotide
cagcaguuuugacguccgc

SEQ ID NO: 1162124 - RNA, 19 nt, Artificial Sequence
  Description of Artificial Sequence: Synthetic oligonucleotide
gaaccugggccugaaugcu

SEQ ID NO: 1162125 - RNA, 19 nt, Artificial Sequence
  Description of Artificial Sequence: Synthetic oligonucleotide
agcagcgacgguccuuguu

SEQ ID NO: 1162126 - RNA, 19 nt, Artificial Sequence
  Description of Artificial Sequence: Synthetic oligonucleotide
cacaugacaucacccgucu

SEQ ID NO: 1162127 - RNA, 19 nt, Artificial Sequence
  Description of Artificial Sequence: Synthetic oligonucleotide
gugacaaggccaggguguc

SEQ ID NO: 1162128 - RNA, 19 nt, Artificial Sequence
  Description of Artificial Sequence: Synthetic oligonucleotide
agggacgacccuccucaau

SEQ ID NO: 1162129 - RNA, 19 nt, Artificial Sequence
  Description of Artificial Sequence: Synthetic oligonucleotide
agauguggacacagucagu

SEQ ID NO: 1162130 - RNA, 19 nt, Artificial Sequence
  Description of Artificial Sequence: Synthetic oligonucleotide
ggggaaacggaugacgugu

SEQ ID NO: 1162131 - RNA, 19 nt, Artificial Sequence
  Description of Artificial Sequence: Synthetic oligonucleotide
gccuugccgaccugugcgg

SEQ ID NO: 1162132 - RNA, 19 nt, Artificial Sequence
  Description of Artificial Sequence: Synthetic oligonucleotide
cacaguuaguuguguuuua

SEQ ID NO: 1162133 - RNA, 19 nt, Artificial Sequence
  Description of Artificial Sequence: Synthetic oligonucleotide
uggguugcggucgccgcuc

SEQ ID NO: 1162134 - RNA, 19 nt, Artificial Sequence
  Description of Artificial Sequence: Synthetic oligonucleotide
ggggccaugcuccauuucu

SEQ ID NO: 1162135 - RNA, 19 nt, Artificial Sequence
  Description of Artificial Sequence: Synthetic oligonucleotide
ggggacccagagauugacg

SEQ ID NO: 1162136 - RNA, 19 nt, Artificial Sequence
  Description of Artificial Sequence: Synthetic oligonucleotide
gcgacgguccuuguuggcc

SEQ ID NO: 1162137 - RNA, 19 nt, Artificial Sequence
  Description of Artificial Sequence: Synthetic oligonucleotide
ggacgacccuccucaauga

SEQ ID NO: 1162138 - RNA, 19 nt, Artificial Sequence
  Description of Artificial Sequence: Synthetic oligonucleotide
acggcagucgggguggguu

SEQ ID NO: 1162139 - RNA, 19 nt, Artificial Sequence
  Description of Artificial Sequence: Synthetic oligonucleotide
cagcaugaaccugggccug

SEQ ID NO: 1162140 - RNA, 19 nt, Artificial Sequence
  Description of Artificial Sequence: Synthetic oligonucleotide
ggaacgcaauaguguuuac

SEQ ID NO: 1162141 - RNA, 19 nt, Artificial Sequence
  Description of Artificial Sequence: Synthetic oligonucleotide
gcaauaguguuuacacaaa

SEQ ID NO: 1162142 - RNA, 19 nt, Artificial Sequence
  Description of Artificial Sequence: Synthetic oligonucleotide
gaggugccggccagggcac

SEQ ID NO: 1162143 - RNA, 19 nt, Artificial Sequence
  Description of Artificial Sequence: Synthetic oligonucleotide
ccggucgauaaaauaaugu

SEQ ID NO: 1162144 - RNA, 19 nt, Artificial Sequence
  Description of Artificial Sequence: Synthetic oligonucleotide
gcguucacccaggucgggg

SEQ ID NO: 1162145 - RNA, 19 nt, Artificial Sequence
  Description of Artificial Sequence: Synthetic oligonucleotide
ggguggguugcggucgccg

SEQ ID NO: 1162146 - RNA, 19 nt, Artificial Sequence
  Description of Artificial Sequence: Synthetic oligonucleotide
cagucgggguggguugcgg

SEQ ID NO: 1162147 - RNA, 19 nt, Artificial Sequence
  Description of Artificial Sequence: Synthetic oligonucleotide
uccggacggcagucggggu

SEQ ID NO: 1162148 - RNA, 19 nt, Artificial Sequence
  Description of Artificial Sequence: Synthetic oligonucleotide
uucucgccacugagugcaa

SEQ ID NO: 1162149 - RNA, 19 nt, Artificial Sequence
  Description of Artificial Sequence: Synthetic oligonucleotide
guggagcgcaaaacaggca

SEQ ID NO: 1162150 - RNA, 19 nt, Artificial Sequence
  Description of Artificial Sequence: Synthetic oligonucleotide
cugaaugcuggcaggccau

SEQ ID NO: 1162151 - RNA, 19 nt, Artificial Sequence
  Description of Artificial Sequence: Synthetic oligonucleotide
gcucgcgaaccaugggcug

SEQ ID NO: 1162152 - RNA, 19 nt, Artificial Sequence
  Description of Artificial Sequence: Synthetic oligonucleotide
cuccguccggucgauaaaa

SEQ ID NO: 1162153 - RNA, 19 nt, Artificial Sequence
  Description of Artificial Sequence: Synthetic oligonucleotide
guccgcaggaacugaguau

SEQ ID NO: 1162154 - RNA, 19 nt, Artificial Sequence
  Description of Artificial Sequence: Synthetic oligonucleotide
cccggcaaagcacguacuc

SEQ ID NO: 1162155 - RNA, 19 nt, Artificial Sequence
  Description of Artificial Sequence: Synthetic oligonucleotide
ugccggccagggcaccccu

SEQ ID NO: 1162156 - RNA, 19 nt, Artificial Sequence
  Description of Artificial Sequence: Synthetic oligonucleotide
guccggucgauaaaauaau

SEQ ID NO: 1162157 - RNA, 19 nt, Artificial Sequence
  Description of Artificial Sequence: Synthetic oligonucleotide
acguccgcaggaacugagu

SEQ ID NO: 1162158 - RNA, 19 nt, Artificial Sequence
  Description of Artificial Sequence: Synthetic oligonucleotide
cggaguugcacaugacauc

SEQ ID NO: 1162159 - RNA, 19 nt, Artificial Sequence
  Description of Artificial Sequence: Synthetic oligonucleotide
aguagccauugaggggaaa

SEQ ID NO: 1162160 - RNA, 19 nt, Artificial Sequence
  Description of Artificial Sequence: Synthetic oligonucleotide
gcggccacaguuaguugug

SEQ ID NO: 1162161 - RNA, 19 nt, Artificial Sequence
  Description of Artificial Sequence: Synthetic oligonucleotide
cccgcaggaggcagccacg

SEQ ID NO: 1162162 - RNA, 19 nt, Artificial Sequence
  Description of Artificial Sequence: Synthetic oligonucleotide
ccaggaacgcaauaguguu

SEQ ID NO: 1162163 - RNA, 19 nt, Artificial Sequence
  Description of Artificial Sequence: Synthetic oligonucleotide
agggccuaguccagggguu

SEQ ID NO: 1162164 - RNA, 19 nt, Artificial Sequence
  Description of Artificial Sequence: Synthetic oligonucleotide
aggucugcgaggaccucuu

SEQ ID NO: 1162165 - RNA, 19 nt, Artificial Sequence
  Description of Artificial Sequence: Synthetic oligonucleotide
ggcccauuccugagauaag

SEQ ID NO: 1162166 - RNA, 19 nt, Artificial Sequence
  Description of Artificial Sequence: Synthetic oligonucleotide
ccggacggcagucggggug

SEQ ID NO: 1162167 - RNA, 19 nt, Artificial Sequence
  Description of Artificial Sequence: Synthetic oligonucleotide
cucggaccaccaggcaguc

SEQ ID NO: 1162168 - RNA, 19 nt, Artificial Sequence
  Description of Artificial Sequence: Synthetic oligonucleotide
gcugccagccacgucuguc

SEQ ID NO: 1162169 - RNA, 19 nt, Artificial Sequence
  Description of Artificial Sequence: Synthetic oligonucleotide
gccacugagugcaaugcgu

SEQ ID NO: 1162170 - RNA, 19 nt, Artificial Sequence
  Description of Artificial Sequence: Synthetic oligonucleotide
ccagagauugacggugaca

SEQ ID NO: 1162171 - RNA, 19 nt, Artificial Sequence
  Description of Artificial Sequence: Synthetic oligonucleotide
gccagcguugacggaguug

SEQ ID NO: 1162172 - RNA, 19 nt, Artificial Sequence
  Description of Artificial Sequence: Synthetic oligonucleotide
caggaacgcaauaguguuu

SEQ ID NO: 1162173 - RNA, 19 nt, Artificial Sequence
  Description of Artificial Sequence: Synthetic oligonucleotide
ggacccagagauugacggu

SEQ ID NO: 1162174 - RNA, 19 nt, Artificial Sequence
  Description of Artificial Sequence: Synthetic oligonucleotide
cccagagauugacggugac

SEQ ID NO: 1162175 - RNA, 19 nt, Artificial Sequence
  Description of Artificial Sequence: Synthetic oligonucleotide
guggguugcggucgccgcu

SEQ ID NO: 1162176 - RNA, 19 nt, Artificial Sequence
  Description of Artificial Sequence: Synthetic oligonucleotide
caggcuaguugaguaaauu

SEQ ID NO: 1162177 - RNA, 19 nt, Artificial Sequence
  Description of Artificial Sequence: Synthetic oligonucleotide
ugguggccccaugcugacu

SEQ ID NO: 1162178 - RNA, 19 nt, Artificial Sequence
  Description of Artificial Sequence: Synthetic oligonucleotide
cggucgauaaaauaauguu

SEQ ID NO: 1162179 - RNA, 19 nt, Artificial Sequence
  Description of Artificial Sequence: Synthetic oligonucleotide
cuuaggcccaguccuuguu

SEQ ID NO: 1162180 - RNA, 19 nt, Artificial Sequence
  Description of Artificial Sequence: Synthetic oligonucleotide
agggcccauuccugagaua

SEQ ID NO: 1162181 - RNA, 19 nt, Artificial Sequence
  Description of Artificial Sequence: Synthetic oligonucleotide
uggguacgauugggucucu

SEQ ID NO: 1162182 - RNA, 19 nt, Artificial Sequence
  Description of Artificial Sequence: Synthetic oligonucleotide
caguagccauugaggggaa

SEQ ID NO: 1162183 - RNA, 19 nt, Artificial Sequence
  Description of Artificial Sequence: Synthetic oligonucleotide
gcagucgggguggguugcg

SEQ ID NO: 1162184 - RNA, 19 nt, Artificial Sequence
  Description of Artificial Sequence: Synthetic oligonucleotide
ccuugccgaccugugcggc

SEQ ID NO: 1162185 - RNA, 19 nt, Artificial Sequence
  Description of Artificial Sequence: Synthetic oligonucleotide
ggguacgauugggucucug

SEQ ID NO: 1162186 - RNA, 19 nt, Artificial Sequence
  Description of Artificial Sequence: Synthetic oligonucleotide
gccagcgcuccagcucgcg

SEQ ID NO: 1162187 - RNA, 19 nt, Artificial Sequence
  Description of Artificial Sequence: Synthetic oligonucleotide
gacgguccuuguuggccuu

SEQ ID NO: 1162188 - RNA, 19 nt, Artificial Sequence
  Description of Artificial Sequence: Synthetic oligonucleotide
ccguccggucgauaaaaua

SEQ ID NO: 1162189 - RNA, 19 nt, Artificial Sequence
  Description of Artificial Sequence: Synthetic oligonucleotide
gcaaugcguucacccaggu

SEQ ID NO: 1162190 - RNA, 19 nt, Artificial Sequence
  Description of Artificial Sequence: Synthetic oligonucleotide
gcguucuuuauggcaugaa

SEQ ID NO: 1162191 - RNA, 19 nt, Artificial Sequence
  Description of Artificial Sequence: Synthetic oligonucleotide
cagggacgacccuccucaa

SEQ ID NO: 1162192 - RNA, 19 nt, Artificial Sequence
  Description of Artificial Sequence: Synthetic oligonucleotide
gccgcuccucccggcaaag

SEQ ID NO: 1162193 - RNA, 19 nt, Artificial Sequence
  Description of Artificial Sequence: Synthetic oligonucleotide
ggccacaguuaguuguguu

SEQ ID NO: 1162194 - RNA, 19 nt, Artificial Sequence
  Description of Artificial Sequence: Synthetic oligonucleotide
gcacuggguacgauugggu

SEQ ID NO: 1162195 - RNA, 19 nt, Artificial Sequence
  Description of Artificial Sequence: Synthetic oligonucleotide
gcaugaaccugggccugaa

SEQ ID NO: 1162196 - RNA, 19 nt, Artificial Sequence
  Description of Artificial Sequence: Synthetic oligonucleotide
cguccgcaggaacugagua

SEQ ID NO: 1162197 - RNA, 19 nt, Artificial Sequence
  Description of Artificial Sequence: Synthetic oligonucleotide
cacccgucucagggacgac

SEQ ID NO: 1162198 - RNA, 19 nt, Artificial Sequence
  Description of Artificial Sequence: Synthetic oligonucleotide
cccuugguagaagggccca

SEQ ID NO: 1162199 - RNA, 19 nt, Artificial Sequence
  Description of Artificial Sequence: Synthetic oligonucleotide
gccuuacugacaggcuagu

SEQ ID NO: 1162200 - RNA, 19 nt, Artificial Sequence
  Description of Artificial Sequence: Synthetic oligonucleotide
cguugacggaguugcacau

SEQ ID NO: 1162201 - RNA, 19 nt, Artificial Sequence
  Description of Artificial Sequence: Synthetic oligonucleotide
cggaugacguguguggggu

SEQ ID NO: 1162202 - RNA, 19 nt, Artificial Sequence
  Description of Artificial Sequence: Synthetic oligonucleotide
ccguagcagagugucagau

SEQ ID NO: 1162203 - RNA, 19 nt, Artificial Sequence
  Description of Artificial Sequence: Synthetic oligonucleotide
caaugggcuccgugccguu

SEQ ID NO: 1162204 - RNA, 19 nt, Artificial Sequence
  Description of Artificial Sequence: Synthetic oligonucleotide
cuaggacaaugggcuccgu

SEQ ID NO: 1162205 - RNA, 19 nt, Artificial Sequence
  Description of Artificial Sequence: Synthetic oligonucleotide
ccucgccuccucauacagu

SEQ ID NO: 1162206 - RNA, 19 nt, Artificial Sequence
  Description of Artificial Sequence: Synthetic oligonucleotide
gguugcggucgccgcuccu

SEQ ID NO: 1162207 - RNA, 19 nt, Artificial Sequence
  Description of Artificial Sequence: Synthetic oligonucleotide
gggcaccccuccaucaguu

SEQ ID NO: 1162208 - RNA, 19 nt, Artificial Sequence
  Description of Artificial Sequence: Synthetic oligonucleotide
cuacgccgucgcugcuccu

SEQ ID NO: 1162209 - RNA, 19 nt, Artificial Sequence
  Description of Artificial Sequence: Synthetic oligonucleotide
ccccucugaaacagccuuu

SEQ ID NO: 1162210 - RNA, 19 nt, Artificial Sequence
  Description of Artificial Sequence: Synthetic oligonucleotide
ccucccggcaaagcacgua

SEQ ID NO: 1162211 - RNA, 19 nt, Artificial Sequence
  Description of Artificial Sequence: Synthetic oligonucleotide
ccuuacugacaggcuaguu

SEQ ID NO: 1162212 - RNA, 19 nt, Artificial Sequence
  Description of Artificial Sequence: Synthetic oligonucleotide
gccggccagggcaccccuc

SEQ ID NO: 1162213 - RNA, 19 nt, Artificial Sequence
  Description of Artificial Sequence: Synthetic oligonucleotide
ccagggguucuugcuuuau

SEQ ID NO: 1162214 - RNA, 19 nt, Artificial Sequence
  Description of Artificial Sequence: Synthetic oligonucleotide
ccgucucagggacgacccu

SEQ ID NO: 1162215 - RNA, 19 nt, Artificial Sequence
  Description of Artificial Sequence: Synthetic oligonucleotide
ccaguccuuguuggaguuu

SEQ ID NO: 1162216 - RNA, 19 nt, Artificial Sequence
  Description of Artificial Sequence: Synthetic oligonucleotide
cgaccugugcggccacagu

SEQ ID NO: 1162217 - RNA, 19 nt, Artificial Sequence
  Description of Artificial Sequence: Synthetic oligonucleotide
cggcuacgccgucgcugcu

SEQ ID NO: 1162218 - RNA, 19 nt, Artificial Sequence
  Description of Artificial Sequence: Synthetic oligonucleotide
uuaauuauguuucaaagac

SEQ ID NO: 1162219 - RNA, 19 nt, Artificial Sequence
  Description of Artificial Sequence: Synthetic oligonucleotide
aaaucgagccauuucaaac

SEQ ID NO: 1162220 - RNA, 19 nt, Artificial Sequence
  Description of Artificial Sequence: Synthetic oligonucleotide
uuuagcuucuacuaaauca

SEQ ID NO: 1162221 - RNA, 19 nt, Artificial Sequence
  Description of Artificial Sequence: Synthetic oligonucleotide
aaauaugguagcuggagag

SEQ ID NO: 1162222 - RNA, 19 nt, Artificial Sequence
  Description of Artificial Sequence: Synthetic oligonucleotide
ugauaauagaccauugcag

SEQ ID NO: 1162223 - RNA, 19 nt, Artificial Sequence
  Description of Artificial Sequence: Synthetic oligonucleotide
gaagacuuauucuuaauag

SEQ ID NO: 1162224 - RNA, 19 nt, Artificial Sequence
  Description of Artificial Sequence: Synthetic oligonucleotide
uuagcuucuacuaaaucag

SEQ ID NO: 1162225 - RNA, 19 nt, Artificial Sequence
  Description of Artificial Sequence: Synthetic oligonucleotide
accauaaccauuuuggaag

SEQ ID NO: 1162226 - RNA, 19 nt, Artificial Sequence
  Description of Artificial Sequence: Synthetic oligonucleotide
agaaaccuucuuuaaagcc

SEQ ID NO: 1162227 - RNA, 19 nt, Artificial Sequence
  Description of Artificial Sequence: Synthetic oligonucleotide
aauagaccauugcagaguc

SEQ ID NO: 1162228 - RNA, 19 nt, Artificial Sequence
  Description of Artificial Sequence: Synthetic oligonucleotide
uagcuggagaguaaaaucg

SEQ ID NO: 1162229 - RNA, 19 nt, Artificial Sequence
  Description of Artificial Sequence: Synthetic oligonucleotide
ugaguauagauacuuauuc

SEQ ID NO: 1162230 - RNA, 19 nt, Artificial Sequence
  Description of Artificial Sequence: Synthetic oligonucleotide
cugauacugacuuagaaac

SEQ ID NO: 1162231 - RNA, 19 nt, Artificial Sequence
  Description of Artificial Sequence: Synthetic oligonucleotide
aacagguacaggcaaggac

SEQ ID NO: 1162232 - RNA, 19 nt, Artificial Sequence
  Description of Artificial Sequence: Synthetic oligonucleotide
ugcaagguuaacaucauca

SEQ ID NO: 1162233 - RNA, 19 nt, Artificial Sequence
  Description of Artificial Sequence: Synthetic oligonucleotide
uuucuuuucacgacuacgc

SEQ ID NO: 1162234 - RNA, 19 nt, Artificial Sequence
  Description of Artificial Sequence: Synthetic oligonucleotide
uaaugcauauucacgagcc

SEQ ID NO: 1162235 - RNA, 19 nt, Artificial Sequence
  Description of Artificial Sequence: Synthetic oligonucleotide
guuagcaugauccaaacuc

SEQ ID NO: 1162236 - RNA, 19 nt, Artificial Sequence
  Description of Artificial Sequence: Synthetic oligonucleotide
uggagaguaaaaucgagcc

SEQ ID NO: 1162237 - RNA, 19 nt, Artificial Sequence
  Description of Artificial Sequence: Synthetic oligonucleotide
acuggcguuuccuaggucc

SEQ ID NO: 1162238 - RNA, 19 nt, Artificial Sequence
  Description of Artificial Sequence: Synthetic oligonucleotide
uuuauuugccucuuguucu

SEQ ID NO: 1162239 - RNA, 19 nt, Artificial Sequence
  Description of Artificial Sequence: Synthetic oligonucleotide
aaacaaugccuuuauucag

SEQ ID NO: 1162240 - RNA, 19 nt, Artificial Sequence
  Description of Artificial Sequence: Synthetic oligonucleotide
uauaucucuuuccaaagcu

SEQ ID NO: 1162241 - RNA, 19 nt, Artificial Sequence
  Description of Artificial Sequence: Synthetic oligonucleotide
agcaauaucaucccaacga

SEQ ID NO: 1162242 - RNA, 19 nt, Artificial Sequence
  Description of Artificial Sequence: Synthetic oligonucleotide
auacuuauucauuugguca

SEQ ID NO: 1162243 - RNA, 19 nt, Artificial Sequence
  Description of Artificial Sequence: Synthetic oligonucleotide
uccaacaccauccauuuga

SEQ ID NO: 1162244 - RNA, 19 nt, Artificial Sequence
  Description of Artificial Sequence: Synthetic oligonucleotide
agguauguaucuuugacug

SEQ ID NO: 1162245 - RNA, 19 nt, Artificial Sequence
  Description of Artificial Sequence: Synthetic oligonucleotide
aguuagacccucaauacgc

SEQ ID NO: 1162246 - RNA, 19 nt, Artificial Sequence
  Description of Artificial Sequence: Synthetic oligonucleotide
ugaugguaaaggaauguag

SEQ ID NO: 1162247 - RNA, 19 nt, Artificial Sequence
  Description of Artificial Sequence: Synthetic oligonucleotide
gacgaagagacauugaaga

SEQ ID NO: 1162248 - RNA, 19 nt, Artificial Sequence
  Description of Artificial Sequence: Synthetic oligonucleotide
aauguagauucuuuucuca

SEQ ID NO: 1162249 - RNA, 19 nt, Artificial Sequence
  Description of Artificial Sequence: Synthetic oligonucleotide
aagacuuauucuuaauagu

SEQ ID NO: 1162250 - RNA, 19 nt, Artificial Sequence
  Description of Artificial Sequence: Synthetic oligonucleotide
ucaauacgccuucucaugg

SEQ ID NO: 1162251 - RNA, 19 nt, Artificial Sequence
  Description of Artificial Sequence: Synthetic oligonucleotide
uucacgacuacgcacagcu

SEQ ID NO: 1162252 - RNA, 19 nt, Artificial Sequence
  Description of Artificial Sequence: Synthetic oligonucleotide
guuacuguguggcuuaggg

SEQ ID NO: 1162253 - RNA, 19 nt, Artificial Sequence
  Description of Artificial Sequence: Synthetic oligonucleotide
aaguuagcaugauccaaac

SEQ ID NO: 1162254 - RNA, 19 nt, Artificial Sequence
  Description of Artificial Sequence: Synthetic oligonucleotide
ucguucaacagguacaggc

SEQ ID NO: 1162255 - RNA, 19 nt, Artificial Sequence
  Description of Artificial Sequence: Synthetic oligonucleotide
uuagaagucaggguugacg

SEQ ID NO: 1162256 - RNA, 19 nt, Artificial Sequence
  Description of Artificial Sequence: Synthetic oligonucleotide
agaagccggaaguucaugc

SEQ ID NO: 1162257 - RNA, 19 nt, Artificial Sequence
  Description of Artificial Sequence: Synthetic oligonucleotide
uaaggcagauuucucacag

SEQ ID NO: 1162258 - RNA, 19 nt, Artificial Sequence
  Description of Artificial Sequence: Synthetic oligonucleotide
acauugguaacaccacugc

SEQ ID NO: 1162259 - RNA, 19 nt, Artificial Sequence
  Description of Artificial Sequence: Synthetic oligonucleotide
uauuuagaagucaggguug

SEQ ID NO: 1162260 - RNA, 19 nt, Artificial Sequence
  Description of Artificial Sequence: Synthetic oligonucleotide
uauagauacuuauucauuu

SEQ ID NO: 1162261 - RNA, 19 nt, Artificial Sequence
  Description of Artificial Sequence: Synthetic oligonucleotide
auaauagaccauugcagag

SEQ ID NO: 1162262 - RNA, 19 nt, Artificial Sequence
  Description of Artificial Sequence: Synthetic oligonucleotide
aguauagauacuuauucau

SEQ ID NO: 1162263 - RNA, 19 nt, Artificial Sequence
  Description of Artificial Sequence: Synthetic oligonucleotide
guaaaaucgagccauuuca

SEQ ID NO: 1162264 - RNA, 19 nt, Artificial Sequence
  Description of Artificial Sequence: Synthetic oligonucleotide
caacuuuacauucucacug

SEQ ID NO: 1162265 - RNA, 19 nt, Artificial Sequence
  Description of Artificial Sequence: Synthetic oligonucleotide
uuauaucucuuuccaaagc

SEQ ID NO: 1162266 - RNA, 19 nt, Artificial Sequence
  Description of Artificial Sequence: Synthetic oligonucleotide
aguacuccuuuccauggcc

SEQ ID NO: 1162267 - RNA, 19 nt, Artificial Sequence
  Description of Artificial Sequence: Synthetic oligonucleotide
auauccuuaacaugcuuag

SEQ ID NO: 1162268 - RNA, 19 nt, Artificial Sequence
  Description of Artificial Sequence: Synthetic oligonucleotide
uuagcaugauccaaacuca

SEQ ID NO: 1162269 - RNA, 19 nt, Artificial Sequence
  Description of Artificial Sequence: Synthetic oligonucleotide
uuauguuucaaagacuuaa

SEQ ID NO: 1162270 - RNA, 19 nt, Artificial Sequence
  Description of Artificial Sequence: Synthetic oligonucleotide
ucugcuaugauugcaaggu

SEQ ID NO: 1162271 - RNA, 19 nt, Artificial Sequence
  Description of Artificial Sequence: Synthetic oligonucleotide
uuuggaagggucaucauuu

SEQ ID NO: 1162272 - RNA, 19 nt, Artificial Sequence
  Description of Artificial Sequence: Synthetic oligonucleotide
uuuucucaagacgacgucg

SEQ ID NO: 1162273 - RNA, 19 nt, Artificial Sequence
  Description of Artificial Sequence: Synthetic oligonucleotide
cuguauuuagaagucaggg

SEQ ID NO: 1162274 - RNA, 19 nt, Artificial Sequence
  Description of Artificial Sequence: Synthetic oligonucleotide
uguauuuagaagucagggu

SEQ ID NO: 1162275 - RNA, 19 nt, Artificial Sequence
  Description of Artificial Sequence: Synthetic oligonucleotide
cuuaauaguucuucccugc

SEQ ID NO: 1162276 - RNA, 19 nt, Artificial Sequence
  Description of Artificial Sequence: Synthetic oligonucleotide
aagacuggcguuuccuagg

SEQ ID NO: 1162277 - RNA, 19 nt, Artificial Sequence
  Description of Artificial Sequence: Synthetic oligonucleotide
auaaauaugguagcuggag

SEQ ID NO: 1162278 - RNA, 19 nt, Artificial Sequence
  Description of Artificial Sequence: Synthetic oligonucleotide
cuuaacaugcuuagcuucc

SEQ ID NO: 1162279 - RNA, 19 nt, Artificial Sequence
  Description of Artificial Sequence: Synthetic oligonucleotide
aaccuuccauguuuucugc

SEQ ID NO: 1162280 - RNA, 19 nt, Artificial Sequence
  Description of Artificial Sequence: Synthetic oligonucleotide
ugacgaagagacauugaag

SEQ ID NO: 1162281 - RNA, 19 nt, Artificial Sequence
  Description of Artificial Sequence: Synthetic oligonucleotide
uccacauuuauuuccugcc

SEQ ID NO: 1162282 - RNA, 19 nt, Artificial Sequence
  Description of Artificial Sequence: Synthetic oligonucleotide
uacuguguggcuuaggguc

SEQ ID NO: 1162283 - RNA, 19 nt, Artificial Sequence
  Description of Artificial Sequence: Synthetic oligonucleotide
aaccauaaccauuuuggaa

SEQ ID NO: 1162284 - RNA, 19 nt, Artificial Sequence
  Description of Artificial Sequence: Synthetic oligonucleotide
gaguuagacccucaauacg

SEQ ID NO: 1162285 - RNA, 19 nt, Artificial Sequence
  Description of Artificial Sequence: Synthetic oligonucleotide
uuacaugugagaaguuagc

SEQ ID NO: 1162286 - RNA, 19 nt, Artificial Sequence
  Description of Artificial Sequence: Synthetic oligonucleotide
aguaaugcauauucacgag

SEQ ID NO: 1162287 - RNA, 19 nt, Artificial Sequence
  Description of Artificial Sequence: Synthetic oligonucleotide
uuuaaagcucucaaguguu

SEQ ID NO: 1162288 - RNA, 19 nt, Artificial Sequence
  Description of Artificial Sequence: Synthetic oligonucleotide
uuaauaguucuucccugcc

SEQ ID NO: 1162289 - RNA, 19 nt, Artificial Sequence
  Description of Artificial Sequence: Synthetic oligonucleotide
cuaaguccuugucauaucc

SEQ ID NO: 1162290 - RNA, 19 nt, Artificial Sequence
  Description of Artificial Sequence: Synthetic oligonucleotide
aucaaggaugcaucucugc

SEQ ID NO: 1162291 - RNA, 19 nt, Artificial Sequence
  Description of Artificial Sequence: Synthetic oligonucleotide
accagaguaaccuuccaug

SEQ ID NO: 1162292 - RNA, 19 nt, Artificial Sequence
  Description of Artificial Sequence: Synthetic oligonucleotide
uggaccaaccaucaguacu

SEQ ID NO: 1162293 - RNA, 19 nt, Artificial Sequence
  Description of Artificial Sequence: Synthetic oligonucleotide
augauugcaagguuaacau

SEQ ID NO: 1162294 - RNA, 19 nt, Artificial Sequence
  Description of Artificial Sequence: Synthetic oligonucleotide
gacgacuacaaauggaauc

SEQ ID NO: 1162295 - RNA, 19 nt, Artificial Sequence
  Description of Artificial Sequence: Synthetic oligonucleotide
acauugguaauguccgcac

SEQ ID NO: 1162296 - RNA, 19 nt, Artificial Sequence
  Description of Artificial Sequence: Synthetic oligonucleotide
uccuaaugcccuuaaagaa

SEQ ID NO: 1162297 - RNA, 19 nt, Artificial Sequence
  Description of Artificial Sequence: Synthetic oligonucleotide
ucaccauuauuaaaguuua

SEQ ID NO: 1162298 - RNA, 19 nt, Artificial Sequence
  Description of Artificial Sequence: Synthetic oligonucleotide
aaaaucgagccauuucaaa

SEQ ID NO: 1162299 - RNA, 19 nt, Artificial Sequence
  Description of Artificial Sequence: Synthetic oligonucleotide
aacuauccauuucucauau

SEQ ID NO: 1162300 - RNA, 19 nt, Artificial Sequence
  Description of Artificial Sequence: Synthetic oligonucleotide
agcucucgaagacuuauuc

SEQ ID NO: 1162301 - RNA, 19 nt, Artificial Sequence
  Description of Artificial Sequence: Synthetic oligonucleotide
ucauaguuucccaguaaug

SEQ ID NO: 1162302 - RNA, 19 nt, Artificial Sequence
  Description of Artificial Sequence: Synthetic oligonucleotide
ugauacugacuuagaaacc

SEQ ID NO: 1162303 - RNA, 19 nt, Artificial Sequence
  Description of Artificial Sequence: Synthetic oligonucleotide
guauguaucuuugacugag

SEQ ID NO: 1162304 - RNA, 19 nt, Artificial Sequence
  Description of Artificial Sequence: Synthetic oligonucleotide
gaccauugcagagucauag

SEQ ID NO: 1162305 - RNA, 19 nt, Artificial Sequence
  Description of Artificial Sequence: Synthetic oligonucleotide
gaguauagauacuuauuca

SEQ ID NO: 1162306 - RNA, 19 nt, Artificial Sequence
  Description of Artificial Sequence: Synthetic oligonucleotide
ucuuuucacgacuacgcac

SEQ ID NO: 1162307 - RNA, 19 nt, Artificial Sequence
  Description of Artificial Sequence: Synthetic oligonucleotide
aaauuuguggcugccagaa

SEQ ID NO: 1162308 - RNA, 19 nt, Artificial Sequence
  Description of Artificial Sequence: Synthetic oligonucleotide
guaaugcauauucacgagc

SEQ ID NO: 1162309 - RNA, 19 nt, Artificial Sequence
  Description of Artificial Sequence: Synthetic oligonucleotide
auauucacgagccaacuuu

SEQ ID NO: 1162310 - RNA, 19 nt, Artificial Sequence
  Description of Artificial Sequence: Synthetic oligonucleotide
acugaguauagauacuuau

SEQ ID NO: 1162311 - RNA, 19 nt, Artificial Sequence
  Description of Artificial Sequence: Synthetic oligonucleotide
uggcuuagggucaugguac

SEQ ID NO: 1162312 - RNA, 19 nt, Artificial Sequence
  Description of Artificial Sequence: Synthetic oligonucleotide
cuggagaguaaaaucgagc

SEQ ID NO: 1162313 - RNA, 19 nt, Artificial Sequence
  Description of Artificial Sequence: Synthetic oligonucleotide
auugguaauguccgcacca

SEQ ID NO: 1162314 - RNA, 19 nt, Artificial Sequence
  Description of Artificial Sequence: Synthetic oligonucleotide
cugauaauagaccauugca

SEQ ID NO: 1162315 - RNA, 19 nt, Artificial Sequence
  Description of Artificial Sequence: Synthetic oligonucleotide
acuacaaauggaaucuauc

SEQ ID NO: 1162316 - RNA, 19 nt, Artificial Sequence
  Description of Artificial Sequence: Synthetic oligonucleotide
gaagacuggcguuuccuag

SEQ ID NO: 1162317 - RNA, 19 nt, Artificial Sequence
  Description of Artificial Sequence: Synthetic oligonucleotide
auacauugguaauguccgc

SEQ ID NO: 1162318 - RNA, 19 nt, Artificial Sequence
  Description of Artificial Sequence: Synthetic oligonucleotide
acgucguaaagccucaucu

SEQ ID NO: 1162319 - RNA, 19 nt, Artificial Sequence
  Description of Artificial Sequence: Synthetic oligonucleotide
uucggauuucuucuggagu

SEQ ID NO: 1162320 - RNA, 19 nt, Artificial Sequence
  Description of Artificial Sequence: Synthetic oligonucleotide
aagacuuaaggcagauuuc

SEQ ID NO: 1162321 - RNA, 19 nt, Artificial Sequence
  Description of Artificial Sequence: Synthetic oligonucleotide
ugcagauggacgaugcgcu

SEQ ID NO: 1162322 - RNA, 19 nt, Artificial Sequence
  Description of Artificial Sequence: Synthetic oligonucleotide
ucacgagccaacuuuacau

SEQ ID NO: 1162323 - RNA, 19 nt, Artificial Sequence
  Description of Artificial Sequence: Synthetic oligonucleotide
uuucucaagacgacgucgu

SEQ ID NO: 1162324 - RNA, 19 nt, Artificial Sequence
  Description of Artificial Sequence: Synthetic oligonucleotide
guagauucuuuucucaaga

SEQ ID NO: 1162325 - RNA, 19 nt, Artificial Sequence
  Description of Artificial Sequence: Synthetic oligonucleotide
ucucacaguuuacauguga

SEQ ID NO: 1162326 - RNA, 19 nt, Artificial Sequence
  Description of Artificial Sequence: Synthetic oligonucleotide
uucuacuaaaucagcaaua

SEQ ID NO: 1162327 - RNA, 19 nt, Artificial Sequence
  Description of Artificial Sequence: Synthetic oligonucleotide
ucucuugaaagguuucgga

SEQ ID NO: 1162328 - RNA, 19 nt, Artificial Sequence
  Description of Artificial Sequence: Synthetic oligonucleotide
uggacgaugcgcucugacg

SEQ ID NO: 1162329 - RNA, 19 nt, Artificial Sequence
  Description of Artificial Sequence: Synthetic oligonucleotide
acugaucaugagaagacuc

SEQ ID NO: 1162330 - RNA, 19 nt, Artificial Sequence
  Description of Artificial Sequence: Synthetic oligonucleotide
aaugcauauucacgagcca

SEQ ID NO: 1162331 - RNA, 19 nt, Artificial Sequence
  Description of Artificial Sequence: Synthetic oligonucleotide
uaaccauuuuggaaggguc

SEQ ID NO: 1162332 - RNA, 19 nt, Artificial Sequence
  Description of Artificial Sequence: Synthetic oligonucleotide
uaauaguucuucccugccu

SEQ ID NO: 1162333 - RNA, 19 nt, Artificial Sequence
  Description of Artificial Sequence: Synthetic oligonucleotide
acauguaagcuggugcggc

SEQ ID NO: 1162334 - RNA, 19 nt, Artificial Sequence
  Description of Artificial Sequence: Synthetic oligonucleotide
uuuuagcuucuacuaaauc

SEQ ID NO: 1162335 - RNA, 19 nt, Artificial Sequence
  Description of Artificial Sequence: Synthetic oligonucleotide
cuuuucacgacuacgcaca

SEQ ID NO: 1162336 - RNA, 19 nt, Artificial Sequence
  Description of Artificial Sequence: Synthetic oligonucleotide
agaguaaccuuccauguuu

SEQ ID NO: 1162337 - RNA, 19 nt, Artificial Sequence
  Description of Artificial Sequence: Synthetic oligonucleotide
aacaccacugcuuccuuaa

SEQ ID NO: 1162338 - RNA, 19 nt, Artificial Sequence
  Description of Artificial Sequence: Synthetic oligonucleotide
uucuuuucacgacuacgca

SEQ ID NO: 1162339 - RNA, 19 nt, Artificial Sequence
  Description of Artificial Sequence: Synthetic oligonucleotide
aagccggaaguucaugcug

SEQ ID NO: 1162340 - RNA, 19 nt, Artificial Sequence
  Description of Artificial Sequence: Synthetic oligonucleotide
ugcuaugauugcaagguua

SEQ ID NO: 1162341 - RNA, 19 nt, Artificial Sequence
  Description of Artificial Sequence: Synthetic oligonucleotide
ugcauauucacgagccaac

SEQ ID NO: 1162342 - RNA, 19 nt, Artificial Sequence
  Description of Artificial Sequence: Synthetic oligonucleotide
acgacuacaaauggaaucu

SEQ ID NO: 1162343 - RNA, 19 nt, Artificial Sequence
  Description of Artificial Sequence: Synthetic oligonucleotide
agaagacucaugcucacau

SEQ ID NO: 1162344 - RNA, 19 nt, Artificial Sequence
  Description of Artificial Sequence: Synthetic oligonucleotide
uacaugugagaaguuagca

SEQ ID NO: 1162345 - RNA, 19 nt, Artificial Sequence
  Description of Artificial Sequence: Synthetic oligonucleotide
uaauagaccauugcagagu

SEQ ID NO: 1162346 - RNA, 19 nt, Artificial Sequence
  Description of Artificial Sequence: Synthetic oligonucleotide
aauaugguagcuggagagu

SEQ ID NO: 1162347 - RNA, 19 nt, Artificial Sequence
  Description of Artificial Sequence: Synthetic oligonucleotide
aaggaugcaucucugcaua

SEQ ID NO: 1162348 - RNA, 19 nt, Artificial Sequence
  Description of Artificial Sequence: Synthetic oligonucleotide
ucacaguuuacaugugaga

SEQ ID NO: 1162349 - RNA, 19 nt, Artificial Sequence
  Description of Artificial Sequence: Synthetic oligonucleotide
uucacgagccaacuuuaca

SEQ ID NO: 1162350 - RNA, 19 nt, Artificial Sequence
  Description of Artificial Sequence: Synthetic oligonucleotide
ggaaauuuguggcugccag

SEQ ID NO: 1162351 - RNA, 19 nt, Artificial Sequence
  Description of Artificial Sequence: Synthetic oligonucleotide
guuuccuagguccugguga

SEQ ID NO: 1162352 - RNA, 19 nt, Artificial Sequence
  Description of Artificial Sequence: Synthetic oligonucleotide
ugucuugcauucuguagca

SEQ ID NO: 1162353 - RNA, 19 nt, Artificial Sequence
  Description of Artificial Sequence: Synthetic oligonucleotide
uuaaggcagauuucucaca

SEQ ID NO: 1162354 - RNA, 19 nt, Artificial Sequence
  Description of Artificial Sequence: Synthetic oligonucleotide
agacuuaaggcagauuucu

SEQ ID NO: 1162355 - RNA, 19 nt, Artificial Sequence
  Description of Artificial Sequence: Synthetic oligonucleotide
aggggaaauuuguggcugc

SEQ ID NO: 1162356 - RNA, 19 nt, Artificial Sequence
  Description of Artificial Sequence: Synthetic oligonucleotide
caagacgacgucguaaagc

SEQ ID NO: 1162357 - RNA, 19 nt, Artificial Sequence
  Description of Artificial Sequence: Synthetic oligonucleotide
guauuuagaagucaggguu

SEQ ID NO: 1162358 - RNA, 19 nt, Artificial Sequence
  Description of Artificial Sequence: Synthetic oligonucleotide
ccaguaaugcauauucacg

SEQ ID NO: 1162359 - RNA, 19 nt, Artificial Sequence
  Description of Artificial Sequence: Synthetic oligonucleotide
acuaaguccuugucauauc

SEQ ID NO: 1162360 - RNA, 19 nt, Artificial Sequence
  Description of Artificial Sequence: Synthetic oligonucleotide
ucacccuucggcuugcuuc

SEQ ID NO: 1162361 - RNA, 19 nt, Artificial Sequence
  Description of Artificial Sequence: Synthetic oligonucleotide
uacauugguaauguccgca

SEQ ID NO: 1162362 - RNA, 19 nt, Artificial Sequence
  Description of Artificial Sequence: Synthetic oligonucleotide
aaccaucaguacuccuuuc

SEQ ID NO: 1162363 - RNA, 19 nt, Artificial Sequence
  Description of Artificial Sequence: Synthetic oligonucleotide
agguggaccaaccaucagu

SEQ ID NO: 1162364 - RNA, 19 nt, Artificial Sequence
  Description of Artificial Sequence: Synthetic oligonucleotide
uauucacgagccaacuuua

SEQ ID NO: 1162365 - RNA, 19 nt, Artificial Sequence
  Description of Artificial Sequence: Synthetic oligonucleotide
cuacaaauggaaucuaucu

SEQ ID NO: 1162366 - RNA, 19 nt, Artificial Sequence
  Description of Artificial Sequence: Synthetic oligonucleotide
gcauacauugguaaugucc

SEQ ID NO: 1162367 - RNA, 19 nt, Artificial Sequence
  Description of Artificial Sequence: Synthetic oligonucleotide
uuuucacgacuacgcacag

SEQ ID NO: 1162368 - RNA, 19 nt, Artificial Sequence
  Description of Artificial Sequence: Synthetic oligonucleotide
agaacucccugauaauaga

SEQ ID NO: 1162369 - RNA, 19 nt, Artificial Sequence
  Description of Artificial Sequence: Synthetic oligonucleotide
aucaucccaacgaacauug

SEQ ID NO: 1162370 - RNA, 19 nt, Artificial Sequence
  Description of Artificial Sequence: Synthetic oligonucleotide
agacuuauucuuaauaguu

SEQ ID NO: 1162371 - RNA, 19 nt, Artificial Sequence
  Description of Artificial Sequence: Synthetic oligonucleotide
acuacgcacagcuuucccu

SEQ ID NO: 1162372 - RNA, 19 nt, Artificial Sequence
  Description of Artificial Sequence: Synthetic oligonucleotide
cuucucuugaaagguuucg

SEQ ID NO: 1162373 - RNA, 19 nt, Artificial Sequence
  Description of Artificial Sequence: Synthetic oligonucleotide
cuucguucaacagguacag

SEQ ID NO: 1162374 - RNA, 19 nt, Artificial Sequence
  Description of Artificial Sequence: Synthetic oligonucleotide
aaccauuuuggaaggguca

SEQ ID NO: 1162375 - RNA, 19 nt, Artificial Sequence
  Description of Artificial Sequence: Synthetic oligonucleotide
auaaccauuuuggaagggu

SEQ ID NO: 1162376 - RNA, 19 nt, Artificial Sequence
  Description of Artificial Sequence: Synthetic oligonucleotide
gagaaguuagcaugaucca

SEQ ID NO: 1162377 - RNA, 19 nt, Artificial Sequence
  Description of Artificial Sequence: Synthetic oligonucleotide
ggaguuagacccucaauac

SEQ ID NO: 1162378 - RNA, 19 nt, Artificial Sequence
  Description of Artificial Sequence: Synthetic oligonucleotide
gacauugaagaauguuguc

SEQ ID NO: 1162379 - RNA, 19 nt, Artificial Sequence
  Description of Artificial Sequence: Synthetic oligonucleotide
gaagacucaugcucacaug

SEQ ID NO: 1162380 - RNA, 19 nt, Artificial Sequence
  Description of Artificial Sequence: Synthetic oligonucleotide
ucaagacgacgucguaaag

SEQ ID NO: 1162381 - RNA, 19 nt, Artificial Sequence
  Description of Artificial Sequence: Synthetic oligonucleotide
ucauauccagugcugucaa

SEQ ID NO: 1162382 - RNA, 19 nt, Artificial Sequence
  Description of Artificial Sequence: Synthetic oligonucleotide
ugacgccugugccugggcg

SEQ ID NO: 1162383 - RNA, 19 nt, Artificial Sequence
  Description of Artificial Sequence: Synthetic oligonucleotide
ucuucucuugaaagguuuc

SEQ ID NO: 1162384 - RNA, 19 nt, Artificial Sequence
  Description of Artificial Sequence: Synthetic oligonucleotide
uuaaaggggugcuguccag

SEQ ID NO: 1162385 - RNA, 19 nt, Artificial Sequence
  Description of Artificial Sequence: Synthetic oligonucleotide
auagcacucagugcaauga

SEQ ID NO: 1162386 - RNA, 19 nt, Artificial Sequence
  Description of Artificial Sequence: Synthetic oligonucleotide
ucucgaagacuuauucuua

SEQ ID NO: 1162387 - RNA, 19 nt, Artificial Sequence
  Description of Artificial Sequence: Synthetic oligonucleotide
ucuucuggaguuagacccu

SEQ ID NO: 1162388 - RNA, 19 nt, Artificial Sequence
  Description of Artificial Sequence: Synthetic oligonucleotide
ggagguauguaucuuugac

SEQ ID NO: 1162389 - RNA, 19 nt, Artificial Sequence
  Description of Artificial Sequence: Synthetic oligonucleotide
gguaauguccgcaccagag

SEQ ID NO: 1162390 - RNA, 19 nt, Artificial Sequence
  Description of Artificial Sequence: Synthetic oligonucleotide
cugaucaugagaagacuca

SEQ ID NO: 1162391 - RNA, 19 nt, Artificial Sequence
  Description of Artificial Sequence: Synthetic oligonucleotide
ggacgaugcgcucugacgc

SEQ ID NO: 1162392 - RNA, 19 nt, Artificial Sequence
  Description of Artificial Sequence: Synthetic oligonucleotide
ccuaaugcccuuaaagaac

SEQ ID NO: 1162393 - RNA, 19 nt, Artificial Sequence
  Description of Artificial Sequence: Synthetic oligonucleotide
ugggcgguuacuguguggc

SEQ ID NO: 1162394 - RNA, 19 nt, Artificial Sequence
  Description of Artificial Sequence: Synthetic oligonucleotide
uggucaagaacucccugau

SEQ ID NO: 1162395 - RNA, 19 nt, Artificial Sequence
  Description of Artificial Sequence: Synthetic oligonucleotide
ugauugcaagguuaacauc

SEQ ID NO: 1162396 - RNA, 19 nt, Artificial Sequence
  Description of Artificial Sequence: Synthetic oligonucleotide
cuggagguauguaucuuug

SEQ ID NO: 1162397 - RNA, 19 nt, Artificial Sequence
  Description of Artificial Sequence: Synthetic oligonucleotide
auggacgaugcgcucugac

SEQ ID NO: 1162398 - RNA, 19 nt, Artificial Sequence
  Description of Artificial Sequence: Synthetic oligonucleotide
agccggaaguucaugcugc

SEQ ID NO: 1162399 - RNA, 19 nt, Artificial Sequence
  Description of Artificial Sequence: Synthetic oligonucleotide
cugugcagauggacgaugc

SEQ ID NO: 1162400 - RNA, 19 nt, Artificial Sequence
  Description of Artificial Sequence: Synthetic oligonucleotide
uuagacccucaauacgccu

SEQ ID NO: 1162401 - RNA, 19 nt, Artificial Sequence
  Description of Artificial Sequence: Synthetic oligonucleotide
augagaagacucaugcuca

SEQ ID NO: 1162402 - RNA, 19 nt, Artificial Sequence
  Description of Artificial Sequence: Synthetic oligonucleotide
aguuagcaugauccaaacu

SEQ ID NO: 1162403 - RNA, 19 nt, Artificial Sequence
  Description of Artificial Sequence: Synthetic oligonucleotide
gagaguaaaaucgagccau

SEQ ID NO: 1162404 - RNA, 19 nt, Artificial Sequence
  Description of Artificial Sequence: Synthetic oligonucleotide
cauugguaauguccgcacc

SEQ ID NO: 1162405 - RNA, 19 nt, Artificial Sequence
  Description of Artificial Sequence: Synthetic oligonucleotide
aggguugacgaagagacau

SEQ ID NO: 1162406 - RNA, 19 nt, Artificial Sequence
  Description of Artificial Sequence: Synthetic oligonucleotide
auauccagugcugucaaau

SEQ ID NO: 1162407 - RNA, 19 nt, Artificial Sequence
  Description of Artificial Sequence: Synthetic oligonucleotide
agcaugauccaaacucaac

SEQ ID NO: 1162408 - RNA, 19 nt, Artificial Sequence
  Description of Artificial Sequence: Synthetic oligonucleotide
gacgacgucguaaagccuc

SEQ ID NO: 1162409 - RNA, 19 nt, Artificial Sequence
  Description of Artificial Sequence: Synthetic oligonucleotide
uugguaauguccgcaccag

SEQ ID NO: 1162410 - RNA, 19 nt, Artificial Sequence
  Description of Artificial Sequence: Synthetic oligonucleotide
gagguauguaucuuugacu

SEQ ID NO: 1162411 - RNA, 19 nt, Artificial Sequence
  Description of Artificial Sequence: Synthetic oligonucleotide
ugaagucccgcgacgacua

SEQ ID NO: 1162412 - RNA, 19 nt, Artificial Sequence
  Description of Artificial Sequence: Synthetic oligonucleotide
ucaucccaacgaacauugg

SEQ ID NO: 1162413 - RNA, 19 nt, Artificial Sequence
  Description of Artificial Sequence: Synthetic oligonucleotide
cuacgcacagcuuucccuc

SEQ ID NO: 1162414 - RNA, 19 nt, Artificial Sequence
  Description of Artificial Sequence: Synthetic oligonucleotide
aacagaagacggacaagcu

SEQ ID NO: 1162415 - RNA, 19 nt, Artificial Sequence
  Description of Artificial Sequence: Synthetic oligonucleotide
agacucugugcagauggac

SEQ ID NO: 1162416 - RNA, 19 nt, Artificial Sequence
  Description of Artificial Sequence: Synthetic oligonucleotide
uguugucuugcauucugua

SEQ ID NO: 1162417 - RNA, 19 nt, Artificial Sequence
  Description of Artificial Sequence: Synthetic oligonucleotide
uggccaucaaggaugcauc

SEQ ID NO: 1162418 - RNA, 19 nt, Artificial Sequence
  Description of Artificial Sequence: Synthetic oligonucleotide
uuuagcaagaagggucuuc

SEQ ID NO: 1162419 - RNA, 19 nt, Artificial Sequence
  Description of Artificial Sequence: Synthetic oligonucleotide
ugagaagacucaugcucac

SEQ ID NO: 1162420 - RNA, 19 nt, Artificial Sequence
  Description of Artificial Sequence: Synthetic oligonucleotide
gacgccugugccugggcgg

SEQ ID NO: 1162421 - RNA, 19 nt, Artificial Sequence
  Description of Artificial Sequence: Synthetic oligonucleotide
cauguaagcuggugcggcc

SEQ ID NO: 1162422 - RNA, 19 nt, Artificial Sequence
  Description of Artificial Sequence: Synthetic oligonucleotide
aucccaacgaacauuggga

SEQ ID NO: 1162423 - RNA, 19 nt, Artificial Sequence
  Description of Artificial Sequence: Synthetic oligonucleotide
gaacucccugauaauagac

SEQ ID NO: 1162424 - RNA, 19 nt, Artificial Sequence
  Description of Artificial Sequence: Synthetic oligonucleotide
acgaagagacauugaagaa

SEQ ID NO: 1162425 - RNA, 19 nt, Artificial Sequence
  Description of Artificial Sequence: Synthetic oligonucleotide
uagcaugauccaaacucaa

SEQ ID NO: 1162426 - RNA, 19 nt, Artificial Sequence
  Description of Artificial Sequence: Synthetic oligonucleotide
acuauccauuucucauauc

SEQ ID NO: 1162427 - RNA, 19 nt, Artificial Sequence
  Description of Artificial Sequence: Synthetic oligonucleotide
cuacuaaaucagcaauauc

SEQ ID NO: 1162428 - RNA, 19 nt, Artificial Sequence
  Description of Artificial Sequence: Synthetic oligonucleotide
uuaacaugcuuagcuucca

SEQ ID NO: 1162429 - RNA, 19 nt, Artificial Sequence
  Description of Artificial Sequence: Synthetic oligonucleotide
ugccuuuauucagaaucag

SEQ ID NO: 1162430 - RNA, 19 nt, Artificial Sequence
  Description of Artificial Sequence: Synthetic oligonucleotide
ucucaccauuauuaaaguu

SEQ ID NO: 1162431 - RNA, 19 nt, Artificial Sequence
  Description of Artificial Sequence: Synthetic oligonucleotide
cucuuuccaaagcuucuac

SEQ ID NO: 1162432 - RNA, 19 nt, Artificial Sequence
  Description of Artificial Sequence: Synthetic oligonucleotide
ucuauaucccaggggaaau

SEQ ID NO: 1162433 - RNA, 19 nt, Artificial Sequence
  Description of Artificial Sequence: Synthetic oligonucleotide
caggcaaggaccacacuuc

SEQ ID NO: 1162434 - RNA, 19 nt, Artificial Sequence
  Description of Artificial Sequence: Synthetic oligonucleotide
ucccaacgaacauugggau

SEQ ID NO: 1162435 - RNA, 19 nt, Artificial Sequence
  Description of Artificial Sequence: Synthetic oligonucleotide
cuaaugcccuuaaagaacu

SEQ ID NO: 1162436 - RNA, 19 nt, Artificial Sequence
  Description of Artificial Sequence: Synthetic oligonucleotide
uucaugcucuucugaaguc

SEQ ID NO: 1162437 - RNA, 19 nt, Artificial Sequence
  Description of Artificial Sequence: Synthetic oligonucleotide
acucaugcucacauguaag

SEQ ID NO: 1162438 - RNA, 19 nt, Artificial Sequence
  Description of Artificial Sequence: Synthetic oligonucleotide
ucaugguacugagaagacu

SEQ ID NO: 1162439 - RNA, 19 nt, Artificial Sequence
  Description of Artificial Sequence: Synthetic oligonucleotide
accuguugccauuucugcu

SEQ ID NO: 1162440 - RNA, 19 nt, Artificial Sequence
  Description of Artificial Sequence: Synthetic oligonucleotide
ucccgcgacgacuacaaau

SEQ ID NO: 1162441 - RNA, 19 nt, Artificial Sequence
  Description of Artificial Sequence: Synthetic oligonucleotide
ugguaauguccgcaccaga

SEQ ID NO: 1162442 - RNA, 19 nt, Artificial Sequence
  Description of Artificial Sequence: Synthetic oligonucleotide
uguaagcuggugcggccga

SEQ ID NO: 1162443 - RNA, 19 nt, Artificial Sequence
  Description of Artificial Sequence: Synthetic oligonucleotide
uugcagagucauaguuucc

SEQ ID NO: 1162444 - RNA, 19 nt, Artificial Sequence
  Description of Artificial Sequence: Synthetic oligonucleotide
acugacuuagaaaccuucu

SEQ ID NO: 1162445 - RNA, 19 nt, Artificial Sequence
  Description of Artificial Sequence: Synthetic oligonucleotide
cagauuucucacaguuuac

SEQ ID NO: 1162446 - RNA, 19 nt, Artificial Sequence
  Description of Artificial Sequence: Synthetic oligonucleotide
ggaauguagauucuuuucu

SEQ ID NO: 1162447 - RNA, 19 nt, Artificial Sequence
  Description of Artificial Sequence: Synthetic oligonucleotide
caucaaggaugcaucucug

SEQ ID NO: 1162448 - RNA, 19 nt, Artificial Sequence
  Description of Artificial Sequence: Synthetic oligonucleotide
uagacccucaauacgccuu

SEQ ID NO: 1162449 - RNA, 19 nt, Artificial Sequence
  Description of Artificial Sequence: Synthetic oligonucleotide
uguggcuuagggucauggu

SEQ ID NO: 1162450 - RNA, 19 nt, Artificial Sequence
  Description of Artificial Sequence: Synthetic oligonucleotide
gacgaugcgcucugacgcc

SEQ ID NO: 1162451 - RNA, 19 nt, Artificial Sequence
  Description of Artificial Sequence: Synthetic oligonucleotide
agucauaguuucccaguaa

SEQ ID NO: 1162452 - RNA, 19 nt, Artificial Sequence
  Description of Artificial Sequence: Synthetic oligonucleotide
cauaaccauuuuggaaggg

SEQ ID NO: 1162453 - RNA, 19 nt, Artificial Sequence
  Description of Artificial Sequence: Synthetic oligonucleotide
agauggacgaugcgcucug

SEQ ID NO: 1162454 - RNA, 19 nt, Artificial Sequence
  Description of Artificial Sequence: Synthetic oligonucleotide
gacuacgcacagcuuuccc

SEQ ID NO: 1162455 - RNA, 19 nt, Artificial Sequence
  Description of Artificial Sequence: Synthetic oligonucleotide
guuagacccucaauacgcc

SEQ ID NO: 1162456 - RNA, 19 nt, Artificial Sequence
  Description of Artificial Sequence: Synthetic oligonucleotide
gcugcgcagcuuuuaaagg

SEQ ID NO: 1162457 - RNA, 19 nt, Artificial Sequence
  Description of Artificial Sequence: Synthetic oligonucleotide
gaaguucaugcugcgcagc

SEQ ID NO: 1162458 - RNA, 19 nt, Artificial Sequence
  Description of Artificial Sequence: Synthetic oligonucleotide
uauccagugcugucaaauu

SEQ ID NO: 1162459 - RNA, 19 nt, Artificial Sequence
  Description of Artificial Sequence: Synthetic oligonucleotide
auucacgagccaacuuuac

SEQ ID NO: 1162460 - RNA, 19 nt, Artificial Sequence
  Description of Artificial Sequence: Synthetic oligonucleotide
aucuauaucccaggggaaa

SEQ ID NO: 1162461 - RNA, 19 nt, Artificial Sequence
  Description of Artificial Sequence: Synthetic oligonucleotide
ccaacgaacauugggauuc

SEQ ID NO: 1162462 - RNA, 19 nt, Artificial Sequence
  Description of Artificial Sequence: Synthetic oligonucleotide
gguugacgaagagacauug

SEQ ID NO: 1162463 - RNA, 19 nt, Artificial Sequence
  Description of Artificial Sequence: Synthetic oligonucleotide
cuuagggucaugguacuga

SEQ ID NO: 1162464 - RNA, 19 nt, Artificial Sequence
  Description of Artificial Sequence: Synthetic oligonucleotide
guacugagaagacuggcgu

SEQ ID NO: 1162465 - RNA, 19 nt, Artificial Sequence
  Description of Artificial Sequence: Synthetic oligonucleotide
ugccugggcgguuacugug

SEQ ID NO: 1162466 - RNA, 19 nt, Artificial Sequence
  Description of Artificial Sequence: Synthetic oligonucleotide
acccucaauacgccuucuc

SEQ ID NO: 1162467 - RNA, 19 nt, Artificial Sequence
  Description of Artificial Sequence: Synthetic oligonucleotide
uucguucaacagguacagg

SEQ ID NO: 1162468 - RNA, 19 nt, Artificial Sequence
  Description of Artificial Sequence: Synthetic oligonucleotide
acgacuacgcacagcuuuc

SEQ ID NO: 1162469 - RNA, 19 nt, Artificial Sequence
  Description of Artificial Sequence: Synthetic oligonucleotide
acgaacauugggauucuga

SEQ ID NO: 1162470 - RNA, 19 nt, Artificial Sequence
  Description of Artificial Sequence: Synthetic oligonucleotide
ucgagccauuucaaacaga

SEQ ID NO: 1162471 - RNA, 19 nt, Artificial Sequence
  Description of Artificial Sequence: Synthetic oligonucleotide
uaaaggggugcuguccagu

SEQ ID NO: 1162472 - RNA, 19 nt, Artificial Sequence
  Description of Artificial Sequence: Synthetic oligonucleotide
agacuggcguuuccuaggu

SEQ ID NO: 1162473 - RNA, 19 nt, Artificial Sequence
  Description of Artificial Sequence: Synthetic oligonucleotide
cauccacauugguaacacc

SEQ ID NO: 1162474 - RNA, 19 nt, Artificial Sequence
  Description of Artificial Sequence: Synthetic oligonucleotide
gcaugauccaaacucaacu

SEQ ID NO: 1162475 - RNA, 19 nt, Artificial Sequence
  Description of Artificial Sequence: Synthetic oligonucleotide
uccugccaaaccuguugcc

SEQ ID NO: 1162476 - RNA, 19 nt, Artificial Sequence
  Description of Artificial Sequence: Synthetic oligonucleotide
gacgucguaaagccucauc

SEQ ID NO: 1162477 - RNA, 19 nt, Artificial Sequence
  Description of Artificial Sequence: Synthetic oligonucleotide
guggcuuagggucauggua

SEQ ID NO: 1162478 - RNA, 19 nt, Artificial Sequence
  Description of Artificial Sequence: Synthetic oligonucleotide
ggagaguaaaaucgagcca

SEQ ID NO: 1162479 - RNA, 19 nt, Artificial Sequence
  Description of Artificial Sequence: Synthetic oligonucleotide
ugcauacauugguaauguc

SEQ ID NO: 1162480 - RNA, 19 nt, Artificial Sequence
  Description of Artificial Sequence: Synthetic oligonucleotide
aauguccgcaccagaguaa

SEQ ID NO: 1162481 - RNA, 19 nt, Artificial Sequence
  Description of Artificial Sequence: Synthetic oligonucleotide
gaagaauguugucuugcau

SEQ ID NO: 1162482 - RNA, 19 nt, Artificial Sequence
  Description of Artificial Sequence: Synthetic oligonucleotide
gacuuaaggcagauuucuc

SEQ ID NO: 1162483 - RNA, 19 nt, Artificial Sequence
  Description of Artificial Sequence: Synthetic oligonucleotide
cucucgaagacuuauucuu

SEQ ID NO: 1162484 - RNA, 19 nt, Artificial Sequence
  Description of Artificial Sequence: Synthetic oligonucleotide
guaaagccucaucuauauc

SEQ ID NO: 1162485 - RNA, 19 nt, Artificial Sequence
  Description of Artificial Sequence: Synthetic oligonucleotide
uuucacgacuacgcacagc

SEQ ID NO: 1162486 - RNA, 19 nt, Artificial Sequence
  Description of Artificial Sequence: Synthetic oligonucleotide
gaagccggaaguucaugcu

SEQ ID NO: 1162487 - RNA, 19 nt, Artificial Sequence
  Description of Artificial Sequence: Synthetic oligonucleotide
uguccgcaccagaguaacc

SEQ ID NO: 1162488 - RNA, 19 nt, Artificial Sequence
  Description of Artificial Sequence: Synthetic oligonucleotide
cccgcgacgacuacaaaug

SEQ ID NO: 1162489 - RNA, 19 nt, Artificial Sequence
  Description of Artificial Sequence: Synthetic oligonucleotide
aacgaacauugggauucug

SEQ ID NO: 1162490 - RNA, 19 nt, Artificial Sequence
  Description of Artificial Sequence: Synthetic oligonucleotide
gucguaaagccucaucuau

SEQ ID NO: 1162491 - RNA, 19 nt, Artificial Sequence
  Description of Artificial Sequence: Synthetic oligonucleotide
guaaccuuccauguuuucu

SEQ ID NO: 1162492 - RNA, 19 nt, Artificial Sequence
  Description of Artificial Sequence: Synthetic oligonucleotide
agcuggagaguaaaaucga

SEQ ID NO: 1162493 - RNA, 19 nt, Artificial Sequence
  Description of Artificial Sequence: Synthetic oligonucleotide
cuaugauugcaagguuaac

SEQ ID NO: 1162494 - RNA, 19 nt, Artificial Sequence
  Description of Artificial Sequence: Synthetic oligonucleotide
ggaccaaccaucaguacuc

SEQ ID NO: 1162495 - RNA, 19 nt, Artificial Sequence
  Description of Artificial Sequence: Synthetic oligonucleotide
gcuggagaguaaaaucgag

SEQ ID NO: 1162496 - RNA, 19 nt, Artificial Sequence
  Description of Artificial Sequence: Synthetic oligonucleotide
guaauguccgcaccagagu

SEQ ID NO: 1162497 - RNA, 19 nt, Artificial Sequence
  Description of Artificial Sequence: Synthetic oligonucleotide
augguagcuggagaguaaa

SEQ ID NO: 1162498 - RNA, 19 nt, Artificial Sequence
  Description of Artificial Sequence: Synthetic oligonucleotide
accaaccaucaguacuccu

SEQ ID NO: 1162499 - RNA, 19 nt, Artificial Sequence
  Description of Artificial Sequence: Synthetic oligonucleotide
gguauguaucuuugacuga

SEQ ID NO: 1162500 - RNA, 19 nt, Artificial Sequence
  Description of Artificial Sequence: Synthetic oligonucleotide
auugcaagguuaacaucau

SEQ ID NO: 1162501 - RNA, 19 nt, Artificial Sequence
  Description of Artificial Sequence: Synthetic oligonucleotide
agaagacggacaagcuucu

SEQ ID NO: 1162502 - RNA, 19 nt, Artificial Sequence
  Description of Artificial Sequence: Synthetic oligonucleotide
cugggcgguuacugugugg

SEQ ID NO: 1162503 - RNA, 19 nt, Artificial Sequence
  Description of Artificial Sequence: Synthetic oligonucleotide
aguccuugucauauccagu

SEQ ID NO: 1162504 - RNA, 19 nt, Artificial Sequence
  Description of Artificial Sequence: Synthetic oligonucleotide
cugaguauagauacuuauu

SEQ ID NO: 1162505 - RNA, 19 nt, Artificial Sequence
  Description of Artificial Sequence: Synthetic oligonucleotide
auccuccauggugguaggc

SEQ ID NO: 1162506 - RNA, 19 nt, Artificial Sequence
  Description of Artificial Sequence: Synthetic oligonucleotide
caucuauaucccaggggaa

SEQ ID NO: 1162507 - RNA, 19 nt, Artificial Sequence
  Description of Artificial Sequence: Synthetic oligonucleotide
cuuagcuuccacauuuauu

SEQ ID NO: 1162508 - RNA, 19 nt, Artificial Sequence
  Description of Artificial Sequence: Synthetic oligonucleotide
guugacgaagagacauuga

SEQ ID NO: 1162509 - RNA, 19 nt, Artificial Sequence
  Description of Artificial Sequence: Synthetic oligonucleotide
ugcagcugauacugacuua

SEQ ID NO: 1162510 - RNA, 19 nt, Artificial Sequence
  Description of Artificial Sequence: Synthetic oligonucleotide
ugcucacauguaagcuggu

SEQ ID NO: 1162511 - RNA, 19 nt, Artificial Sequence
  Description of Artificial Sequence: Synthetic oligonucleotide
gcuaugauugcaagguuaa

SEQ ID NO: 1162512 - RNA, 19 nt, Artificial Sequence
  Description of Artificial Sequence: Synthetic oligonucleotide
cuucuggaguuagacccuc

SEQ ID NO: 1162513 - RNA, 19 nt, Artificial Sequence
  Description of Artificial Sequence: Synthetic oligonucleotide
augcugcgcagcuuuuaaa

SEQ ID NO: 1162514 - RNA, 19 nt, Artificial Sequence
  Description of Artificial Sequence: Synthetic oligonucleotide
acgcacagcuuucccucug

SEQ ID NO: 1162515 - RNA, 19 nt, Artificial Sequence
  Description of Artificial Sequence: Synthetic oligonucleotide
guggaccaaccaucaguac

SEQ ID NO: 1162516 - RNA, 19 nt, Artificial Sequence
  Description of Artificial Sequence: Synthetic oligonucleotide
gcgacgacuacaaauggaa

SEQ ID NO: 1162517 - RNA, 19 nt, Artificial Sequence
  Description of Artificial Sequence: Synthetic oligonucleotide
cuuucacccuucggcuugc

SEQ ID NO: 1162518 - RNA, 19 nt, Artificial Sequence
  Description of Artificial Sequence: Synthetic oligonucleotide
aguuucccaguaaugcaua

SEQ ID NO: 1162519 - RNA, 19 nt, Artificial Sequence
  Description of Artificial Sequence: Synthetic oligonucleotide
caaggaugcaucucugcau

SEQ ID NO: 1162520 - RNA, 19 nt, Artificial Sequence
  Description of Artificial Sequence: Synthetic oligonucleotide
gguggaccaaccaucagua

SEQ ID NO: 1162521 - RNA, 19 nt, Artificial Sequence
  Description of Artificial Sequence: Synthetic oligonucleotide
cgagccauuucaaacagaa

SEQ ID NO: 1162522 - RNA, 19 nt, Artificial Sequence
  Description of Artificial Sequence: Synthetic oligonucleotide
agacucuccucuguauuua

SEQ ID NO: 1162523 - RNA, 19 nt, Artificial Sequence
  Description of Artificial Sequence: Synthetic oligonucleotide
cccugauaauagaccauug

SEQ ID NO: 1162524 - RNA, 19 nt, Artificial Sequence
  Description of Artificial Sequence: Synthetic oligonucleotide
gguaacaccacugcuuccu

SEQ ID NO: 1162525 - RNA, 19 nt, Artificial Sequence
  Description of Artificial Sequence: Synthetic oligonucleotide
cagguggaccaaccaucag

SEQ ID NO: 1162526 - RNA, 19 nt, Artificial Sequence
  Description of Artificial Sequence: Synthetic oligonucleotide
ucaugcugcgcagcuuuua

SEQ ID NO: 1162527 - RNA, 19 nt, Artificial Sequence
  Description of Artificial Sequence: Synthetic oligonucleotide
agucccgcgacgacuacaa

SEQ ID NO: 1162528 - RNA, 19 nt, Artificial Sequence
  Description of Artificial Sequence: Synthetic oligonucleotide
uccagcucucgaagacuua

SEQ ID NO: 1162529 - RNA, 19 nt, Artificial Sequence
  Description of Artificial Sequence: Synthetic oligonucleotide
uccuggugagggucuucgu

SEQ ID NO: 1162530 - RNA, 19 nt, Artificial Sequence
  Description of Artificial Sequence: Synthetic oligonucleotide
gaagucccgcgacgacuac

SEQ ID NO: 1162531 - RNA, 19 nt, Artificial Sequence
  Description of Artificial Sequence: Synthetic oligonucleotide
cacgacuacgcacagcuuu

SEQ ID NO: 1162532 - RNA, 19 nt, Artificial Sequence
  Description of Artificial Sequence: Synthetic oligonucleotide
cagaagccggaaguucaug

SEQ ID NO: 1162533 - RNA, 19 nt, Artificial Sequence
  Description of Artificial Sequence: Synthetic oligonucleotide
cugcauacauugguaaugu

SEQ ID NO: 1162534 - RNA, 19 nt, Artificial Sequence
  Description of Artificial Sequence: Synthetic oligonucleotide
guccgcaccagaguaaccu

SEQ ID NO: 1162535 - RNA, 19 nt, Artificial Sequence
  Description of Artificial Sequence: Synthetic oligonucleotide
gcuggugcggccgaggcuc

SEQ ID NO: 1162536 - RNA, 19 nt, Artificial Sequence
  Description of Artificial Sequence: Synthetic oligonucleotide
agaguaaaaucgagccauu

SEQ ID NO: 1162537 - RNA, 19 nt, Artificial Sequence
  Description of Artificial Sequence: Synthetic oligonucleotide
ucacgacuacgcacagcuu

SEQ ID NO: 1162538 - RNA, 19 nt, Artificial Sequence
  Description of Artificial Sequence: Synthetic oligonucleotide
gaagacggacaagcuucuc

SEQ ID NO: 1162539 - RNA, 19 nt, Artificial Sequence
  Description of Artificial Sequence: Synthetic oligonucleotide
ugcuggagguauguaucuu

SEQ ID NO: 1162540 - RNA, 19 nt, Artificial Sequence
  Description of Artificial Sequence: Synthetic oligonucleotide
uggcguuuccuagguccug

SEQ ID NO: 1162541 - RNA, 19 nt, Artificial Sequence
  Description of Artificial Sequence: Synthetic oligonucleotide
cugacuuagaaaccuucuu

SEQ ID NO: 1162542 - RNA, 19 nt, Artificial Sequence
  Description of Artificial Sequence: Synthetic oligonucleotide
gaguaaaaucgagccauuu

SEQ ID NO: 1162543 - RNA, 19 nt, Artificial Sequence
  Description of Artificial Sequence: Synthetic oligonucleotide
cucugacgccugugccugg

SEQ ID NO: 1162544 - RNA, 19 nt, Artificial Sequence
  Description of Artificial Sequence: Synthetic oligonucleotide
gacuggcguuuccuagguc

SEQ ID NO: 1162545 - RNA, 19 nt, Artificial Sequence
  Description of Artificial Sequence: Synthetic oligonucleotide
ugguaggcaugugcauuuc

SEQ ID NO: 1162546 - RNA, 19 nt, Artificial Sequence
  Description of Artificial Sequence: Synthetic oligonucleotide
ggaugcaucucugcauaca

SEQ ID NO: 1162547 - RNA, 19 nt, Artificial Sequence
  Description of Artificial Sequence: Synthetic oligonucleotide
agacucaugcucacaugua

SEQ ID NO: 1162548 - RNA, 19 nt, Artificial Sequence
  Description of Artificial Sequence: Synthetic oligonucleotide
gcucugacgccugugccug

SEQ ID NO: 1162549 - RNA, 19 nt, Artificial Sequence
  Description of Artificial Sequence: Synthetic oligonucleotide
ccaucaaggaugcaucucu

SEQ ID NO: 1162550 - RNA, 19 nt, Artificial Sequence
  Description of Artificial Sequence: Synthetic oligonucleotide
gcaugugcauuucuucucu

SEQ ID NO: 1162551 - RNA, 19 nt, Artificial Sequence
  Description of Artificial Sequence: Synthetic oligonucleotide
uguguggcuuagggucaug

SEQ ID NO: 1162552 - RNA, 19 nt, Artificial Sequence
  Description of Artificial Sequence: Synthetic oligonucleotide
caggguugacgaagagaca

SEQ ID NO: 1162553 - RNA, 19 nt, Artificial Sequence
  Description of Artificial Sequence: Synthetic oligonucleotide
cgaagacuuauucuuaaua

SEQ ID NO: 1162554 - RNA, 19 nt, Artificial Sequence
  Description of Artificial Sequence: Synthetic oligonucleotide
gcucucgaagacuuauucu

SEQ ID NO: 1162555 - RNA, 19 nt, Artificial Sequence
  Description of Artificial Sequence: Synthetic oligonucleotide
cugacgccugugccugggc

SEQ ID NO: 1162556 - RNA, 19 nt, Artificial Sequence
  Description of Artificial Sequence: Synthetic oligonucleotide
cugcuggagguauguaucu

SEQ ID NO: 1162557 - RNA, 19 nt, Artificial Sequence
  Description of Artificial Sequence: Synthetic oligonucleotide
acgacgucguaaagccuca

SEQ ID NO: 1162558 - RNA, 19 nt, Artificial Sequence
  Description of Artificial Sequence: Synthetic oligonucleotide
auggccuccuaaugcccuu

SEQ ID NO: 1162559 - RNA, 19 nt, Artificial Sequence
  Description of Artificial Sequence: Synthetic oligonucleotide
ccgcgacgacuacaaaugg

SEQ ID NO: 1162560 - RNA, 19 nt, Artificial Sequence
  Description of Artificial Sequence: Synthetic oligonucleotide
cauauucacgagccaacuu

SEQ ID NO: 1162561 - RNA, 19 nt, Artificial Sequence
  Description of Artificial Sequence: Synthetic oligonucleotide
gggaaauuuguggcugcca

SEQ ID NO: 1162562 - RNA, 19 nt, Artificial Sequence
  Description of Artificial Sequence: Synthetic oligonucleotide
acgccuucucauggccauc

SEQ ID NO: 1162563 - RNA, 19 nt, Artificial Sequence
  Description of Artificial Sequence: Synthetic oligonucleotide
cuggugcggccgaggcucc

SEQ ID NO: 1162564 - RNA, 19 nt, Artificial Sequence
  Description of Artificial Sequence: Synthetic oligonucleotide
gauggacgaugcgcucuga

SEQ ID NO: 1162565 - RNA, 19 nt, Artificial Sequence
  Description of Artificial Sequence: Synthetic oligonucleotide
gcagauggacgaugcgcuc

SEQ ID NO: 1162566 - RNA, 19 nt, Artificial Sequence
  Description of Artificial Sequence: Synthetic oligonucleotide
ccgcaccagaguaaccuuc

SEQ ID NO: 1162567 - RNA, 19 nt, Artificial Sequence
  Description of Artificial Sequence: Synthetic oligonucleotide
cuggcguuuccuagguccu

SEQ ID NO: 1162568 - RNA, 19 nt, Artificial Sequence
  Description of Artificial Sequence: Synthetic oligonucleotide
cacgagccaacuuuacauu

SEQ ID NO: 1162569 - RNA, 19 nt, Artificial Sequence
  Description of Artificial Sequence: Synthetic oligonucleotide
caccagaguaaccuuccau

SEQ ID NO: 1162570 - RNA, 19 nt, Artificial Sequence
  Description of Artificial Sequence: Synthetic oligonucleotide
gguaggcaugugcauuucu

SEQ ID NO: 1162571 - RNA, 19 nt, Artificial Sequence
  Description of Artificial Sequence: Synthetic oligonucleotide
gcuuagggucaugguacug

SEQ ID NO: 1162572 - RNA, 19 nt, Artificial Sequence
  Description of Artificial Sequence: Synthetic oligonucleotide
cgcagcuuuuaaaggggug

SEQ ID NO: 1162573 - RNA, 19 nt, Artificial Sequence
  Description of Artificial Sequence: Synthetic oligonucleotide
ggucaagaacucccugaua

SEQ ID NO: 1162574 - RNA, 19 nt, Artificial Sequence
  Description of Artificial Sequence: Synthetic oligonucleotide
acgccugugccugggcggu

SEQ ID NO: 1162575 - RNA, 19 nt, Artificial Sequence
  Description of Artificial Sequence: Synthetic oligonucleotide
uuucacccuucggcuugcu

SEQ ID NO: 1162576 - RNA, 19 nt, Artificial Sequence
  Description of Artificial Sequence: Synthetic oligonucleotide
cagauggacgaugcgcucu

SEQ ID NO: 1162577 - RNA, 19 nt, Artificial Sequence
  Description of Artificial Sequence: Synthetic oligonucleotide
cguaaagccucaucuauau

SEQ ID NO: 1162578 - RNA, 19 nt, Artificial Sequence
  Description of Artificial Sequence: Synthetic oligonucleotide
cagugccagguggaccaac

SEQ ID NO: 1162579 - RNA, 19 nt, Artificial Sequence
  Description of Artificial Sequence: Synthetic oligonucleotide
agaccauugcagagucaua

SEQ ID NO: 1162580 - RNA, 19 nt, Artificial Sequence
  Description of Artificial Sequence: Synthetic oligonucleotide
gcgguuacuguguggcuua

SEQ ID NO: 1162581 - RNA, 19 nt, Artificial Sequence
  Description of Artificial Sequence: Synthetic oligonucleotide
cuucggcuugcuucaugcu

SEQ ID NO: 1162582 - RNA, 19 nt, Artificial Sequence
  Description of Artificial Sequence: Synthetic oligonucleotide
guaacaccacugcuuccuu

SEQ ID NO: 1162583 - RNA, 19 nt, Artificial Sequence
  Description of Artificial Sequence: Synthetic oligonucleotide
ccauuuuggaagggucauc

SEQ ID NO: 1162584 - RNA, 19 nt, Artificial Sequence
  Description of Artificial Sequence: Synthetic oligonucleotide
ccggaaguucaugcugcgc

SEQ ID NO: 1162585 - RNA, 19 nt, Artificial Sequence
  Description of Artificial Sequence: Synthetic oligonucleotide
ccugggcgguuacugugug

SEQ ID NO: 1162586 - RNA, 19 nt, Artificial Sequence
  Description of Artificial Sequence: Synthetic oligonucleotide
cgcgacgacuacaaaugga

SEQ ID NO: 1162587 - RNA, 19 nt, Artificial Sequence
  Description of Artificial Sequence: Synthetic oligonucleotide
cugcuaugauugcaagguu

SEQ ID NO: 1162588 - RNA, 19 nt, Artificial Sequence
  Description of Artificial Sequence: Synthetic oligonucleotide
ggugagggucuucguucaa

SEQ ID NO: 1162589 - RNA, 19 nt, Artificial Sequence
  Description of Artificial Sequence: Synthetic oligonucleotide
cccuucggcuugcuucaug

SEQ ID NO: 1162590 - RNA, 19 nt, Artificial Sequence
  Description of Artificial Sequence: Synthetic oligonucleotide
caacgaacauugggauucu

SEQ ID NO: 1162591 - RNA, 19 nt, Artificial Sequence
  Description of Artificial Sequence: Synthetic oligonucleotide
gacccucaauacgccuucu

SEQ ID NO: 1162592 - RNA, 19 nt, Artificial Sequence
  Description of Artificial Sequence: Synthetic oligonucleotide
cgacuacgcacagcuuucc

SEQ ID NO: 1162593 - RNA, 19 nt, Artificial Sequence
  Description of Artificial Sequence: Synthetic oligonucleotide
cgagccaacuuuacauucu

SEQ ID NO: 1162594 - RNA, 19 nt, Artificial Sequence
  Description of Artificial Sequence: Synthetic oligonucleotide
ggccuccuaaugcccuuaa

SEQ ID NO: 1162595 - RNA, 19 nt, Artificial Sequence
  Description of Artificial Sequence: Synthetic oligonucleotide
ggcgguuacuguguggcuu

SEQ ID NO: 1162596 - RNA, 19 nt, Artificial Sequence
  Description of Artificial Sequence: Synthetic oligonucleotide
cagcucucgaagacuuauu

SEQ ID NO: 1162597 - RNA, 19 nt, Artificial Sequence
  Description of Artificial Sequence: Synthetic oligonucleotide
gucccgcgacgacuacaaa

SEQ ID NO: 1162598 - RNA, 19 nt, Artificial Sequence
  Description of Artificial Sequence: Synthetic oligonucleotide
cauggccaucaaggaugca

SEQ ID NO: 1162599 - RNA, 19 nt, Artificial Sequence
  Description of Artificial Sequence: Synthetic oligonucleotide
ccuggugagggucuucguu

SEQ ID NO: 1162600 - RNA, 19 nt, Artificial Sequence
  Description of Artificial Sequence: Synthetic oligonucleotide
cgaugcgcucugacgccug

SEQ ID NO: 1162601 - RNA, 19 nt, Artificial Sequence
  Description of Artificial Sequence: Synthetic oligonucleotide
ccagcucucgaagacuuau

SEQ ID NO: 1162602 - RNA, 19 nt, Artificial Sequence
  Description of Artificial Sequence: Synthetic oligonucleotide
acccuucggcuugcuucau

SEQ ID NO: 1162603 - RNA, 19 nt, Artificial Sequence
  Description of Artificial Sequence: Synthetic oligonucleotide
gcguuuccuagguccuggu

SEQ ID NO: 1162604 - RNA, 19 nt, Artificial Sequence
  Description of Artificial Sequence: Synthetic oligonucleotide
gggcgguuacuguguggcu

SEQ ID NO: 1162605 - RNA, 19 nt, Artificial Sequence
  Description of Artificial Sequence: Synthetic oligonucleotide
ggguugacgaagagacauu

SEQ ID NO: 1162606 - RNA, 19 nt, Artificial Sequence
  Description of Artificial Sequence: Synthetic oligonucleotide
ggggugcuguccaguuuaa

SEQ ID NO: 1162607 - RNA, 19 nt, Artificial Sequence
  Description of Artificial Sequence: Synthetic oligonucleotide
cuguguggcuuagggucau

SEQ ID NO: 1162608 - RNA, 19 nt, Artificial Sequence
  Description of Artificial Sequence: Synthetic oligonucleotide
gccugggcgguuacugugu

SEQ ID NO: 1162609 - RNA, 19 nt, Artificial Sequence
  Description of Artificial Sequence: Synthetic oligonucleotide
cgacgacuacaaauggaau

SEQ ID NO: 1162610 - RNA, 19 nt, Artificial Sequence
  Description of Artificial Sequence: Synthetic oligonucleotide
cugugccugggcgguuacu

SEQ ID NO: 1162611 - RNA, 19 nt, Artificial Sequence
  Description of Artificial Sequence: Synthetic oligonucleotide
cgacgucguaaagccucau

SEQ ID NO: 1162612 - RNA, 19 nt, Artificial Sequence
  Description of Artificial Sequence: Synthetic oligonucleotide
aacgaaaguacuuuggucc

SEQ ID NO: 1162613 - RNA, 19 nt, Artificial Sequence
  Description of Artificial Sequence: Synthetic oligonucleotide
gauuaaaacacacagugag

SEQ ID NO: 1162614 - RNA, 19 nt, Artificial Sequence
  Description of Artificial Sequence: Synthetic oligonucleotide
auuagcgggauauuaaugc

SEQ ID NO: 1162615 - RNA, 19 nt, Artificial Sequence
  Description of Artificial Sequence: Synthetic oligonucleotide
aaaacgucaucaugcagcc

SEQ ID NO: 1162616 - RNA, 19 nt, Artificial Sequence
  Description of Artificial Sequence: Synthetic oligonucleotide
uaaaacgucaucaugcagc

SEQ ID NO: 1162617 - RNA, 19 nt, Artificial Sequence
  Description of Artificial Sequence: Synthetic oligonucleotide
aacgucaucaugcagccgg

SEQ ID NO: 1162618 - RNA, 19 nt, Artificial Sequence
  Description of Artificial Sequence: Synthetic oligonucleotide
uuucaaagagcccagcucc

SEQ ID NO: 1162619 - RNA, 19 nt, Artificial Sequence
  Description of Artificial Sequence: Synthetic oligonucleotide
gaaucguacacguacuucg

SEQ ID NO: 1162620 - RNA, 19 nt, Artificial Sequence
  Description of Artificial Sequence: Synthetic oligonucleotide
agaagauuccagcacaugg

SEQ ID NO: 1162621 - RNA, 19 nt, Artificial Sequence
  Description of Artificial Sequence: Synthetic oligonucleotide
acgacugacaaccacacac

SEQ ID NO: 1162622 - RNA, 19 nt, Artificial Sequence
  Description of Artificial Sequence: Synthetic oligonucleotide
uugucuguaaucaugcacc

SEQ ID NO: 1162623 - RNA, 19 nt, Artificial Sequence
  Description of Artificial Sequence: Synthetic oligonucleotide
uuguucguuuguuagaagg

SEQ ID NO: 1162624 - RNA, 19 nt, Artificial Sequence
  Description of Artificial Sequence: Synthetic oligonucleotide
cuguaaaacgucaucaugc

SEQ ID NO: 1162625 - RNA, 19 nt, Artificial Sequence
  Description of Artificial Sequence: Synthetic oligonucleotide
uuuccaacgacugacaacc

SEQ ID NO: 1162626 - RNA, 19 nt, Artificial Sequence
  Description of Artificial Sequence: Synthetic oligonucleotide
aaugccgacuuugaguucc

SEQ ID NO: 1162627 - RNA, 19 nt, Artificial Sequence
  Description of Artificial Sequence: Synthetic oligonucleotide
aaguacuuuggucccaucg

SEQ ID NO: 1162628 - RNA, 19 nt, Artificial Sequence
  Description of Artificial Sequence: Synthetic oligonucleotide
uugauguuaauguugggug

SEQ ID NO: 1162629 - RNA, 19 nt, Artificial Sequence
  Description of Artificial Sequence: Synthetic oligonucleotide
uugguuaaggcauugaguc

SEQ ID NO: 1162630 - RNA, 19 nt, Artificial Sequence
  Description of Artificial Sequence: Synthetic oligonucleotide
aaaacguccuaucaguggu

SEQ ID NO: 1162631 - RNA, 19 nt, Artificial Sequence
  Description of Artificial Sequence: Synthetic oligonucleotide
uguuaaaguacacgcgccg

SEQ ID NO: 1162632 - RNA, 19 nt, Artificial Sequence
  Description of Artificial Sequence: Synthetic oligonucleotide
acagugaguauuccuauac

SEQ ID NO: 1162633 - RNA, 19 nt, Artificial Sequence
  Description of Artificial Sequence: Synthetic oligonucleotide
ucaugcaccacuuuucuug

SEQ ID NO: 1162634 - RNA, 19 nt, Artificial Sequence
  Description of Artificial Sequence: Synthetic oligonucleotide
acguguucaugauaaaugg

SEQ ID NO: 1162635 - RNA, 19 nt, Artificial Sequence
  Description of Artificial Sequence: Synthetic oligonucleotide
ugaguauuccuauacaaaa

SEQ ID NO: 1162636 - RNA, 19 nt, Artificial Sequence
  Description of Artificial Sequence: Synthetic oligonucleotide
ugauguuaauguugggugg

SEQ ID NO: 1162637 - RNA, 19 nt, Artificial Sequence
  Description of Artificial Sequence: Synthetic oligonucleotide
uguugcagacacauaagcc

SEQ ID NO: 1162638 - RNA, 19 nt, Artificial Sequence
  Description of Artificial Sequence: Synthetic oligonucleotide
acuaugcccaggcugacac

SEQ ID NO: 1162639 - RNA, 19 nt, Artificial Sequence
  Description of Artificial Sequence: Synthetic oligonucleotide
aaagccgaaucguacacgu

SEQ ID NO: 1162640 - RNA, 19 nt, Artificial Sequence
  Description of Artificial Sequence: Synthetic oligonucleotide
agccgaaucguacacguac

SEQ ID NO: 1162641 - RNA, 19 nt, Artificial Sequence
  Description of Artificial Sequence: Synthetic oligonucleotide
aacguguucaugauaaaug

SEQ ID NO: 1162642 - RNA, 19 nt, Artificial Sequence
  Description of Artificial Sequence: Synthetic oligonucleotide
acgaaaguacuuugguccc

SEQ ID NO: 1162643 - RNA, 19 nt, Artificial Sequence
  Description of Artificial Sequence: Synthetic oligonucleotide
accaaggugacuugaauug

SEQ ID NO: 1162644 - RNA, 19 nt, Artificial Sequence
  Description of Artificial Sequence: Synthetic oligonucleotide
ucguuuguuagaaggaugu

SEQ ID NO: 1162645 - RNA, 19 nt, Artificial Sequence
  Description of Artificial Sequence: Synthetic oligonucleotide
uuaaaacacacagugagua

SEQ ID NO: 1162646 - RNA, 19 nt, Artificial Sequence
  Description of Artificial Sequence: Synthetic oligonucleotide
aaucaugcaccacuuuucu

SEQ ID NO: 1162647 - RNA, 19 nt, Artificial Sequence
  Description of Artificial Sequence: Synthetic oligonucleotide
uguaaaacgucaucaugca

SEQ ID NO: 1162648 - RNA, 19 nt, Artificial Sequence
  Description of Artificial Sequence: Synthetic oligonucleotide
aaagauugccaauuuucau

SEQ ID NO: 1162649 - RNA, 19 nt, Artificial Sequence
  Description of Artificial Sequence: Synthetic oligonucleotide
auuuccucgcugcuguggc

SEQ ID NO: 1162650 - RNA, 19 nt, Artificial Sequence
  Description of Artificial Sequence: Synthetic oligonucleotide
acggcaauguccguuaggc

SEQ ID NO: 1162651 - RNA, 19 nt, Artificial Sequence
  Description of Artificial Sequence: Synthetic oligonucleotide
uguucguuuguuagaagga

SEQ ID NO: 1162652 - RNA, 19 nt, Artificial Sequence
  Description of Artificial Sequence: Synthetic oligonucleotide
uuguuaaaguacacgcgcc

SEQ ID NO: 1162653 - RNA, 19 nt, Artificial Sequence
  Description of Artificial Sequence: Synthetic oligonucleotide
agaagugauuggcucggcc

SEQ ID NO: 1162654 - RNA, 19 nt, Artificial Sequence
  Description of Artificial Sequence: Synthetic oligonucleotide
uuuuccgugaggccggcag

SEQ ID NO: 1162655 - RNA, 19 nt, Artificial Sequence
  Description of Artificial Sequence: Synthetic oligonucleotide
caaaacguccuaucagugg

SEQ ID NO: 1162656 - RNA, 19 nt, Artificial Sequence
  Description of Artificial Sequence: Synthetic oligonucleotide
cacacacuagauuuccucg

SEQ ID NO: 1162657 - RNA, 19 nt, Artificial Sequence
  Description of Artificial Sequence: Synthetic oligonucleotide
aaacacacagugaguauuc

SEQ ID NO: 1162658 - RNA, 19 nt, Artificial Sequence
  Description of Artificial Sequence: Synthetic oligonucleotide
uggucgauucucccaagcg

SEQ ID NO: 1162659 - RNA, 19 nt, Artificial Sequence
  Description of Artificial Sequence: Synthetic oligonucleotide
agugaguauuccuauacaa

SEQ ID NO: 1162660 - RNA, 19 nt, Artificial Sequence
  Description of Artificial Sequence: Synthetic oligonucleotide
uaaucaugcaccacuuuuc

SEQ ID NO: 1162661 - RNA, 19 nt, Artificial Sequence
  Description of Artificial Sequence: Synthetic oligonucleotide
uucguuuguuagaaggaug

SEQ ID NO: 1162662 - RNA, 19 nt, Artificial Sequence
  Description of Artificial Sequence: Synthetic oligonucleotide
aaucguacacguacuucgc

SEQ ID NO: 1162663 - RNA, 19 nt, Artificial Sequence
  Description of Artificial Sequence: Synthetic oligonucleotide
agcacugauggcaacaagg

SEQ ID NO: 1162664 - RNA, 19 nt, Artificial Sequence
  Description of Artificial Sequence: Synthetic oligonucleotide
cugcuagucagucacacac

SEQ ID NO: 1162665 - RNA, 19 nt, Artificial Sequence
  Description of Artificial Sequence: Synthetic oligonucleotide
aaagggaacaaaacguccu

SEQ ID NO: 1162666 - RNA, 19 nt, Artificial Sequence
  Description of Artificial Sequence: Synthetic oligonucleotide
ugucagucugccaacuagc

SEQ ID NO: 1162667 - RNA, 19 nt, Artificial Sequence
  Description of Artificial Sequence: Synthetic oligonucleotide
aggaaugauuccuugucug

SEQ ID NO: 1162668 - RNA, 19 nt, Artificial Sequence
  Description of Artificial Sequence: Synthetic oligonucleotide
gauuccuugucuguaauca

SEQ ID NO: 1162669 - RNA, 19 nt, Artificial Sequence
  Description of Artificial Sequence: Synthetic oligonucleotide
agacacgcuugguuaaggc

SEQ ID NO: 1162670 - RNA, 19 nt, Artificial Sequence
  Description of Artificial Sequence: Synthetic oligonucleotide
guaguugacaacagcauug

SEQ ID NO: 1162671 - RNA, 19 nt, Artificial Sequence
  Description of Artificial Sequence: Synthetic oligonucleotide
gaaggauguuccuaggauc

SEQ ID NO: 1162672 - RNA, 19 nt, Artificial Sequence
  Description of Artificial Sequence: Synthetic oligonucleotide
gaguauuccuauacaaaag

SEQ ID NO: 1162673 - RNA, 19 nt, Artificial Sequence
  Description of Artificial Sequence: Synthetic oligonucleotide
uucuaugcauuucucacua

SEQ ID NO: 1162674 - RNA, 19 nt, Artificial Sequence
  Description of Artificial Sequence: Synthetic oligonucleotide
aaccaaggugacuugaauu

SEQ ID NO: 1162675 - RNA, 19 nt, Artificial Sequence
  Description of Artificial Sequence: Synthetic oligonucleotide
guacccagcucauuuacag

SEQ ID NO: 1162676 - RNA, 19 nt, Artificial Sequence
  Description of Artificial Sequence: Synthetic oligonucleotide
ggugugguccuguaaaacg

SEQ ID NO: 1162677 - RNA, 19 nt, Artificial Sequence
  Description of Artificial Sequence: Synthetic oligonucleotide
aaaagcauuaagaggccca

SEQ ID NO: 1162678 - RNA, 19 nt, Artificial Sequence
  Description of Artificial Sequence: Synthetic oligonucleotide
uguaguugacaacagcauu

SEQ ID NO: 1162679 - RNA, 19 nt, Artificial Sequence
  Description of Artificial Sequence: Synthetic oligonucleotide
cagcuaaacaugcacuggg

SEQ ID NO: 1162680 - RNA, 19 nt, Artificial Sequence
  Description of Artificial Sequence: Synthetic oligonucleotide
agcaaagggaacaaaacgu

SEQ ID NO: 1162681 - RNA, 19 nt, Artificial Sequence
  Description of Artificial Sequence: Synthetic oligonucleotide
uuagcgggauauuaaugca

SEQ ID NO: 1162682 - RNA, 19 nt, Artificial Sequence
  Description of Artificial Sequence: Synthetic oligonucleotide
aguacuuuggucccaucga

SEQ ID NO: 1162683 - RNA, 19 nt, Artificial Sequence
  Description of Artificial Sequence: Synthetic oligonucleotide
gauguuaauguuggguggc

SEQ ID NO: 1162684 - RNA, 19 nt, Artificial Sequence
  Description of Artificial Sequence: Synthetic oligonucleotide
uggagggauggccaugccg

SEQ ID NO: 1162685 - RNA, 19 nt, Artificial Sequence
  Description of Artificial Sequence: Synthetic oligonucleotide
gacauggaacucuucugag

SEQ ID NO: 1162686 - RNA, 19 nt, Artificial Sequence
  Description of Artificial Sequence: Synthetic oligonucleotide
ugccagaaaagcacggcug

SEQ ID NO: 1162687 - RNA, 19 nt, Artificial Sequence
  Description of Artificial Sequence: Synthetic oligonucleotide
gaagugauuggcucggcca

SEQ ID NO: 1162688 - RNA, 19 nt, Artificial Sequence
  Description of Artificial Sequence: Synthetic oligonucleotide
auaagccguacccagcuca

SEQ ID NO: 1162689 - RNA, 19 nt, Artificial Sequence
  Description of Artificial Sequence: Synthetic oligonucleotide
aguacacgcgccguaauuc

SEQ ID NO: 1162690 - RNA, 19 nt, Artificial Sequence
  Description of Artificial Sequence: Synthetic oligonucleotide
caaagauugccaauuuuca

SEQ ID NO: 1162691 - RNA, 19 nt, Artificial Sequence
  Description of Artificial Sequence: Synthetic oligonucleotide
uguuccuaggauccgugac

SEQ ID NO: 1162692 - RNA, 19 nt, Artificial Sequence
  Description of Artificial Sequence: Synthetic oligonucleotide
agaaggauguuccuaggau

SEQ ID NO: 1162693 - RNA, 19 nt, Artificial Sequence
  Description of Artificial Sequence: Synthetic oligonucleotide
uccguuaggcaccugugga

SEQ ID NO: 1162694 - RNA, 19 nt, Artificial Sequence
  Description of Artificial Sequence: Synthetic oligonucleotide
cuaaacaugcacuggggca

SEQ ID NO: 1162695 - RNA, 19 nt, Artificial Sequence
  Description of Artificial Sequence: Synthetic oligonucleotide
ucauccuccaagcuuguua

SEQ ID NO: 1162696 - RNA, 19 nt, Artificial Sequence
  Description of Artificial Sequence: Synthetic oligonucleotide
uguucauggggaccugagc

SEQ ID NO: 1162697 - RNA, 19 nt, Artificial Sequence
  Description of Artificial Sequence: Synthetic oligonucleotide
guaaccuuuccaacgacug

SEQ ID NO: 1162698 - RNA, 19 nt, Artificial Sequence
  Description of Artificial Sequence: Synthetic oligonucleotide
cuaucaguggugagacacg

SEQ ID NO: 1162699 - RNA, 19 nt, Artificial Sequence
  Description of Artificial Sequence: Synthetic oligonucleotide
guacuuuggucccaucgag

SEQ ID NO: 1162700 - RNA, 19 nt, Artificial Sequence
  Description of Artificial Sequence: Synthetic oligonucleotide
gucgcuacagcaccgguug

SEQ ID NO: 1162701 - RNA, 19 nt, Artificial Sequence
  Description of Artificial Sequence: Synthetic oligonucleotide
auggaaagccgaaucguac

SEQ ID NO: 1162702 - RNA, 19 nt, Artificial Sequence
  Description of Artificial Sequence: Synthetic oligonucleotide
agcguuggucgauucuccc

SEQ ID NO: 1162703 - RNA, 19 nt, Artificial Sequence
  Description of Artificial Sequence: Synthetic oligonucleotide
gaaagccgaaucguacacg

SEQ ID NO: 1162704 - RNA, 19 nt, Artificial Sequence
  Description of Artificial Sequence: Synthetic oligonucleotide
ggcugagagcuucagaucc

SEQ ID NO: 1162705 - RNA, 19 nt, Artificial Sequence
  Description of Artificial Sequence: Synthetic oligonucleotide
gguuaaggcauugaguccc

SEQ ID NO: 1162706 - RNA, 19 nt, Artificial Sequence
  Description of Artificial Sequence: Synthetic oligonucleotide
uucacacucacagcuaaac

SEQ ID NO: 1162707 - RNA, 19 nt, Artificial Sequence
  Description of Artificial Sequence: Synthetic oligonucleotide
uuuggucccaucgaggcuc

SEQ ID NO: 1162708 - RNA, 19 nt, Artificial Sequence
  Description of Artificial Sequence: Synthetic oligonucleotide
uuaaaguacacgcgccgua

SEQ ID NO: 1162709 - RNA, 19 nt, Artificial Sequence
  Description of Artificial Sequence: Synthetic oligonucleotide
ugucuguaaucaugcacca

SEQ ID NO: 1162710 - RNA, 19 nt, Artificial Sequence
  Description of Artificial Sequence: Synthetic oligonucleotide
cuuuccaacgacugacaac

SEQ ID NO: 1162711 - RNA, 19 nt, Artificial Sequence
  Description of Artificial Sequence: Synthetic oligonucleotide
uagcuacugaguuuucaca

SEQ ID NO: 1162712 - RNA, 19 nt, Artificial Sequence
  Description of Artificial Sequence: Synthetic oligonucleotide
acagcuaaacaugcacugg

SEQ ID NO: 1162713 - RNA, 19 nt, Artificial Sequence
  Description of Artificial Sequence: Synthetic oligonucleotide
gacaggaaugccgacuuug

SEQ ID NO: 1162714 - RNA, 19 nt, Artificial Sequence
  Description of Artificial Sequence: Synthetic oligonucleotide
uaaaacacacagugaguau

SEQ ID NO: 1162715 - RNA, 19 nt, Artificial Sequence
  Description of Artificial Sequence: Synthetic oligonucleotide
uaucaguggugagacacgc

SEQ ID NO: 1162716 - RNA, 19 nt, Artificial Sequence
  Description of Artificial Sequence: Synthetic oligonucleotide
cugucagucugccaacuag

SEQ ID NO: 1162717 - RNA, 19 nt, Artificial Sequence
  Description of Artificial Sequence: Synthetic oligonucleotide
cugugugauggcuugcuug

SEQ ID NO: 1162718 - RNA, 19 nt, Artificial Sequence
  Description of Artificial Sequence: Synthetic oligonucleotide
auuggugcacucauccacg

SEQ ID NO: 1162719 - RNA, 19 nt, Artificial Sequence
  Description of Artificial Sequence: Synthetic oligonucleotide
gggauggaaagccgaaucg

SEQ ID NO: 1162720 - RNA, 19 nt, Artificial Sequence
  Description of Artificial Sequence: Synthetic oligonucleotide
ugguuuauccacugccaga

SEQ ID NO: 1162721 - RNA, 19 nt, Artificial Sequence
  Description of Artificial Sequence: Synthetic oligonucleotide
uuggucgauucucccaagc

SEQ ID NO: 1162722 - RNA, 19 nt, Artificial Sequence
  Description of Artificial Sequence: Synthetic oligonucleotide
agugaggggagcaucuccg

SEQ ID NO: 1162723 - RNA, 19 nt, Artificial Sequence
  Description of Artificial Sequence: Synthetic oligonucleotide
acguacuucgcucuccaca

SEQ ID NO: 1162724 - RNA, 19 nt, Artificial Sequence
  Description of Artificial Sequence: Synthetic oligonucleotide
uuggcucggccaacgaaag

SEQ ID NO: 1162725 - RNA, 19 nt, Artificial Sequence
  Description of Artificial Sequence: Synthetic oligonucleotide
ggaacaaaacguccuauca

SEQ ID NO: 1162726 - RNA, 19 nt, Artificial Sequence
  Description of Artificial Sequence: Synthetic oligonucleotide
ucucccacguuagagaaau

SEQ ID NO: 1162727 - RNA, 19 nt, Artificial Sequence
  Description of Artificial Sequence: Synthetic oligonucleotide
auuccuauacaaaagcauu

SEQ ID NO: 1162728 - RNA, 19 nt, Artificial Sequence
  Description of Artificial Sequence: Synthetic oligonucleotide
uccaacgacugacaaccac

SEQ ID NO: 1162729 - RNA, 19 nt, Artificial Sequence
  Description of Artificial Sequence: Synthetic oligonucleotide
aaagcauuaagaggcccaa

SEQ ID NO: 1162730 - RNA, 19 nt, Artificial Sequence
  Description of Artificial Sequence: Synthetic oligonucleotide
aguuagcagcagcuaccgc

SEQ ID NO: 1162731 - RNA, 19 nt, Artificial Sequence
  Description of Artificial Sequence: Synthetic oligonucleotide
ugucgggauggaaagccga

SEQ ID NO: 1162732 - RNA, 19 nt, Artificial Sequence
  Description of Artificial Sequence: Synthetic oligonucleotide
uucccagauggcaggagga

SEQ ID NO: 1162733 - RNA, 19 nt, Artificial Sequence
  Description of Artificial Sequence: Synthetic oligonucleotide
caacgacugacaaccacac

SEQ ID NO: 1162734 - RNA, 19 nt, Artificial Sequence
  Description of Artificial Sequence: Synthetic oligonucleotide
uguccguuaggcaccugug

SEQ ID NO: 1162735 - RNA, 19 nt, Artificial Sequence
  Description of Artificial Sequence: Synthetic oligonucleotide
aguuguucguuuguuagaa

SEQ ID NO: 1162736 - RNA, 19 nt, Artificial Sequence
  Description of Artificial Sequence: Synthetic oligonucleotide
gacacgcuugguuaaggca

SEQ ID NO: 1162737 - RNA, 19 nt, Artificial Sequence
  Description of Artificial Sequence: Synthetic oligonucleotide
ugcaccacuuuucuugcau

SEQ ID NO: 1162738 - RNA, 19 nt, Artificial Sequence
  Description of Artificial Sequence: Synthetic oligonucleotide
ggagggauggccaugccgg

SEQ ID NO: 1162739 - RNA, 19 nt, Artificial Sequence
  Description of Artificial Sequence: Synthetic oligonucleotide
ucguacacguacuucgcuc

SEQ ID NO: 1162740 - RNA, 19 nt, Artificial Sequence
  Description of Artificial Sequence: Synthetic oligonucleotide
agcaccgguuguugcagac

SEQ ID NO: 1162741 - RNA, 19 nt, Artificial Sequence
  Description of Artificial Sequence: Synthetic oligonucleotide
auguccguuaggcaccugu

SEQ ID NO: 1162742 - RNA, 19 nt, Artificial Sequence
  Description of Artificial Sequence: Synthetic oligonucleotide
aaaguacacgcgccguaau

SEQ ID NO: 1162743 - RNA, 19 nt, Artificial Sequence
  Description of Artificial Sequence: Synthetic oligonucleotide
guccguuaggcaccugugg

SEQ ID NO: 1162744 - RNA, 19 nt, Artificial Sequence
  Description of Artificial Sequence: Synthetic oligonucleotide
uaaaguacacgcgccguaa

SEQ ID NO: 1162745 - RNA, 19 nt, Artificial Sequence
  Description of Artificial Sequence: Synthetic oligonucleotide
uacacgcgccguaauucag

SEQ ID NO: 1162746 - RNA, 19 nt, Artificial Sequence
  Description of Artificial Sequence: Synthetic oligonucleotide
agcuaaacaugcacugggg

SEQ ID NO: 1162747 - RNA, 19 nt, Artificial Sequence
  Description of Artificial Sequence: Synthetic oligonucleotide
aaguacacgcgccguaauu

SEQ ID NO: 1162748 - RNA, 19 nt, Artificial Sequence
  Description of Artificial Sequence: Synthetic oligonucleotide
gacacauaagccguaccca

SEQ ID NO: 1162749 - RNA, 19 nt, Artificial Sequence
  Description of Artificial Sequence: Synthetic oligonucleotide
gcuaaacaugcacuggggc

SEQ ID NO: 1162750 - RNA, 19 nt, Artificial Sequence
  Description of Artificial Sequence: Synthetic oligonucleotide
uaggauccgugacagugaa

SEQ ID NO: 1162751 - RNA, 19 nt, Artificial Sequence
  Description of Artificial Sequence: Synthetic oligonucleotide
auuuacagugaggggagca

SEQ ID NO: 1162752 - RNA, 19 nt, Artificial Sequence
  Description of Artificial Sequence: Synthetic oligonucleotide
gaauuggugcacucaucca

SEQ ID NO: 1162753 - RNA, 19 nt, Artificial Sequence
  Description of Artificial Sequence: Synthetic oligonucleotide
guuguucguuuguuagaag

SEQ ID NO: 1162754 - RNA, 19 nt, Artificial Sequence
  Description of Artificial Sequence: Synthetic oligonucleotide
caguuagcagcagcuaccg

SEQ ID NO: 1162755 - RNA, 19 nt, Artificial Sequence
  Description of Artificial Sequence: Synthetic oligonucleotide
agcgggugccauuuucauc

SEQ ID NO: 1162756 - RNA, 19 nt, Artificial Sequence
  Description of Artificial Sequence: Synthetic oligonucleotide
ggauccgugacagugaaga

SEQ ID NO: 1162757 - RNA, 19 nt, Artificial Sequence
  Description of Artificial Sequence: Synthetic oligonucleotide
acugacaaccacacacuag

SEQ ID NO: 1162758 - RNA, 19 nt, Artificial Sequence
  Description of Artificial Sequence: Synthetic oligonucleotide
aacgacugacaaccacaca

SEQ ID NO: 1162759 - RNA, 19 nt, Artificial Sequence
  Description of Artificial Sequence: Synthetic oligonucleotide
ccacguuagagaaauuuug

SEQ ID NO: 1162760 - RNA, 19 nt, Artificial Sequence
  Description of Artificial Sequence: Synthetic oligonucleotide
agaagcacugauggcaaca

SEQ ID NO: 1162761 - RNA, 19 nt, Artificial Sequence
  Description of Artificial Sequence: Synthetic oligonucleotide
gagacacgcuugguuaagg

SEQ ID NO: 1162762 - RNA, 19 nt, Artificial Sequence
  Description of Artificial Sequence: Synthetic oligonucleotide
cucauuagcgggauauuaa

SEQ ID NO: 1162763 - RNA, 19 nt, Artificial Sequence
  Description of Artificial Sequence: Synthetic oligonucleotide
cuagauuuccucgcugcug

SEQ ID NO: 1162764 - RNA, 19 nt, Artificial Sequence
  Description of Artificial Sequence: Synthetic oligonucleotide
caccgguuguugcagacac

SEQ ID NO: 1162765 - RNA, 19 nt, Artificial Sequence
  Description of Artificial Sequence: Synthetic oligonucleotide
cauuucucacuaugcccag

SEQ ID NO: 1162766 - RNA, 19 nt, Artificial Sequence
  Description of Artificial Sequence: Synthetic oligonucleotide
uguuacagacauggaacuc

SEQ ID NO: 1162767 - RNA, 19 nt, Artificial Sequence
  Description of Artificial Sequence: Synthetic oligonucleotide
uggugagacacgcuugguu

SEQ ID NO: 1162768 - RNA, 19 nt, Artificial Sequence
  Description of Artificial Sequence: Synthetic oligonucleotide
ucccacguuagagaaauuu

SEQ ID NO: 1162769 - RNA, 19 nt, Artificial Sequence
  Description of Artificial Sequence: Synthetic oligonucleotide
cuugguuaaggcauugagu

SEQ ID NO: 1162770 - RNA, 19 nt, Artificial Sequence
  Description of Artificial Sequence: Synthetic oligonucleotide
ugagacacgcuugguuaag

SEQ ID NO: 1162771 - RNA, 19 nt, Artificial Sequence
  Description of Artificial Sequence: Synthetic oligonucleotide
ccuaucaguggugagacac

SEQ ID NO: 1162772 - RNA, 19 nt, Artificial Sequence
  Description of Artificial Sequence: Synthetic oligonucleotide
aucguacacguacuucgcu

SEQ ID NO: 1162773 - RNA, 19 nt, Artificial Sequence
  Description of Artificial Sequence: Synthetic oligonucleotide
ucggccaacgaaaguacuu

SEQ ID NO: 1162774 - RNA, 19 nt, Artificial Sequence
  Description of Artificial Sequence: Synthetic oligonucleotide
ggugcacucauccacggga

SEQ ID NO: 1162775 - RNA, 19 nt, Artificial Sequence
  Description of Artificial Sequence: Synthetic oligonucleotide
uucgggagguucccagaug

SEQ ID NO: 1162776 - RNA, 19 nt, Artificial Sequence
  Description of Artificial Sequence: Synthetic oligonucleotide
aaacgucaucaugcagccg

SEQ ID NO: 1162777 - RNA, 19 nt, Artificial Sequence
  Description of Artificial Sequence: Synthetic oligonucleotide
uacacguacuucgcucucc

SEQ ID NO: 1162778 - RNA, 19 nt, Artificial Sequence
  Description of Artificial Sequence: Synthetic oligonucleotide
gcaucuccgcuucuguugg

SEQ ID NO: 1162779 - RNA, 19 nt, Artificial Sequence
  Description of Artificial Sequence: Synthetic oligonucleotide
ugauagcugcuagucaguc

SEQ ID NO: 1162780 - RNA, 19 nt, Artificial Sequence
  Description of Artificial Sequence: Synthetic oligonucleotide
ugacaaccacacacuagau

SEQ ID NO: 1162781 - RNA, 19 nt, Artificial Sequence
  Description of Artificial Sequence: Synthetic oligonucleotide
acacgcuugguuaaggcau

SEQ ID NO: 1162782 - RNA, 19 nt, Artificial Sequence
  Description of Artificial Sequence: Synthetic oligonucleotide
gggaccugagccgacaucc

SEQ ID NO: 1162783 - RNA, 19 nt, Artificial Sequence
  Description of Artificial Sequence: Synthetic oligonucleotide
gugauuggcucggccaacg

SEQ ID NO: 1162784 - RNA, 19 nt, Artificial Sequence
  Description of Artificial Sequence: Synthetic oligonucleotide
ucgauucucccaagcgggu

SEQ ID NO: 1162785 - RNA, 19 nt, Artificial Sequence
  Description of Artificial Sequence: Synthetic oligonucleotide
gugaguauuccuauacaaa

SEQ ID NO: 1162786 - RNA, 19 nt, Artificial Sequence
  Description of Artificial Sequence: Synthetic oligonucleotide
ugauuggcucggccaacga

SEQ ID NO: 1162787 - RNA, 19 nt, Artificial Sequence
  Description of Artificial Sequence: Synthetic oligonucleotide
acacguacuucgcucucca

SEQ ID NO: 1162788 - RNA, 19 nt, Artificial Sequence
  Description of Artificial Sequence: Synthetic oligonucleotide
ggaaagccgaaucguacac

SEQ ID NO: 1162789 - RNA, 19 nt, Artificial Sequence
  Description of Artificial Sequence: Synthetic oligonucleotide
ugucgcuacagcaccgguu

SEQ ID NO: 1162790 - RNA, 19 nt, Artificial Sequence
  Description of Artificial Sequence: Synthetic oligonucleotide
gauggaaagccgaaucgua

SEQ ID NO: 1162791 - RNA, 19 nt, Artificial Sequence
  Description of Artificial Sequence: Synthetic oligonucleotide
cagguaaccuuuccaacga

SEQ ID NO: 1162792 - RNA, 19 nt, Artificial Sequence
  Description of Artificial Sequence: Synthetic oligonucleotide
ucugucagucugccaacua

SEQ ID NO: 1162793 - RNA, 19 nt, Artificial Sequence
  Description of Artificial Sequence: Synthetic oligonucleotide
ucuccgcuucuguuggugu

SEQ ID NO: 1162794 - RNA, 19 nt, Artificial Sequence
  Description of Artificial Sequence: Synthetic oligonucleotide
uggugugguccuguaaaac

SEQ ID NO: 1162795 - RNA, 19 nt, Artificial Sequence
  Description of Artificial Sequence: Synthetic oligonucleotide
ggugagacacgcuugguua

SEQ ID NO: 1162796 - RNA, 19 nt, Artificial Sequence
  Description of Artificial Sequence: Synthetic oligonucleotide
cacguuagagaaauuuugu

SEQ ID NO: 1162797 - RNA, 19 nt, Artificial Sequence
  Description of Artificial Sequence: Synthetic oligonucleotide
ucccagauggcaggaggag

SEQ ID NO: 1162798 - RNA, 19 nt, Artificial Sequence
  Description of Artificial Sequence: Synthetic oligonucleotide
gccaacgaaaguacuuugg

SEQ ID NO: 1162799 - RNA, 19 nt, Artificial Sequence
  Description of Artificial Sequence: Synthetic oligonucleotide
uaagccguacccagcucau

SEQ ID NO: 1162800 - RNA, 19 nt, Artificial Sequence
  Description of Artificial Sequence: Synthetic oligonucleotide
cuaggauccgugacaguga

SEQ ID NO: 1162801 - RNA, 19 nt, Artificial Sequence
  Description of Artificial Sequence: Synthetic oligonucleotide
cacgggaaccucuucagaa

SEQ ID NO: 1162802 - RNA, 19 nt, Artificial Sequence
  Description of Artificial Sequence: Synthetic oligonucleotide
cagcguuggucgauucucc

SEQ ID NO: 1162803 - RNA, 19 nt, Artificial Sequence
  Description of Artificial Sequence: Synthetic oligonucleotide
ugaggauccuggagaugac

SEQ ID NO: 1162804 - RNA, 19 nt, Artificial Sequence
  Description of Artificial Sequence: Synthetic oligonucleotide
cagcuaccgcagcaaaggg

SEQ ID NO: 1162805 - RNA, 19 nt, Artificial Sequence
  Description of Artificial Sequence: Synthetic oligonucleotide
uuugccucauuagcgggau

SEQ ID NO: 1162806 - RNA, 19 nt, Artificial Sequence
  Description of Artificial Sequence: Synthetic oligonucleotide
ugcacucauccacgggaac

SEQ ID NO: 1162807 - RNA, 19 nt, Artificial Sequence
  Description of Artificial Sequence: Synthetic oligonucleotide
agccguacccagcucauuu

SEQ ID NO: 1162808 - RNA, 19 nt, Artificial Sequence
  Description of Artificial Sequence: Synthetic oligonucleotide
guacacgcgccguaauuca

SEQ ID NO: 1162809 - RNA, 19 nt, Artificial Sequence
  Description of Artificial Sequence: Synthetic oligonucleotide
acgggaaccucuucagaaa

SEQ ID NO: 1162810 - RNA, 19 nt, Artificial Sequence
  Description of Artificial Sequence: Synthetic oligonucleotide
ccagugucgggauggaaag

SEQ ID NO: 1162811 - RNA, 19 nt, Artificial Sequence
  Description of Artificial Sequence: Synthetic oligonucleotide
gguuuauccacugccagaa

SEQ ID NO: 1162812 - RNA, 19 nt, Artificial Sequence
  Description of Artificial Sequence: Synthetic oligonucleotide
caagcgggugccauuuuca

SEQ ID NO: 1162813 - RNA, 19 nt, Artificial Sequence
  Description of Artificial Sequence: Synthetic oligonucleotide
gggaacaaaacguccuauc

SEQ ID NO: 1162814 - RNA, 19 nt, Artificial Sequence
  Description of Artificial Sequence: Synthetic oligonucleotide
gacugacaaccacacacua

SEQ ID NO: 1162815 - RNA, 19 nt, Artificial Sequence
  Description of Artificial Sequence: Synthetic oligonucleotide
ucuaugcauuucucacuau

SEQ ID NO: 1162816 - RNA, 19 nt, Artificial Sequence
  Description of Artificial Sequence: Synthetic oligonucleotide
guuggucgauucucccaag

SEQ ID NO: 1162817 - RNA, 19 nt, Artificial Sequence
  Description of Artificial Sequence: Synthetic oligonucleotide
aacuagcuacugaguuuuc

SEQ ID NO: 1162818 - RNA, 19 nt, Artificial Sequence
  Description of Artificial Sequence: Synthetic oligonucleotide
acacgcgccguaauucagg

SEQ ID NO: 1162819 - RNA, 19 nt, Artificial Sequence
  Description of Artificial Sequence: Synthetic oligonucleotide
ggauauuaaugcaguuagc

SEQ ID NO: 1162820 - RNA, 19 nt, Artificial Sequence
  Description of Artificial Sequence: Synthetic oligonucleotide
ggaaugccgacuuugaguu

SEQ ID NO: 1162821 - RNA, 19 nt, Artificial Sequence
  Description of Artificial Sequence: Synthetic oligonucleotide
cucguucccgcucggcgcc

SEQ ID NO: 1162822 - RNA, 19 nt, Artificial Sequence
  Description of Artificial Sequence: Synthetic oligonucleotide
aggcccuuguuaaaguaca

SEQ ID NO: 1162823 - RNA, 19 nt, Artificial Sequence
  Description of Artificial Sequence: Synthetic oligonucleotide
uuccaacgacugacaacca

SEQ ID NO: 1162824 - RNA, 19 nt, Artificial Sequence
  Description of Artificial Sequence: Synthetic oligonucleotide
aaagcacggcugguguggu

SEQ ID NO: 1162825 - RNA, 19 nt, Artificial Sequence
  Description of Artificial Sequence: Synthetic oligonucleotide
ccguaauucagggugacuc

SEQ ID NO: 1162826 - RNA, 19 nt, Artificial Sequence
  Description of Artificial Sequence: Synthetic oligonucleotide
gcaguuagcagcagcuacc

SEQ ID NO: 1162827 - RNA, 19 nt, Artificial Sequence
  Description of Artificial Sequence: Synthetic oligonucleotide
uaauguuggguggcacuuc

SEQ ID NO: 1162828 - RNA, 19 nt, Artificial Sequence
  Description of Artificial Sequence: Synthetic oligonucleotide
acguccuaucaguggugag

SEQ ID NO: 1162829 - RNA, 19 nt, Artificial Sequence
  Description of Artificial Sequence: Synthetic oligonucleotide
accuguggagcccugccuu

SEQ ID NO: 1162830 - RNA, 19 nt, Artificial Sequence
  Description of Artificial Sequence: Synthetic oligonucleotide
gccgacauccuuccuauca

SEQ ID NO: 1162831 - RNA, 19 nt, Artificial Sequence
  Description of Artificial Sequence: Synthetic oligonucleotide
gugucgggauggaaagccg

SEQ ID NO: 1162832 - RNA, 19 nt, Artificial Sequence
  Description of Artificial Sequence: Synthetic oligonucleotide
gacaaccacacacuagauu

SEQ ID NO: 1162833 - RNA, 19 nt, Artificial Sequence
  Description of Artificial Sequence: Synthetic oligonucleotide
ccaacgacugacaaccaca

SEQ ID NO: 1162834 - RNA, 19 nt, Artificial Sequence
  Description of Artificial Sequence: Synthetic oligonucleotide
cuucgcucuccacaacuca

SEQ ID NO: 1162835 - RNA, 19 nt, Artificial Sequence
  Description of Artificial Sequence: Synthetic oligonucleotide
aucaugcaccacuuuucuu

SEQ ID NO: 1162836 - RNA, 19 nt, Artificial Sequence
  Description of Artificial Sequence: Synthetic oligonucleotide
caccgcucguucccgcucg

SEQ ID NO: 1162837 - RNA, 19 nt, Artificial Sequence
  Description of Artificial Sequence: Synthetic oligonucleotide
cgcgccguaauucagggug

SEQ ID NO: 1162838 - RNA, 19 nt, Artificial Sequence
  Description of Artificial Sequence: Synthetic oligonucleotide
agggauggccaugccgggg

SEQ ID NO: 1162839 - RNA, 19 nt, Artificial Sequence
  Description of Artificial Sequence: Synthetic oligonucleotide
agcuaccgcagcaaaggga

SEQ ID NO: 1162840 - RNA, 19 nt, Artificial Sequence
  Description of Artificial Sequence: Synthetic oligonucleotide
guuaaaguacacgcgccgu

SEQ ID NO: 1162841 - RNA, 19 nt, Artificial Sequence
  Description of Artificial Sequence: Synthetic oligonucleotide
agccaaccaaggugacuug

SEQ ID NO: 1162842 - RNA, 19 nt, Artificial Sequence
  Description of Artificial Sequence: Synthetic oligonucleotide
cagaagcacugauggcaac

SEQ ID NO: 1162843 - RNA, 19 nt, Artificial Sequence
  Description of Artificial Sequence: Synthetic oligonucleotide
gcuaccgcagcaaagggaa

SEQ ID NO: 1162844 - RNA, 19 nt, Artificial Sequence
  Description of Artificial Sequence: Synthetic oligonucleotide
uggguggcacuuccccaga

SEQ ID NO: 1162845 - RNA, 19 nt, Artificial Sequence
  Description of Artificial Sequence: Synthetic oligonucleotide
uuggucccaucgaggcucu

SEQ ID NO: 1162846 - RNA, 19 nt, Artificial Sequence
  Description of Artificial Sequence: Synthetic oligonucleotide
ccgacauccuuccuaucag

SEQ ID NO: 1162847 - RNA, 19 nt, Artificial Sequence
  Description of Artificial Sequence: Synthetic oligonucleotide
gggcugucgcuacagcacc

SEQ ID NO: 1162848 - RNA, 19 nt, Artificial Sequence
  Description of Artificial Sequence: Synthetic oligonucleotide
guacacguacuucgcucuc

SEQ ID NO: 1162849 - RNA, 19 nt, Artificial Sequence
  Description of Artificial Sequence: Synthetic oligonucleotide
uggcucggccaacgaaagu

SEQ ID NO: 1162850 - RNA, 19 nt, Artificial Sequence
  Description of Artificial Sequence: Synthetic oligonucleotide
gcuacagcaccgguuguug

SEQ ID NO: 1162851 - RNA, 19 nt, Artificial Sequence
  Description of Artificial Sequence: Synthetic oligonucleotide
ggacugguuuauccacugc

SEQ ID NO: 1162852 - RNA, 19 nt, Artificial Sequence
  Description of Artificial Sequence: Synthetic oligonucleotide
ucgggauggaaagccgaau

SEQ ID NO: 1162853 - RNA, 19 nt, Artificial Sequence
  Description of Artificial Sequence: Synthetic oligonucleotide
ccguuaggcaccuguggag

SEQ ID NO: 1162854 - RNA, 19 nt, Artificial Sequence
  Description of Artificial Sequence: Synthetic oligonucleotide
gagccgacauccuuccuau

SEQ ID NO: 1162855 - RNA, 19 nt, Artificial Sequence
  Description of Artificial Sequence: Synthetic oligonucleotide
agccgacauccuuccuauc

SEQ ID NO: 1162856 - RNA, 19 nt, Artificial Sequence
  Description of Artificial Sequence: Synthetic oligonucleotide
augcaccacuuuucuugca

SEQ ID NO: 1162857 - RNA, 19 nt, Artificial Sequence
  Description of Artificial Sequence: Synthetic oligonucleotide
ucgcuacagcaccgguugu

SEQ ID NO: 1162858 - RNA, 19 nt, Artificial Sequence
  Description of Artificial Sequence: Synthetic oligonucleotide
cagugucgggauggaaagc

SEQ ID NO: 1162859 - RNA, 19 nt, Artificial Sequence
  Description of Artificial Sequence: Synthetic oligonucleotide
ucccaagcgggugccauuu

SEQ ID NO: 1162860 - RNA, 19 nt, Artificial Sequence
  Description of Artificial Sequence: Synthetic oligonucleotide
guacuucgcucuccacaac

SEQ ID NO: 1162861 - RNA, 19 nt, Artificial Sequence
  Description of Artificial Sequence: Synthetic oligonucleotide
cagugacaggaaugccgac

SEQ ID NO: 1162862 - RNA, 19 nt, Artificial Sequence
  Description of Artificial Sequence: Synthetic oligonucleotide
cacagugaguauuccuaua

SEQ ID NO: 1162863 - RNA, 19 nt, Artificial Sequence
  Description of Artificial Sequence: Synthetic oligonucleotide
uccccgcaccgcucguucc

SEQ ID NO: 1162864 - RNA, 19 nt, Artificial Sequence
  Description of Artificial Sequence: Synthetic oligonucleotide
cacguacuucgcucuccac

SEQ ID NO: 1162865 - RNA, 19 nt, Artificial Sequence
  Description of Artificial Sequence: Synthetic oligonucleotide
caacuagcuacugaguuuu

SEQ ID NO: 1162866 - RNA, 19 nt, Artificial Sequence
  Description of Artificial Sequence: Synthetic oligonucleotide
uucucacggcaauguccgu

SEQ ID NO: 1162867 - RNA, 19 nt, Artificial Sequence
  Description of Artificial Sequence: Synthetic oligonucleotide
ucaccagugucgggaugga

SEQ ID NO: 1162868 - RNA, 19 nt, Artificial Sequence
  Description of Artificial Sequence: Synthetic oligonucleotide
cauuuuccgugaggccggc

SEQ ID NO: 1162869 - RNA, 19 nt, Artificial Sequence
  Description of Artificial Sequence: Synthetic oligonucleotide
ugaguucccuuugccucau

SEQ ID NO: 1162870 - RNA, 19 nt, Artificial Sequence
  Description of Artificial Sequence: Synthetic oligonucleotide
acgcuugguuaaggcauug

SEQ ID NO: 1162871 - RNA, 19 nt, Artificial Sequence
  Description of Artificial Sequence: Synthetic oligonucleotide
aauguccguuaggcaccug

SEQ ID NO: 1162872 - RNA, 19 nt, Artificial Sequence
  Description of Artificial Sequence: Synthetic oligonucleotide
cauccacgggaaccucuuc

SEQ ID NO: 1162873 - RNA, 19 nt, Artificial Sequence
  Description of Artificial Sequence: Synthetic oligonucleotide
gcagacacauaagccguac

SEQ ID NO: 1162874 - RNA, 19 nt, Artificial Sequence
  Description of Artificial Sequence: Synthetic oligonucleotide
cguuaggcaccuguggagc

SEQ ID NO: 1162875 - RNA, 19 nt, Artificial Sequence
  Description of Artificial Sequence: Synthetic oligonucleotide
ggauggaaagccgaaucgu

SEQ ID NO: 1162876 - RNA, 19 nt, Artificial Sequence
  Description of Artificial Sequence: Synthetic oligonucleotide
ccguacccagcucauuuac

SEQ ID NO: 1162877 - RNA, 19 nt, Artificial Sequence
  Description of Artificial Sequence: Synthetic oligonucleotide
augcaguuagcagcagcua

SEQ ID NO: 1162878 - RNA, 19 nt, Artificial Sequence
  Description of Artificial Sequence: Synthetic oligonucleotide
gccaacuagcuacugaguu

SEQ ID NO: 1162879 - RNA, 19 nt, Artificial Sequence
  Description of Artificial Sequence: Synthetic oligonucleotide
ccaacgaaaguacuuuggu

SEQ ID NO: 1162880 - RNA, 19 nt, Artificial Sequence
  Description of Artificial Sequence: Synthetic oligonucleotide
gcugcuagucagucacaca

SEQ ID NO: 1162881 - RNA, 19 nt, Artificial Sequence
  Description of Artificial Sequence: Synthetic oligonucleotide
aggauccgugacagugaag

SEQ ID NO: 1162882 - RNA, 19 nt, Artificial Sequence
  Description of Artificial Sequence: Synthetic oligonucleotide
ggcugucgcuacagcaccg

SEQ ID NO: 1162883 - RNA, 19 nt, Artificial Sequence
  Description of Artificial Sequence: Synthetic oligonucleotide
aagccgaaucguacacgua

SEQ ID NO: 1162884 - RNA, 19 nt, Artificial Sequence
  Description of Artificial Sequence: Synthetic oligonucleotide
cguacuucgcucuccacaa

SEQ ID NO: 1162885 - RNA, 19 nt, Artificial Sequence
  Description of Artificial Sequence: Synthetic oligonucleotide
gcguuggucgauucuccca

SEQ ID NO: 1162886 - RNA, 19 nt, Artificial Sequence
  Description of Artificial Sequence: Synthetic oligonucleotide
uugccucauuagcgggaua

SEQ ID NO: 1162887 - RNA, 19 nt, Artificial Sequence
  Description of Artificial Sequence: Synthetic oligonucleotide
gucccagauccgccucccc

SEQ ID NO: 1162888 - RNA, 19 nt, Artificial Sequence
  Description of Artificial Sequence: Synthetic oligonucleotide
gccuguggcuucucacggc

SEQ ID NO: 1162889 - RNA, 19 nt, Artificial Sequence
  Description of Artificial Sequence: Synthetic oligonucleotide
gugcacucauccacgggaa

SEQ ID NO: 1162890 - RNA, 19 nt, Artificial Sequence
  Description of Artificial Sequence: Synthetic oligonucleotide
cucucccacguuagagaaa

SEQ ID NO: 1162891 - RNA, 19 nt, Artificial Sequence
  Description of Artificial Sequence: Synthetic oligonucleotide
ccuguggagcccugccuug

SEQ ID NO: 1162892 - RNA, 19 nt, Artificial Sequence
  Description of Artificial Sequence: Synthetic oligonucleotide
cuccgcuucuguuggugua

SEQ ID NO: 1162893 - RNA, 19 nt, Artificial Sequence
  Description of Artificial Sequence: Synthetic oligonucleotide
cagccggugauggucaugu

SEQ ID NO: 1162894 - RNA, 19 nt, Artificial Sequence
  Description of Artificial Sequence: Synthetic oligonucleotide
cuucgggagguucccagau

SEQ ID NO: 1162895 - RNA, 19 nt, Artificial Sequence
  Description of Artificial Sequence: Synthetic oligonucleotide
cgaaucguacacguacuuc

SEQ ID NO: 1162896 - RNA, 19 nt, Artificial Sequence
  Description of Artificial Sequence: Synthetic oligonucleotide
ccaaccaaggugacuugaa

SEQ ID NO: 1162897 - RNA, 19 nt, Artificial Sequence
  Description of Artificial Sequence: Synthetic oligonucleotide
gaccugagccgacauccuu

SEQ ID NO: 1162898 - RNA, 19 nt, Artificial Sequence
  Description of Artificial Sequence: Synthetic oligonucleotide
gccaaccaaggugacuuga

SEQ ID NO: 1162899 - RNA, 19 nt, Artificial Sequence
  Description of Artificial Sequence: Synthetic oligonucleotide
gaggccggcaggaaugauu

SEQ ID NO: 1162900 - RNA, 19 nt, Artificial Sequence
  Description of Artificial Sequence: Synthetic oligonucleotide
cacuaugcccaggcugaca

SEQ ID NO: 1162901 - RNA, 19 nt, Artificial Sequence
  Description of Artificial Sequence: Synthetic oligonucleotide
uccuuccuaucaggaucau

SEQ ID NO: 1162902 - RNA, 19 nt, Artificial Sequence
  Description of Artificial Sequence: Synthetic oligonucleotide
cuguggagcccugccuuga

SEQ ID NO: 1162903 - RNA, 19 nt, Artificial Sequence
  Description of Artificial Sequence: Synthetic oligonucleotide
ggauguuccuaggauccgu

SEQ ID NO: 1162904 - RNA, 19 nt, Artificial Sequence
  Description of Artificial Sequence: Synthetic oligonucleotide
cguccuaucaguggugaga

SEQ ID NO: 1162905 - RNA, 19 nt, Artificial Sequence
  Description of Artificial Sequence: Synthetic oligonucleotide
cguuggucgauucucccaa

SEQ ID NO: 1162906 - RNA, 19 nt, Artificial Sequence
  Description of Artificial Sequence: Synthetic oligonucleotide
ccgacuuugaguucccuuu

SEQ ID NO: 1162907 - RNA, 19 nt, Artificial Sequence
  Description of Artificial Sequence: Synthetic oligonucleotide
cagcauugaaggacugguu

SEQ ID NO: 1162908 - RNA, 19 nt, Artificial Sequence
  Description of Artificial Sequence: Synthetic oligonucleotide
cucuaguuguucguuuguu

SEQ ID NO: 1162909 - RNA, 19 nt, Artificial Sequence
  Description of Artificial Sequence: Synthetic oligonucleotide
ccaacuagcuacugaguuu

SEQ ID NO: 1162910 - RNA, 19 nt, Artificial Sequence
  Description of Artificial Sequence: Synthetic oligonucleotide
gccggcaggaaugauuccu

SEQ ID NO: 1162911 - RNA, 19 nt, Artificial Sequence
  Description of Artificial Sequence: Synthetic oligonucleotide
cccacguuagagaaauuuu

SEQ ID NO: 1162912 - RNA, 19 nt, Artificial Sequence
  Description of Artificial Sequence: Synthetic oligonucleotide
gccguacccagcucauuua

SEQ ID NO: 1162913 - RNA, 19 nt, Artificial Sequence
  Description of Artificial Sequence: Synthetic oligonucleotide
cguacccagcucauuuaca

SEQ ID NO: 1162914 - RNA, 19 nt, Artificial Sequence
  Description of Artificial Sequence: Synthetic oligonucleotide
cguacacguacuucgcucu

SEQ ID NO: 1162915 - RNA, 19 nt, Artificial Sequence
  Description of Artificial Sequence: Synthetic oligonucleotide
cacgcuugguuaaggcauu

SEQ ID NO: 1162916 - RNA, 19 nt, Artificial Sequence
  Description of Artificial Sequence: Synthetic oligonucleotide
caauguccguuaggcaccu

SEQ ID NO: 1162917 - RNA, 19 nt, Artificial Sequence
  Description of Artificial Sequence: Synthetic oligonucleotide
gcaccgguuguugcagaca

SEQ ID NO: 1162918 - RNA, 19 nt, Artificial Sequence
  Description of Artificial Sequence: Synthetic oligonucleotide
gccgaaucguacacguacu

SEQ ID NO: 1162919 - RNA, 19 nt, Artificial Sequence
  Description of Artificial Sequence: Synthetic oligonucleotide
cgaggcucuuugauguuaa

SEQ ID NO: 1162920 - RNA, 19 nt, Artificial Sequence
  Description of Artificial Sequence: Synthetic oligonucleotide
ccacgggaaccucuucaga

SEQ ID NO: 1162921 - RNA, 19 nt, Artificial Sequence
  Description of Artificial Sequence: Synthetic oligonucleotide
cgacugacaaccacacacu

SEQ ID NO: 1162922 - RNA, 19 nt, Artificial Sequence
  Description of Artificial Sequence: Synthetic oligonucleotide
gcgccguaauucaggguga

SEQ ID NO: 1162923 - RNA, 19 nt, Artificial Sequence
  Description of Artificial Sequence: Synthetic oligonucleotide
ccgguuguugcagacacau

SEQ ID NO: 1162924 - RNA, 19 nt, Artificial Sequence
  Description of Artificial Sequence: Synthetic oligonucleotide
gccgacuuugaguucccuu

SEQ ID NO: 1162925 - RNA, 19 nt, Artificial Sequence
  Description of Artificial Sequence: Synthetic oligonucleotide
cccgcaccgcucguucccg

SEQ ID NO: 1162926 - RNA, 19 nt, Artificial Sequence
  Description of Artificial Sequence: Synthetic oligonucleotide
caccagugucgggauggaa

SEQ ID NO: 1162927 - RNA, 19 nt, Artificial Sequence
  Description of Artificial Sequence: Synthetic oligonucleotide
gcgggauauuaaugcaguu

SEQ ID NO: 1162928 - RNA, 19 nt, Artificial Sequence
  Description of Artificial Sequence: Synthetic oligonucleotide
cccaucgaggcucuuugau

SEQ ID NO: 1162929 - RNA, 19 nt, Artificial Sequence
  Description of Artificial Sequence: Synthetic oligonucleotide
caucuccgcuucuguuggu

SEQ ID NO: 1162930 - RNA, 19 nt, Artificial Sequence
  Description of Artificial Sequence: Synthetic oligonucleotide
cgccguaauucagggugac

SEQ ID NO: 1162931 - RNA, 19 nt, Artificial Sequence
  Description of Artificial Sequence: Synthetic oligonucleotide
ggaccugagccgacauccu

SEQ ID NO: 1162932 - RNA, 19 nt, Artificial Sequence
  Description of Artificial Sequence: Synthetic oligonucleotide
gccguaauucagggugacu

SEQ ID NO: 1162933 - RNA, 19 nt, Artificial Sequence
  Description of Artificial Sequence: Synthetic oligonucleotide
ccgaaucguacacguacuu

SEQ ID NO: 1162934 - RNA, 19 nt, Artificial Sequence
  Description of Artificial Sequence: Synthetic oligonucleotide
ccggcaggaaugauuccuu

SEQ ID NO: 1162935 - RNA, 19 nt, Artificial Sequence
  Description of Artificial Sequence: Synthetic oligonucleotide
ccgcucguucccgcucggc

SEQ ID NO: 1162936 - RNA, 19 nt, Artificial Sequence
  Description of Artificial Sequence: Synthetic oligonucleotide
cucccacguuagagaaauu

SEQ ID NO: 1162937 - RNA, 19 nt, Artificial Sequence
  Description of Artificial Sequence: Synthetic oligonucleotide
cgguuguugcagacacaua

SEQ ID NO: 1162938 - RNA, 19 nt, Artificial Sequence
  Description of Artificial Sequence: Synthetic oligonucleotide
ccgcagcaaagggaacaaa

SEQ ID NO: 1162939 - RNA, 19 nt, Artificial Sequence
  Description of Artificial Sequence: Synthetic oligonucleotide
cguucccgcucggcgccac

SEQ ID NO: 1162940 - RNA, 19 nt, Artificial Sequence
  Description of Artificial Sequence: Synthetic oligonucleotide
cgcuacagcaccgguuguu

SEQ ID NO: 1162941 - RNA, 19 nt, Artificial Sequence
  Description of Artificial Sequence: Synthetic oligonucleotide
cgcuucuguugguguaguu

SEQ ID NO: 1162942 - RNA, 19 nt, Artificial Sequence
  Description of Artificial Sequence: Synthetic oligonucleotide
cccaagcgggugccauuuu

SEQ ID NO: 1162943 - RNA, 19 nt, Artificial Sequence
  Description of Artificial Sequence: Synthetic oligonucleotide
uuuauggcaaccaauagag

SEQ ID NO: 1162944 - RNA, 19 nt, Artificial Sequence
  Description of Artificial Sequence: Synthetic oligonucleotide
ugguuuauaagccagauca

SEQ ID NO: 1162945 - RNA, 19 nt, Artificial Sequence
  Description of Artificial Sequence: Synthetic oligonucleotide
uuaaguauuacuugcauga

SEQ ID NO: 1162946 - RNA, 19 nt, Artificial Sequence
  Description of Artificial Sequence: Synthetic oligonucleotide
guuaaggucacuuuuagcc

SEQ ID NO: 1162947 - RNA, 19 nt, Artificial Sequence
  Description of Artificial Sequence: Synthetic oligonucleotide
uauugauucaguauuaagu

SEQ ID NO: 1162948 - RNA, 19 nt, Artificial Sequence
  Description of Artificial Sequence: Synthetic oligonucleotide
acacaauuaucucaugucc

SEQ ID NO: 1162949 - RNA, 19 nt, Artificial Sequence
  Description of Artificial Sequence: Synthetic oligonucleotide
agaaauugcacacuaucac

SEQ ID NO: 1162950 - RNA, 19 nt, Artificial Sequence
  Description of Artificial Sequence: Synthetic oligonucleotide
aaaucgacaucauggaguc

SEQ ID NO: 1162951 - RNA, 19 nt, Artificial Sequence
  Description of Artificial Sequence: Synthetic oligonucleotide
uaguauauguugaggaucg

SEQ ID NO: 1162952 - RNA, 19 nt, Artificial Sequence
  Description of Artificial Sequence: Synthetic oligonucleotide
aaaguguucaaaucgacau

SEQ ID NO: 1162953 - RNA, 19 nt, Artificial Sequence
  Description of Artificial Sequence: Synthetic oligonucleotide
auuauaguuugagaaagcc

SEQ ID NO: 1162954 - RNA, 19 nt, Artificial Sequence
  Description of Artificial Sequence: Synthetic oligonucleotide
uaggauuauaguuugagaa

SEQ ID NO: 1162955 - RNA, 19 nt, Artificial Sequence
  Description of Artificial Sequence: Synthetic oligonucleotide
guuuagagcauucuguugc

SEQ ID NO: 1162956 - RNA, 19 nt, Artificial Sequence
  Description of Artificial Sequence: Synthetic oligonucleotide
aauaccuagaacuuccuuu

SEQ ID NO: 1162957 - RNA, 19 nt, Artificial Sequence
  Description of Artificial Sequence: Synthetic oligonucleotide
uuugcaauaauaguauaug

SEQ ID NO: 1162958 - RNA, 19 nt, Artificial Sequence
  Description of Artificial Sequence: Synthetic oligonucleotide
uauuucgucgcugauagcc

SEQ ID NO: 1162959 - RNA, 19 nt, Artificial Sequence
  Description of Artificial Sequence: Synthetic oligonucleotide
gaucgaguggcuuucaagc

SEQ ID NO: 1162960 - RNA, 19 nt, Artificial Sequence
  Description of Artificial Sequence: Synthetic oligonucleotide
aaugacaucgccacacugg

SEQ ID NO: 1162961 - RNA, 19 nt, Artificial Sequence
  Description of Artificial Sequence: Synthetic oligonucleotide
cacacuaucacuaaggaaa

SEQ ID NO: 1162962 - RNA, 19 nt, Artificial Sequence
  Description of Artificial Sequence: Synthetic oligonucleotide
uuauaagccagaucaaggu

SEQ ID NO: 1162963 - RNA, 19 nt, Artificial Sequence
  Description of Artificial Sequence: Synthetic oligonucleotide
uuuccguugaaguagcucu

SEQ ID NO: 1162964 - RNA, 19 nt, Artificial Sequence
  Description of Artificial Sequence: Synthetic oligonucleotide
uuauaguuugagaaagcca

SEQ ID NO: 1162965 - RNA, 19 nt, Artificial Sequence
  Description of Artificial Sequence: Synthetic oligonucleotide
uugcacacuaucacuaagg

SEQ ID NO: 1162966 - RNA, 19 nt, Artificial Sequence
  Description of Artificial Sequence: Synthetic oligonucleotide
aagcugaucaaaucuucuc

SEQ ID NO: 1162967 - RNA, 19 nt, Artificial Sequence
  Description of Artificial Sequence: Synthetic oligonucleotide
uuugagaaagccauaguua

SEQ ID NO: 1162968 - RNA, 19 nt, Artificial Sequence
  Description of Artificial Sequence: Synthetic oligonucleotide
gcaauaauaguauauguug

SEQ ID NO: 1162969 - RNA, 19 nt, Artificial Sequence
  Description of Artificial Sequence: Synthetic oligonucleotide
uauacuagccauugcacca

SEQ ID NO: 1162970 - RNA, 19 nt, Artificial Sequence
  Description of Artificial Sequence: Synthetic oligonucleotide
gacaauuguaagaaccugg

SEQ ID NO: 1162971 - RNA, 19 nt, Artificial Sequence
  Description of Artificial Sequence: Synthetic oligonucleotide
auucuauaaccaaauaaac

SEQ ID NO: 1162972 - RNA, 19 nt, Artificial Sequence
  Description of Artificial Sequence: Synthetic oligonucleotide
auugauucaguauuaagua

SEQ ID NO: 1162973 - RNA, 19 nt, Artificial Sequence
  Description of Artificial Sequence: Synthetic oligonucleotide
uuccaauaucaaaacuucg

SEQ ID NO: 1162974 - RNA, 19 nt, Artificial Sequence
  Description of Artificial Sequence: Synthetic oligonucleotide
acaauuaucucauguccuc

SEQ ID NO: 1162975 - RNA, 19 nt, Artificial Sequence
  Description of Artificial Sequence: Synthetic oligonucleotide
uacgaauaguucuucugcg

SEQ ID NO: 1162976 - RNA, 19 nt, Artificial Sequence
  Description of Artificial Sequence: Synthetic oligonucleotide
auuaucucauguccucugc

SEQ ID NO: 1162977 - RNA, 19 nt, Artificial Sequence
  Description of Artificial Sequence: Synthetic oligonucleotide
aauuaucucauguccucug

SEQ ID NO: 1162978 - RNA, 19 nt, Artificial Sequence
  Description of Artificial Sequence: Synthetic oligonucleotide
aaguguucaaaucgacauc

SEQ ID NO: 1162979 - RNA, 19 nt, Artificial Sequence
  Description of Artificial Sequence: Synthetic oligonucleotide
auaguauauguugaggauc

SEQ ID NO: 1162980 - RNA, 19 nt, Artificial Sequence
  Description of Artificial Sequence: Synthetic oligonucleotide
aguuaaggucacuuuuagc

SEQ ID NO: 1162981 - RNA, 19 nt, Artificial Sequence
  Description of Artificial Sequence: Synthetic oligonucleotide
uuacauguguaggagagcc

SEQ ID NO: 1162982 - RNA, 19 nt, Artificial Sequence
  Description of Artificial Sequence: Synthetic oligonucleotide
agguacgcuuucuaguucc

SEQ ID NO: 1162983 - RNA, 19 nt, Artificial Sequence
  Description of Artificial Sequence: Synthetic oligonucleotide
ucuguuaggggacacuaca

SEQ ID NO: 1162984 - RNA, 19 nt, Artificial Sequence
  Description of Artificial Sequence: Synthetic oligonucleotide
ucaaaucgacaucauggag

SEQ ID NO: 1162985 - RNA, 19 nt, Artificial Sequence
  Description of Artificial Sequence: Synthetic oligonucleotide
acgaauaguucuucugcgc

SEQ ID NO: 1162986 - RNA, 19 nt, Artificial Sequence
  Description of Artificial Sequence: Synthetic oligonucleotide
ugcaauaauaguauauguu

SEQ ID NO: 1162987 - RNA, 19 nt, Artificial Sequence
  Description of Artificial Sequence: Synthetic oligonucleotide
ugauucaguauuaaguauu

SEQ ID NO: 1162988 - RNA, 19 nt, Artificial Sequence
  Description of Artificial Sequence: Synthetic oligonucleotide
uucccuuugagaauaaaua

SEQ ID NO: 1162989 - RNA, 19 nt, Artificial Sequence
  Description of Artificial Sequence: Synthetic oligonucleotide
cuacgaauaguucuucugc

SEQ ID NO: 1162990 - RNA, 19 nt, Artificial Sequence
  Description of Artificial Sequence: Synthetic oligonucleotide
aacgcacgcuuauacuagc

SEQ ID NO: 1162991 - RNA, 19 nt, Artificial Sequence
  Description of Artificial Sequence: Synthetic oligonucleotide
aacggauauauguuugccu

SEQ ID NO: 1162992 - RNA, 19 nt, Artificial Sequence
  Description of Artificial Sequence: Synthetic oligonucleotide
ucuacgaauaguucuucug

SEQ ID NO: 1162993 - RNA, 19 nt, Artificial Sequence
  Description of Artificial Sequence: Synthetic oligonucleotide
uucaaaucgacaucaugga

SEQ ID NO: 1162994 - RNA, 19 nt, Artificial Sequence
  Description of Artificial Sequence: Synthetic oligonucleotide
aguauuacuugcaugacca

SEQ ID NO: 1162995 - RNA, 19 nt, Artificial Sequence
  Description of Artificial Sequence: Synthetic oligonucleotide
uuuagagcauucuguugcg

SEQ ID NO: 1162996 - RNA, 19 nt, Artificial Sequence
  Description of Artificial Sequence: Synthetic oligonucleotide
uguuugccuaugaugaucu

SEQ ID NO: 1162997 - RNA, 19 nt, Artificial Sequence
  Description of Artificial Sequence: Synthetic oligonucleotide
cuuuacaucucacaaucac

SEQ ID NO: 1162998 - RNA, 19 nt, Artificial Sequence
  Description of Artificial Sequence: Synthetic oligonucleotide
aaggguugcaaaucagucu

SEQ ID NO: 1162999 - RNA, 19 nt, Artificial Sequence
  Description of Artificial Sequence: Synthetic oligonucleotide
uuuaacccaggccagcaca

SEQ ID NO: 1163000 - RNA, 19 nt, Artificial Sequence
  Description of Artificial Sequence: Synthetic oligonucleotide
cuuauacuagccauugcac

SEQ ID NO: 1163001 - RNA, 19 nt, Artificial Sequence
  Description of Artificial Sequence: Synthetic oligonucleotide
aauacaguuaaggucacuu

SEQ ID NO: 1163002 - RNA, 19 nt, Artificial Sequence
  Description of Artificial Sequence: Synthetic oligonucleotide
aaucagaaauugcacacua

SEQ ID NO: 1163003 - RNA, 19 nt, Artificial Sequence
  Description of Artificial Sequence: Synthetic oligonucleotide
uugcaauaauaguauaugu

SEQ ID NO: 1163004 - RNA, 19 nt, Artificial Sequence
  Description of Artificial Sequence: Synthetic oligonucleotide
uuaugaaaguguucaaauc

SEQ ID NO: 1163005 - RNA, 19 nt, Artificial Sequence
  Description of Artificial Sequence: Synthetic oligonucleotide
aguggagugccauuucuuc

SEQ ID NO: 1163006 - RNA, 19 nt, Artificial Sequence
  Description of Artificial Sequence: Synthetic oligonucleotide
uuaggggacacuacaguca

SEQ ID NO: 1163007 - RNA, 19 nt, Artificial Sequence
  Description of Artificial Sequence: Synthetic oligonucleotide
uuagccuuggaacggauau

SEQ ID NO: 1163008 - RNA, 19 nt, Artificial Sequence
  Description of Artificial Sequence: Synthetic oligonucleotide
aaauuggaagccugcagau

SEQ ID NO: 1163009 - RNA, 19 nt, Artificial Sequence
  Description of Artificial Sequence: Synthetic oligonucleotide
cuuaaacagugaaccaggg

SEQ ID NO: 1163010 - RNA, 19 nt, Artificial Sequence
  Description of Artificial Sequence: Synthetic oligonucleotide
guauugauucaguauuaag

SEQ ID NO: 1163011 - RNA, 19 nt, Artificial Sequence
  Description of Artificial Sequence: Synthetic oligonucleotide
uucuguugcguuuaugggu

SEQ ID NO: 1163012 - RNA, 19 nt, Artificial Sequence
  Description of Artificial Sequence: Synthetic oligonucleotide
cuauaaccaaauaaacauc

SEQ ID NO: 1163013 - RNA, 19 nt, Artificial Sequence
  Description of Artificial Sequence: Synthetic oligonucleotide
uuauucuggggacagguua

SEQ ID NO: 1163014 - RNA, 19 nt, Artificial Sequence
  Description of Artificial Sequence: Synthetic oligonucleotide
gucucuacagaugagcuag

SEQ ID NO: 1163015 - RNA, 19 nt, Artificial Sequence
  Description of Artificial Sequence: Synthetic oligonucleotide
ugaaaguguucaaaucgac

SEQ ID NO: 1163016 - RNA, 19 nt, Artificial Sequence
  Description of Artificial Sequence: Synthetic oligonucleotide
caauaauaguauauguuga

SEQ ID NO: 1163017 - RNA, 19 nt, Artificial Sequence
  Description of Artificial Sequence: Synthetic oligonucleotide
ucacuaaggaaaccaggug

SEQ ID NO: 1163018 - RNA, 19 nt, Artificial Sequence
  Description of Artificial Sequence: Synthetic oligonucleotide
caaccaauagagaauucac

SEQ ID NO: 1163019 - RNA, 19 nt, Artificial Sequence
  Description of Artificial Sequence: Synthetic oligonucleotide
ugcacacuaucacuaagga

SEQ ID NO: 1163020 - RNA, 19 nt, Artificial Sequence
  Description of Artificial Sequence: Synthetic oligonucleotide
gagagaaaguccuggcugc

SEQ ID NO: 1163021 - RNA, 19 nt, Artificial Sequence
  Description of Artificial Sequence: Synthetic oligonucleotide
acaggguuauucuggggac

SEQ ID NO: 1163022 - RNA, 19 nt, Artificial Sequence
  Description of Artificial Sequence: Synthetic oligonucleotide
aguuucgugguggaggaac

SEQ ID NO: 1163023 - RNA, 19 nt, Artificial Sequence
  Description of Artificial Sequence: Synthetic oligonucleotide
ucgaguggcuuucaagcag

SEQ ID NO: 1163024 - RNA, 19 nt, Artificial Sequence
  Description of Artificial Sequence: Synthetic oligonucleotide
agagcuauggcuucccgga

SEQ ID NO: 1163025 - RNA, 19 nt, Artificial Sequence
  Description of Artificial Sequence: Synthetic oligonucleotide
ggcauaaucugauaaucag

SEQ ID NO: 1163026 - RNA, 19 nt, Artificial Sequence
  Description of Artificial Sequence: Synthetic oligonucleotide
uguuaggggacacuacagu

SEQ ID NO: 1163027 - RNA, 19 nt, Artificial Sequence
  Description of Artificial Sequence: Synthetic oligonucleotide
uacgcuuucuaguuccacc

SEQ ID NO: 1163028 - RNA, 19 nt, Artificial Sequence
  Description of Artificial Sequence: Synthetic oligonucleotide
ugcguuuauggguugguga

SEQ ID NO: 1163029 - RNA, 19 nt, Artificial Sequence
  Description of Artificial Sequence: Synthetic oligonucleotide
accacuaagaccaugcaga

SEQ ID NO: 1163030 - RNA, 19 nt, Artificial Sequence
  Description of Artificial Sequence: Synthetic oligonucleotide
ugucuuaaacagugaacca

SEQ ID NO: 1163031 - RNA, 19 nt, Artificial Sequence
  Description of Artificial Sequence: Synthetic oligonucleotide
aggauuauaguuugagaaa

SEQ ID NO: 1163032 - RNA, 19 nt, Artificial Sequence
  Description of Artificial Sequence: Synthetic oligonucleotide
uaaugacaucgccacacug

SEQ ID NO: 1163033 - RNA, 19 nt, Artificial Sequence
  Description of Artificial Sequence: Synthetic oligonucleotide
acuaacacacacaaaguga

SEQ ID NO: 1163034 - RNA, 19 nt, Artificial Sequence
  Description of Artificial Sequence: Synthetic oligonucleotide
ucuguugcguuuauggguu

SEQ ID NO: 1163035 - RNA, 19 nt, Artificial Sequence
  Description of Artificial Sequence: Synthetic oligonucleotide
gauuauaguuugagaaagc

SEQ ID NO: 1163036 - RNA, 19 nt, Artificial Sequence
  Description of Artificial Sequence: Synthetic oligonucleotide
uugauucaguauuaaguau

SEQ ID NO: 1163037 - RNA, 19 nt, Artificial Sequence
  Description of Artificial Sequence: Synthetic oligonucleotide
uugcuaaugacuacacaau

SEQ ID NO: 1163038 - RNA, 19 nt, Artificial Sequence
  Description of Artificial Sequence: Synthetic oligonucleotide
aauugcacacuaucacuaa

SEQ ID NO: 1163039 - RNA, 19 nt, Artificial Sequence
  Description of Artificial Sequence: Synthetic oligonucleotide
aucucauguccucugcuag

SEQ ID NO: 1163040 - RNA, 19 nt, Artificial Sequence
  Description of Artificial Sequence: Synthetic oligonucleotide
aaauugcacacuaucacua

SEQ ID NO: 1163041 - RNA, 19 nt, Artificial Sequence
  Description of Artificial Sequence: Synthetic oligonucleotide
aaccaauagagaauucacu

SEQ ID NO: 1163042 - RNA, 19 nt, Artificial Sequence
  Description of Artificial Sequence: Synthetic oligonucleotide
acuuuuagccuuggaacgg

SEQ ID NO: 1163043 - RNA, 19 nt, Artificial Sequence
  Description of Artificial Sequence: Synthetic oligonucleotide
uagcauucgguccacugcu

SEQ ID NO: 1163044 - RNA, 19 nt, Artificial Sequence
  Description of Artificial Sequence: Synthetic oligonucleotide
aucgacaucauggagucca

SEQ ID NO: 1163045 - RNA, 19 nt, Artificial Sequence
  Description of Artificial Sequence: Synthetic oligonucleotide
gauauauguuugccuauga

SEQ ID NO: 1163046 - RNA, 19 nt, Artificial Sequence
  Description of Artificial Sequence: Synthetic oligonucleotide
uauucuggggacagguuaa

SEQ ID NO: 1163047 - RNA, 19 nt, Artificial Sequence
  Description of Artificial Sequence: Synthetic oligonucleotide
agaucugguuuauaagcca

SEQ ID NO: 1163048 - RNA, 19 nt, Artificial Sequence
  Description of Artificial Sequence: Synthetic oligonucleotide
cuuggagaaccagugcucg

SEQ ID NO: 1163049 - RNA, 19 nt, Artificial Sequence
  Description of Artificial Sequence: Synthetic oligonucleotide
ugcuaaugacuacacaauu

SEQ ID NO: 1163050 - RNA, 19 nt, Artificial Sequence
  Description of Artificial Sequence: Synthetic oligonucleotide
agaccaugcagagcuaugg

SEQ ID NO: 1163051 - RNA, 19 nt, Artificial Sequence
  Description of Artificial Sequence: Synthetic oligonucleotide
uguggccgaguucuggaag

SEQ ID NO: 1163052 - RNA, 19 nt, Artificial Sequence
  Description of Artificial Sequence: Synthetic oligonucleotide
acggauauauguuugccua

SEQ ID NO: 1163053 - RNA, 19 nt, Artificial Sequence
  Description of Artificial Sequence: Synthetic oligonucleotide
auaccuagaacuuccuuuu

SEQ ID NO: 1163054 - RNA, 19 nt, Artificial Sequence
  Description of Artificial Sequence: Synthetic oligonucleotide
uguaagaaccuggcaauac

SEQ ID NO: 1163055 - RNA, 19 nt, Artificial Sequence
  Description of Artificial Sequence: Synthetic oligonucleotide
guauauguugaggaucgag

SEQ ID NO: 1163056 - RNA, 19 nt, Artificial Sequence
  Description of Artificial Sequence: Synthetic oligonucleotide
aaaacuucgcugaugggua

SEQ ID NO: 1163057 - RNA, 19 nt, Artificial Sequence
  Description of Artificial Sequence: Synthetic oligonucleotide
uccuucgacuagcauucgg

SEQ ID NO: 1163058 - RNA, 19 nt, Artificial Sequence
  Description of Artificial Sequence: Synthetic oligonucleotide
ugggguacucgaacgcacg

SEQ ID NO: 1163059 - RNA, 19 nt, Artificial Sequence
  Description of Artificial Sequence: Synthetic oligonucleotide
agggaagauggccucaugu

SEQ ID NO: 1163060 - RNA, 19 nt, Artificial Sequence
  Description of Artificial Sequence: Synthetic oligonucleotide
gaaaguguucaaaucgaca

SEQ ID NO: 1163061 - RNA, 19 nt, Artificial Sequence
  Description of Artificial Sequence: Synthetic oligonucleotide
uucucuacgaauaguucuu

SEQ ID NO: 1163062 - RNA, 19 nt, Artificial Sequence
  Description of Artificial Sequence: Synthetic oligonucleotide
agcucuagaguuucguggu

SEQ ID NO: 1163063 - RNA, 19 nt, Artificial Sequence
  Description of Artificial Sequence: Synthetic oligonucleotide
ugagguacgcuuucuaguu

SEQ ID NO: 1163064 - RNA, 19 nt, Artificial Sequence
  Description of Artificial Sequence: Synthetic oligonucleotide
uauuacuugcaugaccauc

SEQ ID NO: 1163065 - RNA, 19 nt, Artificial Sequence
  Description of Artificial Sequence: Synthetic oligonucleotide
augaccaucauagcaccuc

SEQ ID NO: 1163066 - RNA, 19 nt, Artificial Sequence
  Description of Artificial Sequence: Synthetic oligonucleotide
auguuugccuaugaugauc

SEQ ID NO: 1163067 - RNA, 19 nt, Artificial Sequence
  Description of Artificial Sequence: Synthetic oligonucleotide
gaacggauauauguuugcc

SEQ ID NO: 1163068 - RNA, 19 nt, Artificial Sequence
  Description of Artificial Sequence: Synthetic oligonucleotide
aauacucaacacagcagga

SEQ ID NO: 1163069 - RNA, 19 nt, Artificial Sequence
  Description of Artificial Sequence: Synthetic oligonucleotide
caaucugaauuccaauauc

SEQ ID NO: 1163070 - RNA, 19 nt, Artificial Sequence
  Description of Artificial Sequence: Synthetic oligonucleotide
cacauccuuauuucgucgc

SEQ ID NO: 1163071 - RNA, 19 nt, Artificial Sequence
  Description of Artificial Sequence: Synthetic oligonucleotide
acacuaucacuaaggaaac

SEQ ID NO: 1163072 - RNA, 19 nt, Artificial Sequence
  Description of Artificial Sequence: Synthetic oligonucleotide
uguauugauucaguauuaa

SEQ ID NO: 1163073 - RNA, 19 nt, Artificial Sequence
  Description of Artificial Sequence: Synthetic oligonucleotide
aucaaaucuucucuacgaa

SEQ ID NO: 1163074 - RNA, 19 nt, Artificial Sequence
  Description of Artificial Sequence: Synthetic oligonucleotide
uaucaaaacuucgcugaug

SEQ ID NO: 1163075 - RNA, 19 nt, Artificial Sequence
  Description of Artificial Sequence: Synthetic oligonucleotide
caaaucgacaucauggagu

SEQ ID NO: 1163076 - RNA, 19 nt, Artificial Sequence
  Description of Artificial Sequence: Synthetic oligonucleotide
uggcugcaaaauuggaagc

SEQ ID NO: 1163077 - RNA, 19 nt, Artificial Sequence
  Description of Artificial Sequence: Synthetic oligonucleotide
cuguuaggggacacuacag

SEQ ID NO: 1163078 - RNA, 19 nt, Artificial Sequence
  Description of Artificial Sequence: Synthetic oligonucleotide
cucacaaucaccagaguua

SEQ ID NO: 1163079 - RNA, 19 nt, Artificial Sequence
  Description of Artificial Sequence: Synthetic oligonucleotide
uuauggcaaccaauagaga

SEQ ID NO: 1163080 - RNA, 19 nt, Artificial Sequence
  Description of Artificial Sequence: Synthetic oligonucleotide
ugcuuacauguguaggaga

SEQ ID NO: 1163081 - RNA, 19 nt, Artificial Sequence
  Description of Artificial Sequence: Synthetic oligonucleotide
aauaguucuucugcgcuuu

SEQ ID NO: 1163082 - RNA, 19 nt, Artificial Sequence
  Description of Artificial Sequence: Synthetic oligonucleotide
acgcuuucuaguuccacca

SEQ ID NO: 1163083 - RNA, 19 nt, Artificial Sequence
  Description of Artificial Sequence: Synthetic oligonucleotide
gaacgcacgcuuauacuag

SEQ ID NO: 1163084 - RNA, 19 nt, Artificial Sequence
  Description of Artificial Sequence: Synthetic oligonucleotide
cucgaacgcacgcuuauac

SEQ ID NO: 1163085 - RNA, 19 nt, Artificial Sequence
  Description of Artificial Sequence: Synthetic oligonucleotide
auacuagccauugcaccac

SEQ ID NO: 1163086 - RNA, 19 nt, Artificial Sequence
  Description of Artificial Sequence: Synthetic oligonucleotide
cuaggauuauaguuugaga

SEQ ID NO: 1163087 - RNA, 19 nt, Artificial Sequence
  Description of Artificial Sequence: Synthetic oligonucleotide
ugggugugaaaaugucugc

SEQ ID NO: 1163088 - RNA, 19 nt, Artificial Sequence
  Description of Artificial Sequence: Synthetic oligonucleotide
uguugcguuuauggguugg

SEQ ID NO: 1163089 - RNA, 19 nt, Artificial Sequence
  Description of Artificial Sequence: Synthetic oligonucleotide
gacaucgccacacugggcu

SEQ ID NO: 1163090 - RNA, 19 nt, Artificial Sequence
  Description of Artificial Sequence: Synthetic oligonucleotide
caccacuaagaccaugcag

SEQ ID NO: 1163091 - RNA, 19 nt, Artificial Sequence
  Description of Artificial Sequence: Synthetic oligonucleotide
caauagagaauucacuugu

SEQ ID NO: 1163092 - RNA, 19 nt, Artificial Sequence
  Description of Artificial Sequence: Synthetic oligonucleotide
uccacgcuuucuuuguaga

SEQ ID NO: 1163093 - RNA, 19 nt, Artificial Sequence
  Description of Artificial Sequence: Synthetic oligonucleotide
ggaaccuuuccacacagga

SEQ ID NO: 1163094 - RNA, 19 nt, Artificial Sequence
  Description of Artificial Sequence: Synthetic oligonucleotide
uguagagcugagccacggc

SEQ ID NO: 1163095 - RNA, 19 nt, Artificial Sequence
  Description of Artificial Sequence: Synthetic oligonucleotide
agcuauggcuucccggaag

SEQ ID NO: 1163096 - RNA, 19 nt, Artificial Sequence
  Description of Artificial Sequence: Synthetic oligonucleotide
uuccguugaaguagcucug

SEQ ID NO: 1163097 - RNA, 19 nt, Artificial Sequence
  Description of Artificial Sequence: Synthetic oligonucleotide
uaucucauguccucugcua

SEQ ID NO: 1163098 - RNA, 19 nt, Artificial Sequence
  Description of Artificial Sequence: Synthetic oligonucleotide
uuaacccaggccagcacau

SEQ ID NO: 1163099 - RNA, 19 nt, Artificial Sequence
  Description of Artificial Sequence: Synthetic oligonucleotide
aucgaguggcuuucaagca

SEQ ID NO: 1163100 - RNA, 19 nt, Artificial Sequence
  Description of Artificial Sequence: Synthetic oligonucleotide
cacucgaucuuuguagagc

SEQ ID NO: 1163101 - RNA, 19 nt, Artificial Sequence
  Description of Artificial Sequence: Synthetic oligonucleotide
cuucucuacgaauaguucu

SEQ ID NO: 1163102 - RNA, 19 nt, Artificial Sequence
  Description of Artificial Sequence: Synthetic oligonucleotide
acuacacaauuaucucaug

SEQ ID NO: 1163103 - RNA, 19 nt, Artificial Sequence
  Description of Artificial Sequence: Synthetic oligonucleotide
ucgaacgcacgcuuauacu

SEQ ID NO: 1163104 - RNA, 19 nt, Artificial Sequence
  Description of Artificial Sequence: Synthetic oligonucleotide
gauucaguauuaaguauua

SEQ ID NO: 1163105 - RNA, 19 nt, Artificial Sequence
  Description of Artificial Sequence: Synthetic oligonucleotide
guugcaaaucagucucuac

SEQ ID NO: 1163106 - RNA, 19 nt, Artificial Sequence
  Description of Artificial Sequence: Synthetic oligonucleotide
uuuagccuuggaacggaua

SEQ ID NO: 1163107 - RNA, 19 nt, Artificial Sequence
  Description of Artificial Sequence: Synthetic oligonucleotide
gcguuuauggguuggugag

SEQ ID NO: 1163108 - RNA, 19 nt, Artificial Sequence
  Description of Artificial Sequence: Synthetic oligonucleotide
ggaacggauauauguuugc

SEQ ID NO: 1163109 - RNA, 19 nt, Artificial Sequence
  Description of Artificial Sequence: Synthetic oligonucleotide
uugaggaucgaguggcuuu

SEQ ID NO: 1163110 - RNA, 19 nt, Artificial Sequence
  Description of Artificial Sequence: Synthetic oligonucleotide
ccagaucaagguuuuagac

SEQ ID NO: 1163111 - RNA, 19 nt, Artificial Sequence
  Description of Artificial Sequence: Synthetic oligonucleotide
uacauguguaggagagccu

SEQ ID NO: 1163112 - RNA, 19 nt, Artificial Sequence
  Description of Artificial Sequence: Synthetic oligonucleotide
aaacuucgcugauggguau

SEQ ID NO: 1163113 - RNA, 19 nt, Artificial Sequence
  Description of Artificial Sequence: Synthetic oligonucleotide
cuuacauguguaggagagc

SEQ ID NO: 1163114 - RNA, 19 nt, Artificial Sequence
  Description of Artificial Sequence: Synthetic oligonucleotide
cuacaggguuauucugggg

SEQ ID NO: 1163115 - RNA, 19 nt, Artificial Sequence
  Description of Artificial Sequence: Synthetic oligonucleotide
ugauggguauccacgcuuu

SEQ ID NO: 1163116 - RNA, 19 nt, Artificial Sequence
  Description of Artificial Sequence: Synthetic oligonucleotide
cacuaaggaaaccaggugu

SEQ ID NO: 1163117 - RNA, 19 nt, Artificial Sequence
  Description of Artificial Sequence: Synthetic oligonucleotide
cagugaaccagggaagaug

SEQ ID NO: 1163118 - RNA, 19 nt, Artificial Sequence
  Description of Artificial Sequence: Synthetic oligonucleotide
ggaucgaguggcuuucaag

SEQ ID NO: 1163119 - RNA, 19 nt, Artificial Sequence
  Description of Artificial Sequence: Synthetic oligonucleotide
cuaguuccaccauugucca

SEQ ID NO: 1163120 - RNA, 19 nt, Artificial Sequence
  Description of Artificial Sequence: Synthetic oligonucleotide
ugagcuaguuuccguugaa

SEQ ID NO: 1163121 - RNA, 19 nt, Artificial Sequence
  Description of Artificial Sequence: Synthetic oligonucleotide
cauucgguccacugcuuac

SEQ ID NO: 1163122 - RNA, 19 nt, Artificial Sequence
  Description of Artificial Sequence: Synthetic oligonucleotide
uacucgaacgcacgcuuau

SEQ ID NO: 1163123 - RNA, 19 nt, Artificial Sequence
  Description of Artificial Sequence: Synthetic oligonucleotide
uuuauggguuggugagucu

SEQ ID NO: 1163124 - RNA, 19 nt, Artificial Sequence
  Description of Artificial Sequence: Synthetic oligonucleotide
uuucgucgcugauagccaa

SEQ ID NO: 1163125 - RNA, 19 nt, Artificial Sequence
  Description of Artificial Sequence: Synthetic oligonucleotide
gcaucuacuauaaauaccu

SEQ ID NO: 1163126 - RNA, 19 nt, Artificial Sequence
  Description of Artificial Sequence: Synthetic oligonucleotide
uggcaaccaauagagaauu

SEQ ID NO: 1163127 - RNA, 19 nt, Artificial Sequence
  Description of Artificial Sequence: Synthetic oligonucleotide
gagcuaguuuccguugaag

SEQ ID NO: 1163128 - RNA, 19 nt, Artificial Sequence
  Description of Artificial Sequence: Synthetic oligonucleotide
ggcaucuacuauaaauacc

SEQ ID NO: 1163129 - RNA, 19 nt, Artificial Sequence
  Description of Artificial Sequence: Synthetic oligonucleotide
uggaguccauuucuccuuc

SEQ ID NO: 1163130 - RNA, 19 nt, Artificial Sequence
  Description of Artificial Sequence: Synthetic oligonucleotide
ccuacaggguuauucuggg

SEQ ID NO: 1163131 - RNA, 19 nt, Artificial Sequence
  Description of Artificial Sequence: Synthetic oligonucleotide
agccuacaggguuauucug

SEQ ID NO: 1163132 - RNA, 19 nt, Artificial Sequence
  Description of Artificial Sequence: Synthetic oligonucleotide
cuacacaauuaucucaugu

SEQ ID NO: 1163133 - RNA, 19 nt, Artificial Sequence
  Description of Artificial Sequence: Synthetic oligonucleotide
agccuuggaacggauauau

SEQ ID NO: 1163134 - RNA, 19 nt, Artificial Sequence
  Description of Artificial Sequence: Synthetic oligonucleotide
uccaaguggagugccauuu

SEQ ID NO: 1163135 - RNA, 19 nt, Artificial Sequence
  Description of Artificial Sequence: Synthetic oligonucleotide
cugcguuuuggaaggggac

SEQ ID NO: 1163136 - RNA, 19 nt, Artificial Sequence
  Description of Artificial Sequence: Synthetic oligonucleotide
guuuuggaaggggacccag

SEQ ID NO: 1163137 - RNA, 19 nt, Artificial Sequence
  Description of Artificial Sequence: Synthetic oligonucleotide
agccaaucugaauuccaau

SEQ ID NO: 1163138 - RNA, 19 nt, Artificial Sequence
  Description of Artificial Sequence: Synthetic oligonucleotide
caggaagcugaucaaaucu

SEQ ID NO: 1163139 - RNA, 19 nt, Artificial Sequence
  Description of Artificial Sequence: Synthetic oligonucleotide
cucuguuaggggacacuac

SEQ ID NO: 1163140 - RNA, 19 nt, Artificial Sequence
  Description of Artificial Sequence: Synthetic oligonucleotide
gcuuucaagcagcauggug

SEQ ID NO: 1163141 - RNA, 19 nt, Artificial Sequence
  Description of Artificial Sequence: Synthetic oligonucleotide
ugacaucgccacacugggc

SEQ ID NO: 1163142 - RNA, 19 nt, Artificial Sequence
  Description of Artificial Sequence: Synthetic oligonucleotide
cugggguacucgaacgcac

SEQ ID NO: 1163143 - RNA, 19 nt, Artificial Sequence
  Description of Artificial Sequence: Synthetic oligonucleotide
agucucuacagaugagcua

SEQ ID NO: 1163144 - RNA, 19 nt, Artificial Sequence
  Description of Artificial Sequence: Synthetic oligonucleotide
uugcguuuauggguuggug

SEQ ID NO: 1163145 - RNA, 19 nt, Artificial Sequence
  Description of Artificial Sequence: Synthetic oligonucleotide
auggcaaccaauagagaau

SEQ ID NO: 1163146 - RNA, 19 nt, Artificial Sequence
  Description of Artificial Sequence: Synthetic oligonucleotide
acgcacgcuuauacuagcc

SEQ ID NO: 1163147 - RNA, 19 nt, Artificial Sequence
  Description of Artificial Sequence: Synthetic oligonucleotide
guuucgugguggaggaacc

SEQ ID NO: 1163148 - RNA, 19 nt, Artificial Sequence
  Description of Artificial Sequence: Synthetic oligonucleotide
gccuacaggguuauucugg

SEQ ID NO: 1163149 - RNA, 19 nt, Artificial Sequence
  Description of Artificial Sequence: Synthetic oligonucleotide
ggcugcaaaauuggaagcc

SEQ ID NO: 1163150 - RNA, 19 nt, Artificial Sequence
  Description of Artificial Sequence: Synthetic oligonucleotide
ucucuacagaugagcuagu

SEQ ID NO: 1163151 - RNA, 19 nt, Artificial Sequence
  Description of Artificial Sequence: Synthetic oligonucleotide
gagguacgcuuucuaguuc

SEQ ID NO: 1163152 - RNA, 19 nt, Artificial Sequence
  Description of Artificial Sequence: Synthetic oligonucleotide
uuagagcauucuguugcgu

SEQ ID NO: 1163153 - RNA, 19 nt, Artificial Sequence
  Description of Artificial Sequence: Synthetic oligonucleotide
ucgugguggaggaaccuuu

SEQ ID NO: 1163154 - RNA, 19 nt, Artificial Sequence
  Description of Artificial Sequence: Synthetic oligonucleotide
ucucuacgaauaguucuuc

SEQ ID NO: 1163155 - RNA, 19 nt, Artificial Sequence
  Description of Artificial Sequence: Synthetic oligonucleotide
uacuagccauugcaccacu

SEQ ID NO: 1163156 - RNA, 19 nt, Artificial Sequence
  Description of Artificial Sequence: Synthetic oligonucleotide
auggguauccacgcuuucu

SEQ ID NO: 1163157 - RNA, 19 nt, Artificial Sequence
  Description of Artificial Sequence: Synthetic oligonucleotide
guuuccguugaaguagcuc

SEQ ID NO: 1163158 - RNA, 19 nt, Artificial Sequence
  Description of Artificial Sequence: Synthetic oligonucleotide
uucccggaaggguugcaaa

SEQ ID NO: 1163159 - RNA, 19 nt, Artificial Sequence
  Description of Artificial Sequence: Synthetic oligonucleotide
auggccucauguuuccuuu

SEQ ID NO: 1163160 - RNA, 19 nt, Artificial Sequence
  Description of Artificial Sequence: Synthetic oligonucleotide
ucccggaaggguugcaaau

SEQ ID NO: 1163161 - RNA, 19 nt, Artificial Sequence
  Description of Artificial Sequence: Synthetic oligonucleotide
auuucgucgcugauagcca

SEQ ID NO: 1163162 - RNA, 19 nt, Artificial Sequence
  Description of Artificial Sequence: Synthetic oligonucleotide
ggacccagagagaaagucc

SEQ ID NO: 1163163 - RNA, 19 nt, Artificial Sequence
  Description of Artificial Sequence: Synthetic oligonucleotide
auucgguccacugcuuaca

SEQ ID NO: 1163164 - RNA, 19 nt, Artificial Sequence
  Description of Artificial Sequence: Synthetic oligonucleotide
uccguugaaguagcucugu

SEQ ID NO: 1163165 - RNA, 19 nt, Artificial Sequence
  Description of Artificial Sequence: Synthetic oligonucleotide
cucugcuaggauuauaguu

SEQ ID NO: 1163166 - RNA, 19 nt, Artificial Sequence
  Description of Artificial Sequence: Synthetic oligonucleotide
ucgguccacugcuuacaug

SEQ ID NO: 1163167 - RNA, 19 nt, Artificial Sequence
  Description of Artificial Sequence: Synthetic oligonucleotide
ugccuaugaugaucuugcu

SEQ ID NO: 1163168 - RNA, 19 nt, Artificial Sequence
  Description of Artificial Sequence: Synthetic oligonucleotide
aaguggagugccauuucuu

SEQ ID NO: 1163169 - RNA, 19 nt, Artificial Sequence
  Description of Artificial Sequence: Synthetic oligonucleotide
uggguuggugagucuguaa

SEQ ID NO: 1163170 - RNA, 19 nt, Artificial Sequence
  Description of Artificial Sequence: Synthetic oligonucleotide
ucgcccuccuccuuccgcu

SEQ ID NO: 1163171 - RNA, 19 nt, Artificial Sequence
  Description of Artificial Sequence: Synthetic oligonucleotide
acaucgccacacugggcug

SEQ ID NO: 1163172 - RNA, 19 nt, Artificial Sequence
  Description of Artificial Sequence: Synthetic oligonucleotide
aucucacaaucaccagagu

SEQ ID NO: 1163173 - RNA, 19 nt, Artificial Sequence
  Description of Artificial Sequence: Synthetic oligonucleotide
guaggagagccugggguac

SEQ ID NO: 1163174 - RNA, 19 nt, Artificial Sequence
  Description of Artificial Sequence: Synthetic oligonucleotide
guuacaggaggcaucuacu

SEQ ID NO: 1163175 - RNA, 19 nt, Artificial Sequence
  Description of Artificial Sequence: Synthetic oligonucleotide
auuucuccuucgacuagca

SEQ ID NO: 1163176 - RNA, 19 nt, Artificial Sequence
  Description of Artificial Sequence: Synthetic oligonucleotide
uucgucgcugauagccaau

SEQ ID NO: 1163177 - RNA, 19 nt, Artificial Sequence
  Description of Artificial Sequence: Synthetic oligonucleotide
gcugaucaaaucuucucua

SEQ ID NO: 1163178 - RNA, 19 nt, Artificial Sequence
  Description of Artificial Sequence: Synthetic oligonucleotide
gggcauaaucugauaauca

SEQ ID NO: 1163179 - RNA, 19 nt, Artificial Sequence
  Description of Artificial Sequence: Synthetic oligonucleotide
guguauugauucaguauua

SEQ ID NO: 1163180 - RNA, 19 nt, Artificial Sequence
  Description of Artificial Sequence: Synthetic oligonucleotide
aguauauguugaggaucga

SEQ ID NO: 1163181 - RNA, 19 nt, Artificial Sequence
  Description of Artificial Sequence: Synthetic oligonucleotide
gcaauacuguuuaagcaaa

SEQ ID NO: 1163182 - RNA, 19 nt, Artificial Sequence
  Description of Artificial Sequence: Synthetic oligonucleotide
ggaggaaccuuuccacaca

SEQ ID NO: 1163183 - RNA, 19 nt, Artificial Sequence
  Description of Artificial Sequence: Synthetic oligonucleotide
aggaucgaguggcuuucaa

SEQ ID NO: 1163184 - RNA, 19 nt, Artificial Sequence
  Description of Artificial Sequence: Synthetic oligonucleotide
guggagugccauuucuucu

SEQ ID NO: 1163185 - RNA, 19 nt, Artificial Sequence
  Description of Artificial Sequence: Synthetic oligonucleotide
uucgugguggaggaaccuu

SEQ ID NO: 1163186 - RNA, 19 nt, Artificial Sequence
  Description of Artificial Sequence: Synthetic oligonucleotide
gcguuuuggaaggggaccc

SEQ ID NO: 1163187 - RNA, 19 nt, Artificial Sequence
  Description of Artificial Sequence: Synthetic oligonucleotide
gggguacucgaacgcacgc

SEQ ID NO: 1163188 - RNA, 19 nt, Artificial Sequence
  Description of Artificial Sequence: Synthetic oligonucleotide
gauggccucauguuuccuu

SEQ ID NO: 1163189 - RNA, 19 nt, Artificial Sequence
  Description of Artificial Sequence: Synthetic oligonucleotide
caaguggagugccauuucu

SEQ ID NO: 1163190 - RNA, 19 nt, Artificial Sequence
  Description of Artificial Sequence: Synthetic oligonucleotide
gcagagcuauggcuucccg

SEQ ID NO: 1163191 - RNA, 19 nt, Artificial Sequence
  Description of Artificial Sequence: Synthetic oligonucleotide
ugucugcaguuuagagcau

SEQ ID NO: 1163192 - RNA, 19 nt, Artificial Sequence
  Description of Artificial Sequence: Synthetic oligonucleotide
cuguugcguuuauggguug

SEQ ID NO: 1163193 - RNA, 19 nt, Artificial Sequence
  Description of Artificial Sequence: Synthetic oligonucleotide
ggacacuacagucagucuu

SEQ ID NO: 1163194 - RNA, 19 nt, Artificial Sequence
  Description of Artificial Sequence: Synthetic oligonucleotide
gagguuggugacggcggug

SEQ ID NO: 1163195 - RNA, 19 nt, Artificial Sequence
  Description of Artificial Sequence: Synthetic oligonucleotide
guacgcuuucuaguuccac

SEQ ID NO: 1163196 - RNA, 19 nt, Artificial Sequence
  Description of Artificial Sequence: Synthetic oligonucleotide
cucuacgaauaguucuucu

SEQ ID NO: 1163197 - RNA, 19 nt, Artificial Sequence
  Description of Artificial Sequence: Synthetic oligonucleotide
uucuggggacagguuaaua

SEQ ID NO: 1163198 - RNA, 19 nt, Artificial Sequence
  Description of Artificial Sequence: Synthetic oligonucleotide
gcacacuaucacuaaggaa

SEQ ID NO: 1163199 - RNA, 19 nt, Artificial Sequence
  Description of Artificial Sequence: Synthetic oligonucleotide
agcucuguuaggggacacu

SEQ ID NO: 1163200 - RNA, 19 nt, Artificial Sequence
  Description of Artificial Sequence: Synthetic oligonucleotide
gggcccgugcuccugaauc

SEQ ID NO: 1163201 - RNA, 19 nt, Artificial Sequence
  Description of Artificial Sequence: Synthetic oligonucleotide
caauuaucucauguccucu

SEQ ID NO: 1163202 - RNA, 19 nt, Artificial Sequence
  Description of Artificial Sequence: Synthetic oligonucleotide
gcucuagaguuucguggug

SEQ ID NO: 1163203 - RNA, 19 nt, Artificial Sequence
  Description of Artificial Sequence: Synthetic oligonucleotide
gagcuauggcuucccggaa

SEQ ID NO: 1163204 - RNA, 19 nt, Artificial Sequence
  Description of Artificial Sequence: Synthetic oligonucleotide
cagaugagcuaguuuccgu

SEQ ID NO: 1163205 - RNA, 19 nt, Artificial Sequence
  Description of Artificial Sequence: Synthetic oligonucleotide
gccuaugaugaucuugcua

SEQ ID NO: 1163206 - RNA, 19 nt, Artificial Sequence
  Description of Artificial Sequence: Synthetic oligonucleotide
uagcucuguuaggggacac

SEQ ID NO: 1163207 - RNA, 19 nt, Artificial Sequence
  Description of Artificial Sequence: Synthetic oligonucleotide
aguuuccguugaaguagcu

SEQ ID NO: 1163208 - RNA, 19 nt, Artificial Sequence
  Description of Artificial Sequence: Synthetic oligonucleotide
cuccuucgacuagcauucg

SEQ ID NO: 1163209 - RNA, 19 nt, Artificial Sequence
  Description of Artificial Sequence: Synthetic oligonucleotide
cuaugaugaucuugcuaau

SEQ ID NO: 1163210 - RNA, 19 nt, Artificial Sequence
  Description of Artificial Sequence: Synthetic oligonucleotide
caggguuauucuggggaca

SEQ ID NO: 1163211 - RNA, 19 nt, Artificial Sequence
  Description of Artificial Sequence: Synthetic oligonucleotide
cugauggguauccacgcuu

SEQ ID NO: 1163212 - RNA, 19 nt, Artificial Sequence
  Description of Artificial Sequence: Synthetic oligonucleotide
caugaccaucauagcaccu

SEQ ID NO: 1163213 - RNA, 19 nt, Artificial Sequence
  Description of Artificial Sequence: Synthetic oligonucleotide
ccggaaggguugcaaauca

SEQ ID NO: 1163214 - RNA, 19 nt, Artificial Sequence
  Description of Artificial Sequence: Synthetic oligonucleotide
cacgcuuauacuagccauu

SEQ ID NO: 1163215 - RNA, 19 nt, Artificial Sequence
  Description of Artificial Sequence: Synthetic oligonucleotide
cgaacgcacgcuuauacua

SEQ ID NO: 1163216 - RNA, 19 nt, Artificial Sequence
  Description of Artificial Sequence: Synthetic oligonucleotide
ccaaguggagugccauuuc

SEQ ID NO: 1163217 - RNA, 19 nt, Artificial Sequence
  Description of Artificial Sequence: Synthetic oligonucleotide
guugcguuuauggguuggu

SEQ ID NO: 1163218 - RNA, 19 nt, Artificial Sequence
  Description of Artificial Sequence: Synthetic oligonucleotide
gcauucuguugcguuuaug

SEQ ID NO: 1163219 - RNA, 19 nt, Artificial Sequence
  Description of Artificial Sequence: Synthetic oligonucleotide
gguugcaaaucagucucua

SEQ ID NO: 1163220 - RNA, 19 nt, Artificial Sequence
  Description of Artificial Sequence: Synthetic oligonucleotide
acucgaacgcacgcuuaua

SEQ ID NO: 1163221 - RNA, 19 nt, Artificial Sequence
  Description of Artificial Sequence: Synthetic oligonucleotide
cggaaggguugcaaaucag

SEQ ID NO: 1163222 - RNA, 19 nt, Artificial Sequence
  Description of Artificial Sequence: Synthetic oligonucleotide
cgguccacugcuuacaugu

SEQ ID NO: 1163223 - RNA, 19 nt, Artificial Sequence
  Description of Artificial Sequence: Synthetic oligonucleotide
caucgccacacugggcuga

SEQ ID NO: 1163224 - RNA, 19 nt, Artificial Sequence
  Description of Artificial Sequence: Synthetic oligonucleotide
cuucccggaaggguugcaa

SEQ ID NO: 1163225 - RNA, 19 nt, Artificial Sequence
  Description of Artificial Sequence: Synthetic oligonucleotide
acuagccauugcaccacua

SEQ ID NO: 1163226 - RNA, 19 nt, Artificial Sequence
  Description of Artificial Sequence: Synthetic oligonucleotide
aaccagugcucgggcccgu

SEQ ID NO: 1163227 - RNA, 19 nt, Artificial Sequence
  Description of Artificial Sequence: Synthetic oligonucleotide
guacucgaacgcacgcuua

SEQ ID NO: 1163228 - RNA, 19 nt, Artificial Sequence
  Description of Artificial Sequence: Synthetic oligonucleotide
cgcuuauacuagccauugc

SEQ ID NO: 1163229 - RNA, 19 nt, Artificial Sequence
  Description of Artificial Sequence: Synthetic oligonucleotide
gccgaguucuggaagagau

SEQ ID NO: 1163230 - RNA, 19 nt, Artificial Sequence
  Description of Artificial Sequence: Synthetic oligonucleotide
gcauucgguccacugcuua

SEQ ID NO: 1163231 - RNA, 19 nt, Artificial Sequence
  Description of Artificial Sequence: Synthetic oligonucleotide
cccggaaggguugcaaauc

SEQ ID NO: 1163232 - RNA, 19 nt, Artificial Sequence
  Description of Artificial Sequence: Synthetic oligonucleotide
gguacgcuuucuaguucca

SEQ ID NO: 1163233 - RNA, 19 nt, Artificial Sequence
  Description of Artificial Sequence: Synthetic oligonucleotide
cuucgcugauggguaucca

SEQ ID NO: 1163234 - RNA, 19 nt, Artificial Sequence
  Description of Artificial Sequence: Synthetic oligonucleotide
ugaagccuacaggguuauu

SEQ ID NO: 1163235 - RNA, 19 nt, Artificial Sequence
  Description of Artificial Sequence: Synthetic oligonucleotide
gcugauggguauccacgcu

SEQ ID NO: 1163236 - RNA, 19 nt, Artificial Sequence
  Description of Artificial Sequence: Synthetic oligonucleotide
gccuuggaacggauauaug

SEQ ID NO: 1163237 - RNA, 19 nt, Artificial Sequence
  Description of Artificial Sequence: Synthetic oligonucleotide
  modified_base (10)..(10): a, c, u, g, unknown or other
ccccgcgggngcgucgucg

SEQ ID NO: 1163238 - RNA, 19 nt, Artificial Sequence
  Description of Artificial Sequence: Synthetic oligonucleotide
cucgggcccgugcuccuga

SEQ ID NO: 1163239 - RNA, 19 nt, Artificial Sequence
  Description of Artificial Sequence: Synthetic oligonucleotide
gucugcaguuuagagcauu

SEQ ID NO: 1163240 - RNA, 19 nt, Artificial Sequence
  Description of Artificial Sequence: Synthetic oligonucleotide
gcugacacacucgaucuuu

SEQ ID NO: 1163241 - RNA, 19 nt, Artificial Sequence
  Description of Artificial Sequence: Synthetic oligonucleotide
cagugcucgggcccgugcu

SEQ ID NO: 1163242 - RNA, 19 nt, Artificial Sequence
  Description of Artificial Sequence: Synthetic oligonucleotide
cgcacgcuuauacuagcca

SEQ ID NO: 1163243 - RNA, 19 nt, Artificial Sequence
  Description of Artificial Sequence: Synthetic oligonucleotide
ggcccgugcuccugaaucu

SEQ ID NO: 1163244 - RNA, 19 nt, Artificial Sequence
  Description of Artificial Sequence: Synthetic oligonucleotide
ggccgaguucuggaagaga

SEQ ID NO: 1163245 - RNA, 19 nt, Artificial Sequence
  Description of Artificial Sequence: Synthetic oligonucleotide
ccucugcuaggauuauagu

SEQ ID NO: 1163246 - RNA, 19 nt, Artificial Sequence
  Description of Artificial Sequence: Synthetic oligonucleotide
gcccgugcuccugaaucuc

SEQ ID NO: 1163247 - RNA, 19 nt, Artificial Sequence
  Description of Artificial Sequence: Synthetic oligonucleotide
ccgcuccuccaucccuccg

SEQ ID NO: 1163248 - RNA, 19 nt, Artificial Sequence
  Description of Artificial Sequence: Synthetic oligonucleotide
ggguugcaaaucagucucu

SEQ ID NO: 1163249 - RNA, 19 nt, Artificial Sequence
  Description of Artificial Sequence: Synthetic oligonucleotide
ccuuuccacacaggaagcu

SEQ ID NO: 1163250 - RNA, 19 nt, Artificial Sequence
  Description of Artificial Sequence: Synthetic oligonucleotide
cguuuuggaaggggaccca

SEQ ID NO: 1163251 - RNA, 19 nt, Artificial Sequence
  Description of Artificial Sequence: Synthetic oligonucleotide
gcuucccggaaggguugca

SEQ ID NO: 1163252 - RNA, 19 nt, Artificial Sequence
  Description of Artificial Sequence: Synthetic oligonucleotide
  modified_base (9)..(9): a, c, u, g, unknown or other
cccgcgggngcgucgucgu

SEQ ID NO: 1163253 - RNA, 19 nt, Artificial Sequence
  Description of Artificial Sequence: Synthetic oligonucleotide
  modified_base (8)..(8): a, c, u, g, unknown or other
ccgcgggngcgucgucguc

SEQ ID NO: 1163254 - RNA, 19 nt, Artificial Sequence
  Description of Artificial Sequence: Synthetic oligonucleotide
  modified_base (12)..(12): a, c, u, g, unknown or other
ggccccgcgggngcgucgu

SEQ ID NO: 1163255 - RNA, 19 nt, Artificial Sequence
  Description of Artificial Sequence: Synthetic oligonucleotide
gccacggcuguggccgagu

SEQ ID NO: 1163256 - RNA, 19 nt, Artificial Sequence
  Description of Artificial Sequence: Synthetic oligonucleotide
cgggcccgugcuccugaau

SEQ ID NO: 1163257 - RNA, 19 nt, Artificial Sequence
  Description of Artificial Sequence: Synthetic oligonucleotide
acaaaagcggauccgaugc

SEQ ID NO: 1163258 - RNA, 19 nt, Artificial Sequence
  Description of Artificial Sequence: Synthetic oligonucleotide
uguaucgucacuuauuuug

SEQ ID NO: 1163259 - RNA, 19 nt, Artificial Sequence
  Description of Artificial Sequence: Synthetic oligonucleotide
uucaacuacgacuuguugg

SEQ ID NO: 1163260 - RNA, 19 nt, Artificial Sequence
  Description of Artificial Sequence: Synthetic oligonucleotide
ugagcuagaggauaugacg

SEQ ID NO: 1163261 - RNA, 19 nt, Artificial Sequence
  Description of Artificial Sequence: Synthetic oligonucleotide
aagggauucaacuacgacu

SEQ ID NO: 1163262 - RNA, 19 nt, Artificial Sequence
  Description of Artificial Sequence: Synthetic oligonucleotide
ugauccuacaacaucucgg

SEQ ID NO: 1163263 - RNA, 19 nt, Artificial Sequence
  Description of Artificial Sequence: Synthetic oligonucleotide
cuaacaaguguccagcugg

SEQ ID NO: 1163264 - RNA, 19 nt, Artificial Sequence
  Description of Artificial Sequence: Synthetic oligonucleotide
aaagggauucaacuacgac

SEQ ID NO: 1163265 - RNA, 19 nt, Artificial Sequence
  Description of Artificial Sequence: Synthetic oligonucleotide
uuuaaacuggaacugggga

SEQ ID NO: 1163266 - RNA, 19 nt, Artificial Sequence
  Description of Artificial Sequence: Synthetic oligonucleotide
caaauucuccccaugagcc

SEQ ID NO: 1163267 - RNA, 19 nt, Artificial Sequence
  Description of Artificial Sequence: Synthetic oligonucleotide
uguaucgaaauccaagagu

SEQ ID NO: 1163268 - RNA, 19 nt, Artificial Sequence
  Description of Artificial Sequence: Synthetic oligonucleotide
aagggcuuaaagauaagac

SEQ ID NO: 1163269 - RNA, 19 nt, Artificial Sequence
  Description of Artificial Sequence: Synthetic oligonucleotide
uuuacauggccucaguaac

SEQ ID NO: 1163270 - RNA, 19 nt, Artificial Sequence
  Description of Artificial Sequence: Synthetic oligonucleotide
ucuguaucgaaauccaaga

SEQ ID NO: 1163271 - RNA, 19 nt, Artificial Sequence
  Description of Artificial Sequence: Synthetic oligonucleotide
cucgcugaaguucugaucc

SEQ ID NO: 1163272 - RNA, 19 nt, Artificial Sequence
  Description of Artificial Sequence: Synthetic oligonucleotide
ugugucacgauuucaaccu

SEQ ID NO: 1163273 - RNA, 19 nt, Artificial Sequence
  Description of Artificial Sequence: Synthetic oligonucleotide
aguuucugcagucucuugg

SEQ ID NO: 1163274 - RNA, 19 nt, Artificial Sequence
  Description of Artificial Sequence: Synthetic oligonucleotide
ucaacuacgacuuguugga

SEQ ID NO: 1163275 - RNA, 19 nt, Artificial Sequence
  Description of Artificial Sequence: Synthetic oligonucleotide
uaagcuuagggaagguggg

SEQ ID NO: 1163276 - RNA, 19 nt, Artificial Sequence
  Description of Artificial Sequence: Synthetic oligonucleotide
guaucgaaauccaagagug

SEQ ID NO: 1163277 - RNA, 19 nt, Artificial Sequence
  Description of Artificial Sequence: Synthetic oligonucleotide
auugcagcgugauuuauug

SEQ ID NO: 1163278 - RNA, 19 nt, Artificial Sequence
  Description of Artificial Sequence: Synthetic oligonucleotide
gauccuacaacaucucggc

SEQ ID NO: 1163279 - RNA, 19 nt, Artificial Sequence
  Description of Artificial Sequence: Synthetic oligonucleotide
uuuuacauggccucaguaa

SEQ ID NO: 1163280 - RNA, 19 nt, Artificial Sequence
  Description of Artificial Sequence: Synthetic oligonucleotide
acauuaugugcaaagagag

SEQ ID NO: 1163281 - RNA, 19 nt, Artificial Sequence
  Description of Artificial Sequence: Synthetic oligonucleotide
ucgucacuuauuuugggag

SEQ ID NO: 1163282 - RNA, 19 nt, Artificial Sequence
  Description of Artificial Sequence: Synthetic oligonucleotide
agggcuuaaagauaagaca

SEQ ID NO: 1163283 - RNA, 19 nt, Artificial Sequence
  Description of Artificial Sequence: Synthetic oligonucleotide
acgggcuggauccugagac

SEQ ID NO: 1163284 - RNA, 19 nt, Artificial Sequence
  Description of Artificial Sequence: Synthetic oligonucleotide
gagcuagaggauaugacgg

SEQ ID NO: 1163285 - RNA, 19 nt, Artificial Sequence
  Description of Artificial Sequence: Synthetic oligonucleotide
ugauuggcguuaaagggug

SEQ ID NO: 1163286 - RNA, 19 nt, Artificial Sequence
  Description of Artificial Sequence: Synthetic oligonucleotide
uuaugugcaaagagagaag

SEQ ID NO: 1163287 - RNA, 19 nt, Artificial Sequence
  Description of Artificial Sequence: Synthetic oligonucleotide
aaccacgguuccuucaccg

SEQ ID NO: 1163288 - RNA, 19 nt, Artificial Sequence
  Description of Artificial Sequence: Synthetic oligonucleotide
uccacuaaggucccguagc

SEQ ID NO: 1163289 - RNA, 19 nt, Artificial Sequence
  Description of Artificial Sequence: Synthetic oligonucleotide
uaucgaaauccaagagugg

SEQ ID NO: 1163290 - RNA, 19 nt, Artificial Sequence
  Description of Artificial Sequence: Synthetic oligonucleotide
gaugcgggacauuaugugc

SEQ ID NO: 1163291 - RNA, 19 nt, Artificial Sequence
  Description of Artificial Sequence: Synthetic oligonucleotide
uauggucagaggcuaaacu

SEQ ID NO: 1163292 - RNA, 19 nt, Artificial Sequence
  Description of Artificial Sequence: Synthetic oligonucleotide
cuagaggauaugacggugg

SEQ ID NO: 1163293 - RNA, 19 nt, Artificial Sequence
  Description of Artificial Sequence: Synthetic oligonucleotide
aaaagcggauccgaugcgg

SEQ ID NO: 1163294 - RNA, 19 nt, Artificial Sequence
  Description of Artificial Sequence: Synthetic oligonucleotide
ucuaacaaguguccagcug

SEQ ID NO: 1163295 - RNA, 19 nt, Artificial Sequence
  Description of Artificial Sequence: Synthetic oligonucleotide
uuauuggacaagacgugca

SEQ ID NO: 1163296 - RNA, 19 nt, Artificial Sequence
  Description of Artificial Sequence: Synthetic oligonucleotide
acugucauaggacccaugu

SEQ ID NO: 1163297 - RNA, 19 nt, Artificial Sequence
  Description of Artificial Sequence: Synthetic oligonucleotide
acuacgacuuguuggacug

SEQ ID NO: 1163298 - RNA, 19 nt, Artificial Sequence
  Description of Artificial Sequence: Synthetic oligonucleotide
gacauuaugugcaaagaga

SEQ ID NO: 1163299 - RNA, 19 nt, Artificial Sequence
  Description of Artificial Sequence: Synthetic oligonucleotide
uacaaaagcggauccgaug

SEQ ID NO: 1163300 - RNA, 19 nt, Artificial Sequence
  Description of Artificial Sequence: Synthetic oligonucleotide
acccaugucgaguaauggg

SEQ ID NO: 1163301 - RNA, 19 nt, Artificial Sequence
  Description of Artificial Sequence: Synthetic oligonucleotide
uucaccgaacaguacagga

SEQ ID NO: 1163302 - RNA, 19 nt, Artificial Sequence
  Description of Artificial Sequence: Synthetic oligonucleotide
caaguguccagcuggcacg

SEQ ID NO: 1163303 - RNA, 19 nt, Artificial Sequence
  Description of Artificial Sequence: Synthetic oligonucleotide
ugucacucgguccaugaga

SEQ ID NO: 1163304 - RNA, 19 nt, Artificial Sequence
  Description of Artificial Sequence: Synthetic oligonucleotide
uuacauggccucaguaacc

SEQ ID NO: 1163305 - RNA, 19 nt, Artificial Sequence
  Description of Artificial Sequence: Synthetic oligonucleotide
gaacaguacaggaccaggg

SEQ ID NO: 1163306 - RNA, 19 nt, Artificial Sequence
  Description of Artificial Sequence: Synthetic oligonucleotide
cauguguuccacuaagguc

SEQ ID NO: 1163307 - RNA, 19 nt, Artificial Sequence
  Description of Artificial Sequence: Synthetic oligonucleotide
ugguuuuaaacuggaacug

SEQ ID NO: 1163308 - RNA, 19 nt, Artificial Sequence
  Description of Artificial Sequence: Synthetic oligonucleotide
uauuggacaagacgugcac

SEQ ID NO: 1163309 - RNA, 19 nt, Artificial Sequence
  Description of Artificial Sequence: Synthetic oligonucleotide
uaucgucacuuauuuuggg

SEQ ID NO: 1163310 - RNA, 19 nt, Artificial Sequence
  Description of Artificial Sequence: Synthetic oligonucleotide
gggcuuaaagauaagacag

SEQ ID NO: 1163311 - RNA, 19 nt, Artificial Sequence
  Description of Artificial Sequence: Synthetic oligonucleotide
aggcuaaacugucauagga

SEQ ID NO: 1163312 - RNA, 19 nt, Artificial Sequence
  Description of Artificial Sequence: Synthetic oligonucleotide
uaaagggauucaacuacga

SEQ ID NO: 1163313 - RNA, 19 nt, Artificial Sequence
  Description of Artificial Sequence: Synthetic oligonucleotide
gaagugagccagcaagcag

SEQ ID NO: 1163314 - RNA, 19 nt, Artificial Sequence
  Description of Artificial Sequence: Synthetic oligonucleotide
guaaagggauucaacuacg

SEQ ID NO: 1163315 - RNA, 19 nt, Artificial Sequence
  Description of Artificial Sequence: Synthetic oligonucleotide
ucacgcuccggucaaaggu

SEQ ID NO: 1163316 - RNA, 19 nt, Artificial Sequence
  Description of Artificial Sequence: Synthetic oligonucleotide
uaugacgguggucuggccu

SEQ ID NO: 1163317 - RNA, 19 nt, Artificial Sequence
  Description of Artificial Sequence: Synthetic oligonucleotide
acugaggcguucuaacaag

SEQ ID NO: 1163318 - RNA, 19 nt, Artificial Sequence
  Description of Artificial Sequence: Synthetic oligonucleotide
aauccaagaguggcugugg

SEQ ID NO: 1163319 - RNA, 19 nt, Artificial Sequence
  Description of Artificial Sequence: Synthetic oligonucleotide
gcuaaacugucauaggacc

SEQ ID NO: 1163320 - RNA, 19 nt, Artificial Sequence
  Description of Artificial Sequence: Synthetic oligonucleotide
aaauucuccccaugagcca

SEQ ID NO: 1163321 - RNA, 19 nt, Artificial Sequence
  Description of Artificial Sequence: Synthetic oligonucleotide
ucacuaagcuuagggaagg

SEQ ID NO: 1163322 - RNA, 19 nt, Artificial Sequence
  Description of Artificial Sequence: Synthetic oligonucleotide
aacaucucggcuuggugau

SEQ ID NO: 1163323 - RNA, 19 nt, Artificial Sequence
  Description of Artificial Sequence: Synthetic oligonucleotide
uguggaaacgccccuucga

SEQ ID NO: 1163324 - RNA, 19 nt, Artificial Sequence
  Description of Artificial Sequence: Synthetic oligonucleotide
aaauccaagaguggcugug

SEQ ID NO: 1163325 - RNA, 19 nt, Artificial Sequence
  Description of Artificial Sequence: Synthetic oligonucleotide
gggugauuggcguuaaagg

SEQ ID NO: 1163326 - RNA, 19 nt, Artificial Sequence
  Description of Artificial Sequence: Synthetic oligonucleotide
ucucguuucagaccugcgu

SEQ ID NO: 1163327 - RNA, 19 nt, Artificial Sequence
  Description of Artificial Sequence: Synthetic oligonucleotide
uccgaugcgggacauuaug

SEQ ID NO: 1163328 - RNA, 19 nt, Artificial Sequence
  Description of Artificial Sequence: Synthetic oligonucleotide
auuggcguuaaaggguggc

SEQ ID NO: 1163329 - RNA, 19 nt, Artificial Sequence
  Description of Artificial Sequence: Synthetic oligonucleotide
ucagaggcuaaacugucau

SEQ ID NO: 1163330 - RNA, 19 nt, Artificial Sequence
  Description of Artificial Sequence: Synthetic oligonucleotide
gugugucacgauuucaacc

SEQ ID NO: 1163331 - RNA, 19 nt, Artificial Sequence
  Description of Artificial Sequence: Synthetic oligonucleotide
agccaucgaaguuucuugg

SEQ ID NO: 1163332 - RNA, 19 nt, Artificial Sequence
  Description of Artificial Sequence: Synthetic oligonucleotide
agacuggacgggaugaccc

SEQ ID NO: 1163333 - RNA, 19 nt, Artificial Sequence
  Description of Artificial Sequence: Synthetic oligonucleotide
gguaauagugcacugcuuc

SEQ ID NO: 1163334 - RNA, 19 nt, Artificial Sequence
  Description of Artificial Sequence: Synthetic oligonucleotide
ucgaaauccaagaguggcu

SEQ ID NO: 1163335 - RNA, 19 nt, Artificial Sequence
  Description of Artificial Sequence: Synthetic oligonucleotide
ggacauuaugugcaaagag

SEQ ID NO: 1163336 - RNA, 19 nt, Artificial Sequence
  Description of Artificial Sequence: Synthetic oligonucleotide
uagccaucgaaguuucuug

SEQ ID NO: 1163337 - RNA, 19 nt, Artificial Sequence
  Description of Artificial Sequence: Synthetic oligonucleotide
ggcagugugcaucauagcc

SEQ ID NO: 1163338 - RNA, 19 nt, Artificial Sequence
  Description of Artificial Sequence: Synthetic oligonucleotide
guaucgucacuuauuuugg

SEQ ID NO: 1163339 - RNA, 19 nt, Artificial Sequence
  Description of Artificial Sequence: Synthetic oligonucleotide
aaaacucgccaccaucgau

SEQ ID NO: 1163340 - RNA, 19 nt, Artificial Sequence
  Description of Artificial Sequence: Synthetic oligonucleotide
ucagagacuggacgggaug

SEQ ID NO: 1163341 - RNA, 19 nt, Artificial Sequence
  Description of Artificial Sequence: Synthetic oligonucleotide
accugcguuguuugcaaac

SEQ ID NO: 1163342 - RNA, 19 nt, Artificial Sequence
  Description of Artificial Sequence: Synthetic oligonucleotide
cucgccaccaucgauuugc

SEQ ID NO: 1163343 - RNA, 19 nt, Artificial Sequence
  Description of Artificial Sequence: Synthetic oligonucleotide
uucaaccugggaaagccau

SEQ ID NO: 1163344 - RNA, 19 nt, Artificial Sequence
  Description of Artificial Sequence: Synthetic oligonucleotide
cuguaucgaaauccaagag

SEQ ID NO: 1163345 - RNA, 19 nt, Artificial Sequence
  Description of Artificial Sequence: Synthetic oligonucleotide
ugcguuguuugcaaaccac

SEQ ID NO: 1163346 - RNA, 19 nt, Artificial Sequence
  Description of Artificial Sequence: Synthetic oligonucleotide
ugaggcguucuaacaagug

SEQ ID NO: 1163347 - RNA, 19 nt, Artificial Sequence
  Description of Artificial Sequence: Synthetic oligonucleotide
auguaaagggauucaacua

SEQ ID NO: 1163348 - RNA, 19 nt, Artificial Sequence
  Description of Artificial Sequence: Synthetic oligonucleotide
cugauccuacaacaucucg

SEQ ID NO: 1163349 - RNA, 19 nt, Artificial Sequence
  Description of Artificial Sequence: Synthetic oligonucleotide
aucgucacuuauuuuggga

SEQ ID NO: 1163350 - RNA, 19 nt, Artificial Sequence
  Description of Artificial Sequence: Synthetic oligonucleotide
ucucgaugcuucccucucg

SEQ ID NO: 1163351 - RNA, 19 nt, Artificial Sequence
  Description of Artificial Sequence: Synthetic oligonucleotide
uugcaaaccacgaccugga

SEQ ID NO: 1163352 - RNA, 19 nt, Artificial Sequence
  Description of Artificial Sequence: Synthetic oligonucleotide
aaagcggauccgaugcggg

SEQ ID NO: 1163353 - RNA, 19 nt, Artificial Sequence
  Description of Artificial Sequence: Synthetic oligonucleotide
ucggggcucaaucaugugu

SEQ ID NO: 1163354 - RNA, 19 nt, Artificial Sequence
  Description of Artificial Sequence: Synthetic oligonucleotide
agagcggacgggcuggauc

SEQ ID NO: 1163355 - RNA, 19 nt, Artificial Sequence
  Description of Artificial Sequence: Synthetic oligonucleotide
gaggauaugacgguggucu

SEQ ID NO: 1163356 - RNA, 19 nt, Artificial Sequence
  Description of Artificial Sequence: Synthetic oligonucleotide
caucaaucacuguggaaac

SEQ ID NO: 1163357 - RNA, 19 nt, Artificial Sequence
  Description of Artificial Sequence: Synthetic oligonucleotide
uucagaccugcguuguuug

SEQ ID NO: 1163358 - RNA, 19 nt, Artificial Sequence
  Description of Artificial Sequence: Synthetic oligonucleotide
agcaguacugagcggucgg

SEQ ID NO: 1163359 - RNA, 19 nt, Artificial Sequence
  Description of Artificial Sequence: Synthetic oligonucleotide
ugugugucacgauuucaac

SEQ ID NO: 1163360 - RNA, 19 nt, Artificial Sequence
  Description of Artificial Sequence: Synthetic oligonucleotide
agcuguuacucagagucuc

SEQ ID NO: 1163361 - RNA, 19 nt, Artificial Sequence
  Description of Artificial Sequence: Synthetic oligonucleotide
aggcguucuaacaaguguc

SEQ ID NO: 1163362 - RNA, 19 nt, Artificial Sequence
  Description of Artificial Sequence: Synthetic oligonucleotide
augagcuagaggauaugac

SEQ ID NO: 1163363 - RNA, 19 nt, Artificial Sequence
  Description of Artificial Sequence: Synthetic oligonucleotide
gagcggacgggcuggaucc

SEQ ID NO: 1163364 - RNA, 19 nt, Artificial Sequence
  Description of Artificial Sequence: Synthetic oligonucleotide
caaaccacgaccuggaagu

SEQ ID NO: 1163365 - RNA, 19 nt, Artificial Sequence
  Description of Artificial Sequence: Synthetic oligonucleotide
aacgcaaaacucgccacca

SEQ ID NO: 1163366 - RNA, 19 nt, Artificial Sequence
  Description of Artificial Sequence: Synthetic oligonucleotide
agaucgguagccaucgaag

SEQ ID NO: 1163367 - RNA, 19 nt, Artificial Sequence
  Description of Artificial Sequence: Synthetic oligonucleotide
caugucgaguaauggggcc

SEQ ID NO: 1163368 - RNA, 19 nt, Artificial Sequence
  Description of Artificial Sequence: Synthetic oligonucleotide
gaugagcuagaggauauga

SEQ ID NO: 1163369 - RNA, 19 nt, Artificial Sequence
  Description of Artificial Sequence: Synthetic oligonucleotide
uucucguuucagaccugcg

SEQ ID NO: 1163370 - RNA, 19 nt, Artificial Sequence
  Description of Artificial Sequence: Synthetic oligonucleotide
gacugggucagagcggacg

SEQ ID NO: 1163371 - RNA, 19 nt, Artificial Sequence
  Description of Artificial Sequence: Synthetic oligonucleotide
cucucguugguagggagcg

SEQ ID NO: 1163372 - RNA, 19 nt, Artificial Sequence
  Description of Artificial Sequence: Synthetic oligonucleotide
aagcuuagggaaggugggg

SEQ ID NO: 1163373 - RNA, 19 nt, Artificial Sequence
  Description of Artificial Sequence: Synthetic oligonucleotide
caaucacuguggaaacgcc

SEQ ID NO: 1163374 - RNA, 19 nt, Artificial Sequence
  Description of Artificial Sequence: Synthetic oligonucleotide
ucguuucagaccugcguug

SEQ ID NO: 1163375 - RNA, 19 nt, Artificial Sequence
  Description of Artificial Sequence: Synthetic oligonucleotide
gaaggugggguugaccagc

SEQ ID NO: 1163376 - RNA, 19 nt, Artificial Sequence
  Description of Artificial Sequence: Synthetic oligonucleotide
uguguuccacuaagguccc

SEQ ID NO: 1163377 - RNA, 19 nt, Artificial Sequence
  Description of Artificial Sequence: Synthetic oligonucleotide
ucauaggacccaugucgag

SEQ ID NO: 1163378 - RNA, 19 nt, Artificial Sequence
  Description of Artificial Sequence: Synthetic oligonucleotide
aucaaucacuguggaaacg

SEQ ID NO: 1163379 - RNA, 19 nt, Artificial Sequence
  Description of Artificial Sequence: Synthetic oligonucleotide
ucugauccuacaacaucuc

SEQ ID NO: 1163380 - RNA, 19 nt, Artificial Sequence
  Description of Artificial Sequence: Synthetic oligonucleotide
aaguguccagcuggcacgg

SEQ ID NO: 1163381 - RNA, 19 nt, Artificial Sequence
  Description of Artificial Sequence: Synthetic oligonucleotide
uugcagcgugauuuauugg

SEQ ID NO: 1163382 - RNA, 19 nt, Artificial Sequence
  Description of Artificial Sequence: Synthetic oligonucleotide
uccggucaaagguaccuga

SEQ ID NO: 1163383 - RNA, 19 nt, Artificial Sequence
  Description of Artificial Sequence: Synthetic oligonucleotide
uguggcgugucacucgguc

SEQ ID NO: 1163384 - RNA, 19 nt, Artificial Sequence
  Description of Artificial Sequence: Synthetic oligonucleotide
aguaaccacgguuccuuca

SEQ ID NO: 1163385 - RNA, 19 nt, Artificial Sequence
  Description of Artificial Sequence: Synthetic oligonucleotide
agggauucaacuacgacuu

SEQ ID NO: 1163386 - RNA, 19 nt, Artificial Sequence
  Description of Artificial Sequence: Synthetic oligonucleotide
gacccaugucgaguaaugg

SEQ ID NO: 1163387 - RNA, 19 nt, Artificial Sequence
  Description of Artificial Sequence: Synthetic oligonucleotide
ggaaacgccccuucgauca

SEQ ID NO: 1163388 - RNA, 19 nt, Artificial Sequence
  Description of Artificial Sequence: Synthetic oligonucleotide
augacgguggucuggccug

SEQ ID NO: 1163389 - RNA, 19 nt, Artificial Sequence
  Description of Artificial Sequence: Synthetic oligonucleotide
ugacauuguccaccaaaau

SEQ ID NO: 1163390 - RNA, 19 nt, Artificial Sequence
  Description of Artificial Sequence: Synthetic oligonucleotide
acuaagcuuagggaaggug

SEQ ID NO: 1163391 - RNA, 19 nt, Artificial Sequence
  Description of Artificial Sequence: Synthetic oligonucleotide
caaaagcggauccgaugcg

SEQ ID NO: 1163392 - RNA, 19 nt, Artificial Sequence
  Description of Artificial Sequence: Synthetic oligonucleotide
acuggcaucugcaagccgu

SEQ ID NO: 1163393 - RNA, 19 nt, Artificial Sequence
  Description of Artificial Sequence: Synthetic oligonucleotide
aaacucgccaccaucgauu

SEQ ID NO: 1163394 - RNA, 19 nt, Artificial Sequence
  Description of Artificial Sequence: Synthetic oligonucleotide
agcuagaggauaugacggu

SEQ ID NO: 1163395 - RNA, 19 nt, Artificial Sequence
  Description of Artificial Sequence: Synthetic oligonucleotide
aggcccuaagaucuggcca

SEQ ID NO: 1163396 - RNA, 19 nt, Artificial Sequence
  Description of Artificial Sequence: Synthetic oligonucleotide
uguuccacuaaggucccgu

SEQ ID NO: 1163397 - RNA, 19 nt, Artificial Sequence
  Description of Artificial Sequence: Synthetic oligonucleotide
ggguacaagggcuuaaaga

SEQ ID NO: 1163398 - RNA, 19 nt, Artificial Sequence
  Description of Artificial Sequence: Synthetic oligonucleotide
cucggcuuggugauuccgc

SEQ ID NO: 1163399 - RNA, 19 nt, Artificial Sequence
  Description of Artificial Sequence: Synthetic oligonucleotide
ggugggguugaccagccag

SEQ ID NO: 1163400 - RNA, 19 nt, Artificial Sequence
  Description of Artificial Sequence: Synthetic oligonucleotide
gcaucaaucacuguggaaa

SEQ ID NO: 1163401 - RNA, 19 nt, Artificial Sequence
  Description of Artificial Sequence: Synthetic oligonucleotide
aacucgccaccaucgauuu

SEQ ID NO: 1163402 - RNA, 19 nt, Artificial Sequence
  Description of Artificial Sequence: Synthetic oligonucleotide
uggcguuaaaggguggcug

SEQ ID NO: 1163403 - RNA, 19 nt, Artificial Sequence
  Description of Artificial Sequence: Synthetic oligonucleotide
ugucgaguaauggggccag

SEQ ID NO: 1163404 - RNA, 19 nt, Artificial Sequence
  Description of Artificial Sequence: Synthetic oligonucleotide
agcggauccgaugcgggac

SEQ ID NO: 1163405 - RNA, 19 nt, Artificial Sequence
  Description of Artificial Sequence: Synthetic oligonucleotide
aacagggaagcaagggcca

SEQ ID NO: 1163406 - RNA, 19 nt, Artificial Sequence
  Description of Artificial Sequence: Synthetic oligonucleotide
acagacaaauucuccccau

SEQ ID NO: 1163407 - RNA, 19 nt, Artificial Sequence
  Description of Artificial Sequence: Synthetic oligonucleotide
ucgguagccaucgaaguuu

SEQ ID NO: 1163408 - RNA, 19 nt, Artificial Sequence
  Description of Artificial Sequence: Synthetic oligonucleotide
auaggaugagcagcuguug

SEQ ID NO: 1163409 - RNA, 19 nt, Artificial Sequence
  Description of Artificial Sequence: Synthetic oligonucleotide
acggggugaugucaucauc

SEQ ID NO: 1163410 - RNA, 19 nt, Artificial Sequence
  Description of Artificial Sequence: Synthetic oligonucleotide
gucccguagcaacugauga

SEQ ID NO: 1163411 - RNA, 19 nt, Artificial Sequence
  Description of Artificial Sequence: Synthetic oligonucleotide
ucagaccugcguuguuugc

SEQ ID NO: 1163412 - RNA, 19 nt, Artificial Sequence
  Description of Artificial Sequence: Synthetic oligonucleotide
auuuugggagcaguacuga

SEQ ID NO: 1163413 - RNA, 19 nt, Artificial Sequence
  Description of Artificial Sequence: Synthetic oligonucleotide
aucucggcuuggugauucc

SEQ ID NO: 1163414 - RNA, 19 nt, Artificial Sequence
  Description of Artificial Sequence: Synthetic oligonucleotide
ugugcccaaguguucugga

SEQ ID NO: 1163415 - RNA, 19 nt, Artificial Sequence
  Description of Artificial Sequence: Synthetic oligonucleotide
uguugucacuaagcuuagg

SEQ ID NO: 1163416 - RNA, 19 nt, Artificial Sequence
  Description of Artificial Sequence: Synthetic oligonucleotide
ucgaguaauggggccagga

SEQ ID NO: 1163417 - RNA, 19 nt, Artificial Sequence
  Description of Artificial Sequence: Synthetic oligonucleotide
gagcaguacugagcggucg

SEQ ID NO: 1163418 - RNA, 19 nt, Artificial Sequence
  Description of Artificial Sequence: Synthetic oligonucleotide
aagcggauccgaugcggga

SEQ ID NO: 1163419 - RNA, 19 nt, Artificial Sequence
  Description of Artificial Sequence: Synthetic oligonucleotide
ucguugguagggagcggag

SEQ ID NO: 1163420 - RNA, 19 nt, Artificial Sequence
  Description of Artificial Sequence: Synthetic oligonucleotide
gaggcguucuaacaagugu

SEQ ID NO: 1163421 - RNA, 19 nt, Artificial Sequence
  Description of Artificial Sequence: Synthetic oligonucleotide
ucucggcuuggugauuccg

SEQ ID NO: 1163422 - RNA, 19 nt, Artificial Sequence
  Description of Artificial Sequence: Synthetic oligonucleotide
agucucgaugcuucccucu

SEQ ID NO: 1163423 - RNA, 19 nt, Artificial Sequence
  Description of Artificial Sequence: Synthetic oligonucleotide
agcaagggccaaagggagc

SEQ ID NO: 1163424 - RNA, 19 nt, Artificial Sequence
  Description of Artificial Sequence: Synthetic oligonucleotide
cuucaccgaacaguacagg

SEQ ID NO: 1163425 - RNA, 19 nt, Artificial Sequence
  Description of Artificial Sequence: Synthetic oligonucleotide
augauguaaagggauucaa

SEQ ID NO: 1163426 - RNA, 19 nt, Artificial Sequence
  Description of Artificial Sequence: Synthetic oligonucleotide
uuucagaccugcguuguuu

SEQ ID NO: 1163427 - RNA, 19 nt, Artificial Sequence
  Description of Artificial Sequence: Synthetic oligonucleotide
ggggugauuggcguuaaag

SEQ ID NO: 1163428 - RNA, 19 nt, Artificial Sequence
  Description of Artificial Sequence: Synthetic oligonucleotide
uacaacaucucggcuuggu

SEQ ID NO: 1163429 - RNA, 19 nt, Artificial Sequence
  Description of Artificial Sequence: Synthetic oligonucleotide
ggcguuaaaggguggcugc

SEQ ID NO: 1163430 - RNA, 19 nt, Artificial Sequence
  Description of Artificial Sequence: Synthetic oligonucleotide
ccaccaucgauuugcuugg

SEQ ID NO: 1163431 - RNA, 19 nt, Artificial Sequence
  Description of Artificial Sequence: Synthetic oligonucleotide
uggaaacgccccuucgauc

SEQ ID NO: 1163432 - RNA, 19 nt, Artificial Sequence
  Description of Artificial Sequence: Synthetic oligonucleotide
ucguccagauaggaugagc

SEQ ID NO: 1163433 - RNA, 19 nt, Artificial Sequence
  Description of Artificial Sequence: Synthetic oligonucleotide
gaucgguagccaucgaagu

SEQ ID NO: 1163434 - RNA, 19 nt, Artificial Sequence
  Description of Artificial Sequence: Synthetic oligonucleotide
gugauuuauuggacaagac

SEQ ID NO: 1163435 - RNA, 19 nt, Artificial Sequence
  Description of Artificial Sequence: Synthetic oligonucleotide
gaaacgccccuucgaucag

SEQ ID NO: 1163436 - RNA, 19 nt, Artificial Sequence
  Description of Artificial Sequence: Synthetic oligonucleotide
aucgguagccaucgaaguu

SEQ ID NO: 1163437 - RNA, 19 nt, Artificial Sequence
  Description of Artificial Sequence: Synthetic oligonucleotide
gauuggcguuaaagggugg

SEQ ID NO: 1163438 - RNA, 19 nt, Artificial Sequence
  Description of Artificial Sequence: Synthetic oligonucleotide
gccaucgaaguuucuuggg

SEQ ID NO: 1163439 - RNA, 19 nt, Artificial Sequence
  Description of Artificial Sequence: Synthetic oligonucleotide
gaugacccuggcaugcuga

SEQ ID NO: 1163440 - RNA, 19 nt, Artificial Sequence
  Description of Artificial Sequence: Synthetic oligonucleotide
aacaaguguccagcuggca

SEQ ID NO: 1163441 - RNA, 19 nt, Artificial Sequence
  Description of Artificial Sequence: Synthetic oligonucleotide
augcgggacauuaugugca

SEQ ID NO: 1163442 - RNA, 19 nt, Artificial Sequence
  Description of Artificial Sequence: Synthetic oligonucleotide
cacgguuccuucaccgaac

SEQ ID NO: 1163443 - RNA, 19 nt, Artificial Sequence
  Description of Artificial Sequence: Synthetic oligonucleotide
gggguggaugguuuuaaac

SEQ ID NO: 1163444 - RNA, 19 nt, Artificial Sequence
  Description of Artificial Sequence: Synthetic oligonucleotide
ggauaugacgguggucugg

SEQ ID NO: 1163445 - RNA, 19 nt, Artificial Sequence
  Description of Artificial Sequence: Synthetic oligonucleotide
aacgccccuucgaucagag

SEQ ID NO: 1163446 - RNA, 19 nt, Artificial Sequence
  Description of Artificial Sequence: Synthetic oligonucleotide
gugcccaaguguucuggag

SEQ ID NO: 1163447 - RNA, 19 nt, Artificial Sequence
  Description of Artificial Sequence: Synthetic oligonucleotide
gcguuguuugcaaaccacg

SEQ ID NO: 1163448 - RNA, 19 nt, Artificial Sequence
  Description of Artificial Sequence: Synthetic oligonucleotide
ggcuaaacugucauaggac

SEQ ID NO: 1163449 - RNA, 19 nt, Artificial Sequence
  Description of Artificial Sequence: Synthetic oligonucleotide
caucuccagcgguguaucg

SEQ ID NO: 1163450 - RNA, 19 nt, Artificial Sequence
  Description of Artificial Sequence: Synthetic oligonucleotide
cuauggucagaggcuaaac

SEQ ID NO: 1163451 - RNA, 19 nt, Artificial Sequence
  Description of Artificial Sequence: Synthetic oligonucleotide
uagggagcggagaucggua

SEQ ID NO: 1163452 - RNA, 19 nt, Artificial Sequence
  Description of Artificial Sequence: Synthetic oligonucleotide
agaccugcguuguuugcaa

SEQ ID NO: 1163453 - RNA, 19 nt, Artificial Sequence
  Description of Artificial Sequence: Synthetic oligonucleotide
uuggcguuaaaggguggcu

SEQ ID NO: 1163454 - RNA, 19 nt, Artificial Sequence
  Description of Artificial Sequence: Synthetic oligonucleotide
gagcggcuggcucucguug

SEQ ID NO: 1163455 - RNA, 19 nt, Artificial Sequence
  Description of Artificial Sequence: Synthetic oligonucleotide
guggcgugucacucggucc

SEQ ID NO: 1163456 - RNA, 19 nt, Artificial Sequence
  Description of Artificial Sequence: Synthetic oligonucleotide
acgguuccuucaccgaaca

SEQ ID NO: 1163457 - RNA, 19 nt, Artificial Sequence
  Description of Artificial Sequence: Synthetic oligonucleotide
augucgaguaauggggcca

SEQ ID NO: 1163458 - RNA, 19 nt, Artificial Sequence
  Description of Artificial Sequence: Synthetic oligonucleotide
gucauaggacccaugucga

SEQ ID NO: 1163459 - RNA, 19 nt, Artificial Sequence
  Description of Artificial Sequence: Synthetic oligonucleotide
cuggaggucucuucucguc

SEQ ID NO: 1163460 - RNA, 19 nt, Artificial Sequence
  Description of Artificial Sequence: Synthetic oligonucleotide
ccuucaccgaacaguacag

SEQ ID NO: 1163461 - RNA, 19 nt, Artificial Sequence
  Description of Artificial Sequence: Synthetic oligonucleotide
gugugcccaaguguucugg

SEQ ID NO: 1163462 - RNA, 19 nt, Artificial Sequence
  Description of Artificial Sequence: Synthetic oligonucleotide
agcggucggggcucaauca

SEQ ID NO: 1163463 - RNA, 19 nt, Artificial Sequence
  Description of Artificial Sequence: Synthetic oligonucleotide
gcagcaacgcaaaacucgc

SEQ ID NO: 1163464 - RNA, 19 nt, Artificial Sequence
  Description of Artificial Sequence: Synthetic oligonucleotide
ccaugucgaguaauggggc

SEQ ID NO: 1163465 - RNA, 19 nt, Artificial Sequence
  Description of Artificial Sequence: Synthetic oligonucleotide
ucaucuccagcgguguauc

SEQ ID NO: 1163466 - RNA, 19 nt, Artificial Sequence
  Description of Artificial Sequence: Synthetic oligonucleotide
cagcaacgcaaaacucgcc

SEQ ID NO: 1163467 - RNA, 19 nt, Artificial Sequence
  Description of Artificial Sequence: Synthetic oligonucleotide
uacgacuuguuggacugau

SEQ ID NO: 1163468 - RNA, 19 nt, Artificial Sequence
  Description of Artificial Sequence: Synthetic oligonucleotide
gugucacgauuucaaccug

SEQ ID NO: 1163469 - RNA, 19 nt, Artificial Sequence
  Description of Artificial Sequence: Synthetic oligonucleotide
acuauggucagaggcuaaa

SEQ ID NO: 1163470 - RNA, 19 nt, Artificial Sequence
  Description of Artificial Sequence: Synthetic oligonucleotide
gugauuggcguuaaagggu

SEQ ID NO: 1163471 - RNA, 19 nt, Artificial Sequence
  Description of Artificial Sequence: Synthetic oligonucleotide
aggagcgacagaggucagg

SEQ ID NO: 1163472 - RNA, 19 nt, Artificial Sequence
  Description of Artificial Sequence: Synthetic oligonucleotide
aguacaggaccaggguaca

SEQ ID NO: 1163473 - RNA, 19 nt, Artificial Sequence
  Description of Artificial Sequence: Synthetic oligonucleotide
accacgguuccuucaccga

SEQ ID NO: 1163474 - RNA, 19 nt, Artificial Sequence
  Description of Artificial Sequence: Synthetic oligonucleotide
caucucggcuuggugauuc

SEQ ID NO: 1163475 - RNA, 19 nt, Artificial Sequence
  Description of Artificial Sequence: Synthetic oligonucleotide
aucuccagcgguguaucgu

SEQ ID NO: 1163476 - RNA, 19 nt, Artificial Sequence
  Description of Artificial Sequence: Synthetic oligonucleotide
cgacuuguuggacugauuc

SEQ ID NO: 1163477 - RNA, 19 nt, Artificial Sequence
  Description of Artificial Sequence: Synthetic oligonucleotide
ggacaugugccgcagccca

SEQ ID NO: 1163478 - RNA, 19 nt, Artificial Sequence
  Description of Artificial Sequence: Synthetic oligonucleotide
ggcguucuaacaagugucc

SEQ ID NO: 1163479 - RNA, 19 nt, Artificial Sequence
  Description of Artificial Sequence: Synthetic oligonucleotide
auacaaaagcggauccgau

SEQ ID NO: 1163480 - RNA, 19 nt, Artificial Sequence
  Description of Artificial Sequence: Synthetic oligonucleotide
ucgcugaaguucugauccu

SEQ ID NO: 1163481 - RNA, 19 nt, Artificial Sequence
  Description of Artificial Sequence: Synthetic oligonucleotide
ggagcggagaucgguagcc

SEQ ID NO: 1163482 - RNA, 19 nt, Artificial Sequence
  Description of Artificial Sequence: Synthetic oligonucleotide
gcuagaggauaugacggug

SEQ ID NO: 1163483 - RNA, 19 nt, Artificial Sequence
  Description of Artificial Sequence: Synthetic oligonucleotide
agccuggaguggguuaggg

SEQ ID NO: 1163484 - RNA, 19 nt, Artificial Sequence
  Description of Artificial Sequence: Synthetic oligonucleotide
gagcggucggggcucaauc

SEQ ID NO: 1163485 - RNA, 19 nt, Artificial Sequence
  Description of Artificial Sequence: Synthetic oligonucleotide
ucucguugguagggagcgg

SEQ ID NO: 1163486 - RNA, 19 nt, Artificial Sequence
  Description of Artificial Sequence: Synthetic oligonucleotide
acgcuccggucaaagguac

SEQ ID NO: 1163487 - RNA, 19 nt, Artificial Sequence
  Description of Artificial Sequence: Synthetic oligonucleotide
aaacgccccuucgaucaga

SEQ ID NO: 1163488 - RNA, 19 nt, Artificial Sequence
  Description of Artificial Sequence: Synthetic oligonucleotide
acgaccuggaagucccaaa

SEQ ID NO: 1163489 - RNA, 19 nt, Artificial Sequence
  Description of Artificial Sequence: Synthetic oligonucleotide
gguguaucgucacuuauuu

SEQ ID NO: 1163490 - RNA, 19 nt, Artificial Sequence
  Description of Artificial Sequence: Synthetic oligonucleotide
ucgguccaugagacugcag

SEQ ID NO: 1163491 - RNA, 19 nt, Artificial Sequence
  Description of Artificial Sequence: Synthetic oligonucleotide
gccucaguaaccacgguuc

SEQ ID NO: 1163492 - RNA, 19 nt, Artificial Sequence
  Description of Artificial Sequence: Synthetic oligonucleotide
cgccccuucgaucagagac

SEQ ID NO: 1163493 - RNA, 19 nt, Artificial Sequence
  Description of Artificial Sequence: Synthetic oligonucleotide
gugccuaugggaagccaug

SEQ ID NO: 1163494 - RNA, 19 nt, Artificial Sequence
  Description of Artificial Sequence: Synthetic oligonucleotide
cgucacuuauuuugggagc

SEQ ID NO: 1163495 - RNA, 19 nt, Artificial Sequence
  Description of Artificial Sequence: Synthetic oligonucleotide
cugcguuguuugcaaacca

SEQ ID NO: 1163496 - RNA, 19 nt, Artificial Sequence
  Description of Artificial Sequence: Synthetic oligonucleotide
ucccuaucacucugggcuu

SEQ ID NO: 1163497 - RNA, 19 nt, Artificial Sequence
  Description of Artificial Sequence: Synthetic oligonucleotide
ccugcguuguuugcaaacc

SEQ ID NO: 1163498 - RNA, 19 nt, Artificial Sequence
  Description of Artificial Sequence: Synthetic oligonucleotide
cccguagcaacugaugaug

SEQ ID NO: 1163499 - RNA, 19 nt, Artificial Sequence
  Description of Artificial Sequence: Synthetic oligonucleotide
agcgguguaucgucacuua

SEQ ID NO: 1163500 - RNA, 19 nt, Artificial Sequence
  Description of Artificial Sequence: Synthetic oligonucleotide
ggcuuaaagauaagacaga

SEQ ID NO: 1163501 - RNA, 19 nt, Artificial Sequence
  Description of Artificial Sequence: Synthetic oligonucleotide
guacaagggcuuaaagaua

SEQ ID NO: 1163502 - RNA, 19 nt, Artificial Sequence
  Description of Artificial Sequence: Synthetic oligonucleotide
augccuggcuggaccauuc

SEQ ID NO: 1163503 - RNA, 19 nt, Artificial Sequence
  Description of Artificial Sequence: Synthetic oligonucleotide
accgaacaguacaggacca

SEQ ID NO: 1163504 - RNA, 19 nt, Artificial Sequence
  Description of Artificial Sequence: Synthetic oligonucleotide
ugggguugaccagccaguc

SEQ ID NO: 1163505 - RNA, 19 nt, Artificial Sequence
  Description of Artificial Sequence: Synthetic oligonucleotide
cucguugguagggagcgga

SEQ ID NO: 1163506 - RNA, 19 nt, Artificial Sequence
  Description of Artificial Sequence: Synthetic oligonucleotide
ggaacuggggacccaucca

SEQ ID NO: 1163507 - RNA, 19 nt, Artificial Sequence
  Description of Artificial Sequence: Synthetic oligonucleotide
ccuucccuaucacucuggg

SEQ ID NO: 1163508 - RNA, 19 nt, Artificial Sequence
  Description of Artificial Sequence: Synthetic oligonucleotide
gucccaaacacugcagcaa

SEQ ID NO: 1163509 - RNA, 19 nt, Artificial Sequence
  Description of Artificial Sequence: Synthetic oligonucleotide
ucgccaccaucgauuugcu

SEQ ID NO: 1163510 - RNA, 19 nt, Artificial Sequence
  Description of Artificial Sequence: Synthetic oligonucleotide
uaggacccaugucgaguaa

SEQ ID NO: 1163511 - RNA, 19 nt, Artificial Sequence
  Description of Artificial Sequence: Synthetic oligonucleotide
ugauuccgccacuggcauc

SEQ ID NO: 1163512 - RNA, 19 nt, Artificial Sequence
  Description of Artificial Sequence: Synthetic oligonucleotide
ucauagccuggaguggguu

SEQ ID NO: 1163513 - RNA, 19 nt, Artificial Sequence
  Description of Artificial Sequence: Synthetic oligonucleotide
cuaagaucuggccacuguu

SEQ ID NO: 1163514 - RNA, 19 nt, Artificial Sequence
  Description of Artificial Sequence: Synthetic oligonucleotide
gucagaggcuaaacuguca

SEQ ID NO: 1163515 - RNA, 19 nt, Artificial Sequence
  Description of Artificial Sequence: Synthetic oligonucleotide
gacgggcuggauccugaga

SEQ ID NO: 1163516 - RNA, 19 nt, Artificial Sequence
  Description of Artificial Sequence: Synthetic oligonucleotide
ccucaguaaccacgguucc

SEQ ID NO: 1163517 - RNA, 19 nt, Artificial Sequence
  Description of Artificial Sequence: Synthetic oligonucleotide
caacuacgacuuguuggac

SEQ ID NO: 1163518 - RNA, 19 nt, Artificial Sequence
  Description of Artificial Sequence: Synthetic oligonucleotide
ugagcggcuggcucucguu

SEQ ID NO: 1163519 - RNA, 19 nt, Artificial Sequence
  Description of Artificial Sequence: Synthetic oligonucleotide
cagaccugcguuguuugca

SEQ ID NO: 1163520 - RNA, 19 nt, Artificial Sequence
  Description of Artificial Sequence: Synthetic oligonucleotide
cucguuucagaccugcguu

SEQ ID NO: 1163521 - RNA, 19 nt, Artificial Sequence
  Description of Artificial Sequence: Synthetic oligonucleotide
cacgcuccggucaaaggua

SEQ ID NO: 1163522 - RNA, 19 nt, Artificial Sequence
  Description of Artificial Sequence: Synthetic oligonucleotide
cuccggucaaagguaccug

SEQ ID NO: 1163523 - RNA, 19 nt, Artificial Sequence
  Description of Artificial Sequence: Synthetic oligonucleotide
ccggucaaagguaccugag

SEQ ID NO: 1163524 - RNA, 19 nt, Artificial Sequence
  Description of Artificial Sequence: Synthetic oligonucleotide
acgcaaaacucgccaccau

SEQ ID NO: 1163525 - RNA, 19 nt, Artificial Sequence
  Description of Artificial Sequence: Synthetic oligonucleotide
cgugauuuauuggacaaga

SEQ ID NO: 1163526 - RNA, 19 nt, Artificial Sequence
  Description of Artificial Sequence: Synthetic oligonucleotide
ggucccguagcaacugaug

SEQ ID NO: 1163527 - RNA, 19 nt, Artificial Sequence
  Description of Artificial Sequence: Synthetic oligonucleotide
ggauucaacuacgacuugu

SEQ ID NO: 1163528 - RNA, 19 nt, Artificial Sequence
  Description of Artificial Sequence: Synthetic oligonucleotide
cuaucacucugggcuucag

SEQ ID NO: 1163529 - RNA, 19 nt, Artificial Sequence
  Description of Artificial Sequence: Synthetic oligonucleotide
guagccaucgaaguuucuu

SEQ ID NO: 1163530 - RNA, 19 nt, Artificial Sequence
  Description of Artificial Sequence: Synthetic oligonucleotide
gucggggcucaaucaugug

SEQ ID NO: 1163531 - RNA, 19 nt, Artificial Sequence
  Description of Artificial Sequence: Synthetic oligonucleotide
gggagcggagaucgguagc

SEQ ID NO: 1163532 - RNA, 19 nt, Artificial Sequence
  Description of Artificial Sequence: Synthetic oligonucleotide
acucgccaccaucgauuug

SEQ ID NO: 1163533 - RNA, 19 nt, Artificial Sequence
  Description of Artificial Sequence: Synthetic oligonucleotide
gacuggacgggaugacccu

SEQ ID NO: 1163534 - RNA, 19 nt, Artificial Sequence
  Description of Artificial Sequence: Synthetic oligonucleotide
uggugccuaugggaagcca

SEQ ID NO: 1163535 - RNA, 19 nt, Artificial Sequence
  Description of Artificial Sequence: Synthetic oligonucleotide
cucguccagauaggaugag

SEQ ID NO: 1163536 - RNA, 19 nt, Artificial Sequence
  Description of Artificial Sequence: Synthetic oligonucleotide
ugacugggucagagcggac

SEQ ID NO: 1163537 - RNA, 19 nt, Artificial Sequence
  Description of Artificial Sequence: Synthetic oligonucleotide
gucgaguaauggggccagg

SEQ ID NO: 1163538 - RNA, 19 nt, Artificial Sequence
  Description of Artificial Sequence: Synthetic oligonucleotide
cugaggcguucuaacaagu

SEQ ID NO: 1163539 - RNA, 19 nt, Artificial Sequence
  Description of Artificial Sequence: Synthetic oligonucleotide
gggauucaacuacgacuug

SEQ ID NO: 1163540 - RNA, 19 nt, Artificial Sequence
  Description of Artificial Sequence: Synthetic oligonucleotide
gugauuccgccacuggcau

SEQ ID NO: 1163541 - RNA, 19 nt, Artificial Sequence
  Description of Artificial Sequence: Synthetic oligonucleotide
gacccauccacaggcgucu

SEQ ID NO: 1163542 - RNA, 19 nt, Artificial Sequence
  Description of Artificial Sequence: Synthetic oligonucleotide
guagggagcggagaucggu

SEQ ID NO: 1163543 - RNA, 19 nt, Artificial Sequence
  Description of Artificial Sequence: Synthetic oligonucleotide
ugacgguggucuggccuga

SEQ ID NO: 1163544 - RNA, 19 nt, Artificial Sequence
  Description of Artificial Sequence: Synthetic oligonucleotide
gaccugcguuguuugcaaa

SEQ ID NO: 1163545 - RNA, 19 nt, Artificial Sequence
  Description of Artificial Sequence: Synthetic oligonucleotide
ugagcggucggggcucaau

SEQ ID NO: 1163546 - RNA, 19 nt, Artificial Sequence
  Description of Artificial Sequence: Synthetic oligonucleotide
guaauggggccaggacuuc

SEQ ID NO: 1163547 - RNA, 19 nt, Artificial Sequence
  Description of Artificial Sequence: Synthetic oligonucleotide
gggcagugugcaucauagc

SEQ ID NO: 1163548 - RNA, 19 nt, Artificial Sequence
  Description of Artificial Sequence: Synthetic oligonucleotide
cuccagcgguguaucguca

SEQ ID NO: 1163549 - RNA, 19 nt, Artificial Sequence
  Description of Artificial Sequence: Synthetic oligonucleotide
gcagugugcaucauagccu

SEQ ID NO: 1163550 - RNA, 19 nt, Artificial Sequence
  Description of Artificial Sequence: Synthetic oligonucleotide
cacuauggucagaggcuaa

SEQ ID NO: 1163551 - RNA, 19 nt, Artificial Sequence
  Description of Artificial Sequence: Synthetic oligonucleotide
gcaagcaggagcugguaau

SEQ ID NO: 1163552 - RNA, 19 nt, Artificial Sequence
  Description of Artificial Sequence: Synthetic oligonucleotide
guguuccacuaaggucccg

SEQ ID NO: 1163553 - RNA, 19 nt, Artificial Sequence
  Description of Artificial Sequence: Synthetic oligonucleotide
gguagggagcggagaucgg

SEQ ID NO: 1163554 - RNA, 19 nt, Artificial Sequence
  Description of Artificial Sequence: Synthetic oligonucleotide
gacgguggucuggccugag

SEQ ID NO: 1163555 - RNA, 19 nt, Artificial Sequence
  Description of Artificial Sequence: Synthetic oligonucleotide
ggacccauccacaggcguc

SEQ ID NO: 1163556 - RNA, 19 nt, Artificial Sequence
  Description of Artificial Sequence: Synthetic oligonucleotide
caggguacaagggcuuaaa

SEQ ID NO: 1163557 - RNA, 19 nt, Artificial Sequence
  Description of Artificial Sequence: Synthetic oligonucleotide
aggucccguagcaacugau

SEQ ID NO: 1163558 - RNA, 19 nt, Artificial Sequence
  Description of Artificial Sequence: Synthetic oligonucleotide
ccgaacaguacaggaccag

SEQ ID NO: 1163559 - RNA, 19 nt, Artificial Sequence
  Description of Artificial Sequence: Synthetic oligonucleotide
ggacaagacgugcacuuuu

SEQ ID NO: 1163560 - RNA, 19 nt, Artificial Sequence
  Description of Artificial Sequence: Synthetic oligonucleotide
gcguucuaacaagugucca

SEQ ID NO: 1163561 - RNA, 19 nt, Artificial Sequence
  Description of Artificial Sequence: Synthetic oligonucleotide
gugggguugaccagccagu

SEQ ID NO: 1163562 - RNA, 19 nt, Artificial Sequence
  Description of Artificial Sequence: Synthetic oligonucleotide
gcuggcacggggugauguc

SEQ ID NO: 1163563 - RNA, 19 nt, Artificial Sequence
  Description of Artificial Sequence: Synthetic oligonucleotide
ggagcaguacugagcgguc

SEQ ID NO: 1163564 - RNA, 19 nt, Artificial Sequence
  Description of Artificial Sequence: Synthetic oligonucleotide
ccccuucgaucagagacug

SEQ ID NO: 1163565 - RNA, 19 nt, Artificial Sequence
  Description of Artificial Sequence: Synthetic oligonucleotide
cuacgacuuguuggacuga

SEQ ID NO: 1163566 - RNA, 19 nt, Artificial Sequence
  Description of Artificial Sequence: Synthetic oligonucleotide
caucaucuccagcggugua

SEQ ID NO: 1163567 - RNA, 19 nt, Artificial Sequence
  Description of Artificial Sequence: Synthetic oligonucleotide
acgccccuucgaucagaga

SEQ ID NO: 1163568 - RNA, 19 nt, Artificial Sequence
  Description of Artificial Sequence: Synthetic oligonucleotide
cccaggcccuaagaucugg

SEQ ID NO: 1163569 - RNA, 19 nt, Artificial Sequence
  Description of Artificial Sequence: Synthetic oligonucleotide
cccuucgaucagagacugg

SEQ ID NO: 1163570 - RNA, 19 nt, Artificial Sequence
  Description of Artificial Sequence: Synthetic oligonucleotide
auccgaugcgggacauuau

SEQ ID NO: 1163571 - RNA, 19 nt, Artificial Sequence
  Description of Artificial Sequence: Synthetic oligonucleotide
ggccucaguaaccacgguu

SEQ ID NO: 1163572 - RNA, 19 nt, Artificial Sequence
  Description of Artificial Sequence: Synthetic oligonucleotide
acugagcggucggggcuca

SEQ ID NO: 1163573 - RNA, 19 nt, Artificial Sequence
  Description of Artificial Sequence: Synthetic oligonucleotide
acgacuuguuggacugauu

SEQ ID NO: 1163574 - RNA, 19 nt, Artificial Sequence
  Description of Artificial Sequence: Synthetic oligonucleotide
gcguuaaaggguggcugca

SEQ ID NO: 1163575 - RNA, 19 nt, Artificial Sequence
  Description of Artificial Sequence: Synthetic oligonucleotide
ggucggggcucaaucaugu

SEQ ID NO: 1163576 - RNA, 19 nt, Artificial Sequence
  Description of Artificial Sequence: Synthetic oligonucleotide
ggugccuaugggaagccau

SEQ ID NO: 1163577 - RNA, 19 nt, Artificial Sequence
  Description of Artificial Sequence: Synthetic oligonucleotide
ccuaagaucuggccacugu

SEQ ID NO: 1163578 - RNA, 19 nt, Artificial Sequence
  Description of Artificial Sequence: Synthetic oligonucleotide
gcuccggucaaagguaccu

SEQ ID NO: 1163579 - RNA, 19 nt, Artificial Sequence
  Description of Artificial Sequence: Synthetic oligonucleotide
ccacgguuccuucaccgaa

SEQ ID NO: 1163580 - RNA, 19 nt, Artificial Sequence
  Description of Artificial Sequence: Synthetic oligonucleotide
acaucucggcuuggugauu

SEQ ID NO: 1163581 - RNA, 19 nt, Artificial Sequence
  Description of Artificial Sequence: Synthetic oligonucleotide
ccccuguggguacaguuaa

SEQ ID NO: 1163582 - RNA, 19 nt, Artificial Sequence
  Description of Artificial Sequence: Synthetic oligonucleotide
gcgacagaggucagggugu

SEQ ID NO: 1163583 - RNA, 19 nt, Artificial Sequence
  Description of Artificial Sequence: Synthetic oligonucleotide
caauugcagcgugauuuau

SEQ ID NO: 1163584 - RNA, 19 nt, Artificial Sequence
  Description of Artificial Sequence: Synthetic oligonucleotide
cggucggggcucaaucaug

SEQ ID NO: 1163585 - RNA, 19 nt, Artificial Sequence
  Description of Artificial Sequence: Synthetic oligonucleotide
ccguagcaacugaugaugu

SEQ ID NO: 1163586 - RNA, 19 nt, Artificial Sequence
  Description of Artificial Sequence: Synthetic oligonucleotide
gcgguguaucgucacuuau

SEQ ID NO: 1163587 - RNA, 19 nt, Artificial Sequence
  Description of Artificial Sequence: Synthetic oligonucleotide
cguagcaacugaugaugua

SEQ ID NO: 1163588 - RNA, 19 nt, Artificial Sequence
  Description of Artificial Sequence: Synthetic oligonucleotide
cccuaucacucugggcuuc

SEQ ID NO: 1163589 - RNA, 19 nt, Artificial Sequence
  Description of Artificial Sequence: Synthetic oligonucleotide
cgcuccggucaaagguacc

SEQ ID NO: 1163590 - RNA, 19 nt, Artificial Sequence
  Description of Artificial Sequence: Synthetic oligonucleotide
gccccuucgaucagagacu

SEQ ID NO: 1163591 - RNA, 19 nt, Artificial Sequence
  Description of Artificial Sequence: Synthetic oligonucleotide
cagcgguguaucgucacuu

SEQ ID NO: 1163592 - RNA, 19 nt, Artificial Sequence
  Description of Artificial Sequence: Synthetic oligonucleotide
gcgugucacucgguccaug

SEQ ID NO: 1163593 - RNA, 19 nt, Artificial Sequence
  Description of Artificial Sequence: Synthetic oligonucleotide
gcggucggggcucaaucau

SEQ ID NO: 1163594 - RNA, 19 nt, Artificial Sequence
  Description of Artificial Sequence: Synthetic oligonucleotide
gcggacgggcuggauccug

SEQ ID NO: 1163595 - RNA, 19 nt, Artificial Sequence
  Description of Artificial Sequence: Synthetic oligonucleotide
gcgggacauuaugugcaaa

SEQ ID NO: 1163596 - RNA, 19 nt, Artificial Sequence
  Description of Artificial Sequence: Synthetic oligonucleotide
ccaggguacaagggcuuaa

SEQ ID NO: 1163597 - RNA, 19 nt, Artificial Sequence
  Description of Artificial Sequence: Synthetic oligonucleotide
cggggcucaaucauguguu

SEQ ID NO: 1163598 - RNA, 19 nt, Artificial Sequence
  Description of Artificial Sequence: Synthetic oligonucleotide
cccuguggguacaguuaaa

SEQ ID NO: 1163599 - RNA, 19 nt, Artificial Sequence
  Description of Artificial Sequence: Synthetic oligonucleotide
gggucagagcggacgggcu

SEQ ID NO: 1163600 - RNA, 19 nt, Artificial Sequence
  Description of Artificial Sequence: Synthetic oligonucleotide
ccacaggcgucuguggggu

SEQ ID NO: 1163601 - RNA, 19 nt, Artificial Sequence
  Description of Artificial Sequence: Synthetic oligonucleotide
ccagcgguguaucgucacu

SEQ ID NO: 1163602 - RNA, 19 nt, Artificial Sequence
  Description of Artificial Sequence: Synthetic oligonucleotide
cggacgggcuggauccuga

SEQ ID NO: 1163603 - RNA, 19 nt, Artificial Sequence
  Description of Artificial Sequence: Synthetic oligonucleotide
gcaugcugacugggucaga

SEQ ID NO: 1163604 - RNA, 19 nt, Artificial Sequence
  Description of Artificial Sequence: Synthetic oligonucleotide
cugagcggucggggcucaa

SEQ ID NO: 1163605 - RNA, 19 nt, Artificial Sequence
  Description of Artificial Sequence: Synthetic oligonucleotide
gggucacgcuccggucaaa

SEQ ID NO: 1163606 - RNA, 19 nt, Artificial Sequence
  Description of Artificial Sequence: Synthetic oligonucleotide
cccggaggcccuccucugu

SEQ ID NO: 1163607 - RNA, 19 nt, Artificial Sequence
  Description of Artificial Sequence: Synthetic oligonucleotide
ggcgugucacucgguccau

SEQ ID NO: 1163608 - RNA, 19 nt, Artificial Sequence
  Description of Artificial Sequence: Synthetic oligonucleotide
aaagaucaggucuaacccc

SEQ ID NO: 1163609 - RNA, 19 nt, Artificial Sequence
  Description of Artificial Sequence: Synthetic oligonucleotide
agugaugccacguaagggc

SEQ ID NO: 1163610 - RNA, 19 nt, Artificial Sequence
  Description of Artificial Sequence: Synthetic oligonucleotide
aagaauaccugccucauca

SEQ ID NO: 1163611 - RNA, 19 nt, Artificial Sequence
  Description of Artificial Sequence: Synthetic oligonucleotide
agauuuggaaaguaacccc

SEQ ID NO: 1163612 - RNA, 19 nt, Artificial Sequence
  Description of Artificial Sequence: Synthetic oligonucleotide
aaagguguuggacagcgag

SEQ ID NO: 1163613 - RNA, 19 nt, Artificial Sequence
  Description of Artificial Sequence: Synthetic oligonucleotide
uucagaccggcaaacaucg

SEQ ID NO: 1163614 - RNA, 19 nt, Artificial Sequence
  Description of Artificial Sequence: Synthetic oligonucleotide
aaguaugcaggagauaaac

SEQ ID NO: 1163615 - RNA, 19 nt, Artificial Sequence
  Description of Artificial Sequence: Synthetic oligonucleotide
uguuccaccgcaaauccgg

SEQ ID NO: 1163616 - RNA, 19 nt, Artificial Sequence
  Description of Artificial Sequence: Synthetic oligonucleotide
uuaaacaauugauauggca

SEQ ID NO: 1163617 - RNA, 19 nt, Artificial Sequence
  Description of Artificial Sequence: Synthetic oligonucleotide
cagaguuaaaucuccaucc

SEQ ID NO: 1163618 - RNA, 19 nt, Artificial Sequence
  Description of Artificial Sequence: Synthetic oligonucleotide
uucacucgcaccaugagca

SEQ ID NO: 1163619 - RNA, 19 nt, Artificial Sequence
  Description of Artificial Sequence: Synthetic oligonucleotide
auagccaauaaucagguaa

SEQ ID NO: 1163620 - RNA, 19 nt, Artificial Sequence
  Description of Artificial Sequence: Synthetic oligonucleotide
uccaaacggcuuuagaagg

SEQ ID NO: 1163621 - RNA, 19 nt, Artificial Sequence
  Description of Artificial Sequence: Synthetic oligonucleotide
uggaaaguaaccccucagg

SEQ ID NO: 1163622 - RNA, 19 nt, Artificial Sequence
  Description of Artificial Sequence: Synthetic oligonucleotide
aaauccggaguucuuagca

SEQ ID NO: 1163623 - RNA, 19 nt, Artificial Sequence
  Description of Artificial Sequence: Synthetic oligonucleotide
uccuuagucaccuuuagaa

SEQ ID NO: 1163624 - RNA, 19 nt, Artificial Sequence
  Description of Artificial Sequence: Synthetic oligonucleotide
agagauagccaauaaucag

SEQ ID NO: 1163625 - RNA, 19 nt, Artificial Sequence
  Description of Artificial Sequence: Synthetic oligonucleotide
ucaccguucaguuggacag

SEQ ID NO: 1163626 - RNA, 19 nt, Artificial Sequence
  Description of Artificial Sequence: Synthetic oligonucleotide
aauugauauggcaaguuca

SEQ ID NO: 1163627 - RNA, 19 nt, Artificial Sequence
  Description of Artificial Sequence: Synthetic oligonucleotide
aguggagauacauucgaag

SEQ ID NO: 1163628 - RNA, 19 nt, Artificial Sequence
  Description of Artificial Sequence: Synthetic oligonucleotide
gagagacggguucagaccg

SEQ ID NO: 1163629 - RNA, 19 nt, Artificial Sequence
  Description of Artificial Sequence: Synthetic oligonucleotide
agcugacuuucguagaagc

SEQ ID NO: 1163630 - RNA, 19 nt, Artificial Sequence
  Description of Artificial Sequence: Synthetic oligonucleotide
uuguuaaacaauugauaug

SEQ ID NO: 1163631 - RNA, 19 nt, Artificial Sequence
  Description of Artificial Sequence: Synthetic oligonucleotide
uuaacugucuucccucgag

SEQ ID NO: 1163632 - RNA, 19 nt, Artificial Sequence
  Description of Artificial Sequence: Synthetic oligonucleotide
aucgaugaaaaugugagcu

SEQ ID NO: 1163633 - RNA, 19 nt, Artificial Sequence
  Description of Artificial Sequence: Synthetic oligonucleotide
cuugaacucucuuugguac

SEQ ID NO: 1163634 - RNA, 19 nt, Artificial Sequence
  Description of Artificial Sequence: Synthetic oligonucleotide
ucuacuggcuuguuaaaca

SEQ ID NO: 1163635 - RNA, 19 nt, Artificial Sequence
  Description of Artificial Sequence: Synthetic oligonucleotide
aagacauacagaguuaaau

SEQ ID NO: 1163636 - RNA, 19 nt, Artificial Sequence
  Description of Artificial Sequence: Synthetic oligonucleotide
ucaaguaguagugaugcca

SEQ ID NO: 1163637 - RNA, 19 nt, Artificial Sequence
  Description of Artificial Sequence: Synthetic oligonucleotide
ugaacagaagagauagcca

SEQ ID NO: 1163638 - RNA, 19 nt, Artificial Sequence
  Description of Artificial Sequence: Synthetic oligonucleotide
aagaucaggucuaaccccg

SEQ ID NO: 1163639 - RNA, 19 nt, Artificial Sequence
  Description of Artificial Sequence: Synthetic oligonucleotide
acauuauggagguucaaga

SEQ ID NO: 1163640 - RNA, 19 nt, Artificial Sequence
  Description of Artificial Sequence: Synthetic oligonucleotide
auugauauggcaaguucac

SEQ ID NO: 1163641 - RNA, 19 nt, Artificial Sequence
  Description of Artificial Sequence: Synthetic oligonucleotide
cagauuuggaaaguaaccc

SEQ ID NO: 1163642 - RNA, 19 nt, Artificial Sequence
  Description of Artificial Sequence: Synthetic oligonucleotide
aaccccucagguccaaacg

SEQ ID NO: 1163643 - RNA, 19 nt, Artificial Sequence
  Description of Artificial Sequence: Synthetic oligonucleotide
cuagugagcuuccugggcg

SEQ ID NO: 1163644 - RNA, 19 nt, Artificial Sequence
  Description of Artificial Sequence: Synthetic oligonucleotide
uuugccgggucucauuucc

SEQ ID NO: 1163645 - RNA, 19 nt, Artificial Sequence
  Description of Artificial Sequence: Synthetic oligonucleotide
aaagugcggagccuuggag

SEQ ID NO: 1163646 - RNA, 19 nt, Artificial Sequence
  Description of Artificial Sequence: Synthetic oligonucleotide
augcccaacuuauccagcc

SEQ ID NO: 1163647 - RNA, 19 nt, Artificial Sequence
  Description of Artificial Sequence: Synthetic oligonucleotide
ucaaaaguugguuccuucu

SEQ ID NO: 1163648 - RNA, 19 nt, Artificial Sequence
  Description of Artificial Sequence: Synthetic oligonucleotide
acuaucuucaggguuucac

SEQ ID NO: 1163649 - RNA, 19 nt, Artificial Sequence
  Description of Artificial Sequence: Synthetic oligonucleotide
uucguagaagcuuacgaaa

SEQ ID NO: 1163650 - RNA, 19 nt, Artificial Sequence
  Description of Artificial Sequence: Synthetic oligonucleotide
uuggaaaguaaccccucag

SEQ ID NO: 1163651 - RNA, 19 nt, Artificial Sequence
  Description of Artificial Sequence: Synthetic oligonucleotide
acgaaacugaacaaaaucu

SEQ ID NO: 1163652 - RNA, 19 nt, Artificial Sequence
  Description of Artificial Sequence: Synthetic oligonucleotide
guccaaacggcuuuagaag

SEQ ID NO: 1163653 - RNA, 19 nt, Artificial Sequence
  Description of Artificial Sequence: Synthetic oligonucleotide
caccaaaucucaaguaugc

SEQ ID NO: 1163654 - RNA, 19 nt, Artificial Sequence
  Description of Artificial Sequence: Synthetic oligonucleotide
aaguugguuccuucuuggg

SEQ ID NO: 1163655 - RNA, 19 nt, Artificial Sequence
  Description of Artificial Sequence: Synthetic oligonucleotide
uaacugucuucccucgagg

SEQ ID NO: 1163656 - RNA, 19 nt, Artificial Sequence
  Description of Artificial Sequence: Synthetic oligonucleotide
uaugcaggagauaaaccuc

SEQ ID NO: 1163657 - RNA, 19 nt, Artificial Sequence
  Description of Artificial Sequence: Synthetic oligonucleotide
ugauacuuugggugguggg

SEQ ID NO: 1163658 - RNA, 19 nt, Artificial Sequence
  Description of Artificial Sequence: Synthetic oligonucleotide
aaaggcucgaaguuuucau

SEQ ID NO: 1163659 - RNA, 19 nt, Artificial Sequence
  Description of Artificial Sequence: Synthetic oligonucleotide
uuuggaaaguaaccccuca

SEQ ID NO: 1163660 - RNA, 19 nt, Artificial Sequence
  Description of Artificial Sequence: Synthetic oligonucleotide
aaaugugagcuuucuucca

SEQ ID NO: 1163661 - RNA, 19 nt, Artificial Sequence
  Description of Artificial Sequence: Synthetic oligonucleotide
uguuaaagcuggcagggua

SEQ ID NO: 1163662 - RNA, 19 nt, Artificial Sequence
  Description of Artificial Sequence: Synthetic oligonucleotide
ucucauuuccuuagucacc

SEQ ID NO: 1163663 - RNA, 19 nt, Artificial Sequence
  Description of Artificial Sequence: Synthetic oligonucleotide
aaguaguagugaugccacg

SEQ ID NO: 1163664 - RNA, 19 nt, Artificial Sequence
  Description of Artificial Sequence: Synthetic oligonucleotide
caaguaguagugaugccac

SEQ ID NO: 1163665 - RNA, 19 nt, Artificial Sequence
  Description of Artificial Sequence: Synthetic oligonucleotide
aguuaaaucuccauccuga

SEQ ID NO: 1163666 - RNA, 19 nt, Artificial Sequence
  Description of Artificial Sequence: Synthetic oligonucleotide
aucagguaaaggcucgaag

SEQ ID NO: 1163667 - RNA, 19 nt, Artificial Sequence
  Description of Artificial Sequence: Synthetic oligonucleotide
ucacaaacaagcagcaauu

SEQ ID NO: 1163668 - RNA, 19 nt, Artificial Sequence
  Description of Artificial Sequence: Synthetic oligonucleotide
aggagauaaaccucuggcu

SEQ ID NO: 1163669 - RNA, 19 nt, Artificial Sequence
  Description of Artificial Sequence: Synthetic oligonucleotide
cuaagugguaguugccugc

SEQ ID NO: 1163670 - RNA, 19 nt, Artificial Sequence
  Description of Artificial Sequence: Synthetic oligonucleotide
aagugcggagccuuggaga

SEQ ID NO: 1163671 - RNA, 19 nt, Artificial Sequence
  Description of Artificial Sequence: Synthetic oligonucleotide
uccacuaucuucaggguuu

SEQ ID NO: 1163672 - RNA, 19 nt, Artificial Sequence
  Description of Artificial Sequence: Synthetic oligonucleotide
auaaucagguaaaggcucg

SEQ ID NO: 1163673 - RNA, 19 nt, Artificial Sequence
  Description of Artificial Sequence: Synthetic oligonucleotide
ucuaaccccgagcacuuug

SEQ ID NO: 1163674 - RNA, 19 nt, Artificial Sequence
  Description of Artificial Sequence: Synthetic oligonucleotide
caguccaucgaugaaaaug

SEQ ID NO: 1163675 - RNA, 19 nt, Artificial Sequence
  Description of Artificial Sequence: Synthetic oligonucleotide
agaguuaaaucuccauccu

SEQ ID NO: 1163676 - RNA, 19 nt, Artificial Sequence
  Description of Artificial Sequence: Synthetic oligonucleotide
aacaauugauauggcaagu

SEQ ID NO: 1163677 - RNA, 19 nt, Artificial Sequence
  Description of Artificial Sequence: Synthetic oligonucleotide
uccuaacugcaguccaucg

SEQ ID NO: 1163678 - RNA, 19 nt, Artificial Sequence
  Description of Artificial Sequence: Synthetic oligonucleotide
ugagauugccaguaacuuc

SEQ ID NO: 1163679 - RNA, 19 nt, Artificial Sequence
  Description of Artificial Sequence: Synthetic oligonucleotide
uugauauggcaaguucacg

SEQ ID NO: 1163680 - RNA, 19 nt, Artificial Sequence
  Description of Artificial Sequence: Synthetic oligonucleotide
aacgagggacucacgagac

SEQ ID NO: 1163681 - RNA, 19 nt, Artificial Sequence
  Description of Artificial Sequence: Synthetic oligonucleotide
acaggaacgagggacucac

SEQ ID NO: 1163682 - RNA, 19 nt, Artificial Sequence
  Description of Artificial Sequence: Synthetic oligonucleotide
uucaccguucaguuggaca

SEQ ID NO: 1163683 - RNA, 19 nt, Artificial Sequence
  Description of Artificial Sequence: Synthetic oligonucleotide
agguguuggacagcgaggg

SEQ ID NO: 1163684 - RNA, 19 nt, Artificial Sequence
  Description of Artificial Sequence: Synthetic oligonucleotide
cuuucguagaagcuuacga

SEQ ID NO: 1163685 - RNA, 19 nt, Artificial Sequence
  Description of Artificial Sequence: Synthetic oligonucleotide
caucucaccuggauggacc

SEQ ID NO: 1163686 - RNA, 19 nt, Artificial Sequence
  Description of Artificial Sequence: Synthetic oligonucleotide
ugucuaggccuuucacucg

SEQ ID NO: 1163687 - RNA, 19 nt, Artificial Sequence
  Description of Artificial Sequence: Synthetic oligonucleotide
aaacggcuuuagaagguac

SEQ ID NO: 1163688 - RNA, 19 nt, Artificial Sequence
  Description of Artificial Sequence: Synthetic oligonucleotide
uuagucaccuuuagaacuu

SEQ ID NO: 1163689 - RNA, 19 nt, Artificial Sequence
  Description of Artificial Sequence: Synthetic oligonucleotide
ugacuuucguagaagcuua

SEQ ID NO: 1163690 - RNA, 19 nt, Artificial Sequence
  Description of Artificial Sequence: Synthetic oligonucleotide
aaccucuggcuaaagugcg

SEQ ID NO: 1163691 - RNA, 19 nt, Artificial Sequence
  Description of Artificial Sequence: Synthetic oligonucleotide
ccaaaucucaaguaugcag

SEQ ID NO: 1163692 - RNA, 19 nt, Artificial Sequence
  Description of Artificial Sequence: Synthetic oligonucleotide
ggacucacgagacggagcg

SEQ ID NO: 1163693 - RNA, 19 nt, Artificial Sequence
  Description of Artificial Sequence: Synthetic oligonucleotide
gaacgagggacucacgaga

SEQ ID NO: 1163694 - RNA, 19 nt, Artificial Sequence
  Description of Artificial Sequence: Synthetic oligonucleotide
aauccggaguucuuagcaa

SEQ ID NO: 1163695 - RNA, 19 nt, Artificial Sequence
  Description of Artificial Sequence: Synthetic oligonucleotide
cuuagucaccuuuagaacu

SEQ ID NO: 1163696 - RNA, 19 nt, Artificial Sequence
  Description of Artificial Sequence: Synthetic oligonucleotide
ucauccacuaagugguagu

SEQ ID NO: 1163697 - RNA, 19 nt, Artificial Sequence
  Description of Artificial Sequence: Synthetic oligonucleotide
auaccugccucaucaccac

SEQ ID NO: 1163698 - RNA, 19 nt, Artificial Sequence
  Description of Artificial Sequence: Synthetic oligonucleotide
gaagcuuacgaaacugaac

SEQ ID NO: 1163699 - RNA, 19 nt, Artificial Sequence
  Description of Artificial Sequence: Synthetic oligonucleotide
aaaucuccauccugauacu

SEQ ID NO: 1163700 - RNA, 19 nt, Artificial Sequence
  Description of Artificial Sequence: Synthetic oligonucleotide
agaccggcaaacaucgugg

SEQ ID NO: 1163701 - RNA, 19 nt, Artificial Sequence
  Description of Artificial Sequence: Synthetic oligonucleotide
caucacgucaggagagacg

SEQ ID NO: 1163702 - RNA, 19 nt, Artificial Sequence
  Description of Artificial Sequence: Synthetic oligonucleotide
agcauuggagcuguuccac

SEQ ID NO: 1163703 - RNA, 19 nt, Artificial Sequence
  Description of Artificial Sequence: Synthetic oligonucleotide
aggaacgagggacucacga

SEQ ID NO: 1163704 - RNA, 19 nt, Artificial Sequence
  Description of Artificial Sequence: Synthetic oligonucleotide
uguaacccuuggaagcaca

SEQ ID NO: 1163705 - RNA, 19 nt, Artificial Sequence
  Description of Artificial Sequence: Synthetic oligonucleotide
uaaagugcggagccuugga

SEQ ID NO: 1163706 - RNA, 19 nt, Artificial Sequence
  Description of Artificial Sequence: Synthetic oligonucleotide
uacagaguuaaaucuccau

SEQ ID NO: 1163707 - RNA, 19 nt, Artificial Sequence
  Description of Artificial Sequence: Synthetic oligonucleotide
gagauaaaccucuggcuaa

SEQ ID NO: 1163708 - RNA, 19 nt, Artificial Sequence
  Description of Artificial Sequence: Synthetic oligonucleotide
uuccuuagucaccuuuaga

SEQ ID NO: 1163709 - RNA, 19 nt, Artificial Sequence
  Description of Artificial Sequence: Synthetic oligonucleotide
aguaguagugaugccacgu

SEQ ID NO: 1163710 - RNA, 19 nt, Artificial Sequence
  Description of Artificial Sequence: Synthetic oligonucleotide
gauacauucgaaguuugcu

SEQ ID NO: 1163711 - RNA, 19 nt, Artificial Sequence
  Description of Artificial Sequence: Synthetic oligonucleotide
ucgcucgguagaaaacucc

SEQ ID NO: 1163712 - RNA, 19 nt, Artificial Sequence
  Description of Artificial Sequence: Synthetic oligonucleotide
gcuuguuucucccaaccag

SEQ ID NO: 1163713 - RNA, 19 nt, Artificial Sequence
  Description of Artificial Sequence: Synthetic oligonucleotide
gagauugccaguaacuucu

SEQ ID NO: 1163714 - RNA, 19 nt, Artificial Sequence
  Description of Artificial Sequence: Synthetic oligonucleotide
cuaaccccgagcacuuugc

SEQ ID NO: 1163715 - RNA, 19 nt, Artificial Sequence
  Description of Artificial Sequence: Synthetic oligonucleotide
caucaccacuucuaugccc

SEQ ID NO: 1163716 - RNA, 19 nt, Artificial Sequence
  Description of Artificial Sequence: Synthetic oligonucleotide
agauagccaauaaucaggu

SEQ ID NO: 1163717 - RNA, 19 nt, Artificial Sequence
  Description of Artificial Sequence: Synthetic oligonucleotide
uaaaggcucgaaguuuuca

SEQ ID NO: 1163718 - RNA, 19 nt, Artificial Sequence
  Description of Artificial Sequence: Synthetic oligonucleotide
uugaacucucuuugguacu

SEQ ID NO: 1163719 - RNA, 19 nt, Artificial Sequence
  Description of Artificial Sequence: Synthetic oligonucleotide
cuaucacuucuccaccagc

SEQ ID NO: 1163720 - RNA, 19 nt, Artificial Sequence
  Description of Artificial Sequence: Synthetic oligonucleotide
acguaagggcgucuaucac

SEQ ID NO: 1163721 - RNA, 19 nt, Artificial Sequence
  Description of Artificial Sequence: Synthetic oligonucleotide
caaauccggaguucuuagc

SEQ ID NO: 1163722 - RNA, 19 nt, Artificial Sequence
  Description of Artificial Sequence: Synthetic oligonucleotide
ucacgagacggagcggucg

SEQ ID NO: 1163723 - RNA, 19 nt, Artificial Sequence
  Description of Artificial Sequence: Synthetic oligonucleotide
gaucaggucuaaccccgag

SEQ ID NO: 1163724 - RNA, 19 nt, Artificial Sequence
  Description of Artificial Sequence: Synthetic oligonucleotide
uugccugcuccgaagaaua

SEQ ID NO: 1163725 - RNA, 19 nt, Artificial Sequence
  Description of Artificial Sequence: Synthetic oligonucleotide
gcaaagguguuggacagcg

SEQ ID NO: 1163726 - RNA, 19 nt, Artificial Sequence
  Description of Artificial Sequence: Synthetic oligonucleotide
gagauacauucgaaguuug

SEQ ID NO: 1163727 - RNA, 19 nt, Artificial Sequence
  Description of Artificial Sequence: Synthetic oligonucleotide
cagaccggcaaacaucgug

SEQ ID NO: 1163728 - RNA, 19 nt, Artificial Sequence
  Description of Artificial Sequence: Synthetic oligonucleotide
cuucccucgaggcugacca

SEQ ID NO: 1163729 - RNA, 19 nt, Artificial Sequence
  Description of Artificial Sequence: Synthetic oligonucleotide
accccgagcacuuugcaaa

SEQ ID NO: 1163730 - RNA, 19 nt, Artificial Sequence
  Description of Artificial Sequence: Synthetic oligonucleotide
aggucuaaccccgagcacu

SEQ ID NO: 1163731 - RNA, 19 nt, Artificial Sequence
  Description of Artificial Sequence: Synthetic oligonucleotide
gguccaaacggcuuuagaa

SEQ ID NO: 1163732 - RNA, 19 nt, Artificial Sequence
  Description of Artificial Sequence: Synthetic oligonucleotide
cuaaagugcggagccuugg

SEQ ID NO: 1163733 - RNA, 19 nt, Artificial Sequence
  Description of Artificial Sequence: Synthetic oligonucleotide
gccaauaaucagguaaagg

SEQ ID NO: 1163734 - RNA, 19 nt, Artificial Sequence
  Description of Artificial Sequence: Synthetic oligonucleotide
ucaccuggauggaccaccc

SEQ ID NO: 1163735 - RNA, 19 nt, Artificial Sequence
  Description of Artificial Sequence: Synthetic oligonucleotide
guggagauacauucgaagu

SEQ ID NO: 1163736 - RNA, 19 nt, Artificial Sequence
  Description of Artificial Sequence: Synthetic oligonucleotide
guucuuagcaaugcauuca

SEQ ID NO: 1163737 - RNA, 19 nt, Artificial Sequence
  Description of Artificial Sequence: Synthetic oligonucleotide
gauaaaccucuggcuaaag

SEQ ID NO: 1163738 - RNA, 19 nt, Artificial Sequence
  Description of Artificial Sequence: Synthetic oligonucleotide
ggagauaaaccucuggcua

SEQ ID NO: 1163739 - RNA, 19 nt, Artificial Sequence
  Description of Artificial Sequence: Synthetic oligonucleotide
ucgaugaaaaugugagcuu

SEQ ID NO: 1163740 - RNA, 19 nt, Artificial Sequence
  Description of Artificial Sequence: Synthetic oligonucleotide
ugggcggagagguuucucu

SEQ ID NO: 1163741 - RNA, 19 nt, Artificial Sequence
  Description of Artificial Sequence: Synthetic oligonucleotide
ugguugacuugagauugcc

SEQ ID NO: 1163742 - RNA, 19 nt, Artificial Sequence
  Description of Artificial Sequence: Synthetic oligonucleotide
guccguucaaguaguagug

SEQ ID NO: 1163743 - RNA, 19 nt, Artificial Sequence
  Description of Artificial Sequence: Synthetic oligonucleotide
gcaaauccggaguucuuag

SEQ ID NO: 1163744 - RNA, 19 nt, Artificial Sequence
  Description of Artificial Sequence: Synthetic oligonucleotide
ggauggaccacccgcagac

SEQ ID NO: 1163745 - RNA, 19 nt, Artificial Sequence
  Description of Artificial Sequence: Synthetic oligonucleotide
ggaacgagggacucacgag

SEQ ID NO: 1163746 - RNA, 19 nt, Artificial Sequence
  Description of Artificial Sequence: Synthetic oligonucleotide
auggaccacccgcagacgu

SEQ ID NO: 1163747 - RNA, 19 nt, Artificial Sequence
  Description of Artificial Sequence: Synthetic oligonucleotide
cugauacuuuggguggugg

SEQ ID NO: 1163748 - RNA, 19 nt, Artificial Sequence
  Description of Artificial Sequence: Synthetic oligonucleotide
guucagaccggcaaacauc

SEQ ID NO: 1163749 - RNA, 19 nt, Artificial Sequence
  Description of Artificial Sequence: Synthetic oligonucleotide
aaucagguaaaggcucgaa

SEQ ID NO: 1163750 - RNA, 19 nt, Artificial Sequence
  Description of Artificial Sequence: Synthetic oligonucleotide
accaaagaucaggucuaac

SEQ ID NO: 1163751 - RNA, 19 nt, Artificial Sequence
  Description of Artificial Sequence: Synthetic oligonucleotide
ucguccguucaaguaguag

SEQ ID NO: 1163752 - RNA, 19 nt, Artificial Sequence
  Description of Artificial Sequence: Synthetic oligonucleotide
uggcaaguucacgugcuug

SEQ ID NO: 1163753 - RNA, 19 nt, Artificial Sequence
  Description of Artificial Sequence: Synthetic oligonucleotide
agcuuacgaaacugaacaa

SEQ ID NO: 1163754 - RNA, 19 nt, Artificial Sequence
  Description of Artificial Sequence: Synthetic oligonucleotide
uccguucaaguaguaguga

SEQ ID NO: 1163755 - RNA, 19 nt, Artificial Sequence
  Description of Artificial Sequence: Synthetic oligonucleotide
gacggguucagaccggcaa

SEQ ID NO: 1163756 - RNA, 19 nt, Artificial Sequence
  Description of Artificial Sequence: Synthetic oligonucleotide
gagcauuggagcuguucca

SEQ ID NO: 1163757 - RNA, 19 nt, Artificial Sequence
  Description of Artificial Sequence: Synthetic oligonucleotide
uaaccccgagcacuuugca

SEQ ID NO: 1163758 - RNA, 19 nt, Artificial Sequence
  Description of Artificial Sequence: Synthetic oligonucleotide
aggaaccgcgggucggugg

SEQ ID NO: 1163759 - RNA, 19 nt, Artificial Sequence
  Description of Artificial Sequence: Synthetic oligonucleotide
acgagggacucacgagacg

SEQ ID NO: 1163760 - RNA, 19 nt, Artificial Sequence
  Description of Artificial Sequence: Synthetic oligonucleotide
augccuagugagcuuccug

SEQ ID NO: 1163761 - RNA, 19 nt, Artificial Sequence
  Description of Artificial Sequence: Synthetic oligonucleotide
ccuuagucaccuuuagaac

SEQ ID NO: 1163762 - RNA, 19 nt, Artificial Sequence
  Description of Artificial Sequence: Synthetic oligonucleotide
acucacgagacggagcggu

SEQ ID NO: 1163763 - RNA, 19 nt, Artificial Sequence
  Description of Artificial Sequence: Synthetic oligonucleotide
agcgagggugcaccaccgc

SEQ ID NO: 1163764 - RNA, 19 nt, Artificial Sequence
  Description of Artificial Sequence: Synthetic oligonucleotide
ucaucacgucaggagagac

SEQ ID NO: 1163765 - RNA, 19 nt, Artificial Sequence
  Description of Artificial Sequence: Synthetic oligonucleotide
ugcccaguucccaggagau

SEQ ID NO: 1163766 - RNA, 19 nt, Artificial Sequence
  Description of Artificial Sequence: Synthetic oligonucleotide
cuuugguacuguucuuuga

SEQ ID NO: 1163767 - RNA, 19 nt, Artificial Sequence
  Description of Artificial Sequence: Synthetic oligonucleotide
gucuaucacuucuccacca

SEQ ID NO: 1163768 - RNA, 19 nt, Artificial Sequence
  Description of Artificial Sequence: Synthetic oligonucleotide
ucacgucaggagagacggg

SEQ ID NO: 1163769 - RNA, 19 nt, Artificial Sequence
  Description of Artificial Sequence: Synthetic oligonucleotide
gucuacuggcuuguuaaac

SEQ ID NO: 1163770 - RNA, 19 nt, Artificial Sequence
  Description of Artificial Sequence: Synthetic oligonucleotide
uucagcccgagcugucccc

SEQ ID NO: 1163771 - RNA, 19 nt, Artificial Sequence
  Description of Artificial Sequence: Synthetic oligonucleotide
accgcaaauccggaguucu

SEQ ID NO: 1163772 - RNA, 19 nt, Artificial Sequence
  Description of Artificial Sequence: Synthetic oligonucleotide
agucuugguaccaccaaau

SEQ ID NO: 1163773 - RNA, 19 nt, Artificial Sequence
  Description of Artificial Sequence: Synthetic oligonucleotide
aaaggcaggcaugccuagu

SEQ ID NO: 1163774 - RNA, 19 nt, Artificial Sequence
  Description of Artificial Sequence: Synthetic oligonucleotide
gauggaccacccgcagacg

SEQ ID NO: 1163775 - RNA, 19 nt, Artificial Sequence
  Description of Artificial Sequence: Synthetic oligonucleotide
ggcaggcaugccuagugag

SEQ ID NO: 1163776 - RNA, 19 nt, Artificial Sequence
  Description of Artificial Sequence: Synthetic oligonucleotide
caaacaucgugguugacuu

SEQ ID NO: 1163777 - RNA, 19 nt, Artificial Sequence
  Description of Artificial Sequence: Synthetic oligonucleotide
ggcaauucguccguucaag

SEQ ID NO: 1163778 - RNA, 19 nt, Artificial Sequence
  Description of Artificial Sequence: Synthetic oligonucleotide
ugucuucccucgaggcuga

SEQ ID NO: 1163779 - RNA, 19 nt, Artificial Sequence
  Description of Artificial Sequence: Synthetic oligonucleotide
cuaacugcaguccaucgau

SEQ ID NO: 1163780 - RNA, 19 nt, Artificial Sequence
  Description of Artificial Sequence: Synthetic oligonucleotide
auuuccuuagucaccuuua

SEQ ID NO: 1163781 - RNA, 19 nt, Artificial Sequence
  Description of Artificial Sequence: Synthetic oligonucleotide
ggagauguuguaacccuug

SEQ ID NO: 1163782 - RNA, 19 nt, Artificial Sequence
  Description of Artificial Sequence: Synthetic oligonucleotide
cacgagacggagcggucgc

SEQ ID NO: 1163783 - RNA, 19 nt, Artificial Sequence
  Description of Artificial Sequence: Synthetic oligonucleotide
uuuugccgggucucauuuc

SEQ ID NO: 1163784 - RNA, 19 nt, Artificial Sequence
  Description of Artificial Sequence: Synthetic oligonucleotide
agauaaaccucuggcuaaa

SEQ ID NO: 1163785 - RNA, 19 nt, Artificial Sequence
  Description of Artificial Sequence: Synthetic oligonucleotide
cuaggccuuucacucgcac

SEQ ID NO: 1163786 - RNA, 19 nt, Artificial Sequence
  Description of Artificial Sequence: Synthetic oligonucleotide
cagcgagggugcaccaccg

SEQ ID NO: 1163787 - RNA, 19 nt, Artificial Sequence
  Description of Artificial Sequence: Synthetic oligonucleotide
gagacggguucagaccggc

SEQ ID NO: 1163788 - RNA, 19 nt, Artificial Sequence
  Description of Artificial Sequence: Synthetic oligonucleotide
agggcgucuaucacuucuc

SEQ ID NO: 1163789 - RNA, 19 nt, Artificial Sequence
  Description of Artificial Sequence: Synthetic oligonucleotide
cgugguugacuugagauug

SEQ ID NO: 1163790 - RNA, 19 nt, Artificial Sequence
  Description of Artificial Sequence: Synthetic oligonucleotide
gaugccacguaagggcguc

SEQ ID NO: 1163791 - RNA, 19 nt, Artificial Sequence
  Description of Artificial Sequence: Synthetic oligonucleotide
uuguaacccuuggaagcac

SEQ ID NO: 1163792 - RNA, 19 nt, Artificial Sequence
  Description of Artificial Sequence: Synthetic oligonucleotide
accaccgccguaggcagag

SEQ ID NO: 1163793 - RNA, 19 nt, Artificial Sequence
  Description of Artificial Sequence: Synthetic oligonucleotide
acggguucagaccggcaaa

SEQ ID NO: 1163794 - RNA, 19 nt, Artificial Sequence
  Description of Artificial Sequence: Synthetic oligonucleotide
cuuaacugucuucccucga

SEQ ID NO: 1163795 - RNA, 19 nt, Artificial Sequence
  Description of Artificial Sequence: Synthetic oligonucleotide
aaguaaccccucaggucca

SEQ ID NO: 1163796 - RNA, 19 nt, Artificial Sequence
  Description of Artificial Sequence: Synthetic oligonucleotide
gcuccgaagaauaccugcc

SEQ ID NO: 1163797 - RNA, 19 nt, Artificial Sequence
  Description of Artificial Sequence: Synthetic oligonucleotide
ggaaccgcgggucgguggc

SEQ ID NO: 1163798 - RNA, 19 nt, Artificial Sequence
  Description of Artificial Sequence: Synthetic oligonucleotide
cuugucuacuggcuuguua

SEQ ID NO: 1163799 - RNA, 19 nt, Artificial Sequence
  Description of Artificial Sequence: Synthetic oligonucleotide
uugccgggucucauuuccu

SEQ ID NO: 1163800 - RNA, 19 nt, Artificial Sequence
  Description of Artificial Sequence: Synthetic oligonucleotide
gacuuucguagaagcuuac

SEQ ID NO: 1163801 - RNA, 19 nt, Artificial Sequence
  Description of Artificial Sequence: Synthetic oligonucleotide
cugcuccgaagaauaccug

SEQ ID NO: 1163802 - RNA, 19 nt, Artificial Sequence
  Description of Artificial Sequence: Synthetic oligonucleotide
caggaacgagggacucacg

SEQ ID NO: 1163803 - RNA, 19 nt, Artificial Sequence
  Description of Artificial Sequence: Synthetic oligonucleotide
agagacggguucagaccgg

SEQ ID NO: 1163804 - RNA, 19 nt, Artificial Sequence
  Description of Artificial Sequence: Synthetic oligonucleotide
gacucacgagacggagcgg

SEQ ID NO: 1163805 - RNA, 19 nt, Artificial Sequence
  Description of Artificial Sequence: Synthetic oligonucleotide
ucagaccggcaaacaucgu

SEQ ID NO: 1163806 - RNA, 19 nt, Artificial Sequence
  Description of Artificial Sequence: Synthetic oligonucleotide
uuucaccguucaguuggac

SEQ ID NO: 1163807 - RNA, 19 nt, Artificial Sequence
  Description of Artificial Sequence: Synthetic oligonucleotide
gugguugacuugagauugc

SEQ ID NO: 1163808 - RNA, 19 nt, Artificial Sequence
  Description of Artificial Sequence: Synthetic oligonucleotide
acuuauccagccacauaaa

SEQ ID NO: 1163809 - RNA, 19 nt, Artificial Sequence
  Description of Artificial Sequence: Synthetic oligonucleotide
caggucuaaccccgagcac

SEQ ID NO: 1163810 - RNA, 19 nt, Artificial Sequence
  Description of Artificial Sequence: Synthetic oligonucleotide
caguggagauacauucgaa

SEQ ID NO: 1163811 - RNA, 19 nt, Artificial Sequence
  Description of Artificial Sequence: Synthetic oligonucleotide
guuggcgucgauggugaca

SEQ ID NO: 1163812 - RNA, 19 nt, Artificial Sequence
  Description of Artificial Sequence: Synthetic oligonucleotide
ccacuaagugguaguugcc

SEQ ID NO: 1163813 - RNA, 19 nt, Artificial Sequence
  Description of Artificial Sequence: Synthetic oligonucleotide
gggugcaccaccgccguag

SEQ ID NO: 1163814 - RNA, 19 nt, Artificial Sequence
  Description of Artificial Sequence: Synthetic oligonucleotide
ugccgggucucauuuccuu

SEQ ID NO: 1163815 - RNA, 19 nt, Artificial Sequence
  Description of Artificial Sequence: Synthetic oligonucleotide
guaaaggcucgaaguuuuc

SEQ ID NO: 1163816 - RNA, 19 nt, Artificial Sequence
  Description of Artificial Sequence: Synthetic oligonucleotide
uucguccguucaaguagua

SEQ ID NO: 1163817 - RNA, 19 nt, Artificial Sequence
  Description of Artificial Sequence: Synthetic oligonucleotide
gggucucauuuccuuaguc

SEQ ID NO: 1163818 - RNA, 19 nt, Artificial Sequence
  Description of Artificial Sequence: Synthetic oligonucleotide
cucacgagacggagcgguc

SEQ ID NO: 1163819 - RNA, 19 nt, Artificial Sequence
  Description of Artificial Sequence: Synthetic oligonucleotide
ggagcggucgcucgguaga

SEQ ID NO: 1163820 - RNA, 19 nt, Artificial Sequence
  Description of Artificial Sequence: Synthetic oligonucleotide
cugacuuucguagaagcuu

SEQ ID NO: 1163821 - RNA, 19 nt, Artificial Sequence
  Description of Artificial Sequence: Synthetic oligonucleotide
gcgagggugcaccaccgcc

SEQ ID NO: 1163822 - RNA, 19 nt, Artificial Sequence
  Description of Artificial Sequence: Synthetic oligonucleotide
gucgcucgguagaaaacuc

SEQ ID NO: 1163823 - RNA, 19 nt, Artificial Sequence
  Description of Artificial Sequence: Synthetic oligonucleotide
ccgaagaauaccugccuca

SEQ ID NO: 1163824 - RNA, 19 nt, Artificial Sequence
  Description of Artificial Sequence: Synthetic oligonucleotide
ccacccgcagacgugagag

SEQ ID NO: 1163825 - RNA, 19 nt, Artificial Sequence
  Description of Artificial Sequence: Synthetic oligonucleotide
ggugcaccaccgccguagg

SEQ ID NO: 1163826 - RNA, 19 nt, Artificial Sequence
  Description of Artificial Sequence: Synthetic oligonucleotide
gguggcaauucguccguuc

SEQ ID NO: 1163827 - RNA, 19 nt, Artificial Sequence
  Description of Artificial Sequence: Synthetic oligonucleotide
accguucaguuggacagau

SEQ ID NO: 1163828 - RNA, 19 nt, Artificial Sequence
  Description of Artificial Sequence: Synthetic oligonucleotide
gggcgucuaucacuucucc

SEQ ID NO: 1163829 - RNA, 19 nt, Artificial Sequence
  Description of Artificial Sequence: Synthetic oligonucleotide
guaagggcgucuaucacuu

SEQ ID NO: 1163830 - RNA, 19 nt, Artificial Sequence
  Description of Artificial Sequence: Synthetic oligonucleotide
gggcggagagguuucucug

SEQ ID NO: 1163831 - RNA, 19 nt, Artificial Sequence
  Description of Artificial Sequence: Synthetic oligonucleotide
ggagauacauucgaaguuu

SEQ ID NO: 1163832 - RNA, 19 nt, Artificial Sequence
  Description of Artificial Sequence: Synthetic oligonucleotide
gcaggcaugccuagugagc

SEQ ID NO: 1163833 - RNA, 19 nt, Artificial Sequence
  Description of Artificial Sequence: Synthetic oligonucleotide
cacccgcagacgugagagc

SEQ ID NO: 1163834 - RNA, 19 nt, Artificial Sequence
  Description of Artificial Sequence: Synthetic oligonucleotide
accggcaaacaucgugguu

SEQ ID NO: 1163835 - RNA, 19 nt, Artificial Sequence
  Description of Artificial Sequence: Synthetic oligonucleotide
gcaaacaucgugguugacu

SEQ ID NO: 1163836 - RNA, 19 nt, Artificial Sequence
  Description of Artificial Sequence: Synthetic oligonucleotide
aaccgcgggucgguggcca

SEQ ID NO: 1163837 - RNA, 19 nt, Artificial Sequence
  Description of Artificial Sequence: Synthetic oligonucleotide
caacuuauccagccacaua

SEQ ID NO: 1163838 - RNA, 19 nt, Artificial Sequence
  Description of Artificial Sequence: Synthetic oligonucleotide
ggcgucuaucacuucucca

SEQ ID NO: 1163839 - RNA, 19 nt, Artificial Sequence
  Description of Artificial Sequence: Synthetic oligonucleotide
gcuuuagaagguacuuguc

SEQ ID NO: 1163840 - RNA, 19 nt, Artificial Sequence
  Description of Artificial Sequence: Synthetic oligonucleotide
caaagguguuggacagcga

SEQ ID NO: 1163841 - RNA, 19 nt, Artificial Sequence
  Description of Artificial Sequence: Synthetic oligonucleotide
gcuaaagugcggagccuug

SEQ ID NO: 1163842 - RNA, 19 nt, Artificial Sequence
  Description of Artificial Sequence: Synthetic oligonucleotide
ccuaacugcaguccaucga

SEQ ID NO: 1163843 - RNA, 19 nt, Artificial Sequence
  Description of Artificial Sequence: Synthetic oligonucleotide
gaccaaagaucaggucuaa

SEQ ID NO: 1163844 - RNA, 19 nt, Artificial Sequence
  Description of Artificial Sequence: Synthetic oligonucleotide
ugccacguaagggcgucua

SEQ ID NO: 1163845 - RNA, 19 nt, Artificial Sequence
  Description of Artificial Sequence: Synthetic oligonucleotide
gguugacuugagauugcca

SEQ ID NO: 1163846 - RNA, 19 nt, Artificial Sequence
  Description of Artificial Sequence: Synthetic oligonucleotide
cuccgaagaauaccugccu

SEQ ID NO: 1163847 - RNA, 19 nt, Artificial Sequence
  Description of Artificial Sequence: Synthetic oligonucleotide
gggacucacgagacggagc

SEQ ID NO: 1163848 - RNA, 19 nt, Artificial Sequence
  Description of Artificial Sequence: Synthetic oligonucleotide
agaucaggucuaaccccga

SEQ ID NO: 1163849 - RNA, 19 nt, Artificial Sequence
  Description of Artificial Sequence: Synthetic oligonucleotide
guuucaccguucaguugga

SEQ ID NO: 1163850 - RNA, 19 nt, Artificial Sequence
  Description of Artificial Sequence: Synthetic oligonucleotide
ggucgcucgguagaaaacu

SEQ ID NO: 1163851 - RNA, 19 nt, Artificial Sequence
  Description of Artificial Sequence: Synthetic oligonucleotide
gcaauucguccguucaagu

SEQ ID NO: 1163852 - RNA, 19 nt, Artificial Sequence
  Description of Artificial Sequence: Synthetic oligonucleotide
acgugcuuggugacauuau

SEQ ID NO: 1163853 - RNA, 19 nt, Artificial Sequence
  Description of Artificial Sequence: Synthetic oligonucleotide
caccgcaaauccggaguuc

SEQ ID NO: 1163854 - RNA, 19 nt, Artificial Sequence
  Description of Artificial Sequence: Synthetic oligonucleotide
gcggucgcucgguagaaaa

SEQ ID NO: 1163855 - RNA, 19 nt, Artificial Sequence
  Description of Artificial Sequence: Synthetic oligonucleotide
gaccacccgcagacgugag

SEQ ID NO: 1163856 - RNA, 19 nt, Artificial Sequence
  Description of Artificial Sequence: Synthetic oligonucleotide
gaaccgcgggucgguggcc

SEQ ID NO: 1163857 - RNA, 19 nt, Artificial Sequence
  Description of Artificial Sequence: Synthetic oligonucleotide
ccacguaagggcgucuauc

SEQ ID NO: 1163858 - RNA, 19 nt, Artificial Sequence
  Description of Artificial Sequence: Synthetic oligonucleotide
cucaaguaugcaggagaua

SEQ ID NO: 1163859 - RNA, 19 nt, Artificial Sequence
  Description of Artificial Sequence: Synthetic oligonucleotide
caccacgucuucagcccga

SEQ ID NO: 1163860 - RNA, 19 nt, Artificial Sequence
  Description of Artificial Sequence: Synthetic oligonucleotide
cguccguucaaguaguagu

SEQ ID NO: 1163861 - RNA, 19 nt, Artificial Sequence
  Description of Artificial Sequence: Synthetic oligonucleotide
ggaccacccgcagacguga

SEQ ID NO: 1163862 - RNA, 19 nt, Artificial Sequence
  Description of Artificial Sequence: Synthetic oligonucleotide
cccgagcuguccccgcugg

SEQ ID NO: 1163863 - RNA, 19 nt, Artificial Sequence
  Description of Artificial Sequence: Synthetic oligonucleotide
cgcucgguagaaaacucca

SEQ ID NO: 1163864 - RNA, 19 nt, Artificial Sequence
  Description of Artificial Sequence: Synthetic oligonucleotide
gcugacuuucguagaagcu

SEQ ID NO: 1163865 - RNA, 19 nt, Artificial Sequence
  Description of Artificial Sequence: Synthetic oligonucleotide
agauugccaguaacuucuu

SEQ ID NO: 1163866 - RNA, 19 nt, Artificial Sequence
  Description of Artificial Sequence: Synthetic oligonucleotide
acgucaggagagacggguu

SEQ ID NO: 1163867 - RNA, 19 nt, Artificial Sequence
  Description of Artificial Sequence: Synthetic oligonucleotide
acgagacggagcggucgcu

SEQ ID NO: 1163868 - RNA, 19 nt, Artificial Sequence
  Description of Artificial Sequence: Synthetic oligonucleotide
agacggguucagaccggca

SEQ ID NO: 1163869 - RNA, 19 nt, Artificial Sequence
  Description of Artificial Sequence: Synthetic oligonucleotide
ccaaacggcuuuagaaggu

SEQ ID NO: 1163870 - RNA, 19 nt, Artificial Sequence
  Description of Artificial Sequence: Synthetic oligonucleotide
caccguucaguuggacaga

SEQ ID NO: 1163871 - RNA, 19 nt, Artificial Sequence
  Description of Artificial Sequence: Synthetic oligonucleotide
cggcuuuagaagguacuug

SEQ ID NO: 1163872 - RNA, 19 nt, Artificial Sequence
  Description of Artificial Sequence: Synthetic oligonucleotide
gcaugccuagugagcuucc

SEQ ID NO: 1163873 - RNA, 19 nt, Artificial Sequence
  Description of Artificial Sequence: Synthetic oligonucleotide
gagcggucgcucgguagaa

SEQ ID NO: 1163874 - RNA, 19 nt, Artificial Sequence
  Description of Artificial Sequence: Synthetic oligonucleotide
ugguggcaauucguccguu

SEQ ID NO: 1163875 - RNA, 19 nt, Artificial Sequence
  Description of Artificial Sequence: Synthetic oligonucleotide
ccacuucuaugcccaucug

SEQ ID NO: 1163876 - RNA, 19 nt, Artificial Sequence
  Description of Artificial Sequence: Synthetic oligonucleotide
accgccguaggcagagcuu

SEQ ID NO: 1163877 - RNA, 19 nt, Artificial Sequence
  Description of Artificial Sequence: Synthetic oligonucleotide
augccacguaagggcgucu

SEQ ID NO: 1163878 - RNA, 19 nt, Artificial Sequence
  Description of Artificial Sequence: Synthetic oligonucleotide
gcucgguagaaaacuccaa

SEQ ID NO: 1163879 - RNA, 19 nt, Artificial Sequence
  Description of Artificial Sequence: Synthetic oligonucleotide
cggucgcucgguagaaaac

SEQ ID NO: 1163880 - RNA, 19 nt, Artificial Sequence
  Description of Artificial Sequence: Synthetic oligonucleotide
agcggucgcucgguagaaa

SEQ ID NO: 1163881 - RNA, 19 nt, Artificial Sequence
  Description of Artificial Sequence: Synthetic oligonucleotide
guaaccccucagguccaaa

SEQ ID NO: 1163882 - RNA, 19 nt, Artificial Sequence
  Description of Artificial Sequence: Synthetic oligonucleotide
cccgcuggggcgcccuggg

SEQ ID NO: 1163883 - RNA, 19 nt, Artificial Sequence
  Description of Artificial Sequence: Synthetic oligonucleotide
caugccuagugagcuuccu

SEQ ID NO: 1163884 - RNA, 19 nt, Artificial Sequence
  Description of Artificial Sequence: Synthetic oligonucleotide
cggagcggucgcucgguag

SEQ ID NO: 1163885 - RNA, 19 nt, Artificial Sequence
  Description of Artificial Sequence: Synthetic oligonucleotide
ggcuaaagugcggagccuu

SEQ ID NO: 1163886 - RNA, 19 nt, Artificial Sequence
  Description of Artificial Sequence: Synthetic oligonucleotide
cggguucagaccggcaaac

SEQ ID NO: 1163887 - RNA, 19 nt, Artificial Sequence
  Description of Artificial Sequence: Synthetic oligonucleotide
agggugcaccaccgccgua

SEQ ID NO: 1163888 - RNA, 19 nt, Artificial Sequence
  Description of Artificial Sequence: Synthetic oligonucleotide
ggucuaaccccgagcacuu

SEQ ID NO: 1163889 - RNA, 19 nt, Artificial Sequence
  Description of Artificial Sequence: Synthetic oligonucleotide
ccaacuuauccagccacau

SEQ ID NO: 1163890 - RNA, 19 nt, Artificial Sequence
  Description of Artificial Sequence: Synthetic oligonucleotide
gccacguaagggcgucuau

SEQ ID NO: 1163891 - RNA, 19 nt, Artificial Sequence
  Description of Artificial Sequence: Synthetic oligonucleotide
ccaccgcaaauccggaguu

SEQ ID NO: 1163892 - RNA, 19 nt, Artificial Sequence
  Description of Artificial Sequence: Synthetic oligonucleotide
ccgcuggggcgcccugggc

SEQ ID NO: 1163893 - RNA, 19 nt, Artificial Sequence
  Description of Artificial Sequence: Synthetic oligonucleotide
gucuaaccccgagcacuuu

SEQ ID NO: 1163894 - RNA, 19 nt, Artificial Sequence
  Description of Artificial Sequence: Synthetic oligonucleotide
ccguaggcagagcuuguuu

SEQ ID NO: 1163895 - RNA, 19 nt, Artificial Sequence
  Description of Artificial Sequence: Synthetic oligonucleotide
gcggagccuuggagagccc

SEQ ID NO: 1163896 - RNA, 19 nt, Artificial Sequence
  Description of Artificial Sequence: Synthetic oligonucleotide
ccucgaggcugaccaacau

SEQ ID NO: 1163897 - RNA, 19 nt, Artificial Sequence
  Description of Artificial Sequence: Synthetic oligonucleotide
ccaccgccguaggcagagc

SEQ ID NO: 1163898 - RNA, 19 nt, Artificial Sequence
  Description of Artificial Sequence: Synthetic oligonucleotide
ccgcaaauccggaguucuu

SEQ ID NO: 1163899 - RNA, 19 nt, Artificial Sequence
  Description of Artificial Sequence: Synthetic oligonucleotide
ccguucaguuggacagauu

SEQ ID NO: 1163900 - RNA, 19 nt, Artificial Sequence
  Description of Artificial Sequence: Synthetic oligonucleotide
ccugggcggagagguuucu

SEQ ID NO: 1163901 - RNA, 19 nt, Artificial Sequence
  Description of Artificial Sequence: Synthetic oligonucleotide
cgcgggucgguggccaggu

SEQ ID NO: 1163902 - RNA, 19 nt, Artificial Sequence
  Description of Artificial Sequence: Synthetic oligonucleotide
uaauauuagaagaaggacc

SEQ ID NO: 1163903 - RNA, 19 nt, Artificial Sequence
  Description of Artificial Sequence: Synthetic oligonucleotide
auugaugccaaauauagug

SEQ ID NO: 1163904 - RNA, 19 nt, Artificial Sequence
  Description of Artificial Sequence: Synthetic oligonucleotide
uuuaguaagaacuccagca

SEQ ID NO: 1163905 - RNA, 19 nt, Artificial Sequence
  Description of Artificial Sequence: Synthetic oligonucleotide
aauugagaagggcagugcc

SEQ ID NO: 1163906 - RNA, 19 nt, Artificial Sequence
  Description of Artificial Sequence: Synthetic oligonucleotide
gauaugucagaguagauug

SEQ ID NO: 1163907 - RNA, 19 nt, Artificial Sequence
  Description of Artificial Sequence: Synthetic oligonucleotide
ucuuuacaaaccaagagug

SEQ ID NO: 1163908 - RNA, 19 nt, Artificial Sequence
  Description of Artificial Sequence: Synthetic oligonucleotide
aauauagugugggucagcc

SEQ ID NO: 1163909 - RNA, 19 nt, Artificial Sequence
  Description of Artificial Sequence: Synthetic oligonucleotide
agagaugucacggaaagcc

SEQ ID NO: 1163910 - RNA, 19 nt, Artificial Sequence
  Description of Artificial Sequence: Synthetic oligonucleotide
uauagugugggucagccag

SEQ ID NO: 1163911 - RNA, 19 nt, Artificial Sequence
  Description of Artificial Sequence: Synthetic oligonucleotide
aaggguuccuauuacuagc

SEQ ID NO: 1163912 - RNA, 19 nt, Artificial Sequence
  Description of Artificial Sequence: Synthetic oligonucleotide
aauuaagggcucuuuggac

SEQ ID NO: 1163913 - RNA, 19 nt, Artificial Sequence
  Description of Artificial Sequence: Synthetic oligonucleotide
ugugacuucaaucaugugu

SEQ ID NO: 1163914 - RNA, 19 nt, Artificial Sequence
  Description of Artificial Sequence: Synthetic oligonucleotide
auuauugcuccuuccaggc

SEQ ID NO: 1163915 - RNA, 19 nt, Artificial Sequence
  Description of Artificial Sequence: Synthetic oligonucleotide
aaucaaauuacuugugacu

SEQ ID NO: 1163916 - RNA, 19 nt, Artificial Sequence
  Description of Artificial Sequence: Synthetic oligonucleotide
aucaggaaaacaauaaccc

SEQ ID NO: 1163917 - RNA, 19 nt, Artificial Sequence
  Description of Artificial Sequence: Synthetic oligonucleotide
auaauauuagaagaaggac

SEQ ID NO: 1163918 - RNA, 19 nt, Artificial Sequence
  Description of Artificial Sequence: Synthetic oligonucleotide
uggguaaugaauucguagg

SEQ ID NO: 1163919 - RNA, 19 nt, Artificial Sequence
  Description of Artificial Sequence: Synthetic oligonucleotide
uucuuuacaaaccaagagu

SEQ ID NO: 1163920 - RNA, 19 nt, Artificial Sequence
  Description of Artificial Sequence: Synthetic oligonucleotide
uguauuguucaccuuaucu

SEQ ID NO: 1163921 - RNA, 19 nt, Artificial Sequence
  Description of Artificial Sequence: Synthetic oligonucleotide
aaccagaugaucaucuugc

SEQ ID NO: 1163922 - RNA, 19 nt, Artificial Sequence
  Description of Artificial Sequence: Synthetic oligonucleotide
ucuaacaucuucuccaacc

SEQ ID NO: 1163923 - RNA, 19 nt, Artificial Sequence
  Description of Artificial Sequence: Synthetic oligonucleotide
gaaagcacgaaauugagaa

SEQ ID NO: 1163924 - RNA, 19 nt, Artificial Sequence
  Description of Artificial Sequence: Synthetic oligonucleotide
aagcacgaaauugagaagg

SEQ ID NO: 1163925 - RNA, 19 nt, Artificial Sequence
  Description of Artificial Sequence: Synthetic oligonucleotide
guucugacgacucacaugc

SEQ ID NO: 1163926 - RNA, 19 nt, Artificial Sequence
  Description of Artificial Sequence: Synthetic oligonucleotide
agauuucagaucuucagag

SEQ ID NO: 1163927 - RNA, 19 nt, Artificial Sequence
  Description of Artificial Sequence: Synthetic oligonucleotide
auucguagggcucacuagc

SEQ ID NO: 1163928 - RNA, 19 nt, Artificial Sequence
  Description of Artificial Sequence: Synthetic oligonucleotide
agagugauacaaucugucc

SEQ ID NO: 1163929 - RNA, 19 nt, Artificial Sequence
  Description of Artificial Sequence: Synthetic oligonucleotide
aauuaucagggaaagcacg

SEQ ID NO: 1163930 - RNA, 19 nt, Artificial Sequence
  Description of Artificial Sequence: Synthetic oligonucleotide
aauuugcccacucugggug

SEQ ID NO: 1163931 - RNA, 19 nt, Artificial Sequence
  Description of Artificial Sequence: Synthetic oligonucleotide
ucuacugaagauuucagau

SEQ ID NO: 1163932 - RNA, 19 nt, Artificial Sequence
  Description of Artificial Sequence: Synthetic oligonucleotide
aaguaugcagaguaguaug

SEQ ID NO: 1163933 - RNA, 19 nt, Artificial Sequence
  Description of Artificial Sequence: Synthetic oligonucleotide
aaauuaucagggaaagcac

SEQ ID NO: 1163934 - RNA, 19 nt, Artificial Sequence
  Description of Artificial Sequence: Synthetic oligonucleotide
uguggguuauccauucucg

SEQ ID NO: 1163935 - RNA, 19 nt, Artificial Sequence
  Description of Artificial Sequence: Synthetic oligonucleotide
auauugaugccaaauauag

SEQ ID NO: 1163936 - RNA, 19 nt, Artificial Sequence
  Description of Artificial Sequence: Synthetic oligonucleotide
uggccaauaauauuagaag

SEQ ID NO: 1163937 - RNA, 19 nt, Artificial Sequence
  Description of Artificial Sequence: Synthetic oligonucleotide
agaaggaccuggcugagac

SEQ ID NO: 1163938 - RNA, 19 nt, Artificial Sequence
  Description of Artificial Sequence: Synthetic oligonucleotide
agauaaaacagugugguca

SEQ ID NO: 1163939 - RNA, 19 nt, Artificial Sequence
  Description of Artificial Sequence: Synthetic oligonucleotide
ugucuacgaaguauguugg

SEQ ID NO: 1163940 - RNA, 19 nt, Artificial Sequence
  Description of Artificial Sequence: Synthetic oligonucleotide
uaaucaaauuacuugugac

SEQ ID NO: 1163941 - RNA, 19 nt, Artificial Sequence
  Description of Artificial Sequence: Synthetic oligonucleotide
agucagaugauuuauuuau

SEQ ID NO: 1163942 - RNA, 19 nt, Artificial Sequence
  Description of Artificial Sequence: Synthetic oligonucleotide
gagugauacaaucuguccc

SEQ ID NO: 1163943 - RNA, 19 nt, Artificial Sequence
  Description of Artificial Sequence: Synthetic oligonucleotide
cauuuugugcccuuugugc

SEQ ID NO: 1163944 - RNA, 19 nt, Artificial Sequence
  Description of Artificial Sequence: Synthetic oligonucleotide
uccauucucguccauacug

SEQ ID NO: 1163945 - RNA, 19 nt, Artificial Sequence
  Description of Artificial Sequence: Synthetic oligonucleotide
uggccuuacauccuaaccc

SEQ ID NO: 1163946 - RNA, 19 nt, Artificial Sequence
  Description of Artificial Sequence: Synthetic oligonucleotide
uguaguacucaucacugga

SEQ ID NO: 1163947 - RNA, 19 nt, Artificial Sequence
  Description of Artificial Sequence: Synthetic oligonucleotide
aauggcaccgcuccaagga

SEQ ID NO: 1163948 - RNA, 19 nt, Artificial Sequence
  Description of Artificial Sequence: Synthetic oligonucleotide
acggaaagcccgcugaggc

SEQ ID NO: 1163949 - RNA, 19 nt, Artificial Sequence
  Description of Artificial Sequence: Synthetic oligonucleotide
gaauucacugucgagguag

SEQ ID NO: 1163950 - RNA, 19 nt, Artificial Sequence
  Description of Artificial Sequence: Synthetic oligonucleotide
uaccuuugcagucaggaga

SEQ ID NO: 1163951 - RNA, 19 nt, Artificial Sequence
  Description of Artificial Sequence: Synthetic oligonucleotide
gugucuacgaaguauguug

SEQ ID NO: 1163952 - RNA, 19 nt, Artificial Sequence
  Description of Artificial Sequence: Synthetic oligonucleotide
ucacugucgagguagaacu

SEQ ID NO: 1163953 - RNA, 19 nt, Artificial Sequence
  Description of Artificial Sequence: Synthetic oligonucleotide
ucucauuaaucaaauuacu

SEQ ID NO: 1163954 - RNA, 19 nt, Artificial Sequence
  Description of Artificial Sequence: Synthetic oligonucleotide
acuggaacuuaacagauaa

SEQ ID NO: 1163955 - RNA, 19 nt, Artificial Sequence
  Description of Artificial Sequence: Synthetic oligonucleotide
ucaucacuggaacuuaaca

SEQ ID NO: 1163956 - RNA, 19 nt, Artificial Sequence
  Description of Artificial Sequence: Synthetic oligonucleotide
auggccuuacauccuaacc

SEQ ID NO: 1163957 - RNA, 19 nt, Artificial Sequence
  Description of Artificial Sequence: Synthetic oligonucleotide
agugguaaacagcaagcuc

SEQ ID NO: 1163958 - RNA, 19 nt, Artificial Sequence
  Description of Artificial Sequence: Synthetic oligonucleotide
auuucagaucuucagagau

SEQ ID NO: 1163959 - RNA, 19 nt, Artificial Sequence
  Description of Artificial Sequence: Synthetic oligonucleotide
ugauagacauuguuggcug

SEQ ID NO: 1163960 - RNA, 19 nt, Artificial Sequence
  Description of Artificial Sequence: Synthetic oligonucleotide
acagauaaaacaguguggu

SEQ ID NO: 1163961 - RNA, 19 nt, Artificial Sequence
  Description of Artificial Sequence: Synthetic oligonucleotide
agagcuaaaagaaggguuc

SEQ ID NO: 1163962 - RNA, 19 nt, Artificial Sequence
  Description of Artificial Sequence: Synthetic oligonucleotide
agugauacaaucuguccca

SEQ ID NO: 1163963 - RNA, 19 nt, Artificial Sequence
  Description of Artificial Sequence: Synthetic oligonucleotide
gaaggguuccuauuacuag

SEQ ID NO: 1163964 - RNA, 19 nt, Artificial Sequence
  Description of Artificial Sequence: Synthetic oligonucleotide
cuaauaauuuuaucuaaca

SEQ ID NO: 1163965 - RNA, 19 nt, Artificial Sequence
  Description of Artificial Sequence: Synthetic oligonucleotide
agaacuugcuucucaauca

SEQ ID NO: 1163966 - RNA, 19 nt, Artificial Sequence
  Description of Artificial Sequence: Synthetic oligonucleotide
uguucucgaacucgcaaag

SEQ ID NO: 1163967 - RNA, 19 nt, Artificial Sequence
  Description of Artificial Sequence: Synthetic oligonucleotide
ugaugccaaauauagugug

SEQ ID NO: 1163968 - RNA, 19 nt, Artificial Sequence
  Description of Artificial Sequence: Synthetic oligonucleotide
ugugucacguucuuuacaa

SEQ ID NO: 1163969 - RNA, 19 nt, Artificial Sequence
  Description of Artificial Sequence: Synthetic oligonucleotide
aauuacuugugacuucaau

SEQ ID NO: 1163970 - RNA, 19 nt, Artificial Sequence
  Description of Artificial Sequence: Synthetic oligonucleotide
gcuaucaacuuuuaguaag

SEQ ID NO: 1163971 - RNA, 19 nt, Artificial Sequence
  Description of Artificial Sequence: Synthetic oligonucleotide
aggauggucagcaaugugg

SEQ ID NO: 1163972 - RNA, 19 nt, Artificial Sequence
  Description of Artificial Sequence: Synthetic oligonucleotide
aguaguaugggcccaauua

SEQ ID NO: 1163973 - RNA, 19 nt, Artificial Sequence
  Description of Artificial Sequence: Synthetic oligonucleotide
guagauugcagugucuacg

SEQ ID NO: 1163974 - RNA, 19 nt, Artificial Sequence
  Description of Artificial Sequence: Synthetic oligonucleotide
guauuguucaccuuaucuc

SEQ ID NO: 1163975 - RNA, 19 nt, Artificial Sequence
  Description of Artificial Sequence: Synthetic oligonucleotide
uguaccuuugcagucagga

SEQ ID NO: 1163976 - RNA, 19 nt, Artificial Sequence
  Description of Artificial Sequence: Synthetic oligonucleotide
auuagaagaaggaccuggc

SEQ ID NO: 1163977 - RNA, 19 nt, Artificial Sequence
  Description of Artificial Sequence: Synthetic oligonucleotide
aguagauugcagugucuac

SEQ ID NO: 1163978 - RNA, 19 nt, Artificial Sequence
  Description of Artificial Sequence: Synthetic oligonucleotide
guggguaaugaauucguag

SEQ ID NO: 1163979 - RNA, 19 nt, Artificial Sequence
  Description of Artificial Sequence: Synthetic oligonucleotide
gaauuaagggcucuuugga

SEQ ID NO: 1163980 - RNA, 19 nt, Artificial Sequence
  Description of Artificial Sequence: Synthetic oligonucleotide
uugaugccaaauauagugu

SEQ ID NO: 1163981 - RNA, 19 nt, Artificial Sequence
  Description of Artificial Sequence: Synthetic oligonucleotide
aacaauaacccaggaacca

SEQ ID NO: 1163982 - RNA, 19 nt, Artificial Sequence
  Description of Artificial Sequence: Synthetic oligonucleotide
aauauugaugccaaauaua

SEQ ID NO: 1163983 - RNA, 19 nt, Artificial Sequence
  Description of Artificial Sequence: Synthetic oligonucleotide
gucucauuaaucaaauuac

SEQ ID NO: 1163984 - RNA, 19 nt, Artificial Sequence
  Description of Artificial Sequence: Synthetic oligonucleotide
uuucagaucuucagagaug

SEQ ID NO: 1163985 - RNA, 19 nt, Artificial Sequence
  Description of Artificial Sequence: Synthetic oligonucleotide
ugucagaguagauugcagu

SEQ ID NO: 1163986 - RNA, 19 nt, Artificial Sequence
  Description of Artificial Sequence: Synthetic oligonucleotide
ugaugaaaaugcuaauaau

SEQ ID NO: 1163987 - RNA, 19 nt, Artificial Sequence
  Description of Artificial Sequence: Synthetic oligonucleotide
caauauguccccagaaaug

SEQ ID NO: 1163988 - RNA, 19 nt, Artificial Sequence
  Description of Artificial Sequence: Synthetic oligonucleotide
agaagagcuaaaagaaggg

SEQ ID NO: 1163989 - RNA, 19 nt, Artificial Sequence
  Description of Artificial Sequence: Synthetic oligonucleotide
gaaauugagaagggcagug

SEQ ID NO: 1163990 - RNA, 19 nt, Artificial Sequence
  Description of Artificial Sequence: Synthetic oligonucleotide
uuuugugaagcuugugggu

SEQ ID NO: 1163991 - RNA, 19 nt, Artificial Sequence
  Description of Artificial Sequence: Synthetic oligonucleotide
gcaagauggccuuacaucc

SEQ ID NO: 1163992 - RNA, 19 nt, Artificial Sequence
  Description of Artificial Sequence: Synthetic oligonucleotide
aagcuuguggguuauccau

SEQ ID NO: 1163993 - RNA, 19 nt, Artificial Sequence
  Description of Artificial Sequence: Synthetic oligonucleotide
ugaagcuuguggguuaucc

SEQ ID NO: 1163994 - RNA, 19 nt, Artificial Sequence
  Description of Artificial Sequence: Synthetic oligonucleotide
agccaugucaaucuacuga

SEQ ID NO: 1163995 - RNA, 19 nt, Artificial Sequence
  Description of Artificial Sequence: Synthetic oligonucleotide
aaauaugaugaaaaugcua

SEQ ID NO: 1163996 - RNA, 19 nt, Artificial Sequence
  Description of Artificial Sequence: Synthetic oligonucleotide
uaacccuugugucagccac

SEQ ID NO: 1163997 - RNA, 19 nt, Artificial Sequence
  Description of Artificial Sequence: Synthetic oligonucleotide
augccaaauauaguguggg

SEQ ID NO: 1163998 - RNA, 19 nt, Artificial Sequence
  Description of Artificial Sequence: Synthetic oligonucleotide
ucuacgaaguauguuggca

SEQ ID NO: 1163999 - RNA, 19 nt, Artificial Sequence
  Description of Artificial Sequence: Synthetic oligonucleotide
agcaaccacaaguaugcag

SEQ ID NO: 1164000 - RNA, 19 nt, Artificial Sequence
  Description of Artificial Sequence: Synthetic oligonucleotide
agugugucacguucuuuac

SEQ ID NO: 1164001 - RNA, 19 nt, Artificial Sequence
  Description of Artificial Sequence: Synthetic oligonucleotide
gucagaguagauugcagug

SEQ ID NO: 1164002 - RNA, 19 nt, Artificial Sequence
  Description of Artificial Sequence: Synthetic oligonucleotide
gguaguaugcuccaccagc

SEQ ID NO: 1164003 - RNA, 19 nt, Artificial Sequence
  Description of Artificial Sequence: Synthetic oligonucleotide
uuaagggcucuuuggacca

SEQ ID NO: 1164004 - RNA, 19 nt, Artificial Sequence
  Description of Artificial Sequence: Synthetic oligonucleotide
uacgaaguauguuggcaag

SEQ ID NO: 1164005 - RNA, 19 nt, Artificial Sequence
  Description of Artificial Sequence: Synthetic oligonucleotide
uagauugcagugucuacga

SEQ ID NO: 1164006 - RNA, 19 nt, Artificial Sequence
  Description of Artificial Sequence: Synthetic oligonucleotide
uguucugacgacucacaug

SEQ ID NO: 1164007 - RNA, 19 nt, Artificial Sequence
  Description of Artificial Sequence: Synthetic oligonucleotide
auaccccucugauagcuuc

SEQ ID NO: 1164008 - RNA, 19 nt, Artificial Sequence
  Description of Artificial Sequence: Synthetic oligonucleotide
ucuagaacuugcuucucaa

SEQ ID NO: 1164009 - RNA, 19 nt, Artificial Sequence
  Description of Artificial Sequence: Synthetic oligonucleotide
auuguucaccuuaucuccc

SEQ ID NO: 1164010 - RNA, 19 nt, Artificial Sequence
  Description of Artificial Sequence: Synthetic oligonucleotide
uccagagugugucacguuc

SEQ ID NO: 1164011 - RNA, 19 nt, Artificial Sequence
  Description of Artificial Sequence: Synthetic oligonucleotide
gaacucgcaaagcuccucc

SEQ ID NO: 1164012 - RNA, 19 nt, Artificial Sequence
  Description of Artificial Sequence: Synthetic oligonucleotide
agaugaucaucuugcuauc

SEQ ID NO: 1164013 - RNA, 19 nt, Artificial Sequence
  Description of Artificial Sequence: Synthetic oligonucleotide
uuccggcucauaacaaucc

SEQ ID NO: 1164014 - RNA, 19 nt, Artificial Sequence
  Description of Artificial Sequence: Synthetic oligonucleotide
ggguaaugaauucguaggg

SEQ ID NO: 1164015 - RNA, 19 nt, Artificial Sequence
  Description of Artificial Sequence: Synthetic oligonucleotide
acgaaauugagaagggcag

SEQ ID NO: 1164016 - RNA, 19 nt, Artificial Sequence
  Description of Artificial Sequence: Synthetic oligonucleotide
ugauaugucagaguagauu

SEQ ID NO: 1164017 - RNA, 19 nt, Artificial Sequence
  Description of Artificial Sequence: Synthetic oligonucleotide
ugggagaauucacugucga

SEQ ID NO: 1164018 - RNA, 19 nt, Artificial Sequence
  Description of Artificial Sequence: Synthetic oligonucleotide
uuguggguuauccauucuc

SEQ ID NO: 1164019 - RNA, 19 nt, Artificial Sequence
  Description of Artificial Sequence: Synthetic oligonucleotide
uccugauaugucagaguag

SEQ ID NO: 1164020 - RNA, 19 nt, Artificial Sequence
  Description of Artificial Sequence: Synthetic oligonucleotide
ggguuauccauucucgucc

SEQ ID NO: 1164021 - RNA, 19 nt, Artificial Sequence
  Description of Artificial Sequence: Synthetic oligonucleotide
ugaagccaugucaaucuac

SEQ ID NO: 1164022 - RNA, 19 nt, Artificial Sequence
  Description of Artificial Sequence: Synthetic oligonucleotide
caaagcugaugguaugaag

SEQ ID NO: 1164023 - RNA, 19 nt, Artificial Sequence
  Description of Artificial Sequence: Synthetic oligonucleotide
uucucaaucacagcuguau

SEQ ID NO: 1164024 - RNA, 19 nt, Artificial Sequence
  Description of Artificial Sequence: Synthetic oligonucleotide
ucaaucauguguacacuuu

SEQ ID NO: 1164025 - RNA, 19 nt, Artificial Sequence
  Description of Artificial Sequence: Synthetic oligonucleotide
cuggccaauaauauuagaa

SEQ ID NO: 1164026 - RNA, 19 nt, Artificial Sequence
  Description of Artificial Sequence: Synthetic oligonucleotide
ucguccauacugauagaca

SEQ ID NO: 1164027 - RNA, 19 nt, Artificial Sequence
  Description of Artificial Sequence: Synthetic oligonucleotide
aaucauguguacacuuucu

SEQ ID NO: 1164028 - RNA, 19 nt, Artificial Sequence
  Description of Artificial Sequence: Synthetic oligonucleotide
ucugacgacucacaugcau

SEQ ID NO: 1164029 - RNA, 19 nt, Artificial Sequence
  Description of Artificial Sequence: Synthetic oligonucleotide
agcuguauuguucaccuua

SEQ ID NO: 1164030 - RNA, 19 nt, Artificial Sequence
  Description of Artificial Sequence: Synthetic oligonucleotide
guagggcucacuagcaugg

SEQ ID NO: 1164031 - RNA, 19 nt, Artificial Sequence
  Description of Artificial Sequence: Synthetic oligonucleotide
gaaauggcaccgcuccaag

SEQ ID NO: 1164032 - RNA, 19 nt, Artificial Sequence
  Description of Artificial Sequence: Synthetic oligonucleotide
gauagacauuguuggcugc

SEQ ID NO: 1164033 - RNA, 19 nt, Artificial Sequence
  Description of Artificial Sequence: Synthetic oligonucleotide
ucucccaaccagcuguucu

SEQ ID NO: 1164034 - RNA, 19 nt, Artificial Sequence
  Description of Artificial Sequence: Synthetic oligonucleotide
cagaauuaagggcucuuug

SEQ ID NO: 1164035 - RNA, 19 nt, Artificial Sequence
  Description of Artificial Sequence: Synthetic oligonucleotide
agaugucacggaaagcccg

SEQ ID NO: 1164036 - RNA, 19 nt, Artificial Sequence
  Description of Artificial Sequence: Synthetic oligonucleotide
aagccaugucaaucuacug

SEQ ID NO: 1164037 - RNA, 19 nt, Artificial Sequence
  Description of Artificial Sequence: Synthetic oligonucleotide
guaaugaauucguagggcu

SEQ ID NO: 1164038 - RNA, 19 nt, Artificial Sequence
  Description of Artificial Sequence: Synthetic oligonucleotide
ggccaauaauauuagaaga

SEQ ID NO: 1164039 - RNA, 19 nt, Artificial Sequence
  Description of Artificial Sequence: Synthetic oligonucleotide
gaugguaugaagacaauau

SEQ ID NO: 1164040 - RNA, 19 nt, Artificial Sequence
  Description of Artificial Sequence: Synthetic oligonucleotide
caaucauguguacacuuuc

SEQ ID NO: 1164041 - RNA, 19 nt, Artificial Sequence
  Description of Artificial Sequence: Synthetic oligonucleotide
cucgcaaagcuccuccugc

SEQ ID NO: 1164042 - RNA, 19 nt, Artificial Sequence
  Description of Artificial Sequence: Synthetic oligonucleotide
acaggucuagaacggcagg

SEQ ID NO: 1164043 - RNA, 19 nt, Artificial Sequence
  Description of Artificial Sequence: Synthetic oligonucleotide
cuaucaacuuuuaguaaga

SEQ ID NO: 1164044 - RNA, 19 nt, Artificial Sequence
  Description of Artificial Sequence: Synthetic oligonucleotide
uucacugucgagguagaac

SEQ ID NO: 1164045 - RNA, 19 nt, Artificial Sequence
  Description of Artificial Sequence: Synthetic oligonucleotide
uucguagggcucacuagca

SEQ ID NO: 1164046 - RNA, 19 nt, Artificial Sequence
  Description of Artificial Sequence: Synthetic oligonucleotide
guuccuauuacuagcaaaa

SEQ ID NO: 1164047 - RNA, 19 nt, Artificial Sequence
  Description of Artificial Sequence: Synthetic oligonucleotide
ucagguaaggauggccucc

SEQ ID NO: 1164048 - RNA, 19 nt, Artificial Sequence
  Description of Artificial Sequence: Synthetic oligonucleotide
gguacugcugcccaauaug

SEQ ID NO: 1164049 - RNA, 19 nt, Artificial Sequence
  Description of Artificial Sequence: Synthetic oligonucleotide
auuccggcucauaacaauc

SEQ ID NO: 1164050 - RNA, 19 nt, Artificial Sequence
  Description of Artificial Sequence: Synthetic oligonucleotide
cagggaaagcacgaaauug

SEQ ID NO: 1164051 - RNA, 19 nt, Artificial Sequence
  Description of Artificial Sequence: Synthetic oligonucleotide
cacaggucuagaacggcag

SEQ ID NO: 1164052 - RNA, 19 nt, Artificial Sequence
  Description of Artificial Sequence: Synthetic oligonucleotide
ugcuaucaacuuuuaguaa

SEQ ID NO: 1164053 - RNA, 19 nt, Artificial Sequence
  Description of Artificial Sequence: Synthetic oligonucleotide
ucacauuccggcucauaac

SEQ ID NO: 1164054 - RNA, 19 nt, Artificial Sequence
  Description of Artificial Sequence: Synthetic oligonucleotide
auuaucagggaaagcacga

SEQ ID NO: 1164055 - RNA, 19 nt, Artificial Sequence
  Description of Artificial Sequence: Synthetic oligonucleotide
cugggagaauucacugucg

SEQ ID NO: 1164056 - RNA, 19 nt, Artificial Sequence
  Description of Artificial Sequence: Synthetic oligonucleotide
cagaugaucaucuugcuau

SEQ ID NO: 1164057 - RNA, 19 nt, Artificial Sequence
  Description of Artificial Sequence: Synthetic oligonucleotide
cacauuccggcucauaaca

SEQ ID NO: 1164058 - RNA, 19 nt, Artificial Sequence
  Description of Artificial Sequence: Synthetic oligonucleotide
gagugugucacguucuuua

SEQ ID NO: 1164059 - RNA, 19 nt, Artificial Sequence
  Description of Artificial Sequence: Synthetic oligonucleotide
gaagcuuguggguuaucca

SEQ ID NO: 1164060 - RNA, 19 nt, Artificial Sequence
  Description of Artificial Sequence: Synthetic oligonucleotide
agacuggccaauaauauua

SEQ ID NO: 1164061 - RNA, 19 nt, Artificial Sequence
  Description of Artificial Sequence: Synthetic oligonucleotide
gguguggguaaugaauucg

SEQ ID NO: 1164062 - RNA, 19 nt, Artificial Sequence
  Description of Artificial Sequence: Synthetic oligonucleotide
uccagcagacuccuuccca

SEQ ID NO: 1164063 - RNA, 19 nt, Artificial Sequence
  Description of Artificial Sequence: Synthetic oligonucleotide
ggaagcaaccacaaguaug

SEQ ID NO: 1164064 - RNA, 19 nt, Artificial Sequence
  Description of Artificial Sequence: Synthetic oligonucleotide
uccggcucauaacaaucca

SEQ ID NO: 1164065 - RNA, 19 nt, Artificial Sequence
  Description of Artificial Sequence: Synthetic oligonucleotide
gguaaugaauucguagggc

SEQ ID NO: 1164066 - RNA, 19 nt, Artificial Sequence
  Description of Artificial Sequence: Synthetic oligonucleotide
ucgagguagaacuccccac

SEQ ID NO: 1164067 - RNA, 19 nt, Artificial Sequence
  Description of Artificial Sequence: Synthetic oligonucleotide
ugauacaaucugucccaca

SEQ ID NO: 1164068 - RNA, 19 nt, Artificial Sequence
  Description of Artificial Sequence: Synthetic oligonucleotide
aacucgcaaagcuccuccu

SEQ ID NO: 1164069 - RNA, 19 nt, Artificial Sequence
  Description of Artificial Sequence: Synthetic oligonucleotide
gagaugucacggaaagccc

SEQ ID NO: 1164070 - RNA, 19 nt, Artificial Sequence
  Description of Artificial Sequence: Synthetic oligonucleotide
agucagguaaggauggccu

SEQ ID NO: 1164071 - RNA, 19 nt, Artificial Sequence
  Description of Artificial Sequence: Synthetic oligonucleotide
agcacgaaauugagaaggg

SEQ ID NO: 1164072 - RNA, 19 nt, Artificial Sequence
  Description of Artificial Sequence: Synthetic oligonucleotide
uacuugugacuucaaucau

SEQ ID NO: 1164073 - RNA, 19 nt, Artificial Sequence
  Description of Artificial Sequence: Synthetic oligonucleotide
ucaggcuuaucacccacuu

SEQ ID NO: 1164074 - RNA, 19 nt, Artificial Sequence
  Description of Artificial Sequence: Synthetic oligonucleotide
ugacgacucacaugcauuu

SEQ ID NO: 1164075 - RNA, 19 nt, Artificial Sequence
  Description of Artificial Sequence: Synthetic oligonucleotide
uaagccagucagguaagga

SEQ ID NO: 1164076 - RNA, 19 nt, Artificial Sequence
  Description of Artificial Sequence: Synthetic oligonucleotide
ugggcccaauuauugcucc

SEQ ID NO: 1164077 - RNA, 19 nt, Artificial Sequence
  Description of Artificial Sequence: Synthetic oligonucleotide
cugucgagguagaacuccc

SEQ ID NO: 1164078 - RNA, 19 nt, Artificial Sequence
  Description of Artificial Sequence: Synthetic oligonucleotide
gaugucacggaaagcccgc

SEQ ID NO: 1164079 - RNA, 19 nt, Artificial Sequence
  Description of Artificial Sequence: Synthetic oligonucleotide
caaccacaaguaugcagag

SEQ ID NO: 1164080 - RNA, 19 nt, Artificial Sequence
  Description of Artificial Sequence: Synthetic oligonucleotide
aaaccaagagugauacaau

SEQ ID NO: 1164081 - RNA, 19 nt, Artificial Sequence
  Description of Artificial Sequence: Synthetic oligonucleotide
uaucaacuuuuaguaagaa

SEQ ID NO: 1164082 - RNA, 19 nt, Artificial Sequence
  Description of Artificial Sequence: Synthetic oligonucleotide
aggagcaagauggccuuac

SEQ ID NO: 1164083 - RNA, 19 nt, Artificial Sequence
  Description of Artificial Sequence: Synthetic oligonucleotide
ccaaauauaguguggguca

SEQ ID NO: 1164084 - RNA, 19 nt, Artificial Sequence
  Description of Artificial Sequence: Synthetic oligonucleotide
cuacgaaguauguuggcaa

SEQ ID NO: 1164085 - RNA, 19 nt, Artificial Sequence
  Description of Artificial Sequence: Synthetic oligonucleotide
cucguccauacugauagac

SEQ ID NO: 1164086 - RNA, 19 nt, Artificial Sequence
  Description of Artificial Sequence: Synthetic oligonucleotide
cauccuaacccuuguguca

SEQ ID NO: 1164087 - RNA, 19 nt, Artificial Sequence
  Description of Artificial Sequence: Synthetic oligonucleotide
guacacuuucuugauguac

SEQ ID NO: 1164088 - RNA, 19 nt, Artificial Sequence
  Description of Artificial Sequence: Synthetic oligonucleotide
gacaauauugaugccaaau

SEQ ID NO: 1164089 - RNA, 19 nt, Artificial Sequence
  Description of Artificial Sequence: Synthetic oligonucleotide
cuccugauaugucagagua

SEQ ID NO: 1164090 - RNA, 19 nt, Artificial Sequence
  Description of Artificial Sequence: Synthetic oligonucleotide
uagacauuguuggcugcag

SEQ ID NO: 1164091 - RNA, 19 nt, Artificial Sequence
  Description of Artificial Sequence: Synthetic oligonucleotide
ugccaaauauagugugggu

SEQ ID NO: 1164092 - RNA, 19 nt, Artificial Sequence
  Description of Artificial Sequence: Synthetic oligonucleotide
acuggcuuguaguacucau

SEQ ID NO: 1164093 - RNA, 19 nt, Artificial Sequence
  Description of Artificial Sequence: Synthetic oligonucleotide
accgcuaagccagucaggu

SEQ ID NO: 1164094 - RNA, 19 nt, Artificial Sequence
  Description of Artificial Sequence: Synthetic oligonucleotide
agguaguaugcuccaccag

SEQ ID NO: 1164095 - RNA, 19 nt, Artificial Sequence
  Description of Artificial Sequence: Synthetic oligonucleotide
ugcccaauauguccccaga

SEQ ID NO: 1164096 - RNA, 19 nt, Artificial Sequence
  Description of Artificial Sequence: Synthetic oligonucleotide
aggcccagguaguaugcuc

SEQ ID NO: 1164097 - RNA, 19 nt, Artificial Sequence
  Description of Artificial Sequence: Synthetic oligonucleotide
ucgcaaagcuccuccugcc

SEQ ID NO: 1164098 - RNA, 19 nt, Artificial Sequence
  Description of Artificial Sequence: Synthetic oligonucleotide
cucacauuccggcucauaa

SEQ ID NO: 1164099 - RNA, 19 nt, Artificial Sequence
  Description of Artificial Sequence: Synthetic oligonucleotide
cagauaaaacagugugguc

SEQ ID NO: 1164100 - RNA, 19 nt, Artificial Sequence
  Description of Artificial Sequence: Synthetic oligonucleotide
acucgcaaagcuccuccug

SEQ ID NO: 1164101 - RNA, 19 nt, Artificial Sequence
  Description of Artificial Sequence: Synthetic oligonucleotide
acaauccauagaagccagc

SEQ ID NO: 1164102 - RNA, 19 nt, Artificial Sequence
  Description of Artificial Sequence: Synthetic oligonucleotide
cugccuaccagacacagcu

SEQ ID NO: 1164103 - RNA, 19 nt, Artificial Sequence
  Description of Artificial Sequence: Synthetic oligonucleotide
ccagguguacaauccauag

SEQ ID NO: 1164104 - RNA, 19 nt, Artificial Sequence
  Description of Artificial Sequence: Synthetic oligonucleotide
uuauccauucucguccaua

SEQ ID NO: 1164105 - RNA, 19 nt, Artificial Sequence
  Description of Artificial Sequence: Synthetic oligonucleotide
ccaauuugcccacucuggg

SEQ ID NO: 1164106 - RNA, 19 nt, Artificial Sequence
  Description of Artificial Sequence: Synthetic oligonucleotide
gucuacgaaguauguuggc

SEQ ID NO: 1164107 - RNA, 19 nt, Artificial Sequence
  Description of Artificial Sequence: Synthetic oligonucleotide
ugauuugguguggguaaug

SEQ ID NO: 1164108 - RNA, 19 nt, Artificial Sequence
  Description of Artificial Sequence: Synthetic oligonucleotide
cagcaagcucacauuccgg

SEQ ID NO: 1164109 - RNA, 19 nt, Artificial Sequence
  Description of Artificial Sequence: Synthetic oligonucleotide
cccucugauagcuucuucc

SEQ ID NO: 1164110 - RNA, 19 nt, Artificial Sequence
  Description of Artificial Sequence: Synthetic oligonucleotide
gaagccaugucaaucuacu

SEQ ID NO: 1164111 - RNA, 19 nt, Artificial Sequence
  Description of Artificial Sequence: Synthetic oligonucleotide
agcagugaagccaugucaa

SEQ ID NO: 1164112 - RNA, 19 nt, Artificial Sequence
  Description of Artificial Sequence: Synthetic oligonucleotide
gucacggaaagcccgcuga

SEQ ID NO: 1164113 - RNA, 19 nt, Artificial Sequence
  Description of Artificial Sequence: Synthetic oligonucleotide
gugugggucagccaggugu

SEQ ID NO: 1164114 - RNA, 19 nt, Artificial Sequence
  Description of Artificial Sequence: Synthetic oligonucleotide
cuggcuuguaguacucauc

SEQ ID NO: 1164115 - RNA, 19 nt, Artificial Sequence
  Description of Artificial Sequence: Synthetic oligonucleotide
gcauuuugugcccuuugug

SEQ ID NO: 1164116 - RNA, 19 nt, Artificial Sequence
  Description of Artificial Sequence: Synthetic oligonucleotide
augaauucguagggcucac

SEQ ID NO: 1164117 - RNA, 19 nt, Artificial Sequence
  Description of Artificial Sequence: Synthetic oligonucleotide
ugauuugcuagggucucau

SEQ ID NO: 1164118 - RNA, 19 nt, Artificial Sequence
  Description of Artificial Sequence: Synthetic oligonucleotide
uuuggaccaccugagccuc

SEQ ID NO: 1164119 - RNA, 19 nt, Artificial Sequence
  Description of Artificial Sequence: Synthetic oligonucleotide
augggcccaauuauugcuc

SEQ ID NO: 1164120 - RNA, 19 nt, Artificial Sequence
  Description of Artificial Sequence: Synthetic oligonucleotide
guaguaugggcccaauuau

SEQ ID NO: 1164121 - RNA, 19 nt, Artificial Sequence
  Description of Artificial Sequence: Synthetic oligonucleotide
gucgagguagaacucccca

SEQ ID NO: 1164122 - RNA, 19 nt, Artificial Sequence
  Description of Artificial Sequence: Synthetic oligonucleotide
cagugaagccaugucaauc

SEQ ID NO: 1164123 - RNA, 19 nt, Artificial Sequence
  Description of Artificial Sequence: Synthetic oligonucleotide
cagguaguaugcuccacca

SEQ ID NO: 1164124 - RNA, 19 nt, Artificial Sequence
  Description of Artificial Sequence: Synthetic oligonucleotide
acaaguaugcagaguagua

SEQ ID NO: 1164125 - RNA, 19 nt, Artificial Sequence
  Description of Artificial Sequence: Synthetic oligonucleotide
ucgaacucgcaaagcuccu

SEQ ID NO: 1164126 - RNA, 19 nt, Artificial Sequence
  Description of Artificial Sequence: Synthetic oligonucleotide
caccuuaucucccagaauu

SEQ ID NO: 1164127 - RNA, 19 nt, Artificial Sequence
  Description of Artificial Sequence: Synthetic oligonucleotide
auggcacuguagauauugg

SEQ ID NO: 1164128 - RNA, 19 nt, Artificial Sequence
  Description of Artificial Sequence: Synthetic oligonucleotide
cuaagccagucagguaagg

SEQ ID NO: 1164129 - RNA, 19 nt, Artificial Sequence
  Description of Artificial Sequence: Synthetic oligonucleotide
gggagaauucacugucgag

SEQ ID NO: 1164130 - RNA, 19 nt, Artificial Sequence
  Description of Artificial Sequence: Synthetic oligonucleotide
ucacuagcauggcacugua

SEQ ID NO: 1164131 - RNA, 19 nt, Artificial Sequence
  Description of Artificial Sequence: Synthetic oligonucleotide
gccaaauauaguguggguc

SEQ ID NO: 1164132 - RNA, 19 nt, Artificial Sequence
  Description of Artificial Sequence: Synthetic oligonucleotide
ccacaguucuagaacuugc

SEQ ID NO: 1164133 - RNA, 19 nt, Artificial Sequence
  Description of Artificial Sequence: Synthetic oligonucleotide
ccauuuugagggaagcauc

SEQ ID NO: 1164134 - RNA, 19 nt, Artificial Sequence
  Description of Artificial Sequence: Synthetic oligonucleotide
cauacugauagacauuguu

SEQ ID NO: 1164135 - RNA, 19 nt, Artificial Sequence
  Description of Artificial Sequence: Synthetic oligonucleotide
cugcccaauauguccccag

SEQ ID NO: 1164136 - RNA, 19 nt, Artificial Sequence
  Description of Artificial Sequence: Synthetic oligonucleotide
gccaugucaaucuacugaa

SEQ ID NO: 1164137 - RNA, 19 nt, Artificial Sequence
  Description of Artificial Sequence: Synthetic oligonucleotide
cuuuggaccaccugagccu

SEQ ID NO: 1164138 - RNA, 19 nt, Artificial Sequence
  Description of Artificial Sequence: Synthetic oligonucleotide
gggacuccaaauaucuccc

SEQ ID NO: 1164139 - RNA, 19 nt, Artificial Sequence
  Description of Artificial Sequence: Synthetic oligonucleotide
cuguucucgaacucgcaaa

SEQ ID NO: 1164140 - RNA, 19 nt, Artificial Sequence
  Description of Artificial Sequence: Synthetic oligonucleotide
cucugccuaccagacacag

SEQ ID NO: 1164141 - RNA, 19 nt, Artificial Sequence
  Description of Artificial Sequence: Synthetic oligonucleotide
ccagguaguaugcuccacc

SEQ ID NO: 1164142 - RNA, 19 nt, Artificial Sequence
  Description of Artificial Sequence: Synthetic oligonucleotide
aggguuccuauuacuagca

SEQ ID NO: 1164143 - RNA, 19 nt, Artificial Sequence
  Description of Artificial Sequence: Synthetic oligonucleotide
acgaaguauguuggcaaga

SEQ ID NO: 1164144 - RNA, 19 nt, Artificial Sequence
  Description of Artificial Sequence: Synthetic oligonucleotide
ccuuacauccuaacccuug

SEQ ID NO: 1164145 - RNA, 19 nt, Artificial Sequence
  Description of Artificial Sequence: Synthetic oligonucleotide
acauuguuggcugcagaau

SEQ ID NO: 1164146 - RNA, 19 nt, Artificial Sequence
  Description of Artificial Sequence: Synthetic oligonucleotide
gucagguaaggauggccuc

SEQ ID NO: 1164147 - RNA, 19 nt, Artificial Sequence
  Description of Artificial Sequence: Synthetic oligonucleotide
cccaauuauugcuccuucc

SEQ ID NO: 1164148 - RNA, 19 nt, Artificial Sequence
  Description of Artificial Sequence: Synthetic oligonucleotide
gggauucuccaugagccag

SEQ ID NO: 1164149 - RNA, 19 nt, Artificial Sequence
  Description of Artificial Sequence: Synthetic oligonucleotide
agugucuacgaaguauguu

SEQ ID NO: 1164150 - RNA, 19 nt, Artificial Sequence
  Description of Artificial Sequence: Synthetic oligonucleotide
ugccuaccagacacagcug

SEQ ID NO: 1164151 - RNA, 19 nt, Artificial Sequence
  Description of Artificial Sequence: Synthetic oligonucleotide
cacggaaagcccgcugagg

SEQ ID NO: 1164152 - RNA, 19 nt, Artificial Sequence
  Description of Artificial Sequence: Synthetic oligonucleotide
guaguacucaucacuggaa

SEQ ID NO: 1164153 - RNA, 19 nt, Artificial Sequence
  Description of Artificial Sequence: Synthetic oligonucleotide
guucucgaacucgcaaagc

SEQ ID NO: 1164154 - RNA, 19 nt, Artificial Sequence
  Description of Artificial Sequence: Synthetic oligonucleotide
cacuagcauggcacuguag

SEQ ID NO: 1164155 - RNA, 19 nt, Artificial Sequence
  Description of Artificial Sequence: Synthetic oligonucleotide
ccaauuauugcuccuucca

SEQ ID NO: 1164156 - RNA, 19 nt, Artificial Sequence
  Description of Artificial Sequence: Synthetic oligonucleotide
agggucucauuaaucaaau

SEQ ID NO: 1164157 - RNA, 19 nt, Artificial Sequence
  Description of Artificial Sequence: Synthetic oligonucleotide
ggcacuguagauauuggaa

SEQ ID NO: 1164158 - RNA, 19 nt, Artificial Sequence
  Description of Artificial Sequence: Synthetic oligonucleotide
agaauucacugucgaggua

SEQ ID NO: 1164159 - RNA, 19 nt, Artificial Sequence
  Description of Artificial Sequence: Synthetic oligonucleotide
cagguguacaauccauaga

SEQ ID NO: 1164160 - RNA, 19 nt, Artificial Sequence
  Description of Artificial Sequence: Synthetic oligonucleotide
cuguauuguucaccuuauc

SEQ ID NO: 1164161 - RNA, 19 nt, Artificial Sequence
  Description of Artificial Sequence: Synthetic oligonucleotide
uucugacgacucacaugca

SEQ ID NO: 1164162 - RNA, 19 nt, Artificial Sequence
  Description of Artificial Sequence: Synthetic oligonucleotide
agccauuuugagggaagca

SEQ ID NO: 1164163 - RNA, 19 nt, Artificial Sequence
  Description of Artificial Sequence: Synthetic oligonucleotide
ucucguccauacugauaga

SEQ ID NO: 1164164 - RNA, 19 nt, Artificial Sequence
  Description of Artificial Sequence: Synthetic oligonucleotide
augacuucagucagaugau

SEQ ID NO: 1164165 - RNA, 19 nt, Artificial Sequence
  Description of Artificial Sequence: Synthetic oligonucleotide
ccuugugucagccacaggu

SEQ ID NO: 1164166 - RNA, 19 nt, Artificial Sequence
  Description of Artificial Sequence: Synthetic oligonucleotide
ucccaaccagcuguucuga

SEQ ID NO: 1164167 - RNA, 19 nt, Artificial Sequence
  Description of Artificial Sequence: Synthetic oligonucleotide
agaguagauugcagugucu

SEQ ID NO: 1164168 - RNA, 19 nt, Artificial Sequence
  Description of Artificial Sequence: Synthetic oligonucleotide
ugaauucguagggcucacu

SEQ ID NO: 1164169 - RNA, 19 nt, Artificial Sequence
  Description of Artificial Sequence: Synthetic oligonucleotide
gguuauccauucucgucca

SEQ ID NO: 1164170 - RNA, 19 nt, Artificial Sequence
  Description of Artificial Sequence: Synthetic oligonucleotide
cagacaucaggaaaacaau

SEQ ID NO: 1164171 - RNA, 19 nt, Artificial Sequence
  Description of Artificial Sequence: Synthetic oligonucleotide
auggcaccgcuccaaggau

SEQ ID NO: 1164172 - RNA, 19 nt, Artificial Sequence
  Description of Artificial Sequence: Synthetic oligonucleotide
ugccuuccagaguguguca

SEQ ID NO: 1164173 - RNA, 19 nt, Artificial Sequence
  Description of Artificial Sequence: Synthetic oligonucleotide
cacugucgagguagaacuc

SEQ ID NO: 1164174 - RNA, 19 nt, Artificial Sequence
  Description of Artificial Sequence: Synthetic oligonucleotide
cuaccagacacagcugaca

SEQ ID NO: 1164175 - RNA, 19 nt, Artificial Sequence
  Description of Artificial Sequence: Synthetic oligonucleotide
cauuguuggcugcagaauu

SEQ ID NO: 1164176 - RNA, 19 nt, Artificial Sequence
  Description of Artificial Sequence: Synthetic oligonucleotide
cuaacccuugugucagcca

SEQ ID NO: 1164177 - RNA, 19 nt, Artificial Sequence
  Description of Artificial Sequence: Synthetic oligonucleotide
ccacaaguaugcagaguag

SEQ ID NO: 1164178 - RNA, 19 nt, Artificial Sequence
  Description of Artificial Sequence: Synthetic oligonucleotide
ugacuucagucagaugauu

SEQ ID NO: 1164179 - RNA, 19 nt, Artificial Sequence
  Description of Artificial Sequence: Synthetic oligonucleotide
aacccuugugucagccaca

SEQ ID NO: 1164180 - RNA, 19 nt, Artificial Sequence
  Description of Artificial Sequence: Synthetic oligonucleotide
cuguagauauuggaagcaa

SEQ ID NO: 1164181 - RNA, 19 nt, Artificial Sequence
  Description of Artificial Sequence: Synthetic oligonucleotide
gccuaccagacacagcuga

SEQ ID NO: 1164182 - RNA, 19 nt, Artificial Sequence
  Description of Artificial Sequence: Synthetic oligonucleotide
gugauacaaucugucccac

SEQ ID NO: 1164183 - RNA, 19 nt, Artificial Sequence
  Description of Artificial Sequence: Synthetic oligonucleotide
ugugcccuuugugccuucc

SEQ ID NO: 1164184 - RNA, 19 nt, Artificial Sequence
  Description of Artificial Sequence: Synthetic oligonucleotide
aauaccccucugauagcuu

SEQ ID NO: 1164185 - RNA, 19 nt, Artificial Sequence
  Description of Artificial Sequence: Synthetic oligonucleotide
gggcucacuagcauggcac

SEQ ID NO: 1164186 - RNA, 19 nt, Artificial Sequence
  Description of Artificial Sequence: Synthetic oligonucleotide
uggcaccgcuccaaggauu

SEQ ID NO: 1164187 - RNA, 19 nt, Artificial Sequence
  Description of Artificial Sequence: Synthetic oligonucleotide
cgaaguauguuggcaagag

SEQ ID NO: 1164188 - RNA, 19 nt, Artificial Sequence
  Description of Artificial Sequence: Synthetic oligonucleotide
cuggaacuuaacagauaaa

SEQ ID NO: 1164189 - RNA, 19 nt, Artificial Sequence
  Description of Artificial Sequence: Synthetic oligonucleotide
uccccagaaauggcaccgc

SEQ ID NO: 1164190 - RNA, 19 nt, Artificial Sequence
  Description of Artificial Sequence: Synthetic oligonucleotide
cacaaguaugcagaguagu

SEQ ID NO: 1164191 - RNA, 19 nt, Artificial Sequence
  Description of Artificial Sequence: Synthetic oligonucleotide
caauuugcccacucugggu

SEQ ID NO: 1164192 - RNA, 19 nt, Artificial Sequence
  Description of Artificial Sequence: Synthetic oligonucleotide
guacucaucacuggaacuu

SEQ ID NO: 1164193 - RNA, 19 nt, Artificial Sequence
  Description of Artificial Sequence: Synthetic oligonucleotide
gcacgaaauugagaagggc

SEQ ID NO: 1164194 - RNA, 19 nt, Artificial Sequence
  Description of Artificial Sequence: Synthetic oligonucleotide
gcaaagcuccuccugccuc

SEQ ID NO: 1164195 - RNA, 19 nt, Artificial Sequence
  Description of Artificial Sequence: Synthetic oligonucleotide
ccggcucauaacaauccac

SEQ ID NO: 1164196 - RNA, 19 nt, Artificial Sequence
  Description of Artificial Sequence: Synthetic oligonucleotide
ggugauuugcuagggucuc

SEQ ID NO: 1164197 - RNA, 19 nt, Artificial Sequence
  Description of Artificial Sequence: Synthetic oligonucleotide
guggguuauccauucucgu

SEQ ID NO: 1164198 - RNA, 19 nt, Artificial Sequence
  Description of Artificial Sequence: Synthetic oligonucleotide
gcuguucucgaacucgcaa

SEQ ID NO: 1164199 - RNA, 19 nt, Artificial Sequence
  Description of Artificial Sequence: Synthetic oligonucleotide
uagggcucacuagcauggc

SEQ ID NO: 1164200 - RNA, 19 nt, Artificial Sequence
  Description of Artificial Sequence: Synthetic oligonucleotide
gcaaugugguaacaguggu

SEQ ID NO: 1164201 - RNA, 19 nt, Artificial Sequence
  Description of Artificial Sequence: Synthetic oligonucleotide
gugucaggcuuaucaccca

SEQ ID NO: 1164202 - RNA, 19 nt, Artificial Sequence
  Description of Artificial Sequence: Synthetic oligonucleotide
cacccacuucacuggcuug

SEQ ID NO: 1164203 - RNA, 19 nt, Artificial Sequence
  Description of Artificial Sequence: Synthetic oligonucleotide
gcaagagaugaaagaccag

SEQ ID NO: 1164204 - RNA, 19 nt, Artificial Sequence
  Description of Artificial Sequence: Synthetic oligonucleotide
gcuaagccagucagguaag

SEQ ID NO: 1164205 - RNA, 19 nt, Artificial Sequence
  Description of Artificial Sequence: Synthetic oligonucleotide
aaagcccgcugaggcugag

SEQ ID NO: 1164206 - RNA, 19 nt, Artificial Sequence
  Description of Artificial Sequence: Synthetic oligonucleotide
accuuaucucccagaauuu

SEQ ID NO: 1164207 - RNA, 19 nt, Artificial Sequence
  Description of Artificial Sequence: Synthetic oligonucleotide
guguggguaaugaauucgu

SEQ ID NO: 1164208 - RNA, 19 nt, Artificial Sequence
  Description of Artificial Sequence: Synthetic oligonucleotide
uuugcccacucugggugau

SEQ ID NO: 1164209 - RNA, 19 nt, Artificial Sequence
  Description of Artificial Sequence: Synthetic oligonucleotide
auguaccuuugcagucagg

SEQ ID NO: 1164210 - RNA, 19 nt, Artificial Sequence
  Description of Artificial Sequence: Synthetic oligonucleotide
ccauucucguccauacuga

SEQ ID NO: 1164211 - RNA, 19 nt, Artificial Sequence
  Description of Artificial Sequence: Synthetic oligonucleotide
caagauggccuuacauccu

SEQ ID NO: 1164212 - RNA, 19 nt, Artificial Sequence
  Description of Artificial Sequence: Synthetic oligonucleotide
uggcugagacagugguguc

SEQ ID NO: 1164213 - RNA, 19 nt, Artificial Sequence
  Description of Artificial Sequence: Synthetic oligonucleotide
cacucugggugauuugcua

SEQ ID NO: 1164214 - RNA, 19 nt, Artificial Sequence
  Description of Artificial Sequence: Synthetic oligonucleotide
ccaauauguccccagaaau

SEQ ID NO: 1164215 - RNA, 19 nt, Artificial Sequence
  Description of Artificial Sequence: Synthetic oligonucleotide
cgcuaagccagucagguaa

SEQ ID NO: 1164216 - RNA, 19 nt, Artificial Sequence
  Description of Artificial Sequence: Synthetic oligonucleotide
agagugugucacguucuuu

SEQ ID NO: 1164217 - RNA, 19 nt, Artificial Sequence
  Description of Artificial Sequence: Synthetic oligonucleotide
agcuuguggguuauccauu

SEQ ID NO: 1164218 - RNA, 19 nt, Artificial Sequence
  Description of Artificial Sequence: Synthetic oligonucleotide
cugacgacucacaugcauu

SEQ ID NO: 1164219 - RNA, 19 nt, Artificial Sequence
  Description of Artificial Sequence: Synthetic oligonucleotide
gcccaauuauugcuccuuc

SEQ ID NO: 1164220 - RNA, 19 nt, Artificial Sequence
  Description of Artificial Sequence: Synthetic oligonucleotide
ccacuggggauucuccaug

SEQ ID NO: 1164221 - RNA, 19 nt, Artificial Sequence
  Description of Artificial Sequence: Synthetic oligonucleotide
agaguaguaugggcccaau

SEQ ID NO: 1164222 - RNA, 19 nt, Artificial Sequence
  Description of Artificial Sequence: Synthetic oligonucleotide
cacaugacuucagucagau

SEQ ID NO: 1164223 - RNA, 19 nt, Artificial Sequence
  Description of Artificial Sequence: Synthetic oligonucleotide
cucacuagcauggcacugu

SEQ ID NO: 1164224 - RNA, 19 nt, Artificial Sequence
  Description of Artificial Sequence: Synthetic oligonucleotide
ggacuccaaauaucuccca

SEQ ID NO: 1164225 - RNA, 19 nt, Artificial Sequence
  Description of Artificial Sequence: Synthetic oligonucleotide
cagacuggccaauaauauu

SEQ ID NO: 1164226 - RNA, 19 nt, Artificial Sequence
  Description of Artificial Sequence: Synthetic oligonucleotide
gugauuugcuagggucuca

SEQ ID NO: 1164227 - RNA, 19 nt, Artificial Sequence
  Description of Artificial Sequence: Synthetic oligonucleotide
augucacggaaagcccgcu

SEQ ID NO: 1164228 - RNA, 19 nt, Artificial Sequence
  Description of Artificial Sequence: Synthetic oligonucleotide
gaguaguaugggcccaauu

SEQ ID NO: 1164229 - RNA, 19 nt, Artificial Sequence
  Description of Artificial Sequence: Synthetic oligonucleotide
gaaagcccgcugaggcuga

SEQ ID NO: 1164230 - RNA, 19 nt, Artificial Sequence
  Description of Artificial Sequence: Synthetic oligonucleotide
gcccuuugugccuuccaga

SEQ ID NO: 1164231 - RNA, 19 nt, Artificial Sequence
  Description of Artificial Sequence: Synthetic oligonucleotide
ccacaggucuagaacggca

SEQ ID NO: 1164232 - RNA, 19 nt, Artificial Sequence
  Description of Artificial Sequence: Synthetic oligonucleotide
cagugucuacgaaguaugu

SEQ ID NO: 1164233 - RNA, 19 nt, Artificial Sequence
  Description of Artificial Sequence: Synthetic oligonucleotide
gccauuuugagggaagcau

SEQ ID NO: 1164234 - RNA, 19 nt, Artificial Sequence
  Description of Artificial Sequence: Synthetic oligonucleotide
gcucacuagcauggcacug

SEQ ID NO: 1164235 - RNA, 19 nt, Artificial Sequence
  Description of Artificial Sequence: Synthetic oligonucleotide
gcccaauauguccccagaa

SEQ ID NO: 1164236 - RNA, 19 nt, Artificial Sequence
  Description of Artificial Sequence: Synthetic oligonucleotide
cuguucugacgacucacau

SEQ ID NO: 1164237 - RNA, 19 nt, Artificial Sequence
  Description of Artificial Sequence: Synthetic oligonucleotide
cgagguagaacuccccaca

SEQ ID NO: 1164238 - RNA, 19 nt, Artificial Sequence
  Description of Artificial Sequence: Synthetic oligonucleotide
gggugauuugcuagggucu

SEQ ID NO: 1164239 - RNA, 19 nt, Artificial Sequence
  Description of Artificial Sequence: Synthetic oligonucleotide
caggucuagaacggcaggu

SEQ ID NO: 1164240 - RNA, 19 nt, Artificial Sequence
  Description of Artificial Sequence: Synthetic oligonucleotide
gguaaacagcaagcucaca

SEQ ID NO: 1164241 - RNA, 19 nt, Artificial Sequence
  Description of Artificial Sequence: Synthetic oligonucleotide
cacuggcuuguaguacuca

SEQ ID NO: 1164242 - RNA, 19 nt, Artificial Sequence
  Description of Artificial Sequence: Synthetic oligonucleotide
ggguuccuauuacuagcaa

SEQ ID NO: 1164243 - RNA, 19 nt, Artificial Sequence
  Description of Artificial Sequence: Synthetic oligonucleotide
cagaguaguaugggcccaa

SEQ ID NO: 1164244 - RNA, 19 nt, Artificial Sequence
  Description of Artificial Sequence: Synthetic oligonucleotide
ggcucacuagcauggcacu

SEQ ID NO: 1164245 - RNA, 19 nt, Artificial Sequence
  Description of Artificial Sequence: Synthetic oligonucleotide
guuauccauucucguccau

SEQ ID NO: 1164246 - RNA, 19 nt, Artificial Sequence
  Description of Artificial Sequence: Synthetic oligonucleotide
ccagucagguaaggauggc

SEQ ID NO: 1164247 - RNA, 19 nt, Artificial Sequence
  Description of Artificial Sequence: Synthetic oligonucleotide
accccucugauagcuucuu

SEQ ID NO: 1164248 - RNA, 19 nt, Artificial Sequence
  Description of Artificial Sequence: Synthetic oligonucleotide
gcccagguaguaugcucca

SEQ ID NO: 1164249 - RNA, 19 nt, Artificial Sequence
  Description of Artificial Sequence: Synthetic oligonucleotide
gcuguauuguucaccuuau

SEQ ID NO: 1164250 - RNA, 19 nt, Artificial Sequence
  Description of Artificial Sequence: Synthetic oligonucleotide
guccauacugauagacauu

SEQ ID NO: 1164251 - RNA, 19 nt, Artificial Sequence
  Description of Artificial Sequence: Synthetic oligonucleotide
ccagagugugucacguucu

SEQ ID NO: 1164252 - RNA, 19 nt, Artificial Sequence
  Description of Artificial Sequence: Synthetic oligonucleotide
caccgcuccaaggauugcu

SEQ ID NO: 1164253 - RNA, 19 nt, Artificial Sequence
  Description of Artificial Sequence: Synthetic oligonucleotide
cagagugugucacguucuu

SEQ ID NO: 1164254 - RNA, 19 nt, Artificial Sequence
  Description of Artificial Sequence: Synthetic oligonucleotide
ccuccugauaugucagagu

SEQ ID NO: 1164255 - RNA, 19 nt, Artificial Sequence
  Description of Artificial Sequence: Synthetic oligonucleotide
gcugcccaauaugucccca

SEQ ID NO: 1164256 - RNA, 19 nt, Artificial Sequence
  Description of Artificial Sequence: Synthetic oligonucleotide
caggccacggugucugauu

SEQ ID NO: 1164257 - RNA, 19 nt, Artificial Sequence
  Description of Artificial Sequence: Synthetic oligonucleotide
ccacagggacuccaaauau

SEQ ID NO: 1164258 - RNA, 19 nt, Artificial Sequence
  Description of Artificial Sequence: Synthetic oligonucleotide
uugcccacucugggugauu

SEQ ID NO: 1164259 - RNA, 19 nt, Artificial Sequence
  Description of Artificial Sequence: Synthetic oligonucleotide
gggucucauuaaucaaauu

SEQ ID NO: 1164260 - RNA, 19 nt, Artificial Sequence
  Description of Artificial Sequence: Synthetic oligonucleotide
gggcccaauuauugcuccu

SEQ ID NO: 1164261 - RNA, 19 nt, Artificial Sequence
  Description of Artificial Sequence: Synthetic oligonucleotide
cagcagacuccuucccauu

SEQ ID NO: 1164262 - RNA, 19 nt, Artificial Sequence
  Description of Artificial Sequence: Synthetic oligonucleotide
ggcccaauuauugcuccuu

SEQ ID NO: 1164263 - RNA, 19 nt, Artificial Sequence
  Description of Artificial Sequence: Synthetic oligonucleotide
gcagguacugcugcccaau

SEQ ID NO: 1164264 - RNA, 19 nt, Artificial Sequence
  Description of Artificial Sequence: Synthetic oligonucleotide
caggagcaagauggccuua

SEQ ID NO: 1164265 - RNA, 19 nt, Artificial Sequence
  Description of Artificial Sequence: Synthetic oligonucleotide
ggaagccaauuugcccacu

SEQ ID NO: 1164266 - RNA, 19 nt, Artificial Sequence
  Description of Artificial Sequence: Synthetic oligonucleotide
ccccagaaauggcaccgcu

SEQ ID NO: 1164267 - RNA, 19 nt, Artificial Sequence
  Description of Artificial Sequence: Synthetic oligonucleotide
cggaaagcccgcugaggcu

SEQ ID NO: 1164268 - RNA, 19 nt, Artificial Sequence
  Description of Artificial Sequence: Synthetic oligonucleotide
gccuuacauccuaacccuu

SEQ ID NO: 1164269 - RNA, 19 nt, Artificial Sequence
  Description of Artificial Sequence: Synthetic oligonucleotide
uagaacggcaucaugaacg

SEQ ID NO: 1164270 - RNA, 19 nt, Artificial Sequence
  Description of Artificial Sequence: Synthetic oligonucleotide
uuaaauaaccaucuccuug

SEQ ID NO: 1164271 - RNA, 19 nt, Artificial Sequence
  Description of Artificial Sequence: Synthetic oligonucleotide
aaucuuagugcauccaggg

SEQ ID NO: 1164272 - RNA, 19 nt, Artificial Sequence
  Description of Artificial Sequence: Synthetic oligonucleotide
uaugggguaagguagacag

SEQ ID NO: 1164273 - RNA, 19 nt, Artificial Sequence
  Description of Artificial Sequence: Synthetic oligonucleotide
uuagacagaaagaugacac

SEQ ID NO: 1164274 - RNA, 19 nt, Artificial Sequence
  Description of Artificial Sequence: Synthetic oligonucleotide
aaugaaauuggcaccaaac

SEQ ID NO: 1164275 - RNA, 19 nt, Artificial Sequence
  Description of Artificial Sequence: Synthetic oligonucleotide
uguaaggguacccauaggc

SEQ ID NO: 1164276 - RNA, 19 nt, Artificial Sequence
  Description of Artificial Sequence: Synthetic oligonucleotide
uuuacuguuucacaguugu

SEQ ID NO: 1164277 - RNA, 19 nt, Artificial Sequence
  Description of Artificial Sequence: Synthetic oligonucleotide
ucauaggacauuaggaugc

SEQ ID NO: 1164278 - RNA, 19 nt, Artificial Sequence
  Description of Artificial Sequence: Synthetic oligonucleotide
accaggaccaaacaagagc

SEQ ID NO: 1164279 - RNA, 19 nt, Artificial Sequence
  Description of Artificial Sequence: Synthetic oligonucleotide
uaaauaaccaucuccuugu

SEQ ID NO: 1164280 - RNA, 19 nt, Artificial Sequence
  Description of Artificial Sequence: Synthetic oligonucleotide
augaucauaggacauuagg

SEQ ID NO: 1164281 - RNA, 19 nt, Artificial Sequence
  Description of Artificial Sequence: Synthetic oligonucleotide
ucaacuuguaggaagcggc

SEQ ID NO: 1164282 - RNA, 19 nt, Artificial Sequence
  Description of Artificial Sequence: Synthetic oligonucleotide
aaggucaacuuguaggaag

SEQ ID NO: 1164283 - RNA, 19 nt, Artificial Sequence
  Description of Artificial Sequence: Synthetic oligonucleotide
caugauuggacagacaugc

SEQ ID NO: 1164284 - RNA, 19 nt, Artificial Sequence
  Description of Artificial Sequence: Synthetic oligonucleotide
uguacauaucccauggcgc

SEQ ID NO: 1164285 - RNA, 19 nt, Artificial Sequence
  Description of Artificial Sequence: Synthetic oligonucleotide
agaaagaugacacgguaug

SEQ ID NO: 1164286 - RNA, 19 nt, Artificial Sequence
  Description of Artificial Sequence: Synthetic oligonucleotide
aaucccaagcucccaauag

SEQ ID NO: 1164287 - RNA, 19 nt, Artificial Sequence
  Description of Artificial Sequence: Synthetic oligonucleotide
uguaggagagacacaaggc

SEQ ID NO: 1164288 - RNA, 19 nt, Artificial Sequence
  Description of Artificial Sequence: Synthetic oligonucleotide
uggacugaccaucuguggg

SEQ ID NO: 1164289 - RNA, 19 nt, Artificial Sequence
  Description of Artificial Sequence: Synthetic oligonucleotide
uuguaauaggcgcuggcag

SEQ ID NO: 1164290 - RNA, 19 nt, Artificial Sequence
  Description of Artificial Sequence: Synthetic oligonucleotide
cagaccuaagucaugauug

SEQ ID NO: 1164291 - RNA, 19 nt, Artificial Sequence
  Description of Artificial Sequence: Synthetic oligonucleotide
aauaggcgcuggcagcugc

SEQ ID NO: 1164292 - RNA, 19 nt, Artificial Sequence
  Description of Artificial Sequence: Synthetic oligonucleotide
cauggguugagcuagugug

SEQ ID NO: 1164293 - RNA, 19 nt, Artificial Sequence
  Description of Artificial Sequence: Synthetic oligonucleotide
aaaucuuagugcauccagg

SEQ ID NO: 1164294 - RNA, 19 nt, Artificial Sequence
  Description of Artificial Sequence: Synthetic oligonucleotide
cuguacauaucccauggcg

SEQ ID NO: 1164295 - RNA, 19 nt, Artificial Sequence
  Description of Artificial Sequence: Synthetic oligonucleotide
ugucaaauaaauagggauu

SEQ ID NO: 1164296 - RNA, 19 nt, Artificial Sequence
  Description of Artificial Sequence: Synthetic oligonucleotide
cuguaggagagacacaagg

SEQ ID NO: 1164297 - RNA, 19 nt, Artificial Sequence
  Description of Artificial Sequence: Synthetic oligonucleotide
guaacuguuuauaaucagg

SEQ ID NO: 1164298 - RNA, 19 nt, Artificial Sequence
  Description of Artificial Sequence: Synthetic oligonucleotide
uugacgaucacuccgccac

SEQ ID NO: 1164299 - RNA, 19 nt, Artificial Sequence
  Description of Artificial Sequence: Synthetic oligonucleotide
cugguaacuguuuauaauc

SEQ ID NO: 1164300 - RNA, 19 nt, Artificial Sequence
  Description of Artificial Sequence: Synthetic oligonucleotide
aucauaggacauuaggaug

SEQ ID NO: 1164301 - RNA, 19 nt, Artificial Sequence
  Description of Artificial Sequence: Synthetic oligonucleotide
agcuacuacagugaggaac

SEQ ID NO: 1164302 - RNA, 19 nt, Artificial Sequence
  Description of Artificial Sequence: Synthetic oligonucleotide
uagacagaaagaugacacg

SEQ ID NO: 1164303 - RNA, 19 nt, Artificial Sequence
  Description of Artificial Sequence: Synthetic oligonucleotide
aauauauuaacuggauuuu

SEQ ID NO: 1164304 - RNA, 19 nt, Artificial Sequence
  Description of Artificial Sequence: Synthetic oligonucleotide
ugguaacuguuuauaauca

SEQ ID NO: 1164305 - RNA, 19 nt, Artificial Sequence
  Description of Artificial Sequence: Synthetic oligonucleotide
uccuggauagaacucaggu

SEQ ID NO: 1164306 - RNA, 19 nt, Artificial Sequence
  Description of Artificial Sequence: Synthetic oligonucleotide
aaucaaggugcaaacuggg

SEQ ID NO: 1164307 - RNA, 19 nt, Artificial Sequence
  Description of Artificial Sequence: Synthetic oligonucleotide
uguaauaggcgcuggcagc

SEQ ID NO: 1164308 - RNA, 19 nt, Artificial Sequence
  Description of Artificial Sequence: Synthetic oligonucleotide
guucccuuaaugaaauugg

SEQ ID NO: 1164309 - RNA, 19 nt, Artificial Sequence
  Description of Artificial Sequence: Synthetic oligonucleotide
gugugucaaauaaauaggg

SEQ ID NO: 1164310 - RNA, 19 nt, Artificial Sequence
  Description of Artificial Sequence: Synthetic oligonucleotide
caaaucuuagugcauccag

SEQ ID NO: 1164311 - RNA, 19 nt, Artificial Sequence
  Description of Artificial Sequence: Synthetic oligonucleotide
auagaacggcaucaugaac

SEQ ID NO: 1164312 - RNA, 19 nt, Artificial Sequence
  Description of Artificial Sequence: Synthetic oligonucleotide
uucaugagauagaacggca

SEQ ID NO: 1164313 - RNA, 19 nt, Artificial Sequence
  Description of Artificial Sequence: Synthetic oligonucleotide
auuaggaugcucucagugu

SEQ ID NO: 1164314 - RNA, 19 nt, Artificial Sequence
  Description of Artificial Sequence: Synthetic oligonucleotide
uuccauuggcgacuggcgg

SEQ ID NO: 1164315 - RNA, 19 nt, Artificial Sequence
  Description of Artificial Sequence: Synthetic oligonucleotide
ugcccaaacucaauggcgc

SEQ ID NO: 1164316 - RNA, 19 nt, Artificial Sequence
  Description of Artificial Sequence: Synthetic oligonucleotide
agaccuaagucaugauugg

SEQ ID NO: 1164317 - RNA, 19 nt, Artificial Sequence
  Description of Artificial Sequence: Synthetic oligonucleotide
agguaaguuccacaugauc

SEQ ID NO: 1164318 - RNA, 19 nt, Artificial Sequence
  Description of Artificial Sequence: Synthetic oligonucleotide
aacggcaucaugaacgacu

SEQ ID NO: 1164319 - RNA, 19 nt, Artificial Sequence
  Description of Artificial Sequence: Synthetic oligonucleotide
agauagaacggcaucauga

SEQ ID NO: 1164320 - RNA, 19 nt, Artificial Sequence
  Description of Artificial Sequence: Synthetic oligonucleotide
ucaaggugcaaacuggguu

SEQ ID NO: 1164321 - RNA, 19 nt, Artificial Sequence
  Description of Artificial Sequence: Synthetic oligonucleotide
uccggggucaggcacaccc

SEQ ID NO: 1164322 - RNA, 19 nt, Artificial Sequence
  Description of Artificial Sequence: Synthetic oligonucleotide
cuucaugagauagaacggc

SEQ ID NO: 1164323 - RNA, 19 nt, Artificial Sequence
  Description of Artificial Sequence: Synthetic oligonucleotide
guagacagugccuuucuug

SEQ ID NO: 1164324 - RNA, 19 nt, Artificial Sequence
  Description of Artificial Sequence: Synthetic oligonucleotide
uuuuacuguuucacaguug

SEQ ID NO: 1164325 - RNA, 19 nt, Artificial Sequence
  Description of Artificial Sequence: Synthetic oligonucleotide
aauagccccagagauggug

SEQ ID NO: 1164326 - RNA, 19 nt, Artificial Sequence
  Description of Artificial Sequence: Synthetic oligonucleotide
ucaugauuggacagacaug

SEQ ID NO: 1164327 - RNA, 19 nt, Artificial Sequence
  Description of Artificial Sequence: Synthetic oligonucleotide
cuuguuuugcguccagacc

SEQ ID NO: 1164328 - RNA, 19 nt, Artificial Sequence
  Description of Artificial Sequence: Synthetic oligonucleotide
uaaauagggauuucucuuu

SEQ ID NO: 1164329 - RNA, 19 nt, Artificial Sequence
  Description of Artificial Sequence: Synthetic oligonucleotide
uuaggaugcucucaguguu

SEQ ID NO: 1164330 - RNA, 19 nt, Artificial Sequence
  Description of Artificial Sequence: Synthetic oligonucleotide
guagcaaacaaaucaaggu

SEQ ID NO: 1164331 - RNA, 19 nt, Artificial Sequence
  Description of Artificial Sequence: Synthetic oligonucleotide
cuacagugaggaacaaggg

SEQ ID NO: 1164332 - RNA, 19 nt, Artificial Sequence
  Description of Artificial Sequence: Synthetic oligonucleotide
uuugcguccagaccaggac

SEQ ID NO: 1164333 - RNA, 19 nt, Artificial Sequence
  Description of Artificial Sequence: Synthetic oligonucleotide
agaacaggcccucccuggc

SEQ ID NO: 1164334 - RNA, 19 nt, Artificial Sequence
  Description of Artificial Sequence: Synthetic oligonucleotide
aaaagccccuuguguaaag

SEQ ID NO: 1164335 - RNA, 19 nt, Artificial Sequence
  Description of Artificial Sequence: Synthetic oligonucleotide
auagggguagccaggaggg

SEQ ID NO: 1164336 - RNA, 19 nt, Artificial Sequence
  Description of Artificial Sequence: Synthetic oligonucleotide
aucuuagugcauccagggg

SEQ ID NO: 1164337 - RNA, 19 nt, Artificial Sequence
  Description of Artificial Sequence: Synthetic oligonucleotide
gguaaguuccacaugauca

SEQ ID NO: 1164338 - RNA, 19 nt, Artificial Sequence
  Description of Artificial Sequence: Synthetic oligonucleotide
ucauugaagguaaguucca

SEQ ID NO: 1164339 - RNA, 19 nt, Artificial Sequence
  Description of Artificial Sequence: Synthetic oligonucleotide
aaggcgggucugaugagcc

SEQ ID NO: 1164340 - RNA, 19 nt, Artificial Sequence
  Description of Artificial Sequence: Synthetic oligonucleotide
cugcccaaacucaauggcg

SEQ ID NO: 1164341 - RNA, 19 nt, Artificial Sequence
  Description of Artificial Sequence: Synthetic oligonucleotide
ggcauguagacauugugug

SEQ ID NO: 1164342 - RNA, 19 nt, Artificial Sequence
  Description of Artificial Sequence: Synthetic oligonucleotide
gauagaacggcaucaugaa

SEQ ID NO: 1164343 - RNA, 19 nt, Artificial Sequence
  Description of Artificial Sequence: Synthetic oligonucleotide
cuuaaugaaauuggcacca

SEQ ID NO: 1164344 - RNA, 19 nt, Artificial Sequence
  Description of Artificial Sequence: Synthetic oligonucleotide
agagacacaaggcgggucu

SEQ ID NO: 1164345 - RNA, 19 nt, Artificial Sequence
  Description of Artificial Sequence: Synthetic oligonucleotide
uguuuauaaucaggccugg

SEQ ID NO: 1164346 - RNA, 19 nt, Artificial Sequence
  Description of Artificial Sequence: Synthetic oligonucleotide
ugggaggcgccucucagag

SEQ ID NO: 1164347 - RNA, 19 nt, Artificial Sequence
  Description of Artificial Sequence: Synthetic oligonucleotide
uguugagcgccauagucuc

SEQ ID NO: 1164348 - RNA, 19 nt, Artificial Sequence
  Description of Artificial Sequence: Synthetic oligonucleotide
aggaaugugagcaggaccu

SEQ ID NO: 1164349 - RNA, 19 nt, Artificial Sequence
  Description of Artificial Sequence: Synthetic oligonucleotide
aaauagggauuucucuuua

SEQ ID NO: 1164350 - RNA, 19 nt, Artificial Sequence
  Description of Artificial Sequence: Synthetic oligonucleotide
uaagucaugauuggacaga

SEQ ID NO: 1164351 - RNA, 19 nt, Artificial Sequence
  Description of Artificial Sequence: Synthetic oligonucleotide
uguuuugcguccagaccag

SEQ ID NO: 1164352 - RNA, 19 nt, Artificial Sequence
  Description of Artificial Sequence: Synthetic oligonucleotide
aaagccccuuguguaaagg

SEQ ID NO: 1164353 - RNA, 19 nt, Artificial Sequence
  Description of Artificial Sequence: Synthetic oligonucleotide
caacuuguaggaagcggcg

SEQ ID NO: 1164354 - RNA, 19 nt, Artificial Sequence
  Description of Artificial Sequence: Synthetic oligonucleotide
uaaugaaauuggcaccaaa

SEQ ID NO: 1164355 - RNA, 19 nt, Artificial Sequence
  Description of Artificial Sequence: Synthetic oligonucleotide
ucugaugagcccagaagau

SEQ ID NO: 1164356 - RNA, 19 nt, Artificial Sequence
  Description of Artificial Sequence: Synthetic oligonucleotide
gaaauuggcaccaaacacu

SEQ ID NO: 1164357 - RNA, 19 nt, Artificial Sequence
  Description of Artificial Sequence: Synthetic oligonucleotide
caaacaagagcaaaucuua

SEQ ID NO: 1164358 - RNA, 19 nt, Artificial Sequence
  Description of Artificial Sequence: Synthetic oligonucleotide
gacauuguguggguugccg

SEQ ID NO: 1164359 - RNA, 19 nt, Artificial Sequence
  Description of Artificial Sequence: Synthetic oligonucleotide
uacccauaggcuccauuag

SEQ ID NO: 1164360 - RNA, 19 nt, Artificial Sequence
  Description of Artificial Sequence: Synthetic oligonucleotide
aggggcaaucccaagcucc

SEQ ID NO: 1164361 - RNA, 19 nt, Artificial Sequence
  Description of Artificial Sequence: Synthetic oligonucleotide
aauaaccaucuccuuguuu

SEQ ID NO: 1164362 - RNA, 19 nt, Artificial Sequence
  Description of Artificial Sequence: Synthetic oligonucleotide
uccgagugauucuuguuga

SEQ ID NO: 1164363 - RNA, 19 nt, Artificial Sequence
  Description of Artificial Sequence: Synthetic oligonucleotide
agacaugcacucucuacug

SEQ ID NO: 1164364 - RNA, 19 nt, Artificial Sequence
  Description of Artificial Sequence: Synthetic oligonucleotide
uugcguccagaccaggacc

SEQ ID NO: 1164365 - RNA, 19 nt, Artificial Sequence
  Description of Artificial Sequence: Synthetic oligonucleotide
ucucagaugcagcuccgug

SEQ ID NO: 1164366 - RNA, 19 nt, Artificial Sequence
  Description of Artificial Sequence: Synthetic oligonucleotide
cauuccauuggcgacuggc

SEQ ID NO: 1164367 - RNA, 19 nt, Artificial Sequence
  Description of Artificial Sequence: Synthetic oligonucleotide
uccccuuagacagaaagau

SEQ ID NO: 1164368 - RNA, 19 nt, Artificial Sequence
  Description of Artificial Sequence: Synthetic oligonucleotide
agggcuaguuccugguaac

SEQ ID NO: 1164369 - RNA, 19 nt, Artificial Sequence
  Description of Artificial Sequence: Synthetic oligonucleotide
aagauggcguaggaugguc

SEQ ID NO: 1164370 - RNA, 19 nt, Artificial Sequence
  Description of Artificial Sequence: Synthetic oligonucleotide
gaagaacaggcccucccug

SEQ ID NO: 1164371 - RNA, 19 nt, Artificial Sequence
  Description of Artificial Sequence: Synthetic oligonucleotide
cguaggauggucaucaggc

SEQ ID NO: 1164372 - RNA, 19 nt, Artificial Sequence
  Description of Artificial Sequence: Synthetic oligonucleotide
guugccgggguuguaauag

SEQ ID NO: 1164373 - RNA, 19 nt, Artificial Sequence
  Description of Artificial Sequence: Synthetic oligonucleotide
gucaacuuguaggaagcgg

SEQ ID NO: 1164374 - RNA, 19 nt, Artificial Sequence
  Description of Artificial Sequence: Synthetic oligonucleotide
ccaauagccccagagaugg

SEQ ID NO: 1164375 - RNA, 19 nt, Artificial Sequence
  Description of Artificial Sequence: Synthetic oligonucleotide
ugaacgacugcauggcguc

SEQ ID NO: 1164376 - RNA, 19 nt, Artificial Sequence
  Description of Artificial Sequence: Synthetic oligonucleotide
ccuuaaugaaauuggcacc

SEQ ID NO: 1164377 - RNA, 19 nt, Artificial Sequence
  Description of Artificial Sequence: Synthetic oligonucleotide
gagauagaacggcaucaug

SEQ ID NO: 1164378 - RNA, 19 nt, Artificial Sequence
  Description of Artificial Sequence: Synthetic oligonucleotide
uggguugagcuaguguggg

SEQ ID NO: 1164379 - RNA, 19 nt, Artificial Sequence
  Description of Artificial Sequence: Synthetic oligonucleotide
acauaggccccacugggca

SEQ ID NO: 1164380 - RNA, 19 nt, Artificial Sequence
  Description of Artificial Sequence: Synthetic oligonucleotide
uagacauuguguggguugc

SEQ ID NO: 1164381 - RNA, 19 nt, Artificial Sequence
  Description of Artificial Sequence: Synthetic oligonucleotide
cacaaggcgggucugauga

SEQ ID NO: 1164382 - RNA, 19 nt, Artificial Sequence
  Description of Artificial Sequence: Synthetic oligonucleotide
gguggauagggguagccag

SEQ ID NO: 1164383 - RNA, 19 nt, Artificial Sequence
  Description of Artificial Sequence: Synthetic oligonucleotide
gucaugauuggacagacau

SEQ ID NO: 1164384 - RNA, 19 nt, Artificial Sequence
  Description of Artificial Sequence: Synthetic oligonucleotide
caugaucauaggacauuag

SEQ ID NO: 1164385 - RNA, 19 nt, Artificial Sequence
  Description of Artificial Sequence: Synthetic oligonucleotide
gaagcuagacagagcagug

SEQ ID NO: 1164386 - RNA, 19 nt, Artificial Sequence
  Description of Artificial Sequence: Synthetic oligonucleotide
cuuguguaaaggggaagag

SEQ ID NO: 1164387 - RNA, 19 nt, Artificial Sequence
  Description of Artificial Sequence: Synthetic oligonucleotide
gaagcucacacaggggcag

SEQ ID NO: 1164388 - RNA, 19 nt, Artificial Sequence
  Description of Artificial Sequence: Synthetic oligonucleotide
gaugccaccuggagcaucc

SEQ ID NO: 1164389 - RNA, 19 nt, Artificial Sequence
  Description of Artificial Sequence: Synthetic oligonucleotide
caugaacgacugcauggcg

SEQ ID NO: 1164390 - RNA, 19 nt, Artificial Sequence
  Description of Artificial Sequence: Synthetic oligonucleotide
aggagagacacaaggcggg

SEQ ID NO: 1164391 - RNA, 19 nt, Artificial Sequence
  Description of Artificial Sequence: Synthetic oligonucleotide
uguugacgaucacuccgcc

SEQ ID NO: 1164392 - RNA, 19 nt, Artificial Sequence
  Description of Artificial Sequence: Synthetic oligonucleotide
gguacauuccauuggcgac

SEQ ID NO: 1164393 - RNA, 19 nt, Artificial Sequence
  Description of Artificial Sequence: Synthetic oligonucleotide
aaucucagaugcagcuccg

SEQ ID NO: 1164394 - RNA, 19 nt, Artificial Sequence
  Description of Artificial Sequence: Synthetic oligonucleotide
cauccaucaugggaggucc

SEQ ID NO: 1164395 - RNA, 19 nt, Artificial Sequence
  Description of Artificial Sequence: Synthetic oligonucleotide
ggaggggucguccagugag

SEQ ID NO: 1164396 - RNA, 19 nt, Artificial Sequence
  Description of Artificial Sequence: Synthetic oligonucleotide
uacuacagugaggaacaag

SEQ ID NO: 1164397 - RNA, 19 nt, Artificial Sequence
  Description of Artificial Sequence: Synthetic oligonucleotide
uaggaugcucucaguguug

SEQ ID NO: 1164398 - RNA, 19 nt, Artificial Sequence
  Description of Artificial Sequence: Synthetic oligonucleotide
cccuuagacagaaagauga

SEQ ID NO: 1164399 - RNA, 19 nt, Artificial Sequence
  Description of Artificial Sequence: Synthetic oligonucleotide
agguggacugaccaucugu

SEQ ID NO: 1164400 - RNA, 19 nt, Artificial Sequence
  Description of Artificial Sequence: Synthetic oligonucleotide
aggugcucguucccagacc

SEQ ID NO: 1164401 - RNA, 19 nt, Artificial Sequence
  Description of Artificial Sequence: Synthetic oligonucleotide
ggguaagguagacagugcc

SEQ ID NO: 1164402 - RNA, 19 nt, Artificial Sequence
  Description of Artificial Sequence: Synthetic oligonucleotide
ucccagaccuaagucauga

SEQ ID NO: 1164403 - RNA, 19 nt, Artificial Sequence
  Description of Artificial Sequence: Synthetic oligonucleotide
ggucugaugagcccagaag

SEQ ID NO: 1164404 - RNA, 19 nt, Artificial Sequence
  Description of Artificial Sequence: Synthetic oligonucleotide
cuuagacagaaagaugaca

SEQ ID NO: 1164405 - RNA, 19 nt, Artificial Sequence
  Description of Artificial Sequence: Synthetic oligonucleotide
aaauaaccaucuccuuguu

SEQ ID NO: 1164406 - RNA, 19 nt, Artificial Sequence
  Description of Artificial Sequence: Synthetic oligonucleotide
uccagaccaggaccaaaca

SEQ ID NO: 1164407 - RNA, 19 nt, Artificial Sequence
  Description of Artificial Sequence: Synthetic oligonucleotide
caucagggcuaguuccugg

SEQ ID NO: 1164408 - RNA, 19 nt, Artificial Sequence
  Description of Artificial Sequence: Synthetic oligonucleotide
ugccgggguuguaauaggc

SEQ ID NO: 1164409 - RNA, 19 nt, Artificial Sequence
  Description of Artificial Sequence: Synthetic oligonucleotide
gggucguccagugagaggc

SEQ ID NO: 1164410 - RNA, 19 nt, Artificial Sequence
  Description of Artificial Sequence: Synthetic oligonucleotide
cccauaggcuccauuaggg

SEQ ID NO: 1164411 - RNA, 19 nt, Artificial Sequence
  Description of Artificial Sequence: Synthetic oligonucleotide
gaucacuccgccacccucc

SEQ ID NO: 1164412 - RNA, 19 nt, Artificial Sequence
  Description of Artificial Sequence: Synthetic oligonucleotide
ugaggaacaaggggcaauc

SEQ ID NO: 1164413 - RNA, 19 nt, Artificial Sequence
  Description of Artificial Sequence: Synthetic oligonucleotide
guacccauaggcuccauua

SEQ ID NO: 1164414 - RNA, 19 nt, Artificial Sequence
  Description of Artificial Sequence: Synthetic oligonucleotide
ucguucccagaccuaaguc

SEQ ID NO: 1164415 - RNA, 19 nt, Artificial Sequence
  Description of Artificial Sequence: Synthetic oligonucleotide
ugagauagaacggcaucau

SEQ ID NO: 1164416 - RNA, 19 nt, Artificial Sequence
  Description of Artificial Sequence: Synthetic oligonucleotide
uugccgggguuguaauagg

SEQ ID NO: 1164417 - RNA, 19 nt, Artificial Sequence
  Description of Artificial Sequence: Synthetic oligonucleotide
agugccauggguugagcua

SEQ ID NO: 1164418 - RNA, 19 nt, Artificial Sequence
  Description of Artificial Sequence: Synthetic oligonucleotide
ugaccaucuguggggacag

SEQ ID NO: 1164419 - RNA, 19 nt, Artificial Sequence
  Description of Artificial Sequence: Synthetic oligonucleotide
augagcccagaagauggcg

SEQ ID NO: 1164420 - RNA, 19 nt, Artificial Sequence
  Description of Artificial Sequence: Synthetic oligonucleotide
gacacgguaugggguaagg

SEQ ID NO: 1164421 - RNA, 19 nt, Artificial Sequence
  Description of Artificial Sequence: Synthetic oligonucleotide
caggagcuacuacagugag

SEQ ID NO: 1164422 - RNA, 19 nt, Artificial Sequence
  Description of Artificial Sequence: Synthetic oligonucleotide
ugagcuagugugggaagcu

SEQ ID NO: 1164423 - RNA, 19 nt, Artificial Sequence
  Description of Artificial Sequence: Synthetic oligonucleotide
cugaugagcccagaagaug

SEQ ID NO: 1164424 - RNA, 19 nt, Artificial Sequence
  Description of Artificial Sequence: Synthetic oligonucleotide
aacgacugcauggcguccu

SEQ ID NO: 1164425 - RNA, 19 nt, Artificial Sequence
  Description of Artificial Sequence: Synthetic oligonucleotide
augaacgacugcauggcgu

SEQ ID NO: 1164426 - RNA, 19 nt, Artificial Sequence
  Description of Artificial Sequence: Synthetic oligonucleotide
aggucacaugguuggaggu

SEQ ID NO: 1164427 - RNA, 19 nt, Artificial Sequence
  Description of Artificial Sequence: Synthetic oligonucleotide
ugacgaucacuccgccacc

SEQ ID NO: 1164428 - RNA, 19 nt, Artificial Sequence
  Description of Artificial Sequence: Synthetic oligonucleotide
uuaaugaaauuggcaccaa

SEQ ID NO: 1164429 - RNA, 19 nt, Artificial Sequence
  Description of Artificial Sequence: Synthetic oligonucleotide
gcuacuacagugaggaaca

SEQ ID NO: 1164430 - RNA, 19 nt, Artificial Sequence
  Description of Artificial Sequence: Synthetic oligonucleotide
guguaaaggggaagaggag

SEQ ID NO: 1164431 - RNA, 19 nt, Artificial Sequence
  Description of Artificial Sequence: Synthetic oligonucleotide
ucccgagacucgcagcgcu

SEQ ID NO: 1164432 - RNA, 19 nt, Artificial Sequence
  Description of Artificial Sequence: Synthetic oligonucleotide
gguuguaauaggcgcuggc

SEQ ID NO: 1164433 - RNA, 19 nt, Artificial Sequence
  Description of Artificial Sequence: Synthetic oligonucleotide
ccuggauagaacucaggug

SEQ ID NO: 1164434 - RNA, 19 nt, Artificial Sequence
  Description of Artificial Sequence: Synthetic oligonucleotide
gguaguaggguggcggcgg

SEQ ID NO: 1164435 - RNA, 19 nt, Artificial Sequence
  Description of Artificial Sequence: Synthetic oligonucleotide
uggaggcuugugaugccac

SEQ ID NO: 1164436 - RNA, 19 nt, Artificial Sequence
  Description of Artificial Sequence: Synthetic oligonucleotide
ugggcauguaaggguaccc

SEQ ID NO: 1164437 - RNA, 19 nt, Artificial Sequence
  Description of Artificial Sequence: Synthetic oligonucleotide
cacgguaugggguaaggua

SEQ ID NO: 1164438 - RNA, 19 nt, Artificial Sequence
  Description of Artificial Sequence: Synthetic oligonucleotide
aaggucuacugggucuucu

SEQ ID NO: 1164439 - RNA, 19 nt, Artificial Sequence
  Description of Artificial Sequence: Synthetic oligonucleotide
ggaagcggcgccuucccag

SEQ ID NO: 1164440 - RNA, 19 nt, Artificial Sequence
  Description of Artificial Sequence: Synthetic oligonucleotide
aggcgggucugaugagccc

SEQ ID NO: 1164441 - RNA, 19 nt, Artificial Sequence
  Description of Artificial Sequence: Synthetic oligonucleotide
ggaacaaggggcaauccca

SEQ ID NO: 1164442 - RNA, 19 nt, Artificial Sequence
  Description of Artificial Sequence: Synthetic oligonucleotide
gucaaauaaauagggauuu

SEQ ID NO: 1164443 - RNA, 19 nt, Artificial Sequence
  Description of Artificial Sequence: Synthetic oligonucleotide
uccgccacccuccgaguga

SEQ ID NO: 1164444 - RNA, 19 nt, Artificial Sequence
  Description of Artificial Sequence: Synthetic oligonucleotide
uguaggaagcggcgccuuc

SEQ ID NO: 1164445 - RNA, 19 nt, Artificial Sequence
  Description of Artificial Sequence: Synthetic oligonucleotide
ccuaagucaugauuggaca

SEQ ID NO: 1164446 - RNA, 19 nt, Artificial Sequence
  Description of Artificial Sequence: Synthetic oligonucleotide
caaggcgggucugaugagc

SEQ ID NO: 1164447 - RNA, 19 nt, Artificial Sequence
  Description of Artificial Sequence: Synthetic oligonucleotide
cccuuugaaagccucuggc

SEQ ID NO: 1164448 - RNA, 19 nt, Artificial Sequence
  Description of Artificial Sequence: Synthetic oligonucleotide
acggcaucaugaacgacug

SEQ ID NO: 1164449 - RNA, 19 nt, Artificial Sequence
  Description of Artificial Sequence: Synthetic oligonucleotide
acacaaggcgggucugaug

SEQ ID NO: 1164450 - RNA, 19 nt, Artificial Sequence
  Description of Artificial Sequence: Synthetic oligonucleotide
uggucccuuugaaagccuc

SEQ ID NO: 1164451 - RNA, 19 nt, Artificial Sequence
  Description of Artificial Sequence: Synthetic oligonucleotide
acucucuacugcuccugca

SEQ ID NO: 1164452 - RNA, 19 nt, Artificial Sequence
  Description of Artificial Sequence: Synthetic oligonucleotide
ccauaggcuccauuagggg

SEQ ID NO: 1164453 - RNA, 19 nt, Artificial Sequence
  Description of Artificial Sequence: Synthetic oligonucleotide
gguggacugaccaucugug

SEQ ID NO: 1164454 - RNA, 19 nt, Artificial Sequence
  Description of Artificial Sequence: Synthetic oligonucleotide
aggagcuacuacagugagg

SEQ ID NO: 1164455 - RNA, 19 nt, Artificial Sequence
  Description of Artificial Sequence: Synthetic oligonucleotide
aggaguggccagagagucc

SEQ ID NO: 1164456 - RNA, 19 nt, Artificial Sequence
  Description of Artificial Sequence: Synthetic oligonucleotide
ccgggguuguaauaggcgc

SEQ ID NO: 1164457 - RNA, 19 nt, Artificial Sequence
  Description of Artificial Sequence: Synthetic oligonucleotide
ggucuacugggucuucuug

SEQ ID NO: 1164458 - RNA, 19 nt, Artificial Sequence
  Description of Artificial Sequence: Synthetic oligonucleotide
gcguaggauggucaucagg

SEQ ID NO: 1164459 - RNA, 19 nt, Artificial Sequence
  Description of Artificial Sequence: Synthetic oligonucleotide
ucuccuuguuuugcgucca

SEQ ID NO: 1164460 - RNA, 19 nt, Artificial Sequence
  Description of Artificial Sequence: Synthetic oligonucleotide
gagagucccucugugggca

SEQ ID NO: 1164461 - RNA, 19 nt, Artificial Sequence
  Description of Artificial Sequence: Synthetic oligonucleotide
aagguaaguuccacaugau

SEQ ID NO: 1164462 - RNA, 19 nt, Artificial Sequence
  Description of Artificial Sequence: Synthetic oligonucleotide
guccagaccaggaccaaac

SEQ ID NO: 1164463 - RNA, 19 nt, Artificial Sequence
  Description of Artificial Sequence: Synthetic oligonucleotide
guugacgaucacuccgcca

SEQ ID NO: 1164464 - RNA, 19 nt, Artificial Sequence
  Description of Artificial Sequence: Synthetic oligonucleotide
acugggcauguaaggguac

SEQ ID NO: 1164465 - RNA, 19 nt, Artificial Sequence
  Description of Artificial Sequence: Synthetic oligonucleotide
cucgugggcauguagacau

SEQ ID NO: 1164466 - RNA, 19 nt, Artificial Sequence
  Description of Artificial Sequence: Synthetic oligonucleotide
uggagcauccgcugcccaa

SEQ ID NO: 1164467 - RNA, 19 nt, Artificial Sequence
  Description of Artificial Sequence: Synthetic oligonucleotide
gaccuaagucaugauugga

SEQ ID NO: 1164468 - RNA, 19 nt, Artificial Sequence
  Description of Artificial Sequence: Synthetic oligonucleotide
ucagggcuaguuccuggua

SEQ ID NO: 1164469 - RNA, 19 nt, Artificial Sequence
  Description of Artificial Sequence: Synthetic oligonucleotide
agggguagccaggagggca

SEQ ID NO: 1164470 - RNA, 19 nt, Artificial Sequence
  Description of Artificial Sequence: Synthetic oligonucleotide
aggaugcucucaguguugu

SEQ ID NO: 1164471 - RNA, 19 nt, Artificial Sequence
  Description of Artificial Sequence: Synthetic oligonucleotide
gaacaaggggcaaucccaa

SEQ ID NO: 1164472 - RNA, 19 nt, Artificial Sequence
  Description of Artificial Sequence: Synthetic oligonucleotide
ccuuagacagaaagaugac

SEQ ID NO: 1164473 - RNA, 19 nt, Artificial Sequence
  Description of Artificial Sequence: Synthetic oligonucleotide
ugacacgguaugggguaag

SEQ ID NO: 1164474 - RNA, 19 nt, Artificial Sequence
  Description of Artificial Sequence: Synthetic oligonucleotide
guaggguggcggcggaggc

SEQ ID NO: 1164475 - RNA, 19 nt, Artificial Sequence
  Description of Artificial Sequence: Synthetic oligonucleotide
ggucaacuuguaggaagcg

SEQ ID NO: 1164476 - RNA, 19 nt, Artificial Sequence
  Description of Artificial Sequence: Synthetic oligonucleotide
guuuugcguccagaccagg

SEQ ID NO: 1164477 - RNA, 19 nt, Artificial Sequence
  Description of Artificial Sequence: Synthetic oligonucleotide
guaaggguacccauaggcu

SEQ ID NO: 1164478 - RNA, 19 nt, Artificial Sequence
  Description of Artificial Sequence: Synthetic oligonucleotide
gagguggacugaccaucug

SEQ ID NO: 1164479 - RNA, 19 nt, Artificial Sequence
  Description of Artificial Sequence: Synthetic oligonucleotide
auggcguaggauggucauc

SEQ ID NO: 1164480 - RNA, 19 nt, Artificial Sequence
  Description of Artificial Sequence: Synthetic oligonucleotide
uggguugccgggguuguaa

SEQ ID NO: 1164481 - RNA, 19 nt, Artificial Sequence
  Description of Artificial Sequence: Synthetic oligonucleotide
uccgcugcccaaacucaau

SEQ ID NO: 1164482 - RNA, 19 nt, Artificial Sequence
  Description of Artificial Sequence: Synthetic oligonucleotide
caaggugcaaacuggguuu

SEQ ID NO: 1164483 - RNA, 19 nt, Artificial Sequence
  Description of Artificial Sequence: Synthetic oligonucleotide
uaauaggcgcuggcagcug

SEQ ID NO: 1164484 - RNA, 19 nt, Artificial Sequence
  Description of Artificial Sequence: Synthetic oligonucleotide
gacugaccaucugugggga

SEQ ID NO: 1164485 - RNA, 19 nt, Artificial Sequence
  Description of Artificial Sequence: Synthetic oligonucleotide
agauggcguaggaugguca

SEQ ID NO: 1164486 - RNA, 19 nt, Artificial Sequence
  Description of Artificial Sequence: Synthetic oligonucleotide
auucuuguugagcgccaua

SEQ ID NO: 1164487 - RNA, 19 nt, Artificial Sequence
  Description of Artificial Sequence: Synthetic oligonucleotide
gauggcguaggauggucau

SEQ ID NO: 1164488 - RNA, 19 nt, Artificial Sequence
  Description of Artificial Sequence: Synthetic oligonucleotide
acauuccauuggcgacugg

SEQ ID NO: 1164489 - RNA, 19 nt, Artificial Sequence
  Description of Artificial Sequence: Synthetic oligonucleotide
auaggccccacugggcaug

SEQ ID NO: 1164490 - RNA, 19 nt, Artificial Sequence
  Description of Artificial Sequence: Synthetic oligonucleotide
cuucaccucuggaggcuug

SEQ ID NO: 1164491 - RNA, 19 nt, Artificial Sequence
  Description of Artificial Sequence: Synthetic oligonucleotide
guaauaggcgcuggcagcu

SEQ ID NO: 1164492 - RNA, 19 nt, Artificial Sequence
  Description of Artificial Sequence: Synthetic oligonucleotide
ccauaggcccaggauaggg

SEQ ID NO: 1164493 - RNA, 19 nt, Artificial Sequence
  Description of Artificial Sequence: Synthetic oligonucleotide
gugcaaacuggguuuauuu

SEQ ID NO: 1164494 - RNA, 19 nt, Artificial Sequence
  Description of Artificial Sequence: Synthetic oligonucleotide
acuggggucccgagacucg

SEQ ID NO: 1164495 - RNA, 19 nt, Artificial Sequence
  Description of Artificial Sequence: Synthetic oligonucleotide
gaacgacugcauggcgucc

SEQ ID NO: 1164496 - RNA, 19 nt, Artificial Sequence
  Description of Artificial Sequence: Synthetic oligonucleotide
acacgguaugggguaaggu

SEQ ID NO: 1164497 - RNA, 19 nt, Artificial Sequence
  Description of Artificial Sequence: Synthetic oligonucleotide
guaagguagacagugccuu

SEQ ID NO: 1164498 - RNA, 19 nt, Artificial Sequence
  Description of Artificial Sequence: Synthetic oligonucleotide
cagggcuaguuccugguaa

SEQ ID NO: 1164499 - RNA, 19 nt, Artificial Sequence
  Description of Artificial Sequence: Synthetic oligonucleotide
gcgggcgugaagcucacac

SEQ ID NO: 1164500 - RNA, 19 nt, Artificial Sequence
  Description of Artificial Sequence: Synthetic oligonucleotide
aggucuacugggucuucuu

SEQ ID NO: 1164501 - RNA, 19 nt, Artificial Sequence
  Description of Artificial Sequence: Synthetic oligonucleotide
uccgugggaggcccaggaa

SEQ ID NO: 1164502 - RNA, 19 nt, Artificial Sequence
  Description of Artificial Sequence: Synthetic oligonucleotide
caugucauugaagguaagu

SEQ ID NO: 1164503 - RNA, 19 nt, Artificial Sequence
  Description of Artificial Sequence: Synthetic oligonucleotide
gccgggguuguaauaggcg

SEQ ID NO: 1164504 - RNA, 19 nt, Artificial Sequence
  Description of Artificial Sequence: Synthetic oligonucleotide
gggguacauuccauuggcg

SEQ ID NO: 1164505 - RNA, 19 nt, Artificial Sequence
  Description of Artificial Sequence: Synthetic oligonucleotide
gggguaguaggguggcggc

SEQ ID NO: 1164506 - RNA, 19 nt, Artificial Sequence
  Description of Artificial Sequence: Synthetic oligonucleotide
gccuguaggagagacacaa

SEQ ID NO: 1164507 - RNA, 19 nt, Artificial Sequence
  Description of Artificial Sequence: Synthetic oligonucleotide
gaagcugggaggcgccucu

SEQ ID NO: 1164508 - RNA, 19 nt, Artificial Sequence
  Description of Artificial Sequence: Synthetic oligonucleotide
cacuggggucccgagacuc

SEQ ID NO: 1164509 - RNA, 19 nt, Artificial Sequence
  Description of Artificial Sequence: Synthetic oligonucleotide
uggggucccgagacucgca

SEQ ID NO: 1164510 - RNA, 19 nt, Artificial Sequence
  Description of Artificial Sequence: Synthetic oligonucleotide
agacacaaggcgggucuga

SEQ ID NO: 1164511 - RNA, 19 nt, Artificial Sequence
  Description of Artificial Sequence: Synthetic oligonucleotide
caccucuggaggcuuguga

SEQ ID NO: 1164512 - RNA, 19 nt, Artificial Sequence
  Description of Artificial Sequence: Synthetic oligonucleotide
augauuggacagacaugca

SEQ ID NO: 1164513 - RNA, 19 nt, Artificial Sequence
  Description of Artificial Sequence: Synthetic oligonucleotide
ggugcucguucccagaccu

SEQ ID NO: 1164514 - RNA, 19 nt, Artificial Sequence
  Description of Artificial Sequence: Synthetic oligonucleotide
cauagucucuccucccacu

SEQ ID NO: 1164515 - RNA, 19 nt, Artificial Sequence
  Description of Artificial Sequence: Synthetic oligonucleotide
ccccuuagacagaaagaug

SEQ ID NO: 1164516 - RNA, 19 nt, Artificial Sequence
  Description of Artificial Sequence: Synthetic oligonucleotide
ucaccucuggaggcuugug

SEQ ID NO: 1164517 - RNA, 19 nt, Artificial Sequence
  Description of Artificial Sequence: Synthetic oligonucleotide
ggcggaggcuggcucgugg

SEQ ID NO: 1164518 - RNA, 19 nt, Artificial Sequence
  Description of Artificial Sequence: Synthetic oligonucleotide
ggcguccuuccccuuagac

SEQ ID NO: 1164519 - RNA, 19 nt, Artificial Sequence
  Description of Artificial Sequence: Synthetic oligonucleotide
ggggucguccagugagagg

SEQ ID NO: 1164520 - RNA, 19 nt, Artificial Sequence
  Description of Artificial Sequence: Synthetic oligonucleotide
gaggcuugugaugccaccu

SEQ ID NO: 1164521 - RNA, 19 nt, Artificial Sequence
  Description of Artificial Sequence: Synthetic oligonucleotide
uggcaaguuucaggucaca

SEQ ID NO: 1164522 - RNA, 19 nt, Artificial Sequence
  Description of Artificial Sequence: Synthetic oligonucleotide
gaacggcaucaugaacgac

SEQ ID NO: 1164523 - RNA, 19 nt, Artificial Sequence
  Description of Artificial Sequence: Synthetic oligonucleotide
gcggaggcuggcucguggg

SEQ ID NO: 1164524 - RNA, 19 nt, Artificial Sequence
  Description of Artificial Sequence: Synthetic oligonucleotide
gggagguggacugaccauc

SEQ ID NO: 1164525 - RNA, 19 nt, Artificial Sequence
  Description of Artificial Sequence: Synthetic oligonucleotide
cuccgccacccuccgagug

SEQ ID NO: 1164526 - RNA, 19 nt, Artificial Sequence
  Description of Artificial Sequence: Synthetic oligonucleotide
gcaaaucuuagugcaucca

SEQ ID NO: 1164527 - RNA, 19 nt, Artificial Sequence
  Description of Artificial Sequence: Synthetic oligonucleotide
ggguuguaauaggcgcugg

SEQ ID NO: 1164528 - RNA, 19 nt, Artificial Sequence
  Description of Artificial Sequence: Synthetic oligonucleotide
ggguaguaggguggcggcg

SEQ ID NO: 1164529 - RNA, 19 nt, Artificial Sequence
  Description of Artificial Sequence: Synthetic oligonucleotide
gccauagucucuccuccca

SEQ ID NO: 1164530 - RNA, 19 nt, Artificial Sequence
  Description of Artificial Sequence: Synthetic oligonucleotide
ccgagugauucuuguugag

SEQ ID NO: 1164531 - RNA, 19 nt, Artificial Sequence
  Description of Artificial Sequence: Synthetic oligonucleotide
guaguaggguggcggcgga

SEQ ID NO: 1164532 - RNA, 19 nt, Artificial Sequence
  Description of Artificial Sequence: Synthetic oligonucleotide
cccaaacucaauggcgccc

SEQ ID NO: 1164533 - RNA, 19 nt, Artificial Sequence
  Description of Artificial Sequence: Synthetic oligonucleotide
ggcacaccccaggaggaag

SEQ ID NO: 1164534 - RNA, 19 nt, Artificial Sequence
  Description of Artificial Sequence: Synthetic oligonucleotide
augggguaagguagacagu

SEQ ID NO: 1164535 - RNA, 19 nt, Artificial Sequence
  Description of Artificial Sequence: Synthetic oligonucleotide
ggaaugugagcaggaccug

SEQ ID NO: 1164536 - RNA, 19 nt, Artificial Sequence
  Description of Artificial Sequence: Synthetic oligonucleotide
ggcuuccggggucaggcac

SEQ ID NO: 1164537 - RNA, 19 nt, Artificial Sequence
  Description of Artificial Sequence: Synthetic oligonucleotide
gggguaagguagacagugc

SEQ ID NO: 1164538 - RNA, 19 nt, Artificial Sequence
  Description of Artificial Sequence: Synthetic oligonucleotide
acuccgccacccuccgagu

SEQ ID NO: 1164539 - RNA, 19 nt, Artificial Sequence
  Description of Artificial Sequence: Synthetic oligonucleotide
caugguuggaggugcucgu

SEQ ID NO: 1164540 - RNA, 19 nt, Artificial Sequence
  Description of Artificial Sequence: Synthetic oligonucleotide
gguaagguagacagugccu

SEQ ID NO: 1164541 - RNA, 19 nt, Artificial Sequence
  Description of Artificial Sequence: Synthetic oligonucleotide
cuuccggggucaggcacac

SEQ ID NO: 1164542 - RNA, 19 nt, Artificial Sequence
  Description of Artificial Sequence: Synthetic oligonucleotide
gggcauguagacauugugu

SEQ ID NO: 1164543 - RNA, 19 nt, Artificial Sequence
  Description of Artificial Sequence: Synthetic oligonucleotide
augacacgguaugggguaa

SEQ ID NO: 1164544 - RNA, 19 nt, Artificial Sequence
  Description of Artificial Sequence: Synthetic oligonucleotide
uggcguccuuccccuuaga

SEQ ID NO: 1164545 - RNA, 19 nt, Artificial Sequence
  Description of Artificial Sequence: Synthetic oligonucleotide
gaggggucguccagugaga

SEQ ID NO: 1164546 - RNA, 19 nt, Artificial Sequence
  Description of Artificial Sequence: Synthetic oligonucleotide
gccccuuguguaaagggga

SEQ ID NO: 1164547 - RNA, 19 nt, Artificial Sequence
  Description of Artificial Sequence: Synthetic oligonucleotide
ggcguaggauggucaucag

SEQ ID NO: 1164548 - RNA, 19 nt, Artificial Sequence
  Description of Artificial Sequence: Synthetic oligonucleotide
ucgugggcauguagacauu

SEQ ID NO: 1164549 - RNA, 19 nt, Artificial Sequence
  Description of Artificial Sequence: Synthetic oligonucleotide
gauucuuguugagcgccau

SEQ ID NO: 1164550 - RNA, 19 nt, Artificial Sequence
  Description of Artificial Sequence: Synthetic oligonucleotide
gagcuacuacagugaggaa

SEQ ID NO: 1164551 - RNA, 19 nt, Artificial Sequence
  Description of Artificial Sequence: Synthetic oligonucleotide
ccgcugcccaaacucaaug

SEQ ID NO: 1164552 - RNA, 19 nt, Artificial Sequence
  Description of Artificial Sequence: Synthetic oligonucleotide
gggucugaugagcccagaa

SEQ ID NO: 1164553 - RNA, 19 nt, Artificial Sequence
  Description of Artificial Sequence: Synthetic oligonucleotide
ggcauguaaggguacccau

SEQ ID NO: 1164554 - RNA, 19 nt, Artificial Sequence
  Description of Artificial Sequence: Synthetic oligonucleotide
cauaggacauuaggaugcu

SEQ ID NO: 1164555 - RNA, 19 nt, Artificial Sequence
  Description of Artificial Sequence: Synthetic oligonucleotide
gcuugugaugccaccugga

SEQ ID NO: 1164556 - RNA, 19 nt, Artificial Sequence
  Description of Artificial Sequence: Synthetic oligonucleotide
gucccgagacucgcagcgc

SEQ ID NO: 1164557 - RNA, 19 nt, Artificial Sequence
  Description of Artificial Sequence: Synthetic oligonucleotide
caaggucuacugggucuuc

SEQ ID NO: 1164558 - RNA, 19 nt, Artificial Sequence
  Description of Artificial Sequence: Synthetic oligonucleotide
gcauguaaggguacccaua

SEQ ID NO: 1164559 - RNA, 19 nt, Artificial Sequence
  Description of Artificial Sequence: Synthetic oligonucleotide
ggguugagcuaguguggga

SEQ ID NO: 1164560 - RNA, 19 nt, Artificial Sequence
  Description of Artificial Sequence: Synthetic oligonucleotide
gugaggaacaaggggcaau

SEQ ID NO: 1164561 - RNA, 19 nt, Artificial Sequence
  Description of Artificial Sequence: Synthetic oligonucleotide
auccaucaugggagguccu

SEQ ID NO: 1164562 - RNA, 19 nt, Artificial Sequence
  Description of Artificial Sequence: Synthetic oligonucleotide
ggcuccauuaggggcuuca

SEQ ID NO: 1164563 - RNA, 19 nt, Artificial Sequence
  Description of Artificial Sequence: Synthetic oligonucleotide
uccucccacuggggucccg

SEQ ID NO: 1164564 - RNA, 19 nt, Artificial Sequence
  Description of Artificial Sequence: Synthetic oligonucleotide
acccuccgagugauucuug

SEQ ID NO: 1164565 - RNA, 19 nt, Artificial Sequence
  Description of Artificial Sequence: Synthetic oligonucleotide
gcgguggauagggguagcc

SEQ ID NO: 1164566 - RNA, 19 nt, Artificial Sequence
  Description of Artificial Sequence: Synthetic oligonucleotide
cgccauagucucuccuccc

SEQ ID NO: 1164567 - RNA, 19 nt, Artificial Sequence
  Description of Artificial Sequence: Synthetic oligonucleotide
ccggggucaggcacacccc

SEQ ID NO: 1164568 - RNA, 19 nt, Artificial Sequence
  Description of Artificial Sequence: Synthetic oligonucleotide
gguugccgggguuguaaua

SEQ ID NO: 1164569 - RNA, 19 nt, Artificial Sequence
  Description of Artificial Sequence: Synthetic oligonucleotide
cuacuacagugaggaacaa

SEQ ID NO: 1164570 - RNA, 19 nt, Artificial Sequence
  Description of Artificial Sequence: Synthetic oligonucleotide
gccauggguugagcuagug

SEQ ID NO: 1164571 - RNA, 19 nt, Artificial Sequence
  Description of Artificial Sequence: Synthetic oligonucleotide
cauaggccccacugggcau

SEQ ID NO: 1164572 - RNA, 19 nt, Artificial Sequence
  Description of Artificial Sequence: Synthetic oligonucleotide
cgaucacuccgccacccuc

SEQ ID NO: 1164573 - RNA, 19 nt, Artificial Sequence
  Description of Artificial Sequence: Synthetic oligonucleotide
ggacaguggcuuccggggu

SEQ ID NO: 1164574 - RNA, 19 nt, Artificial Sequence
  Description of Artificial Sequence: Synthetic oligonucleotide
gcuuccggggucaggcaca

SEQ ID NO: 1164575 - RNA, 19 nt, Artificial Sequence
  Description of Artificial Sequence: Synthetic oligonucleotide
ggacagacaugcacucucu

SEQ ID NO: 1164576 - RNA, 19 nt, Artificial Sequence
  Description of Artificial Sequence: Synthetic oligonucleotide
gcggcgccuucccagccac

SEQ ID NO: 1164577 - RNA, 19 nt, Artificial Sequence
  Description of Artificial Sequence: Synthetic oligonucleotide
uuccggggucaggcacacc

SEQ ID NO: 1164578 - RNA, 19 nt, Artificial Sequence
  Description of Artificial Sequence: Synthetic oligonucleotide
ccccuuguguaaaggggaa

SEQ ID NO: 1164579 - RNA, 19 nt, Artificial Sequence
  Description of Artificial Sequence: Synthetic oligonucleotide
ggugcaaacuggguuuauu

SEQ ID NO: 1164580 - RNA, 19 nt, Artificial Sequence
  Description of Artificial Sequence: Synthetic oligonucleotide
ggcgguggauagggguagc

SEQ ID NO: 1164581 - RNA, 19 nt, Artificial Sequence
  Description of Artificial Sequence: Synthetic oligonucleotide
gguacccauaggcuccauu

SEQ ID NO: 1164582 - RNA, 19 nt, Artificial Sequence
  Description of Artificial Sequence: Synthetic oligonucleotide
cccgagacucgcagcgcuc

SEQ ID NO: 1164583 - RNA, 19 nt, Artificial Sequence
  Description of Artificial Sequence: Synthetic oligonucleotide
cgguaugggguaagguaga

SEQ ID NO: 1164584 - RNA, 19 nt, Artificial Sequence
  Description of Artificial Sequence: Synthetic oligonucleotide
ccauggguugagcuagugu

SEQ ID NO: 1164585 - RNA, 19 nt, Artificial Sequence
  Description of Artificial Sequence: Synthetic oligonucleotide
ggagagacacaaggcgggu

SEQ ID NO: 1164586 - RNA, 19 nt, Artificial Sequence
  Description of Artificial Sequence: Synthetic oligonucleotide
caauagccccagagauggu

SEQ ID NO: 1164587 - RNA, 19 nt, Artificial Sequence
  Description of Artificial Sequence: Synthetic oligonucleotide
cuccucccacugggguccc

SEQ ID NO: 1164588 - RNA, 19 nt, Artificial Sequence
  Description of Artificial Sequence: Synthetic oligonucleotide
ggucguccagugagaggca

SEQ ID NO: 1164589 - RNA, 19 nt, Artificial Sequence
  Description of Artificial Sequence: Synthetic oligonucleotide
ggcuucaccucuggaggcu

SEQ ID NO: 1164590 - RNA, 19 nt, Artificial Sequence
  Description of Artificial Sequence: Synthetic oligonucleotide
ggccuguaggagagacaca

SEQ ID NO: 1164591 - RNA, 19 nt, Artificial Sequence
  Description of Artificial Sequence: Synthetic oligonucleotide
cccuccgagugauucuugu

SEQ ID NO: 1164592 - RNA, 19 nt, Artificial Sequence
  Description of Artificial Sequence: Synthetic oligonucleotide
ggguugccgggguuguaau

SEQ ID NO: 1164593 - RNA, 19 nt, Artificial Sequence
  Description of Artificial Sequence: Synthetic oligonucleotide
gcgccuucccagccaccuc

SEQ ID NO: 1164594 - RNA, 19 nt, Artificial Sequence
  Description of Artificial Sequence: Synthetic oligonucleotide
cgguggauagggguagcca

SEQ ID NO: 1164595 - RNA, 19 nt, Artificial Sequence
  Description of Artificial Sequence: Synthetic oligonucleotide
guggguugccgggguugua

SEQ ID NO: 1164596 - RNA, 19 nt, Artificial Sequence
  Description of Artificial Sequence: Synthetic oligonucleotide
ccucccacuggggucccga

SEQ ID NO: 1164597 - RNA, 19 nt, Artificial Sequence
  Description of Artificial Sequence: Synthetic oligonucleotide
gcuucaccucuggaggcuu

SEQ ID NO: 1164598 - RNA, 19 nt, Artificial Sequence
  Description of Artificial Sequence: Synthetic oligonucleotide
ccgagacucgcagcgcucu

SEQ ID NO: 1164599 - RNA, 19 nt, Artificial Sequence
  Description of Artificial Sequence: Synthetic oligonucleotide
gggcgggcgugaagcucac

SEQ ID NO: 1164600 - RNA, 19 nt, Artificial Sequence
  Description of Artificial Sequence: Synthetic oligonucleotide
cccagaccuaagucaugau

SEQ ID NO: 1164601 - RNA, 19 nt, Artificial Sequence
  Description of Artificial Sequence: Synthetic oligonucleotide
ggcgggcgugaagcucaca

SEQ ID NO: 1164602 - RNA, 19 nt, Artificial Sequence
  Description of Artificial Sequence: Synthetic oligonucleotide
cgccacccuccgagugauu

SEQ ID NO: 1164603 - RNA, 19 nt, Artificial Sequence
  Description of Artificial Sequence: Synthetic oligonucleotide
uuaacuuccacuuugcugg

SEQ ID NO: 1164604 - RNA, 19 nt, Artificial Sequence
  Description of Artificial Sequence: Synthetic oligonucleotide
gaugagaggaaucaggugc

SEQ ID NO: 1164605 - RNA, 19 nt, Artificial Sequence
  Description of Artificial Sequence: Synthetic oligonucleotide
acugguucggcccagcucc

SEQ ID NO: 1164606 - RNA, 19 nt, Artificial Sequence
  Description of Artificial Sequence: Synthetic oligonucleotide
aacugagcggcauauugcg

SEQ ID NO: 1164607 - RNA, 19 nt, Artificial Sequence
  Description of Artificial Sequence: Synthetic oligonucleotide
uacauucugaaccaccugc

SEQ ID NO: 1164608 - RNA, 19 nt, Artificial Sequence
  Description of Artificial Sequence: Synthetic oligonucleotide
aaucaggugcccugggccc

SEQ ID NO: 1164609 - RNA, 19 nt, Artificial Sequence
  Description of Artificial Sequence: Synthetic oligonucleotide
acaugcucggaacugagcg

SEQ ID NO: 1164610 - RNA, 19 nt, Artificial Sequence
  Description of Artificial Sequence: Synthetic oligonucleotide
cuaacaagaucccaguccc

SEQ ID NO: 1164611 - RNA, 19 nt, Artificial Sequence
  Description of Artificial Sequence: Synthetic oligonucleotide
acaauugccggaaaguggc

SEQ ID NO: 1164612 - RNA, 19 nt, Artificial Sequence
  Description of Artificial Sequence: Synthetic oligonucleotide
gcugguagcagacagaagg

SEQ ID NO: 1164613 - RNA, 19 nt, Artificial Sequence
  Description of Artificial Sequence: Synthetic oligonucleotide
accugcaugacaugggagc

SEQ ID NO: 1164614 - RNA, 19 nt, Artificial Sequence
  Description of Artificial Sequence: Synthetic oligonucleotide
auauugaccaccacuuugc

SEQ ID NO: 1164615 - RNA, 19 nt, Artificial Sequence
  Description of Artificial Sequence: Synthetic oligonucleotide
aacuggacaugcucggaac

SEQ ID NO: 1164616 - RNA, 19 nt, Artificial Sequence
  Description of Artificial Sequence: Synthetic oligonucleotide
aacaauugccggaaagugg

SEQ ID NO: 1164617 - RNA, 19 nt, Artificial Sequence
  Description of Artificial Sequence: Synthetic oligonucleotide
cuuuacgcagugcagacag

SEQ ID NO: 1164618 - RNA, 19 nt, Artificial Sequence
  Description of Artificial Sequence: Synthetic oligonucleotide
cauauugcgcucagcagcg

SEQ ID NO: 1164619 - RNA, 19 nt, Artificial Sequence
  Description of Artificial Sequence: Synthetic oligonucleotide
uagaugaccugcaugacau

SEQ ID NO: 1164620 - RNA, 19 nt, Artificial Sequence
  Description of Artificial Sequence: Synthetic oligonucleotide
uguggaugaacagugggcc

SEQ ID NO: 1164621 - RNA, 19 nt, Artificial Sequence
  Description of Artificial Sequence: Synthetic oligonucleotide
gguuuugcagcacacaaag

SEQ ID NO: 1164622 - RNA, 19 nt, Artificial Sequence
  Description of Artificial Sequence: Synthetic oligonucleotide
cucgaugagaggaaucagg

SEQ ID NO: 1164623 - RNA, 19 nt, Artificial Sequence
  Description of Artificial Sequence: Synthetic oligonucleotide
aggcuaguguuguuggugc

SEQ ID NO: 1164624 - RNA, 19 nt, Artificial Sequence
  Description of Artificial Sequence: Synthetic oligonucleotide
aguggcgcgaaccacaacu

SEQ ID NO: 1164625 - RNA, 19 nt, Artificial Sequence
  Description of Artificial Sequence: Synthetic oligonucleotide
cagcaguuggaccagaggc

SEQ ID NO: 1164626 - RNA, 19 nt, Artificial Sequence
  Description of Artificial Sequence: Synthetic oligonucleotide
cacgcuggaacaauugccg

SEQ ID NO: 1164627 - RNA, 19 nt, Artificial Sequence
  Description of Artificial Sequence: Synthetic oligonucleotide
aagaucccagucccaggcc

SEQ ID NO: 1164628 - RNA, 19 nt, Artificial Sequence
  Description of Artificial Sequence: Synthetic oligonucleotide
aggcgcuuuucuuggaucc

SEQ ID NO: 1164629 - RNA, 19 nt, Artificial Sequence
  Description of Artificial Sequence: Synthetic oligonucleotide
gaauugcuccggaagaggg

SEQ ID NO: 1164630 - RNA, 19 nt, Artificial Sequence
  Description of Artificial Sequence: Synthetic oligonucleotide
acgucuguagcucuagaag

SEQ ID NO: 1164631 - RNA, 19 nt, Artificial Sequence
  Description of Artificial Sequence: Synthetic oligonucleotide
agagaauugcuccggaaga

SEQ ID NO: 1164632 - RNA, 19 nt, Artificial Sequence
  Description of Artificial Sequence: Synthetic oligonucleotide
auguccacgagcuuggcga

SEQ ID NO: 1164633 - RNA, 19 nt, Artificial Sequence
  Description of Artificial Sequence: Synthetic oligonucleotide
guuggugcucacuuuacgc

SEQ ID NO: 1164634 - RNA, 19 nt, Artificial Sequence
  Description of Artificial Sequence: Synthetic oligonucleotide
acauccuuaacuuccacuu

SEQ ID NO: 1164635 - RNA, 19 nt, Artificial Sequence
  Description of Artificial Sequence: Synthetic oligonucleotide
gaacaauugccggaaagug

SEQ ID NO: 1164636 - RNA, 19 nt, Artificial Sequence
  Description of Artificial Sequence: Synthetic oligonucleotide
guugcccucgccucgacgg

SEQ ID NO: 1164637 - RNA, 19 nt, Artificial Sequence
  Description of Artificial Sequence: Synthetic oligonucleotide
cagagaauugcuccggaag

SEQ ID NO: 1164638 - RNA, 19 nt, Artificial Sequence
  Description of Artificial Sequence: Synthetic oligonucleotide
agaaagucauuccugcuaa

SEQ ID NO: 1164639 - RNA, 19 nt, Artificial Sequence
  Description of Artificial Sequence: Synthetic oligonucleotide
cacacaaagcagcugggcc

SEQ ID NO: 1164640 - RNA, 19 nt, Artificial Sequence
  Description of Artificial Sequence: Synthetic oligonucleotide
acacuugcacugcagguag

SEQ ID NO: 1164641 - RNA, 19 nt, Artificial Sequence
  Description of Artificial Sequence: Synthetic oligonucleotide
cuuggagaaacuaagggcu

SEQ ID NO: 1164642 - RNA, 19 nt, Artificial Sequence
  Description of Artificial Sequence: Synthetic oligonucleotide
auugccggaaaguggcgcg

SEQ ID NO: 1164643 - RNA, 19 nt, Artificial Sequence
  Description of Artificial Sequence: Synthetic oligonucleotide
ucuagaaggugauggggcu

SEQ ID NO: 1164644 - RNA, 19 nt, Artificial Sequence
  Description of Artificial Sequence: Synthetic oligonucleotide
uuggugcucacuuuacgca

SEQ ID NO: 1164645 - RNA, 19 nt, Artificial Sequence
  Description of Artificial Sequence: Synthetic oligonucleotide
agagcagauccagaaaguc

SEQ ID NO: 1164646 - RNA, 19 nt, Artificial Sequence
  Description of Artificial Sequence: Synthetic oligonucleotide
uuacgcagugcagacagcc

SEQ ID NO: 1164647 - RNA, 19 nt, Artificial Sequence
  Description of Artificial Sequence: Synthetic oligonucleotide
ugggucauuccauuccugc

SEQ ID NO: 1164648 - RNA, 19 nt, Artificial Sequence
  Description of Artificial Sequence: Synthetic oligonucleotide
acggcuuuuggacugguca

SEQ ID NO: 1164649 - RNA, 19 nt, Artificial Sequence
  Description of Artificial Sequence: Synthetic oligonucleotide
augagaggaaucaggugcc

SEQ ID NO: 1164650 - RNA, 19 nt, Artificial Sequence
  Description of Artificial Sequence: Synthetic oligonucleotide
acaugggagcugccgaagc

SEQ ID NO: 1164651 - RNA, 19 nt, Artificial Sequence
  Description of Artificial Sequence: Synthetic oligonucleotide
uccuuaacuuccacuuugc

SEQ ID NO: 1164652 - RNA, 19 nt, Artificial Sequence
  Description of Artificial Sequence: Synthetic oligonucleotide
gauagcgcaucccugccac

SEQ ID NO: 1164653 - RNA, 19 nt, Artificial Sequence
  Description of Artificial Sequence: Synthetic oligonucleotide
augcucggaacugagcggc

SEQ ID NO: 1164654 - RNA, 19 nt, Artificial Sequence
  Description of Artificial Sequence: Synthetic oligonucleotide
uauugaccaccacuuugcc

SEQ ID NO: 1164655 - RNA, 19 nt, Artificial Sequence
  Description of Artificial Sequence: Synthetic oligonucleotide
accugcaaguucaaugccc

SEQ ID NO: 1164656 - RNA, 19 nt, Artificial Sequence
  Description of Artificial Sequence: Synthetic oligonucleotide
gcauauugcgcucagcagc

SEQ ID NO: 1164657 - RNA, 19 nt, Artificial Sequence
  Description of Artificial Sequence: Synthetic oligonucleotide
uggugcucacuuuacgcag

SEQ ID NO: 1164658 - RNA, 19 nt, Artificial Sequence
  Description of Artificial Sequence: Synthetic oligonucleotide
ucguucacacacuugcacu

SEQ ID NO: 1164659 - RNA, 19 nt, Artificial Sequence
  Description of Artificial Sequence: Synthetic oligonucleotide
uauugcgcucagcagcgcc

SEQ ID NO: 1164660 - RNA, 19 nt, Artificial Sequence
  Description of Artificial Sequence: Synthetic oligonucleotide
uugaagggagggaggacgc

SEQ ID NO: 1164661 - RNA, 19 nt, Artificial Sequence
  Description of Artificial Sequence: Synthetic oligonucleotide
ucacuuuacgcagugcaga

SEQ ID NO: 1164662 - RNA, 19 nt, Artificial Sequence
  Description of Artificial Sequence: Synthetic oligonucleotide
uccucgaugagaggaauca

SEQ ID NO: 1164663 - RNA, 19 nt, Artificial Sequence
  Description of Artificial Sequence: Synthetic oligonucleotide
ggaacugagcggcauauug

SEQ ID NO: 1164664 - RNA, 19 nt, Artificial Sequence
  Description of Artificial Sequence: Synthetic oligonucleotide
ucgaacacucugucaauga

SEQ ID NO: 1164665 - RNA, 19 nt, Artificial Sequence
  Description of Artificial Sequence: Synthetic oligonucleotide
ugcagauagcgcaucccug

SEQ ID NO: 1164666 - RNA, 19 nt, Artificial Sequence
  Description of Artificial Sequence: Synthetic oligonucleotide
uccguuuccccacucagua

SEQ ID NO: 1164667 - RNA, 19 nt, Artificial Sequence
  Description of Artificial Sequence: Synthetic oligonucleotide
ucucuggauauugaccacc

SEQ ID NO: 1164668 - RNA, 19 nt, Artificial Sequence
  Description of Artificial Sequence: Synthetic oligonucleotide
gagguuuugcagcacacaa

SEQ ID NO: 1164669 - RNA, 19 nt, Artificial Sequence
  Description of Artificial Sequence: Synthetic oligonucleotide
ggagaaguagaguuucuug

SEQ ID NO: 1164670 - RNA, 19 nt, Artificial Sequence
  Description of Artificial Sequence: Synthetic oligonucleotide
ggauuuugaggccagagaa

SEQ ID NO: 1164671 - RNA, 19 nt, Artificial Sequence
  Description of Artificial Sequence: Synthetic oligonucleotide
uuccuggcgacacucggca

SEQ ID NO: 1164672 - RNA, 19 nt, Artificial Sequence
  Description of Artificial Sequence: Synthetic oligonucleotide
ugaaccaccugcacacgcu

SEQ ID NO: 1164673 - RNA, 19 nt, Artificial Sequence
  Description of Artificial Sequence: Synthetic oligonucleotide
auuuugaggccagagaauu

SEQ ID NO: 1164674 - RNA, 19 nt, Artificial Sequence
  Description of Artificial Sequence: Synthetic oligonucleotide
aaggagcccagguugcccu

SEQ ID NO: 1164675 - RNA, 19 nt, Artificial Sequence
  Description of Artificial Sequence: Synthetic oligonucleotide
gauccggaugucuuggaga

SEQ ID NO: 1164676 - RNA, 19 nt, Artificial Sequence
  Description of Artificial Sequence: Synthetic oligonucleotide
caugacaugggagcugccg

SEQ ID NO: 1164677 - RNA, 19 nt, Artificial Sequence
  Description of Artificial Sequence: Synthetic oligonucleotide
ugcaugacaugggagcugc

SEQ ID NO: 1164678 - RNA, 19 nt, Artificial Sequence
  Description of Artificial Sequence: Synthetic oligonucleotide
acugguuguuuccucgaug

SEQ ID NO: 1164679 - RNA, 19 nt, Artificial Sequence
  Description of Artificial Sequence: Synthetic oligonucleotide
caugcucggaacugagcgg

SEQ ID NO: 1164680 - RNA, 19 nt, Artificial Sequence
  Description of Artificial Sequence: Synthetic oligonucleotide
agugggcuguagugguucc

SEQ ID NO: 1164681 - RNA, 19 nt, Artificial Sequence
  Description of Artificial Sequence: Synthetic oligonucleotide
ucaacucguucacacacuu

SEQ ID NO: 1164682 - RNA, 19 nt, Artificial Sequence
  Description of Artificial Sequence: Synthetic oligonucleotide
cugguuguuuccucgauga

SEQ ID NO: 1164683 - RNA, 19 nt, Artificial Sequence
  Description of Artificial Sequence: Synthetic oligonucleotide
uucaacucguucacacacu

SEQ ID NO: 1164684 - RNA, 19 nt, Artificial Sequence
  Description of Artificial Sequence: Synthetic oligonucleotide
agugggucauuccauuccu

SEQ ID NO: 1164685 - RNA, 19 nt, Artificial Sequence
  Description of Artificial Sequence: Synthetic oligonucleotide
uucaaugcccgcugcagau

SEQ ID NO: 1164686 - RNA, 19 nt, Artificial Sequence
  Description of Artificial Sequence: Synthetic oligonucleotide
ccugcuaacaagaucccag

SEQ ID NO: 1164687 - RNA, 19 nt, Artificial Sequence
  Description of Artificial Sequence: Synthetic oligonucleotide
gaugucuuggagaaacuaa

SEQ ID NO: 1164688 - RNA, 19 nt, Artificial Sequence
  Description of Artificial Sequence: Synthetic oligonucleotide
caaugcccgcugcagaucc

SEQ ID NO: 1164689 - RNA, 19 nt, Artificial Sequence
  Description of Artificial Sequence: Synthetic oligonucleotide
cucguucacacacuugcac

SEQ ID NO: 1164690 - RNA, 19 nt, Artificial Sequence
  Description of Artificial Sequence: Synthetic oligonucleotide
ugcgcucugcuccaacacc

SEQ ID NO: 1164691 - RNA, 19 nt, Artificial Sequence
  Description of Artificial Sequence: Synthetic oligonucleotide
agaucugucuuguccuucu

SEQ ID NO: 1164692 - RNA, 19 nt, Artificial Sequence
  Description of Artificial Sequence: Synthetic oligonucleotide
gcaccugcaaguucaaugc

SEQ ID NO: 1164693 - RNA, 19 nt, Artificial Sequence
  Description of Artificial Sequence: Synthetic oligonucleotide
uggcgcgaaccacaacugg

SEQ ID NO: 1164694 - RNA, 19 nt, Artificial Sequence
  Description of Artificial Sequence: Synthetic oligonucleotide
gaaaagacuccauggauuu

SEQ ID NO: 1164695 - RNA, 19 nt, Artificial Sequence
  Description of Artificial Sequence: Synthetic oligonucleotide
ugagggagaaguagaguuu

SEQ ID NO: 1164696 - RNA, 19 nt, Artificial Sequence
  Description of Artificial Sequence: Synthetic oligonucleotide
cuuggauccggaugucuug

SEQ ID NO: 1164697 - RNA, 19 nt, Artificial Sequence
  Description of Artificial Sequence: Synthetic oligonucleotide
cacuuuacgcagugcagac

SEQ ID NO: 1164698 - RNA, 19 nt, Artificial Sequence
  Description of Artificial Sequence: Synthetic oligonucleotide
ugcaccacacccuggcgca

SEQ ID NO: 1164699 - RNA, 19 nt, Artificial Sequence
  Description of Artificial Sequence: Synthetic oligonucleotide
acgcuggaacaauugccgg

SEQ ID NO: 1164700 - RNA, 19 nt, Artificial Sequence
  Description of Artificial Sequence: Synthetic oligonucleotide
cacggaagacgccagggug

SEQ ID NO: 1164701 - RNA, 19 nt, Artificial Sequence
  Description of Artificial Sequence: Synthetic oligonucleotide
ccuguagaugagcugagcc

SEQ ID NO: 1164702 - RNA, 19 nt, Artificial Sequence
  Description of Artificial Sequence: Synthetic oligonucleotide
ugguuguuuccucgaugag

SEQ ID NO: 1164703 - RNA, 19 nt, Artificial Sequence
  Description of Artificial Sequence: Synthetic oligonucleotide
uauugccuacauucugaac

SEQ ID NO: 1164704 - RNA, 19 nt, Artificial Sequence
  Description of Artificial Sequence: Synthetic oligonucleotide
uagagcugugggcuucuug

SEQ ID NO: 1164705 - RNA, 19 nt, Artificial Sequence
  Description of Artificial Sequence: Synthetic oligonucleotide
uuccugcuaacaagauccc

SEQ ID NO: 1164706 - RNA, 19 nt, Artificial Sequence
  Description of Artificial Sequence: Synthetic oligonucleotide
accggcguguccauauugc

SEQ ID NO: 1164707 - RNA, 19 nt, Artificial Sequence
  Description of Artificial Sequence: Synthetic oligonucleotide
ugaacagugggcccuccuu

SEQ ID NO: 1164708 - RNA, 19 nt, Artificial Sequence
  Description of Artificial Sequence: Synthetic oligonucleotide
gcagauagcgcaucccugc

SEQ ID NO: 1164709 - RNA, 19 nt, Artificial Sequence
  Description of Artificial Sequence: Synthetic oligonucleotide
cuccggaagaggguguugg

SEQ ID NO: 1164710 - RNA, 19 nt, Artificial Sequence
  Description of Artificial Sequence: Synthetic oligonucleotide
ugguagcagacagaaggca

SEQ ID NO: 1164711 - RNA, 19 nt, Artificial Sequence
  Description of Artificial Sequence: Synthetic oligonucleotide
cucgacggcuuuuggacug

SEQ ID NO: 1164712 - RNA, 19 nt, Artificial Sequence
  Description of Artificial Sequence: Synthetic oligonucleotide
gguagcagacagaaggcag

SEQ ID NO: 1164713 - RNA, 19 nt, Artificial Sequence
  Description of Artificial Sequence: Synthetic oligonucleotide
caauugccggaaaguggcg

SEQ ID NO: 1164714 - RNA, 19 nt, Artificial Sequence
  Description of Artificial Sequence: Synthetic oligonucleotide
gaaagucauuccugcuaac

SEQ ID NO: 1164715 - RNA, 19 nt, Artificial Sequence
  Description of Artificial Sequence: Synthetic oligonucleotide
uuggagaaacuaagggcuu

SEQ ID NO: 1164716 - RNA, 19 nt, Artificial Sequence
  Description of Artificial Sequence: Synthetic oligonucleotide
cucggcacugguuguuucc

SEQ ID NO: 1164717 - RNA, 19 nt, Artificial Sequence
  Description of Artificial Sequence: Synthetic oligonucleotide
uuccguuuccccacucagu

SEQ ID NO: 1164718 - RNA, 19 nt, Artificial Sequence
  Description of Artificial Sequence: Synthetic oligonucleotide
aaguggcgcgaaccacaac

SEQ ID NO: 1164719 - RNA, 19 nt, Artificial Sequence
  Description of Artificial Sequence: Synthetic oligonucleotide
aggaaucaggugcccuggg

SEQ ID NO: 1164720 - RNA, 19 nt, Artificial Sequence
  Description of Artificial Sequence: Synthetic oligonucleotide
cuacauucugaaccaccug

SEQ ID NO: 1164721 - RNA, 19 nt, Artificial Sequence
  Description of Artificial Sequence: Synthetic oligonucleotide
acugagcggcauauugcgc

SEQ ID NO: 1164722 - RNA, 19 nt, Artificial Sequence
  Description of Artificial Sequence: Synthetic oligonucleotide
uacgcagugcagacagcca

SEQ ID NO: 1164723 - RNA, 19 nt, Artificial Sequence
  Description of Artificial Sequence: Synthetic oligonucleotide
guagaugagcugagccucg

SEQ ID NO: 1164724 - RNA, 19 nt, Artificial Sequence
  Description of Artificial Sequence: Synthetic oligonucleotide
ggcauauugcgcucagcag

SEQ ID NO: 1164725 - RNA, 19 nt, Artificial Sequence
  Description of Artificial Sequence: Synthetic oligonucleotide
caugcagauagcgcauccc

SEQ ID NO: 1164726 - RNA, 19 nt, Artificial Sequence
  Description of Artificial Sequence: Synthetic oligonucleotide
acucaguagccggugcuuc

SEQ ID NO: 1164727 - RNA, 19 nt, Artificial Sequence
  Description of Artificial Sequence: Synthetic oligonucleotide
ugacaugggagcugccgaa

SEQ ID NO: 1164728 - RNA, 19 nt, Artificial Sequence
  Description of Artificial Sequence: Synthetic oligonucleotide
cuggauauugaccaccacu

SEQ ID NO: 1164729 - RNA, 19 nt, Artificial Sequence
  Description of Artificial Sequence: Synthetic oligonucleotide
ucgaggucgugguccagug

SEQ ID NO: 1164730 - RNA, 19 nt, Artificial Sequence
  Description of Artificial Sequence: Synthetic oligonucleotide
aagaggguguuggccucac

SEQ ID NO: 1164731 - RNA, 19 nt, Artificial Sequence
  Description of Artificial Sequence: Synthetic oligonucleotide
gugagggagaaguagaguu

SEQ ID NO: 1164732 - RNA, 19 nt, Artificial Sequence
  Description of Artificial Sequence: Synthetic oligonucleotide
uguccauauugccuacauu

SEQ ID NO: 1164733 - RNA, 19 nt, Artificial Sequence
  Description of Artificial Sequence: Synthetic oligonucleotide
aguuucuugaagggaggga

SEQ ID NO: 1164734 - RNA, 19 nt, Artificial Sequence
  Description of Artificial Sequence: Synthetic oligonucleotide
acucggcacugguuguuuc

SEQ ID NO: 1164735 - RNA, 19 nt, Artificial Sequence
  Description of Artificial Sequence: Synthetic oligonucleotide
cucgaacacucugucaaug

SEQ ID NO: 1164736 - RNA, 19 nt, Artificial Sequence
  Description of Artificial Sequence: Synthetic oligonucleotide
cagauagcgcaucccugcc

SEQ ID NO: 1164737 - RNA, 19 nt, Artificial Sequence
  Description of Artificial Sequence: Synthetic oligonucleotide
gaggacgccacgcggcccc

SEQ ID NO: 1164738 - RNA, 19 nt, Artificial Sequence
  Description of Artificial Sequence: Synthetic oligonucleotide
gaccggcguguccauauug

SEQ ID NO: 1164739 - RNA, 19 nt, Artificial Sequence
  Description of Artificial Sequence: Synthetic oligonucleotide
agauagcgcaucccugcca

SEQ ID NO: 1164740 - RNA, 19 nt, Artificial Sequence
  Description of Artificial Sequence: Synthetic oligonucleotide
gcucuagaaggugaugggg

SEQ ID NO: 1164741 - RNA, 19 nt, Artificial Sequence
  Description of Artificial Sequence: Synthetic oligonucleotide
aagacuccauggauuuuga

SEQ ID NO: 1164742 - RNA, 19 nt, Artificial Sequence
  Description of Artificial Sequence: Synthetic oligonucleotide
ggaugccaugcagauagcg

SEQ ID NO: 1164743 - RNA, 19 nt, Artificial Sequence
  Description of Artificial Sequence: Synthetic oligonucleotide
ucacgucuguagcucuaga

SEQ ID NO: 1164744 - RNA, 19 nt, Artificial Sequence
  Description of Artificial Sequence: Synthetic oligonucleotide
gacaugggagcugccgaag

SEQ ID NO: 1164745 - RNA, 19 nt, Artificial Sequence
  Description of Artificial Sequence: Synthetic oligonucleotide
cagggugguaggaucccag

SEQ ID NO: 1164746 - RNA, 19 nt, Artificial Sequence
  Description of Artificial Sequence: Synthetic oligonucleotide
ugagaggaaucaggugccc

SEQ ID NO: 1164747 - RNA, 19 nt, Artificial Sequence
  Description of Artificial Sequence: Synthetic oligonucleotide
ugcacacgcuggaacaauu

SEQ ID NO: 1164748 - RNA, 19 nt, Artificial Sequence
  Description of Artificial Sequence: Synthetic oligonucleotide
caccacgugggcacgcagc

SEQ ID NO: 1164749 - RNA, 19 nt, Artificial Sequence
  Description of Artificial Sequence: Synthetic oligonucleotide
aaaguggcgcgaaccacaa

SEQ ID NO: 1164750 - RNA, 19 nt, Artificial Sequence
  Description of Artificial Sequence: Synthetic oligonucleotide
cacgugggcacgcagcguc

SEQ ID NO: 1164751 - RNA, 19 nt, Artificial Sequence
  Description of Artificial Sequence: Synthetic oligonucleotide
agucgcaccuccaacugca

SEQ ID NO: 1164752 - RNA, 19 nt, Artificial Sequence
  Description of Artificial Sequence: Synthetic oligonucleotide
gagagugggucuugucaca

SEQ ID NO: 1164753 - RNA, 19 nt, Artificial Sequence
  Description of Artificial Sequence: Synthetic oligonucleotide
gguuguuuccucgaugaga

SEQ ID NO: 1164754 - RNA, 19 nt, Artificial Sequence
  Description of Artificial Sequence: Synthetic oligonucleotide
gagugggucuugucacagc

SEQ ID NO: 1164755 - RNA, 19 nt, Artificial Sequence
  Description of Artificial Sequence: Synthetic oligonucleotide
ucacugguucggcccagcu

SEQ ID NO: 1164756 - RNA, 19 nt, Artificial Sequence
  Description of Artificial Sequence: Synthetic oligonucleotide
ccccuuuggccuuuggucc

SEQ ID NO: 1164757 - RNA, 19 nt, Artificial Sequence
  Description of Artificial Sequence: Synthetic oligonucleotide
aaaagacuccauggauuuu

SEQ ID NO: 1164758 - RNA, 19 nt, Artificial Sequence
  Description of Artificial Sequence: Synthetic oligonucleotide
auauugcgcucagcagcgc

SEQ ID NO: 1164759 - RNA, 19 nt, Artificial Sequence
  Description of Artificial Sequence: Synthetic oligonucleotide
ggauccggaugucuuggag

SEQ ID NO: 1164760 - RNA, 19 nt, Artificial Sequence
  Description of Artificial Sequence: Synthetic oligonucleotide
gcugcagucggaaccagcc

SEQ ID NO: 1164761 - RNA, 19 nt, Artificial Sequence
  Description of Artificial Sequence: Synthetic oligonucleotide
ugagcggcauauugcgcuc

SEQ ID NO: 1164762 - RNA, 19 nt, Artificial Sequence
  Description of Artificial Sequence: Synthetic oligonucleotide
ggaaucaggugcccugggc

SEQ ID NO: 1164763 - RNA, 19 nt, Artificial Sequence
  Description of Artificial Sequence: Synthetic oligonucleotide
uuuccucgaugagaggaau

SEQ ID NO: 1164764 - RNA, 19 nt, Artificial Sequence
  Description of Artificial Sequence: Synthetic oligonucleotide
gaaaguccuuggcgagccc

SEQ ID NO: 1164765 - RNA, 19 nt, Artificial Sequence
  Description of Artificial Sequence: Synthetic oligonucleotide
cuguagaugagcugagccu

SEQ ID NO: 1164766 - RNA, 19 nt, Artificial Sequence
  Description of Artificial Sequence: Synthetic oligonucleotide
ucggaacugagcggcauau

SEQ ID NO: 1164767 - RNA, 19 nt, Artificial Sequence
  Description of Artificial Sequence: Synthetic oligonucleotide
agcggcauauugcgcucag

SEQ ID NO: 1164768 - RNA, 19 nt, Artificial Sequence
  Description of Artificial Sequence: Synthetic oligonucleotide
uagcgcaucccugccaccu

SEQ ID NO: 1164769 - RNA, 19 nt, Artificial Sequence
  Description of Artificial Sequence: Synthetic oligonucleotide
cguuuccccacucaguagc

SEQ ID NO: 1164770 - RNA, 19 nt, Artificial Sequence
  Description of Artificial Sequence: Synthetic oligonucleotide
cagucgcaccuccaacugc

SEQ ID NO: 1164771 - RNA, 19 nt, Artificial Sequence
  Description of Artificial Sequence: Synthetic oligonucleotide
ugggagcugccgaagcuuu

SEQ ID NO: 1164772 - RNA, 19 nt, Artificial Sequence
  Description of Artificial Sequence: Synthetic oligonucleotide
ucgccucgacggcuuuugg

SEQ ID NO: 1164773 - RNA, 19 nt, Artificial Sequence
  Description of Artificial Sequence: Synthetic oligonucleotide
cacgucuguagcucuagaa

SEQ ID NO: 1164774 - RNA, 19 nt, Artificial Sequence
  Description of Artificial Sequence: Synthetic oligonucleotide
ggcuuuuggacuggucagg

SEQ ID NO: 1164775 - RNA, 19 nt, Artificial Sequence
  Description of Artificial Sequence: Synthetic oligonucleotide
guagcucuagaaggugaug

SEQ ID NO: 1164776 - RNA, 19 nt, Artificial Sequence
  Description of Artificial Sequence: Synthetic oligonucleotide
cugagcggcauauugcgcu

SEQ ID NO: 1164777 - RNA, 19 nt, Artificial Sequence
  Description of Artificial Sequence: Synthetic oligonucleotide
ucgacggcuuuuggacugg

SEQ ID NO: 1164778 - RNA, 19 nt, Artificial Sequence
  Description of Artificial Sequence: Synthetic oligonucleotide
uggauccggaugucuugga

SEQ ID NO: 1164779 - RNA, 19 nt, Artificial Sequence
  Description of Artificial Sequence: Synthetic oligonucleotide
acuaagggcuucaguggug

SEQ ID NO: 1164780 - RNA, 19 nt, Artificial Sequence
  Description of Artificial Sequence: Synthetic oligonucleotide
gucucuggauauugaccac

SEQ ID NO: 1164781 - RNA, 19 nt, Artificial Sequence
  Description of Artificial Sequence: Synthetic oligonucleotide
ucggcacugguuguuuccu

SEQ ID NO: 1164782 - RNA, 19 nt, Artificial Sequence
  Description of Artificial Sequence: Synthetic oligonucleotide
cacgagcuuggcgaugaag

SEQ ID NO: 1164783 - RNA, 19 nt, Artificial Sequence
  Description of Artificial Sequence: Synthetic oligonucleotide
gauuuugaggccagagaau

SEQ ID NO: 1164784 - RNA, 19 nt, Artificial Sequence
  Description of Artificial Sequence: Synthetic oligonucleotide
uguccacgagcuuggcgau

SEQ ID NO: 1164785 - RNA, 19 nt, Artificial Sequence
  Description of Artificial Sequence: Synthetic oligonucleotide
uugcuccggaagagggugu

SEQ ID NO: 1164786 - RNA, 19 nt, Artificial Sequence
  Description of Artificial Sequence: Synthetic oligonucleotide
ccggaugucuuggagaaac

SEQ ID NO: 1164787 - RNA, 19 nt, Artificial Sequence
  Description of Artificial Sequence: Synthetic oligonucleotide
acaacuggacaugcucgga

SEQ ID NO: 1164788 - RNA, 19 nt, Artificial Sequence
  Description of Artificial Sequence: Synthetic oligonucleotide
cagugcagacagccacugg

SEQ ID NO: 1164789 - RNA, 19 nt, Artificial Sequence
  Description of Artificial Sequence: Synthetic oligonucleotide
gagcugugggcuucuugga

SEQ ID NO: 1164790 - RNA, 19 nt, Artificial Sequence
  Description of Artificial Sequence: Synthetic oligonucleotide
uugcccucgccucgacggc

SEQ ID NO: 1164791 - RNA, 19 nt, Artificial Sequence
  Description of Artificial Sequence: Synthetic oligonucleotide
gcuuuuggacuggucaggc

SEQ ID NO: 1164792 - RNA, 19 nt, Artificial Sequence
  Description of Artificial Sequence: Synthetic oligonucleotide
ggcguguccauauugccua

SEQ ID NO: 1164793 - RNA, 19 nt, Artificial Sequence
  Description of Artificial Sequence: Synthetic oligonucleotide
cucuuuggcccuggagacc

SEQ ID NO: 1164794 - RNA, 19 nt, Artificial Sequence
  Description of Artificial Sequence: Synthetic oligonucleotide
cccggcuucaccucccugc

SEQ ID NO: 1164795 - RNA, 19 nt, Artificial Sequence
  Description of Artificial Sequence: Synthetic oligonucleotide
gugcgcucugcuccaacac

SEQ ID NO: 1164796 - RNA, 19 nt, Artificial Sequence
  Description of Artificial Sequence: Synthetic oligonucleotide
gcuguagugguuccaucca

SEQ ID NO: 1164797 - RNA, 19 nt, Artificial Sequence
  Description of Artificial Sequence: Synthetic oligonucleotide
agguuuugcagcacacaaa

SEQ ID NO: 1164798 - RNA, 19 nt, Artificial Sequence
  Description of Artificial Sequence: Synthetic oligonucleotide
gaaggcagcacggugucau

SEQ ID NO: 1164799 - RNA, 19 nt, Artificial Sequence
  Description of Artificial Sequence: Synthetic oligonucleotide
cacugguucggcccagcuc

SEQ ID NO: 1164800 - RNA, 19 nt, Artificial Sequence
  Description of Artificial Sequence: Synthetic oligonucleotide
gcagucgcaccuccaacug

SEQ ID NO: 1164801 - RNA, 19 nt, Artificial Sequence
  Description of Artificial Sequence: Synthetic oligonucleotide
cacccuacauccuuaacuu

SEQ ID NO: 1164802 - RNA, 19 nt, Artificial Sequence
  Description of Artificial Sequence: Synthetic oligonucleotide
cgagagugggucuugucac

SEQ ID NO: 1164803 - RNA, 19 nt, Artificial Sequence
  Description of Artificial Sequence: Synthetic oligonucleotide
ggcagcacggugucauccc

SEQ ID NO: 1164804 - RNA, 19 nt, Artificial Sequence
  Description of Artificial Sequence: Synthetic oligonucleotide
guggcgcgaaccacaacug

SEQ ID NO: 1164805 - RNA, 19 nt, Artificial Sequence
  Description of Artificial Sequence: Synthetic oligonucleotide
guuuccucgaugagaggaa

SEQ ID NO: 1164806 - RNA, 19 nt, Artificial Sequence
  Description of Artificial Sequence: Synthetic oligonucleotide
ccggaugcuggccagcuug

SEQ ID NO: 1164807 - RNA, 19 nt, Artificial Sequence
  Description of Artificial Sequence: Synthetic oligonucleotide
gccuacauucugaaccacc

SEQ ID NO: 1164808 - RNA, 19 nt, Artificial Sequence
  Description of Artificial Sequence: Synthetic oligonucleotide
gucaucccgcagucgcacc

SEQ ID NO: 1164809 - RNA, 19 nt, Artificial Sequence
  Description of Artificial Sequence: Synthetic oligonucleotide
uccauuccugcagggucac

SEQ ID NO: 1164810 - RNA, 19 nt, Artificial Sequence
  Description of Artificial Sequence: Synthetic oligonucleotide
cuuggagguuuugcagcac

SEQ ID NO: 1164811 - RNA, 19 nt, Artificial Sequence
  Description of Artificial Sequence: Synthetic oligonucleotide
ggagaaacuaagggcuuca

SEQ ID NO: 1164812 - RNA, 19 nt, Artificial Sequence
  Description of Artificial Sequence: Synthetic oligonucleotide
uugccggaaaguggcgcga

SEQ ID NO: 1164813 - RNA, 19 nt, Artificial Sequence
  Description of Artificial Sequence: Synthetic oligonucleotide
cucgccucgacggcuuuug

SEQ ID NO: 1164814 - RNA, 19 nt, Artificial Sequence
  Description of Artificial Sequence: Synthetic oligonucleotide
cuggcgacacucggcacug

SEQ ID NO: 1164815 - RNA, 19 nt, Artificial Sequence
  Description of Artificial Sequence: Synthetic oligonucleotide
gguugcccucgccucgacg

SEQ ID NO: 1164816 - RNA, 19 nt, Artificial Sequence
  Description of Artificial Sequence: Synthetic oligonucleotide
ggaaaguggcgcgaaccac

SEQ ID NO: 1164817 - RNA, 19 nt, Artificial Sequence
  Description of Artificial Sequence: Synthetic oligonucleotide
guagacagucugggcccgg

SEQ ID NO: 1164818 - RNA, 19 nt, Artificial Sequence
  Description of Artificial Sequence: Synthetic oligonucleotide
caccuccaacugcaaggag

SEQ ID NO: 1164819 - RNA, 19 nt, Artificial Sequence
  Description of Artificial Sequence: Synthetic oligonucleotide
cacagugggcuguaguggu

SEQ ID NO: 1164820 - RNA, 19 nt, Artificial Sequence
  Description of Artificial Sequence: Synthetic oligonucleotide
ccggaaaguggcgcgaacc

SEQ ID NO: 1164821 - RNA, 19 nt, Artificial Sequence
  Description of Artificial Sequence: Synthetic oligonucleotide
ggcgcuuuucuuggauccg

SEQ ID NO: 1164822 - RNA, 19 nt, Artificial Sequence
  Description of Artificial Sequence: Synthetic oligonucleotide
agguugcccucgccucgac

SEQ ID NO: 1164823 - RNA, 19 nt, Artificial Sequence
  Description of Artificial Sequence: Synthetic oligonucleotide
augggagcugccgaagcuu

SEQ ID NO: 1164824 - RNA, 19 nt, Artificial Sequence
  Description of Artificial Sequence: Synthetic oligonucleotide
ccuacauucugaaccaccu

SEQ ID NO: 1164825 - RNA, 19 nt, Artificial Sequence
  Description of Artificial Sequence: Synthetic oligonucleotide
cguccgugcgcucugcucc

SEQ ID NO: 1164826 - RNA, 19 nt, Artificial Sequence
  Description of Artificial Sequence: Synthetic oligonucleotide
gacacucggcacugguugu

SEQ ID NO: 1164827 - RNA, 19 nt, Artificial Sequence
  Description of Artificial Sequence: Synthetic oligonucleotide
ccaguguguccucuccacc

SEQ ID NO: 1164828 - RNA, 19 nt, Artificial Sequence
  Description of Artificial Sequence: Synthetic oligonucleotide
ccgagagugggucuuguca

SEQ ID NO: 1164829 - RNA, 19 nt, Artificial Sequence
  Description of Artificial Sequence: Synthetic oligonucleotide
agcccggaugcuggccagc

SEQ ID NO: 1164830 - RNA, 19 nt, Artificial Sequence
  Description of Artificial Sequence: Synthetic oligonucleotide
ccggcguguccauauugcc

SEQ ID NO: 1164831 - RNA, 19 nt, Artificial Sequence
  Description of Artificial Sequence: Synthetic oligonucleotide
ggcacgcagcguccgugcg

SEQ ID NO: 1164832 - RNA, 19 nt, Artificial Sequence
  Description of Artificial Sequence: Synthetic oligonucleotide
agagcacccuacauccuua

SEQ ID NO: 1164833 - RNA, 19 nt, Artificial Sequence
  Description of Artificial Sequence: Synthetic oligonucleotide
ggaugucuuggagaaacua

SEQ ID NO: 1164834 - RNA, 19 nt, Artificial Sequence
  Description of Artificial Sequence: Synthetic oligonucleotide
cgaugagaggaaucaggug

SEQ ID NO: 1164835 - RNA, 19 nt, Artificial Sequence
  Description of Artificial Sequence: Synthetic oligonucleotide
gcacacgcuggaacaauug

SEQ ID NO: 1164836 - RNA, 19 nt, Artificial Sequence
  Description of Artificial Sequence: Synthetic oligonucleotide
ucuggacggcgggccagcc

SEQ ID NO: 1164837 - RNA, 19 nt, Artificial Sequence
  Description of Artificial Sequence: Synthetic oligonucleotide
ggcgcgaaccacaacugga

SEQ ID NO: 1164838 - RNA, 19 nt, Artificial Sequence
  Description of Artificial Sequence: Synthetic oligonucleotide
gguggccacuuccuggcga

SEQ ID NO: 1164839 - RNA, 19 nt, Artificial Sequence
  Description of Artificial Sequence: Synthetic oligonucleotide
cacgcggccccuuuggccu

SEQ ID NO: 1164840 - RNA, 19 nt, Artificial Sequence
  Description of Artificial Sequence: Synthetic oligonucleotide
gccuuugguccuguggaug

SEQ ID NO: 1164841 - RNA, 19 nt, Artificial Sequence
  Description of Artificial Sequence: Synthetic oligonucleotide
agucggaaccagccuucuu

SEQ ID NO: 1164842 - RNA, 19 nt, Artificial Sequence
  Description of Artificial Sequence: Synthetic oligonucleotide
gacggcuuuuggacugguc

SEQ ID NO: 1164843 - RNA, 19 nt, Artificial Sequence
  Description of Artificial Sequence: Synthetic oligonucleotide
ugccggaaaguggcgcgaa

SEQ ID NO: 1164844 - RNA, 19 nt, Artificial Sequence
  Description of Artificial Sequence: Synthetic oligonucleotide
agcguccgugcgcucugcu

SEQ ID NO: 1164845 - RNA, 19 nt, Artificial Sequence
  Description of Artificial Sequence: Synthetic oligonucleotide
ugcccucgccucgacggcu

SEQ ID NO: 1164846 - RNA, 19 nt, Artificial Sequence
  Description of Artificial Sequence: Synthetic oligonucleotide
cucuggacggcgggccagc

SEQ ID NO: 1164847 - RNA, 19 nt, Artificial Sequence
  Description of Artificial Sequence: Synthetic oligonucleotide
cauggauuuugaggccaga

SEQ ID NO: 1164848 - RNA, 19 nt, Artificial Sequence
  Description of Artificial Sequence: Synthetic oligonucleotide
gcgcgaaccacaacuggac

SEQ ID NO: 1164849 - RNA, 19 nt, Artificial Sequence
  Description of Artificial Sequence: Synthetic oligonucleotide
ugcuccggaagaggguguu

SEQ ID NO: 1164850 - RNA, 19 nt, Artificial Sequence
  Description of Artificial Sequence: Synthetic oligonucleotide
cagugggcccuccuucaca

SEQ ID NO: 1164851 - RNA, 19 nt, Artificial Sequence
  Description of Artificial Sequence: Synthetic oligonucleotide
ccacgcggccccuuuggcc

SEQ ID NO: 1164852 - RNA, 19 nt, Artificial Sequence
  Description of Artificial Sequence: Synthetic oligonucleotide
gagccucgaggucgugguc

SEQ ID NO: 1164853 - RNA, 19 nt, Artificial Sequence
  Description of Artificial Sequence: Synthetic oligonucleotide
ggucacccgagaguggguc

SEQ ID NO: 1164854 - RNA, 19 nt, Artificial Sequence
  Description of Artificial Sequence: Synthetic oligonucleotide
ccacugguucaacucguuc

SEQ ID NO: 1164855 - RNA, 19 nt, Artificial Sequence
  Description of Artificial Sequence: Synthetic oligonucleotide
gagcggcauauugcgcuca

SEQ ID NO: 1164856 - RNA, 19 nt, Artificial Sequence
  Description of Artificial Sequence: Synthetic oligonucleotide
uccggaugucuuggagaaa

SEQ ID NO: 1164857 - RNA, 19 nt, Artificial Sequence
  Description of Artificial Sequence: Synthetic oligonucleotide
ccguuuccccacucaguag

SEQ ID NO: 1164858 - RNA, 19 nt, Artificial Sequence
  Description of Artificial Sequence: Synthetic oligonucleotide
agaccggcguguccauauu

SEQ ID NO: 1164859 - RNA, 19 nt, Artificial Sequence
  Description of Artificial Sequence: Synthetic oligonucleotide
gcacugguuguuuccucga

SEQ ID NO: 1164860 - RNA, 19 nt, Artificial Sequence
  Description of Artificial Sequence: Synthetic oligonucleotide
gcacgcagcguccgugcgc

SEQ ID NO: 1164861 - RNA, 19 nt, Artificial Sequence
  Description of Artificial Sequence: Synthetic oligonucleotide
gcgaaccacaacuggacau

SEQ ID NO: 1164862 - RNA, 19 nt, Artificial Sequence
  Description of Artificial Sequence: Synthetic oligonucleotide
agcgcaucccugccaccuu

SEQ ID NO: 1164863 - RNA, 19 nt, Artificial Sequence
  Description of Artificial Sequence: Synthetic oligonucleotide
cacuugcacugcagguaga

SEQ ID NO: 1164864 - RNA, 19 nt, Artificial Sequence
  Description of Artificial Sequence: Synthetic oligonucleotide
guccgugcgcucugcucca

SEQ ID NO: 1164865 - RNA, 19 nt, Artificial Sequence
  Description of Artificial Sequence: Synthetic oligonucleotide
cucggaacugagcggcaua

SEQ ID NO: 1164866 - RNA, 19 nt, Artificial Sequence
  Description of Artificial Sequence: Synthetic oligonucleotide
acgccacgcggccccuuug

SEQ ID NO: 1164867 - RNA, 19 nt, Artificial Sequence
  Description of Artificial Sequence: Synthetic oligonucleotide
caucccgcagucgcaccuc

SEQ ID NO: 1164868 - RNA, 19 nt, Artificial Sequence
  Description of Artificial Sequence: Synthetic oligonucleotide
acacucggcacugguuguu

SEQ ID NO: 1164869 - RNA, 19 nt, Artificial Sequence
  Description of Artificial Sequence: Synthetic oligonucleotide
aggucgugguccagugggu

SEQ ID NO: 1164870 - RNA, 19 nt, Artificial Sequence
  Description of Artificial Sequence: Synthetic oligonucleotide
cauccuuaacuuccacuuu

SEQ ID NO: 1164871 - RNA, 19 nt, Artificial Sequence
  Description of Artificial Sequence: Synthetic oligonucleotide
ggccaguguguccucucca

SEQ ID NO: 1164872 - RNA, 19 nt, Artificial Sequence
  Description of Artificial Sequence: Synthetic oligonucleotide
gacggcgggccagccagga

SEQ ID NO: 1164873 - RNA, 19 nt, Artificial Sequence
  Description of Artificial Sequence: Synthetic oligonucleotide
gcagucggaaccagccuuc

SEQ ID NO: 1164874 - RNA, 19 nt, Artificial Sequence
  Description of Artificial Sequence: Synthetic oligonucleotide
ggucgugguccaguggguc

SEQ ID NO: 1164875 - RNA, 19 nt, Artificial Sequence
  Description of Artificial Sequence: Synthetic oligonucleotide
cagagcacccuacauccuu

SEQ ID NO: 1164876 - RNA, 19 nt, Artificial Sequence
  Description of Artificial Sequence: Synthetic oligonucleotide
gucacccgagagugggucu

SEQ ID NO: 1164877 - RNA, 19 nt, Artificial Sequence
  Description of Artificial Sequence: Synthetic oligonucleotide
guccacgagcuuggcgaug

SEQ ID NO: 1164878 - RNA, 19 nt, Artificial Sequence
  Description of Artificial Sequence: Synthetic oligonucleotide
acccgagagugggucuugu

SEQ ID NO: 1164879 - RNA, 19 nt, Artificial Sequence
  Description of Artificial Sequence: Synthetic oligonucleotide
uggccacuuccuggcgaca

SEQ ID NO: 1164880 - RNA, 19 nt, Artificial Sequence
  Description of Artificial Sequence: Synthetic oligonucleotide
ggauauugaccaccacuuu

SEQ ID NO: 1164881 - RNA, 19 nt, Artificial Sequence
  Description of Artificial Sequence: Synthetic oligonucleotide
gacgccagggugguaggau

SEQ ID NO: 1164882 - RNA, 19 nt, Artificial Sequence
  Description of Artificial Sequence: Synthetic oligonucleotide
ccagagaauugcuccggaa

SEQ ID NO: 1164883 - RNA, 19 nt, Artificial Sequence
  Description of Artificial Sequence: Synthetic oligonucleotide
gcagcguccgugcgcucug

SEQ ID NO: 1164884 - RNA, 19 nt, Artificial Sequence
  Description of Artificial Sequence: Synthetic oligonucleotide
cacccgagagugggucuug

SEQ ID NO: 1164885 - RNA, 19 nt, Artificial Sequence
  Description of Artificial Sequence: Synthetic oligonucleotide
cccggccagccucaucugc

SEQ ID NO: 1164886 - RNA, 19 nt, Artificial Sequence
  Description of Artificial Sequence: Synthetic oligonucleotide
gcguguccauauugccuac

SEQ ID NO: 1164887 - RNA, 19 nt, Artificial Sequence
  Description of Artificial Sequence: Synthetic oligonucleotide
cgaggucgugguccagugg

SEQ ID NO: 1164888 - RNA, 19 nt, Artificial Sequence
  Description of Artificial Sequence: Synthetic oligonucleotide
ggucaggcugcagucggaa

SEQ ID NO: 1164889 - RNA, 19 nt, Artificial Sequence
  Description of Artificial Sequence: Synthetic oligonucleotide
cuggacggcgggccagcca

SEQ ID NO: 1164890 - RNA, 19 nt, Artificial Sequence
  Description of Artificial Sequence: Synthetic oligonucleotide
cgcuggaacaauugccgga

SEQ ID NO: 1164891 - RNA, 19 nt, Artificial Sequence
  Description of Artificial Sequence: Synthetic oligonucleotide
gccggaaaguggcgcgaac

SEQ ID NO: 1164892 - RNA, 19 nt, Artificial Sequence
  Description of Artificial Sequence: Synthetic oligonucleotide
cacgcagcguccgugcgcu

SEQ ID NO: 1164893 - RNA, 19 nt, Artificial Sequence
  Description of Artificial Sequence: Synthetic oligonucleotide
cucgaggucgugguccagu

SEQ ID NO: 1164894 - RNA, 19 nt, Artificial Sequence
  Description of Artificial Sequence: Synthetic oligonucleotide
ggaggacgccacgcggccc

SEQ ID NO: 1164895 - RNA, 19 nt, Artificial Sequence
  Description of Artificial Sequence: Synthetic oligonucleotide
ggcuaguguuguuggugcu

SEQ ID NO: 1164896 - RNA, 19 nt, Artificial Sequence
  Description of Artificial Sequence: Synthetic oligonucleotide
gcugcagauccagcucuuc

SEQ ID NO: 1164897 - RNA, 19 nt, Artificial Sequence
  Description of Artificial Sequence: Synthetic oligonucleotide
ccgucugugggcggugcag

SEQ ID NO: 1164898 - RNA, 19 nt, Artificial Sequence
  Description of Artificial Sequence: Synthetic oligonucleotide
ggugcucacuuuacgcagu

SEQ ID NO: 1164899 - RNA, 19 nt, Artificial Sequence
  Description of Artificial Sequence: Synthetic oligonucleotide
gcguccgugcgcucugcuc

SEQ ID NO: 1164900 - RNA, 19 nt, Artificial Sequence
  Description of Artificial Sequence: Synthetic oligonucleotide
cccgaagugcagccuccac

SEQ ID NO: 1164901 - RNA, 19 nt, Artificial Sequence
  Description of Artificial Sequence: Synthetic oligonucleotide
cagcguccgugcgcucugc

SEQ ID NO: 1164902 - RNA, 19 nt, Artificial Sequence
  Description of Artificial Sequence: Synthetic oligonucleotide
cccgagagugggucuuguc

SEQ ID NO: 1164903 - RNA, 19 nt, Artificial Sequence
  Description of Artificial Sequence: Synthetic oligonucleotide
gcuccggaagaggguguug

SEQ ID NO: 1164904 - RNA, 19 nt, Artificial Sequence
  Description of Artificial Sequence: Synthetic oligonucleotide
cagcccagaucugucuugu

SEQ ID NO: 1164905 - RNA, 19 nt, Artificial Sequence
  Description of Artificial Sequence: Synthetic oligonucleotide
gcggcauauugcgcucagc

SEQ ID NO: 1164906 - RNA, 19 nt, Artificial Sequence
  Description of Artificial Sequence: Synthetic oligonucleotide
ccagccggaagagcagauc

SEQ ID NO: 1164907 - RNA, 19 nt, Artificial Sequence
  Description of Artificial Sequence: Synthetic oligonucleotide
uccgugcgcucugcuccaa

SEQ ID NO: 1164908 - RNA, 19 nt, Artificial Sequence
  Description of Artificial Sequence: Synthetic oligonucleotide
aggugcccugggcccuggu

SEQ ID NO: 1164909 - RNA, 19 nt, Artificial Sequence
  Description of Artificial Sequence: Synthetic oligonucleotide
cgccacgcggccccuuugg

SEQ ID NO: 1164910 - RNA, 19 nt, Artificial Sequence
  Description of Artificial Sequence: Synthetic oligonucleotide
gcccagguugcccucgccu

SEQ ID NO: 1164911 - RNA, 19 nt, Artificial Sequence
  Description of Artificial Sequence: Synthetic oligonucleotide
ccggcuucaccucccugca

SEQ ID NO: 1164912 - RNA, 19 nt, Artificial Sequence
  Description of Artificial Sequence: Synthetic oligonucleotide
gacgccacgcggccccuuu

SEQ ID NO: 1164913 - RNA, 19 nt, Artificial Sequence
  Description of Artificial Sequence: Synthetic oligonucleotide
gucgcaccuccaacugcaa

SEQ ID NO: 1164914 - RNA, 19 nt, Artificial Sequence
  Description of Artificial Sequence: Synthetic oligonucleotide
cgcgaaccacaacuggaca

SEQ ID NO: 1164915 - RNA, 19 nt, Artificial Sequence
  Description of Artificial Sequence: Synthetic oligonucleotide
cgcagucgcaccuccaacu

SEQ ID NO: 1164916 - RNA, 19 nt, Artificial Sequence
  Description of Artificial Sequence: Synthetic oligonucleotide
acgcggccccuuuggccuu

SEQ ID NO: 1164917 - RNA, 19 nt, Artificial Sequence
  Description of Artificial Sequence: Synthetic oligonucleotide
cuggcgcacagugggcugu

SEQ ID NO: 1164918 - RNA, 19 nt, Artificial Sequence
  Description of Artificial Sequence: Synthetic oligonucleotide
cccgcagucgcaccuccaa

SEQ ID NO: 1164919 - RNA, 19 nt, Artificial Sequence
  Description of Artificial Sequence: Synthetic oligonucleotide
ccucgacggcuuuuggacu

SEQ ID NO: 1164920 - RNA, 19 nt, Artificial Sequence
  Description of Artificial Sequence: Synthetic oligonucleotide
aggacgccacgcggccccu

SEQ ID NO: 1164921 - RNA, 19 nt, Artificial Sequence
  Description of Artificial Sequence: Synthetic oligonucleotide
cgccucgacggcuuuugga

SEQ ID NO: 1164922 - RNA, 19 nt, Artificial Sequence
  Description of Artificial Sequence: Synthetic oligonucleotide
cagucggaaccagccuucu

SEQ ID NO: 1164923 - RNA, 19 nt, Artificial Sequence
  Description of Artificial Sequence: Synthetic oligonucleotide
ccauuccugcagggucacc

SEQ ID NO: 1164924 - RNA, 19 nt, Artificial Sequence
  Description of Artificial Sequence: Synthetic oligonucleotide
ccgugcgcucugcuccaac

SEQ ID NO: 1164925 - RNA, 19 nt, Artificial Sequence
  Description of Artificial Sequence: Synthetic oligonucleotide
cggaugcuggccagcuuga

SEQ ID NO: 1164926 - RNA, 19 nt, Artificial Sequence
  Description of Artificial Sequence: Synthetic oligonucleotide
cagcuugauaaaggcgcuu

SEQ ID NO: 1164927 - RNA, 19 nt, Artificial Sequence
  Description of Artificial Sequence: Synthetic oligonucleotide
cacucggcacugguuguuu

SEQ ID NO: 1164928 - RNA, 19 nt, Artificial Sequence
  Description of Artificial Sequence: Synthetic oligonucleotide
ccuccgucugugggcggug

SEQ ID NO: 1164929 - RNA, 19 nt, Artificial Sequence
  Description of Artificial Sequence: Synthetic oligonucleotide
cguguccauauugccuaca

SEQ ID NO: 1164930 - RNA, 19 nt, Artificial Sequence
  Description of Artificial Sequence: Synthetic oligonucleotide
ggagaccggcguguccaua

SEQ ID NO: 1164931 - RNA, 19 nt, Artificial Sequence
  Description of Artificial Sequence: Synthetic oligonucleotide
gcucggaacugagcggcau

SEQ ID NO: 1164932 - RNA, 19 nt, Artificial Sequence
  Description of Artificial Sequence: Synthetic oligonucleotide
gcgacacucggcacugguu

SEQ ID NO: 1164933 - RNA, 19 nt, Artificial Sequence
  Description of Artificial Sequence: Synthetic oligonucleotide
ggaagacgccaggguggua

SEQ ID NO: 1164934 - RNA, 19 nt, Artificial Sequence
  Description of Artificial Sequence: Synthetic oligonucleotide
gcccggaugcuggccagcu

SEQ ID NO: 1164935 - RNA, 19 nt, Artificial Sequence
  Description of Artificial Sequence: Synthetic oligonucleotide
gccuccgucugugggcggu

SEQ ID NO: 1164936 - RNA, 19 nt, Artificial Sequence
  Description of Artificial Sequence: Synthetic oligonucleotide
gcggccccuuuggccuuug

SEQ ID NO: 1164937 - RNA, 19 nt, Artificial Sequence
  Description of Artificial Sequence: Synthetic oligonucleotide
ccacgagcuuggcgaugaa

SEQ ID NO: 1164938 - RNA, 19 nt, Artificial Sequence
  Description of Artificial Sequence: Synthetic oligonucleotide
ccaacaccucagccuccgu

SEQ ID NO: 1164939 - RNA, 19 nt, Artificial Sequence
  Description of Artificial Sequence: Synthetic oligonucleotide
ccacgugggcacgcagcgu

SEQ ID NO: 1164940 - RNA, 19 nt, Artificial Sequence
  Description of Artificial Sequence: Synthetic oligonucleotide
gcccucgccucgacggcuu

SEQ ID NO: 1164941 - RNA, 19 nt, Artificial Sequence
  Description of Artificial Sequence: Synthetic oligonucleotide
cgacggcuuuuggacuggu

SEQ ID NO: 1164942 - RNA, 19 nt, Artificial Sequence
  Description of Artificial Sequence: Synthetic oligonucleotide
cccucgccucgacggcuuu

SEQ ID NO: 1164943 - RNA, 19 nt, Artificial Sequence
  Description of Artificial Sequence: Synthetic oligonucleotide
cgcggccccuuuggccuuu

SEQ ID NO: 1164944 - RNA, 19 nt, Artificial Sequence
  Description of Artificial Sequence: Synthetic oligonucleotide
uuuaaagggguacagacgc

SEQ ID NO: 1164945 - RNA, 19 nt, Artificial Sequence
  Description of Artificial Sequence: Synthetic oligonucleotide
uuugguauaagcuggaggc

SEQ ID NO: 1164946 - RNA, 19 nt, Artificial Sequence
  Description of Artificial Sequence: Synthetic oligonucleotide
aaagcuuugguauaagcug

SEQ ID NO: 1164947 - RNA, 19 nt, Artificial Sequence
  Description of Artificial Sequence: Synthetic oligonucleotide
aaagacuuaaggcaagaag

SEQ ID NO: 1164948 - RNA, 19 nt, Artificial Sequence
  Description of Artificial Sequence: Synthetic oligonucleotide
aagacauauucucugcuac

SEQ ID NO: 1164949 - RNA, 19 nt, Artificial Sequence
  Description of Artificial Sequence: Synthetic oligonucleotide
ugugucugaagacucaugg

SEQ ID NO: 1164950 - RNA, 19 nt, Artificial Sequence
  Description of Artificial Sequence: Synthetic oligonucleotide
augauguaggguuucaccc

SEQ ID NO: 1164951 - RNA, 19 nt, Artificial Sequence
  Description of Artificial Sequence: Synthetic oligonucleotide
ucaacgacuauauaaauaa

SEQ ID NO: 1164952 - RNA, 19 nt, Artificial Sequence
  Description of Artificial Sequence: Synthetic oligonucleotide
uuuuaaagggguacagacg

SEQ ID NO: 1164953 - RNA, 19 nt, Artificial Sequence
  Description of Artificial Sequence: Synthetic oligonucleotide
guacuuaauaaccacaccc

SEQ ID NO: 1164954 - RNA, 19 nt, Artificial Sequence
  Description of Artificial Sequence: Synthetic oligonucleotide
uucuaucuaguucagaugu

SEQ ID NO: 1164955 - RNA, 19 nt, Artificial Sequence
  Description of Artificial Sequence: Synthetic oligonucleotide
caauaaugagguuaugugg

SEQ ID NO: 1164956 - RNA, 19 nt, Artificial Sequence
  Description of Artificial Sequence: Synthetic oligonucleotide
cucacuguacuuaauaacc

SEQ ID NO: 1164957 - RNA, 19 nt, Artificial Sequence
  Description of Artificial Sequence: Synthetic oligonucleotide
ugaaaaucagcacauggcu

SEQ ID NO: 1164958 - RNA, 19 nt, Artificial Sequence
  Description of Artificial Sequence: Synthetic oligonucleotide
uuugucaccaaaacaaaac

SEQ ID NO: 1164959 - RNA, 19 nt, Artificial Sequence
  Description of Artificial Sequence: Synthetic oligonucleotide
acaaccaaagcuuacugag

SEQ ID NO: 1164960 - RNA, 19 nt, Artificial Sequence
  Description of Artificial Sequence: Synthetic oligonucleotide
uuguuguuuaggaaggucc

SEQ ID NO: 1164961 - RNA, 19 nt, Artificial Sequence
  Description of Artificial Sequence: Synthetic oligonucleotide
gagguuaugugguaaauug

SEQ ID NO: 1164962 - RNA, 19 nt, Artificial Sequence
  Description of Artificial Sequence: Synthetic oligonucleotide
uauucucugcuacugaacc

SEQ ID NO: 1164963 - RNA, 19 nt, Artificial Sequence
  Description of Artificial Sequence: Synthetic oligonucleotide
aaaacgaagugcaaaauga

SEQ ID NO: 1164964 - RNA, 19 nt, Artificial Sequence
  Description of Artificial Sequence: Synthetic oligonucleotide
aauaaugagguuauguggu

SEQ ID NO: 1164965 - RNA, 19 nt, Artificial Sequence
  Description of Artificial Sequence: Synthetic oligonucleotide
ucuaucacaaaacacuguc

SEQ ID NO: 1164966 - RNA, 19 nt, Artificial Sequence
  Description of Artificial Sequence: Synthetic oligonucleotide
uaauuggugagauuguucu

SEQ ID NO: 1164967 - RNA, 19 nt, Artificial Sequence
  Description of Artificial Sequence: Synthetic oligonucleotide
aagguaagcacucugccga

SEQ ID NO: 1164968 - RNA, 19 nt, Artificial Sequence
  Description of Artificial Sequence: Synthetic oligonucleotide
uuaauaaccacaccccgga

SEQ ID NO: 1164969 - RNA, 19 nt, Artificial Sequence
  Description of Artificial Sequence: Synthetic oligonucleotide
aagcucaacgacuauauaa

SEQ ID NO: 1164970 - RNA, 19 nt, Artificial Sequence
  Description of Artificial Sequence: Synthetic oligonucleotide
agaucaaugauguaggguu

SEQ ID NO: 1164971 - RNA, 19 nt, Artificial Sequence
  Description of Artificial Sequence: Synthetic oligonucleotide
ucuguuaccagcagggcga

SEQ ID NO: 1164972 - RNA, 19 nt, Artificial Sequence
  Description of Artificial Sequence: Synthetic oligonucleotide
gaggaacggauucucaugg

SEQ ID NO: 1164973 - RNA, 19 nt, Artificial Sequence
  Description of Artificial Sequence: Synthetic oligonucleotide
uaucacaaaacacugucau

SEQ ID NO: 1164974 - RNA, 19 nt, Artificial Sequence
  Description of Artificial Sequence: Synthetic oligonucleotide
aagggcuuaaguuuccugu

SEQ ID NO: 1164975 - RNA, 19 nt, Artificial Sequence
  Description of Artificial Sequence: Synthetic oligonucleotide
aacgaagugcaaaaugaac

SEQ ID NO: 1164976 - RNA, 19 nt, Artificial Sequence
  Description of Artificial Sequence: Synthetic oligonucleotide
aacgacuauauaaauaaga

SEQ ID NO: 1164977 - RNA, 19 nt, Artificial Sequence
  Description of Artificial Sequence: Synthetic oligonucleotide
agcaagacauauucucugc

SEQ ID NO: 1164978 - RNA, 19 nt, Artificial Sequence
  Description of Artificial Sequence: Synthetic oligonucleotide
uuaacaggcaccucucugc

SEQ ID NO: 1164979 - RNA, 19 nt, Artificial Sequence
  Description of Artificial Sequence: Synthetic oligonucleotide
uuagacagucaauaaugag

SEQ ID NO: 1164980 - RNA, 19 nt, Artificial Sequence
  Description of Artificial Sequence: Synthetic oligonucleotide
gaagguaagcacucugccg

SEQ ID NO: 1164981 - RNA, 19 nt, Artificial Sequence
  Description of Artificial Sequence: Synthetic oligonucleotide
uuaugugguaaauugucac

SEQ ID NO: 1164982 - RNA, 19 nt, Artificial Sequence
  Description of Artificial Sequence: Synthetic oligonucleotide
acuguuacgagcucuccuc

SEQ ID NO: 1164983 - RNA, 19 nt, Artificial Sequence
  Description of Artificial Sequence: Synthetic oligonucleotide
agugagaguucucauacug

SEQ ID NO: 1164984 - RNA, 19 nt, Artificial Sequence
  Description of Artificial Sequence: Synthetic oligonucleotide
uaugugguaaauugucacc

SEQ ID NO: 1164985 - RNA, 19 nt, Artificial Sequence
  Description of Artificial Sequence: Synthetic oligonucleotide
accucugugguucaauacg

SEQ ID NO: 1164986 - RNA, 19 nt, Artificial Sequence
  Description of Artificial Sequence: Synthetic oligonucleotide
uguuguuuaggaagguccc

SEQ ID NO: 1164987 - RNA, 19 nt, Artificial Sequence
  Description of Artificial Sequence: Synthetic oligonucleotide
ugagaguucucauacugca

SEQ ID NO: 1164988 - RNA, 19 nt, Artificial Sequence
  Description of Artificial Sequence: Synthetic oligonucleotide
uguacuuaauaaccacacc

SEQ ID NO: 1164989 - RNA, 19 nt, Artificial Sequence
  Description of Artificial Sequence: Synthetic oligonucleotide
gaguguacuccacaagccg

SEQ ID NO: 1164990 - RNA, 19 nt, Artificial Sequence
  Description of Artificial Sequence: Synthetic oligonucleotide
uccacaaagcucaacgacu

SEQ ID NO: 1164991 - RNA, 19 nt, Artificial Sequence
  Description of Artificial Sequence: Synthetic oligonucleotide
ucuuuuggcgggaauggcc

SEQ ID NO: 1164992 - RNA, 19 nt, Artificial Sequence
  Description of Artificial Sequence: Synthetic oligonucleotide
ugcuacugaacccaaauuu

SEQ ID NO: 1164993 - RNA, 19 nt, Artificial Sequence
  Description of Artificial Sequence: Synthetic oligonucleotide
gagauucucugcucuaggg

SEQ ID NO: 1164994 - RNA, 19 nt, Artificial Sequence
  Description of Artificial Sequence: Synthetic oligonucleotide
agaaacuguacaaagagaa

SEQ ID NO: 1164995 - RNA, 19 nt, Artificial Sequence
  Description of Artificial Sequence: Synthetic oligonucleotide
auuaugaaagucccuuucu

SEQ ID NO: 1164996 - RNA, 19 nt, Artificial Sequence
  Description of Artificial Sequence: Synthetic oligonucleotide
uucacuuugacgguggagu

SEQ ID NO: 1164997 - RNA, 19 nt, Artificial Sequence
  Description of Artificial Sequence: Synthetic oligonucleotide
uaggguuucacccuccgac

SEQ ID NO: 1164998 - RNA, 19 nt, Artificial Sequence
  Description of Artificial Sequence: Synthetic oligonucleotide
aauacgcuuguuguuuagg

SEQ ID NO: 1164999 - RNA, 19 nt, Artificial Sequence
  Description of Artificial Sequence: Synthetic oligonucleotide
ugagauucucugcucuagg

SEQ ID NO: 1165000 - RNA, 19 nt, Artificial Sequence
  Description of Artificial Sequence: Synthetic oligonucleotide
uauugguguccucaagaag

SEQ ID NO: 1165001 - RNA, 19 nt, Artificial Sequence
  Description of Artificial Sequence: Synthetic oligonucleotide
ugguucaauacgcuuguug

SEQ ID NO: 1165002 - RNA, 19 nt, Artificial Sequence
  Description of Artificial Sequence: Synthetic oligonucleotide
agagaacaagccacaaucc

SEQ ID NO: 1165003 - RNA, 19 nt, Artificial Sequence
  Description of Artificial Sequence: Synthetic oligonucleotide
gaucuucucguccucuccg

SEQ ID NO: 1165004 - RNA, 19 nt, Artificial Sequence
  Description of Artificial Sequence: Synthetic oligonucleotide
uggguaggagccaugaccu

SEQ ID NO: 1165005 - RNA, 19 nt, Artificial Sequence
  Description of Artificial Sequence: Synthetic oligonucleotide
guucagaugugucugaaga

SEQ ID NO: 1165006 - RNA, 19 nt, Artificial Sequence
  Description of Artificial Sequence: Synthetic oligonucleotide
cuuuuggcgggaauggccc

SEQ ID NO: 1165007 - RNA, 19 nt, Artificial Sequence
  Description of Artificial Sequence: Synthetic oligonucleotide
cagcacauggcucugaaac

SEQ ID NO: 1165008 - RNA, 19 nt, Artificial Sequence
  Description of Artificial Sequence: Synthetic oligonucleotide
guaagcacucugccgaugg

SEQ ID NO: 1165009 - RNA, 19 nt, Artificial Sequence
  Description of Artificial Sequence: Synthetic oligonucleotide
acgagcucuccucugcucc

SEQ ID NO: 1165010 - RNA, 19 nt, Artificial Sequence
  Description of Artificial Sequence: Synthetic oligonucleotide
gacacaguuacaucugcac

SEQ ID NO: 1165011 - RNA, 19 nt, Artificial Sequence
  Description of Artificial Sequence: Synthetic oligonucleotide
acccacuacacacuuugac

SEQ ID NO: 1165012 - RNA, 19 nt, Artificial Sequence
  Description of Artificial Sequence: Synthetic oligonucleotide
gcuguaauuggugagauug

SEQ ID NO: 1165013 - RNA, 19 nt, Artificial Sequence
  Description of Artificial Sequence: Synthetic oligonucleotide
cagaauuuggcugucucgg

SEQ ID NO: 1165014 - RNA, 19 nt, Artificial Sequence
  Description of Artificial Sequence: Synthetic oligonucleotide
aagugcaaaaugaacuucu

SEQ ID NO: 1165015 - RNA, 19 nt, Artificial Sequence
  Description of Artificial Sequence: Synthetic oligonucleotide
ucuaugacucaagagcuga

SEQ ID NO: 1165016 - RNA, 19 nt, Artificial Sequence
  Description of Artificial Sequence: Synthetic oligonucleotide
ucugcuacugaacccaaau

SEQ ID NO: 1165017 - RNA, 19 nt, Artificial Sequence
  Description of Artificial Sequence: Synthetic oligonucleotide
uacaugacgggaaguaccu

SEQ ID NO: 1165018 - RNA, 19 nt, Artificial Sequence
  Description of Artificial Sequence: Synthetic oligonucleotide
aguucauaguaccucugug

SEQ ID NO: 1165019 - RNA, 19 nt, Artificial Sequence
  Description of Artificial Sequence: Synthetic oligonucleotide
ugaaacacaccagcgcccg

SEQ ID NO: 1165020 - RNA, 19 nt, Artificial Sequence
  Description of Artificial Sequence: Synthetic oligonucleotide
agagcuccucuuuuggcgg

SEQ ID NO: 1165021 - RNA, 19 nt, Artificial Sequence
  Description of Artificial Sequence: Synthetic oligonucleotide
acgaagugcaaaaugaacu

SEQ ID NO: 1165022 - RNA, 19 nt, Artificial Sequence
  Description of Artificial Sequence: Synthetic oligonucleotide
gaggccuuugccuaucaug

SEQ ID NO: 1165023 - RNA, 19 nt, Artificial Sequence
  Description of Artificial Sequence: Synthetic oligonucleotide
uguaggguuucacccuccg

SEQ ID NO: 1165024 - RNA, 19 nt, Artificial Sequence
  Description of Artificial Sequence: Synthetic oligonucleotide
uaggguuugucaccaaaac

SEQ ID NO: 1165025 - RNA, 19 nt, Artificial Sequence
  Description of Artificial Sequence: Synthetic oligonucleotide
ucccgacacaguuacaucu

SEQ ID NO: 1165026 - RNA, 19 nt, Artificial Sequence
  Description of Artificial Sequence: Synthetic oligonucleotide
uuaugaaagucccuuucuu

SEQ ID NO: 1165027 - RNA, 19 nt, Artificial Sequence
  Description of Artificial Sequence: Synthetic oligonucleotide
ucuaucuaguucagaugug

SEQ ID NO: 1165028 - RNA, 19 nt, Artificial Sequence
  Description of Artificial Sequence: Synthetic oligonucleotide
gcgaugucggcccagaagg

SEQ ID NO: 1165029 - RNA, 19 nt, Artificial Sequence
  Description of Artificial Sequence: Synthetic oligonucleotide
uacugagauucucugcucu

SEQ ID NO: 1165030 - RNA, 19 nt, Artificial Sequence
  Description of Artificial Sequence: Synthetic oligonucleotide
uaugacucaagagcugacc

SEQ ID NO: 1165031 - RNA, 19 nt, Artificial Sequence
  Description of Artificial Sequence: Synthetic oligonucleotide
uuaaggcaagaagaggcgc

SEQ ID NO: 1165032 - RNA, 19 nt, Artificial Sequence
  Description of Artificial Sequence: Synthetic oligonucleotide
uucuaucacaaaacacugu

SEQ ID NO: 1165033 - RNA, 19 nt, Artificial Sequence
  Description of Artificial Sequence: Synthetic oligonucleotide
gaugcggcgaugucggccc

SEQ ID NO: 1165034 - RNA, 19 nt, Artificial Sequence
  Description of Artificial Sequence: Synthetic oligonucleotide
gucauaugaaaaucagcac

SEQ ID NO: 1165035 - RNA, 19 nt, Artificial Sequence
  Description of Artificial Sequence: Synthetic oligonucleotide
auuggugagauuguucuga

SEQ ID NO: 1165036 - RNA, 19 nt, Artificial Sequence
  Description of Artificial Sequence: Synthetic oligonucleotide
acgacuauauaaauaagaa

SEQ ID NO: 1165037 - RNA, 19 nt, Artificial Sequence
  Description of Artificial Sequence: Synthetic oligonucleotide
aagacugcgugcugcuuug

SEQ ID NO: 1165038 - RNA, 19 nt, Artificial Sequence
  Description of Artificial Sequence: Synthetic oligonucleotide
gacgggaaguaccucauca

SEQ ID NO: 1165039 - RNA, 19 nt, Artificial Sequence
  Description of Artificial Sequence: Synthetic oligonucleotide
uucuaugacucaagagcug

SEQ ID NO: 1165040 - RNA, 19 nt, Artificial Sequence
  Description of Artificial Sequence: Synthetic oligonucleotide
agcuuagacagucaauaau

SEQ ID NO: 1165041 - RNA, 19 nt, Artificial Sequence
  Description of Artificial Sequence: Synthetic oligonucleotide
acacaguuacaucugcaca

SEQ ID NO: 1165042 - RNA, 19 nt, Artificial Sequence
  Description of Artificial Sequence: Synthetic oligonucleotide
uuaaagggguacagacgcc

SEQ ID NO: 1165043 - RNA, 19 nt, Artificial Sequence
  Description of Artificial Sequence: Synthetic oligonucleotide
augugguauuauuucuauc

SEQ ID NO: 1165044 - RNA, 19 nt, Artificial Sequence
  Description of Artificial Sequence: Synthetic oligonucleotide
agcaguucugaaggcaccc

SEQ ID NO: 1165045 - RNA, 19 nt, Artificial Sequence
  Description of Artificial Sequence: Synthetic oligonucleotide
caacaugcuguaauuggug

SEQ ID NO: 1165046 - RNA, 19 nt, Artificial Sequence
  Description of Artificial Sequence: Synthetic oligonucleotide
ugucugucugucuagcuua

SEQ ID NO: 1165047 - RNA, 19 nt, Artificial Sequence
  Description of Artificial Sequence: Synthetic oligonucleotide
agcuuacugagauucucug

SEQ ID NO: 1165048 - RNA, 19 nt, Artificial Sequence
  Description of Artificial Sequence: Synthetic oligonucleotide
cacaagccgauacuggaag

SEQ ID NO: 1165049 - RNA, 19 nt, Artificial Sequence
  Description of Artificial Sequence: Synthetic oligonucleotide
uugguguccucaagaagug

SEQ ID NO: 1165050 - RNA, 19 nt, Artificial Sequence
  Description of Artificial Sequence: Synthetic oligonucleotide
ucaguucauaguaccucug

SEQ ID NO: 1165051 - RNA, 19 nt, Artificial Sequence
  Description of Artificial Sequence: Synthetic oligonucleotide
ucguccucuccgaggaugg

SEQ ID NO: 1165052 - RNA, 19 nt, Artificial Sequence
  Description of Artificial Sequence: Synthetic oligonucleotide
ggaacggauucucaugggg

SEQ ID NO: 1165053 - RNA, 19 nt, Artificial Sequence
  Description of Artificial Sequence: Synthetic oligonucleotide
ucugcugacgaugcucccg

SEQ ID NO: 1165054 - RNA, 19 nt, Artificial Sequence
  Description of Artificial Sequence: Synthetic oligonucleotide
gaauuuggcugucucgguc

SEQ ID NO: 1165055 - RNA, 19 nt, Artificial Sequence
  Description of Artificial Sequence: Synthetic oligonucleotide
guuacgagcucuccucugc

SEQ ID NO: 1165056 - RNA, 19 nt, Artificial Sequence
  Description of Artificial Sequence: Synthetic oligonucleotide
ucaguugcuagcugucaga

SEQ ID NO: 1165057 - RNA, 19 nt, Artificial Sequence
  Description of Artificial Sequence: Synthetic oligonucleotide
agaaaguucaaagcuuggu

SEQ ID NO: 1165058 - RNA, 19 nt, Artificial Sequence
  Description of Artificial Sequence: Synthetic oligonucleotide
ucuagcuuagacagucaau

SEQ ID NO: 1165059 - RNA, 19 nt, Artificial Sequence
  Description of Artificial Sequence: Synthetic oligonucleotide
ugacucaagagcugaccca

SEQ ID NO: 1165060 - RNA, 19 nt, Artificial Sequence
  Description of Artificial Sequence: Synthetic oligonucleotide
caacugugccgucagcacg

SEQ ID NO: 1165061 - RNA, 19 nt, Artificial Sequence
  Description of Artificial Sequence: Synthetic oligonucleotide
aaacgaagugcaaaaugaa

SEQ ID NO: 1165062 - RNA, 19 nt, Artificial Sequence
  Description of Artificial Sequence: Synthetic oligonucleotide
aagugagaguucucauacu

SEQ ID NO: 1165063 - RNA, 19 nt, Artificial Sequence
  Description of Artificial Sequence: Synthetic oligonucleotide
cuuucuaucuaguucagau

SEQ ID NO: 1165064 - RNA, 19 nt, Artificial Sequence
  Description of Artificial Sequence: Synthetic oligonucleotide
guuuaggaaggucccguug

SEQ ID NO: 1165065 - RNA, 19 nt, Artificial Sequence
  Description of Artificial Sequence: Synthetic oligonucleotide
uccucuuuuggcgggaaug

SEQ ID NO: 1165066 - RNA, 19 nt, Artificial Sequence
  Description of Artificial Sequence: Synthetic oligonucleotide
aagguauugguguccucaa

SEQ ID NO: 1165067 - RNA, 19 nt, Artificial Sequence
  Description of Artificial Sequence: Synthetic oligonucleotide
aucgcagagugucugucug

SEQ ID NO: 1165068 - RNA, 19 nt, Artificial Sequence
  Description of Artificial Sequence: Synthetic oligonucleotide
agggcuuaaguuuccugug

SEQ ID NO: 1165069 - RNA, 19 nt, Artificial Sequence
  Description of Artificial Sequence: Synthetic oligonucleotide
guuguuuaggaaggucccg

SEQ ID NO: 1165070 - RNA, 19 nt, Artificial Sequence
  Description of Artificial Sequence: Synthetic oligonucleotide
ucuucucguccucuccgag

SEQ ID NO: 1165071 - RNA, 19 nt, Artificial Sequence
  Description of Artificial Sequence: Synthetic oligonucleotide
aaacacgaagugagaguuc

SEQ ID NO: 1165072 - RNA, 19 nt, Artificial Sequence
  Description of Artificial Sequence: Synthetic oligonucleotide
ggugcuucucaguugcuag

SEQ ID NO: 1165073 - RNA, 19 nt, Artificial Sequence
  Description of Artificial Sequence: Synthetic oligonucleotide
caugacgggaaguaccuca

SEQ ID NO: 1165074 - RNA, 19 nt, Artificial Sequence
  Description of Artificial Sequence: Synthetic oligonucleotide
uuguuuaggaaggucccgu

SEQ ID NO: 1165075 - RNA, 19 nt, Artificial Sequence
  Description of Artificial Sequence: Synthetic oligonucleotide
gguauugguguccucaaga

SEQ ID NO: 1165076 - RNA, 19 nt, Artificial Sequence
  Description of Artificial Sequence: Synthetic oligonucleotide
guuacaucugcacaggcau

SEQ ID NO: 1165077 - RNA, 19 nt, Artificial Sequence
  Description of Artificial Sequence: Synthetic oligonucleotide
cuaucacaaaacacuguca

SEQ ID NO: 1165078 - RNA, 19 nt, Artificial Sequence
  Description of Artificial Sequence: Synthetic oligonucleotide
aauccccuuuccaagggcu

SEQ ID NO: 1165079 - RNA, 19 nt, Artificial Sequence
  Description of Artificial Sequence: Synthetic oligonucleotide
cuagcuuagacagucaaua

SEQ ID NO: 1165080 - RNA, 19 nt, Artificial Sequence
  Description of Artificial Sequence: Synthetic oligonucleotide
cugucuagcuuagacaguc

SEQ ID NO: 1165081 - RNA, 19 nt, Artificial Sequence
  Description of Artificial Sequence: Synthetic oligonucleotide
aggaacggauucucauggg

SEQ ID NO: 1165082 - RNA, 19 nt, Artificial Sequence
  Description of Artificial Sequence: Synthetic oligonucleotide
gggaaugucggcgaugcgg

SEQ ID NO: 1165083 - RNA, 19 nt, Artificial Sequence
  Description of Artificial Sequence: Synthetic oligonucleotide
agcagggcgagggaucacc

SEQ ID NO: 1165084 - RNA, 19 nt, Artificial Sequence
  Description of Artificial Sequence: Synthetic oligonucleotide
ccagaaaguucaaagcuug

SEQ ID NO: 1165085 - RNA, 19 nt, Artificial Sequence
  Description of Artificial Sequence: Synthetic oligonucleotide
uguaauuggugagauuguu

SEQ ID NO: 1165086 - RNA, 19 nt, Artificial Sequence
  Description of Artificial Sequence: Synthetic oligonucleotide
uccgaggaugguccucacg

SEQ ID NO: 1165087 - RNA, 19 nt, Artificial Sequence
  Description of Artificial Sequence: Synthetic oligonucleotide
gaccucccgacacaguuac

SEQ ID NO: 1165088 - RNA, 19 nt, Artificial Sequence
  Description of Artificial Sequence: Synthetic oligonucleotide
uguuacgagcucuccucug

SEQ ID NO: 1165089 - RNA, 19 nt, Artificial Sequence
  Description of Artificial Sequence: Synthetic oligonucleotide
ucgaugggaaugucggcga

SEQ ID NO: 1165090 - RNA, 19 nt, Artificial Sequence
  Description of Artificial Sequence: Synthetic oligonucleotide
uagcuuagacagucaauaa

SEQ ID NO: 1165091 - RNA, 19 nt, Artificial Sequence
  Description of Artificial Sequence: Synthetic oligonucleotide
aaagcucaacgacuauaua

SEQ ID NO: 1165092 - RNA, 19 nt, Artificial Sequence
  Description of Artificial Sequence: Synthetic oligonucleotide
cauauucucugcuacugaa

SEQ ID NO: 1165093 - RNA, 19 nt, Artificial Sequence
  Description of Artificial Sequence: Synthetic oligonucleotide
agcucaacgacuauauaaa

SEQ ID NO: 1165094 - RNA, 19 nt, Artificial Sequence
  Description of Artificial Sequence: Synthetic oligonucleotide
cccacuacacacuuugacc

SEQ ID NO: 1165095 - RNA, 19 nt, Artificial Sequence
  Description of Artificial Sequence: Synthetic oligonucleotide
cugcgugcugcuuugagca

SEQ ID NO: 1165096 - RNA, 19 nt, Artificial Sequence
  Description of Artificial Sequence: Synthetic oligonucleotide
uggcucugaaacacaccag

SEQ ID NO: 1165097 - RNA, 19 nt, Artificial Sequence
  Description of Artificial Sequence: Synthetic oligonucleotide
gguuaugugguaaauuguc

SEQ ID NO: 1165098 - RNA, 19 nt, Artificial Sequence
  Description of Artificial Sequence: Synthetic oligonucleotide
aaugucggcgaugcggcga

SEQ ID NO: 1165099 - RNA, 19 nt, Artificial Sequence
  Description of Artificial Sequence: Synthetic oligonucleotide
uccaagggcuuaaguuucc

SEQ ID NO: 1165100 - RNA, 19 nt, Artificial Sequence
  Description of Artificial Sequence: Synthetic oligonucleotide
acaaagagaacaagccaca

SEQ ID NO: 1165101 - RNA, 19 nt, Artificial Sequence
  Description of Artificial Sequence: Synthetic oligonucleotide
ucaauacgcuuguuguuua

SEQ ID NO: 1165102 - RNA, 19 nt, Artificial Sequence
  Description of Artificial Sequence: Synthetic oligonucleotide
uaccucugugguucaauac

SEQ ID NO: 1165103 - RNA, 19 nt, Artificial Sequence
  Description of Artificial Sequence: Synthetic oligonucleotide
ccaaagcuuacugagauuc

SEQ ID NO: 1165104 - RNA, 19 nt, Artificial Sequence
  Description of Artificial Sequence: Synthetic oligonucleotide
guauugguguccucaagaa

SEQ ID NO: 1165105 - RNA, 19 nt, Artificial Sequence
  Description of Artificial Sequence: Synthetic oligonucleotide
cucaacgacuauauaaaua

SEQ ID NO: 1165106 - RNA, 19 nt, Artificial Sequence
  Description of Artificial Sequence: Synthetic oligonucleotide
aggaggaacggauucucau

SEQ ID NO: 1165107 - RNA, 19 nt, Artificial Sequence
  Description of Artificial Sequence: Synthetic oligonucleotide
guaauuggugagauuguuc

SEQ ID NO: 1165108 - RNA, 19 nt, Artificial Sequence
  Description of Artificial Sequence: Synthetic oligonucleotide
uguccucaagaagugcccc

SEQ ID NO: 1165109 - RNA, 19 nt, Artificial Sequence
  Description of Artificial Sequence: Synthetic oligonucleotide
uuuggcgggaauggccccg

SEQ ID NO: 1165110 - RNA, 19 nt, Artificial Sequence
  Description of Artificial Sequence: Synthetic oligonucleotide
aaggucccguugccugagc

SEQ ID NO: 1165111 - RNA, 19 nt, Artificial Sequence
  Description of Artificial Sequence: Synthetic oligonucleotide
auaaugagguuauguggua

SEQ ID NO: 1165112 - RNA, 19 nt, Artificial Sequence
  Description of Artificial Sequence: Synthetic oligonucleotide
auggucgaugggaaugucg

SEQ ID NO: 1165113 - RNA, 19 nt, Artificial Sequence
  Description of Artificial Sequence: Synthetic oligonucleotide
aguuacaucugcacaggca

SEQ ID NO: 1165114 - RNA, 19 nt, Artificial Sequence
  Description of Artificial Sequence: Synthetic oligonucleotide
uuacgagcucuccucugcu

SEQ ID NO: 1165115 - RNA, 19 nt, Artificial Sequence
  Description of Artificial Sequence: Synthetic oligonucleotide
gguucaauacgcuuguugu

SEQ ID NO: 1165116 - RNA, 19 nt, Artificial Sequence
  Description of Artificial Sequence: Synthetic oligonucleotide
agcgcccguggguaggagc

SEQ ID NO: 1165117 - RNA, 19 nt, Artificial Sequence
  Description of Artificial Sequence: Synthetic oligonucleotide
caauacgcuuguuguuuag

SEQ ID NO: 1165118 - RNA, 19 nt, Artificial Sequence
  Description of Artificial Sequence: Synthetic oligonucleotide
aagccgauacuggaagacu

SEQ ID NO: 1165119 - RNA, 19 nt, Artificial Sequence
  Description of Artificial Sequence: Synthetic oligonucleotide
ugucuagcuuagacaguca

SEQ ID NO: 1165120 - RNA, 19 nt, Artificial Sequence
  Description of Artificial Sequence: Synthetic oligonucleotide
guacuccacaagccgauac

SEQ ID NO: 1165121 - RNA, 19 nt, Artificial Sequence
  Description of Artificial Sequence: Synthetic oligonucleotide
ugagguuaugugguaaauu

SEQ ID NO: 1165122 - RNA, 19 nt, Artificial Sequence
  Description of Artificial Sequence: Synthetic oligonucleotide
gugagaguucucauacugc

SEQ ID NO: 1165123 - RNA, 19 nt, Artificial Sequence
  Description of Artificial Sequence: Synthetic oligonucleotide
cucacuguuacgagcucuc

SEQ ID NO: 1165124 - RNA, 19 nt, Artificial Sequence
  Description of Artificial Sequence: Synthetic oligonucleotide
gaaugucggcgaugcggcg

SEQ ID NO: 1165125 - RNA, 19 nt, Artificial Sequence
  Description of Artificial Sequence: Synthetic oligonucleotide
ugcuucucaguugcuagcu

SEQ ID NO: 1165126 - RNA, 19 nt, Artificial Sequence
  Description of Artificial Sequence: Synthetic oligonucleotide
gcucacuguacuuaauaac

SEQ ID NO: 1165127 - RNA, 19 nt, Artificial Sequence
  Description of Artificial Sequence: Synthetic oligonucleotide
ugacgaugcucccggcgcc

SEQ ID NO: 1165128 - RNA, 19 nt, Artificial Sequence
  Description of Artificial Sequence: Synthetic oligonucleotide
gagucaaccccauggccuc

SEQ ID NO: 1165129 - RNA, 19 nt, Artificial Sequence
  Description of Artificial Sequence: Synthetic oligonucleotide
aguguacuccacaagccga

SEQ ID NO: 1165130 - RNA, 19 nt, Artificial Sequence
  Description of Artificial Sequence: Synthetic oligonucleotide
uuggugagauuguucugaa

SEQ ID NO: 1165131 - RNA, 19 nt, Artificial Sequence
  Description of Artificial Sequence: Synthetic oligonucleotide
caagccgauacuggaagac

SEQ ID NO: 1165132 - RNA, 19 nt, Artificial Sequence
  Description of Artificial Sequence: Synthetic oligonucleotide
caguuacaucugcacaggc

SEQ ID NO: 1165133 - RNA, 19 nt, Artificial Sequence
  Description of Artificial Sequence: Synthetic oligonucleotide
acaagccgauacuggaaga

SEQ ID NO: 1165134 - RNA, 19 nt, Artificial Sequence
  Description of Artificial Sequence: Synthetic oligonucleotide
uggcauuaugaaagucccu

SEQ ID NO: 1165135 - RNA, 19 nt, Artificial Sequence
  Description of Artificial Sequence: Synthetic oligonucleotide
gcugucucggucccgaccc

SEQ ID NO: 1165136 - RNA, 19 nt, Artificial Sequence
  Description of Artificial Sequence: Synthetic oligonucleotide
acaaagcucaacgacuaua

SEQ ID NO: 1165137 - RNA, 19 nt, Artificial Sequence
  Description of Artificial Sequence: Synthetic oligonucleotide
uaagcacucugccgaugga

SEQ ID NO: 1165138 - RNA, 19 nt, Artificial Sequence
  Description of Artificial Sequence: Synthetic oligonucleotide
cacgaguguacuccacaag

SEQ ID NO: 1165139 - RNA, 19 nt, Artificial Sequence
  Description of Artificial Sequence: Synthetic oligonucleotide
gaggcgcuggagucaaccc

SEQ ID NO: 1165140 - RNA, 19 nt, Artificial Sequence
  Description of Artificial Sequence: Synthetic oligonucleotide
gcgccuggcauuaugaaag

SEQ ID NO: 1165141 - RNA, 19 nt, Artificial Sequence
  Description of Artificial Sequence: Synthetic oligonucleotide
gcuuacugagauucucugc

SEQ ID NO: 1165142 - RNA, 19 nt, Artificial Sequence
  Description of Artificial Sequence: Synthetic oligonucleotide
caugcuguaauuggugaga

SEQ ID NO: 1165143 - RNA, 19 nt, Artificial Sequence
  Description of Artificial Sequence: Synthetic oligonucleotide
uguuuaggaaggucccguu

SEQ ID NO: 1165144 - RNA, 19 nt, Artificial Sequence
  Description of Artificial Sequence: Synthetic oligonucleotide
aagcacucugccgauggau

SEQ ID NO: 1165145 - RNA, 19 nt, Artificial Sequence
  Description of Artificial Sequence: Synthetic oligonucleotide
cuaucaugugguauuauuu

SEQ ID NO: 1165146 - RNA, 19 nt, Artificial Sequence
  Description of Artificial Sequence: Synthetic oligonucleotide
ggaaugucggcgaugcggc

SEQ ID NO: 1165147 - RNA, 19 nt, Artificial Sequence
  Description of Artificial Sequence: Synthetic oligonucleotide
cagcaguucugaaggcacc

SEQ ID NO: 1165148 - RNA, 19 nt, Artificial Sequence
  Description of Artificial Sequence: Synthetic oligonucleotide
cacgaagugagaguucuca

SEQ ID NO: 1165149 - RNA, 19 nt, Artificial Sequence
  Description of Artificial Sequence: Synthetic oligonucleotide
acgaagugagaguucucau

SEQ ID NO: 1165150 - RNA, 19 nt, Artificial Sequence
  Description of Artificial Sequence: Synthetic oligonucleotide
ccacuacacacuuugacca

SEQ ID NO: 1165151 - RNA, 19 nt, Artificial Sequence
  Description of Artificial Sequence: Synthetic oligonucleotide
caaccaaagcuuacugaga

SEQ ID NO: 1165152 - RNA, 19 nt, Artificial Sequence
  Description of Artificial Sequence: Synthetic oligonucleotide
gucuagcuuagacagucaa

SEQ ID NO: 1165153 - RNA, 19 nt, Artificial Sequence
  Description of Artificial Sequence: Synthetic oligonucleotide
aaggcacccacuacacacu

SEQ ID NO: 1165154 - RNA, 19 nt, Artificial Sequence
  Description of Artificial Sequence: Synthetic oligonucleotide
ugggaaugucggcgaugcg

SEQ ID NO: 1165155 - RNA, 19 nt, Artificial Sequence
  Description of Artificial Sequence: Synthetic oligonucleotide
caaugauguaggguuucac

SEQ ID NO: 1165156 - RNA, 19 nt, Artificial Sequence
  Description of Artificial Sequence: Synthetic oligonucleotide
gugucugaagacucaugga

SEQ ID NO: 1165157 - RNA, 19 nt, Artificial Sequence
  Description of Artificial Sequence: Synthetic oligonucleotide
acgggaaguaccucaucau

SEQ ID NO: 1165158 - RNA, 19 nt, Artificial Sequence
  Description of Artificial Sequence: Synthetic oligonucleotide
gagugucugucugucuagc

SEQ ID NO: 1165159 - RNA, 19 nt, Artificial Sequence
  Description of Artificial Sequence: Synthetic oligonucleotide
ugauggcucucggugcugc

SEQ ID NO: 1165160 - RNA, 19 nt, Artificial Sequence
  Description of Artificial Sequence: Synthetic oligonucleotide
ccuccgaccaacugugccg

SEQ ID NO: 1165161 - RNA, 19 nt, Artificial Sequence
  Description of Artificial Sequence: Synthetic oligonucleotide
augcagaggccuuugccua

SEQ ID NO: 1165162 - RNA, 19 nt, Artificial Sequence
  Description of Artificial Sequence: Synthetic oligonucleotide
gcgggaauggccccggugc

SEQ ID NO: 1165163 - RNA, 19 nt, Artificial Sequence
  Description of Artificial Sequence: Synthetic oligonucleotide
agcacucugccgauggaug

SEQ ID NO: 1165164 - RNA, 19 nt, Artificial Sequence
  Description of Artificial Sequence: Synthetic oligonucleotide
ggcgaugucggcccagaag

SEQ ID NO: 1165165 - RNA, 19 nt, Artificial Sequence
  Description of Artificial Sequence: Synthetic oligonucleotide
gcugacgaugcucccggcg

SEQ ID NO: 1165166 - RNA, 19 nt, Artificial Sequence
  Description of Artificial Sequence: Synthetic oligonucleotide
ucggcccagaagguaagca

SEQ ID NO: 1165167 - RNA, 19 nt, Artificial Sequence
  Description of Artificial Sequence: Synthetic oligonucleotide
ggcgaugcggcgaugucgg

SEQ ID NO: 1165168 - RNA, 19 nt, Artificial Sequence
  Description of Artificial Sequence: Synthetic oligonucleotide
cugccgauggauguacaug

SEQ ID NO: 1165169 - RNA, 19 nt, Artificial Sequence
  Description of Artificial Sequence: Synthetic oligonucleotide
ccacaauccccuuuccaag

SEQ ID NO: 1165170 - RNA, 19 nt, Artificial Sequence
  Description of Artificial Sequence: Synthetic oligonucleotide
gggcuuaaguuuccugugc

SEQ ID NO: 1165171 - RNA, 19 nt, Artificial Sequence
  Description of Artificial Sequence: Synthetic oligonucleotide
ugcgugcugcuuugagcag

SEQ ID NO: 1165172 - RNA, 19 nt, Artificial Sequence
  Description of Artificial Sequence: Synthetic oligonucleotide
gaaggucccguugccugag

SEQ ID NO: 1165173 - RNA, 19 nt, Artificial Sequence
  Description of Artificial Sequence: Synthetic oligonucleotide
cuagcugucagacaccauu

SEQ ID NO: 1165174 - RNA, 19 nt, Artificial Sequence
  Description of Artificial Sequence: Synthetic oligonucleotide
agucaaccccauggccucc

SEQ ID NO: 1165175 - RNA, 19 nt, Artificial Sequence
  Description of Artificial Sequence: Synthetic oligonucleotide
uuuggcugucucggucccg

SEQ ID NO: 1165176 - RNA, 19 nt, Artificial Sequence
  Description of Artificial Sequence: Synthetic oligonucleotide
gugccggucucgcucacug

SEQ ID NO: 1165177 - RNA, 19 nt, Artificial Sequence
  Description of Artificial Sequence: Synthetic oligonucleotide
ggcuuaaguuuccugugca

SEQ ID NO: 1165178 - RNA, 19 nt, Artificial Sequence
  Description of Artificial Sequence: Synthetic oligonucleotide
uggugagauuguucugaaa

SEQ ID NO: 1165179 - RNA, 19 nt, Artificial Sequence
  Description of Artificial Sequence: Synthetic oligonucleotide
acaaaacuccugguccaca

SEQ ID NO: 1165180 - RNA, 19 nt, Artificial Sequence
  Description of Artificial Sequence: Synthetic oligonucleotide
gggauggucgaugggaaug

SEQ ID NO: 1165181 - RNA, 19 nt, Artificial Sequence
  Description of Artificial Sequence: Synthetic oligonucleotide
cagucaauaaugagguuau

SEQ ID NO: 1165182 - RNA, 19 nt, Artificial Sequence
  Description of Artificial Sequence: Synthetic oligonucleotide
caagcgcccacaggcaggc

SEQ ID NO: 1165183 - RNA, 19 nt, Artificial Sequence
  Description of Artificial Sequence: Synthetic oligonucleotide
cgagggaucaccuccugag

SEQ ID NO: 1165184 - RNA, 19 nt, Artificial Sequence
  Description of Artificial Sequence: Synthetic oligonucleotide
acaugacgggaaguaccuc

SEQ ID NO: 1165185 - RNA, 19 nt, Artificial Sequence
  Description of Artificial Sequence: Synthetic oligonucleotide
gcugccgaucuucucgucc

SEQ ID NO: 1165186 - RNA, 19 nt, Artificial Sequence
  Description of Artificial Sequence: Synthetic oligonucleotide
ggcucacuguacuuaauaa

SEQ ID NO: 1165187 - RNA, 19 nt, Artificial Sequence
  Description of Artificial Sequence: Synthetic oligonucleotide
ucgcagagugucugucugu

SEQ ID NO: 1165188 - RNA, 19 nt, Artificial Sequence
  Description of Artificial Sequence: Synthetic oligonucleotide
ugacgggaaguaccucauc

SEQ ID NO: 1165189 - RNA, 19 nt, Artificial Sequence
  Description of Artificial Sequence: Synthetic oligonucleotide
uacgagcucuccucugcuc

SEQ ID NO: 1165190 - RNA, 19 nt, Artificial Sequence
  Description of Artificial Sequence: Synthetic oligonucleotide
augcuguaauuggugagau

SEQ ID NO: 1165191 - RNA, 19 nt, Artificial Sequence
  Description of Artificial Sequence: Synthetic oligonucleotide
cucccgacacaguuacauc

SEQ ID NO: 1165192 - RNA, 19 nt, Artificial Sequence
  Description of Artificial Sequence: Synthetic oligonucleotide
ggugggugcuucucaguug

SEQ ID NO: 1165193 - RNA, 19 nt, Artificial Sequence
  Description of Artificial Sequence: Synthetic oligonucleotide
guaccucugugguucaaua

SEQ ID NO: 1165194 - RNA, 19 nt, Artificial Sequence
  Description of Artificial Sequence: Synthetic oligonucleotide
ccagaagguaagcacucug

SEQ ID NO: 1165195 - RNA, 19 nt, Artificial Sequence
  Description of Artificial Sequence: Synthetic oligonucleotide
uugccugagcccagaucaa

SEQ ID NO: 1165196 - RNA, 19 nt, Artificial Sequence
  Description of Artificial Sequence: Synthetic oligonucleotide
acaccccggaagguauugg

SEQ ID NO: 1165197 - RNA, 19 nt, Artificial Sequence
  Description of Artificial Sequence: Synthetic oligonucleotide
ccuccugagcuucaccgcc

SEQ ID NO: 1165198 - RNA, 19 nt, Artificial Sequence
  Description of Artificial Sequence: Synthetic oligonucleotide
augugucugaagacucaug

SEQ ID NO: 1165199 - RNA, 19 nt, Artificial Sequence
  Description of Artificial Sequence: Synthetic oligonucleotide
gcuacugaacccaaauuua

SEQ ID NO: 1165200 - RNA, 19 nt, Artificial Sequence
  Description of Artificial Sequence: Synthetic oligonucleotide
ugccuaucaugugguauua

SEQ ID NO: 1165201 - RNA, 19 nt, Artificial Sequence
  Description of Artificial Sequence: Synthetic oligonucleotide
agguaagcacucugccgau

SEQ ID NO: 1165202 - RNA, 19 nt, Artificial Sequence
  Description of Artificial Sequence: Synthetic oligonucleotide
agggauggucgaugggaau

SEQ ID NO: 1165203 - RNA, 19 nt, Artificial Sequence
  Description of Artificial Sequence: Synthetic oligonucleotide
gaugucggcccagaaggua

SEQ ID NO: 1165204 - RNA, 19 nt, Artificial Sequence
  Description of Artificial Sequence: Synthetic oligonucleotide
guaggguuucacccuccga

SEQ ID NO: 1165205 - RNA, 19 nt, Artificial Sequence
  Description of Artificial Sequence: Synthetic oligonucleotide
ggucccguugccugagccc

SEQ ID NO: 1165206 - RNA, 19 nt, Artificial Sequence
  Description of Artificial Sequence: Synthetic oligonucleotide
gaugugucugaagacucau

SEQ ID NO: 1165207 - RNA, 19 nt, Artificial Sequence
  Description of Artificial Sequence: Synthetic oligonucleotide
augucggcgaugcggcgau

SEQ ID NO: 1165208 - RNA, 19 nt, Artificial Sequence
  Description of Artificial Sequence: Synthetic oligonucleotide
ccgauacuggaagacugcg

SEQ ID NO: 1165209 - RNA, 19 nt, Artificial Sequence
  Description of Artificial Sequence: Synthetic oligonucleotide
guucaauacgcuuguuguu

SEQ ID NO: 1165210 - RNA, 19 nt, Artificial Sequence
  Description of Artificial Sequence: Synthetic oligonucleotide
acacgaagugagaguucuc

SEQ ID NO: 1165211 - RNA, 19 nt, Artificial Sequence
  Description of Artificial Sequence: Synthetic oligonucleotide
uguacuccacaagccgaua

SEQ ID NO: 1165212 - RNA, 19 nt, Artificial Sequence
  Description of Artificial Sequence: Synthetic oligonucleotide
agaggccuuugccuaucau

SEQ ID NO: 1165213 - RNA, 19 nt, Artificial Sequence
  Description of Artificial Sequence: Synthetic oligonucleotide
uccucacguuccugcuuca

SEQ ID NO: 1165214 - RNA, 19 nt, Artificial Sequence
  Description of Artificial Sequence: Synthetic oligonucleotide
gauggucgaugggaauguc

SEQ ID NO: 1165215 - RNA, 19 nt, Artificial Sequence
  Description of Artificial Sequence: Synthetic oligonucleotide
ccgacacaguuacaucugc

SEQ ID NO: 1165216 - RNA, 19 nt, Artificial Sequence
  Description of Artificial Sequence: Synthetic oligonucleotide
caaagcuuacugagauucu

SEQ ID NO: 1165217 - RNA, 19 nt, Artificial Sequence
  Description of Artificial Sequence: Synthetic oligonucleotide
cacaccccggaagguauug

SEQ ID NO: 1165218 - RNA, 19 nt, Artificial Sequence
  Description of Artificial Sequence: Synthetic oligonucleotide
augacgggaaguaccucau

SEQ ID NO: 1165219 - RNA, 19 nt, Artificial Sequence
  Description of Artificial Sequence: Synthetic oligonucleotide
ucggcgaugcggcgauguc

SEQ ID NO: 1165220 - RNA, 19 nt, Artificial Sequence
  Description of Artificial Sequence: Synthetic oligonucleotide
cccgacacaguuacaucug

SEQ ID NO: 1165221 - RNA, 19 nt, Artificial Sequence
  Description of Artificial Sequence: Synthetic oligonucleotide
uuuugggauccgggcuucu

SEQ ID NO: 1165222 - RNA, 19 nt, Artificial Sequence
  Description of Artificial Sequence: Synthetic oligonucleotide
ugccgaucuucucguccuc

SEQ ID NO: 1165223 - RNA, 19 nt, Artificial Sequence
  Description of Artificial Sequence: Synthetic oligonucleotide
ggcugucucggucccgacc

SEQ ID NO: 1165224 - RNA, 19 nt, Artificial Sequence
  Description of Artificial Sequence: Synthetic oligonucleotide
gccgauacuggaagacugc

SEQ ID NO: 1165225 - RNA, 19 nt, Artificial Sequence
  Description of Artificial Sequence: Synthetic oligonucleotide
gugucugucugucuagcuu

SEQ ID NO: 1165226 - RNA, 19 nt, Artificial Sequence
  Description of Artificial Sequence: Synthetic oligonucleotide
gggcucacuguacuuaaua

SEQ ID NO: 1165227 - RNA, 19 nt, Artificial Sequence
  Description of Artificial Sequence: Synthetic oligonucleotide
ggcgccuggcauuaugaaa

SEQ ID NO: 1165228 - RNA, 19 nt, Artificial Sequence
  Description of Artificial Sequence: Synthetic oligonucleotide
cucacguuccugcuucacu

SEQ ID NO: 1165229 - RNA, 19 nt, Artificial Sequence
  Description of Artificial Sequence: Synthetic oligonucleotide
gcaggagggauggucgaug

SEQ ID NO: 1165230 - RNA, 19 nt, Artificial Sequence
  Description of Artificial Sequence: Synthetic oligonucleotide
gcugacccaggccaaagcu

SEQ ID NO: 1165231 - RNA, 19 nt, Artificial Sequence
  Description of Artificial Sequence: Synthetic oligonucleotide
ugccggucucgcucacugu

SEQ ID NO: 1165232 - RNA, 19 nt, Artificial Sequence
  Description of Artificial Sequence: Synthetic oligonucleotide
cagggcgagggaucaccuc

SEQ ID NO: 1165233 - RNA, 19 nt, Artificial Sequence
  Description of Artificial Sequence: Synthetic oligonucleotide
gcacgaguguacuccacaa

SEQ ID NO: 1165234 - RNA, 19 nt, Artificial Sequence
  Description of Artificial Sequence: Synthetic oligonucleotide
cuuugccuaucauguggua

SEQ ID NO: 1165235 - RNA, 19 nt, Artificial Sequence
  Description of Artificial Sequence: Synthetic oligonucleotide
gcaacagagaaaagacuua

SEQ ID NO: 1165236 - RNA, 19 nt, Artificial Sequence
  Description of Artificial Sequence: Synthetic oligonucleotide
gguaagcacucugccgaug

SEQ ID NO: 1165237 - RNA, 19 nt, Artificial Sequence
  Description of Artificial Sequence: Synthetic oligonucleotide
ccccagaaaguucaaagcu

SEQ ID NO: 1165238 - RNA, 19 nt, Artificial Sequence
  Description of Artificial Sequence: Synthetic oligonucleotide
caucgcagagugucugucu

SEQ ID NO: 1165239 - RNA, 19 nt, Artificial Sequence
  Description of Artificial Sequence: Synthetic oligonucleotide
agagcugacccaggccaaa

SEQ ID NO: 1165240 - RNA, 19 nt, Artificial Sequence
  Description of Artificial Sequence: Synthetic oligonucleotide
caccucucugcuucuguua

SEQ ID NO: 1165241 - RNA, 19 nt, Artificial Sequence
  Description of Artificial Sequence: Synthetic oligonucleotide
ugccgucagcacgagugua

SEQ ID NO: 1165242 - RNA, 19 nt, Artificial Sequence
  Description of Artificial Sequence: Synthetic oligonucleotide
guacagacgccaccguuuu

SEQ ID NO: 1165243 - RNA, 19 nt, Artificial Sequence
  Description of Artificial Sequence: Synthetic oligonucleotide
cccaaauuuaaggacgucu

SEQ ID NO: 1165244 - RNA, 19 nt, Artificial Sequence
  Description of Artificial Sequence: Synthetic oligonucleotide
gucggcccagaagguaagc

SEQ ID NO: 1165245 - RNA, 19 nt, Artificial Sequence
  Description of Artificial Sequence: Synthetic oligonucleotide
ggcgggaauggccccggug

SEQ ID NO: 1165246 - RNA, 19 nt, Artificial Sequence
  Description of Artificial Sequence: Synthetic oligonucleotide
gacagucaauaaugagguu

SEQ ID NO: 1165247 - RNA, 19 nt, Artificial Sequence
  Description of Artificial Sequence: Synthetic oligonucleotide
gguuucacccuccgaccaa

SEQ ID NO: 1165248 - RNA, 19 nt, Artificial Sequence
  Description of Artificial Sequence: Synthetic oligonucleotide
gggaaguaccucaucauuu

SEQ ID NO: 1165249 - RNA, 19 nt, Artificial Sequence
  Description of Artificial Sequence: Synthetic oligonucleotide
ccggaagguauuggugucc

SEQ ID NO: 1165250 - RNA, 19 nt, Artificial Sequence
  Description of Artificial Sequence: Synthetic oligonucleotide
cccggaagguauugguguc

SEQ ID NO: 1165251 - RNA, 19 nt, Artificial Sequence
  Description of Artificial Sequence: Synthetic oligonucleotide
agcccagaucaaugaugua

SEQ ID NO: 1165252 - RNA, 19 nt, Artificial Sequence
  Description of Artificial Sequence: Synthetic oligonucleotide
gcucaacgacuauauaaau

SEQ ID NO: 1165253 - RNA, 19 nt, Artificial Sequence
  Description of Artificial Sequence: Synthetic oligonucleotide
cucuccgaggaugguccuc

SEQ ID NO: 1165254 - RNA, 19 nt, Artificial Sequence
  Description of Artificial Sequence: Synthetic oligonucleotide
gccgucagcacgaguguac

SEQ ID NO: 1165255 - RNA, 19 nt, Artificial Sequence
  Description of Artificial Sequence: Synthetic oligonucleotide
cugacccaggccaaagcuu

SEQ ID NO: 1165256 - RNA, 19 nt, Artificial Sequence
  Description of Artificial Sequence: Synthetic oligonucleotide
ccuaucaugugguauuauu

SEQ ID NO: 1165257 - RNA, 19 nt, Artificial Sequence
  Description of Artificial Sequence: Synthetic oligonucleotide
caccccggaagguauuggu

SEQ ID NO: 1165258 - RNA, 19 nt, Artificial Sequence
  Description of Artificial Sequence: Synthetic oligonucleotide
gucaaccccauggccucca

SEQ ID NO: 1165259 - RNA, 19 nt, Artificial Sequence
  Description of Artificial Sequence: Synthetic oligonucleotide
uccgaccaacugugccguc

SEQ ID NO: 1165260 - RNA, 19 nt, Artificial Sequence
  Description of Artificial Sequence: Synthetic oligonucleotide
guguacuccacaagccgau

SEQ ID NO: 1165261 - RNA, 19 nt, Artificial Sequence
  Description of Artificial Sequence: Synthetic oligonucleotide
gguacagacgccaccguuu

SEQ ID NO: 1165262 - RNA, 19 nt, Artificial Sequence
  Description of Artificial Sequence: Synthetic oligonucleotide
ggcgagggaucaccuccug

SEQ ID NO: 1165263 - RNA, 19 nt, Artificial Sequence
  Description of Artificial Sequence: Synthetic oligonucleotide
ggauggucgaugggaaugu

SEQ ID NO: 1165264 - RNA, 19 nt, Artificial Sequence
  Description of Artificial Sequence: Synthetic oligonucleotide
ccacaagccgauacuggaa

SEQ ID NO: 1165265 - RNA, 19 nt, Artificial Sequence
  Description of Artificial Sequence: Synthetic oligonucleotide
agugccccagaaaguucaa

SEQ ID NO: 1165266 - RNA, 19 nt, Artificial Sequence
  Description of Artificial Sequence: Synthetic oligonucleotide
gcacucugccgauggaugu

SEQ ID NO: 1165267 - RNA, 19 nt, Artificial Sequence
  Description of Artificial Sequence: Synthetic oligonucleotide
uggcgggaauggccccggu

SEQ ID NO: 1165268 - RNA, 19 nt, Artificial Sequence
  Description of Artificial Sequence: Synthetic oligonucleotide
caggcaucgcagagugucu

SEQ ID NO: 1165269 - RNA, 19 nt, Artificial Sequence
  Description of Artificial Sequence: Synthetic oligonucleotide
gccgauggauguacaugac

SEQ ID NO: 1165270 - RNA, 19 nt, Artificial Sequence
  Description of Artificial Sequence: Synthetic oligonucleotide
cggcgaugcggcgaugucg

SEQ ID NO: 1165271 - RNA, 19 nt, Artificial Sequence
  Description of Artificial Sequence: Synthetic oligonucleotide
cgaagugcaaaaugaacuu

SEQ ID NO: 1165272 - RNA, 19 nt, Artificial Sequence
  Description of Artificial Sequence: Synthetic oligonucleotide
cucuaggguuugucaccaa

SEQ ID NO: 1165273 - RNA, 19 nt, Artificial Sequence
  Description of Artificial Sequence: Synthetic oligonucleotide
caugaccucccgacacagu

SEQ ID NO: 1165274 - RNA, 19 nt, Artificial Sequence
  Description of Artificial Sequence: Synthetic oligonucleotide
gucggcgaugcggcgaugu

SEQ ID NO: 1165275 - RNA, 19 nt, Artificial Sequence
  Description of Artificial Sequence: Synthetic oligonucleotide
cacaaagcucaacgacuau

SEQ ID NO: 1165276 - RNA, 19 nt, Artificial Sequence
  Description of Artificial Sequence: Synthetic oligonucleotide
gacgaugcucccggcgccu

SEQ ID NO: 1165277 - RNA, 19 nt, Artificial Sequence
  Description of Artificial Sequence: Synthetic oligonucleotide
cuccgaccaacugugccgu

SEQ ID NO: 1165278 - RNA, 19 nt, Artificial Sequence
  Description of Artificial Sequence: Synthetic oligonucleotide
augcggcgaugucggccca

SEQ ID NO: 1165279 - RNA, 19 nt, Artificial Sequence
  Description of Artificial Sequence: Synthetic oligonucleotide
cggucucgcucacuguuac

SEQ ID NO: 1165280 - RNA, 19 nt, Artificial Sequence
  Description of Artificial Sequence: Synthetic oligonucleotide
gcucacuguuacgagcucu

SEQ ID NO: 1165281 - RNA, 19 nt, Artificial Sequence
  Description of Artificial Sequence: Synthetic oligonucleotide
ccggcgccuggcauuauga

SEQ ID NO: 1165282 - RNA, 19 nt, Artificial Sequence
  Description of Artificial Sequence: Synthetic oligonucleotide
cguugccugagcccagauc

SEQ ID NO: 1165283 - RNA, 19 nt, Artificial Sequence
  Description of Artificial Sequence: Synthetic oligonucleotide
gcagagugucugucugucu

SEQ ID NO: 1165284 - RNA, 19 nt, Artificial Sequence
  Description of Artificial Sequence: Synthetic oligonucleotide
ggguacagacgccaccguu

SEQ ID NO: 1165285 - RNA, 19 nt, Artificial Sequence
  Description of Artificial Sequence: Synthetic oligonucleotide
guauaagcuggaggcuguu

SEQ ID NO: 1165286 - RNA, 19 nt, Artificial Sequence
  Description of Artificial Sequence: Synthetic oligonucleotide
ccucacguuccugcuucac

SEQ ID NO: 1165287 - RNA, 19 nt, Artificial Sequence
  Description of Artificial Sequence: Synthetic oligonucleotide
cgucagcacgaguguacuc

SEQ ID NO: 1165288 - RNA, 19 nt, Artificial Sequence
  Description of Artificial Sequence: Synthetic oligonucleotide
ccgaccaacugugccguca

SEQ ID NO: 1165289 - RNA, 19 nt, Artificial Sequence
  Description of Artificial Sequence: Synthetic oligonucleotide
ggucccgacccugaccacu

SEQ ID NO: 1165290 - RNA, 19 nt, Artificial Sequence
  Description of Artificial Sequence: Synthetic oligonucleotide
accucccgacacaguuaca

SEQ ID NO: 1165291 - RNA, 19 nt, Artificial Sequence
  Description of Artificial Sequence: Synthetic oligonucleotide
ccucccgacacaguuacau

SEQ ID NO: 1165292 - RNA, 19 nt, Artificial Sequence
  Description of Artificial Sequence: Synthetic oligonucleotide
cagcgcccguggguaggag

SEQ ID NO: 1165293 - RNA, 19 nt, Artificial Sequence
  Description of Artificial Sequence: Synthetic oligonucleotide
cccguggguaggagccaug

SEQ ID NO: 1165294 - RNA, 19 nt, Artificial Sequence
  Description of Artificial Sequence: Synthetic oligonucleotide
cucccggcgccuggcauua

SEQ ID NO: 1165295 - RNA, 19 nt, Artificial Sequence
  Description of Artificial Sequence: Synthetic oligonucleotide
cuccucuuuuggcgggaau

SEQ ID NO: 1165296 - RNA, 19 nt, Artificial Sequence
  Description of Artificial Sequence: Synthetic oligonucleotide
gggguacagacgccaccgu

SEQ ID NO: 1165297 - RNA, 19 nt, Artificial Sequence
  Description of Artificial Sequence: Synthetic oligonucleotide
ccggucucgcucacuguua

SEQ ID NO: 1165298 - RNA, 19 nt, Artificial Sequence
  Description of Artificial Sequence: Synthetic oligonucleotide
cugucucggucccgacccu

SEQ ID NO: 1165299 - RNA, 19 nt, Artificial Sequence
  Description of Artificial Sequence: Synthetic oligonucleotide
gcggcgaugucggcccaga

SEQ ID NO: 1165300 - RNA, 19 nt, Artificial Sequence
  Description of Artificial Sequence: Synthetic oligonucleotide
gugguucaauacgcuuguu

SEQ ID NO: 1165301 - RNA, 19 nt, Artificial Sequence
  Description of Artificial Sequence: Synthetic oligonucleotide
cgggaaguaccucaucauu

SEQ ID NO: 1165302 - RNA, 19 nt, Artificial Sequence
  Description of Artificial Sequence: Synthetic oligonucleotide
gggcgagggaucaccuccu

SEQ ID NO: 1165303 - RNA, 19 nt, Artificial Sequence
  Description of Artificial Sequence: Synthetic oligonucleotide
ccgucagcacgaguguacu

SEQ ID NO: 1165304 - RNA, 19 nt, Artificial Sequence
  Description of Artificial Sequence: Synthetic oligonucleotide
ucccggcgccuggcauuau

SEQ ID NO: 1165305 - RNA, 19 nt, Artificial Sequence
  Description of Artificial Sequence: Synthetic oligonucleotide
cgaugucggcccagaaggu

SEQ ID NO: 1165306 - RNA, 19 nt, Artificial Sequence
  Description of Artificial Sequence: Synthetic oligonucleotide
cccguugccugagcccaga

SEQ ID NO: 1165307 - RNA, 19 nt, Artificial Sequence
  Description of Artificial Sequence: Synthetic oligonucleotide
ggugccggucucgcucacu

SEQ ID NO: 1165308 - RNA, 19 nt, Artificial Sequence
  Description of Artificial Sequence: Synthetic oligonucleotide
ggggcucacuguacuuaau

SEQ ID NO: 1165309 - RNA, 19 nt, Artificial Sequence
  Description of Artificial Sequence: Synthetic oligonucleotide
ggcacccacuacacacuuu

SEQ ID NO: 1165310 - RNA, 19 nt, Artificial Sequence
  Description of Artificial Sequence: Synthetic oligonucleotide
cggucccgacccugaccac

SEQ ID NO: 1165311 - RNA, 19 nt, Artificial Sequence
  Description of Artificial Sequence: Synthetic oligonucleotide
gcgcuggagucaaccccau

SEQ ID NO: 1165312 - RNA, 19 nt, Artificial Sequence
  Description of Artificial Sequence: Synthetic oligonucleotide
cggcgaugucggcccagaa

SEQ ID NO: 1165313 - RNA, 19 nt, Artificial Sequence
  Description of Artificial Sequence: Synthetic oligonucleotide
aauaaaggggacuccaggg

SEQ ID NO: 1165314 - RNA, 19 nt, Artificial Sequence
  Description of Artificial Sequence: Synthetic oligonucleotide
aacacucagagucuguccc

SEQ ID NO: 1165315 - RNA, 19 nt, Artificial Sequence
  Description of Artificial Sequence: Synthetic oligonucleotide
cuugguuaagacaucaccc

SEQ ID NO: 1165316 - RNA, 19 nt, Artificial Sequence
  Description of Artificial Sequence: Synthetic oligonucleotide
gaagcagcucaauaaaggg

SEQ ID NO: 1165317 - RNA, 19 nt, Artificial Sequence
  Description of Artificial Sequence: Synthetic oligonucleotide
uccucgaacacucagaguc

SEQ ID NO: 1165318 - RNA, 19 nt, Artificial Sequence
  Description of Artificial Sequence: Synthetic oligonucleotide
aauauauucucaucaguaa

SEQ ID NO: 1165319 - RNA, 19 nt, Artificial Sequence
  Description of Artificial Sequence: Synthetic oligonucleotide
uauauucucaucaguaacu

SEQ ID NO: 1165320 - RNA, 19 nt, Artificial Sequence
  Description of Artificial Sequence: Synthetic oligonucleotide
aagauagaauccuuggggu

SEQ ID NO: 1165321 - RNA, 19 nt, Artificial Sequence
  Description of Artificial Sequence: Synthetic oligonucleotide
augaacaccucguagugcg

SEQ ID NO: 1165322 - RNA, 19 nt, Artificial Sequence
  Description of Artificial Sequence: Synthetic oligonucleotide
aguaacuucuccucgaaca

SEQ ID NO: 1165323 - RNA, 19 nt, Artificial Sequence
  Description of Artificial Sequence: Synthetic oligonucleotide
aucaguaagaaggagagug

SEQ ID NO: 1165324 - RNA, 19 nt, Artificial Sequence
  Description of Artificial Sequence: Synthetic oligonucleotide
cucucuaugguccuggagg

SEQ ID NO: 1165325 - RNA, 19 nt, Artificial Sequence
  Description of Artificial Sequence: Synthetic oligonucleotide
guuuagggugacuagaccc

SEQ ID NO: 1165326 - RNA, 19 nt, Artificial Sequence
  Description of Artificial Sequence: Synthetic oligonucleotide
ugggagaugacuccggaag

SEQ ID NO: 1165327 - RNA, 19 nt, Artificial Sequence
  Description of Artificial Sequence: Synthetic oligonucleotide
ucaguaagaaggagagugg

SEQ ID NO: 1165328 - RNA, 19 nt, Artificial Sequence
  Description of Artificial Sequence: Synthetic oligonucleotide
aguucauacucuuccuccc

SEQ ID NO: 1165329 - RNA, 19 nt, Artificial Sequence
  Description of Artificial Sequence: Synthetic oligonucleotide
acgaccugcagcuuuggcc

SEQ ID NO: 1165330 - RNA, 19 nt, Artificial Sequence
  Description of Artificial Sequence: Synthetic oligonucleotide
guaggggucacacaggcag

SEQ ID NO: 1165331 - RNA, 19 nt, Artificial Sequence
  Description of Artificial Sequence: Synthetic oligonucleotide
agguuuagggccaucaccc

SEQ ID NO: 1165332 - RNA, 19 nt, Artificial Sequence
  Description of Artificial Sequence: Synthetic oligonucleotide
agaaccgucacaggggucc

SEQ ID NO: 1165333 - RNA, 19 nt, Artificial Sequence
  Description of Artificial Sequence: Synthetic oligonucleotide
ucuucagacaccacucgag

SEQ ID NO: 1165334 - RNA, 19 nt, Artificial Sequence
  Description of Artificial Sequence: Synthetic oligonucleotide
aagacuuguagugagggga

SEQ ID NO: 1165335 - RNA, 19 nt, Artificial Sequence
  Description of Artificial Sequence: Synthetic oligonucleotide
aguacuucuggguaggccu

SEQ ID NO: 1165336 - RNA, 19 nt, Artificial Sequence
  Description of Artificial Sequence: Synthetic oligonucleotide
ggugacuagacccagcagg

SEQ ID NO: 1165337 - RNA, 19 nt, Artificial Sequence
  Description of Artificial Sequence: Synthetic oligonucleotide
ucucuaugguccuggaggg

SEQ ID NO: 1165338 - RNA, 19 nt, Artificial Sequence
  Description of Artificial Sequence: Synthetic oligonucleotide
ucagacaccacucgagggc

SEQ ID NO: 1165339 - RNA, 19 nt, Artificial Sequence
  Description of Artificial Sequence: Synthetic oligonucleotide
accgcaaagacuuguagug

SEQ ID NO: 1165340 - RNA, 19 nt, Artificial Sequence
  Description of Artificial Sequence: Synthetic oligonucleotide
uuuagggugacuagaccca

SEQ ID NO: 1165341 - RNA, 19 nt, Artificial Sequence
  Description of Artificial Sequence: Synthetic oligonucleotide
auaagcaggagaaaagaag

SEQ ID NO: 1165342 - RNA, 19 nt, Artificial Sequence
  Description of Artificial Sequence: Synthetic oligonucleotide
caccacaaggcccugaggg

SEQ ID NO: 1165343 - RNA, 19 nt, Artificial Sequence
  Description of Artificial Sequence: Synthetic oligonucleotide
gauaucagugccuccagca

SEQ ID NO: 1165344 - RNA, 19 nt, Artificial Sequence
  Description of Artificial Sequence: Synthetic oligonucleotide
aaccgcaaagacuuguagu

SEQ ID NO: 1165345 - RNA, 19 nt, Artificial Sequence
  Description of Artificial Sequence: Synthetic oligonucleotide
gaagcugacaacaggacac

SEQ ID NO: 1165346 - RNA, 19 nt, Artificial Sequence
  Description of Artificial Sequence: Synthetic oligonucleotide
uucagacaccacucgaggg

SEQ ID NO: 1165347 - RNA, 19 nt, Artificial Sequence
  Description of Artificial Sequence: Synthetic oligonucleotide
aauccccucagcuccauga

SEQ ID NO: 1165348 - RNA, 19 nt, Artificial Sequence
  Description of Artificial Sequence: Synthetic oligonucleotide
agaagccucucuauggucc

SEQ ID NO: 1165349 - RNA, 19 nt, Artificial Sequence
  Description of Artificial Sequence: Synthetic oligonucleotide
uuuggccacagccgaaggg

SEQ ID NO: 1165350 - RNA, 19 nt, Artificial Sequence
  Description of Artificial Sequence: Synthetic oligonucleotide
caaagacuuguagugaggg

SEQ ID NO: 1165351 - RNA, 19 nt, Artificial Sequence
  Description of Artificial Sequence: Synthetic oligonucleotide
agacaucacccucuucugc

SEQ ID NO: 1165352 - RNA, 19 nt, Artificial Sequence
  Description of Artificial Sequence: Synthetic oligonucleotide
gauuccucaauccccucag

SEQ ID NO: 1165353 - RNA, 19 nt, Artificial Sequence
  Description of Artificial Sequence: Synthetic oligonucleotide
cucgauuuuccuccgacag

SEQ ID NO: 1165354 - RNA, 19 nt, Artificial Sequence
  Description of Artificial Sequence: Synthetic oligonucleotide
agcucaauaaaggggacuc

SEQ ID NO: 1165355 - RNA, 19 nt, Artificial Sequence
  Description of Artificial Sequence: Synthetic oligonucleotide
caguucauacucuuccucc

SEQ ID NO: 1165356 - RNA, 19 nt, Artificial Sequence
  Description of Artificial Sequence: Synthetic oligonucleotide
acagccgaagggccaaucc

SEQ ID NO: 1165357 - RNA, 19 nt, Artificial Sequence
  Description of Artificial Sequence: Synthetic oligonucleotide
ucaucaguaacuucuccuc

SEQ ID NO: 1165358 - RNA, 19 nt, Artificial Sequence
  Description of Artificial Sequence: Synthetic oligonucleotide
uaaccgcaaagacuuguag

SEQ ID NO: 1165359 - RNA, 19 nt, Artificial Sequence
  Description of Artificial Sequence: Synthetic oligonucleotide
uuguuuagggugacuagac

SEQ ID NO: 1165360 - RNA, 19 nt, Artificial Sequence
  Description of Artificial Sequence: Synthetic oligonucleotide
ugcauccaaggucaccacg

SEQ ID NO: 1165361 - RNA, 19 nt, Artificial Sequence
  Description of Artificial Sequence: Synthetic oligonucleotide
uuccgaugcugccaggcgg

SEQ ID NO: 1165362 - RNA, 19 nt, Artificial Sequence
  Description of Artificial Sequence: Synthetic oligonucleotide
aguacucugaagcucccug

SEQ ID NO: 1165363 - RNA, 19 nt, Artificial Sequence
  Description of Artificial Sequence: Synthetic oligonucleotide
uuuccgaugcugccaggcg

SEQ ID NO: 1165364 - RNA, 19 nt, Artificial Sequence
  Description of Artificial Sequence: Synthetic oligonucleotide
cuucagacaccacucgagg

SEQ ID NO: 1165365 - RNA, 19 nt, Artificial Sequence
  Description of Artificial Sequence: Synthetic oligonucleotide
accacaaggcccugagggc

SEQ ID NO: 1165366 - RNA, 19 nt, Artificial Sequence
  Description of Artificial Sequence: Synthetic oligonucleotide
gacuagacccagcagggug

SEQ ID NO: 1165367 - RNA, 19 nt, Artificial Sequence
  Description of Artificial Sequence: Synthetic oligonucleotide
caucaguaacuucuccucg

SEQ ID NO: 1165368 - RNA, 19 nt, Artificial Sequence
  Description of Artificial Sequence: Synthetic oligonucleotide
ggagacuuccuucaggcag

SEQ ID NO: 1165369 - RNA, 19 nt, Artificial Sequence
  Description of Artificial Sequence: Synthetic oligonucleotide
aacaccucguagugcgggg

SEQ ID NO: 1165370 - RNA, 19 nt, Artificial Sequence
  Description of Artificial Sequence: Synthetic oligonucleotide
ugacgucugguccaggacu

SEQ ID NO: 1165371 - RNA, 19 nt, Artificial Sequence
  Description of Artificial Sequence: Synthetic oligonucleotide
agccaggauggucuggccc

SEQ ID NO: 1165372 - RNA, 19 nt, Artificial Sequence
  Description of Artificial Sequence: Synthetic oligonucleotide
ucuggguaggccuuguuua

SEQ ID NO: 1165373 - RNA, 19 nt, Artificial Sequence
  Description of Artificial Sequence: Synthetic oligonucleotide
cagggguccagaaugcugc

SEQ ID NO: 1165374 - RNA, 19 nt, Artificial Sequence
  Description of Artificial Sequence: Synthetic oligonucleotide
uuccuugacuggaagcagc

SEQ ID NO: 1165375 - RNA, 19 nt, Artificial Sequence
  Description of Artificial Sequence: Synthetic oligonucleotide
agagguguuccuagguucc

SEQ ID NO: 1165376 - RNA, 19 nt, Artificial Sequence
  Description of Artificial Sequence: Synthetic oligonucleotide
uucuucagacaccacucga

SEQ ID NO: 1165377 - RNA, 19 nt, Artificial Sequence
  Description of Artificial Sequence: Synthetic oligonucleotide
auagaauccuugggguugc

SEQ ID NO: 1165378 - RNA, 19 nt, Artificial Sequence
  Description of Artificial Sequence: Synthetic oligonucleotide
cagguuuagggccaucacc

SEQ ID NO: 1165379 - RNA, 19 nt, Artificial Sequence
  Description of Artificial Sequence: Synthetic oligonucleotide
ucagugggagaugacuccg

SEQ ID NO: 1165380 - RNA, 19 nt, Artificial Sequence
  Description of Artificial Sequence: Synthetic oligonucleotide
gaacacucagagucugucc

SEQ ID NO: 1165381 - RNA, 19 nt, Artificial Sequence
  Description of Artificial Sequence: Synthetic oligonucleotide
uggguuccuuccuugacug

SEQ ID NO: 1165382 - RNA, 19 nt, Artificial Sequence
  Description of Artificial Sequence: Synthetic oligonucleotide
uccgacagauuccucaauc

SEQ ID NO: 1165383 - RNA, 19 nt, Artificial Sequence
  Description of Artificial Sequence: Synthetic oligonucleotide
ccaacaaacacacuccaag

SEQ ID NO: 1165384 - RNA, 19 nt, Artificial Sequence
  Description of Artificial Sequence: Synthetic oligonucleotide
uccuccgacagauuccuca

SEQ ID NO: 1165385 - RNA, 19 nt, Artificial Sequence
  Description of Artificial Sequence: Synthetic oligonucleotide
gagagguguuccuagguuc

SEQ ID NO: 1165386 - RNA, 19 nt, Artificial Sequence
  Description of Artificial Sequence: Synthetic oligonucleotide
aacagcagcagcagcagca

SEQ ID NO: 1165387 - RNA, 19 nt, Artificial Sequence
  Description of Artificial Sequence: Synthetic oligonucleotide
acuuguagugaggggagac

SEQ ID NO: 1165388 - RNA, 19 nt, Artificial Sequence
  Description of Artificial Sequence: Synthetic oligonucleotide
ucacacugccccguaaccg

SEQ ID NO: 1165389 - RNA, 19 nt, Artificial Sequence
  Description of Artificial Sequence: Synthetic oligonucleotide
aaccacccguaccacaucu

SEQ ID NO: 1165390 - RNA, 19 nt, Artificial Sequence
  Description of Artificial Sequence: Synthetic oligonucleotide
cuugacuggaagcagcuca

SEQ ID NO: 1165391 - RNA, 19 nt, Artificial Sequence
  Description of Artificial Sequence: Synthetic oligonucleotide
guacucugaagcucccugg

SEQ ID NO: 1165392 - RNA, 19 nt, Artificial Sequence
  Description of Artificial Sequence: Synthetic oligonucleotide
uguaguucagcugcucggc

SEQ ID NO: 1165393 - RNA, 19 nt, Artificial Sequence
  Description of Artificial Sequence: Synthetic oligonucleotide
agagaagccucucuauggu

SEQ ID NO: 1165394 - RNA, 19 nt, Artificial Sequence
  Description of Artificial Sequence: Synthetic oligonucleotide
gacaucacccucuucugca

SEQ ID NO: 1165395 - RNA, 19 nt, Artificial Sequence
  Description of Artificial Sequence: Synthetic oligonucleotide
aaaagaaggcuagcccuug

SEQ ID NO: 1165396 - RNA, 19 nt, Artificial Sequence
  Description of Artificial Sequence: Synthetic oligonucleotide
uuuagggccaucaccccuc

SEQ ID NO: 1165397 - RNA, 19 nt, Artificial Sequence
  Description of Artificial Sequence: Synthetic oligonucleotide
uaggccuuguuuaggguga

SEQ ID NO: 1165398 - RNA, 19 nt, Artificial Sequence
  Description of Artificial Sequence: Synthetic oligonucleotide
aucaguaacuucuccucga

SEQ ID NO: 1165399 - RNA, 19 nt, Artificial Sequence
  Description of Artificial Sequence: Synthetic oligonucleotide
gugacuagacccagcaggg

SEQ ID NO: 1165400 - RNA, 19 nt, Artificial Sequence
  Description of Artificial Sequence: Synthetic oligonucleotide
ugguuaagacaucacccuc

SEQ ID NO: 1165401 - RNA, 19 nt, Artificial Sequence
  Description of Artificial Sequence: Synthetic oligonucleotide
ggcagcagagaauauauuc

SEQ ID NO: 1165402 - RNA, 19 nt, Artificial Sequence
  Description of Artificial Sequence: Synthetic oligonucleotide
agggccaucaccccuccag

SEQ ID NO: 1165403 - RNA, 19 nt, Artificial Sequence
  Description of Artificial Sequence: Synthetic oligonucleotide
ugugacgucugguccagga

SEQ ID NO: 1165404 - RNA, 19 nt, Artificial Sequence
  Description of Artificial Sequence: Synthetic oligonucleotide
guggagugugcucuguucc

SEQ ID NO: 1165405 - RNA, 19 nt, Artificial Sequence
  Description of Artificial Sequence: Synthetic oligonucleotide
cagcagagaauauauucuc

SEQ ID NO: 1165406 - RNA, 19 nt, Artificial Sequence
  Description of Artificial Sequence: Synthetic oligonucleotide
ucgauuuuccuccgacaga

SEQ ID NO: 1165407 - RNA, 19 nt, Artificial Sequence
  Description of Artificial Sequence: Synthetic oligonucleotide
agaguccuuggcuccaaag

SEQ ID NO: 1165408 - RNA, 19 nt, Artificial Sequence
  Description of Artificial Sequence: Synthetic oligonucleotide
aggugaccgagccugagga

SEQ ID NO: 1165409 - RNA, 19 nt, Artificial Sequence
  Description of Artificial Sequence: Synthetic oligonucleotide
ucaguaacuucuccucgaa

SEQ ID NO: 1165410 - RNA, 19 nt, Artificial Sequence
  Description of Artificial Sequence: Synthetic oligonucleotide
gaacccugggcuuucuuca

SEQ ID NO: 1165411 - RNA, 19 nt, Artificial Sequence
  Description of Artificial Sequence: Synthetic oligonucleotide
gaacaccucguagugcggg

SEQ ID NO: 1165412 - RNA, 19 nt, Artificial Sequence
  Description of Artificial Sequence: Synthetic oligonucleotide
ucacagggguccagaaugc

SEQ ID NO: 1165413 - RNA, 19 nt, Artificial Sequence
  Description of Artificial Sequence: Synthetic oligonucleotide
ucucgauuuuccuccgaca

SEQ ID NO: 1165414 - RNA, 19 nt, Artificial Sequence
  Description of Artificial Sequence: Synthetic oligonucleotide
aguaagaaggagaguggag

SEQ ID NO: 1165415 - RNA, 19 nt, Artificial Sequence
  Description of Artificial Sequence: Synthetic oligonucleotide
uccuugacuggaagcagcu

SEQ ID NO: 1165416 - RNA, 19 nt, Artificial Sequence
  Description of Artificial Sequence: Synthetic oligonucleotide
agcagcauaagcaggagaa

SEQ ID NO: 1165417 - RNA, 19 nt, Artificial Sequence
  Description of Artificial Sequence: Synthetic oligonucleotide
cacacugccccguaaccgc

SEQ ID NO: 1165418 - RNA, 19 nt, Artificial Sequence
  Description of Artificial Sequence: Synthetic oligonucleotide
auggacuuuggcaggacuc

SEQ ID NO: 1165419 - RNA, 19 nt, Artificial Sequence
  Description of Artificial Sequence: Synthetic oligonucleotide
agauuccucaauccccuca

SEQ ID NO: 1165420 - RNA, 19 nt, Artificial Sequence
  Description of Artificial Sequence: Synthetic oligonucleotide
agggugacuagacccagca

SEQ ID NO: 1165421 - RNA, 19 nt, Artificial Sequence
  Description of Artificial Sequence: Synthetic oligonucleotide
cuccaugaacaccucguag

SEQ ID NO: 1165422 - RNA, 19 nt, Artificial Sequence
  Description of Artificial Sequence: Synthetic oligonucleotide
acaacaggacacugguugu

SEQ ID NO: 1165423 - RNA, 19 nt, Artificial Sequence
  Description of Artificial Sequence: Synthetic oligonucleotide
guagugaggggagacuucc

SEQ ID NO: 1165424 - RNA, 19 nt, Artificial Sequence
  Description of Artificial Sequence: Synthetic oligonucleotide
ugaccgagccugaggaccc

SEQ ID NO: 1165425 - RNA, 19 nt, Artificial Sequence
  Description of Artificial Sequence: Synthetic oligonucleotide
ccuugguuaagacaucacc

SEQ ID NO: 1165426 - RNA, 19 nt, Artificial Sequence
  Description of Artificial Sequence: Synthetic oligonucleotide
gggcagaaccgucacaggg

SEQ ID NO: 1165427 - RNA, 19 nt, Artificial Sequence
  Description of Artificial Sequence: Synthetic oligonucleotide
uugacuggaagcagcucaa

SEQ ID NO: 1165428 - RNA, 19 nt, Artificial Sequence
  Description of Artificial Sequence: Synthetic oligonucleotide
aacccugggcuuucuucag

SEQ ID NO: 1165429 - RNA, 19 nt, Artificial Sequence
  Description of Artificial Sequence: Synthetic oligonucleotide
uccucaauccccucagcuc

SEQ ID NO: 1165430 - RNA, 19 nt, Artificial Sequence
  Description of Artificial Sequence: Synthetic oligonucleotide
cuuuggcccacguggagug

SEQ ID NO: 1165431 - RNA, 19 nt, Artificial Sequence
  Description of Artificial Sequence: Synthetic oligonucleotide
augccggggacagaguugg

SEQ ID NO: 1165432 - RNA, 19 nt, Artificial Sequence
  Description of Artificial Sequence: Synthetic oligonucleotide
uguaggcaccaaccacccg

SEQ ID NO: 1165433 - RNA, 19 nt, Artificial Sequence
  Description of Artificial Sequence: Synthetic oligonucleotide
uugucucgauuuuccuccg

SEQ ID NO: 1165434 - RNA, 19 nt, Artificial Sequence
  Description of Artificial Sequence: Synthetic oligonucleotide
agauagaauccuugggguu

SEQ ID NO: 1165435 - RNA, 19 nt, Artificial Sequence
  Description of Artificial Sequence: Synthetic oligonucleotide
gacccgaggcauuucagga

SEQ ID NO: 1165436 - RNA, 19 nt, Artificial Sequence
  Description of Artificial Sequence: Synthetic oligonucleotide
ggcauuucaggagggaagg

SEQ ID NO: 1165437 - RNA, 19 nt, Artificial Sequence
  Description of Artificial Sequence: Synthetic oligonucleotide
guuccuagguucccggcug

SEQ ID NO: 1165438 - RNA, 19 nt, Artificial Sequence
  Description of Artificial Sequence: Synthetic oligonucleotide
uuagggugacuagacccag

SEQ ID NO: 1165439 - RNA, 19 nt, Artificial Sequence
  Description of Artificial Sequence: Synthetic oligonucleotide
gucaguacuucuggguagg

SEQ ID NO: 1165440 - RNA, 19 nt, Artificial Sequence
  Description of Artificial Sequence: Synthetic oligonucleotide
cuuguuuagggugacuaga

SEQ ID NO: 1165441 - RNA, 19 nt, Artificial Sequence
  Description of Artificial Sequence: Synthetic oligonucleotide
gagucaguacuucugggua

SEQ ID NO: 1165442 - RNA, 19 nt, Artificial Sequence
  Description of Artificial Sequence: Synthetic oligonucleotide
uggucggucagcaccaguu

SEQ ID NO: 1165443 - RNA, 19 nt, Artificial Sequence
  Description of Artificial Sequence: Synthetic oligonucleotide
uagcccuuggcaccacaag

SEQ ID NO: 1165444 - RNA, 19 nt, Artificial Sequence
  Description of Artificial Sequence: Synthetic oligonucleotide
acaucacccucuucugcag

SEQ ID NO: 1165445 - RNA, 19 nt, Artificial Sequence
  Description of Artificial Sequence: Synthetic oligonucleotide
ugcucggcuagggagaggu

SEQ ID NO: 1165446 - RNA, 19 nt, Artificial Sequence
  Description of Artificial Sequence: Synthetic oligonucleotide
aggagcuuggccaggugac

SEQ ID NO: 1165447 - RNA, 19 nt, Artificial Sequence
  Description of Artificial Sequence: Synthetic oligonucleotide
ccucaauccccucagcucc

SEQ ID NO: 1165448 - RNA, 19 nt, Artificial Sequence
  Description of Artificial Sequence: Synthetic oligonucleotide
uggagugugcucuguucca

SEQ ID NO: 1165449 - RNA, 19 nt, Artificial Sequence
  Description of Artificial Sequence: Synthetic oligonucleotide
aaggucaccacgaccugca

SEQ ID NO: 1165450 - RNA, 19 nt, Artificial Sequence
  Description of Artificial Sequence: Synthetic oligonucleotide
ugguguuggaggcgggcca

SEQ ID NO: 1165451 - RNA, 19 nt, Artificial Sequence
  Description of Artificial Sequence: Synthetic oligonucleotide
uguaggggucacacaggca

SEQ ID NO: 1165452 - RNA, 19 nt, Artificial Sequence
  Description of Artificial Sequence: Synthetic oligonucleotide
uggucucaccagauggacu

SEQ ID NO: 1165453 - RNA, 19 nt, Artificial Sequence
  Description of Artificial Sequence: Synthetic oligonucleotide
gggagaugacuccggaagg

SEQ ID NO: 1165454 - RNA, 19 nt, Artificial Sequence
  Description of Artificial Sequence: Synthetic oligonucleotide
uggguaggccuuguuuagg

SEQ ID NO: 1165455 - RNA, 19 nt, Artificial Sequence
  Description of Artificial Sequence: Synthetic oligonucleotide
ggugaagcugacaacagga

SEQ ID NO: 1165456 - RNA, 19 nt, Artificial Sequence
  Description of Artificial Sequence: Synthetic oligonucleotide
gucucgauuuuccuccgac

SEQ ID NO: 1165457 - RNA, 19 nt, Artificial Sequence
  Description of Artificial Sequence: Synthetic oligonucleotide
acaccccagaggaaagggc

SEQ ID NO: 1165458 - RNA, 19 nt, Artificial Sequence
  Description of Artificial Sequence: Synthetic oligonucleotide
agugggagaugacuccgga

SEQ ID NO: 1165459 - RNA, 19 nt, Artificial Sequence
  Description of Artificial Sequence: Synthetic oligonucleotide
agcagagaauauauucuca

SEQ ID NO: 1165460 - RNA, 19 nt, Artificial Sequence
  Description of Artificial Sequence: Synthetic oligonucleotide
agacuuguagugaggggag

SEQ ID NO: 1165461 - RNA, 19 nt, Artificial Sequence
  Description of Artificial Sequence: Synthetic oligonucleotide
cguagugcggggcagaacc

SEQ ID NO: 1165462 - RNA, 19 nt, Artificial Sequence
  Description of Artificial Sequence: Synthetic oligonucleotide
gggcccaacaaacacacuc

SEQ ID NO: 1165463 - RNA, 19 nt, Artificial Sequence
  Description of Artificial Sequence: Synthetic oligonucleotide
guuuccgaugcugccaggc

SEQ ID NO: 1165464 - RNA, 19 nt, Artificial Sequence
  Description of Artificial Sequence: Synthetic oligonucleotide
guaggcaccaaccacccgu

SEQ ID NO: 1165465 - RNA, 19 nt, Artificial Sequence
  Description of Artificial Sequence: Synthetic oligonucleotide
uuaagacaucacccucuuc

SEQ ID NO: 1165466 - RNA, 19 nt, Artificial Sequence
  Description of Artificial Sequence: Synthetic oligonucleotide
uccuggagucaguacuucu

SEQ ID NO: 1165467 - RNA, 19 nt, Artificial Sequence
  Description of Artificial Sequence: Synthetic oligonucleotide
ggacccgaggcauuucagg

SEQ ID NO: 1165468 - RNA, 19 nt, Artificial Sequence
  Description of Artificial Sequence: Synthetic oligonucleotide
ggcguggucggucagcacc

SEQ ID NO: 1165469 - RNA, 19 nt, Artificial Sequence
  Description of Artificial Sequence: Synthetic oligonucleotide
ugucccagccugccgguga

SEQ ID NO: 1165470 - RNA, 19 nt, Artificial Sequence
  Description of Artificial Sequence: Synthetic oligonucleotide
aagggccaauccucggggu

SEQ ID NO: 1165471 - RNA, 19 nt, Artificial Sequence
  Description of Artificial Sequence: Synthetic oligonucleotide
agugaggggagacuuccuu

SEQ ID NO: 1165472 - RNA, 19 nt, Artificial Sequence
  Description of Artificial Sequence: Synthetic oligonucleotide
ugccccguaaccgcaaaga

SEQ ID NO: 1165473 - RNA, 19 nt, Artificial Sequence
  Description of Artificial Sequence: Synthetic oligonucleotide
uucccggaguacucugaag

SEQ ID NO: 1165474 - RNA, 19 nt, Artificial Sequence
  Description of Artificial Sequence: Synthetic oligonucleotide
gcugacaacaggacacugg

SEQ ID NO: 1165475 - RNA, 19 nt, Artificial Sequence
  Description of Artificial Sequence: Synthetic oligonucleotide
acaccucguagugcggggc

SEQ ID NO: 1165476 - RNA, 19 nt, Artificial Sequence
  Description of Artificial Sequence: Synthetic oligonucleotide
uagggugacuagacccagc

SEQ ID NO: 1165477 - RNA, 19 nt, Artificial Sequence
  Description of Artificial Sequence: Synthetic oligonucleotide
caggcaguacuuccuggag

SEQ ID NO: 1165478 - RNA, 19 nt, Artificial Sequence
  Description of Artificial Sequence: Synthetic oligonucleotide
ggcagaaccgucacagggg

SEQ ID NO: 1165479 - RNA, 19 nt, Artificial Sequence
  Description of Artificial Sequence: Synthetic oligonucleotide
uuccuagguucccggcugc

SEQ ID NO: 1165480 - RNA, 19 nt, Artificial Sequence
  Description of Artificial Sequence: Synthetic oligonucleotide
cagacaccacucgagggcc

SEQ ID NO: 1165481 - RNA, 19 nt, Artificial Sequence
  Description of Artificial Sequence: Synthetic oligonucleotide
ucgaacacucagagucugu

SEQ ID NO: 1165482 - RNA, 19 nt, Artificial Sequence
  Description of Artificial Sequence: Synthetic oligonucleotide
uggcuuuggcccacgugga

SEQ ID NO: 1165483 - RNA, 19 nt, Artificial Sequence
  Description of Artificial Sequence: Synthetic oligonucleotide
caagcuugucucgauuuuc

SEQ ID NO: 1165484 - RNA, 19 nt, Artificial Sequence
  Description of Artificial Sequence: Synthetic oligonucleotide
cagagggaagccuggcaac

SEQ ID NO: 1165485 - RNA, 19 nt, Artificial Sequence
  Description of Artificial Sequence: Synthetic oligonucleotide
ucauacucuuccucccuuu

SEQ ID NO: 1165486 - RNA, 19 nt, Artificial Sequence
  Description of Artificial Sequence: Synthetic oligonucleotide
gaggacccgaggcauuuca

SEQ ID NO: 1165487 - RNA, 19 nt, Artificial Sequence
  Description of Artificial Sequence: Synthetic oligonucleotide
caggacucacacugccccg

SEQ ID NO: 1165488 - RNA, 19 nt, Artificial Sequence
  Description of Artificial Sequence: Synthetic oligonucleotide
gaagcucccuggucucacc

SEQ ID NO: 1165489 - RNA, 19 nt, Artificial Sequence
  Description of Artificial Sequence: Synthetic oligonucleotide
agcuccaugaacaccucgu

SEQ ID NO: 1165490 - RNA, 19 nt, Artificial Sequence
  Description of Artificial Sequence: Synthetic oligonucleotide
ccgacagauuccucaaucc

SEQ ID NO: 1165491 - RNA, 19 nt, Artificial Sequence
  Description of Artificial Sequence: Synthetic oligonucleotide
gugaggggagacuuccuuc

SEQ ID NO: 1165492 - RNA, 19 nt, Artificial Sequence
  Description of Artificial Sequence: Synthetic oligonucleotide
caguacuucuggguaggcc

SEQ ID NO: 1165493 - RNA, 19 nt, Artificial Sequence
  Description of Artificial Sequence: Synthetic oligonucleotide
agugugcucuguuccaguu

SEQ ID NO: 1165494 - RNA, 19 nt, Artificial Sequence
  Description of Artificial Sequence: Synthetic oligonucleotide
ucccuggucucaccagaug

SEQ ID NO: 1165495 - RNA, 19 nt, Artificial Sequence
  Description of Artificial Sequence: Synthetic oligonucleotide
acagcagcagcagcagcag

SEQ ID NO: 1165496 - RNA, 19 nt, Artificial Sequence
  Description of Artificial Sequence: Synthetic oligonucleotide
agccucucuaugguccugg

SEQ ID NO: 1165497 - RNA, 19 nt, Artificial Sequence
  Description of Artificial Sequence: Synthetic oligonucleotide
ggucaggccggcguggucg

SEQ ID NO: 1165498 - RNA, 19 nt, Artificial Sequence
  Description of Artificial Sequence: Synthetic oligonucleotide
gcaacagcugccuugguua

SEQ ID NO: 1165499 - RNA, 19 nt, Artificial Sequence
  Description of Artificial Sequence: Synthetic oligonucleotide
agagggaagccuggcaaca

SEQ ID NO: 1165500 - RNA, 19 nt, Artificial Sequence
  Description of Artificial Sequence: Synthetic oligonucleotide
aagggcgagguggcagagg

SEQ ID NO: 1165501 - RNA, 19 nt, Artificial Sequence
  Description of Artificial Sequence: Synthetic oligonucleotide
gucggucagcaccaguuca

SEQ ID NO: 1165502 - RNA, 19 nt, Artificial Sequence
  Description of Artificial Sequence: Synthetic oligonucleotide
agguucccggcugcuaugg

SEQ ID NO: 1165503 - RNA, 19 nt, Artificial Sequence
  Description of Artificial Sequence: Synthetic oligonucleotide
gagggaagccuggcaacag

SEQ ID NO: 1165504 - RNA, 19 nt, Artificial Sequence
  Description of Artificial Sequence: Synthetic oligonucleotide
cucgaacacucagagucug

SEQ ID NO: 1165505 - RNA, 19 nt, Artificial Sequence
  Description of Artificial Sequence: Synthetic oligonucleotide
ggggcagaagauagaaucc

SEQ ID NO: 1165506 - RNA, 19 nt, Artificial Sequence
  Description of Artificial Sequence: Synthetic oligonucleotide
ggcaccaaccacccguacc

SEQ ID NO: 1165507 - RNA, 19 nt, Artificial Sequence
  Description of Artificial Sequence: Synthetic oligonucleotide
cuuggcaccacaaggcccu

SEQ ID NO: 1165508 - RNA, 19 nt, Artificial Sequence
  Description of Artificial Sequence: Synthetic oligonucleotide
cugccggugaagcugacaa

SEQ ID NO: 1165509 - RNA, 19 nt, Artificial Sequence
  Description of Artificial Sequence: Synthetic oligonucleotide
cacccucuucugcaggagc

SEQ ID NO: 1165510 - RNA, 19 nt, Artificial Sequence
  Description of Artificial Sequence: Synthetic oligonucleotide
cuggucucaccagauggac

SEQ ID NO: 1165511 - RNA, 19 nt, Artificial Sequence
  Description of Artificial Sequence: Synthetic oligonucleotide
cccgaggcauuucaggagg

SEQ ID NO: 1165512 - RNA, 19 nt, Artificial Sequence
  Description of Artificial Sequence: Synthetic oligonucleotide
uggggauaucagugccucc

SEQ ID NO: 1165513 - RNA, 19 nt, Artificial Sequence
  Description of Artificial Sequence: Synthetic oligonucleotide
cguaccacaucucccaggc

SEQ ID NO: 1165514 - RNA, 19 nt, Artificial Sequence
  Description of Artificial Sequence: Synthetic oligonucleotide
ggauaucagugccuccagc

SEQ ID NO: 1165515 - RNA, 19 nt, Artificial Sequence
  Description of Artificial Sequence: Synthetic oligonucleotide
gaggcauuucaggagggaa

SEQ ID NO: 1165516 - RNA, 19 nt, Artificial Sequence
  Description of Artificial Sequence: Synthetic oligonucleotide
cagcauaagcaggagaaaa

SEQ ID NO: 1165517 - RNA, 19 nt, Artificial Sequence
  Description of Artificial Sequence: Synthetic oligonucleotide
ccuggagucaguacuucug

SEQ ID NO: 1165518 - RNA, 19 nt, Artificial Sequence
  Description of Artificial Sequence: Synthetic oligonucleotide
cugcuagugcuucccggag

SEQ ID NO: 1165519 - RNA, 19 nt, Artificial Sequence
  Description of Artificial Sequence: Synthetic oligonucleotide
ccuuguuuagggugacuag

SEQ ID NO: 1165520 - RNA, 19 nt, Artificial Sequence
  Description of Artificial Sequence: Synthetic oligonucleotide
ugcggggcagaaccgucac

SEQ ID NO: 1165521 - RNA, 19 nt, Artificial Sequence
  Description of Artificial Sequence: Synthetic oligonucleotide
guaccacaucucccaggcg

SEQ ID NO: 1165522 - RNA, 19 nt, Artificial Sequence
  Description of Artificial Sequence: Synthetic oligonucleotide
guagugcggggcagaaccg

SEQ ID NO: 1165523 - RNA, 19 nt, Artificial Sequence
  Description of Artificial Sequence: Synthetic oligonucleotide
cgcaaagacuuguagugag

SEQ ID NO: 1165524 - RNA, 19 nt, Artificial Sequence
  Description of Artificial Sequence: Synthetic oligonucleotide
uaggcaccaaccacccgua

SEQ ID NO: 1165525 - RNA, 19 nt, Artificial Sequence
  Description of Artificial Sequence: Synthetic oligonucleotide
gacgucugguccaggacuc

SEQ ID NO: 1165526 - RNA, 19 nt, Artificial Sequence
  Description of Artificial Sequence: Synthetic oligonucleotide
agcauggccagugggagua

SEQ ID NO: 1165527 - RNA, 19 nt, Artificial Sequence
  Description of Artificial Sequence: Synthetic oligonucleotide
gugacgucugguccaggac

SEQ ID NO: 1165528 - RNA, 19 nt, Artificial Sequence
  Description of Artificial Sequence: Synthetic oligonucleotide
ugacuccggaaggugcuca

SEQ ID NO: 1165529 - RNA, 19 nt, Artificial Sequence
  Description of Artificial Sequence: Synthetic oligonucleotide
ucggcuagggagagguguu

SEQ ID NO: 1165530 - RNA, 19 nt, Artificial Sequence
  Description of Artificial Sequence: Synthetic oligonucleotide
ggcccaacaaacacacucc

SEQ ID NO: 1165531 - RNA, 19 nt, Artificial Sequence
  Description of Artificial Sequence: Synthetic oligonucleotide
ugccugguuuuggucagug

SEQ ID NO: 1165532 - RNA, 19 nt, Artificial Sequence
  Description of Artificial Sequence: Synthetic oligonucleotide
ggugcucaagucuguacuc

SEQ ID NO: 1165533 - RNA, 19 nt, Artificial Sequence
  Description of Artificial Sequence: Synthetic oligonucleotide
cuuggcuugccugguuuug

SEQ ID NO: 1165534 - RNA, 19 nt, Artificial Sequence
  Description of Artificial Sequence: Synthetic oligonucleotide
gguuuagggccaucacccc

SEQ ID NO: 1165535 - RNA, 19 nt, Artificial Sequence
  Description of Artificial Sequence: Synthetic oligonucleotide
ugccaggcggcugccaagc

SEQ ID NO: 1165536 - RNA, 19 nt, Artificial Sequence
  Description of Artificial Sequence: Synthetic oligonucleotide
uuggcccacguggagugug

SEQ ID NO: 1165537 - RNA, 19 nt, Artificial Sequence
  Description of Artificial Sequence: Synthetic oligonucleotide
ggucaccacgaccugcagc

SEQ ID NO: 1165538 - RNA, 19 nt, Artificial Sequence
  Description of Artificial Sequence: Synthetic oligonucleotide
aggcaccaaccacccguac

SEQ ID NO: 1165539 - RNA, 19 nt, Artificial Sequence
  Description of Artificial Sequence: Synthetic oligonucleotide
uggucaagcuugucucgau

SEQ ID NO: 1165540 - RNA, 19 nt, Artificial Sequence
  Description of Artificial Sequence: Synthetic oligonucleotide
cucuaugguccuggagggg

SEQ ID NO: 1165541 - RNA, 19 nt, Artificial Sequence
  Description of Artificial Sequence: Synthetic oligonucleotide
agugcggggcagaaccguc

SEQ ID NO: 1165542 - RNA, 19 nt, Artificial Sequence
  Description of Artificial Sequence: Synthetic oligonucleotide
ccggggacagaguugggcc

SEQ ID NO: 1165543 - RNA, 19 nt, Artificial Sequence
  Description of Artificial Sequence: Synthetic oligonucleotide
ccuuuggacaucaguaaga

SEQ ID NO: 1165544 - RNA, 19 nt, Artificial Sequence
  Description of Artificial Sequence: Synthetic oligonucleotide
ccuuggcaccacaaggccc

SEQ ID NO: 1165545 - RNA, 19 nt, Artificial Sequence
  Description of Artificial Sequence: Synthetic oligonucleotide
gagguguuccuagguuccc

SEQ ID NO: 1165546 - RNA, 19 nt, Artificial Sequence
  Description of Artificial Sequence: Synthetic oligonucleotide
augacuccggaaggugcuc

SEQ ID NO: 1165547 - RNA, 19 nt, Artificial Sequence
  Description of Artificial Sequence: Synthetic oligonucleotide
guuuagggccaucaccccu

SEQ ID NO: 1165548 - RNA, 19 nt, Artificial Sequence
  Description of Artificial Sequence: Synthetic oligonucleotide
cgacagauuccucaauccc

SEQ ID NO: 1165549 - RNA, 19 nt, Artificial Sequence
  Description of Artificial Sequence: Synthetic oligonucleotide
cugccccacugcuuuggcc

SEQ ID NO: 1165550 - RNA, 19 nt, Artificial Sequence
  Description of Artificial Sequence: Synthetic oligonucleotide
cagcaucuggagacacccc

SEQ ID NO: 1165551 - RNA, 19 nt, Artificial Sequence
  Description of Artificial Sequence: Synthetic oligonucleotide
ggacaucaguaagaaggag

SEQ ID NO: 1165552 - RNA, 19 nt, Artificial Sequence
  Description of Artificial Sequence: Synthetic oligonucleotide
ucgagggccugcugcuggc

SEQ ID NO: 1165553 - RNA, 19 nt, Artificial Sequence
  Description of Artificial Sequence: Synthetic oligonucleotide
gguugcuccggccacaggu

SEQ ID NO: 1165554 - RNA, 19 nt, Artificial Sequence
  Description of Artificial Sequence: Synthetic oligonucleotide
ugccggugaagcugacaac

SEQ ID NO: 1165555 - RNA, 19 nt, Artificial Sequence
  Description of Artificial Sequence: Synthetic oligonucleotide
gcggcaccuggucaggccg

SEQ ID NO: 1165556 - RNA, 19 nt, Artificial Sequence
  Description of Artificial Sequence: Synthetic oligonucleotide
cccucggggagacagcagg

SEQ ID NO: 1165557 - RNA, 19 nt, Artificial Sequence
  Description of Artificial Sequence: Synthetic oligonucleotide
gggcuuacccggcccaggg

SEQ ID NO: 1165558 - RNA, 19 nt, Artificial Sequence
  Description of Artificial Sequence: Synthetic oligonucleotide
ggagacaccccagaggaaa

SEQ ID NO: 1165559 - RNA, 19 nt, Artificial Sequence
  Description of Artificial Sequence: Synthetic oligonucleotide
gaagccucucuaugguccu

SEQ ID NO: 1165560 - RNA, 19 nt, Artificial Sequence
  Description of Artificial Sequence: Synthetic oligonucleotide
gcuuacccggcccagggca

SEQ ID NO: 1165561 - RNA, 19 nt, Artificial Sequence
  Description of Artificial Sequence: Synthetic oligonucleotide
gacaccacucgagggccug

SEQ ID NO: 1165562 - RNA, 19 nt, Artificial Sequence
  Description of Artificial Sequence: Synthetic oligonucleotide
uagugcggggcagaaccgu

SEQ ID NO: 1165563 - RNA, 19 nt, Artificial Sequence
  Description of Artificial Sequence: Synthetic oligonucleotide
guucauacucuuccucccu

SEQ ID NO: 1165564 - RNA, 19 nt, Artificial Sequence
  Description of Artificial Sequence: Synthetic oligonucleotide
auccccucagcuccaugaa

SEQ ID NO: 1165565 - RNA, 19 nt, Artificial Sequence
  Description of Artificial Sequence: Synthetic oligonucleotide
gccggugaagcugacaaca

SEQ ID NO: 1165566 - RNA, 19 nt, Artificial Sequence
  Description of Artificial Sequence: Synthetic oligonucleotide
ccauuuccuugccaucugc

SEQ ID NO: 1165567 - RNA, 19 nt, Artificial Sequence
  Description of Artificial Sequence: Synthetic oligonucleotide
gagacuuccuucaggcagu

SEQ ID NO: 1165568 - RNA, 19 nt, Artificial Sequence
  Description of Artificial Sequence: Synthetic oligonucleotide
gcaguggucaagcuugucu

SEQ ID NO: 1165569 - RNA, 19 nt, Artificial Sequence
  Description of Artificial Sequence: Synthetic oligonucleotide
uccucccuuuggacaucag

SEQ ID NO: 1165570 - RNA, 19 nt, Artificial Sequence
  Description of Artificial Sequence: Synthetic oligonucleotide
gguuaagacaucacccucu

SEQ ID NO: 1165571 - RNA, 19 nt, Artificial Sequence
  Description of Artificial Sequence: Synthetic oligonucleotide
gaggggcaggcugcuagug

SEQ ID NO: 1165572 - RNA, 19 nt, Artificial Sequence
  Description of Artificial Sequence: Synthetic oligonucleotide
cuagcccuuggcaccacaa

SEQ ID NO: 1165573 - RNA, 19 nt, Artificial Sequence
  Description of Artificial Sequence: Synthetic oligonucleotide
gacuuguagugaggggaga

SEQ ID NO: 1165574 - RNA, 19 nt, Artificial Sequence
  Description of Artificial Sequence: Synthetic oligonucleotide
caucaccccuccagaagca

SEQ ID NO: 1165575 - RNA, 19 nt, Artificial Sequence
  Description of Artificial Sequence: Synthetic oligonucleotide
uccuguaguucagcugcuc

SEQ ID NO: 1165576 - RNA, 19 nt, Artificial Sequence
  Description of Artificial Sequence: Synthetic oligonucleotide
gcccuuggcaccacaaggc

SEQ ID NO: 1165577 - RNA, 19 nt, Artificial Sequence
  Description of Artificial Sequence: Synthetic oligonucleotide
guaaccgcaaagacuugua

SEQ ID NO: 1165578 - RNA, 19 nt, Artificial Sequence
  Description of Artificial Sequence: Synthetic oligonucleotide
cagcagcagcagcagcagc

SEQ ID NO: 1165579 - RNA, 19 nt, Artificial Sequence
  Description of Artificial Sequence: Synthetic oligonucleotide
gccugguuuuggucagugg

SEQ ID NO: 1165580 - RNA, 19 nt, Artificial Sequence
  Description of Artificial Sequence: Synthetic oligonucleotide
aggacccgaggcauuucag

SEQ ID NO: 1165581 - RNA, 19 nt, Artificial Sequence
  Description of Artificial Sequence: Synthetic oligonucleotide
ggacagaguugggccaugg

SEQ ID NO: 1165582 - RNA, 19 nt, Artificial Sequence
  Description of Artificial Sequence: Synthetic oligonucleotide
gaaggugcucaagucugua

SEQ ID NO: 1165583 - RNA, 19 nt, Artificial Sequence
  Description of Artificial Sequence: Synthetic oligonucleotide
cuccagggcccaacaaaca

SEQ ID NO: 1165584 - RNA, 19 nt, Artificial Sequence
  Description of Artificial Sequence: Synthetic oligonucleotide
gggugacuagacccagcag

SEQ ID NO: 1165585 - RNA, 19 nt, Artificial Sequence
  Description of Artificial Sequence: Synthetic oligonucleotide
gugggagaugacuccggaa

SEQ ID NO: 1165586 - RNA, 19 nt, Artificial Sequence
  Description of Artificial Sequence: Synthetic oligonucleotide
cugccccguaaccgcaaag

SEQ ID NO: 1165587 - RNA, 19 nt, Artificial Sequence
  Description of Artificial Sequence: Synthetic oligonucleotide
ccaggcggcaccuggucag

SEQ ID NO: 1165588 - RNA, 19 nt, Artificial Sequence
  Description of Artificial Sequence: Synthetic oligonucleotide
ggcuagggagagguguucc

SEQ ID NO: 1165589 - RNA, 19 nt, Artificial Sequence
  Description of Artificial Sequence: Synthetic oligonucleotide
ugccggggacagaguuggg

SEQ ID NO: 1165590 - RNA, 19 nt, Artificial Sequence
  Description of Artificial Sequence: Synthetic oligonucleotide
gcuagugcuucccggagua

SEQ ID NO: 1165591 - RNA, 19 nt, Artificial Sequence
  Description of Artificial Sequence: Synthetic oligonucleotide
gguuuuggucagugggaga

SEQ ID NO: 1165592 - RNA, 19 nt, Artificial Sequence
  Description of Artificial Sequence: Synthetic oligonucleotide
ggucugagaguccuuggcu

SEQ ID NO: 1165593 - RNA, 19 nt, Artificial Sequence
  Description of Artificial Sequence: Synthetic oligonucleotide
ugacuggaagcagcucaau

SEQ ID NO: 1165594 - RNA, 19 nt, Artificial Sequence
  Description of Artificial Sequence: Synthetic oligonucleotide
gguguuggaggcgggccag

SEQ ID NO: 1165595 - RNA, 19 nt, Artificial Sequence
  Description of Artificial Sequence: Synthetic oligonucleotide
ugagaguccuuggcuccaa

SEQ ID NO: 1165596 - RNA, 19 nt, Artificial Sequence
  Description of Artificial Sequence: Synthetic oligonucleotide
gacagaguugggccauggu

SEQ ID NO: 1165597 - RNA, 19 nt, Artificial Sequence
  Description of Artificial Sequence: Synthetic oligonucleotide
ggcuuuggcccacguggag

SEQ ID NO: 1165598 - RNA, 19 nt, Artificial Sequence
  Description of Artificial Sequence: Synthetic oligonucleotide
cccguaaccgcaaagacuu

SEQ ID NO: 1165599 - RNA, 19 nt, Artificial Sequence
  Description of Artificial Sequence: Synthetic oligonucleotide
ccggugaagcugacaacag

SEQ ID NO: 1165600 - RNA, 19 nt, Artificial Sequence
  Description of Artificial Sequence: Synthetic oligonucleotide
gggccaauccucggggucc

SEQ ID NO: 1165601 - RNA, 19 nt, Artificial Sequence
  Description of Artificial Sequence: Synthetic oligonucleotide
gacuccggaaggugcucaa

SEQ ID NO: 1165602 - RNA, 19 nt, Artificial Sequence
  Description of Artificial Sequence: Synthetic oligonucleotide
gccccguaaccgcaaagac

SEQ ID NO: 1165603 - RNA, 19 nt, Artificial Sequence
  Description of Artificial Sequence: Synthetic oligonucleotide
guaguucagcugcucggcu

SEQ ID NO: 1165604 - RNA, 19 nt, Artificial Sequence
  Description of Artificial Sequence: Synthetic oligonucleotide
acugccccguaaccgcaaa

SEQ ID NO: 1165605 - RNA, 19 nt, Artificial Sequence
  Description of Artificial Sequence: Synthetic oligonucleotide
agccuggcaacagcugccu

SEQ ID NO: 1165606 - RNA, 19 nt, Artificial Sequence
  Description of Artificial Sequence: Synthetic oligonucleotide
ggucggucagcaccaguuc

SEQ ID NO: 1165607 - RNA, 19 nt, Artificial Sequence
  Description of Artificial Sequence: Synthetic oligonucleotide
acguggagugugcucuguu

SEQ ID NO: 1165608 - RNA, 19 nt, Artificial Sequence
  Description of Artificial Sequence: Synthetic oligonucleotide
cuagguucccggcugcuau

SEQ ID NO: 1165609 - RNA, 19 nt, Artificial Sequence
  Description of Artificial Sequence: Synthetic oligonucleotide
uuuggcccacguggagugu

SEQ ID NO: 1165610 - RNA, 19 nt, Artificial Sequence
  Description of Artificial Sequence: Synthetic oligonucleotide
cagaaccgucacagggguc

SEQ ID NO: 1165611 - RNA, 19 nt, Artificial Sequence
  Description of Artificial Sequence: Synthetic oligonucleotide
ggcgagguggcagagggaa

SEQ ID NO: 1165612 - RNA, 19 nt, Artificial Sequence
  Description of Artificial Sequence: Synthetic oligonucleotide
gaccgagccugaggacccg

SEQ ID NO: 1165613 - RNA, 19 nt, Artificial Sequence
  Description of Artificial Sequence: Synthetic oligonucleotide
cuccggaaggugcucaagu

SEQ ID NO: 1165614 - RNA, 19 nt, Artificial Sequence
  Description of Artificial Sequence: Synthetic oligonucleotide
ucguagugcggggcagaac

SEQ ID NO: 1165615 - RNA, 19 nt, Artificial Sequence
  Description of Artificial Sequence: Synthetic oligonucleotide
aggccggcguggucgguca

SEQ ID NO: 1165616 - RNA, 19 nt, Artificial Sequence
  Description of Artificial Sequence: Synthetic oligonucleotide
cuuguagugaggggagacu

SEQ ID NO: 1165617 - RNA, 19 nt, Artificial Sequence
  Description of Artificial Sequence: Synthetic oligonucleotide
cucggcuagggagaggugu

SEQ ID NO: 1165618 - RNA, 19 nt, Artificial Sequence
  Description of Artificial Sequence: Synthetic oligonucleotide
aggaaagggcgagguggca

SEQ ID NO: 1165619 - RNA, 19 nt, Artificial Sequence
  Description of Artificial Sequence: Synthetic oligonucleotide
aggguggccugaagagaag

SEQ ID NO: 1165620 - RNA, 19 nt, Artificial Sequence
  Description of Artificial Sequence: Synthetic oligonucleotide
uuccuccgacagauuccuc

SEQ ID NO: 1165621 - RNA, 19 nt, Artificial Sequence
  Description of Artificial Sequence: Synthetic oligonucleotide
gccuuguuuagggugacua

SEQ ID NO: 1165622 - RNA, 19 nt, Artificial Sequence
  Description of Artificial Sequence: Synthetic oligonucleotide
cucggggucccugcuccag

SEQ ID NO: 1165623 - RNA, 19 nt, Artificial Sequence
  Description of Artificial Sequence: Synthetic oligonucleotide
ugaggacccgaggcauuuc

SEQ ID NO: 1165624 - RNA, 19 nt, Artificial Sequence
  Description of Artificial Sequence: Synthetic oligonucleotide
gugcucuguuccaguuucc

SEQ ID NO: 1165625 - RNA, 19 nt, Artificial Sequence
  Description of Artificial Sequence: Synthetic oligonucleotide
gccagggcagcagagaaua

SEQ ID NO: 1165626 - RNA, 19 nt, Artificial Sequence
  Description of Artificial Sequence: Synthetic oligonucleotide
ccagggcccaacaaacaca

SEQ ID NO: 1165627 - RNA, 19 nt, Artificial Sequence
  Description of Artificial Sequence: Synthetic oligonucleotide
cuccagugcccucagcccu

SEQ ID NO: 1165628 - RNA, 19 nt, Artificial Sequence
  Description of Artificial Sequence: Synthetic oligonucleotide
uagaauccuugggguugcu

SEQ ID NO: 1165629 - RNA, 19 nt, Artificial Sequence
  Description of Artificial Sequence: Synthetic oligonucleotide
acacugccccguaaccgca

SEQ ID NO: 1165630 - RNA, 19 nt, Artificial Sequence
  Description of Artificial Sequence: Synthetic oligonucleotide
gccggggacagaguugggc

SEQ ID NO: 1165631 - RNA, 19 nt, Artificial Sequence
  Description of Artificial Sequence: Synthetic oligonucleotide
caccucguagugcggggca

SEQ ID NO: 1165632 - RNA, 19 nt, Artificial Sequence
  Description of Artificial Sequence: Synthetic oligonucleotide
gaaccgucacaggggucca

SEQ ID NO: 1165633 - RNA, 19 nt, Artificial Sequence
  Description of Artificial Sequence: Synthetic oligonucleotide
cagccgaagggccaauccu

SEQ ID NO: 1165634 - RNA, 19 nt, Artificial Sequence
  Description of Artificial Sequence: Synthetic oligonucleotide
ggcuuacccggcccagggc

SEQ ID NO: 1165635 - RNA, 19 nt, Artificial Sequence
  Description of Artificial Sequence: Synthetic oligonucleotide
gggcagaagauagaauccu

SEQ ID NO: 1165636 - RNA, 19 nt, Artificial Sequence
  Description of Artificial Sequence: Synthetic oligonucleotide
ggagaugacuccggaaggu

SEQ ID NO: 1165637 - RNA, 19 nt, Artificial Sequence
  Description of Artificial Sequence: Synthetic oligonucleotide
ggagagguguuccuagguu

SEQ ID NO: 1165638 - RNA, 19 nt, Artificial Sequence
  Description of Artificial Sequence: Synthetic oligonucleotide
cacagccgaagggccaauc

SEQ ID NO: 1165639 - RNA, 19 nt, Artificial Sequence
  Description of Artificial Sequence: Synthetic oligonucleotide
caacaggacacugguugua

SEQ ID NO: 1165640 - RNA, 19 nt, Artificial Sequence
  Description of Artificial Sequence: Synthetic oligonucleotide
gaguacucugaagcucccu

SEQ ID NO: 1165641 - RNA, 19 nt, Artificial Sequence
  Description of Artificial Sequence: Synthetic oligonucleotide
ccuugggguugcuccggcc

SEQ ID NO: 1165642 - RNA, 19 nt, Artificial Sequence
  Description of Artificial Sequence: Synthetic oligonucleotide
cacucgagggccugcugcu

SEQ ID NO: 1165643 - RNA, 19 nt, Artificial Sequence
  Description of Artificial Sequence: Synthetic oligonucleotide
ggggcuuacccggcccagg

SEQ ID NO: 1165644 - RNA, 19 nt, Artificial Sequence
  Description of Artificial Sequence: Synthetic oligonucleotide
gugcggggcagaaccguca

SEQ ID NO: 1165645 - RNA, 19 nt, Artificial Sequence
  Description of Artificial Sequence: Synthetic oligonucleotide
cucggggagacagcaggaa

SEQ ID NO: 1165646 - RNA, 19 nt, Artificial Sequence
  Description of Artificial Sequence: Synthetic oligonucleotide
gccuugguuaagacaucac

SEQ ID NO: 1165647 - RNA, 19 nt, Artificial Sequence
  Description of Artificial Sequence: Synthetic oligonucleotide
caucaguaagaaggagagu

SEQ ID NO: 1165648 - RNA, 19 nt, Artificial Sequence
  Description of Artificial Sequence: Synthetic oligonucleotide
accgagccugaggacccga

SEQ ID NO: 1165649 - RNA, 19 nt, Artificial Sequence
  Description of Artificial Sequence: Synthetic oligonucleotide
cucguagugcggggcagaa

SEQ ID NO: 1165650 - RNA, 19 nt, Artificial Sequence
  Description of Artificial Sequence: Synthetic oligonucleotide
cugcucggcuagggagagg

SEQ ID NO: 1165651 - RNA, 19 nt, Artificial Sequence
  Description of Artificial Sequence: Synthetic oligonucleotide
ccuccgacagauuccucaa

SEQ ID NO: 1165652 - RNA, 19 nt, Artificial Sequence
  Description of Artificial Sequence: Synthetic oligonucleotide
cuccucgaacacucagagu

SEQ ID NO: 1165653 - RNA, 19 nt, Artificial Sequence
  Description of Artificial Sequence: Synthetic oligonucleotide
caccuggucaggccggcgu

SEQ ID NO: 1165654 - RNA, 19 nt, Artificial Sequence
  Description of Artificial Sequence: Synthetic oligonucleotide
ccgagccugaggacccgag

SEQ ID NO: 1165655 - RNA, 19 nt, Artificial Sequence
  Description of Artificial Sequence: Synthetic oligonucleotide
ggccaauccucgggguccc

SEQ ID NO: 1165656 - RNA, 19 nt, Artificial Sequence
  Description of Artificial Sequence: Synthetic oligonucleotide
ggucaagcuugucucgauu

SEQ ID NO: 1165657 - RNA, 19 nt, Artificial Sequence
  Description of Artificial Sequence: Synthetic oligonucleotide
ccggaaggugcucaagucu

SEQ ID NO: 1165658 - RNA, 19 nt, Artificial Sequence
  Description of Artificial Sequence: Synthetic oligonucleotide
gcuagcccuuggcaccaca

SEQ ID NO: 1165659 - RNA, 19 nt, Artificial Sequence
  Description of Artificial Sequence: Synthetic oligonucleotide
ccccguaaccgcaaagacu

SEQ ID NO: 1165660 - RNA, 19 nt, Artificial Sequence
  Description of Artificial Sequence: Synthetic oligonucleotide
cuuacccggcccagggcau

SEQ ID NO: 1165661 - RNA, 19 nt, Artificial Sequence
  Description of Artificial Sequence: Synthetic oligonucleotide
ccgcaaagacuuguaguga

SEQ ID NO: 1165662 - RNA, 19 nt, Artificial Sequence
  Description of Artificial Sequence: Synthetic oligonucleotide
cacugccccguaaccgcaa

SEQ ID NO: 1165663 - RNA, 19 nt, Artificial Sequence
  Description of Artificial Sequence: Synthetic oligonucleotide
cccggcccagggcaugccg

SEQ ID NO: 1165664 - RNA, 19 nt, Artificial Sequence
  Description of Artificial Sequence: Synthetic oligonucleotide
gcuuuggcccacguggagu

SEQ ID NO: 1165665 - RNA, 19 nt, Artificial Sequence
  Description of Artificial Sequence: Synthetic oligonucleotide
gauuuuccuccgacagauu

SEQ ID NO: 1165666 - RNA, 19 nt, Artificial Sequence
  Description of Artificial Sequence: Synthetic oligonucleotide
agggcccaacaaacacacu

SEQ ID NO: 1165667 - RNA, 19 nt, Artificial Sequence
  Description of Artificial Sequence: Synthetic oligonucleotide
ggucacacaggcaguacuu

SEQ ID NO: 1165668 - RNA, 19 nt, Artificial Sequence
  Description of Artificial Sequence: Synthetic oligonucleotide
cucccuggucucaccagau

SEQ ID NO: 1165669 - RNA, 19 nt, Artificial Sequence
  Description of Artificial Sequence: Synthetic oligonucleotide
gguccaggacucagcaucu

SEQ ID NO: 1165670 - RNA, 19 nt, Artificial Sequence
  Description of Artificial Sequence: Synthetic oligonucleotide
gcguggucggucagcacca

SEQ ID NO: 1165671 - RNA, 19 nt, Artificial Sequence
  Description of Artificial Sequence: Synthetic oligonucleotide
guugcuccggccacagguu

SEQ ID NO: 1165672 - RNA, 19 nt, Artificial Sequence
  Description of Artificial Sequence: Synthetic oligonucleotide
ccguaaccgcaaagacuug

SEQ ID NO: 1165673 - RNA, 19 nt, Artificial Sequence
  Description of Artificial Sequence: Synthetic oligonucleotide
guggucggucagcaccagu

SEQ ID NO: 1165674 - RNA, 19 nt, Artificial Sequence
  Description of Artificial Sequence: Synthetic oligonucleotide
ccaggugaccgagccugag

SEQ ID NO: 1165675 - RNA, 19 nt, Artificial Sequence
  Description of Artificial Sequence: Synthetic oligonucleotide
ccucggggagacagcagga

SEQ ID NO: 1165676 - RNA, 19 nt, Artificial Sequence
  Description of Artificial Sequence: Synthetic oligonucleotide
gcaugccggggacagaguu

SEQ ID NO: 1165677 - RNA, 19 nt, Artificial Sequence
  Description of Artificial Sequence: Synthetic oligonucleotide
ccuugacuggaagcagcuc

SEQ ID NO: 1165678 - RNA, 19 nt, Artificial Sequence
  Description of Artificial Sequence: Synthetic oligonucleotide
gggacagaguugggccaug

SEQ ID NO: 1165679 - RNA, 19 nt, Artificial Sequence
  Description of Artificial Sequence: Synthetic oligonucleotide
ccaggauggucuggcccgc

SEQ ID NO: 1165680 - RNA, 19 nt, Artificial Sequence
  Description of Artificial Sequence: Synthetic oligonucleotide
ccucgaacacucagagucu

SEQ ID NO: 1165681 - RNA, 19 nt, Artificial Sequence
  Description of Artificial Sequence: Synthetic oligonucleotide
ggaggcgggccagccagga

SEQ ID NO: 1165682 - RNA, 19 nt, Artificial Sequence
  Description of Artificial Sequence: Synthetic oligonucleotide
cucccaggcggcaccuggu

SEQ ID NO: 1165683 - RNA, 19 nt, Artificial Sequence
  Description of Artificial Sequence: Synthetic oligonucleotide
gcauggccagugggaguag

SEQ ID NO: 1165684 - RNA, 19 nt, Artificial Sequence
  Description of Artificial Sequence: Synthetic oligonucleotide
ggcaguggucaagcuuguc

SEQ ID NO: 1165685 - RNA, 19 nt, Artificial Sequence
  Description of Artificial Sequence: Synthetic oligonucleotide
ggacucacacugccccgua

SEQ ID NO: 1165686 - RNA, 19 nt, Artificial Sequence
  Description of Artificial Sequence: Synthetic oligonucleotide
cuccgacagauuccucaau

SEQ ID NO: 1165687 - RNA, 19 nt, Artificial Sequence
  Description of Artificial Sequence: Synthetic oligonucleotide
gccggcguggucggucagc

SEQ ID NO: 1165688 - RNA, 19 nt, Artificial Sequence
  Description of Artificial Sequence: Synthetic oligonucleotide
cccaggcggcaccugguca

SEQ ID NO: 1165689 - RNA, 19 nt, Artificial Sequence
  Description of Artificial Sequence: Synthetic oligonucleotide
cguaaccgcaaagacuugu

SEQ ID NO: 1165690 - RNA, 19 nt, Artificial Sequence
  Description of Artificial Sequence: Synthetic oligonucleotide
gcucggcuagggagaggug

SEQ ID NO: 1165691 - RNA, 19 nt, Artificial Sequence
  Description of Artificial Sequence: Synthetic oligonucleotide
ggccggcguggucggucag

SEQ ID NO: 1165692 - RNA, 19 nt, Artificial Sequence
  Description of Artificial Sequence: Synthetic oligonucleotide
cacguggagugugcucugu

SEQ ID NO: 1165693 - RNA, 19 nt, Artificial Sequence
  Description of Artificial Sequence: Synthetic oligonucleotide
gucucaccagauggacuuu

SEQ ID NO: 1165694 - RNA, 19 nt, Artificial Sequence
  Description of Artificial Sequence: Synthetic oligonucleotide
ccggcguggucggucagca

SEQ ID NO: 1165695 - RNA, 19 nt, Artificial Sequence
  Description of Artificial Sequence: Synthetic oligonucleotide
ccucguagugcggggcaga

SEQ ID NO: 1165696 - RNA, 19 nt, Artificial Sequence
  Description of Artificial Sequence: Synthetic oligonucleotide
ccugccggugaagcugaca

SEQ ID NO: 1165697 - RNA, 19 nt, Artificial Sequence
  Description of Artificial Sequence: Synthetic oligonucleotide
cuccuuggcuugccugguu

SEQ ID NO: 1165698 - RNA, 19 nt, Artificial Sequence
  Description of Artificial Sequence: Synthetic oligonucleotide
ccuagguucccggcugcua

SEQ ID NO: 1165699 - RNA, 19 nt, Artificial Sequence
  Description of Artificial Sequence: Synthetic oligonucleotide
gggcagcagagaauauauu

SEQ ID NO: 1165700 - RNA, 19 nt, Artificial Sequence
  Description of Artificial Sequence: Synthetic oligonucleotide
cguggucggucagcaccag

SEQ ID NO: 1165701 - RNA, 19 nt, Artificial Sequence
  Description of Artificial Sequence: Synthetic oligonucleotide
ggccuuguuuagggugacu

SEQ ID NO: 1165702 - RNA, 19 nt, Artificial Sequence
  Description of Artificial Sequence: Synthetic oligonucleotide
ggucccugcuccagggcuu

SEQ ID NO: 1165703 - RNA, 19 nt, Artificial Sequence
  Description of Artificial Sequence: Synthetic oligonucleotide
gcccucagcccuggggaua

SEQ ID NO: 1165704 - RNA, 19 nt, Artificial Sequence
  Description of Artificial Sequence: Synthetic oligonucleotide
ggcaugccggggacagagu

SEQ ID NO: 1165705 - RNA, 19 nt, Artificial Sequence
  Description of Artificial Sequence: Synthetic oligonucleotide
ccagggcagcagagaauau

SEQ ID NO: 1165706 - RNA, 19 nt, Artificial Sequence
  Description of Artificial Sequence: Synthetic oligonucleotide
cggcguggucggucagcac

SEQ ID NO: 1165707 - RNA, 19 nt, Artificial Sequence
  Description of Artificial Sequence: Synthetic oligonucleotide
ccgaugcugccaggcggcu

SEQ ID NO: 1165708 - RNA, 19 nt, Artificial Sequence
  Description of Artificial Sequence: Synthetic oligonucleotide
ccacagccgaagggccaau

SEQ ID NO: 1165709 - RNA, 19 nt, Artificial Sequence
  Description of Artificial Sequence: Synthetic oligonucleotide
ucaauuaucaccuuucuug

SEQ ID NO: 1165710 - RNA, 19 nt, Artificial Sequence
  Description of Artificial Sequence: Synthetic oligonucleotide
acucaaauaaacuacauca

SEQ ID NO: 1165711 - RNA, 19 nt, Artificial Sequence
  Description of Artificial Sequence: Synthetic oligonucleotide
gaauuauccuuacugaagg

SEQ ID NO: 1165712 - RNA, 19 nt, Artificial Sequence
  Description of Artificial Sequence: Synthetic oligonucleotide
ugugaauacaaguugauuc

SEQ ID NO: 1165713 - RNA, 19 nt, Artificial Sequence
  Description of Artificial Sequence: Synthetic oligonucleotide
auaagcugcacugauagcc

SEQ ID NO: 1165714 - RNA, 19 nt, Artificial Sequence
  Description of Artificial Sequence: Synthetic oligonucleotide
aaugaauuauccuuacuga

SEQ ID NO: 1165715 - RNA, 19 nt, Artificial Sequence
  Description of Artificial Sequence: Synthetic oligonucleotide
uucucuauaagugacaccc

SEQ ID NO: 1165716 - RNA, 19 nt, Artificial Sequence
  Description of Artificial Sequence: Synthetic oligonucleotide
ugaucaucaauuaucaccu

SEQ ID NO: 1165717 - RNA, 19 nt, Artificial Sequence
  Description of Artificial Sequence: Synthetic oligonucleotide
ugaaucgucucucauaagc

SEQ ID NO: 1165718 - RNA, 19 nt, Artificial Sequence
  Description of Artificial Sequence: Synthetic oligonucleotide
cuaagcaaaacccaaacug

SEQ ID NO: 1165719 - RNA, 19 nt, Artificial Sequence
  Description of Artificial Sequence: Synthetic oligonucleotide
ugaauuauccuuacugaag

SEQ ID NO: 1165720 - RNA, 19 nt, Artificial Sequence
  Description of Artificial Sequence: Synthetic oligonucleotide
aauccuuucugguauccac

SEQ ID NO: 1165721 - RNA, 19 nt, Artificial Sequence
  Description of Artificial Sequence: Synthetic oligonucleotide
uuuaugaucaaccgguaac

SEQ ID NO: 1165722 - RNA, 19 nt, Artificial Sequence
  Description of Artificial Sequence: Synthetic oligonucleotide
uacaucauaauacuggcaa

SEQ ID NO: 1165723 - RNA, 19 nt, Artificial Sequence
  Description of Artificial Sequence: Synthetic oligonucleotide
ugucuacuaagcaaaaccc

SEQ ID NO: 1165724 - RNA, 19 nt, Artificial Sequence
  Description of Artificial Sequence: Synthetic oligonucleotide
gacaguacuauuaaagucc

SEQ ID NO: 1165725 - RNA, 19 nt, Artificial Sequence
  Description of Artificial Sequence: Synthetic oligonucleotide
uggguaauaaacuuucuug

SEQ ID NO: 1165726 - RNA, 19 nt, Artificial Sequence
  Description of Artificial Sequence: Synthetic oligonucleotide
uguuaugugucuacuaagc

SEQ ID NO: 1165727 - RNA, 19 nt, Artificial Sequence
  Description of Artificial Sequence: Synthetic oligonucleotide
agaucaauauuugaguugg

SEQ ID NO: 1165728 - RNA, 19 nt, Artificial Sequence
  Description of Artificial Sequence: Synthetic oligonucleotide
uuugaaucgucucucauaa

SEQ ID NO: 1165729 - RNA, 19 nt, Artificial Sequence
  Description of Artificial Sequence: Synthetic oligonucleotide
aaaccacuaagguaaaggu

SEQ ID NO: 1165730 - RNA, 19 nt, Artificial Sequence
  Description of Artificial Sequence: Synthetic oligonucleotide
uccaacucaaauaaacuac

SEQ ID NO: 1165731 - RNA, 19 nt, Artificial Sequence
  Description of Artificial Sequence: Synthetic oligonucleotide
uggaaaaucauauccuccc

SEQ ID NO: 1165732 - RNA, 19 nt, Artificial Sequence
  Description of Artificial Sequence: Synthetic oligonucleotide
uugauaagguguaugguga

SEQ ID NO: 1165733 - RNA, 19 nt, Artificial Sequence
  Description of Artificial Sequence: Synthetic oligonucleotide
uaaacucacgguuauuugc

SEQ ID NO: 1165734 - RNA, 19 nt, Artificial Sequence
  Description of Artificial Sequence: Synthetic oligonucleotide
acuauuaaaguccaagaaa

SEQ ID NO: 1165735 - RNA, 19 nt, Artificial Sequence
  Description of Artificial Sequence: Synthetic oligonucleotide
uuuagcaucccaaguacug

SEQ ID NO: 1165736 - RNA, 19 nt, Artificial Sequence
  Description of Artificial Sequence: Synthetic oligonucleotide
cauaauacuggcaaagauc

SEQ ID NO: 1165737 - RNA, 19 nt, Artificial Sequence
  Description of Artificial Sequence: Synthetic oligonucleotide
uauagaauccaguaauagu

SEQ ID NO: 1165738 - RNA, 19 nt, Artificial Sequence
  Description of Artificial Sequence: Synthetic oligonucleotide
ucuccuuuaugaucaaccg

SEQ ID NO: 1165739 - RNA, 19 nt, Artificial Sequence
  Description of Artificial Sequence: Synthetic oligonucleotide
aauuaucaccuuucuuggg

SEQ ID NO: 1165740 - RNA, 19 nt, Artificial Sequence
  Description of Artificial Sequence: Synthetic oligonucleotide
uuauccuuacugaagguac

SEQ ID NO: 1165741 - RNA, 19 nt, Artificial Sequence
  Description of Artificial Sequence: Synthetic oligonucleotide
agaugauuaagguaauucu

SEQ ID NO: 1165742 - RNA, 19 nt, Artificial Sequence
  Description of Artificial Sequence: Synthetic oligonucleotide
uucaacuggauaaaucgca

SEQ ID NO: 1165743 - RNA, 19 nt, Artificial Sequence
  Description of Artificial Sequence: Synthetic oligonucleotide
agaaucuccaauuauggaa

SEQ ID NO: 1165744 - RNA, 19 nt, Artificial Sequence
  Description of Artificial Sequence: Synthetic oligonucleotide
uaagugacacccauaauuc

SEQ ID NO: 1165745 - RNA, 19 nt, Artificial Sequence
  Description of Artificial Sequence: Synthetic oligonucleotide
caauuaucaccuuucuugg

SEQ ID NO: 1165746 - RNA, 19 nt, Artificial Sequence
  Description of Artificial Sequence: Synthetic oligonucleotide
acugcuaaguauagaaucc

SEQ ID NO: 1165747 - RNA, 19 nt, Artificial Sequence
  Description of Artificial Sequence: Synthetic oligonucleotide
aaugcaucgcaauccuuuc

SEQ ID NO: 1165748 - RNA, 19 nt, Artificial Sequence
  Description of Artificial Sequence: Synthetic oligonucleotide
gugucuacuaagcaaaacc

SEQ ID NO: 1165749 - RNA, 19 nt, Artificial Sequence
  Description of Artificial Sequence: Synthetic oligonucleotide
gcuauaagcaucuuucacg

SEQ ID NO: 1165750 - RNA, 19 nt, Artificial Sequence
  Description of Artificial Sequence: Synthetic oligonucleotide
uacuauuaaaguccaagaa

SEQ ID NO: 1165751 - RNA, 19 nt, Artificial Sequence
  Description of Artificial Sequence: Synthetic oligonucleotide
gaugauuaagguaauucug

SEQ ID NO: 1165752 - RNA, 19 nt, Artificial Sequence
  Description of Artificial Sequence: Synthetic oligonucleotide
uaaguagcaaaauccacac

SEQ ID NO: 1165753 - RNA, 19 nt, Artificial Sequence
  Description of Artificial Sequence: Synthetic oligonucleotide
uaacgguccagucuuaucu

SEQ ID NO: 1165754 - RNA, 19 nt, Artificial Sequence
  Description of Artificial Sequence: Synthetic oligonucleotide
ucuacuaagcaaaacccaa

SEQ ID NO: 1165755 - RNA, 19 nt, Artificial Sequence
  Description of Artificial Sequence: Synthetic oligonucleotide
aucuuagucagguaaugag

SEQ ID NO: 1165756 - RNA, 19 nt, Artificial Sequence
  Description of Artificial Sequence: Synthetic oligonucleotide
ucuguuaugugucuacuaa

SEQ ID NO: 1165757 - RNA, 19 nt, Artificial Sequence
  Description of Artificial Sequence: Synthetic oligonucleotide
auauugaagaucccagcag

SEQ ID NO: 1165758 - RNA, 19 nt, Artificial Sequence
  Description of Artificial Sequence: Synthetic oligonucleotide
uauagucaccacuagauuu

SEQ ID NO: 1165759 - RNA, 19 nt, Artificial Sequence
  Description of Artificial Sequence: Synthetic oligonucleotide
uaugcacaaaaccauguaa

SEQ ID NO: 1165760 - RNA, 19 nt, Artificial Sequence
  Description of Artificial Sequence: Synthetic oligonucleotide
uuuaccgucaugauuuguc

SEQ ID NO: 1165761 - RNA, 19 nt, Artificial Sequence
  Description of Artificial Sequence: Synthetic oligonucleotide
uugaguuggauccuggaaa

SEQ ID NO: 1165762 - RNA, 19 nt, Artificial Sequence
  Description of Artificial Sequence: Synthetic oligonucleotide
uguaaccuguuucuguuug

SEQ ID NO: 1165763 - RNA, 19 nt, Artificial Sequence
  Description of Artificial Sequence: Synthetic oligonucleotide
ucaucaauuaucaccuuuc

SEQ ID NO: 1165764 - RNA, 19 nt, Artificial Sequence
  Description of Artificial Sequence: Synthetic oligonucleotide
aaucgucucucauaagcug

SEQ ID NO: 1165765 - RNA, 19 nt, Artificial Sequence
  Description of Artificial Sequence: Synthetic oligonucleotide
gaagguacugacuaucuga

SEQ ID NO: 1165766 - RNA, 19 nt, Artificial Sequence
  Description of Artificial Sequence: Synthetic oligonucleotide
uuaugugucuacuaagcaa

SEQ ID NO: 1165767 - RNA, 19 nt, Artificial Sequence
  Description of Artificial Sequence: Synthetic oligonucleotide
ucuaaguagcaaaauccac

SEQ ID NO: 1165768 - RNA, 19 nt, Artificial Sequence
  Description of Artificial Sequence: Synthetic oligonucleotide
uccaauuauggaaacugcu

SEQ ID NO: 1165769 - RNA, 19 nt, Artificial Sequence
  Description of Artificial Sequence: Synthetic oligonucleotide
uucauacugagaaaccacu

SEQ ID NO: 1165770 - RNA, 19 nt, Artificial Sequence
  Description of Artificial Sequence: Synthetic oligonucleotide
uguacaguucuuaccaaac

SEQ ID NO: 1165771 - RNA, 19 nt, Artificial Sequence
  Description of Artificial Sequence: Synthetic oligonucleotide
aauaguugaggauucucua

SEQ ID NO: 1165772 - RNA, 19 nt, Artificial Sequence
  Description of Artificial Sequence: Synthetic oligonucleotide
uguaugcacaaaaccaugu

SEQ ID NO: 1165773 - RNA, 19 nt, Artificial Sequence
  Description of Artificial Sequence: Synthetic oligonucleotide
uauuugaguuggauccugg

SEQ ID NO: 1165774 - RNA, 19 nt, Artificial Sequence
  Description of Artificial Sequence: Synthetic oligonucleotide
agcguaaauggcuccaagg

SEQ ID NO: 1165775 - RNA, 19 nt, Artificial Sequence
  Description of Artificial Sequence: Synthetic oligonucleotide
uagaauccaguaauaguug

SEQ ID NO: 1165776 - RNA, 19 nt, Artificial Sequence
  Description of Artificial Sequence: Synthetic oligonucleotide
ugugauaaacucacgguua

SEQ ID NO: 1165777 - RNA, 19 nt, Artificial Sequence
  Description of Artificial Sequence: Synthetic oligonucleotide
uugaugacugcuaaguaua

SEQ ID NO: 1165778 - RNA, 19 nt, Artificial Sequence
  Description of Artificial Sequence: Synthetic oligonucleotide
aauuucuuauuugaaucgu

SEQ ID NO: 1165779 - RNA, 19 nt, Artificial Sequence
  Description of Artificial Sequence: Synthetic oligonucleotide
agguauauuuuccaauucu

SEQ ID NO: 1165780 - RNA, 19 nt, Artificial Sequence
  Description of Artificial Sequence: Synthetic oligonucleotide
uggauaaaucgcaagcccu

SEQ ID NO: 1165781 - RNA, 19 nt, Artificial Sequence
  Description of Artificial Sequence: Synthetic oligonucleotide
uccuccggcacucugacca

SEQ ID NO: 1165782 - RNA, 19 nt, Artificial Sequence
  Description of Artificial Sequence: Synthetic oligonucleotide
caggcuauaagcaucuuuc

SEQ ID NO: 1165783 - RNA, 19 nt, Artificial Sequence
  Description of Artificial Sequence: Synthetic oligonucleotide
uucucuaucauuggaguug

SEQ ID NO: 1165784 - RNA, 19 nt, Artificial Sequence
  Description of Artificial Sequence: Synthetic oligonucleotide
auagaauccaguaauaguu

SEQ ID NO: 1165785 - RNA, 19 nt, Artificial Sequence
  Description of Artificial Sequence: Synthetic oligonucleotide
uuguuuagcaucccaagua

SEQ ID NO: 1165786 - RNA, 19 nt, Artificial Sequence
  Description of Artificial Sequence: Synthetic oligonucleotide
auggaauugguagaugggg

SEQ ID NO: 1165787 - RNA, 19 nt, Artificial Sequence
  Description of Artificial Sequence: Synthetic oligonucleotide
ugcuaaguauagaauccag

SEQ ID NO: 1165788 - RNA, 19 nt, Artificial Sequence
  Description of Artificial Sequence: Synthetic oligonucleotide
uugugauaaacucacgguu

SEQ ID NO: 1165789 - RNA, 19 nt, Artificial Sequence
  Description of Artificial Sequence: Synthetic oligonucleotide
acuaagguaaaggugugag

SEQ ID NO: 1165790 - RNA, 19 nt, Artificial Sequence
  Description of Artificial Sequence: Synthetic oligonucleotide
aacugaucaucaauuauca

SEQ ID NO: 1165791 - RNA, 19 nt, Artificial Sequence
  Description of Artificial Sequence: Synthetic oligonucleotide
aauuauccuuacugaaggu

SEQ ID NO: 1165792 - RNA, 19 nt, Artificial Sequence
  Description of Artificial Sequence: Synthetic oligonucleotide
agggcuguugauccgaauc

SEQ ID NO: 1165793 - RNA, 19 nt, Artificial Sequence
  Description of Artificial Sequence: Synthetic oligonucleotide
uaaaggugugaguuccagg

SEQ ID NO: 1165794 - RNA, 19 nt, Artificial Sequence
  Description of Artificial Sequence: Synthetic oligonucleotide
ugauuaagguaauucugac

SEQ ID NO: 1165795 - RNA, 19 nt, Artificial Sequence
  Description of Artificial Sequence: Synthetic oligonucleotide
uuaauccguuuugauaagg

SEQ ID NO: 1165796 - RNA, 19 nt, Artificial Sequence
  Description of Artificial Sequence: Synthetic oligonucleotide
cuguggguaaauuaugcug

SEQ ID NO: 1165797 - RNA, 19 nt, Artificial Sequence
  Description of Artificial Sequence: Synthetic oligonucleotide
caaccauugugauaaacuc

SEQ ID NO: 1165798 - RNA, 19 nt, Artificial Sequence
  Description of Artificial Sequence: Synthetic oligonucleotide
aaauuaugcugguaaucaa

SEQ ID NO: 1165799 - RNA, 19 nt, Artificial Sequence
  Description of Artificial Sequence: Synthetic oligonucleotide
cauggaauugguagauggg

SEQ ID NO: 1165800 - RNA, 19 nt, Artificial Sequence
  Description of Artificial Sequence: Synthetic oligonucleotide
auaaacucacgguuauuug

SEQ ID NO: 1165801 - RNA, 19 nt, Artificial Sequence
  Description of Artificial Sequence: Synthetic oligonucleotide
ugguucgccauccuuauuc

SEQ ID NO: 1165802 - RNA, 19 nt, Artificial Sequence
  Description of Artificial Sequence: Synthetic oligonucleotide
ucuaucauuggaguugugu

SEQ ID NO: 1165803 - RNA, 19 nt, Artificial Sequence
  Description of Artificial Sequence: Synthetic oligonucleotide
acuaucugaaugcaucgca

SEQ ID NO: 1165804 - RNA, 19 nt, Artificial Sequence
  Description of Artificial Sequence: Synthetic oligonucleotide
uaauucugacuauguacag

SEQ ID NO: 1165805 - RNA, 19 nt, Artificial Sequence
  Description of Artificial Sequence: Synthetic oligonucleotide
ugcaucgcaauccuuucug

SEQ ID NO: 1165806 - RNA, 19 nt, Artificial Sequence
  Description of Artificial Sequence: Synthetic oligonucleotide
cuggauaaaucgcaagccc

SEQ ID NO: 1165807 - RNA, 19 nt, Artificial Sequence
  Description of Artificial Sequence: Synthetic oligonucleotide
agucagcgcauguagauca

SEQ ID NO: 1165808 - RNA, 19 nt, Artificial Sequence
  Description of Artificial Sequence: Synthetic oligonucleotide
uucgccauccuuauucugu

SEQ ID NO: 1165809 - RNA, 19 nt, Artificial Sequence
  Description of Artificial Sequence: Synthetic oligonucleotide
uuaugaucaaccgguaacu

SEQ ID NO: 1165810 - RNA, 19 nt, Artificial Sequence
  Description of Artificial Sequence: Synthetic oligonucleotide
cuaaguauagaauccagua

SEQ ID NO: 1165811 - RNA, 19 nt, Artificial Sequence
  Description of Artificial Sequence: Synthetic oligonucleotide
uuauucuguggguaaauua

SEQ ID NO: 1165812 - RNA, 19 nt, Artificial Sequence
  Description of Artificial Sequence: Synthetic oligonucleotide
cuuuaucuuagucagguaa

SEQ ID NO: 1165813 - RNA, 19 nt, Artificial Sequence
  Description of Artificial Sequence: Synthetic oligonucleotide
cuuguacacaaccauugug

SEQ ID NO: 1165814 - RNA, 19 nt, Artificial Sequence
  Description of Artificial Sequence: Synthetic oligonucleotide
aauuaugcugguaaucaau

SEQ ID NO: 1165815 - RNA, 19 nt, Artificial Sequence
  Description of Artificial Sequence: Synthetic oligonucleotide
auagucaccacuagauuuc

SEQ ID NO: 1165816 - RNA, 19 nt, Artificial Sequence
  Description of Artificial Sequence: Synthetic oligonucleotide
ugaugacugcuaaguauag

SEQ ID NO: 1165817 - RNA, 19 nt, Artificial Sequence
  Description of Artificial Sequence: Synthetic oligonucleotide
augauauugaagaucccag

SEQ ID NO: 1165818 - RNA, 19 nt, Artificial Sequence
  Description of Artificial Sequence: Synthetic oligonucleotide
aucgcaagcccuugaacuc

SEQ ID NO: 1165819 - RNA, 19 nt, Artificial Sequence
  Description of Artificial Sequence: Synthetic oligonucleotide
ugcacugauagccaaugau

SEQ ID NO: 1165820 - RNA, 19 nt, Artificial Sequence
  Description of Artificial Sequence: Synthetic oligonucleotide
aauucugacuauguacagu

SEQ ID NO: 1165821 - RNA, 19 nt, Artificial Sequence
  Description of Artificial Sequence: Synthetic oligonucleotide
aucgucucucauaagcugc

SEQ ID NO: 1165822 - RNA, 19 nt, Artificial Sequence
  Description of Artificial Sequence: Synthetic oligonucleotide
guacuauuaaaguccaaga

SEQ ID NO: 1165823 - RNA, 19 nt, Artificial Sequence
  Description of Artificial Sequence: Synthetic oligonucleotide
ugacgguuuaccgucauga

SEQ ID NO: 1165824 - RNA, 19 nt, Artificial Sequence
  Description of Artificial Sequence: Synthetic oligonucleotide
ucaacuggauaaaucgcaa

SEQ ID NO: 1165825 - RNA, 19 nt, Artificial Sequence
  Description of Artificial Sequence: Synthetic oligonucleotide
ugaaugaauuauccuuacu

SEQ ID NO: 1165826 - RNA, 19 nt, Artificial Sequence
  Description of Artificial Sequence: Synthetic oligonucleotide
uuauuugaaucgucucuca

SEQ ID NO: 1165827 - RNA, 19 nt, Artificial Sequence
  Description of Artificial Sequence: Synthetic oligonucleotide
cuauaagugacacccauaa

SEQ ID NO: 1165828 - RNA, 19 nt, Artificial Sequence
  Description of Artificial Sequence: Synthetic oligonucleotide
cuuauuugaaucgucucuc

SEQ ID NO: 1165829 - RNA, 19 nt, Artificial Sequence
  Description of Artificial Sequence: Synthetic oligonucleotide
ugaagaguugaugacugcu

SEQ ID NO: 1165830 - RNA, 19 nt, Artificial Sequence
  Description of Artificial Sequence: Synthetic oligonucleotide
uuaucuuagucagguaaug

SEQ ID NO: 1165831 - RNA, 19 nt, Artificial Sequence
  Description of Artificial Sequence: Synthetic oligonucleotide
uaagcugcacugauagcca

SEQ ID NO: 1165832 - RNA, 19 nt, Artificial Sequence
  Description of Artificial Sequence: Synthetic oligonucleotide
auuaauccguuuugauaag

SEQ ID NO: 1165833 - RNA, 19 nt, Artificial Sequence
  Description of Artificial Sequence: Synthetic oligonucleotide
aaacucacgguuauuugca

SEQ ID NO: 1165834 - RNA, 19 nt, Artificial Sequence
  Description of Artificial Sequence: Synthetic oligonucleotide
cuguuaugugucuacuaag

SEQ ID NO: 1165835 - RNA, 19 nt, Artificial Sequence
  Description of Artificial Sequence: Synthetic oligonucleotide
accauauacuuuccacagg

SEQ ID NO: 1165836 - RNA, 19 nt, Artificial Sequence
  Description of Artificial Sequence: Synthetic oligonucleotide
acaaugaggaccagaaucu

SEQ ID NO: 1165837 - RNA, 19 nt, Artificial Sequence
  Description of Artificial Sequence: Synthetic oligonucleotide
uguaaugaauuguguucug

SEQ ID NO: 1165838 - RNA, 19 nt, Artificial Sequence
  Description of Artificial Sequence: Synthetic oligonucleotide
auauccucccauaacuuuc

SEQ ID NO: 1165839 - RNA, 19 nt, Artificial Sequence
  Description of Artificial Sequence: Synthetic oligonucleotide
uuuccagcguaaauggcuc

SEQ ID NO: 1165840 - RNA, 19 nt, Artificial Sequence
  Description of Artificial Sequence: Synthetic oligonucleotide
aaccacuaagguaaaggug

SEQ ID NO: 1165841 - RNA, 19 nt, Artificial Sequence
  Description of Artificial Sequence: Synthetic oligonucleotide
uccguuuugauaaggugua

SEQ ID NO: 1165842 - RNA, 19 nt, Artificial Sequence
  Description of Artificial Sequence: Synthetic oligonucleotide
uaaaucgcaagcccuugaa

SEQ ID NO: 1165843 - RNA, 19 nt, Artificial Sequence
  Description of Artificial Sequence: Synthetic oligonucleotide
aguugaggauucucuauca

SEQ ID NO: 1165844 - RNA, 19 nt, Artificial Sequence
  Description of Artificial Sequence: Synthetic oligonucleotide
gauccgaaucccaucaaug

SEQ ID NO: 1165845 - RNA, 19 nt, Artificial Sequence
  Description of Artificial Sequence: Synthetic oligonucleotide
auccgaaucccaucaaugu

SEQ ID NO: 1165846 - RNA, 19 nt, Artificial Sequence
  Description of Artificial Sequence: Synthetic oligonucleotide
aaccauugugauaaacuca

SEQ ID NO: 1165847 - RNA, 19 nt, Artificial Sequence
  Description of Artificial Sequence: Synthetic oligonucleotide
accgucaugauuugucucu

SEQ ID NO: 1165848 - RNA, 19 nt, Artificial Sequence
  Description of Artificial Sequence: Synthetic oligonucleotide
uuaccgucaugauuugucu

SEQ ID NO: 1165849 - RNA, 19 nt, Artificial Sequence
  Description of Artificial Sequence: Synthetic oligonucleotide
uauccucccauaacuuuca

SEQ ID NO: 1165850 - RNA, 19 nt, Artificial Sequence
  Description of Artificial Sequence: Synthetic oligonucleotide
uaucuuagucagguaauga

SEQ ID NO: 1165851 - RNA, 19 nt, Artificial Sequence
  Description of Artificial Sequence: Synthetic oligonucleotide
uguacacaaccauugugau

SEQ ID NO: 1165852 - RNA, 19 nt, Artificial Sequence
  Description of Artificial Sequence: Synthetic oligonucleotide
aucaaccgguaacugauca

SEQ ID NO: 1165853 - RNA, 19 nt, Artificial Sequence
  Description of Artificial Sequence: Synthetic oligonucleotide
auaguugaggauucucuau

SEQ ID NO: 1165854 - RNA, 19 nt, Artificial Sequence
  Description of Artificial Sequence: Synthetic oligonucleotide
uuuugugagucuccugaaa

SEQ ID NO: 1165855 - RNA, 19 nt, Artificial Sequence
  Description of Artificial Sequence: Synthetic oligonucleotide
guuaugugucuacuaagca

SEQ ID NO: 1165856 - RNA, 19 nt, Artificial Sequence
  Description of Artificial Sequence: Synthetic oligonucleotide
gaaucuccaauuauggaaa

SEQ ID NO: 1165857 - RNA, 19 nt, Artificial Sequence
  Description of Artificial Sequence: Synthetic oligonucleotide
aggugugaguuccaggugu

SEQ ID NO: 1165858 - RNA, 19 nt, Artificial Sequence
  Description of Artificial Sequence: Synthetic oligonucleotide
ucuauaagugacacccaua

SEQ ID NO: 1165859 - RNA, 19 nt, Artificial Sequence
  Description of Artificial Sequence: Synthetic oligonucleotide
aaggugugaguuccaggug

SEQ ID NO: 1165860 - RNA, 19 nt, Artificial Sequence
  Description of Artificial Sequence: Synthetic oligonucleotide
caauguauggagguggguc

SEQ ID NO: 1165861 - RNA, 19 nt, Artificial Sequence
  Description of Artificial Sequence: Synthetic oligonucleotide
uccaacacuguauugccuu

SEQ ID NO: 1165862 - RNA, 19 nt, Artificial Sequence
  Description of Artificial Sequence: Synthetic oligonucleotide
uaugaucaaccgguaacug

SEQ ID NO: 1165863 - RNA, 19 nt, Artificial Sequence
  Description of Artificial Sequence: Synthetic oligonucleotide
gcaugcugaauauacccgg

SEQ ID NO: 1165864 - RNA, 19 nt, Artificial Sequence
  Description of Artificial Sequence: Synthetic oligonucleotide
uccauuaauccguuuugau

SEQ ID NO: 1165865 - RNA, 19 nt, Artificial Sequence
  Description of Artificial Sequence: Synthetic oligonucleotide
acuguaaccuguuucuguu

SEQ ID NO: 1165866 - RNA, 19 nt, Artificial Sequence
  Description of Artificial Sequence: Synthetic oligonucleotide
uagcaucccaaguacugug

SEQ ID NO: 1165867 - RNA, 19 nt, Artificial Sequence
  Description of Artificial Sequence: Synthetic oligonucleotide
acgguccagucuuaucuac

SEQ ID NO: 1165868 - RNA, 19 nt, Artificial Sequence
  Description of Artificial Sequence: Synthetic oligonucleotide
gucaccacuagauuuccuc

SEQ ID NO: 1165869 - RNA, 19 nt, Artificial Sequence
  Description of Artificial Sequence: Synthetic oligonucleotide
caaguacugugaauacaag

SEQ ID NO: 1165870 - RNA, 19 nt, Artificial Sequence
  Description of Artificial Sequence: Synthetic oligonucleotide
ugauccgaaucccaucaau

SEQ ID NO: 1165871 - RNA, 19 nt, Artificial Sequence
  Description of Artificial Sequence: Synthetic oligonucleotide
ugacaaguaccagauucca

SEQ ID NO: 1165872 - RNA, 19 nt, Artificial Sequence
  Description of Artificial Sequence: Synthetic oligonucleotide
aguaccagauuccacugua

SEQ ID NO: 1165873 - RNA, 19 nt, Artificial Sequence
  Description of Artificial Sequence: Synthetic oligonucleotide
caguaauaguugaggauuc

SEQ ID NO: 1165874 - RNA, 19 nt, Artificial Sequence
  Description of Artificial Sequence: Synthetic oligonucleotide
accuauagucaccacuaga

SEQ ID NO: 1165875 - RNA, 19 nt, Artificial Sequence
  Description of Artificial Sequence: Synthetic oligonucleotide
ucucuauaagugacaccca

SEQ ID NO: 1165876 - RNA, 19 nt, Artificial Sequence
  Description of Artificial Sequence: Synthetic oligonucleotide
uccgaaucccaucaaugua

SEQ ID NO: 1165877 - RNA, 19 nt, Artificial Sequence
  Description of Artificial Sequence: Synthetic oligonucleotide
ggacaguacuauuaaaguc

SEQ ID NO: 1165878 - RNA, 19 nt, Artificial Sequence
  Description of Artificial Sequence: Synthetic oligonucleotide
acacuguauugccuugguc

SEQ ID NO: 1165879 - RNA, 19 nt, Artificial Sequence
  Description of Artificial Sequence: Synthetic oligonucleotide
acgguuauuugcaaaguca

SEQ ID NO: 1165880 - RNA, 19 nt, Artificial Sequence
  Description of Artificial Sequence: Synthetic oligonucleotide
guuggauccuggaaaauca

SEQ ID NO: 1165881 - RNA, 19 nt, Artificial Sequence
  Description of Artificial Sequence: Synthetic oligonucleotide
uuaagguaauucugacuau

SEQ ID NO: 1165882 - RNA, 19 nt, Artificial Sequence
  Description of Artificial Sequence: Synthetic oligonucleotide
uuccauuaauccguuuuga

SEQ ID NO: 1165883 - RNA, 19 nt, Artificial Sequence
  Description of Artificial Sequence: Synthetic oligonucleotide
agcgcauguagaucaauau

SEQ ID NO: 1165884 - RNA, 19 nt, Artificial Sequence
  Description of Artificial Sequence: Synthetic oligonucleotide
uuagcaucccaaguacugu

SEQ ID NO: 1165885 - RNA, 19 nt, Artificial Sequence
  Description of Artificial Sequence: Synthetic oligonucleotide
aagguacugacuaucugaa

SEQ ID NO: 1165886 - RNA, 19 nt, Artificial Sequence
  Description of Artificial Sequence: Synthetic oligonucleotide
ucucuaucauuggaguugu

SEQ ID NO: 1165887 - RNA, 19 nt, Artificial Sequence
  Description of Artificial Sequence: Synthetic oligonucleotide
uugugagucuccugaaaau

SEQ ID NO: 1165888 - RNA, 19 nt, Artificial Sequence
  Description of Artificial Sequence: Synthetic oligonucleotide
uguauugccuugguccucu

SEQ ID NO: 1165889 - RNA, 19 nt, Artificial Sequence
  Description of Artificial Sequence: Synthetic oligonucleotide
ugccaacucuguaugcaca

SEQ ID NO: 1165890 - RNA, 19 nt, Artificial Sequence
  Description of Artificial Sequence: Synthetic oligonucleotide
auuauccuuacugaaggua

SEQ ID NO: 1165891 - RNA, 19 nt, Artificial Sequence
  Description of Artificial Sequence: Synthetic oligonucleotide
cuugggacaccauugaggu

SEQ ID NO: 1165892 - RNA, 19 nt, Artificial Sequence
  Description of Artificial Sequence: Synthetic oligonucleotide
aauugguagaugggguuau

SEQ ID NO: 1165893 - RNA, 19 nt, Artificial Sequence
  Description of Artificial Sequence: Synthetic oligonucleotide
accacuagauuuccucuga

SEQ ID NO: 1165894 - RNA, 19 nt, Artificial Sequence
  Description of Artificial Sequence: Synthetic oligonucleotide
ugugucuacuaagcaaaac

SEQ ID NO: 1165895 - RNA, 19 nt, Artificial Sequence
  Description of Artificial Sequence: Synthetic oligonucleotide
gauaaacucacgguuauuu

SEQ ID NO: 1165896 - RNA, 19 nt, Artificial Sequence
  Description of Artificial Sequence: Synthetic oligonucleotide
gacuaucugaaugcaucgc

SEQ ID NO: 1165897 - RNA, 19 nt, Artificial Sequence
  Description of Artificial Sequence: Synthetic oligonucleotide
cacgguuauuugcaaaguc

SEQ ID NO: 1165898 - RNA, 19 nt, Artificial Sequence
  Description of Artificial Sequence: Synthetic oligonucleotide
uauacccggacuguguaau

SEQ ID NO: 1165899 - RNA, 19 nt, Artificial Sequence
  Description of Artificial Sequence: Synthetic oligonucleotide
acaccauugaggugaaguu

SEQ ID NO: 1165900 - RNA, 19 nt, Artificial Sequence
  Description of Artificial Sequence: Synthetic oligonucleotide
auucucuaucauuggaguu

SEQ ID NO: 1165901 - RNA, 19 nt, Artificial Sequence
  Description of Artificial Sequence: Synthetic oligonucleotide
cugagaaaccacuaaggua

SEQ ID NO: 1165902 - RNA, 19 nt, Artificial Sequence
  Description of Artificial Sequence: Synthetic oligonucleotide
ucggggaucaaaguuuaaa

SEQ ID NO: 1165903 - RNA, 19 nt, Artificial Sequence
  Description of Artificial Sequence: Synthetic oligonucleotide
gaguuguguugucuugaug

SEQ ID NO: 1165904 - RNA, 19 nt, Artificial Sequence
  Description of Artificial Sequence: Synthetic oligonucleotide
aggcuauaagcaucuuuca

SEQ ID NO: 1165905 - RNA, 19 nt, Artificial Sequence
  Description of Artificial Sequence: Synthetic oligonucleotide
cagguauauuuuccaauuc

SEQ ID NO: 1165906 - RNA, 19 nt, Artificial Sequence
  Description of Artificial Sequence: Synthetic oligonucleotide
cugaagaguugaugacugc

SEQ ID NO: 1165907 - RNA, 19 nt, Artificial Sequence
  Description of Artificial Sequence: Synthetic oligonucleotide
guaauaguugaggauucuc

SEQ ID NO: 1165908 - RNA, 19 nt, Artificial Sequence
  Description of Artificial Sequence: Synthetic oligonucleotide
uugaaucgucucucauaag

SEQ ID NO: 1165909 - RNA, 19 nt, Artificial Sequence
  Description of Artificial Sequence: Synthetic oligonucleotide
cuuuccagcguaaauggcu

SEQ ID NO: 1165910 - RNA, 19 nt, Artificial Sequence
  Description of Artificial Sequence: Synthetic oligonucleotide
ucuuucacggguccuuguu

SEQ ID NO: 1165911 - RNA, 19 nt, Artificial Sequence
  Description of Artificial Sequence: Synthetic oligonucleotide
guccucucaguucuaucag

SEQ ID NO: 1165912 - RNA, 19 nt, Artificial Sequence
  Description of Artificial Sequence: Synthetic oligonucleotide
uucacggguccuuguuuag

SEQ ID NO: 1165913 - RNA, 19 nt, Artificial Sequence
  Description of Artificial Sequence: Synthetic oligonucleotide
aacgguccagucuuaucua

SEQ ID NO: 1165914 - RNA, 19 nt, Artificial Sequence
  Description of Artificial Sequence: Synthetic oligonucleotide
guagaucaauauuugaguu

SEQ ID NO: 1165915 - RNA, 19 nt, Artificial Sequence
  Description of Artificial Sequence: Synthetic oligonucleotide
uaucuacauggaauuggua

SEQ ID NO: 1165916 - RNA, 19 nt, Artificial Sequence
  Description of Artificial Sequence: Synthetic oligonucleotide
caaccgguaacugaucauc

SEQ ID NO: 1165917 - RNA, 19 nt, Artificial Sequence
  Description of Artificial Sequence: Synthetic oligonucleotide
aaccgguaacugaucauca

SEQ ID NO: 1165918 - RNA, 19 nt, Artificial Sequence
  Description of Artificial Sequence: Synthetic oligonucleotide
acuguguaaugaauugugu

SEQ ID NO: 1165919 - RNA, 19 nt, Artificial Sequence
  Description of Artificial Sequence: Synthetic oligonucleotide
uuguuggaauaagaacaca

SEQ ID NO: 1165920 - RNA, 19 nt, Artificial Sequence
  Description of Artificial Sequence: Synthetic oligonucleotide
ggcuauaagcaucuuucac

SEQ ID NO: 1165921 - RNA, 19 nt, Artificial Sequence
  Description of Artificial Sequence: Synthetic oligonucleotide
guauggugaagggaucuug

SEQ ID NO: 1165922 - RNA, 19 nt, Artificial Sequence
  Description of Artificial Sequence: Synthetic oligonucleotide
ugucuguuaugugucuacu

SEQ ID NO: 1165923 - RNA, 19 nt, Artificial Sequence
  Description of Artificial Sequence: Synthetic oligonucleotide
caccacuagauuuccucug

SEQ ID NO: 1165924 - RNA, 19 nt, Artificial Sequence
  Description of Artificial Sequence: Synthetic oligonucleotide
cuaucugaaugcaucgcaa

SEQ ID NO: 1165925 - RNA, 19 nt, Artificial Sequence
  Description of Artificial Sequence: Synthetic oligonucleotide
uaaccuguuucuguuugaa

SEQ ID NO: 1165926 - RNA, 19 nt, Artificial Sequence
  Description of Artificial Sequence: Synthetic oligonucleotide
uugauggggacaguacuau

SEQ ID NO: 1165927 - RNA, 19 nt, Artificial Sequence
  Description of Artificial Sequence: Synthetic oligonucleotide
gucuacuaagcaaaaccca

SEQ ID NO: 1165928 - RNA, 19 nt, Artificial Sequence
  Description of Artificial Sequence: Synthetic oligonucleotide
ucaaccgguaacugaucau

SEQ ID NO: 1165929 - RNA, 19 nt, Artificial Sequence
  Description of Artificial Sequence: Synthetic oligonucleotide
gcacugauagccaaugaug

SEQ ID NO: 1165930 - RNA, 19 nt, Artificial Sequence
  Description of Artificial Sequence: Synthetic oligonucleotide
uucugacuauguacaguuc

SEQ ID NO: 1165931 - RNA, 19 nt, Artificial Sequence
  Description of Artificial Sequence: Synthetic oligonucleotide
gggcuguugauccgaaucc

SEQ ID NO: 1165932 - RNA, 19 nt, Artificial Sequence
  Description of Artificial Sequence: Synthetic oligonucleotide
gacaaguaccagauuccac

SEQ ID NO: 1165933 - RNA, 19 nt, Artificial Sequence
  Description of Artificial Sequence: Synthetic oligonucleotide
guaacugaucaucaauuau

SEQ ID NO: 1165934 - RNA, 19 nt, Artificial Sequence
  Description of Artificial Sequence: Synthetic oligonucleotide
gguauccacccagucagcg

SEQ ID NO: 1165935 - RNA, 19 nt, Artificial Sequence
  Description of Artificial Sequence: Synthetic oligonucleotide
gcguaaauggcuccaagga

SEQ ID NO: 1165936 - RNA, 19 nt, Artificial Sequence
  Description of Artificial Sequence: Synthetic oligonucleotide
uuccagcguaaauggcucc

SEQ ID NO: 1165937 - RNA, 19 nt, Artificial Sequence
  Description of Artificial Sequence: Synthetic oligonucleotide
uaccgucaugauuugucuc

SEQ ID NO: 1165938 - RNA, 19 nt, Artificial Sequence
  Description of Artificial Sequence: Synthetic oligonucleotide
gaaucgucucucauaagcu

SEQ ID NO: 1165939 - RNA, 19 nt, Artificial Sequence
  Description of Artificial Sequence: Synthetic oligonucleotide
cauauacuuuccacaggga

SEQ ID NO: 1165940 - RNA, 19 nt, Artificial Sequence
  Description of Artificial Sequence: Synthetic oligonucleotide
uccagcguaaauggcucca

SEQ ID NO: 1165941 - RNA, 19 nt, Artificial Sequence
  Description of Artificial Sequence: Synthetic oligonucleotide
cuugauggggacaguacua

SEQ ID NO: 1165942 - RNA, 19 nt, Artificial Sequence
  Description of Artificial Sequence: Synthetic oligonucleotide
augcaucgcaauccuuucu

SEQ ID NO: 1165943 - RNA, 19 nt, Artificial Sequence
  Description of Artificial Sequence: Synthetic oligonucleotide
auauacccggacuguguaa

SEQ ID NO: 1165944 - RNA, 19 nt, Artificial Sequence
  Description of Artificial Sequence: Synthetic oligonucleotide
ucaauguauggaggugggu

SEQ ID NO: 1165945 - RNA, 19 nt, Artificial Sequence
  Description of Artificial Sequence: Synthetic oligonucleotide
cauucugacgguuuaccgu

SEQ ID NO: 1165946 - RNA, 19 nt, Artificial Sequence
  Description of Artificial Sequence: Synthetic oligonucleotide
uugauccgaaucccaucaa

SEQ ID NO: 1165947 - RNA, 19 nt, Artificial Sequence
  Description of Artificial Sequence: Synthetic oligonucleotide
gguaacugaucaucaauua

SEQ ID NO: 1165948 - RNA, 19 nt, Artificial Sequence
  Description of Artificial Sequence: Synthetic oligonucleotide
gucuuaucuacauggaauu

SEQ ID NO: 1165949 - RNA, 19 nt, Artificial Sequence
  Description of Artificial Sequence: Synthetic oligonucleotide
cuuguuuagcaucccaagu

SEQ ID NO: 1165950 - RNA, 19 nt, Artificial Sequence
  Description of Artificial Sequence: Synthetic oligonucleotide
ccaacucaaauaaacuaca

SEQ ID NO: 1165951 - RNA, 19 nt, Artificial Sequence
  Description of Artificial Sequence: Synthetic oligonucleotide
ucacggguccuuguuuagc

SEQ ID NO: 1165952 - RNA, 19 nt, Artificial Sequence
  Description of Artificial Sequence: Synthetic oligonucleotide
gcaucgcaauccuuucugg

SEQ ID NO: 1165953 - RNA, 19 nt, Artificial Sequence
  Description of Artificial Sequence: Synthetic oligonucleotide
cuaucauuggaguuguguu

SEQ ID NO: 1165954 - RNA, 19 nt, Artificial Sequence
  Description of Artificial Sequence: Synthetic oligonucleotide
uggggacaguacuauuaaa

SEQ ID NO: 1165955 - RNA, 19 nt, Artificial Sequence
  Description of Artificial Sequence: Synthetic oligonucleotide
guaaauggcuccaaggauu

SEQ ID NO: 1165956 - RNA, 19 nt, Artificial Sequence
  Description of Artificial Sequence: Synthetic oligonucleotide
caccuauagucaccacuag

SEQ ID NO: 1165957 - RNA, 19 nt, Artificial Sequence
  Description of Artificial Sequence: Synthetic oligonucleotide
guaaccuguuucuguuuga

SEQ ID NO: 1165958 - RNA, 19 nt, Artificial Sequence
  Description of Artificial Sequence: Synthetic oligonucleotide
guaacgguccagucuuauc

SEQ ID NO: 1165959 - RNA, 19 nt, Artificial Sequence
  Description of Artificial Sequence: Synthetic oligonucleotide
auacccggacuguguaaug

SEQ ID NO: 1165960 - RNA, 19 nt, Artificial Sequence
  Description of Artificial Sequence: Synthetic oligonucleotide
acugugaauacaaguugau

SEQ ID NO: 1165961 - RNA, 19 nt, Artificial Sequence
  Description of Artificial Sequence: Synthetic oligonucleotide
ucgcaagcccuugaacucu

SEQ ID NO: 1165962 - RNA, 19 nt, Artificial Sequence
  Description of Artificial Sequence: Synthetic oligonucleotide
accgguaacugaucaucaa

SEQ ID NO: 1165963 - RNA, 19 nt, Artificial Sequence
  Description of Artificial Sequence: Synthetic oligonucleotide
ggggaugauauugaagauc

SEQ ID NO: 1165964 - RNA, 19 nt, Artificial Sequence
  Description of Artificial Sequence: Synthetic oligonucleotide
cugcuaaguauagaaucca

SEQ ID NO: 1165965 - RNA, 19 nt, Artificial Sequence
  Description of Artificial Sequence: Synthetic oligonucleotide
agcaaaauccacaccuaua

SEQ ID NO: 1165966 - RNA, 19 nt, Artificial Sequence
  Description of Artificial Sequence: Synthetic oligonucleotide
cagucuuaucuacauggaa

SEQ ID NO: 1165967 - RNA, 19 nt, Artificial Sequence
  Description of Artificial Sequence: Synthetic oligonucleotide
uguauggugaagggaucuu

SEQ ID NO: 1165968 - RNA, 19 nt, Artificial Sequence
  Description of Artificial Sequence: Synthetic oligonucleotide
ugauggggacaguacuauu

SEQ ID NO: 1165969 - RNA, 19 nt, Artificial Sequence
  Description of Artificial Sequence: Synthetic oligonucleotide
gucuguuaugugucuacua

SEQ ID NO: 1165970 - RNA, 19 nt, Artificial Sequence
  Description of Artificial Sequence: Synthetic oligonucleotide
gugauaaacucacgguuau

SEQ ID NO: 1165971 - RNA, 19 nt, Artificial Sequence
  Description of Artificial Sequence: Synthetic oligonucleotide
gugugaguuccaggugugg

SEQ ID NO: 1165972 - RNA, 19 nt, Artificial Sequence
  Description of Artificial Sequence: Synthetic oligonucleotide
cuaagguaaaggugugagu

SEQ ID NO: 1165973 - RNA, 19 nt, Artificial Sequence
  Description of Artificial Sequence: Synthetic oligonucleotide
guacacaaccauugugaua

SEQ ID NO: 1165974 - RNA, 19 nt, Artificial Sequence
  Description of Artificial Sequence: Synthetic oligonucleotide
aguaacgguccagucuuau

SEQ ID NO: 1165975 - RNA, 19 nt, Artificial Sequence
  Description of Artificial Sequence: Synthetic oligonucleotide
ccuauagucaccacuagau

SEQ ID NO: 1165976 - RNA, 19 nt, Artificial Sequence
  Description of Artificial Sequence: Synthetic oligonucleotide
ccaauuauggaaacugcua

SEQ ID NO: 1165977 - RNA, 19 nt, Artificial Sequence
  Description of Artificial Sequence: Synthetic oligonucleotide
ugauaaacucacgguuauu

SEQ ID NO: 1165978 - RNA, 19 nt, Artificial Sequence
  Description of Artificial Sequence: Synthetic oligonucleotide
caguccuuuagaugauuaa

SEQ ID NO: 1165979 - RNA, 19 nt, Artificial Sequence
  Description of Artificial Sequence: Synthetic oligonucleotide
gaucaaccgguaacugauc

SEQ ID NO: 1165980 - RNA, 19 nt, Artificial Sequence
  Description of Artificial Sequence: Synthetic oligonucleotide
acaguccuuuagaugauua

SEQ ID NO: 1165981 - RNA, 19 nt, Artificial Sequence
  Description of Artificial Sequence: Synthetic oligonucleotide
ccauuaauccguuuugaua

SEQ ID NO: 1165982 - RNA, 19 nt, Artificial Sequence
  Description of Artificial Sequence: Synthetic oligonucleotide
uggguaaauuaugcuggua

SEQ ID NO: 1165983 - RNA, 19 nt, Artificial Sequence
  Description of Artificial Sequence: Synthetic oligonucleotide
uucggggaucaaaguuuaa

SEQ ID NO: 1165984 - RNA, 19 nt, Artificial Sequence
  Description of Artificial Sequence: Synthetic oligonucleotide
cugacgguuuaccgucaug

SEQ ID NO: 1165985 - RNA, 19 nt, Artificial Sequence
  Description of Artificial Sequence: Synthetic oligonucleotide
cucuauaagugacacccau

SEQ ID NO: 1165986 - RNA, 19 nt, Artificial Sequence
  Description of Artificial Sequence: Synthetic oligonucleotide
gguuuaccgucaugauuug

SEQ ID NO: 1165987 - RNA, 19 nt, Artificial Sequence
  Description of Artificial Sequence: Synthetic oligonucleotide
cucuacauucugaaugaau

SEQ ID NO: 1165988 - RNA, 19 nt, Artificial Sequence
  Description of Artificial Sequence: Synthetic oligonucleotide
cauauccucccauaacuuu

SEQ ID NO: 1165989 - RNA, 19 nt, Artificial Sequence
  Description of Artificial Sequence: Synthetic oligonucleotide
cagcgcauguagaucaaua

SEQ ID NO: 1165990 - RNA, 19 nt, Artificial Sequence
  Description of Artificial Sequence: Synthetic oligonucleotide
ucagcgcauguagaucaau

SEQ ID NO: 1165991 - RNA, 19 nt, Artificial Sequence
  Description of Artificial Sequence: Synthetic oligonucleotide
cuggguaauaaacuuucuu

SEQ ID NO: 1165992 - RNA, 19 nt, Artificial Sequence
  Description of Artificial Sequence: Synthetic oligonucleotide
guuuagcaucccaaguacu

SEQ ID NO: 1165993 - RNA, 19 nt, Artificial Sequence
  Description of Artificial Sequence: Synthetic oligonucleotide
guuguuggccaggcuauaa

SEQ ID NO: 1165994 - RNA, 19 nt, Artificial Sequence
  Description of Artificial Sequence: Synthetic oligonucleotide
ccaacacuguauugccuug

SEQ ID NO: 1165995 - RNA, 19 nt, Artificial Sequence
  Description of Artificial Sequence: Synthetic oligonucleotide
acggguccuuguuuagcau

SEQ ID NO: 1165996 - RNA, 19 nt, Artificial Sequence
  Description of Artificial Sequence: Synthetic oligonucleotide
guggguaaauuaugcuggu

SEQ ID NO: 1165997 - RNA, 19 nt, Artificial Sequence
  Description of Artificial Sequence: Synthetic oligonucleotide
gcuaaguauagaauccagu

SEQ ID NO: 1165998 - RNA, 19 nt, Artificial Sequence
  Description of Artificial Sequence: Synthetic oligonucleotide
ggauuguacucugguucgc

SEQ ID NO: 1165999 - RNA, 19 nt, Artificial Sequence
  Description of Artificial Sequence: Synthetic oligonucleotide
cuacauggaauugguagau

SEQ ID NO: 1166000 - RNA, 19 nt, Artificial Sequence
  Description of Artificial Sequence: Synthetic oligonucleotide
acacagcaauucuccuuua

SEQ ID NO: 1166001 - RNA, 19 nt, Artificial Sequence
  Description of Artificial Sequence: Synthetic oligonucleotide
cuguauugccuugguccuc

SEQ ID NO: 1166002 - RNA, 19 nt, Artificial Sequence
  Description of Artificial Sequence: Synthetic oligonucleotide
guauggaggugggucagcu

SEQ ID NO: 1166003 - RNA, 19 nt, Artificial Sequence
  Description of Artificial Sequence: Synthetic oligonucleotide
ggugaaguuuuaccauaua

SEQ ID NO: 1166004 - RNA, 19 nt, Artificial Sequence
  Description of Artificial Sequence: Synthetic oligonucleotide
gugagucuccugaaaauuu

SEQ ID NO: 1166005 - RNA, 19 nt, Artificial Sequence
  Description of Artificial Sequence: Synthetic oligonucleotide
cgcauguagaucaauauuu

SEQ ID NO: 1166006 - RNA, 19 nt, Artificial Sequence
  Description of Artificial Sequence: Synthetic oligonucleotide
gcaucccaaguacugugaa

SEQ ID NO: 1166007 - RNA, 19 nt, Artificial Sequence
  Description of Artificial Sequence: Synthetic oligonucleotide
caguacuauuaaaguccaa

SEQ ID NO: 1166008 - RNA, 19 nt, Artificial Sequence
  Description of Artificial Sequence: Synthetic oligonucleotide
gggucagcuggguaauaaa

SEQ ID NO: 1166009 - RNA, 19 nt, Artificial Sequence
  Description of Artificial Sequence: Synthetic oligonucleotide
caagcccuugaacucucua

SEQ ID NO: 1166010 - RNA, 19 nt, Artificial Sequence
  Description of Artificial Sequence: Synthetic oligonucleotide
ggacuguguaaugaauugu

SEQ ID NO: 1166011 - RNA, 19 nt, Artificial Sequence
  Description of Artificial Sequence: Synthetic oligonucleotide
ccgaaucccaucaauguau

SEQ ID NO: 1166012 - RNA, 19 nt, Artificial Sequence
  Description of Artificial Sequence: Synthetic oligonucleotide
gguucgccauccuuauucu

SEQ ID NO: 1166013 - RNA, 19 nt, Artificial Sequence
  Description of Artificial Sequence: Synthetic oligonucleotide
cuuucacggguccuuguuu

SEQ ID NO: 1166014 - RNA, 19 nt, Artificial Sequence
  Description of Artificial Sequence: Synthetic oligonucleotide
agcugcacugauagccaau

SEQ ID NO: 1166015 - RNA, 19 nt, Artificial Sequence
  Description of Artificial Sequence: Synthetic oligonucleotide
ccccuugugggcacugcac

SEQ ID NO: 1166016 - RNA, 19 nt, Artificial Sequence
  Description of Artificial Sequence: Synthetic oligonucleotide
cugugaauacaaguugauu

SEQ ID NO: 1166017 - RNA, 19 nt, Artificial Sequence
  Description of Artificial Sequence: Synthetic oligonucleotide
guuuaccgucaugauuugu

SEQ ID NO: 1166018 - RNA, 19 nt, Artificial Sequence
  Description of Artificial Sequence: Synthetic oligonucleotide
gcuuuaucuuagucaggua

SEQ ID NO: 1166019 - RNA, 19 nt, Artificial Sequence
  Description of Artificial Sequence: Synthetic oligonucleotide
guauugccuugguccucuc

SEQ ID NO: 1166020 - RNA, 19 nt, Artificial Sequence
  Description of Artificial Sequence: Synthetic oligonucleotide
caccauugaggugaaguuu

SEQ ID NO: 1166021 - RNA, 19 nt, Artificial Sequence
  Description of Artificial Sequence: Synthetic oligonucleotide
gcgcauguagaucaauauu

SEQ ID NO: 1166022 - RNA, 19 nt, Artificial Sequence
  Description of Artificial Sequence: Synthetic oligonucleotide
cuguaaccuguuucuguuu

SEQ ID NO: 1166023 - RNA, 19 nt, Artificial Sequence
  Description of Artificial Sequence: Synthetic oligonucleotide
ccgucaugauuugucucug

SEQ ID NO: 1166024 - RNA, 19 nt, Artificial Sequence
  Description of Artificial Sequence: Synthetic oligonucleotide
gucagcgcauguagaucaa

SEQ ID NO: 1166025 - RNA, 19 nt, Artificial Sequence
  Description of Artificial Sequence: Synthetic oligonucleotide
gagggcuguugauccgaau

SEQ ID NO: 1166026 - RNA, 19 nt, Artificial Sequence
  Description of Artificial Sequence: Synthetic oligonucleotide
caguaacgguccagucuua

SEQ ID NO: 1166027 - RNA, 19 nt, Artificial Sequence
  Description of Artificial Sequence: Synthetic oligonucleotide
cguaaauggcuccaaggau

SEQ ID NO: 1166028 - RNA, 19 nt, Artificial Sequence
  Description of Artificial Sequence: Synthetic oligonucleotide
ccggcacucugaccacucc

SEQ ID NO: 1166029 - RNA, 19 nt, Artificial Sequence
  Description of Artificial Sequence: Synthetic oligonucleotide
ccgguaacugaucaucaau

SEQ ID NO: 1166030 - RNA, 19 nt, Artificial Sequence
  Description of Artificial Sequence: Synthetic oligonucleotide
ccacaccuauagucaccac

SEQ ID NO: 1166031 - RNA, 19 nt, Artificial Sequence
  Description of Artificial Sequence: Synthetic oligonucleotide
cgguccagucuuaucuaca

SEQ ID NO: 1166032 - RNA, 19 nt, Artificial Sequence
  Description of Artificial Sequence: Synthetic oligonucleotide
ccaggcuauaagcaucuuu

SEQ ID NO: 1166033 - RNA, 19 nt, Artificial Sequence
  Description of Artificial Sequence: Synthetic oligonucleotide
cgcaagcccuugaacucuc

SEQ ID NO: 1166034 - RNA, 19 nt, Artificial Sequence
  Description of Artificial Sequence: Synthetic oligonucleotide
ccuuauucuguggguaaau

SEQ ID NO: 1166035 - RNA, 19 nt, Artificial Sequence
  Description of Artificial Sequence: Synthetic oligonucleotide
cugguucgccauccuuauu

SEQ ID NO: 1166036 - RNA, 19 nt, Artificial Sequence
  Description of Artificial Sequence: Synthetic oligonucleotide
ccacuccacuuuccauuaa

SEQ ID NO: 1166037 - RNA, 19 nt, Artificial Sequence
  Description of Artificial Sequence: Synthetic oligonucleotide
ccguuuugauaagguguau

SEQ ID NO: 1166038 - RNA, 19 nt, Artificial Sequence
  Description of Artificial Sequence: Synthetic oligonucleotide
aguaagucuagauuuaagg

SEQ ID NO: 1166039 - RNA, 19 nt, Artificial Sequence
  Description of Artificial Sequence: Synthetic oligonucleotide
aagugguacucauagacgg

SEQ ID NO: 1166040 - RNA, 19 nt, Artificial Sequence
  Description of Artificial Sequence: Synthetic oligonucleotide
uaagucuagauuuaaggag

SEQ ID NO: 1166041 - RNA, 19 nt, Artificial Sequence
  Description of Artificial Sequence: Synthetic oligonucleotide
uuuaaggaggccuacgucc

SEQ ID NO: 1166042 - RNA, 19 nt, Artificial Sequence
  Description of Artificial Sequence: Synthetic oligonucleotide
uggagcugaaauaaagugg

SEQ ID NO: 1166043 - RNA, 19 nt, Artificial Sequence
  Description of Artificial Sequence: Synthetic oligonucleotide
ggaauuaggagacugaacc

SEQ ID NO: 1166044 - RNA, 19 nt, Artificial Sequence
  Description of Artificial Sequence: Synthetic oligonucleotide
cuaucucugggcaacaugg

SEQ ID NO: 1166045 - RNA, 19 nt, Artificial Sequence
  Description of Artificial Sequence: Synthetic oligonucleotide
gaaguggcgauccucauag

SEQ ID NO: 1166046 - RNA, 19 nt, Artificial Sequence
  Description of Artificial Sequence: Synthetic oligonucleotide
uucccuugaaucaugcccg

SEQ ID NO: 1166047 - RNA, 19 nt, Artificial Sequence
  Description of Artificial Sequence: Synthetic oligonucleotide
ugcauaagaagcaauguuc

SEQ ID NO: 1166048 - RNA, 19 nt, Artificial Sequence
  Description of Artificial Sequence: Synthetic oligonucleotide
acggacagcacccuguacc

SEQ ID NO: 1166049 - RNA, 19 nt, Artificial Sequence
  Description of Artificial Sequence: Synthetic oligonucleotide
ugcaguagcagucauuaca

SEQ ID NO: 1166050 - RNA, 19 nt, Artificial Sequence
  Description of Artificial Sequence: Synthetic oligonucleotide
ugaguaagcccucgaagcg

SEQ ID NO: 1166051 - RNA, 19 nt, Artificial Sequence
  Description of Artificial Sequence: Synthetic oligonucleotide
uaccuuaugacucuccaac

SEQ ID NO: 1166052 - RNA, 19 nt, Artificial Sequence
  Description of Artificial Sequence: Synthetic oligonucleotide
aaugccucgcucauggugg

SEQ ID NO: 1166053 - RNA, 19 nt, Artificial Sequence
  Description of Artificial Sequence: Synthetic oligonucleotide
uucucaggcacccauagaa

SEQ ID NO: 1166054 - RNA, 19 nt, Artificial Sequence
  Description of Artificial Sequence: Synthetic oligonucleotide
aagacucauuucuggaguc

SEQ ID NO: 1166055 - RNA, 19 nt, Artificial Sequence
  Description of Artificial Sequence: Synthetic oligonucleotide
aaagugguacucauagacg

SEQ ID NO: 1166056 - RNA, 19 nt, Artificial Sequence
  Description of Artificial Sequence: Synthetic oligonucleotide
aauuaggagacugaacccu

SEQ ID NO: 1166057 - RNA, 19 nt, Artificial Sequence
  Description of Artificial Sequence: Synthetic oligonucleotide
cugaguaagcccucgaagc

SEQ ID NO: 1166058 - RNA, 19 nt, Artificial Sequence
  Description of Artificial Sequence: Synthetic oligonucleotide
ucauagacggacagcaccc

SEQ ID NO: 1166059 - RNA, 19 nt, Artificial Sequence
  Description of Artificial Sequence: Synthetic oligonucleotide
ugggugucccacaagagcc

SEQ ID NO: 1166060 - RNA, 19 nt, Artificial Sequence
  Description of Artificial Sequence: Synthetic oligonucleotide
cuugaucuagggaagacuc

SEQ ID NO: 1166061 - RNA, 19 nt, Artificial Sequence
  Description of Artificial Sequence: Synthetic oligonucleotide
guaagucuagauuuaagga

SEQ ID NO: 1166062 - RNA, 19 nt, Artificial Sequence
  Description of Artificial Sequence: Synthetic oligonucleotide
ugaaucaugcccgaugagc

SEQ ID NO: 1166063 - RNA, 19 nt, Artificial Sequence
  Description of Artificial Sequence: Synthetic oligonucleotide
ucuagagccuugaucuagg

SEQ ID NO: 1166064 - RNA, 19 nt, Artificial Sequence
  Description of Artificial Sequence: Synthetic oligonucleotide
ugaugggugucccacaaga

SEQ ID NO: 1166065 - RNA, 19 nt, Artificial Sequence
  Description of Artificial Sequence: Synthetic oligonucleotide
acuacacaggggcaggugg

SEQ ID NO: 1166066 - RNA, 19 nt, Artificial Sequence
  Description of Artificial Sequence: Synthetic oligonucleotide
auuuaaggaggccuacguc

SEQ ID NO: 1166067 - RNA, 19 nt, Artificial Sequence
  Description of Artificial Sequence: Synthetic oligonucleotide
ugcaucgcggaaaagggug

SEQ ID NO: 1166068 - RNA, 19 nt, Artificial Sequence
  Description of Artificial Sequence: Synthetic oligonucleotide
accuuaugacucuccaacc

SEQ ID NO: 1166069 - RNA, 19 nt, Artificial Sequence
  Description of Artificial Sequence: Synthetic oligonucleotide
gugcaaucuaucuuugagg

SEQ ID NO: 1166070 - RNA, 19 nt, Artificial Sequence
  Description of Artificial Sequence: Synthetic oligonucleotide
uguaccuuaugacucucca

SEQ ID NO: 1166071 - RNA, 19 nt, Artificial Sequence
  Description of Artificial Sequence: Synthetic oligonucleotide
agagcccagauuuggggcc

SEQ ID NO: 1166072 - RNA, 19 nt, Artificial Sequence
  Description of Artificial Sequence: Synthetic oligonucleotide
cucauagacggacagcacc

SEQ ID NO: 1166073 - RNA, 19 nt, Artificial Sequence
  Description of Artificial Sequence: Synthetic oligonucleotide
agacuugaagaacuuaagu

SEQ ID NO: 1166074 - RNA, 19 nt, Artificial Sequence
  Description of Artificial Sequence: Synthetic oligonucleotide
uaugacucuccaaccaggc

SEQ ID NO: 1166075 - RNA, 19 nt, Artificial Sequence
  Description of Artificial Sequence: Synthetic oligonucleotide
aguagggaucaucaucccg

SEQ ID NO: 1166076 - RNA, 19 nt, Artificial Sequence
  Description of Artificial Sequence: Synthetic oligonucleotide
uauuugcggccguacaagg

SEQ ID NO: 1166077 - RNA, 19 nt, Artificial Sequence
  Description of Artificial Sequence: Synthetic oligonucleotide
uggcgauccucauagaaca

SEQ ID NO: 1166078 - RNA, 19 nt, Artificial Sequence
  Description of Artificial Sequence: Synthetic oligonucleotide
ucugguacgaagccuuggc

SEQ ID NO: 1166079 - RNA, 19 nt, Artificial Sequence
  Description of Artificial Sequence: Synthetic oligonucleotide
ugguacgaagccuuggccc

SEQ ID NO: 1166080 - RNA, 19 nt, Artificial Sequence
  Description of Artificial Sequence: Synthetic oligonucleotide
ggaacgggagccuagaggc

SEQ ID NO: 1166081 - RNA, 19 nt, Artificial Sequence
  Description of Artificial Sequence: Synthetic oligonucleotide
uguauuugcggccguacaa

SEQ ID NO: 1166082 - RNA, 19 nt, Artificial Sequence
  Description of Artificial Sequence: Synthetic oligonucleotide
uuugcggccguacaaggac

SEQ ID NO: 1166083 - RNA, 19 nt, Artificial Sequence
  Description of Artificial Sequence: Synthetic oligonucleotide
cauacuugccuccuccucc

SEQ ID NO: 1166084 - RNA, 19 nt, Artificial Sequence
  Description of Artificial Sequence: Synthetic oligonucleotide
acagucaaaugccucgcuc

SEQ ID NO: 1166085 - RNA, 19 nt, Artificial Sequence
  Description of Artificial Sequence: Synthetic oligonucleotide
aacuuaaguugaugggugu

SEQ ID NO: 1166086 - RNA, 19 nt, Artificial Sequence
  Description of Artificial Sequence: Synthetic oligonucleotide
aggaacgggagccuagagg

SEQ ID NO: 1166087 - RNA, 19 nt, Artificial Sequence
  Description of Artificial Sequence: Synthetic oligonucleotide
uuaaggaggccuacgucca

SEQ ID NO: 1166088 - RNA, 19 nt, Artificial Sequence
  Description of Artificial Sequence: Synthetic oligonucleotide
uaugucacuccacccuggg

SEQ ID NO: 1166089 - RNA, 19 nt, Artificial Sequence
  Description of Artificial Sequence: Synthetic oligonucleotide
uuugcacagucaaaugccu

SEQ ID NO: 1166090 - RNA, 19 nt, Artificial Sequence
  Description of Artificial Sequence: Synthetic oligonucleotide
aagcccucgaagcgggcgc

SEQ ID NO: 1166091 - RNA, 19 nt, Artificial Sequence
  Description of Artificial Sequence: Synthetic oligonucleotide
agagucaggagccuuggcu

SEQ ID NO: 1166092 - RNA, 19 nt, Artificial Sequence
  Description of Artificial Sequence: Synthetic oligonucleotide
aagagucaggagccuuggc

SEQ ID NO: 1166093 - RNA, 19 nt, Artificial Sequence
  Description of Artificial Sequence: Synthetic oligonucleotide
ucuccgucugguacgaagc

SEQ ID NO: 1166094 - RNA, 19 nt, Artificial Sequence
  Description of Artificial Sequence: Synthetic oligonucleotide
ggugcaaucuaucuuugag

SEQ ID NO: 1166095 - RNA, 19 nt, Artificial Sequence
  Description of Artificial Sequence: Synthetic oligonucleotide
gaacaguucccuugaauca

SEQ ID NO: 1166096 - RNA, 19 nt, Artificial Sequence
  Description of Artificial Sequence: Synthetic oligonucleotide
cuuaaguugaugggugucc

SEQ ID NO: 1166097 - RNA, 19 nt, Artificial Sequence
  Description of Artificial Sequence: Synthetic oligonucleotide
agagguagccggcugcgac

SEQ ID NO: 1166098 - RNA, 19 nt, Artificial Sequence
  Description of Artificial Sequence: Synthetic oligonucleotide
ugaagaacuuaaguugaug

SEQ ID NO: 1166099 - RNA, 19 nt, Artificial Sequence
  Description of Artificial Sequence: Synthetic oligonucleotide
uggguaugcuggaauuagg

SEQ ID NO: 1166100 - RNA, 19 nt, Artificial Sequence
  Description of Artificial Sequence: Synthetic oligonucleotide
aguucccuugaaucaugcc

SEQ ID NO: 1166101 - RNA, 19 nt, Artificial Sequence
  Description of Artificial Sequence: Synthetic oligonucleotide
acagagaagcucacugucc

SEQ ID NO: 1166102 - RNA, 19 nt, Artificial Sequence
  Description of Artificial Sequence: Synthetic oligonucleotide
ucuaucuuugaggacuucu

SEQ ID NO: 1166103 - RNA, 19 nt, Artificial Sequence
  Description of Artificial Sequence: Synthetic oligonucleotide
aaucaugcccgaugagcug

SEQ ID NO: 1166104 - RNA, 19 nt, Artificial Sequence
  Description of Artificial Sequence: Synthetic oligonucleotide
uggaauuaggagacugaac

SEQ ID NO: 1166105 - RNA, 19 nt, Artificial Sequence
  Description of Artificial Sequence: Synthetic oligonucleotide
uuaaguugauggguguccc

SEQ ID NO: 1166106 - RNA, 19 nt, Artificial Sequence
  Description of Artificial Sequence: Synthetic oligonucleotide
agauuuggggccuggguca

SEQ ID NO: 1166107 - RNA, 19 nt, Artificial Sequence
  Description of Artificial Sequence: Synthetic oligonucleotide
uuguucucauagcaaggca

SEQ ID NO: 1166108 - RNA, 19 nt, Artificial Sequence
  Description of Artificial Sequence: Synthetic oligonucleotide
uagcaaggcacgcaguagu

SEQ ID NO: 1166109 - RNA, 19 nt, Artificial Sequence
  Description of Artificial Sequence: Synthetic oligonucleotide
cuaucuuugaggacuucuc

SEQ ID NO: 1166110 - RNA, 19 nt, Artificial Sequence
  Description of Artificial Sequence: Synthetic oligonucleotide
gaccaggcauucucgaugc

SEQ ID NO: 1166111 - RNA, 19 nt, Artificial Sequence
  Description of Artificial Sequence: Synthetic oligonucleotide
aagugggguaagccacccc

SEQ ID NO: 1166112 - RNA, 19 nt, Artificial Sequence
  Description of Artificial Sequence: Synthetic oligonucleotide
cuugaaucaugcccgauga

SEQ ID NO: 1166113 - RNA, 19 nt, Artificial Sequence
  Description of Artificial Sequence: Synthetic oligonucleotide
ucuggaagugggguaagcc

SEQ ID NO: 1166114 - RNA, 19 nt, Artificial Sequence
  Description of Artificial Sequence: Synthetic oligonucleotide
agucuugaacccuugguuu

SEQ ID NO: 1166115 - RNA, 19 nt, Artificial Sequence
  Description of Artificial Sequence: Synthetic oligonucleotide
uguugucauagcagggaac

SEQ ID NO: 1166116 - RNA, 19 nt, Artificial Sequence
  Description of Artificial Sequence: Synthetic oligonucleotide
agacucauuucuggagucc

SEQ ID NO: 1166117 - RNA, 19 nt, Artificial Sequence
  Description of Artificial Sequence: Synthetic oligonucleotide
uugaucuagggaagacuca

SEQ ID NO: 1166118 - RNA, 19 nt, Artificial Sequence
  Description of Artificial Sequence: Synthetic oligonucleotide
aaucugcuauccaggcagc

SEQ ID NO: 1166119 - RNA, 19 nt, Artificial Sequence
  Description of Artificial Sequence: Synthetic oligonucleotide
acuuaaguugauggguguc

SEQ ID NO: 1166120 - RNA, 19 nt, Artificial Sequence
  Description of Artificial Sequence: Synthetic oligonucleotide
aucaucccgagaugugaac

SEQ ID NO: 1166121 - RNA, 19 nt, Artificial Sequence
  Description of Artificial Sequence: Synthetic oligonucleotide
aucuagggaagacucauuu

SEQ ID NO: 1166122 - RNA, 19 nt, Artificial Sequence
  Description of Artificial Sequence: Synthetic oligonucleotide
gaguaagcccucgaagcgg

SEQ ID NO: 1166123 - RNA, 19 nt, Artificial Sequence
  Description of Artificial Sequence: Synthetic oligonucleotide
guggaggccauucuaagga

SEQ ID NO: 1166124 - RNA, 19 nt, Artificial Sequence
  Description of Artificial Sequence: Synthetic oligonucleotide
aguagugagcgcccuuguc

SEQ ID NO: 1166125 - RNA, 19 nt, Artificial Sequence
  Description of Artificial Sequence: Synthetic oligonucleotide
cugaaauaaagugguacuc

SEQ ID NO: 1166126 - RNA, 19 nt, Artificial Sequence
  Description of Artificial Sequence: Synthetic oligonucleotide
auaaagugguacucauaga

SEQ ID NO: 1166127 - RNA, 19 nt, Artificial Sequence
  Description of Artificial Sequence: Synthetic oligonucleotide
gguacucauagacggacag

SEQ ID NO: 1166128 - RNA, 19 nt, Artificial Sequence
  Description of Artificial Sequence: Synthetic oligonucleotide
gguaugcuggaauuaggag

SEQ ID NO: 1166129 - RNA, 19 nt, Artificial Sequence
  Description of Artificial Sequence: Synthetic oligonucleotide
gaugcugaguaagcccucg

SEQ ID NO: 1166130 - RNA, 19 nt, Artificial Sequence
  Description of Artificial Sequence: Synthetic oligonucleotide
aaggaacgggagccuagag

SEQ ID NO: 1166131 - RNA, 19 nt, Artificial Sequence
  Description of Artificial Sequence: Synthetic oligonucleotide
aacccuugguuugggaaag

SEQ ID NO: 1166132 - RNA, 19 nt, Artificial Sequence
  Description of Artificial Sequence: Synthetic oligonucleotide
aggcagagcacugugaaga

SEQ ID NO: 1166133 - RNA, 19 nt, Artificial Sequence
  Description of Artificial Sequence: Synthetic oligonucleotide
caggcagccccuaaucugc

SEQ ID NO: 1166134 - RNA, 19 nt, Artificial Sequence
  Description of Artificial Sequence: Synthetic oligonucleotide
aaugccggucuucgaagga

SEQ ID NO: 1166135 - RNA, 19 nt, Artificial Sequence
  Description of Artificial Sequence: Synthetic oligonucleotide
ucuagggaagacucauuuc

SEQ ID NO: 1166136 - RNA, 19 nt, Artificial Sequence
  Description of Artificial Sequence: Synthetic oligonucleotide
uuaggagacugaacccuga

SEQ ID NO: 1166137 - RNA, 19 nt, Artificial Sequence
  Description of Artificial Sequence: Synthetic oligonucleotide
ucaucagcgagggagcgcu

SEQ ID NO: 1166138 - RNA, 19 nt, Artificial Sequence
  Description of Artificial Sequence: Synthetic oligonucleotide
uagacggacagcacccugu

SEQ ID NO: 1166139 - RNA, 19 nt, Artificial Sequence
  Description of Artificial Sequence: Synthetic oligonucleotide
ucugcacuacacaggggca

SEQ ID NO: 1166140 - RNA, 19 nt, Artificial Sequence
  Description of Artificial Sequence: Synthetic oligonucleotide
aaggcacgcaguagugagc

SEQ ID NO: 1166141 - RNA, 19 nt, Artificial Sequence
  Description of Artificial Sequence: Synthetic oligonucleotide
guauuugcggccguacaag

SEQ ID NO: 1166142 - RNA, 19 nt, Artificial Sequence
  Description of Artificial Sequence: Synthetic oligonucleotide
gucuugaacccuugguuug

SEQ ID NO: 1166143 - RNA, 19 nt, Artificial Sequence
  Description of Artificial Sequence: Synthetic oligonucleotide
agcgggcacaccgaggagc

SEQ ID NO: 1166144 - RNA, 19 nt, Artificial Sequence
  Description of Artificial Sequence: Synthetic oligonucleotide
aggcacgcaguagugagcg

SEQ ID NO: 1166145 - RNA, 19 nt, Artificial Sequence
  Description of Artificial Sequence: Synthetic oligonucleotide
ugaucuagggaagacucau

SEQ ID NO: 1166146 - RNA, 19 nt, Artificial Sequence
  Description of Artificial Sequence: Synthetic oligonucleotide
aacgggagccuagaggcug

SEQ ID NO: 1166147 - RNA, 19 nt, Artificial Sequence
  Description of Artificial Sequence: Synthetic oligonucleotide
caaugccggucuucgaagg

SEQ ID NO: 1166148 - RNA, 19 nt, Artificial Sequence
  Description of Artificial Sequence: Synthetic oligonucleotide
cuagggaagacucauuucu

SEQ ID NO: 1166149 - RNA, 19 nt, Artificial Sequence
  Description of Artificial Sequence: Synthetic oligonucleotide
uugaagaacuuaaguugau

SEQ ID NO: 1166150 - RNA, 19 nt, Artificial Sequence
  Description of Artificial Sequence: Synthetic oligonucleotide
acguccagaguucagguuu

SEQ ID NO: 1166151 - RNA, 19 nt, Artificial Sequence
  Description of Artificial Sequence: Synthetic oligonucleotide
cacacuguuuuauugcaga

SEQ ID NO: 1166152 - RNA, 19 nt, Artificial Sequence
  Description of Artificial Sequence: Synthetic oligonucleotide
aucccgagaugugaacugc

SEQ ID NO: 1166153 - RNA, 19 nt, Artificial Sequence
  Description of Artificial Sequence: Synthetic oligonucleotide
aagccuuggcccaccaggg

SEQ ID NO: 1166154 - RNA, 19 nt, Artificial Sequence
  Description of Artificial Sequence: Synthetic oligonucleotide
gagaguaccagcuggguau

SEQ ID NO: 1166155 - RNA, 19 nt, Artificial Sequence
  Description of Artificial Sequence: Synthetic oligonucleotide
agccccuaaucugcuaucc

SEQ ID NO: 1166156 - RNA, 19 nt, Artificial Sequence
  Description of Artificial Sequence: Synthetic oligonucleotide
aggcaugacagucucccca

SEQ ID NO: 1166157 - RNA, 19 nt, Artificial Sequence
  Description of Artificial Sequence: Synthetic oligonucleotide
cuagagccuugaucuaggg

SEQ ID NO: 1166158 - RNA, 19 nt, Artificial Sequence
  Description of Artificial Sequence: Synthetic oligonucleotide
ucuugcacccagugcagac

SEQ ID NO: 1166159 - RNA, 19 nt, Artificial Sequence
  Description of Artificial Sequence: Synthetic oligonucleotide
aguaagcccucgaagcggg

SEQ ID NO: 1166160 - RNA, 19 nt, Artificial Sequence
  Description of Artificial Sequence: Synthetic oligonucleotide
gaagggcucaucagcgagg

SEQ ID NO: 1166161 - RNA, 19 nt, Artificial Sequence
  Description of Artificial Sequence: Synthetic oligonucleotide
uaucucugggcaacaugga

SEQ ID NO: 1166162 - RNA, 19 nt, Artificial Sequence
  Description of Artificial Sequence: Synthetic oligonucleotide
ucaucccgagaugugaacu

SEQ ID NO: 1166163 - RNA, 19 nt, Artificial Sequence
  Description of Artificial Sequence: Synthetic oligonucleotide
ugguuugggaaaggggaag

SEQ ID NO: 1166164 - RNA, 19 nt, Artificial Sequence
  Description of Artificial Sequence: Synthetic oligonucleotide
ucucaggcacccauagaaa

SEQ ID NO: 1166165 - RNA, 19 nt, Artificial Sequence
  Description of Artificial Sequence: Synthetic oligonucleotide
uggugaugcugaguaagcc

SEQ ID NO: 1166166 - RNA, 19 nt, Artificial Sequence
  Description of Artificial Sequence: Synthetic oligonucleotide
gauguauuugcggccguac

SEQ ID NO: 1166167 - RNA, 19 nt, Artificial Sequence
  Description of Artificial Sequence: Synthetic oligonucleotide
gucucgauaugucacucca

SEQ ID NO: 1166168 - RNA, 19 nt, Artificial Sequence
  Description of Artificial Sequence: Synthetic oligonucleotide
uugaugggugucccacaag

SEQ ID NO: 1166169 - RNA, 19 nt, Artificial Sequence
  Description of Artificial Sequence: Synthetic oligonucleotide
uccacccugggucagcguc

SEQ ID NO: 1166170 - RNA, 19 nt, Artificial Sequence
  Description of Artificial Sequence: Synthetic oligonucleotide
gaacccuugguuugggaaa

SEQ ID NO: 1166171 - RNA, 19 nt, Artificial Sequence
  Description of Artificial Sequence: Synthetic oligonucleotide
acaccgaggagcaaacuug

SEQ ID NO: 1166172 - RNA, 19 nt, Artificial Sequence
  Description of Artificial Sequence: Synthetic oligonucleotide
cuggguaugcuggaauuag

SEQ ID NO: 1166173 - RNA, 19 nt, Artificial Sequence
  Description of Artificial Sequence: Synthetic oligonucleotide
cugguacgaagccuuggcc

SEQ ID NO: 1166174 - RNA, 19 nt, Artificial Sequence
  Description of Artificial Sequence: Synthetic oligonucleotide
auguauuugcggccguaca

SEQ ID NO: 1166175 - RNA, 19 nt, Artificial Sequence
  Description of Artificial Sequence: Synthetic oligonucleotide
auagcaaggcacgcaguag

SEQ ID NO: 1166176 - RNA, 19 nt, Artificial Sequence
  Description of Artificial Sequence: Synthetic oligonucleotide
ucucgauaugucacuccac

SEQ ID NO: 1166177 - RNA, 19 nt, Artificial Sequence
  Description of Artificial Sequence: Synthetic oligonucleotide
cuaccugcgggccgggacg

SEQ ID NO: 1166178 - RNA, 19 nt, Artificial Sequence
  Description of Artificial Sequence: Synthetic oligonucleotide
cuagauuuaaggaggccua

SEQ ID NO: 1166179 - RNA, 19 nt, Artificial Sequence
  Description of Artificial Sequence: Synthetic oligonucleotide
ucauagcaaggcacgcagu

SEQ ID NO: 1166180 - RNA, 19 nt, Artificial Sequence
  Description of Artificial Sequence: Synthetic oligonucleotide
gaaucaugcccgaugagcu

SEQ ID NO: 1166181 - RNA, 19 nt, Artificial Sequence
  Description of Artificial Sequence: Synthetic oligonucleotide
auagacggacagcacccug

SEQ ID NO: 1166182 - RNA, 19 nt, Artificial Sequence
  Description of Artificial Sequence: Synthetic oligonucleotide
ccuaaucugcuauccaggc

SEQ ID NO: 1166183 - RNA, 19 nt, Artificial Sequence
  Description of Artificial Sequence: Synthetic oligonucleotide
uagauuuaaggaggccuac

SEQ ID NO: 1166184 - RNA, 19 nt, Artificial Sequence
  Description of Artificial Sequence: Synthetic oligonucleotide
cacggcuccuaccugcggg

SEQ ID NO: 1166185 - RNA, 19 nt, Artificial Sequence
  Description of Artificial Sequence: Synthetic oligonucleotide
gaaucuggaagugggguaa

SEQ ID NO: 1166186 - RNA, 19 nt, Artificial Sequence
  Description of Artificial Sequence: Synthetic oligonucleotide
agagaguaccagcugggua

SEQ ID NO: 1166187 - RNA, 19 nt, Artificial Sequence
  Description of Artificial Sequence: Synthetic oligonucleotide
gcggaaaagggugggaugg

SEQ ID NO: 1166188 - RNA, 19 nt, Artificial Sequence
  Description of Artificial Sequence: Synthetic oligonucleotide
caugccaugucuggccucc

SEQ ID NO: 1166189 - RNA, 19 nt, Artificial Sequence
  Description of Artificial Sequence: Synthetic oligonucleotide
guucacacccacugcauaa

SEQ ID NO: 1166190 - RNA, 19 nt, Artificial Sequence
  Description of Artificial Sequence: Synthetic oligonucleotide
ccuugguuugggaaagggg

SEQ ID NO: 1166191 - RNA, 19 nt, Artificial Sequence
  Description of Artificial Sequence: Synthetic oligonucleotide
aggaggccuacguccagag

SEQ ID NO: 1166192 - RNA, 19 nt, Artificial Sequence
  Description of Artificial Sequence: Synthetic oligonucleotide
gagccgaucgccccacggc

SEQ ID NO: 1166193 - RNA, 19 nt, Artificial Sequence
  Description of Artificial Sequence: Synthetic oligonucleotide
cccuaaucugcuauccagg

SEQ ID NO: 1166194 - RNA, 19 nt, Artificial Sequence
  Description of Artificial Sequence: Synthetic oligonucleotide
cauacuccagcuuccggga

SEQ ID NO: 1166195 - RNA, 19 nt, Artificial Sequence
  Description of Artificial Sequence: Synthetic oligonucleotide
gcauaagaagcaauguuca

SEQ ID NO: 1166196 - RNA, 19 nt, Artificial Sequence
  Description of Artificial Sequence: Synthetic oligonucleotide
gagccuugaucuagggaag

SEQ ID NO: 1166197 - RNA, 19 nt, Artificial Sequence
  Description of Artificial Sequence: Synthetic oligonucleotide
ggggauggggucaaacugg

SEQ ID NO: 1166198 - RNA, 19 nt, Artificial Sequence
  Description of Artificial Sequence: Synthetic oligonucleotide
gacucauuucuggagucca

SEQ ID NO: 1166199 - RNA, 19 nt, Artificial Sequence
  Description of Artificial Sequence: Synthetic oligonucleotide
cuucgaaggacacauacuu

SEQ ID NO: 1166200 - RNA, 19 nt, Artificial Sequence
  Description of Artificial Sequence: Synthetic oligonucleotide
gaucaucaucccgagaugu

SEQ ID NO: 1166201 - RNA, 19 nt, Artificial Sequence
  Description of Artificial Sequence: Synthetic oligonucleotide
aggagcaaacuuguucuca

SEQ ID NO: 1166202 - RNA, 19 nt, Artificial Sequence
  Description of Artificial Sequence: Synthetic oligonucleotide
augacucuccaaccaggca

SEQ ID NO: 1166203 - RNA, 19 nt, Artificial Sequence
  Description of Artificial Sequence: Synthetic oligonucleotide
aaucuaucuuugaggacuu

SEQ ID NO: 1166204 - RNA, 19 nt, Artificial Sequence
  Description of Artificial Sequence: Synthetic oligonucleotide
cacgcaguagugagcgccc

SEQ ID NO: 1166205 - RNA, 19 nt, Artificial Sequence
  Description of Artificial Sequence: Synthetic oligonucleotide
gacagcacccuguaccuua

SEQ ID NO: 1166206 - RNA, 19 nt, Artificial Sequence
  Description of Artificial Sequence: Synthetic oligonucleotide
gagagccgcggagagguag

SEQ ID NO: 1166207 - RNA, 19 nt, Artificial Sequence
  Description of Artificial Sequence: Synthetic oligonucleotide
guggcgauccucauagaac

SEQ ID NO: 1166208 - RNA, 19 nt, Artificial Sequence
  Description of Artificial Sequence: Synthetic oligonucleotide
ucccgagaugugaacugcu

SEQ ID NO: 1166209 - RNA, 19 nt, Artificial Sequence
  Description of Artificial Sequence: Synthetic oligonucleotide
caauguucaugccaugucu

SEQ ID NO: 1166210 - RNA, 19 nt, Artificial Sequence
  Description of Artificial Sequence: Synthetic oligonucleotide
ucuauccaguaagucuaga

SEQ ID NO: 1166211 - RNA, 19 nt, Artificial Sequence
  Description of Artificial Sequence: Synthetic oligonucleotide
cuaaucugcuauccaggca

SEQ ID NO: 1166212 - RNA, 19 nt, Artificial Sequence
  Description of Artificial Sequence: Synthetic oligonucleotide
agugagcgcccuugucagg

SEQ ID NO: 1166213 - RNA, 19 nt, Artificial Sequence
  Description of Artificial Sequence: Synthetic oligonucleotide
gcugaaauaaagugguacu

SEQ ID NO: 1166214 - RNA, 19 nt, Artificial Sequence
  Description of Artificial Sequence: Synthetic oligonucleotide
ucccaccugugauggggcg

SEQ ID NO: 1166215 - RNA, 19 nt, Artificial Sequence
  Description of Artificial Sequence: Synthetic oligonucleotide
uugaacccuugguuuggga

SEQ ID NO: 1166216 - RNA, 19 nt, Artificial Sequence
  Description of Artificial Sequence: Synthetic oligonucleotide
cauagcaaggcacgcagua

SEQ ID NO: 1166217 - RNA, 19 nt, Artificial Sequence
  Description of Artificial Sequence: Synthetic oligonucleotide
agagccgcggagagguagc

SEQ ID NO: 1166218 - RNA, 19 nt, Artificial Sequence
  Description of Artificial Sequence: Synthetic oligonucleotide
uugcggccguacaaggacu

SEQ ID NO: 1166219 - RNA, 19 nt, Artificial Sequence
  Description of Artificial Sequence: Synthetic oligonucleotide
ggcgaagguguugucauag

SEQ ID NO: 1166220 - RNA, 19 nt, Artificial Sequence
  Description of Artificial Sequence: Synthetic oligonucleotide
guacucauagacggacagc

SEQ ID NO: 1166221 - RNA, 19 nt, Artificial Sequence
  Description of Artificial Sequence: Synthetic oligonucleotide
cuccgucugguacgaagcc

SEQ ID NO: 1166222 - RNA, 19 nt, Artificial Sequence
  Description of Artificial Sequence: Synthetic oligonucleotide
gagagagccgcggagaggu

SEQ ID NO: 1166223 - RNA, 19 nt, Artificial Sequence
  Description of Artificial Sequence: Synthetic oligonucleotide
gggugugugugucuagagc

SEQ ID NO: 1166224 - RNA, 19 nt, Artificial Sequence
  Description of Artificial Sequence: Synthetic oligonucleotide
ccuugaaucaugcccgaug

SEQ ID NO: 1166225 - RNA, 19 nt, Artificial Sequence
  Description of Artificial Sequence: Synthetic oligonucleotide
agccggcugcgacagacug

SEQ ID NO: 1166226 - RNA, 19 nt, Artificial Sequence
  Description of Artificial Sequence: Synthetic oligonucleotide
gugagcgcccuugucaggc

SEQ ID NO: 1166227 - RNA, 19 nt, Artificial Sequence
  Description of Artificial Sequence: Synthetic oligonucleotide
gguacgaagccuuggccca

SEQ ID NO: 1166228 - RNA, 19 nt, Artificial Sequence
  Description of Artificial Sequence: Synthetic oligonucleotide
agccgaucgccccacggcu

SEQ ID NO: 1166229 - RNA, 19 nt, Artificial Sequence
  Description of Artificial Sequence: Synthetic oligonucleotide
ggcaacauggagcugaaau

SEQ ID NO: 1166230 - RNA, 19 nt, Artificial Sequence
  Description of Artificial Sequence: Synthetic oligonucleotide
ucauggaaguggcgauccu

SEQ ID NO: 1166231 - RNA, 19 nt, Artificial Sequence
  Description of Artificial Sequence: Synthetic oligonucleotide
ggccauucuaaggaggggc

SEQ ID NO: 1166232 - RNA, 19 nt, Artificial Sequence
  Description of Artificial Sequence: Synthetic oligonucleotide
ggaggccauucuaaggagg

SEQ ID NO: 1166233 - RNA, 19 nt, Artificial Sequence
  Description of Artificial Sequence: Synthetic oligonucleotide
ggacucacugcauuuugca

SEQ ID NO: 1166234 - RNA, 19 nt, Artificial Sequence
  Description of Artificial Sequence: Synthetic oligonucleotide
gagguagccggcugcgaca

SEQ ID NO: 1166235 - RNA, 19 nt, Artificial Sequence
  Description of Artificial Sequence: Synthetic oligonucleotide
cuugggugcaaagaguucu

SEQ ID NO: 1166236 - RNA, 19 nt, Artificial Sequence
  Description of Artificial Sequence: Synthetic oligonucleotide
cucccaccugugauggggc

SEQ ID NO: 1166237 - RNA, 19 nt, Artificial Sequence
  Description of Artificial Sequence: Synthetic oligonucleotide
uggauguauuugcggccgu

SEQ ID NO: 1166238 - RNA, 19 nt, Artificial Sequence
  Description of Artificial Sequence: Synthetic oligonucleotide
auagaacaguucccuugaa

SEQ ID NO: 1166239 - RNA, 19 nt, Artificial Sequence
  Description of Artificial Sequence: Synthetic oligonucleotide
ugucuagagccuugaucua

SEQ ID NO: 1166240 - RNA, 19 nt, Artificial Sequence
  Description of Artificial Sequence: Synthetic oligonucleotide
gcaacauggagcugaaaua

SEQ ID NO: 1166241 - RNA, 19 nt, Artificial Sequence
  Description of Artificial Sequence: Synthetic oligonucleotide
aggccuacguccagaguuc

SEQ ID NO: 1166242 - RNA, 19 nt, Artificial Sequence
  Description of Artificial Sequence: Synthetic oligonucleotide
uccgucugguacgaagccu

SEQ ID NO: 1166243 - RNA, 19 nt, Artificial Sequence
  Description of Artificial Sequence: Synthetic oligonucleotide
caucgcggaaaaggguggg

SEQ ID NO: 1166244 - RNA, 19 nt, Artificial Sequence
  Description of Artificial Sequence: Synthetic oligonucleotide
uccagacuugaagaacuua

SEQ ID NO: 1166245 - RNA, 19 nt, Artificial Sequence
  Description of Artificial Sequence: Synthetic oligonucleotide
gcaauguucaugccauguc

SEQ ID NO: 1166246 - RNA, 19 nt, Artificial Sequence
  Description of Artificial Sequence: Synthetic oligonucleotide
guaccuuaugacucuccaa

SEQ ID NO: 1166247 - RNA, 19 nt, Artificial Sequence
  Description of Artificial Sequence: Synthetic oligonucleotide
cuggaauuaggagacugaa

SEQ ID NO: 1166248 - RNA, 19 nt, Artificial Sequence
  Description of Artificial Sequence: Synthetic oligonucleotide
ugcggccguacaaggacuc

SEQ ID NO: 1166249 - RNA, 19 nt, Artificial Sequence
  Description of Artificial Sequence: Synthetic oligonucleotide
gguguugucauagcaggga

SEQ ID NO: 1166250 - RNA, 19 nt, Artificial Sequence
  Description of Artificial Sequence: Synthetic oligonucleotide
ggucucgauaugucacucc

SEQ ID NO: 1166251 - RNA, 19 nt, Artificial Sequence
  Description of Artificial Sequence: Synthetic oligonucleotide
cugccuaucucugggcaac

SEQ ID NO: 1166252 - RNA, 19 nt, Artificial Sequence
  Description of Artificial Sequence: Synthetic oligonucleotide
agccggccgagagagccgc

SEQ ID NO: 1166253 - RNA, 19 nt, Artificial Sequence
  Description of Artificial Sequence: Synthetic oligonucleotide
aggccauucuaaggagggg

SEQ ID NO: 1166254 - RNA, 19 nt, Artificial Sequence
  Description of Artificial Sequence: Synthetic oligonucleotide
agugguacucauagacgga

SEQ ID NO: 1166255 - RNA, 19 nt, Artificial Sequence
  Description of Artificial Sequence: Synthetic oligonucleotide
ucgcggaaaagggugggau

SEQ ID NO: 1166256 - RNA, 19 nt, Artificial Sequence
  Description of Artificial Sequence: Synthetic oligonucleotide
agaguaccagcuggguaug

SEQ ID NO: 1166257 - RNA, 19 nt, Artificial Sequence
  Description of Artificial Sequence: Synthetic oligonucleotide
ugcagccucgccgccacug

SEQ ID NO: 1166258 - RNA, 19 nt, Artificial Sequence
  Description of Artificial Sequence: Synthetic oligonucleotide
uacguccagaguucagguu

SEQ ID NO: 1166259 - RNA, 19 nt, Artificial Sequence
  Description of Artificial Sequence: Synthetic oligonucleotide
ucaugcccgaugagcugcu

SEQ ID NO: 1166260 - RNA, 19 nt, Artificial Sequence
  Description of Artificial Sequence: Synthetic oligonucleotide
ccguacaaggacucacugc

SEQ ID NO: 1166261 - RNA, 19 nt, Artificial Sequence
  Description of Artificial Sequence: Synthetic oligonucleotide
aucgccccacggcuccuac

SEQ ID NO: 1166262 - RNA, 19 nt, Artificial Sequence
  Description of Artificial Sequence: Synthetic oligonucleotide
caucaucccgagaugugaa

SEQ ID NO: 1166263 - RNA, 19 nt, Artificial Sequence
  Description of Artificial Sequence: Synthetic oligonucleotide
uggucucgauaugucacuc

SEQ ID NO: 1166264 - RNA, 19 nt, Artificial Sequence
  Description of Artificial Sequence: Synthetic oligonucleotide
caggcaugacagucucccc

SEQ ID NO: 1166265 - RNA, 19 nt, Artificial Sequence
  Description of Artificial Sequence: Synthetic oligonucleotide
auuugcggccguacaagga

SEQ ID NO: 1166266 - RNA, 19 nt, Artificial Sequence
  Description of Artificial Sequence: Synthetic oligonucleotide
ccaaugccggucuucgaag

SEQ ID NO: 1166267 - RNA, 19 nt, Artificial Sequence
  Description of Artificial Sequence: Synthetic oligonucleotide
ccgaggagcaaacuuguuc

SEQ ID NO: 1166268 - RNA, 19 nt, Artificial Sequence
  Description of Artificial Sequence: Synthetic oligonucleotide
ugggcaacauggagcugaa

SEQ ID NO: 1166269 - RNA, 19 nt, Artificial Sequence
  Description of Artificial Sequence: Synthetic oligonucleotide
cuugucaggcacgaaggaa

SEQ ID NO: 1166270 - RNA, 19 nt, Artificial Sequence
  Description of Artificial Sequence: Synthetic oligonucleotide
ggagccgaucgccccacgg

SEQ ID NO: 1166271 - RNA, 19 nt, Artificial Sequence
  Description of Artificial Sequence: Synthetic oligonucleotide
ggaguccagacuugaagaa

SEQ ID NO: 1166272 - RNA, 19 nt, Artificial Sequence
  Description of Artificial Sequence: Synthetic oligonucleotide
gcacgcaguagugagcgcc

SEQ ID NO: 1166273 - RNA, 19 nt, Artificial Sequence
  Description of Artificial Sequence: Synthetic oligonucleotide
ccuuaugacucuccaacca

SEQ ID NO: 1166274 - RNA, 19 nt, Artificial Sequence
  Description of Artificial Sequence: Synthetic oligonucleotide
gggacgagccggccgagag

SEQ ID NO: 1166275 - RNA, 19 nt, Artificial Sequence
  Description of Artificial Sequence: Synthetic oligonucleotide
aggggccacugucugucug

SEQ ID NO: 1166276 - RNA, 19 nt, Artificial Sequence
  Description of Artificial Sequence: Synthetic oligonucleotide
augcugaguaagcccucga

SEQ ID NO: 1166277 - RNA, 19 nt, Artificial Sequence
  Description of Artificial Sequence: Synthetic oligonucleotide
gacggacagcacccuguac

SEQ ID NO: 1166278 - RNA, 19 nt, Artificial Sequence
  Description of Artificial Sequence: Synthetic oligonucleotide
ucaugccaugucuggccuc

SEQ ID NO: 1166279 - RNA, 19 nt, Artificial Sequence
  Description of Artificial Sequence: Synthetic oligonucleotide
gccguacaaggacucacug

SEQ ID NO: 1166280 - RNA, 19 nt, Artificial Sequence
  Description of Artificial Sequence: Synthetic oligonucleotide
cgagaugugaacugcuguc

SEQ ID NO: 1166281 - RNA, 19 nt, Artificial Sequence
  Description of Artificial Sequence: Synthetic oligonucleotide
gcugcacuugggugcaaag

SEQ ID NO: 1166282 - RNA, 19 nt, Artificial Sequence
  Description of Artificial Sequence: Synthetic oligonucleotide
uacgaagccuuggcccacc

SEQ ID NO: 1166283 - RNA, 19 nt, Artificial Sequence
  Description of Artificial Sequence: Synthetic oligonucleotide
cgaaggacacauacuugcc

SEQ ID NO: 1166284 - RNA, 19 nt, Artificial Sequence
  Description of Artificial Sequence: Synthetic oligonucleotide
cugcauaagaagcaauguu

SEQ ID NO: 1166285 - RNA, 19 nt, Artificial Sequence
  Description of Artificial Sequence: Synthetic oligonucleotide
agacggacagcacccugua

SEQ ID NO: 1166286 - RNA, 19 nt, Artificial Sequence
  Description of Artificial Sequence: Synthetic oligonucleotide
ggggucuugcacccagugc

SEQ ID NO: 1166287 - RNA, 19 nt, Artificial Sequence
  Description of Artificial Sequence: Synthetic oligonucleotide
gcaguagugagcgcccuug

SEQ ID NO: 1166288 - RNA, 19 nt, Artificial Sequence
  Description of Artificial Sequence: Synthetic oligonucleotide
gggugcaaagaguucucca

SEQ ID NO: 1166289 - RNA, 19 nt, Artificial Sequence
  Description of Artificial Sequence: Synthetic oligonucleotide
uggucuccgucugguacga

SEQ ID NO: 1166290 - RNA, 19 nt, Artificial Sequence
  Description of Artificial Sequence: Synthetic oligonucleotide
gcaucgcggaaaagggugg

SEQ ID NO: 1166291 - RNA, 19 nt, Artificial Sequence
  Description of Artificial Sequence: Synthetic oligonucleotide
agccuugaucuagggaaga

SEQ ID NO: 1166292 - RNA, 19 nt, Artificial Sequence
  Description of Artificial Sequence: Synthetic oligonucleotide
gcacagaacuuggucuccg

SEQ ID NO: 1166293 - RNA, 19 nt, Artificial Sequence
  Description of Artificial Sequence: Synthetic oligonucleotide
gagcgcccuugucaggcac

SEQ ID NO: 1166294 - RNA, 19 nt, Artificial Sequence
  Description of Artificial Sequence: Synthetic oligonucleotide
cagucauuacagagaagcu

SEQ ID NO: 1166295 - RNA, 19 nt, Artificial Sequence
  Description of Artificial Sequence: Synthetic oligonucleotide
cuacguccagaguucaggu

SEQ ID NO: 1166296 - RNA, 19 nt, Artificial Sequence
  Description of Artificial Sequence: Synthetic oligonucleotide
cacuacacaggggcaggug

SEQ ID NO: 1166297 - RNA, 19 nt, Artificial Sequence
  Description of Artificial Sequence: Synthetic oligonucleotide
gguuugggaaaggggaaga

SEQ ID NO: 1166298 - RNA, 19 nt, Artificial Sequence
  Description of Artificial Sequence: Synthetic oligonucleotide
gccaaugccggucuucgaa

SEQ ID NO: 1166299 - RNA, 19 nt, Artificial Sequence
  Description of Artificial Sequence: Synthetic oligonucleotide
agcgcccuugucaggcacg

SEQ ID NO: 1166300 - RNA, 19 nt, Artificial Sequence
  Description of Artificial Sequence: Synthetic oligonucleotide
acccuugguuugggaaagg

SEQ ID NO: 1166301 - RNA, 19 nt, Artificial Sequence
  Description of Artificial Sequence: Synthetic oligonucleotide
gagccggccgagagagccg

SEQ ID NO: 1166302 - RNA, 19 nt, Artificial Sequence
  Description of Artificial Sequence: Synthetic oligonucleotide
aucgcggaaaaggguggga

SEQ ID NO: 1166303 - RNA, 19 nt, Artificial Sequence
  Description of Artificial Sequence: Synthetic oligonucleotide
agcccucgaagcgggcgcg

SEQ ID NO: 1166304 - RNA, 19 nt, Artificial Sequence
  Description of Artificial Sequence: Synthetic oligonucleotide
cccgagaugugaacugcug

SEQ ID NO: 1166305 - RNA, 19 nt, Artificial Sequence
  Description of Artificial Sequence: Synthetic oligonucleotide
agccgcggagagguagccg

SEQ ID NO: 1166306 - RNA, 19 nt, Artificial Sequence
  Description of Artificial Sequence: Synthetic oligonucleotide
acgaagccuuggcccacca

SEQ ID NO: 1166307 - RNA, 19 nt, Artificial Sequence
  Description of Artificial Sequence: Synthetic oligonucleotide
ucgccccacggcuccuacc

SEQ ID NO: 1166308 - RNA, 19 nt, Artificial Sequence
  Description of Artificial Sequence: Synthetic oligonucleotide
caccgaggagcaaacuugu

SEQ ID NO: 1166309 - RNA, 19 nt, Artificial Sequence
  Description of Artificial Sequence: Synthetic oligonucleotide
ggccgagagagccgcggag

SEQ ID NO: 1166310 - RNA, 19 nt, Artificial Sequence
  Description of Artificial Sequence: Synthetic oligonucleotide
agcccucauggaaguggcg

SEQ ID NO: 1166311 - RNA, 19 nt, Artificial Sequence
  Description of Artificial Sequence: Synthetic oligonucleotide
cccgaugagcugcuggcac

SEQ ID NO: 1166312 - RNA, 19 nt, Artificial Sequence
  Description of Artificial Sequence: Synthetic oligonucleotide
gagccgcggagagguagcc

SEQ ID NO: 1166313 - RNA, 19 nt, Artificial Sequence
  Description of Artificial Sequence: Synthetic oligonucleotide
ggcgauccucauagaacag

SEQ ID NO: 1166314 - RNA, 19 nt, Artificial Sequence
  Description of Artificial Sequence: Synthetic oligonucleotide
cacaccgaggagcaaacuu

SEQ ID NO: 1166315 - RNA, 19 nt, Artificial Sequence
  Description of Artificial Sequence: Synthetic oligonucleotide
acgaaggaacgggagccua

SEQ ID NO: 1166316 - RNA, 19 nt, Artificial Sequence
  Description of Artificial Sequence: Synthetic oligonucleotide
cgaaggaacgggagccuag

SEQ ID NO: 1166317 - RNA, 19 nt, Artificial Sequence
  Description of Artificial Sequence: Synthetic oligonucleotide
gggugcaaucuaucuuuga

SEQ ID NO: 1166318 - RNA, 19 nt, Artificial Sequence
  Description of Artificial Sequence: Synthetic oligonucleotide
uaccugcgggccgggacga

SEQ ID NO: 1166319 - RNA, 19 nt, Artificial Sequence
  Description of Artificial Sequence: Synthetic oligonucleotide
guacgaagccuuggcccac

SEQ ID NO: 1166320 - RNA, 19 nt, Artificial Sequence
  Description of Artificial Sequence: Synthetic oligonucleotide
ggagcgcuggcagcggcag

SEQ ID NO: 1166321 - RNA, 19 nt, Artificial Sequence
  Description of Artificial Sequence: Synthetic oligonucleotide
ccuaccugcgggccgggac

SEQ ID NO: 1166322 - RNA, 19 nt, Artificial Sequence
  Description of Artificial Sequence: Synthetic oligonucleotide
cugcaucgcggaaaagggu

SEQ ID NO: 1166323 - RNA, 19 nt, Artificial Sequence
  Description of Artificial Sequence: Synthetic oligonucleotide
guaagcccucgaagcgggc

SEQ ID NO: 1166324 - RNA, 19 nt, Artificial Sequence
  Description of Artificial Sequence: Synthetic oligonucleotide
ggcacaccgaggagcaaac

SEQ ID NO: 1166325 - RNA, 19 nt, Artificial Sequence
  Description of Artificial Sequence: Synthetic oligonucleotide
ggugccaaugccggucuuc

SEQ ID NO: 1166326 - RNA, 19 nt, Artificial Sequence
  Description of Artificial Sequence: Synthetic oligonucleotide
caucagcgagggagcgcug

SEQ ID NO: 1166327 - RNA, 19 nt, Artificial Sequence
  Description of Artificial Sequence: Synthetic oligonucleotide
gagagguagccggcugcga

SEQ ID NO: 1166328 - RNA, 19 nt, Artificial Sequence
  Description of Artificial Sequence: Synthetic oligonucleotide
ccucugcacuacacagggg

SEQ ID NO: 1166329 - RNA, 19 nt, Artificial Sequence
  Description of Artificial Sequence: Synthetic oligonucleotide
gccuugaucuagggaagac

SEQ ID NO: 1166330 - RNA, 19 nt, Artificial Sequence
  Description of Artificial Sequence: Synthetic oligonucleotide
ccugaagccucugcacuac

SEQ ID NO: 1166331 - RNA, 19 nt, Artificial Sequence
  Description of Artificial Sequence: Synthetic oligonucleotide
guggugccaaugccggucu

SEQ ID NO: 1166332 - RNA, 19 nt, Artificial Sequence
  Description of Artificial Sequence: Synthetic oligonucleotide
acagcacccuguaccuuau

SEQ ID NO: 1166333 - RNA, 19 nt, Artificial Sequence
  Description of Artificial Sequence: Synthetic oligonucleotide
cagcgggcacaccgaggag

SEQ ID NO: 1166334 - RNA, 19 nt, Artificial Sequence
  Description of Artificial Sequence: Synthetic oligonucleotide
ccgaucgccccacggcucc

SEQ ID NO: 1166335 - RNA, 19 nt, Artificial Sequence
  Description of Artificial Sequence: Synthetic oligonucleotide
cgcggaaaagggugggaug

SEQ ID NO: 1166336 - RNA, 19 nt, Artificial Sequence
  Description of Artificial Sequence: Synthetic oligonucleotide
ggguuggucucgauauguc

SEQ ID NO: 1166337 - RNA, 19 nt, Artificial Sequence
  Description of Artificial Sequence: Synthetic oligonucleotide
acgcaguagugagcgcccu

SEQ ID NO: 1166338 - RNA, 19 nt, Artificial Sequence
  Description of Artificial Sequence: Synthetic oligonucleotide
gccgggagccgaucgcccc

SEQ ID NO: 1166339 - RNA, 19 nt, Artificial Sequence
  Description of Artificial Sequence: Synthetic oligonucleotide
gccccuaaucugcuaucca

SEQ ID NO: 1166340 - RNA, 19 nt, Artificial Sequence
  Description of Artificial Sequence: Synthetic oligonucleotide
gcgagggagcgcuggcagc

SEQ ID NO: 1166341 - RNA, 19 nt, Artificial Sequence
  Description of Artificial Sequence: Synthetic oligonucleotide
ccucauagaacaguucccu

SEQ ID NO: 1166342 - RNA, 19 nt, Artificial Sequence
  Description of Artificial Sequence: Synthetic oligonucleotide
ccuugucaggcacgaagga

SEQ ID NO: 1166343 - RNA, 19 nt, Artificial Sequence
  Description of Artificial Sequence: Synthetic oligonucleotide
acgggagccuagaggcugu

SEQ ID NO: 1166344 - RNA, 19 nt, Artificial Sequence
  Description of Artificial Sequence: Synthetic oligonucleotide
gccaggguuggucucgaua

SEQ ID NO: 1166345 - RNA, 19 nt, Artificial Sequence
  Description of Artificial Sequence: Synthetic oligonucleotide
cgauaugucacuccacccu

SEQ ID NO: 1166346 - RNA, 19 nt, Artificial Sequence
  Description of Artificial Sequence: Synthetic oligonucleotide
gccucgcucauggugguga

SEQ ID NO: 1166347 - RNA, 19 nt, Artificial Sequence
  Description of Artificial Sequence: Synthetic oligonucleotide
augccaggguuggucucga

SEQ ID NO: 1166348 - RNA, 19 nt, Artificial Sequence
  Description of Artificial Sequence: Synthetic oligonucleotide
gaacgggagccuagaggcu

SEQ ID NO: 1166349 - RNA, 19 nt, Artificial Sequence
  Description of Artificial Sequence: Synthetic oligonucleotide
gccgggacgagccggccga

SEQ ID NO: 1166350 - RNA, 19 nt, Artificial Sequence
  Description of Artificial Sequence: Synthetic oligonucleotide
uccuaccugcgggccggga

SEQ ID NO: 1166351 - RNA, 19 nt, Artificial Sequence
  Description of Artificial Sequence: Synthetic oligonucleotide
cauagacggacagcacccu

SEQ ID NO: 1166352 - RNA, 19 nt, Artificial Sequence
  Description of Artificial Sequence: Synthetic oligonucleotide
gcaugacagucuccccaca

SEQ ID NO: 1166353 - RNA, 19 nt, Artificial Sequence
  Description of Artificial Sequence: Synthetic oligonucleotide
ugccaggguuggucucgau

SEQ ID NO: 1166354 - RNA, 19 nt, Artificial Sequence
  Description of Artificial Sequence: Synthetic oligonucleotide
ccuguaccuuaugacucuc

SEQ ID NO: 1166355 - RNA, 19 nt, Artificial Sequence
  Description of Artificial Sequence: Synthetic oligonucleotide
caaccaggcagccccuaau

SEQ ID NO: 1166356 - RNA, 19 nt, Artificial Sequence
  Description of Artificial Sequence: Synthetic oligonucleotide
cagagaguaccagcugggu

SEQ ID NO: 1166357 - RNA, 19 nt, Artificial Sequence
  Description of Artificial Sequence: Synthetic oligonucleotide
gcgauccucauagaacagu

SEQ ID NO: 1166358 - RNA, 19 nt, Artificial Sequence
  Description of Artificial Sequence: Synthetic oligonucleotide
gccuacguccagaguucag

SEQ ID NO: 1166359 - RNA, 19 nt, Artificial Sequence
  Description of Artificial Sequence: Synthetic oligonucleotide
caguagugagcgcccuugu

SEQ ID NO: 1166360 - RNA, 19 nt, Artificial Sequence
  Description of Artificial Sequence: Synthetic oligonucleotide
guacaaggacucacugcau

SEQ ID NO: 1166361 - RNA, 19 nt, Artificial Sequence
  Description of Artificial Sequence: Synthetic oligonucleotide
ccgagaugugaacugcugu

SEQ ID NO: 1166362 - RNA, 19 nt, Artificial Sequence
  Description of Artificial Sequence: Synthetic oligonucleotide
ccuugaucuagggaagacu

SEQ ID NO: 1166363 - RNA, 19 nt, Artificial Sequence
  Description of Artificial Sequence: Synthetic oligonucleotide
gcugcagcgggcacaccga

SEQ ID NO: 1166364 - RNA, 19 nt, Artificial Sequence
  Description of Artificial Sequence: Synthetic oligonucleotide
gggagccgaucgccccacg

SEQ ID NO: 1166365 - RNA, 19 nt, Artificial Sequence
  Description of Artificial Sequence: Synthetic oligonucleotide
cuccuaccugcgggccggg

SEQ ID NO: 1166366 - RNA, 19 nt, Artificial Sequence
  Description of Artificial Sequence: Synthetic oligonucleotide
cgagagagccgcggagagg

SEQ ID NO: 1166367 - RNA, 19 nt, Artificial Sequence
  Description of Artificial Sequence: Synthetic oligonucleotide
gucccacaagagcccagau

SEQ ID NO: 1166368 - RNA, 19 nt, Artificial Sequence
  Description of Artificial Sequence: Synthetic oligonucleotide
cacgaaggaacgggagccu

SEQ ID NO: 1166369 - RNA, 19 nt, Artificial Sequence
  Description of Artificial Sequence: Synthetic oligonucleotide
ggccuacguccagaguuca

SEQ ID NO: 1166370 - RNA, 19 nt, Artificial Sequence
  Description of Artificial Sequence: Synthetic oligonucleotide
ggggucaaacuggggugca

SEQ ID NO: 1166371 - RNA, 19 nt, Artificial Sequence
  Description of Artificial Sequence: Synthetic oligonucleotide
ccugcgggccgggacgagc

SEQ ID NO: 1166372 - RNA, 19 nt, Artificial Sequence
  Description of Artificial Sequence: Synthetic oligonucleotide
ccgggacccaggcaugaca

SEQ ID NO: 1166373 - RNA, 19 nt, Artificial Sequence
  Description of Artificial Sequence: Synthetic oligonucleotide
cccuguaccuuaugacucu

SEQ ID NO: 1166374 - RNA, 19 nt, Artificial Sequence
  Description of Artificial Sequence: Synthetic oligonucleotide
ggccgggagccgaucgccc

SEQ ID NO: 1166375 - RNA, 19 nt, Artificial Sequence
  Description of Artificial Sequence: Synthetic oligonucleotide
ggccguacaaggacucacu

SEQ ID NO: 1166376 - RNA, 19 nt, Artificial Sequence
  Description of Artificial Sequence: Synthetic oligonucleotide
gaucgccccacggcuccua

SEQ ID NO: 1166377 - RNA, 19 nt, Artificial Sequence
  Description of Artificial Sequence: Synthetic oligonucleotide
cggccguacaaggacucac

SEQ ID NO: 1166378 - RNA, 19 nt, Artificial Sequence
  Description of Artificial Sequence: Synthetic oligonucleotide
gggauggggauggggucaa

SEQ ID NO: 1166379 - RNA, 19 nt, Artificial Sequence
  Description of Artificial Sequence: Synthetic oligonucleotide
cuccaaccaggcagccccu

SEQ ID NO: 1166380 - RNA, 19 nt, Artificial Sequence
  Description of Artificial Sequence: Synthetic oligonucleotide
gcgcccuugucaggcacga

SEQ ID NO: 1166381 - RNA, 19 nt, Artificial Sequence
  Description of Artificial Sequence: Synthetic oligonucleotide
agagagccgcggagaggua

SEQ ID NO: 1166382 - RNA, 19 nt, Artificial Sequence
  Description of Artificial Sequence: Synthetic oligonucleotide
cagccucgccgccacugcu

SEQ ID NO: 1166383 - RNA, 19 nt, Artificial Sequence
  Description of Artificial Sequence: Synthetic oligonucleotide
cggucuucgaaggacacau

SEQ ID NO: 1166384 - RNA, 19 nt, Artificial Sequence
  Description of Artificial Sequence: Synthetic oligonucleotide
cgcgcgcgggcgugggugg

SEQ ID NO: 1166385 - RNA, 19 nt, Artificial Sequence
  Description of Artificial Sequence: Synthetic oligonucleotide
gcggccguacaaggacuca

SEQ ID NO: 1166386 - RNA, 19 nt, Artificial Sequence
  Description of Artificial Sequence: Synthetic oligonucleotide
gcacuacacaggggcaggu

SEQ ID NO: 1166387 - RNA, 19 nt, Artificial Sequence
  Description of Artificial Sequence: Synthetic oligonucleotide
gccggccgagagagccgcg

SEQ ID NO: 1166388 - RNA, 19 nt, Artificial Sequence
  Description of Artificial Sequence: Synthetic oligonucleotide
cggcuccuaccugcgggcc

SEQ ID NO: 1166389 - RNA, 19 nt, Artificial Sequence
  Description of Artificial Sequence: Synthetic oligonucleotide
gcacaccgaggagcaaacu

SEQ ID NO: 1166390 - RNA, 19 nt, Artificial Sequence
  Description of Artificial Sequence: Synthetic oligonucleotide
cgccccacggcuccuaccu

SEQ ID NO: 1166391 - RNA, 19 nt, Artificial Sequence
  Description of Artificial Sequence: Synthetic oligonucleotide
cacccugggucagcgucuu

SEQ ID NO: 1166392 - RNA, 19 nt, Artificial Sequence
  Description of Artificial Sequence: Synthetic oligonucleotide
ccgggacgagccggccgag

SEQ ID NO: 1166393 - RNA, 19 nt, Artificial Sequence
  Description of Artificial Sequence: Synthetic oligonucleotide
cgggagccgaucgccccac

SEQ ID NO: 1166394 - RNA, 19 nt, Artificial Sequence
  Description of Artificial Sequence: Synthetic oligonucleotide
ccucgcucaugguggugau

SEQ ID NO: 1166395 - RNA, 19 nt, Artificial Sequence
  Description of Artificial Sequence: Synthetic oligonucleotide
gguggggccgggagccgau

SEQ ID NO: 1166396 - RNA, 19 nt, Artificial Sequence
  Description of Artificial Sequence: Synthetic oligonucleotide
cccuugaaucaugcccgau

SEQ ID NO: 1166397 - RNA, 19 nt, Artificial Sequence
  Description of Artificial Sequence: Synthetic oligonucleotide
cgggacgagccggccgaga

SEQ ID NO: 1166398 - RNA, 19 nt, Artificial Sequence
  Description of Artificial Sequence: Synthetic oligonucleotide
cgggcacaccgaggagcaa

SEQ ID NO: 1166399 - RNA, 19 nt, Artificial Sequence
  Description of Artificial Sequence: Synthetic oligonucleotide
cgaucgccccacggcuccu

SEQ ID NO: 1166400 - RNA, 19 nt, Artificial Sequence
  Description of Artificial Sequence: Synthetic oligonucleotide
cgggagccuagaggcuguu

SEQ ID NO: 1166401 - RNA, 19 nt, Artificial Sequence
  Description of Artificial Sequence: Synthetic oligonucleotide
uuuccuauaaguuaaaacg

SEQ ID NO: 1166402 - RNA, 19 nt, Artificial Sequence
  Description of Artificial Sequence: Synthetic oligonucleotide
aaaucauggaucuccuugc

SEQ ID NO: 1166403 - RNA, 19 nt, Artificial Sequence
  Description of Artificial Sequence: Synthetic oligonucleotide
aaaaucugggaagaguugc

SEQ ID NO: 1166404 - RNA, 19 nt, Artificial Sequence
  Description of Artificial Sequence: Synthetic oligonucleotide
auuuccuauaaguuaaaac

SEQ ID NO: 1166405 - RNA, 19 nt, Artificial Sequence
  Description of Artificial Sequence: Synthetic oligonucleotide
aauacuggaggugucaccg

SEQ ID NO: 1166406 - RNA, 19 nt, Artificial Sequence
  Description of Artificial Sequence: Synthetic oligonucleotide
uauaaguuaaaacgugccc

SEQ ID NO: 1166407 - RNA, 19 nt, Artificial Sequence
  Description of Artificial Sequence: Synthetic oligonucleotide
uugacaaagaucaucucgc

SEQ ID NO: 1166408 - RNA, 19 nt, Artificial Sequence
  Description of Artificial Sequence: Synthetic oligonucleotide
aaagcucaggaacaaauca

SEQ ID NO: 1166409 - RNA, 19 nt, Artificial Sequence
  Description of Artificial Sequence: Synthetic oligonucleotide
aaacgugcccuuuuggcac

SEQ ID NO: 1166410 - RNA, 19 nt, Artificial Sequence
  Description of Artificial Sequence: Synthetic oligonucleotide
gaagaguugcuucacagcc

SEQ ID NO: 1166411 - RNA, 19 nt, Artificial Sequence
  Description of Artificial Sequence: Synthetic oligonucleotide
uccaguacaguccagggcc

SEQ ID NO: 1166412 - RNA, 19 nt, Artificial Sequence
  Description of Artificial Sequence: Synthetic oligonucleotide
cuauaaguuaaaacgugcc

SEQ ID NO: 1166413 - RNA, 19 nt, Artificial Sequence
  Description of Artificial Sequence: Synthetic oligonucleotide
uauauaauacuggaggugu

SEQ ID NO: 1166414 - RNA, 19 nt, Artificial Sequence
  Description of Artificial Sequence: Synthetic oligonucleotide
agugcuuaagcaugugggc

SEQ ID NO: 1166415 - RNA, 19 nt, Artificial Sequence
  Description of Artificial Sequence: Synthetic oligonucleotide
aagacaagucugcaugggg

SEQ ID NO: 1166416 - RNA, 19 nt, Artificial Sequence
  Description of Artificial Sequence: Synthetic oligonucleotide
uuccuauaaguuaaaacgu

SEQ ID NO: 1166417 - RNA, 19 nt, Artificial Sequence
  Description of Artificial Sequence: Synthetic oligonucleotide
uucuuuagcaaguuccaag

SEQ ID NO: 1166418 - RNA, 19 nt, Artificial Sequence
  Description of Artificial Sequence: Synthetic oligonucleotide
aagugcuuaagcauguggg

SEQ ID NO: 1166419 - RNA, 19 nt, Artificial Sequence
  Description of Artificial Sequence: Synthetic oligonucleotide
ggauaucucguucacaucg

SEQ ID NO: 1166420 - RNA, 19 nt, Artificial Sequence
  Description of Artificial Sequence: Synthetic oligonucleotide
uggacaaccaucaucggac

SEQ ID NO: 1166421 - RNA, 19 nt, Artificial Sequence
  Description of Artificial Sequence: Synthetic oligonucleotide
aaaacgugcccuuuuggca

SEQ ID NO: 1166422 - RNA, 19 nt, Artificial Sequence
  Description of Artificial Sequence: Synthetic oligonucleotide
aacgacaagucacacucag

SEQ ID NO: 1166423 - RNA, 19 nt, Artificial Sequence
  Description of Artificial Sequence: Synthetic oligonucleotide
uccuauaaguuaaaacgug

SEQ ID NO: 1166424 - RNA, 19 nt, Artificial Sequence
  Description of Artificial Sequence: Synthetic oligonucleotide
aauucaaaaucugggaaga

SEQ ID NO: 1166425 - RNA, 19 nt, Artificial Sequence
  Description of Artificial Sequence: Synthetic oligonucleotide
aagaucaucucgcuguaca

SEQ ID NO: 1166426 - RNA, 19 nt, Artificial Sequence
  Description of Artificial Sequence: Synthetic oligonucleotide
uaaaacgugcccuuuuggc

SEQ ID NO: 1166427 - RNA, 19 nt, Artificial Sequence
  Description of Artificial Sequence: Synthetic oligonucleotide
aaguucaugaagguugauc

SEQ ID NO: 1166428 - RNA, 19 nt, Artificial Sequence
  Description of Artificial Sequence: Synthetic oligonucleotide
aggcacgugguucaggagc

SEQ ID NO: 1166429 - RNA, 19 nt, Artificial Sequence
  Description of Artificial Sequence: Synthetic oligonucleotide
auaaguuaaaacgugcccu

SEQ ID NO: 1166430 - RNA, 19 nt, Artificial Sequence
  Description of Artificial Sequence: Synthetic oligonucleotide
aggagcacccucuuggugg

SEQ ID NO: 1166431 - RNA, 19 nt, Artificial Sequence
  Description of Artificial Sequence: Synthetic oligonucleotide
guggauacugagcauaaag

SEQ ID NO: 1166432 - RNA, 19 nt, Artificial Sequence
  Description of Artificial Sequence: Synthetic oligonucleotide
uguccaaugccucuuuuga

SEQ ID NO: 1166433 - RNA, 19 nt, Artificial Sequence
  Description of Artificial Sequence: Synthetic oligonucleotide
aacaccgagacauguugag

SEQ ID NO: 1166434 - RNA, 19 nt, Artificial Sequence
  Description of Artificial Sequence: Synthetic oligonucleotide
caccgugacagcaugaacc

SEQ ID NO: 1166435 - RNA, 19 nt, Artificial Sequence
  Description of Artificial Sequence: Synthetic oligonucleotide
uuuugacugagucccagga

SEQ ID NO: 1166436 - RNA, 19 nt, Artificial Sequence
  Description of Artificial Sequence: Synthetic oligonucleotide
gaggacaaucccuugcccg

SEQ ID NO: 1166437 - RNA, 19 nt, Artificial Sequence
  Description of Artificial Sequence: Synthetic oligonucleotide
aguccgaccaucaugcagc

SEQ ID NO: 1166438 - RNA, 19 nt, Artificial Sequence
  Description of Artificial Sequence: Synthetic oligonucleotide
cacaguccgaccaucaugc

SEQ ID NO: 1166439 - RNA, 19 nt, Artificial Sequence
  Description of Artificial Sequence: Synthetic oligonucleotide
uacaaagucuguucuuuag

SEQ ID NO: 1166440 - RNA, 19 nt, Artificial Sequence
  Description of Artificial Sequence: Synthetic oligonucleotide
acggcaguaguccaggcgg

SEQ ID NO: 1166441 - RNA, 19 nt, Artificial Sequence
  Description of Artificial Sequence: Synthetic oligonucleotide
aucgauccgguucuucucc

SEQ ID NO: 1166442 - RNA, 19 nt, Artificial Sequence
  Description of Artificial Sequence: Synthetic oligonucleotide
ccauggacaaccaucaucg

SEQ ID NO: 1166443 - RNA, 19 nt, Artificial Sequence
  Description of Artificial Sequence: Synthetic oligonucleotide
guugcuuuaucccucaguc

SEQ ID NO: 1166444 - RNA, 19 nt, Artificial Sequence
  Description of Artificial Sequence: Synthetic oligonucleotide
uguucuuuagcaaguucca

SEQ ID NO: 1166445 - RNA, 19 nt, Artificial Sequence
  Description of Artificial Sequence: Synthetic oligonucleotide
ugcacgaagccauugacaa

SEQ ID NO: 1166446 - RNA, 19 nt, Artificial Sequence
  Description of Artificial Sequence: Synthetic oligonucleotide
cugccaaaggcuaaaggcc

SEQ ID NO: 1166447 - RNA, 19 nt, Artificial Sequence
  Description of Artificial Sequence: Synthetic oligonucleotide
ugguccaagaggacaaucc

SEQ ID NO: 1166448 - RNA, 19 nt, Artificial Sequence
  Description of Artificial Sequence: Synthetic oligonucleotide
uguggcgagacaccuuugg

SEQ ID NO: 1166449 - RNA, 19 nt, Artificial Sequence
  Description of Artificial Sequence: Synthetic oligonucleotide
acaugaauucaaaaucugg

SEQ ID NO: 1166450 - RNA, 19 nt, Artificial Sequence
  Description of Artificial Sequence: Synthetic oligonucleotide
uuugggagugauauggcaa

SEQ ID NO: 1166451 - RNA, 19 nt, Artificial Sequence
  Description of Artificial Sequence: Synthetic oligonucleotide
acaacaccgagacauguug

SEQ ID NO: 1166452 - RNA, 19 nt, Artificial Sequence
  Description of Artificial Sequence: Synthetic oligonucleotide
auauauaauacuggaggug

SEQ ID NO: 1166453 - RNA, 19 nt, Artificial Sequence
  Description of Artificial Sequence: Synthetic oligonucleotide
ggaacgacaagucacacuc

SEQ ID NO: 1166454 - RNA, 19 nt, Artificial Sequence
  Description of Artificial Sequence: Synthetic oligonucleotide
cacgaagccauugacaaag

SEQ ID NO: 1166455 - RNA, 19 nt, Artificial Sequence
  Description of Artificial Sequence: Synthetic oligonucleotide
cugaaacauaucugggucc

SEQ ID NO: 1166456 - RNA, 19 nt, Artificial Sequence
  Description of Artificial Sequence: Synthetic oligonucleotide
ucggccagugcccugauac

SEQ ID NO: 1166457 - RNA, 19 nt, Artificial Sequence
  Description of Artificial Sequence: Synthetic oligonucleotide
aggaacuggcacuggaccg

SEQ ID NO: 1166458 - RNA, 19 nt, Artificial Sequence
  Description of Artificial Sequence: Synthetic oligonucleotide
ggaggugucaccgugacag

SEQ ID NO: 1166459 - RNA, 19 nt, Artificial Sequence
  Description of Artificial Sequence: Synthetic oligonucleotide
agccucaagcccuucacuc

SEQ ID NO: 1166460 - RNA, 19 nt, Artificial Sequence
  Description of Artificial Sequence: Synthetic oligonucleotide
acaaccaucaucggaccac

SEQ ID NO: 1166461 - RNA, 19 nt, Artificial Sequence
  Description of Artificial Sequence: Synthetic oligonucleotide
gacaaagaucaucucgcug

SEQ ID NO: 1166462 - RNA, 19 nt, Artificial Sequence
  Description of Artificial Sequence: Synthetic oligonucleotide
uuaucccucagucuccagu

SEQ ID NO: 1166463 - RNA, 19 nt, Artificial Sequence
  Description of Artificial Sequence: Synthetic oligonucleotide
cuugucguucaccugcccg

SEQ ID NO: 1166464 - RNA, 19 nt, Artificial Sequence
  Description of Artificial Sequence: Synthetic oligonucleotide
ugcggaguagcucauuggu

SEQ ID NO: 1166465 - RNA, 19 nt, Artificial Sequence
  Description of Artificial Sequence: Synthetic oligonucleotide
agcuaaagugcuuaagcau

SEQ ID NO: 1166466 - RNA, 19 nt, Artificial Sequence
  Description of Artificial Sequence: Synthetic oligonucleotide
ccugauacaacaccgagac

SEQ ID NO: 1166467 - RNA, 19 nt, Artificial Sequence
  Description of Artificial Sequence: Synthetic oligonucleotide
uuugagcuugaaccuucgg

SEQ ID NO: 1166468 - RNA, 19 nt, Artificial Sequence
  Description of Artificial Sequence: Synthetic oligonucleotide
accaucaucggaccacagg

SEQ ID NO: 1166469 - RNA, 19 nt, Artificial Sequence
  Description of Artificial Sequence: Synthetic oligonucleotide
ugcuuaagcaugugggcca

SEQ ID NO: 1166470 - RNA, 19 nt, Artificial Sequence
  Description of Artificial Sequence: Synthetic oligonucleotide
ucgcuguacaucuugccca

SEQ ID NO: 1166471 - RNA, 19 nt, Artificial Sequence
  Description of Artificial Sequence: Synthetic oligonucleotide
aaaggcuaaaggccucacu

SEQ ID NO: 1166472 - RNA, 19 nt, Artificial Sequence
  Description of Artificial Sequence: Synthetic oligonucleotide
uaguuggccgcauuacugc

SEQ ID NO: 1166473 - RNA, 19 nt, Artificial Sequence
  Description of Artificial Sequence: Synthetic oligonucleotide
ccuauaaguuaaaacgugc

SEQ ID NO: 1166474 - RNA, 19 nt, Artificial Sequence
  Description of Artificial Sequence: Synthetic oligonucleotide
uuugacugagucccaggac

SEQ ID NO: 1166475 - RNA, 19 nt, Artificial Sequence
  Description of Artificial Sequence: Synthetic oligonucleotide
uccgcacuagcacauugcc

SEQ ID NO: 1166476 - RNA, 19 nt, Artificial Sequence
  Description of Artificial Sequence: Synthetic oligonucleotide
ugaaacauaucuggguccu

SEQ ID NO: 1166477 - RNA, 19 nt, Artificial Sequence
  Description of Artificial Sequence: Synthetic oligonucleotide
aaagaucaucucgcuguac

SEQ ID NO: 1166478 - RNA, 19 nt, Artificial Sequence
  Description of Artificial Sequence: Synthetic oligonucleotide
uuccugacaauccccacaa

SEQ ID NO: 1166479 - RNA, 19 nt, Artificial Sequence
  Description of Artificial Sequence: Synthetic oligonucleotide
gacacuaggaaggggcagg

SEQ ID NO: 1166480 - RNA, 19 nt, Artificial Sequence
  Description of Artificial Sequence: Synthetic oligonucleotide
ugggucaguggauacugag

SEQ ID NO: 1166481 - RNA, 19 nt, Artificial Sequence
  Description of Artificial Sequence: Synthetic oligonucleotide
uugucguucaccugcccgc

SEQ ID NO: 1166482 - RNA, 19 nt, Artificial Sequence
  Description of Artificial Sequence: Synthetic oligonucleotide
cuuuugacugagucccagg

SEQ ID NO: 1166483 - RNA, 19 nt, Artificial Sequence
  Description of Artificial Sequence: Synthetic oligonucleotide
caaaaucugggaagaguug

SEQ ID NO: 1166484 - RNA, 19 nt, Artificial Sequence
  Description of Artificial Sequence: Synthetic oligonucleotide
gaagguugaucugccaaag

SEQ ID NO: 1166485 - RNA, 19 nt, Artificial Sequence
  Description of Artificial Sequence: Synthetic oligonucleotide
gacggcaguaguccaggcg

SEQ ID NO: 1166486 - RNA, 19 nt, Artificial Sequence
  Description of Artificial Sequence: Synthetic oligonucleotide
aaucccuugcccgugucug

SEQ ID NO: 1166487 - RNA, 19 nt, Artificial Sequence
  Description of Artificial Sequence: Synthetic oligonucleotide
auggacaaccaucaucgga

SEQ ID NO: 1166488 - RNA, 19 nt, Artificial Sequence
  Description of Artificial Sequence: Synthetic oligonucleotide
caacagcagagugugacgg

SEQ ID NO: 1166489 - RNA, 19 nt, Artificial Sequence
  Description of Artificial Sequence: Synthetic oligonucleotide
gaacaaaugagguguggaa

SEQ ID NO: 1166490 - RNA, 19 nt, Artificial Sequence
  Description of Artificial Sequence: Synthetic oligonucleotide
uggcacaugugguuggccc

SEQ ID NO: 1166491 - RNA, 19 nt, Artificial Sequence
  Description of Artificial Sequence: Synthetic oligonucleotide
acaucgauccgguucuucu

SEQ ID NO: 1166492 - RNA, 19 nt, Artificial Sequence
  Description of Artificial Sequence: Synthetic oligonucleotide
augaagguugaucugccaa

SEQ ID NO: 1166493 - RNA, 19 nt, Artificial Sequence
  Description of Artificial Sequence: Synthetic oligonucleotide
acaccuuugggagugauau

SEQ ID NO: 1166494 - RNA, 19 nt, Artificial Sequence
  Description of Artificial Sequence: Synthetic oligonucleotide
ugagguguggaaagacacu

SEQ ID NO: 1166495 - RNA, 19 nt, Artificial Sequence
  Description of Artificial Sequence: Synthetic oligonucleotide
ucuuuugacugagucccag

SEQ ID NO: 1166496 - RNA, 19 nt, Artificial Sequence
  Description of Artificial Sequence: Synthetic oligonucleotide
aucaucggaccacaggcca

SEQ ID NO: 1166497 - RNA, 19 nt, Artificial Sequence
  Description of Artificial Sequence: Synthetic oligonucleotide
aaacuccaucaggagcacc

SEQ ID NO: 1166498 - RNA, 19 nt, Artificial Sequence
  Description of Artificial Sequence: Synthetic oligonucleotide
aagucacacucagugagga

SEQ ID NO: 1166499 - RNA, 19 nt, Artificial Sequence
  Description of Artificial Sequence: Synthetic oligonucleotide
cuuugagcuugaaccuucg

SEQ ID NO: 1166500 - RNA, 19 nt, Artificial Sequence
  Description of Artificial Sequence: Synthetic oligonucleotide
uugggagugauauggcaaa

SEQ ID NO: 1166501 - RNA, 19 nt, Artificial Sequence
  Description of Artificial Sequence: Synthetic oligonucleotide
aacaaaucauggaucuccu

SEQ ID NO: 1166502 - RNA, 19 nt, Artificial Sequence
  Description of Artificial Sequence: Synthetic oligonucleotide
aaugagcaggcgucucucu

SEQ ID NO: 1166503 - RNA, 19 nt, Artificial Sequence
  Description of Artificial Sequence: Synthetic oligonucleotide
uuggccgcauuacugcuga

SEQ ID NO: 1166504 - RNA, 19 nt, Artificial Sequence
  Description of Artificial Sequence: Synthetic oligonucleotide
uuccgcacuagcacauugc

SEQ ID NO: 1166505 - RNA, 19 nt, Artificial Sequence
  Description of Artificial Sequence: Synthetic oligonucleotide
ccucuuuugacugaguccc

SEQ ID NO: 1166506 - RNA, 19 nt, Artificial Sequence
  Description of Artificial Sequence: Synthetic oligonucleotide
ccaucaucggaccacaggc

SEQ ID NO: 1166507 - RNA, 19 nt, Artificial Sequence
  Description of Artificial Sequence: Synthetic oligonucleotide
aggauaucucguucacauc

SEQ ID NO: 1166508 - RNA, 19 nt, Artificial Sequence
  Description of Artificial Sequence: Synthetic oligonucleotide
agaaugagcaggcgucucu

SEQ ID NO: 1166509 - RNA, 19 nt, Artificial Sequence
  Description of Artificial Sequence: Synthetic oligonucleotide
auguaauccuugucguuca

SEQ ID NO: 1166510 - RNA, 19 nt, Artificial Sequence
  Description of Artificial Sequence: Synthetic oligonucleotide
caucaucggaccacaggcc

SEQ ID NO: 1166511 - RNA, 19 nt, Artificial Sequence
  Description of Artificial Sequence: Synthetic oligonucleotide
guaguuggccgcauuacug

SEQ ID NO: 1166512 - RNA, 19 nt, Artificial Sequence
  Description of Artificial Sequence: Synthetic oligonucleotide
cucguucacaucgauccgg

SEQ ID NO: 1166513 - RNA, 19 nt, Artificial Sequence
  Description of Artificial Sequence: Synthetic oligonucleotide
cuugcccgugucuggaugc

SEQ ID NO: 1166514 - RNA, 19 nt, Artificial Sequence
  Description of Artificial Sequence: Synthetic oligonucleotide
uaggucuucucggaugacc

SEQ ID NO: 1166515 - RNA, 19 nt, Artificial Sequence
  Description of Artificial Sequence: Synthetic oligonucleotide
aguuaaaacgugcccuuuu

SEQ ID NO: 1166516 - RNA, 19 nt, Artificial Sequence
  Description of Artificial Sequence: Synthetic oligonucleotide
ucggaugaccugucggacc

SEQ ID NO: 1166517 - RNA, 19 nt, Artificial Sequence
  Description of Artificial Sequence: Synthetic oligonucleotide
aagcucaggaacaaaucau

SEQ ID NO: 1166518 - RNA, 19 nt, Artificial Sequence
  Description of Artificial Sequence: Synthetic oligonucleotide
caccgagacauguugagga

SEQ ID NO: 1166519 - RNA, 19 nt, Artificial Sequence
  Description of Artificial Sequence: Synthetic oligonucleotide
ccgaccaucaugcagcacc

SEQ ID NO: 1166520 - RNA, 19 nt, Artificial Sequence
  Description of Artificial Sequence: Synthetic oligonucleotide
cuggcuuaucucaggcagg

SEQ ID NO: 1166521 - RNA, 19 nt, Artificial Sequence
  Description of Artificial Sequence: Synthetic oligonucleotide
aauccccacaaagugggaa

SEQ ID NO: 1166522 - RNA, 19 nt, Artificial Sequence
  Description of Artificial Sequence: Synthetic oligonucleotide
uaggaagcuaaagugcuua

SEQ ID NO: 1166523 - RNA, 19 nt, Artificial Sequence
  Description of Artificial Sequence: Synthetic oligonucleotide
gugcccugauacaacaccg

SEQ ID NO: 1166524 - RNA, 19 nt, Artificial Sequence
  Description of Artificial Sequence: Synthetic oligonucleotide
ugcguucuucccuucauuu

SEQ ID NO: 1166525 - RNA, 19 nt, Artificial Sequence
  Description of Artificial Sequence: Synthetic oligonucleotide
agguaguuggccgcauuac

SEQ ID NO: 1166526 - RNA, 19 nt, Artificial Sequence
  Description of Artificial Sequence: Synthetic oligonucleotide
caugggucaguggauacug

SEQ ID NO: 1166527 - RNA, 19 nt, Artificial Sequence
  Description of Artificial Sequence: Synthetic oligonucleotide
gguccaagaggacaauccc

SEQ ID NO: 1166528 - RNA, 19 nt, Artificial Sequence
  Description of Artificial Sequence: Synthetic oligonucleotide
aaccuacugauuuccuaua

SEQ ID NO: 1166529 - RNA, 19 nt, Artificial Sequence
  Description of Artificial Sequence: Synthetic oligonucleotide
cuccaguacaguccagggc

SEQ ID NO: 1166530 - RNA, 19 nt, Artificial Sequence
  Description of Artificial Sequence: Synthetic oligonucleotide
gaaggaacuggcacuggac

SEQ ID NO: 1166531 - RNA, 19 nt, Artificial Sequence
  Description of Artificial Sequence: Synthetic oligonucleotide
cuuugggagugauauggca

SEQ ID NO: 1166532 - RNA, 19 nt, Artificial Sequence
  Description of Artificial Sequence: Synthetic oligonucleotide
gacaugggucaguggauac

SEQ ID NO: 1166533 - RNA, 19 nt, Artificial Sequence
  Description of Artificial Sequence: Synthetic oligonucleotide
cauguugaggaaggaacug

SEQ ID NO: 1166534 - RNA, 19 nt, Artificial Sequence
  Description of Artificial Sequence: Synthetic oligonucleotide
ugcccugauacaacaccga

SEQ ID NO: 1166535 - RNA, 19 nt, Artificial Sequence
  Description of Artificial Sequence: Synthetic oligonucleotide
cugcggaguagcucauugg

SEQ ID NO: 1166536 - RNA, 19 nt, Artificial Sequence
  Description of Artificial Sequence: Synthetic oligonucleotide
uguaauccuugucguucac

SEQ ID NO: 1166537 - RNA, 19 nt, Artificial Sequence
  Description of Artificial Sequence: Synthetic oligonucleotide
acaccgagacauguugagg

SEQ ID NO: 1166538 - RNA, 19 nt, Artificial Sequence
  Description of Artificial Sequence: Synthetic oligonucleotide
ucaaugcugcggaguagcu

SEQ ID NO: 1166539 - RNA, 19 nt, Artificial Sequence
  Description of Artificial Sequence: Synthetic oligonucleotide
uacaacaccgagacauguu

SEQ ID NO: 1166540 - RNA, 19 nt, Artificial Sequence
  Description of Artificial Sequence: Synthetic oligonucleotide
ugagcaggcgucucucuuc

SEQ ID NO: 1166541 - RNA, 19 nt, Artificial Sequence
  Description of Artificial Sequence: Synthetic oligonucleotide
caguccgaccaucaugcag

SEQ ID NO: 1166542 - RNA, 19 nt, Artificial Sequence
  Description of Artificial Sequence: Synthetic oligonucleotide
cauggacaaccaucaucgg

SEQ ID NO: 1166543 - RNA, 19 nt, Artificial Sequence
  Description of Artificial Sequence: Synthetic oligonucleotide
auacaacaccgagacaugu

SEQ ID NO: 1166544 - RNA, 19 nt, Artificial Sequence
  Description of Artificial Sequence: Synthetic oligonucleotide
agacggcaguaguccaggc

SEQ ID NO: 1166545 - RNA, 19 nt, Artificial Sequence
  Description of Artificial Sequence: Synthetic oligonucleotide
guagccucaagcccuucac

SEQ ID NO: 1166546 - RNA, 19 nt, Artificial Sequence
  Description of Artificial Sequence: Synthetic oligonucleotide
gaucaucucgcuguacauc

SEQ ID NO: 1166547 - RNA, 19 nt, Artificial Sequence
  Description of Artificial Sequence: Synthetic oligonucleotide
acuagcacauugccugggu

SEQ ID NO: 1166548 - RNA, 19 nt, Artificial Sequence
  Description of Artificial Sequence: Synthetic oligonucleotide
ucaccgugacagcaugaac

SEQ ID NO: 1166549 - RNA, 19 nt, Artificial Sequence
  Description of Artificial Sequence: Synthetic oligonucleotide
cuagcacauugccugggug

SEQ ID NO: 1166550 - RNA, 19 nt, Artificial Sequence
  Description of Artificial Sequence: Synthetic oligonucleotide
uaaagcccaugguccaaga

SEQ ID NO: 1166551 - RNA, 19 nt, Artificial Sequence
  Description of Artificial Sequence: Synthetic oligonucleotide
ugugagcaccugguaaagc

SEQ ID NO: 1166552 - RNA, 19 nt, Artificial Sequence
  Description of Artificial Sequence: Synthetic oligonucleotide
guaauccuugucguucacc

SEQ ID NO: 1166553 - RNA, 19 nt, Artificial Sequence
  Description of Artificial Sequence: Synthetic oligonucleotide
accuacugauuuccuauaa

SEQ ID NO: 1166554 - RNA, 19 nt, Artificial Sequence
  Description of Artificial Sequence: Synthetic oligonucleotide
cgcacuagcacauugccug

SEQ ID NO: 1166555 - RNA, 19 nt, Artificial Sequence
  Description of Artificial Sequence: Synthetic oligonucleotide
aguuggccgcauuacugcu

SEQ ID NO: 1166556 - RNA, 19 nt, Artificial Sequence
  Description of Artificial Sequence: Synthetic oligonucleotide
cgacaagucacacucagug

SEQ ID NO: 1166557 - RNA, 19 nt, Artificial Sequence
  Description of Artificial Sequence: Synthetic oligonucleotide
ggagagcugagacccagcc

SEQ ID NO: 1166558 - RNA, 19 nt, Artificial Sequence
  Description of Artificial Sequence: Synthetic oligonucleotide
gaucugccaaaggcuaaag

SEQ ID NO: 1166559 - RNA, 19 nt, Artificial Sequence
  Description of Artificial Sequence: Synthetic oligonucleotide
aacgugcccuuuuggcaca

SEQ ID NO: 1166560 - RNA, 19 nt, Artificial Sequence
  Description of Artificial Sequence: Synthetic oligonucleotide
ugucaccgugacagcauga

SEQ ID NO: 1166561 - RNA, 19 nt, Artificial Sequence
  Description of Artificial Sequence: Synthetic oligonucleotide
cuuccugacaauccccaca

SEQ ID NO: 1166562 - RNA, 19 nt, Artificial Sequence
  Description of Artificial Sequence: Synthetic oligonucleotide
ucucaaugcugcggaguag

SEQ ID NO: 1166563 - RNA, 19 nt, Artificial Sequence
  Description of Artificial Sequence: Synthetic oligonucleotide
cuugguggacagcucccag

SEQ ID NO: 1166564 - RNA, 19 nt, Artificial Sequence
  Description of Artificial Sequence: Synthetic oligonucleotide
aagaaccuacugauuuccu

SEQ ID NO: 1166565 - RNA, 19 nt, Artificial Sequence
  Description of Artificial Sequence: Synthetic oligonucleotide
uuaagcaugugggccacuu

SEQ ID NO: 1166566 - RNA, 19 nt, Artificial Sequence
  Description of Artificial Sequence: Synthetic oligonucleotide
ucuucucggaugaccuguc

SEQ ID NO: 1166567 - RNA, 19 nt, Artificial Sequence
  Description of Artificial Sequence: Synthetic oligonucleotide
ggaccgggugcccagggcg

SEQ ID NO: 1166568 - RNA, 19 nt, Artificial Sequence
  Description of Artificial Sequence: Synthetic oligonucleotide
guugaucugccaaaggcua

SEQ ID NO: 1166569 - RNA, 19 nt, Artificial Sequence
  Description of Artificial Sequence: Synthetic oligonucleotide
caucgauccgguucuucuc

SEQ ID NO: 1166570 - RNA, 19 nt, Artificial Sequence
  Description of Artificial Sequence: Synthetic oligonucleotide
gaacuggcacuggaccggg

SEQ ID NO: 1166571 - RNA, 19 nt, Artificial Sequence
  Description of Artificial Sequence: Synthetic oligonucleotide
aguagcucauuggucuuca

SEQ ID NO: 1166572 - RNA, 19 nt, Artificial Sequence
  Description of Artificial Sequence: Synthetic oligonucleotide
ggaacuggcacuggaccgg

SEQ ID NO: 1166573 - RNA, 19 nt, Artificial Sequence
  Description of Artificial Sequence: Synthetic oligonucleotide
ccuacugauuuccuauaag

SEQ ID NO: 1166574 - RNA, 19 nt, Artificial Sequence
  Description of Artificial Sequence: Synthetic oligonucleotide
gaaugagcaggcgucucuc

SEQ ID NO: 1166575 - RNA, 19 nt, Artificial Sequence
  Description of Artificial Sequence: Synthetic oligonucleotide
ugcuuccgcacuagcacau

SEQ ID NO: 1166576 - RNA, 19 nt, Artificial Sequence
  Description of Artificial Sequence: Synthetic oligonucleotide
aggcaaacaguggguagag

SEQ ID NO: 1166577 - RNA, 19 nt, Artificial Sequence
  Description of Artificial Sequence: Synthetic oligonucleotide
cagacggcaguaguccagg

SEQ ID NO: 1166578 - RNA, 19 nt, Artificial Sequence
  Description of Artificial Sequence: Synthetic oligonucleotide
cugagcauaaaggaacaaa

SEQ ID NO: 1166579 - RNA, 19 nt, Artificial Sequence
  Description of Artificial Sequence: Synthetic oligonucleotide
gaaccuucgggugcuggac

SEQ ID NO: 1166580 - RNA, 19 nt, Artificial Sequence
  Description of Artificial Sequence: Synthetic oligonucleotide
gugacggugccauggacaa

SEQ ID NO: 1166581 - RNA, 19 nt, Artificial Sequence
  Description of Artificial Sequence: Synthetic oligonucleotide
gcagggaacgacaagucac

SEQ ID NO: 1166582 - RNA, 19 nt, Artificial Sequence
  Description of Artificial Sequence: Synthetic oligonucleotide
caugaacccacagcugcac

SEQ ID NO: 1166583 - RNA, 19 nt, Artificial Sequence
  Description of Artificial Sequence: Synthetic oligonucleotide
aggaagcuaaagugcuuaa

SEQ ID NO: 1166584 - RNA, 19 nt, Artificial Sequence
  Description of Artificial Sequence: Synthetic oligonucleotide
ccaacagcagagugugacg

SEQ ID NO: 1166585 - RNA, 19 nt, Artificial Sequence
  Description of Artificial Sequence: Synthetic oligonucleotide
gaggcacgugguucaggag

SEQ ID NO: 1166586 - RNA, 19 nt, Artificial Sequence
  Description of Artificial Sequence: Synthetic oligonucleotide
auacaggcaaacagugggu

SEQ ID NO: 1166587 - RNA, 19 nt, Artificial Sequence
  Description of Artificial Sequence: Synthetic oligonucleotide
accuucgggugcuggaccu

SEQ ID NO: 1166588 - RNA, 19 nt, Artificial Sequence
  Description of Artificial Sequence: Synthetic oligonucleotide
ugggccacuuucucugcgu

SEQ ID NO: 1166589 - RNA, 19 nt, Artificial Sequence
  Description of Artificial Sequence: Synthetic oligonucleotide
ucgauccgguucuucucca

SEQ ID NO: 1166590 - RNA, 19 nt, Artificial Sequence
  Description of Artificial Sequence: Synthetic oligonucleotide
uccucugcucggccagugc

SEQ ID NO: 1166591 - RNA, 19 nt, Artificial Sequence
  Description of Artificial Sequence: Synthetic oligonucleotide
cagcaugaacccacagcug

SEQ ID NO: 1166592 - RNA, 19 nt, Artificial Sequence
  Description of Artificial Sequence: Synthetic oligonucleotide
caacaccgagacauguuga

SEQ ID NO: 1166593 - RNA, 19 nt, Artificial Sequence
  Description of Artificial Sequence: Synthetic oligonucleotide
acagugcacgaagccauug

SEQ ID NO: 1166594 - RNA, 19 nt, Artificial Sequence
  Description of Artificial Sequence: Synthetic oligonucleotide
agguguggaaagacacuag

SEQ ID NO: 1166595 - RNA, 19 nt, Artificial Sequence
  Description of Artificial Sequence: Synthetic oligonucleotide
guugaggaaggaacuggca

SEQ ID NO: 1166596 - RNA, 19 nt, Artificial Sequence
  Description of Artificial Sequence: Synthetic oligonucleotide
agcaaguuccaagaaccua

SEQ ID NO: 1166597 - RNA, 19 nt, Artificial Sequence
  Description of Artificial Sequence: Synthetic oligonucleotide
cagcauacaggcaaacagu

SEQ ID NO: 1166598 - RNA, 19 nt, Artificial Sequence
  Description of Artificial Sequence: Synthetic oligonucleotide
acaugggucaguggauacu

SEQ ID NO: 1166599 - RNA, 19 nt, Artificial Sequence
  Description of Artificial Sequence: Synthetic oligonucleotide
gccauugacaaagaucauc

SEQ ID NO: 1166600 - RNA, 19 nt, Artificial Sequence
  Description of Artificial Sequence: Synthetic oligonucleotide
auacuggaggugucaccgu

SEQ ID NO: 1166601 - RNA, 19 nt, Artificial Sequence
  Description of Artificial Sequence: Synthetic oligonucleotide
gcccugauacaacaccgag

SEQ ID NO: 1166602 - RNA, 19 nt, Artificial Sequence
  Description of Artificial Sequence: Synthetic oligonucleotide
uuggcacaugugguuggcc

SEQ ID NO: 1166603 - RNA, 19 nt, Artificial Sequence
  Description of Artificial Sequence: Synthetic oligonucleotide
aucggaccacaggccaacc

SEQ ID NO: 1166604 - RNA, 19 nt, Artificial Sequence
  Description of Artificial Sequence: Synthetic oligonucleotide
cacuagcacauugccuggg

SEQ ID NO: 1166605 - RNA, 19 nt, Artificial Sequence
  Description of Artificial Sequence: Synthetic oligonucleotide
ggacaaccaucaucggacc

SEQ ID NO: 1166606 - RNA, 19 nt, Artificial Sequence
  Description of Artificial Sequence: Synthetic oligonucleotide
agcccgagucagccagccc

SEQ ID NO: 1166607 - RNA, 19 nt, Artificial Sequence
  Description of Artificial Sequence: Synthetic oligonucleotide
aaccaucaucggaccacag

SEQ ID NO: 1166608 - RNA, 19 nt, Artificial Sequence
  Description of Artificial Sequence: Synthetic oligonucleotide
augagcaggcgucucucuu

SEQ ID NO: 1166609 - RNA, 19 nt, Artificial Sequence
  Description of Artificial Sequence: Synthetic oligonucleotide
caucaggagcacccucuug

SEQ ID NO: 1166610 - RNA, 19 nt, Artificial Sequence
  Description of Artificial Sequence: Synthetic oligonucleotide
uucgggugcuggaccuuca

SEQ ID NO: 1166611 - RNA, 19 nt, Artificial Sequence
  Description of Artificial Sequence: Synthetic oligonucleotide
gcacuagcacauugccugg

SEQ ID NO: 1166612 - RNA, 19 nt, Artificial Sequence
  Description of Artificial Sequence: Synthetic oligonucleotide
gugguuggcccuuccugac

SEQ ID NO: 1166613 - RNA, 19 nt, Artificial Sequence
  Description of Artificial Sequence: Synthetic oligonucleotide
caggcaaacaguggguaga

SEQ ID NO: 1166614 - RNA, 19 nt, Artificial Sequence
  Description of Artificial Sequence: Synthetic oligonucleotide
cagugcccugauacaacac

SEQ ID NO: 1166615 - RNA, 19 nt, Artificial Sequence
  Description of Artificial Sequence: Synthetic oligonucleotide
agacaugggucaguggaua

SEQ ID NO: 1166616 - RNA, 19 nt, Artificial Sequence
  Description of Artificial Sequence: Synthetic oligonucleotide
caaugcugcggaguagcuc

SEQ ID NO: 1166617 - RNA, 19 nt, Artificial Sequence
  Description of Artificial Sequence: Synthetic oligonucleotide
aucaaagcucaggaacaaa

SEQ ID NO: 1166618 - RNA, 19 nt, Artificial Sequence
  Description of Artificial Sequence: Synthetic oligonucleotide
gaccgggugcccagggcgg

SEQ ID NO: 1166619 - RNA, 19 nt, Artificial Sequence
  Description of Artificial Sequence: Synthetic oligonucleotide
cagcuuauucucagaugca

SEQ ID NO: 1166620 - RNA, 19 nt, Artificial Sequence
  Description of Artificial Sequence: Synthetic oligonucleotide
agagugugacggugccaug

SEQ ID NO: 1166621 - RNA, 19 nt, Artificial Sequence
  Description of Artificial Sequence: Synthetic oligonucleotide
guuggccgcauuacugcug

SEQ ID NO: 1166622 - RNA, 19 nt, Artificial Sequence
  Description of Artificial Sequence: Synthetic oligonucleotide
caggcggaacuccucugug

SEQ ID NO: 1166623 - RNA, 19 nt, Artificial Sequence
  Description of Artificial Sequence: Synthetic oligonucleotide
cugggaagaguugcuucac

SEQ ID NO: 1166624 - RNA, 19 nt, Artificial Sequence
  Description of Artificial Sequence: Synthetic oligonucleotide
cuggaugcuuccgcacuag

SEQ ID NO: 1166625 - RNA, 19 nt, Artificial Sequence
  Description of Artificial Sequence: Synthetic oligonucleotide
ugggagugauauggcaaaa

SEQ ID NO: 1166626 - RNA, 19 nt, Artificial Sequence
  Description of Artificial Sequence: Synthetic oligonucleotide
caaaggcuaaaggccucac

SEQ ID NO: 1166627 - RNA, 19 nt, Artificial Sequence
  Description of Artificial Sequence: Synthetic oligonucleotide
caaacuccaucaggagcac

SEQ ID NO: 1166628 - RNA, 19 nt, Artificial Sequence
  Description of Artificial Sequence: Synthetic oligonucleotide
aggcgucucucuuccucug

SEQ ID NO: 1166629 - RNA, 19 nt, Artificial Sequence
  Description of Artificial Sequence: Synthetic oligonucleotide
gcuuuaucccucagucucc

SEQ ID NO: 1166630 - RNA, 19 nt, Artificial Sequence
  Description of Artificial Sequence: Synthetic oligonucleotide
gccgcauuacugcugaucu

SEQ ID NO: 1166631 - RNA, 19 nt, Artificial Sequence
  Description of Artificial Sequence: Synthetic oligonucleotide
gaguugcuucacagccagg

SEQ ID NO: 1166632 - RNA, 19 nt, Artificial Sequence
  Description of Artificial Sequence: Synthetic oligonucleotide
ggcggucucaaugcugcgg

SEQ ID NO: 1166633 - RNA, 19 nt, Artificial Sequence
  Description of Artificial Sequence: Synthetic oligonucleotide
cccuucauuuaggaagucc

SEQ ID NO: 1166634 - RNA, 19 nt, Artificial Sequence
  Description of Artificial Sequence: Synthetic oligonucleotide
cacagacggcaguagucca

SEQ ID NO: 1166635 - RNA, 19 nt, Artificial Sequence
  Description of Artificial Sequence: Synthetic oligonucleotide
acaguccgaccaucaugca

SEQ ID NO: 1166636 - RNA, 19 nt, Artificial Sequence
  Description of Artificial Sequence: Synthetic oligonucleotide
agcacccucuugguggaca

SEQ ID NO: 1166637 - RNA, 19 nt, Artificial Sequence
  Description of Artificial Sequence: Synthetic oligonucleotide
acucagugaggagcccgag

SEQ ID NO: 1166638 - RNA, 19 nt, Artificial Sequence
  Description of Artificial Sequence: Synthetic oligonucleotide
cacucagugaggagcccga

SEQ ID NO: 1166639 - RNA, 19 nt, Artificial Sequence
  Description of Artificial Sequence: Synthetic oligonucleotide
acucgaagcagaaguucau

SEQ ID NO: 1166640 - RNA, 19 nt, Artificial Sequence
  Description of Artificial Sequence: Synthetic oligonucleotide
caaguuccaagaaccuacu

SEQ ID NO: 1166641 - RNA, 19 nt, Artificial Sequence
  Description of Artificial Sequence: Synthetic oligonucleotide
ugacuggagcuuguccaau

SEQ ID NO: 1166642 - RNA, 19 nt, Artificial Sequence
  Description of Artificial Sequence: Synthetic oligonucleotide
gaccgggcugucagcauac

SEQ ID NO: 1166643 - RNA, 19 nt, Artificial Sequence
  Description of Artificial Sequence: Synthetic oligonucleotide
ccucacuguggcgagacac

SEQ ID NO: 1166644 - RNA, 19 nt, Artificial Sequence
  Description of Artificial Sequence: Synthetic oligonucleotide
aguggauacugagcauaaa

SEQ ID NO: 1166645 - RNA, 19 nt, Artificial Sequence
  Description of Artificial Sequence: Synthetic oligonucleotide
gguagccucaagcccuuca

SEQ ID NO: 1166646 - RNA, 19 nt, Artificial Sequence
  Description of Artificial Sequence: Synthetic oligonucleotide
acuggaccgggugcccagg

SEQ ID NO: 1166647 - RNA, 19 nt, Artificial Sequence
  Description of Artificial Sequence: Synthetic oligonucleotide
gcuguacugcuucacccuc

SEQ ID NO: 1166648 - RNA, 19 nt, Artificial Sequence
  Description of Artificial Sequence: Synthetic oligonucleotide
gucaccgugacagcaugaa

SEQ ID NO: 1166649 - RNA, 19 nt, Artificial Sequence
  Description of Artificial Sequence: Synthetic oligonucleotide
gguaguuggccgcauuacu

SEQ ID NO: 1166650 - RNA, 19 nt, Artificial Sequence
  Description of Artificial Sequence: Synthetic oligonucleotide
caguacaguccagggcccc

SEQ ID NO: 1166651 - RNA, 19 nt, Artificial Sequence
  Description of Artificial Sequence: Synthetic oligonucleotide
gugcccuuuuggcacaugu

SEQ ID NO: 1166652 - RNA, 19 nt, Artificial Sequence
  Description of Artificial Sequence: Synthetic oligonucleotide
cuuggagcuuugagcuuga

SEQ ID NO: 1166653 - RNA, 19 nt, Artificial Sequence
  Description of Artificial Sequence: Synthetic oligonucleotide
caaccaucaucggaccaca

SEQ ID NO: 1166654 - RNA, 19 nt, Artificial Sequence
  Description of Artificial Sequence: Synthetic oligonucleotide
cugucagcauacaggcaaa

SEQ ID NO: 1166655 - RNA, 19 nt, Artificial Sequence
  Description of Artificial Sequence: Synthetic oligonucleotide
gcggucucaaugcugcgga

SEQ ID NO: 1166656 - RNA, 19 nt, Artificial Sequence
  Description of Artificial Sequence: Synthetic oligonucleotide
gaauguccuuggagcuuug

SEQ ID NO: 1166657 - RNA, 19 nt, Artificial Sequence
  Description of Artificial Sequence: Synthetic oligonucleotide
ccaguacaguccagggccc

SEQ ID NO: 1166658 - RNA, 19 nt, Artificial Sequence
  Description of Artificial Sequence: Synthetic oligonucleotide
cuucgggugcuggaccuuc

SEQ ID NO: 1166659 - RNA, 19 nt, Artificial Sequence
  Description of Artificial Sequence: Synthetic oligonucleotide
cucuuuugacugaguccca

SEQ ID NO: 1166660 - RNA, 19 nt, Artificial Sequence
  Description of Artificial Sequence: Synthetic oligonucleotide
cccaggaccgggcugucag

SEQ ID NO: 1166661 - RNA, 19 nt, Artificial Sequence
  Description of Artificial Sequence: Synthetic oligonucleotide
gcccagggcggucucaaug

SEQ ID NO: 1166662 - RNA, 19 nt, Artificial Sequence
  Description of Artificial Sequence: Synthetic oligonucleotide
cuguggcgagacaccuuug

SEQ ID NO: 1166663 - RNA, 19 nt, Artificial Sequence
  Description of Artificial Sequence: Synthetic oligonucleotide
gacaaucccuugcccgugu

SEQ ID NO: 1166664 - RNA, 19 nt, Artificial Sequence
  Description of Artificial Sequence: Synthetic oligonucleotide
cacaucgauccgguucuuc

SEQ ID NO: 1166665 - RNA, 19 nt, Artificial Sequence
  Description of Artificial Sequence: Synthetic oligonucleotide
agcaucuggcgaggcacgu

SEQ ID NO: 1166666 - RNA, 19 nt, Artificial Sequence
  Description of Artificial Sequence: Synthetic oligonucleotide
caccuccaucaggagaaug

SEQ ID NO: 1166667 - RNA, 19 nt, Artificial Sequence
  Description of Artificial Sequence: Synthetic oligonucleotide
ccgagacauguugaggaag

SEQ ID NO: 1166668 - RNA, 19 nt, Artificial Sequence
  Description of Artificial Sequence: Synthetic oligonucleotide
guccgaccaucaugcagca

SEQ ID NO: 1166669 - RNA, 19 nt, Artificial Sequence
  Description of Artificial Sequence: Synthetic oligonucleotide
cccugauacaacaccgaga

SEQ ID NO: 1166670 - RNA, 19 nt, Artificial Sequence
  Description of Artificial Sequence: Synthetic oligonucleotide
ggcgucucucuuccucugc

SEQ ID NO: 1166671 - RNA, 19 nt, Artificial Sequence
  Description of Artificial Sequence: Synthetic oligonucleotide
cuaggucuucucggaugac

SEQ ID NO: 1166672 - RNA, 19 nt, Artificial Sequence
  Description of Artificial Sequence: Synthetic oligonucleotide
ggagcacccucuuggugga

SEQ ID NO: 1166673 - RNA, 19 nt, Artificial Sequence
  Description of Artificial Sequence: Synthetic oligonucleotide
ccagguagccucaagcccu

SEQ ID NO: 1166674 - RNA, 19 nt, Artificial Sequence
  Description of Artificial Sequence: Synthetic oligonucleotide
caggaccgggcugucagca

SEQ ID NO: 1166675 - RNA, 19 nt, Artificial Sequence
  Description of Artificial Sequence: Synthetic oligonucleotide
aggaccgggcugucagcau

SEQ ID NO: 1166676 - RNA, 19 nt, Artificial Sequence
  Description of Artificial Sequence: Synthetic oligonucleotide
cgcuguacaucuugcccag

SEQ ID NO: 1166677 - RNA, 19 nt, Artificial Sequence
  Description of Artificial Sequence: Synthetic oligonucleotide
ggacaaucccuugcccgug

SEQ ID NO: 1166678 - RNA, 19 nt, Artificial Sequence
  Description of Artificial Sequence: Synthetic oligonucleotide
gggaacgacaagucacacu

SEQ ID NO: 1166679 - RNA, 19 nt, Artificial Sequence
  Description of Artificial Sequence: Synthetic oligonucleotide
ccuucacucgaagcagaag

SEQ ID NO: 1166680 - RNA, 19 nt, Artificial Sequence
  Description of Artificial Sequence: Synthetic oligonucleotide
agucuccaguacaguccag

SEQ ID NO: 1166681 - RNA, 19 nt, Artificial Sequence
  Description of Artificial Sequence: Synthetic oligonucleotide
cccgugucuggaugcuucc

SEQ ID NO: 1166682 - RNA, 19 nt, Artificial Sequence
  Description of Artificial Sequence: Synthetic oligonucleotide
caugugguuggcccuuccu

SEQ ID NO: 1166683 - RNA, 19 nt, Artificial Sequence
  Description of Artificial Sequence: Synthetic oligonucleotide
gucaguggauacugagcau

SEQ ID NO: 1166684 - RNA, 19 nt, Artificial Sequence
  Description of Artificial Sequence: Synthetic oligonucleotide
gcaguaguccaggcggaac

SEQ ID NO: 1166685 - RNA, 19 nt, Artificial Sequence
  Description of Artificial Sequence: Synthetic oligonucleotide
caggcgucucucuuccucu

SEQ ID NO: 1166686 - RNA, 19 nt, Artificial Sequence
  Description of Artificial Sequence: Synthetic oligonucleotide
ccucaguggcagugacugg

SEQ ID NO: 1166687 - RNA, 19 nt, Artificial Sequence
  Description of Artificial Sequence: Synthetic oligonucleotide
cucaagcccuucacucgaa

SEQ ID NO: 1166688 - RNA, 19 nt, Artificial Sequence
  Description of Artificial Sequence: Synthetic oligonucleotide
ccucaagcccuucacucga

SEQ ID NO: 1166689 - RNA, 19 nt, Artificial Sequence
  Description of Artificial Sequence: Synthetic oligonucleotide
ggaccuuuaggaagcuaaa

SEQ ID NO: 1166690 - RNA, 19 nt, Artificial Sequence
  Description of Artificial Sequence: Synthetic oligonucleotide
ggccgcauuacugcugauc

SEQ ID NO: 1166691 - RNA, 19 nt, Artificial Sequence
  Description of Artificial Sequence: Synthetic oligonucleotide
ccgggcugucagcauacag

SEQ ID NO: 1166692 - RNA, 19 nt, Artificial Sequence
  Description of Artificial Sequence: Synthetic oligonucleotide
gcaggauaucucguucaca

SEQ ID NO: 1166693 - RNA, 19 nt, Artificial Sequence
  Description of Artificial Sequence: Synthetic oligonucleotide
cccuuccugacaaucccca

SEQ ID NO: 1166694 - RNA, 19 nt, Artificial Sequence
  Description of Artificial Sequence: Synthetic oligonucleotide
gcuaaaggccucacugaaa

SEQ ID NO: 1166695 - RNA, 19 nt, Artificial Sequence
  Description of Artificial Sequence: Synthetic oligonucleotide
aacuggcacuggaccgggu

SEQ ID NO: 1166696 - RNA, 19 nt, Artificial Sequence
  Description of Artificial Sequence: Synthetic oligonucleotide
gcaugaacccacagcugca

SEQ ID NO: 1166697 - RNA, 19 nt, Artificial Sequence
  Description of Artificial Sequence: Synthetic oligonucleotide
uccgaccaucaugcagcac

SEQ ID NO: 1166698 - RNA, 19 nt, Artificial Sequence
  Description of Artificial Sequence: Synthetic oligonucleotide
ggcacaugugguuggcccu

SEQ ID NO: 1166699 - RNA, 19 nt, Artificial Sequence
  Description of Artificial Sequence: Synthetic oligonucleotide
gcggaguagcucauugguc

SEQ ID NO: 1166700 - RNA, 19 nt, Artificial Sequence
  Description of Artificial Sequence: Synthetic oligonucleotide
agccauugacaaagaucau

SEQ ID NO: 1166701 - RNA, 19 nt, Artificial Sequence
  Description of Artificial Sequence: Synthetic oligonucleotide
cgaggcacgugguucagga

SEQ ID NO: 1166702 - RNA, 19 nt, Artificial Sequence
  Description of Artificial Sequence: Synthetic oligonucleotide
gguggcaggauaucucguu

SEQ ID NO: 1166703 - RNA, 19 nt, Artificial Sequence
  Description of Artificial Sequence: Synthetic oligonucleotide
gguaaagcccaugguccaa

SEQ ID NO: 1166704 - RNA, 19 nt, Artificial Sequence
  Description of Artificial Sequence: Synthetic oligonucleotide
caaucccuugcccgugucu

SEQ ID NO: 1166705 - RNA, 19 nt, Artificial Sequence
  Description of Artificial Sequence: Synthetic oligonucleotide
ggccagugcccugauacaa

SEQ ID NO: 1166706 - RNA, 19 nt, Artificial Sequence
  Description of Artificial Sequence: Synthetic oligonucleotide
ggaccgggcugucagcaua

SEQ ID NO: 1166707 - RNA, 19 nt, Artificial Sequence
  Description of Artificial Sequence: Synthetic oligonucleotide
ccuugucguucaccugccc

SEQ ID NO: 1166708 - RNA, 19 nt, Artificial Sequence
  Description of Artificial Sequence: Synthetic oligonucleotide
gaaguucaugaagguugau

SEQ ID NO: 1166709 - RNA, 19 nt, Artificial Sequence
  Description of Artificial Sequence: Synthetic oligonucleotide
ccaggaccgggcugucagc

SEQ ID NO: 1166710 - RNA, 19 nt, Artificial Sequence
  Description of Artificial Sequence: Synthetic oligonucleotide
ucacaucgauccgguucuu

SEQ ID NO: 1166711 - RNA, 19 nt, Artificial Sequence
  Description of Artificial Sequence: Synthetic oligonucleotide
ccgcauuacugcugaucuc

SEQ ID NO: 1166712 - RNA, 19 nt, Artificial Sequence
  Description of Artificial Sequence: Synthetic oligonucleotide
cacuaggaaggggcaggga

SEQ ID NO: 1166713 - RNA, 19 nt, Artificial Sequence
  Description of Artificial Sequence: Synthetic oligonucleotide
ccgugucuggaugcuuccg

SEQ ID NO: 1166714 - RNA, 19 nt, Artificial Sequence
  Description of Artificial Sequence: Synthetic oligonucleotide
gcaucuggcgaggcacgug

SEQ ID NO: 1166715 - RNA, 19 nt, Artificial Sequence
  Description of Artificial Sequence: Synthetic oligonucleotide
ugcugcggaguagcucauu

SEQ ID NO: 1166716 - RNA, 19 nt, Artificial Sequence
  Description of Artificial Sequence: Synthetic oligonucleotide
gcccgugucuggaugcuuc

SEQ ID NO: 1166717 - RNA, 19 nt, Artificial Sequence
  Description of Artificial Sequence: Synthetic oligonucleotide
ugcccgugucuggaugcuu

SEQ ID NO: 1166718 - RNA, 19 nt, Artificial Sequence
  Description of Artificial Sequence: Synthetic oligonucleotide
ccgccuuguggaccugggc

SEQ ID NO: 1166719 - RNA, 19 nt, Artificial Sequence
  Description of Artificial Sequence: Synthetic oligonucleotide
ggaguagcucauuggucuu

SEQ ID NO: 1166720 - RNA, 19 nt, Artificial Sequence
  Description of Artificial Sequence: Synthetic oligonucleotide
uggccgcauuacugcugau

SEQ ID NO: 1166721 - RNA, 19 nt, Artificial Sequence
  Description of Artificial Sequence: Synthetic oligonucleotide
accgggugcccagggcggu

SEQ ID NO: 1166722 - RNA, 19 nt, Artificial Sequence
  Description of Artificial Sequence: Synthetic oligonucleotide
gcgucucucuuccucugcu

SEQ ID NO: 1166723 - RNA, 19 nt, Artificial Sequence
  Description of Artificial Sequence: Synthetic oligonucleotide
gagcacccucuugguggac

SEQ ID NO: 1166724 - RNA, 19 nt, Artificial Sequence
  Description of Artificial Sequence: Synthetic oligonucleotide
gcagagugugacggugcca

SEQ ID NO: 1166725 - RNA, 19 nt, Artificial Sequence
  Description of Artificial Sequence: Synthetic oligonucleotide
gcccuucacucgaagcaga

SEQ ID NO: 1166726 - RNA, 19 nt, Artificial Sequence
  Description of Artificial Sequence: Synthetic oligonucleotide
gcagccccuaggcgcuggc

SEQ ID NO: 1166727 - RNA, 19 nt, Artificial Sequence
  Description of Artificial Sequence: Synthetic oligonucleotide
cugcguucuucccuucauu

SEQ ID NO: 1166728 - RNA, 19 nt, Artificial Sequence
  Description of Artificial Sequence: Synthetic oligonucleotide
gcgagacaccuuugggagu

SEQ ID NO: 1166729 - RNA, 19 nt, Artificial Sequence
  Description of Artificial Sequence: Synthetic oligonucleotide
augcugcggaguagcucau

SEQ ID NO: 1166730 - RNA, 19 nt, Artificial Sequence
  Description of Artificial Sequence: Synthetic oligonucleotide
acgugcccuuuuggcacau

SEQ ID NO: 1166731 - RNA, 19 nt, Artificial Sequence
  Description of Artificial Sequence: Synthetic oligonucleotide
guuggcccuuccugacaau

SEQ ID NO: 1166732 - RNA, 19 nt, Artificial Sequence
  Description of Artificial Sequence: Synthetic oligonucleotide
cuuaagcaugugggccacu

SEQ ID NO: 1166733 - RNA, 19 nt, Artificial Sequence
  Description of Artificial Sequence: Synthetic oligonucleotide
cggaugaccugucggaccu

SEQ ID NO: 1166734 - RNA, 19 nt, Artificial Sequence
  Description of Artificial Sequence: Synthetic oligonucleotide
ccgcacuagcacauugccu

SEQ ID NO: 1166735 - RNA, 19 nt, Artificial Sequence
  Description of Artificial Sequence: Synthetic oligonucleotide
ggggcuccaacagcagagu

SEQ ID NO: 1166736 - RNA, 19 nt, Artificial Sequence
  Description of Artificial Sequence: Synthetic oligonucleotide
cucggccagugcccugaua

SEQ ID NO: 1166737 - RNA, 19 nt, Artificial Sequence
  Description of Artificial Sequence: Synthetic oligonucleotide
cccuaggcgcuggcuguac

SEQ ID NO: 1166738 - RNA, 19 nt, Artificial Sequence
  Description of Artificial Sequence: Synthetic oligonucleotide
gcaccgccuuguggaccug

SEQ ID NO: 1166739 - RNA, 19 nt, Artificial Sequence
  Description of Artificial Sequence: Synthetic oligonucleotide
cgugcccuuuuggcacaug

SEQ ID NO: 1166740 - RNA, 19 nt, Artificial Sequence
  Description of Artificial Sequence: Synthetic oligonucleotide
gcuuccgcacuagcacauu

SEQ ID NO: 1166741 - RNA, 19 nt, Artificial Sequence
  Description of Artificial Sequence: Synthetic oligonucleotide
ccuucgggugcuggaccuu

SEQ ID NO: 1166742 - RNA, 19 nt, Artificial Sequence
  Description of Artificial Sequence: Synthetic oligonucleotide
aaagucauggcucaucucc

SEQ ID NO: 1166743 - RNA, 19 nt, Artificial Sequence
  Description of Artificial Sequence: Synthetic oligonucleotide
cuuugaagcacaaagaggc

SEQ ID NO: 1166744 - RNA, 19 nt, Artificial Sequence
  Description of Artificial Sequence: Synthetic oligonucleotide
aggaagaacacuaugaggc

SEQ ID NO: 1166745 - RNA, 19 nt, Artificial Sequence
  Description of Artificial Sequence: Synthetic oligonucleotide
auaucugccauacugcuag

SEQ ID NO: 1166746 - RNA, 19 nt, Artificial Sequence
  Description of Artificial Sequence: Synthetic oligonucleotide
uuggugauagcacagggcc

SEQ ID NO: 1166747 - RNA, 19 nt, Artificial Sequence
  Description of Artificial Sequence: Synthetic oligonucleotide
cuuggaaugagccuguagc

SEQ ID NO: 1166748 - RNA, 19 nt, Artificial Sequence
  Description of Artificial Sequence: Synthetic oligonucleotide
ucauuagccguuuugcugc

SEQ ID NO: 1166749 - RNA, 19 nt, Artificial Sequence
  Description of Artificial Sequence: Synthetic oligonucleotide
agcuuugaagcacaaagag

SEQ ID NO: 1166750 - RNA, 19 nt, Artificial Sequence
  Description of Artificial Sequence: Synthetic oligonucleotide
uggagcauccuaaaguaag

SEQ ID NO: 1166751 - RNA, 19 nt, Artificial Sequence
  Description of Artificial Sequence: Synthetic oligonucleotide
auagacauccuaaaggcgg

SEQ ID NO: 1166752 - RNA, 19 nt, Artificial Sequence
  Description of Artificial Sequence: Synthetic oligonucleotide
agugaacacuccuccaugc

SEQ ID NO: 1166753 - RNA, 19 nt, Artificial Sequence
  Description of Artificial Sequence: Synthetic oligonucleotide
acugcaguacaucaccugg

SEQ ID NO: 1166754 - RNA, 19 nt, Artificial Sequence
  Description of Artificial Sequence: Synthetic oligonucleotide
ugaauuuguccccaggagu

SEQ ID NO: 1166755 - RNA, 19 nt, Artificial Sequence
  Description of Artificial Sequence: Synthetic oligonucleotide
ucaaauuaacacccaguca

SEQ ID NO: 1166756 - RNA, 19 nt, Artificial Sequence
  Description of Artificial Sequence: Synthetic oligonucleotide
agcacaaagaggccagacc

SEQ ID NO: 1166757 - RNA, 19 nt, Artificial Sequence
  Description of Artificial Sequence: Synthetic oligonucleotide
uuccaaggcgguaacaugc

SEQ ID NO: 1166758 - RNA, 19 nt, Artificial Sequence
  Description of Artificial Sequence: Synthetic oligonucleotide
acacuaugaggccuggagc

SEQ ID NO: 1166759 - RNA, 19 nt, Artificial Sequence
  Description of Artificial Sequence: Synthetic oligonucleotide
agcgguagcugucaucucc

SEQ ID NO: 1166760 - RNA, 19 nt, Artificial Sequence
  Description of Artificial Sequence: Synthetic oligonucleotide
uccccucaaauuaacaccc

SEQ ID NO: 1166761 - RNA, 19 nt, Artificial Sequence
  Description of Artificial Sequence: Synthetic oligonucleotide
ucagcauuauacuugcagu

SEQ ID NO: 1166762 - RNA, 19 nt, Artificial Sequence
  Description of Artificial Sequence: Synthetic oligonucleotide
ucacaguuaaggaacucgc

SEQ ID NO: 1166763 - RNA, 19 nt, Artificial Sequence
  Description of Artificial Sequence: Synthetic oligonucleotide
uggcuuaauaucuuccaag

SEQ ID NO: 1166764 - RNA, 19 nt, Artificial Sequence
  Description of Artificial Sequence: Synthetic oligonucleotide
acgucagucaucucauccc

SEQ ID NO: 1166765 - RNA, 19 nt, Artificial Sequence
  Description of Artificial Sequence: Synthetic oligonucleotide
ucaggcgugaaccacuggc

SEQ ID NO: 1166766 - RNA, 19 nt, Artificial Sequence
  Description of Artificial Sequence: Synthetic oligonucleotide
uccucuauagacauccuaa

SEQ ID NO: 1166767 - RNA, 19 nt, Artificial Sequence
  Description of Artificial Sequence: Synthetic oligonucleotide
gagaccggaauccaucagg

SEQ ID NO: 1166768 - RNA, 19 nt, Artificial Sequence
  Description of Artificial Sequence: Synthetic oligonucleotide
ggcgguaacaugcaaaagg

SEQ ID NO: 1166769 - RNA, 19 nt, Artificial Sequence
  Description of Artificial Sequence: Synthetic oligonucleotide
auuucagcuggucccaggg

SEQ ID NO: 1166770 - RNA, 19 nt, Artificial Sequence
  Description of Artificial Sequence: Synthetic oligonucleotide
gucuaaguagcugauacag

SEQ ID NO: 1166771 - RNA, 19 nt, Artificial Sequence
  Description of Artificial Sequence: Synthetic oligonucleotide
gacucggugguauugcucc

SEQ ID NO: 1166772 - RNA, 19 nt, Artificial Sequence
  Description of Artificial Sequence: Synthetic oligonucleotide
agagguaaggcaucacauc

SEQ ID NO: 1166773 - RNA, 19 nt, Artificial Sequence
  Description of Artificial Sequence: Synthetic oligonucleotide
cacuaugaggccuggagcc

SEQ ID NO: 1166774 - RNA, 19 nt, Artificial Sequence
  Description of Artificial Sequence: Synthetic oligonucleotide
gguaacaugcaaaaggaag

SEQ ID NO: 1166775 - RNA, 19 nt, Artificial Sequence
  Description of Artificial Sequence: Synthetic oligonucleotide
gagguaaggcaucacauca

SEQ ID NO: 1166776 - RNA, 19 nt, Artificial Sequence
  Description of Artificial Sequence: Synthetic oligonucleotide
ugaacaaguaguucucccu

SEQ ID NO: 1166777 - RNA, 19 nt, Artificial Sequence
  Description of Artificial Sequence: Synthetic oligonucleotide
caguuaaggaacucgccgg

SEQ ID NO: 1166778 - RNA, 19 nt, Artificial Sequence
  Description of Artificial Sequence: Synthetic oligonucleotide
ggcuuaauaucuuccaagg

SEQ ID NO: 1166779 - RNA, 19 nt, Artificial Sequence
  Description of Artificial Sequence: Synthetic oligonucleotide
agcauaucugccauacugc

SEQ ID NO: 1166780 - RNA, 19 nt, Artificial Sequence
  Description of Artificial Sequence: Synthetic oligonucleotide
uuauacuugcagucuccgg

SEQ ID NO: 1166781 - RNA, 19 nt, Artificial Sequence
  Description of Artificial Sequence: Synthetic oligonucleotide
gguugucugagucaggucc

SEQ ID NO: 1166782 - RNA, 19 nt, Artificial Sequence
  Description of Artificial Sequence: Synthetic oligonucleotide
auuuguggaggagggaccc

SEQ ID NO: 1166783 - RNA, 19 nt, Artificial Sequence
  Description of Artificial Sequence: Synthetic oligonucleotide
aaggcgguaacaugcaaaa

SEQ ID NO: 1166784 - RNA, 19 nt, Artificial Sequence
  Description of Artificial Sequence: Synthetic oligonucleotide
auuggagcauccuaaagua

SEQ ID NO: 1166785 - RNA, 19 nt, Artificial Sequence
  Description of Artificial Sequence: Synthetic oligonucleotide
guagcugauacagauuucc

SEQ ID NO: 1166786 - RNA, 19 nt, Artificial Sequence
  Description of Artificial Sequence: Synthetic oligonucleotide
uuucacaguagccaccauc

SEQ ID NO: 1166787 - RNA, 19 nt, Artificial Sequence
  Description of Artificial Sequence: Synthetic oligonucleotide
ucuaccuguuccaccuugg

SEQ ID NO: 1166788 - RNA, 19 nt, Artificial Sequence
  Description of Artificial Sequence: Synthetic oligonucleotide
uuggaaugagccuguagca

SEQ ID NO: 1166789 - RNA, 19 nt, Artificial Sequence
  Description of Artificial Sequence: Synthetic oligonucleotide
cauuauacuugcagucucc

SEQ ID NO: 1166790 - RNA, 19 nt, Artificial Sequence
  Description of Artificial Sequence: Synthetic oligonucleotide
cucauuagccguuuugcug

SEQ ID NO: 1166791 - RNA, 19 nt, Artificial Sequence
  Description of Artificial Sequence: Synthetic oligonucleotide
aacaaguaguucucccuga

SEQ ID NO: 1166792 - RNA, 19 nt, Artificial Sequence
  Description of Artificial Sequence: Synthetic oligonucleotide
ucccugaggaucuuguggc

SEQ ID NO: 1166793 - RNA, 19 nt, Artificial Sequence
  Description of Artificial Sequence: Synthetic oligonucleotide
ucuaaguagcugauacaga

SEQ ID NO: 1166794 - RNA, 19 nt, Artificial Sequence
  Description of Artificial Sequence: Synthetic oligonucleotide
cucuauagacauccuaaag

SEQ ID NO: 1166795 - RNA, 19 nt, Artificial Sequence
  Description of Artificial Sequence: Synthetic oligonucleotide
gauuggagcauccuaaagu

SEQ ID NO: 1166796 - RNA, 19 nt, Artificial Sequence
  Description of Artificial Sequence: Synthetic oligonucleotide
aauuaacacccagucaaga

SEQ ID NO: 1166797 - RNA, 19 nt, Artificial Sequence
  Description of Artificial Sequence: Synthetic oligonucleotide
auuauacuugcagucuccg

SEQ ID NO: 1166798 - RNA, 19 nt, Artificial Sequence
  Description of Artificial Sequence: Synthetic oligonucleotide
aggguuacgucacacguca

SEQ ID NO: 1166799 - RNA, 19 nt, Artificial Sequence
  Description of Artificial Sequence: Synthetic oligonucleotide
aggagcauaucugccauac

SEQ ID NO: 1166800 - RNA, 19 nt, Artificial Sequence
  Description of Artificial Sequence: Synthetic oligonucleotide
ugauacagauuuccucgcc

SEQ ID NO: 1166801 - RNA, 19 nt, Artificial Sequence
  Description of Artificial Sequence: Synthetic oligonucleotide
cauccuaaaguaaggagca

SEQ ID NO: 1166802 - RNA, 19 nt, Artificial Sequence
  Description of Artificial Sequence: Synthetic oligonucleotide
guagcauaggcacgggucc

SEQ ID NO: 1166803 - RNA, 19 nt, Artificial Sequence
  Description of Artificial Sequence: Synthetic oligonucleotide
gaggccuggagccuguucc

SEQ ID NO: 1166804 - RNA, 19 nt, Artificial Sequence
  Description of Artificial Sequence: Synthetic oligonucleotide
aacaugcaaaaggaaguug

SEQ ID NO: 1166805 - RNA, 19 nt, Artificial Sequence
  Description of Artificial Sequence: Synthetic oligonucleotide
gggaauaucaguucuagaa

SEQ ID NO: 1166806 - RNA, 19 nt, Artificial Sequence
  Description of Artificial Sequence: Synthetic oligonucleotide
gugaguaugggccaaggga

SEQ ID NO: 1166807 - RNA, 19 nt, Artificial Sequence
  Description of Artificial Sequence: Synthetic oligonucleotide
guuccccucaaauuaacac

SEQ ID NO: 1166808 - RNA, 19 nt, Artificial Sequence
  Description of Artificial Sequence: Synthetic oligonucleotide
uccaagaugccaccccaag

SEQ ID NO: 1166809 - RNA, 19 nt, Artificial Sequence
  Description of Artificial Sequence: Synthetic oligonucleotide
auacuugcagucuccggag

SEQ ID NO: 1166810 - RNA, 19 nt, Artificial Sequence
  Description of Artificial Sequence: Synthetic oligonucleotide
uugugaaggagugugucca

SEQ ID NO: 1166811 - RNA, 19 nt, Artificial Sequence
  Description of Artificial Sequence: Synthetic oligonucleotide
uccucauuagccguuuugc

SEQ ID NO: 1166812 - RNA, 19 nt, Artificial Sequence
  Description of Artificial Sequence: Synthetic oligonucleotide
agauuggagcauccuaaag

SEQ ID NO: 1166813 - RNA, 19 nt, Artificial Sequence
  Description of Artificial Sequence: Synthetic oligonucleotide
gaauccaucaggcgugaac

SEQ ID NO: 1166814 - RNA, 19 nt, Artificial Sequence
  Description of Artificial Sequence: Synthetic oligonucleotide
uaaggaacucgccgguugc

SEQ ID NO: 1166815 - RNA, 19 nt, Artificial Sequence
  Description of Artificial Sequence: Synthetic oligonucleotide
uacgcagaaguuccaguug

SEQ ID NO: 1166816 - RNA, 19 nt, Artificial Sequence
  Description of Artificial Sequence: Synthetic oligonucleotide
uccaguuggcccuugaauu

SEQ ID NO: 1166817 - RNA, 19 nt, Artificial Sequence
  Description of Artificial Sequence: Synthetic oligonucleotide
auagugaacacuccuccau

SEQ ID NO: 1166818 - RNA, 19 nt, Artificial Sequence
  Description of Artificial Sequence: Synthetic oligonucleotide
ggauaggugaguaugggcc

SEQ ID NO: 1166819 - RNA, 19 nt, Artificial Sequence
  Description of Artificial Sequence: Synthetic oligonucleotide
gaagacuucaguguuccuc

SEQ ID NO: 1166820 - RNA, 19 nt, Artificial Sequence
  Description of Artificial Sequence: Synthetic oligonucleotide
aguaugggccaagggaccc

SEQ ID NO: 1166821 - RNA, 19 nt, Artificial Sequence
  Description of Artificial Sequence: Synthetic oligonucleotide
acaaguaguucucccugag

SEQ ID NO: 1166822 - RNA, 19 nt, Artificial Sequence
  Description of Artificial Sequence: Synthetic oligonucleotide
auuggggacacaacugugg

SEQ ID NO: 1166823 - RNA, 19 nt, Artificial Sequence
  Description of Artificial Sequence: Synthetic oligonucleotide
guugugaaggagugugucc

SEQ ID NO: 1166824 - RNA, 19 nt, Artificial Sequence
  Description of Artificial Sequence: Synthetic oligonucleotide
acguucuaccuguuccacc

SEQ ID NO: 1166825 - RNA, 19 nt, Artificial Sequence
  Description of Artificial Sequence: Synthetic oligonucleotide
uaaggagcauaucugccau

SEQ ID NO: 1166826 - RNA, 19 nt, Artificial Sequence
  Description of Artificial Sequence: Synthetic oligonucleotide
agggaacaaagucauggcu

SEQ ID NO: 1166827 - RNA, 19 nt, Artificial Sequence
  Description of Artificial Sequence: Synthetic oligonucleotide
uuagccguuuugcugcaga

SEQ ID NO: 1166828 - RNA, 19 nt, Artificial Sequence
  Description of Artificial Sequence: Synthetic oligonucleotide
cauuuguggaggagggacc

SEQ ID NO: 1166829 - RNA, 19 nt, Artificial Sequence
  Description of Artificial Sequence: Synthetic oligonucleotide
cagcauuauacuugcaguc

SEQ ID NO: 1166830 - RNA, 19 nt, Artificial Sequence
  Description of Artificial Sequence: Synthetic oligonucleotide
uggcaagggaauaucaguu

SEQ ID NO: 1166831 - RNA, 19 nt, Artificial Sequence
  Description of Artificial Sequence: Synthetic oligonucleotide
cacaguuaaggaacucgcc

SEQ ID NO: 1166832 - RNA, 19 nt, Artificial Sequence
  Description of Artificial Sequence: Synthetic oligonucleotide
gauaggugaguaugggcca

SEQ ID NO: 1166833 - RNA, 19 nt, Artificial Sequence
  Description of Artificial Sequence: Synthetic oligonucleotide
uacgucacacgucagucau

SEQ ID NO: 1166834 - RNA, 19 nt, Artificial Sequence
  Description of Artificial Sequence: Synthetic oligonucleotide
aagaacacuaugaggccug

SEQ ID NO: 1166835 - RNA, 19 nt, Artificial Sequence
  Description of Artificial Sequence: Synthetic oligonucleotide
uccuaaaggcgguugucug

SEQ ID NO: 1166836 - RNA, 19 nt, Artificial Sequence
  Description of Artificial Sequence: Synthetic oligonucleotide
cagucucacggcuacagug

SEQ ID NO: 1166837 - RNA, 19 nt, Artificial Sequence
  Description of Artificial Sequence: Synthetic oligonucleotide
cugauacagauuuccucgc

SEQ ID NO: 1166838 - RNA, 19 nt, Artificial Sequence
  Description of Artificial Sequence: Synthetic oligonucleotide
gauagugaacacuccucca

SEQ ID NO: 1166839 - RNA, 19 nt, Artificial Sequence
  Description of Artificial Sequence: Synthetic oligonucleotide
uguuccaccuuggaaugag

SEQ ID NO: 1166840 - RNA, 19 nt, Artificial Sequence
  Description of Artificial Sequence: Synthetic oligonucleotide
ucacaguagccaccauccg

SEQ ID NO: 1166841 - RNA, 19 nt, Artificial Sequence
  Description of Artificial Sequence: Synthetic oligonucleotide
aaggcgguugucugaguca

SEQ ID NO: 1166842 - RNA, 19 nt, Artificial Sequence
  Description of Artificial Sequence: Synthetic oligonucleotide
acagaaugccagaagggag

SEQ ID NO: 1166843 - RNA, 19 nt, Artificial Sequence
  Description of Artificial Sequence: Synthetic oligonucleotide
uggcgaggagggaacaaag

SEQ ID NO: 1166844 - RNA, 19 nt, Artificial Sequence
  Description of Artificial Sequence: Synthetic oligonucleotide
uaauaucuuccaaggcggu

SEQ ID NO: 1166845 - RNA, 19 nt, Artificial Sequence
  Description of Artificial Sequence: Synthetic oligonucleotide
aggauagugaacacuccuc

SEQ ID NO: 1166846 - RNA, 19 nt, Artificial Sequence
  Description of Artificial Sequence: Synthetic oligonucleotide
cucuuucugucaaggaaac

SEQ ID NO: 1166847 - RNA, 19 nt, Artificial Sequence
  Description of Artificial Sequence: Synthetic oligonucleotide
uacuugcagucuccggagg

SEQ ID NO: 1166848 - RNA, 19 nt, Artificial Sequence
  Description of Artificial Sequence: Synthetic oligonucleotide
uuacgucacacgucaguca

SEQ ID NO: 1166849 - RNA, 19 nt, Artificial Sequence
  Description of Artificial Sequence: Synthetic oligonucleotide
agcauuauacuugcagucu

SEQ ID NO: 1166850 - RNA, 19 nt, Artificial Sequence
  Description of Artificial Sequence: Synthetic oligonucleotide
gguauugcuccgcagcugc

SEQ ID NO: 1166851 - RNA, 19 nt, Artificial Sequence
  Description of Artificial Sequence: Synthetic oligonucleotide
uacugcuaggaagagguaa

SEQ ID NO: 1166852 - RNA, 19 nt, Artificial Sequence
  Description of Artificial Sequence: Synthetic oligonucleotide
uguugugaaggaguguguc

SEQ ID NO: 1166853 - RNA, 19 nt, Artificial Sequence
  Description of Artificial Sequence: Synthetic oligonucleotide
aagaugccaccccaagaau

SEQ ID NO: 1166854 - RNA, 19 nt, Artificial Sequence
  Description of Artificial Sequence: Synthetic oligonucleotide
aggcgugaaccacuggcuc

SEQ ID NO: 1166855 - RNA, 19 nt, Artificial Sequence
  Description of Artificial Sequence: Synthetic oligonucleotide
guaacaugcaaaaggaagu

SEQ ID NO: 1166856 - RNA, 19 nt, Artificial Sequence
  Description of Artificial Sequence: Synthetic oligonucleotide
cacccagucaagaggggcc

SEQ ID NO: 1166857 - RNA, 19 nt, Artificial Sequence
  Description of Artificial Sequence: Synthetic oligonucleotide
uccuaaaguaaggagcaua

SEQ ID NO: 1166858 - RNA, 19 nt, Artificial Sequence
  Description of Artificial Sequence: Synthetic oligonucleotide
uccaaggcgguaacaugca

SEQ ID NO: 1166859 - RNA, 19 nt, Artificial Sequence
  Description of Artificial Sequence: Synthetic oligonucleotide
cagaaugccagaagggaga

SEQ ID NO: 1166860 - RNA, 19 nt, Artificial Sequence
  Description of Artificial Sequence: Synthetic oligonucleotide
gcuuaauaucuuccaaggc

SEQ ID NO: 1166861 - RNA, 19 nt, Artificial Sequence
  Description of Artificial Sequence: Synthetic oligonucleotide
ggggacacaacugugguug

SEQ ID NO: 1166862 - RNA, 19 nt, Artificial Sequence
  Description of Artificial Sequence: Synthetic oligonucleotide
gagagaccggaauccauca

SEQ ID NO: 1166863 - RNA, 19 nt, Artificial Sequence
  Description of Artificial Sequence: Synthetic oligonucleotide
guuacgucacacgucaguc

SEQ ID NO: 1166864 - RNA, 19 nt, Artificial Sequence
  Description of Artificial Sequence: Synthetic oligonucleotide
uggucccuuguccuuggcc

SEQ ID NO: 1166865 - RNA, 19 nt, Artificial Sequence
  Description of Artificial Sequence: Synthetic oligonucleotide
gcuuggugauagcacaggg

SEQ ID NO: 1166866 - RNA, 19 nt, Artificial Sequence
  Description of Artificial Sequence: Synthetic oligonucleotide
cauuggggacacaacugug

SEQ ID NO: 1166867 - RNA, 19 nt, Artificial Sequence
  Description of Artificial Sequence: Synthetic oligonucleotide
acccuucacaguuaaggaa

SEQ ID NO: 1166868 - RNA, 19 nt, Artificial Sequence
  Description of Artificial Sequence: Synthetic oligonucleotide
ugcgcucccgcugacagca

SEQ ID NO: 1166869 - RNA, 19 nt, Artificial Sequence
  Description of Artificial Sequence: Synthetic oligonucleotide
uuguuccccucaaauuaac

SEQ ID NO: 1166870 - RNA, 19 nt, Artificial Sequence
  Description of Artificial Sequence: Synthetic oligonucleotide
ggccauuucagcugguccc

SEQ ID NO: 1166871 - RNA, 19 nt, Artificial Sequence
  Description of Artificial Sequence: Synthetic oligonucleotide
uaucuuccaaggcgguaac

SEQ ID NO: 1166872 - RNA, 19 nt, Artificial Sequence
  Description of Artificial Sequence: Synthetic oligonucleotide
agucaggcacguucuaccu

SEQ ID NO: 1166873 - RNA, 19 nt, Artificial Sequence
  Description of Artificial Sequence: Synthetic oligonucleotide
gguggauaggugaguaugg

SEQ ID NO: 1166874 - RNA, 19 nt, Artificial Sequence
  Description of Artificial Sequence: Synthetic oligonucleotide
ggugaguaugggccaaggg

SEQ ID NO: 1166875 - RNA, 19 nt, Artificial Sequence
  Description of Artificial Sequence: Synthetic oligonucleotide
gaggauagugaacacuccu

SEQ ID NO: 1166876 - RNA, 19 nt, Artificial Sequence
  Description of Artificial Sequence: Synthetic oligonucleotide
agagaccggaauccaucag

SEQ ID NO: 1166877 - RNA, 19 nt, Artificial Sequence
  Description of Artificial Sequence: Synthetic oligonucleotide
ucucacggcuacaguggag

SEQ ID NO: 1166878 - RNA, 19 nt, Artificial Sequence
  Description of Artificial Sequence: Synthetic oligonucleotide
caguguuccucuauagaca

SEQ ID NO: 1166879 - RNA, 19 nt, Artificial Sequence
  Description of Artificial Sequence: Synthetic oligonucleotide
agggaagauuggagcaucc

SEQ ID NO: 1166880 - RNA, 19 nt, Artificial Sequence
  Description of Artificial Sequence: Synthetic oligonucleotide
agggaaagaaugggagcgg

SEQ ID NO: 1166881 - RNA, 19 nt, Artificial Sequence
  Description of Artificial Sequence: Synthetic oligonucleotide
ucuuucugucaaggaaacc

SEQ ID NO: 1166882 - RNA, 19 nt, Artificial Sequence
  Description of Artificial Sequence: Synthetic oligonucleotide
aguggucccuuguccuugg

SEQ ID NO: 1166883 - RNA, 19 nt, Artificial Sequence
  Description of Artificial Sequence: Synthetic oligonucleotide
agggagagaggggugcugg

SEQ ID NO: 1166884 - RNA, 19 nt, Artificial Sequence
  Description of Artificial Sequence: Synthetic oligonucleotide
uguuccagucucacggcua

SEQ ID NO: 1166885 - RNA, 19 nt, Artificial Sequence
  Description of Artificial Sequence: Synthetic oligonucleotide
auaggcacggguccucccu

SEQ ID NO: 1166886 - RNA, 19 nt, Artificial Sequence
  Description of Artificial Sequence: Synthetic oligonucleotide
gaacacuccuccaugccuc

SEQ ID NO: 1166887 - RNA, 19 nt, Artificial Sequence
  Description of Artificial Sequence: Synthetic oligonucleotide
aguggagcguggcaaggga

SEQ ID NO: 1166888 - RNA, 19 nt, Artificial Sequence
  Description of Artificial Sequence: Synthetic oligonucleotide
agggaauaucaguucuaga

SEQ ID NO: 1166889 - RNA, 19 nt, Artificial Sequence
  Description of Artificial Sequence: Synthetic oligonucleotide
gaacucgccgguugcugcc

SEQ ID NO: 1166890 - RNA, 19 nt, Artificial Sequence
  Description of Artificial Sequence: Synthetic oligonucleotide
uuuguccccaggaguuugu

SEQ ID NO: 1166891 - RNA, 19 nt, Artificial Sequence
  Description of Artificial Sequence: Synthetic oligonucleotide
ccacauuuguggaggaggg

SEQ ID NO: 1166892 - RNA, 19 nt, Artificial Sequence
  Description of Artificial Sequence: Synthetic oligonucleotide
uggagcguggcaagggaau

SEQ ID NO: 1166893 - RNA, 19 nt, Artificial Sequence
  Description of Artificial Sequence: Synthetic oligonucleotide
agauggucaucuguggcga

SEQ ID NO: 1166894 - RNA, 19 nt, Artificial Sequence
  Description of Artificial Sequence: Synthetic oligonucleotide
cagcuuugaagcacaaaga

SEQ ID NO: 1166895 - RNA, 19 nt, Artificial Sequence
  Description of Artificial Sequence: Synthetic oligonucleotide
cagcagucuaaguagcuga

SEQ ID NO: 1166896 - RNA, 19 nt, Artificial Sequence
  Description of Artificial Sequence: Synthetic oligonucleotide
cacggguccucccugggag

SEQ ID NO: 1166897 - RNA, 19 nt, Artificial Sequence
  Description of Artificial Sequence: Synthetic oligonucleotide
uggaaugagccuguagcau

SEQ ID NO: 1166898 - RNA, 19 nt, Artificial Sequence
  Description of Artificial Sequence: Synthetic oligonucleotide
uauugcuccgcagcugcca

SEQ ID NO: 1166899 - RNA, 19 nt, Artificial Sequence
  Description of Artificial Sequence: Synthetic oligonucleotide
auccuaaaggcgguugucu

SEQ ID NO: 1166900 - RNA, 19 nt, Artificial Sequence
  Description of Artificial Sequence: Synthetic oligonucleotide
aguagcugauacagauuuc

SEQ ID NO: 1166901 - RNA, 19 nt, Artificial Sequence
  Description of Artificial Sequence: Synthetic oligonucleotide
cuccucauuagccguuuug

SEQ ID NO: 1166902 - RNA, 19 nt, Artificial Sequence
  Description of Artificial Sequence: Synthetic oligonucleotide
ggucuccucguacagggcc

SEQ ID NO: 1166903 - RNA, 19 nt, Artificial Sequence
  Description of Artificial Sequence: Synthetic oligonucleotide
augccagaagggagaaagc

SEQ ID NO: 1166904 - RNA, 19 nt, Artificial Sequence
  Description of Artificial Sequence: Synthetic oligonucleotide
gauggucaucuguggcgag

SEQ ID NO: 1166905 - RNA, 19 nt, Artificial Sequence
  Description of Artificial Sequence: Synthetic oligonucleotide
agccguuuugcugcagaac

SEQ ID NO: 1166906 - RNA, 19 nt, Artificial Sequence
  Description of Artificial Sequence: Synthetic oligonucleotide
acucggugguauugcuccg

SEQ ID NO: 1166907 - RNA, 19 nt, Artificial Sequence
  Description of Artificial Sequence: Synthetic oligonucleotide
caucaggcgugaaccacug

SEQ ID NO: 1166908 - RNA, 19 nt, Artificial Sequence
  Description of Artificial Sequence: Synthetic oligonucleotide
gauuuccucgccuggcuua

SEQ ID NO: 1166909 - RNA, 19 nt, Artificial Sequence
  Description of Artificial Sequence: Synthetic oligonucleotide
cacaguagccaccauccga

SEQ ID NO: 1166910 - RNA, 19 nt, Artificial Sequence
  Description of Artificial Sequence: Synthetic oligonucleotide
ggcaaugggugcaaggaug

SEQ ID NO: 1166911 - RNA, 19 nt, Artificial Sequence
  Description of Artificial Sequence: Synthetic oligonucleotide
uccucgccuggcuuaauau

SEQ ID NO: 1166912 - RNA, 19 nt, Artificial Sequence
  Description of Artificial Sequence: Synthetic oligonucleotide
ggcaggguuacgucacacg

SEQ ID NO: 1166913 - RNA, 19 nt, Artificial Sequence
  Description of Artificial Sequence: Synthetic oligonucleotide
ucgagagaccggaauccau

SEQ ID NO: 1166914 - RNA, 19 nt, Artificial Sequence
  Description of Artificial Sequence: Synthetic oligonucleotide
ugggugcaaggaugagggg

SEQ ID NO: 1166915 - RNA, 19 nt, Artificial Sequence
  Description of Artificial Sequence: Synthetic oligonucleotide
cuccggaggauagugaaca

SEQ ID NO: 1166916 - RNA, 19 nt, Artificial Sequence
  Description of Artificial Sequence: Synthetic oligonucleotide
aauuuguccccaggaguuu

SEQ ID NO: 1166917 - RNA, 19 nt, Artificial Sequence
  Description of Artificial Sequence: Synthetic oligonucleotide
gcauuauacuugcagucuc

SEQ ID NO: 1166918 - RNA, 19 nt, Artificial Sequence
  Description of Artificial Sequence: Synthetic oligonucleotide
caaggcgguaacaugcaaa

SEQ ID NO: 1166919 - RNA, 19 nt, Artificial Sequence
  Description of Artificial Sequence: Synthetic oligonucleotide
gaauuuguccccaggaguu

SEQ ID NO: 1166920 - RNA, 19 nt, Artificial Sequence
  Description of Artificial Sequence: Synthetic oligonucleotide
acaggacucggugguauug

SEQ ID NO: 1166921 - RNA, 19 nt, Artificial Sequence
  Description of Artificial Sequence: Synthetic oligonucleotide
gcaggcaaugggugcaagg

SEQ ID NO: 1166922 - RNA, 19 nt, Artificial Sequence
  Description of Artificial Sequence: Synthetic oligonucleotide
gaaugggagcgguagcugu

SEQ ID NO: 1166923 - RNA, 19 nt, Artificial Sequence
  Description of Artificial Sequence: Synthetic oligonucleotide
caggguuacgucacacguc

SEQ ID NO: 1166924 - RNA, 19 nt, Artificial Sequence
  Description of Artificial Sequence: Synthetic oligonucleotide
ugccucgagagaccggaau

SEQ ID NO: 1166925 - RNA, 19 nt, Artificial Sequence
  Description of Artificial Sequence: Synthetic oligonucleotide
aggugaguaugggccaagg

SEQ ID NO: 1166926 - RNA, 19 nt, Artificial Sequence
  Description of Artificial Sequence: Synthetic oligonucleotide
gcgaggagggaacaaaguc

SEQ ID NO: 1166927 - RNA, 19 nt, Artificial Sequence
  Description of Artificial Sequence: Synthetic oligonucleotide
ugguauugcuccgcagcug

SEQ ID NO: 1166928 - RNA, 19 nt, Artificial Sequence
  Description of Artificial Sequence: Synthetic oligonucleotide
cucgccuggcuuaauaucu

SEQ ID NO: 1166929 - RNA, 19 nt, Artificial Sequence
  Description of Artificial Sequence: Synthetic oligonucleotide
uagccguuuugcugcagaa

SEQ ID NO: 1166930 - RNA, 19 nt, Artificial Sequence
  Description of Artificial Sequence: Synthetic oligonucleotide
gucaggcacguucuaccug

SEQ ID NO: 1166931 - RNA, 19 nt, Artificial Sequence
  Description of Artificial Sequence: Synthetic oligonucleotide
ggcaagggaauaucaguuc

SEQ ID NO: 1166932 - RNA, 19 nt, Artificial Sequence
  Description of Artificial Sequence: Synthetic oligonucleotide
cagucaagaggggccaagc

SEQ ID NO: 1166933 - RNA, 19 nt, Artificial Sequence
  Description of Artificial Sequence: Synthetic oligonucleotide
aaggagcauaucugccaua

SEQ ID NO: 1166934 - RNA, 19 nt, Artificial Sequence
  Description of Artificial Sequence: Synthetic oligonucleotide
uuccucgccuggcuuaaua

SEQ ID NO: 1166935 - RNA, 19 nt, Artificial Sequence
  Description of Artificial Sequence: Synthetic oligonucleotide
agucauggcucaucuccaa

SEQ ID NO: 1166936 - RNA, 19 nt, Artificial Sequence
  Description of Artificial Sequence: Synthetic oligonucleotide
aggcaggguuacgucacac

SEQ ID NO: 1166937 - RNA, 19 nt, Artificial Sequence
  Description of Artificial Sequence: Synthetic oligonucleotide
auagcacagggccgaugca

SEQ ID NO: 1166938 - RNA, 19 nt, Artificial Sequence
  Description of Artificial Sequence: Synthetic oligonucleotide
uccggaggauagugaacac

SEQ ID NO: 1166939 - RNA, 19 nt, Artificial Sequence
  Description of Artificial Sequence: Synthetic oligonucleotide
ccgguugcugccucgagag

SEQ ID NO: 1166940 - RNA, 19 nt, Artificial Sequence
  Description of Artificial Sequence: Synthetic oligonucleotide
gggccauuucagcuggucc

SEQ ID NO: 1166941 - RNA, 19 nt, Artificial Sequence
  Description of Artificial Sequence: Synthetic oligonucleotide
aaccacuggcucagggucu

SEQ ID NO: 1166942 - RNA, 19 nt, Artificial Sequence
  Description of Artificial Sequence: Synthetic oligonucleotide
cuaugaggccuggagccug

SEQ ID NO: 1166943 - RNA, 19 nt, Artificial Sequence
  Description of Artificial Sequence: Synthetic oligonucleotide
acuaugaggccuggagccu

SEQ ID NO: 1166944 - RNA, 19 nt, Artificial Sequence
  Description of Artificial Sequence: Synthetic oligonucleotide
uccuuugcugggccauuuc

SEQ ID NO: 1166945 - RNA, 19 nt, Artificial Sequence
  Description of Artificial Sequence: Synthetic oligonucleotide
uaggugaguaugggccaag

SEQ ID NO: 1166946 - RNA, 19 nt, Artificial Sequence
  Description of Artificial Sequence: Synthetic oligonucleotide
auggcucaucuccaagcau

SEQ ID NO: 1166947 - RNA, 19 nt, Artificial Sequence
  Description of Artificial Sequence: Synthetic oligonucleotide
gugaagagccuacgcagaa

SEQ ID NO: 1166948 - RNA, 19 nt, Artificial Sequence
  Description of Artificial Sequence: Synthetic oligonucleotide
ggcccuugaauuugucccc

SEQ ID NO: 1166949 - RNA, 19 nt, Artificial Sequence
  Description of Artificial Sequence: Synthetic oligonucleotide
gcgguaacaugcaaaagga

SEQ ID NO: 1166950 - RNA, 19 nt, Artificial Sequence
  Description of Artificial Sequence: Synthetic oligonucleotide
ggugauagcacagggccga

SEQ ID NO: 1166951 - RNA, 19 nt, Artificial Sequence
  Description of Artificial Sequence: Synthetic oligonucleotide
cggaggauagugaacacuc

SEQ ID NO: 1166952 - RNA, 19 nt, Artificial Sequence
  Description of Artificial Sequence: Synthetic oligonucleotide
aggcacggguccucccugg

SEQ ID NO: 1166953 - RNA, 19 nt, Artificial Sequence
  Description of Artificial Sequence: Synthetic oligonucleotide
aucuguggcgaggagggaa

SEQ ID NO: 1166954 - RNA, 19 nt, Artificial Sequence
  Description of Artificial Sequence: Synthetic oligonucleotide
cugcauuggggacacaacu

SEQ ID NO: 1166955 - RNA, 19 nt, Artificial Sequence
  Description of Artificial Sequence: Synthetic oligonucleotide
gcugcgcucccgcugacag

SEQ ID NO: 1166956 - RNA, 19 nt, Artificial Sequence
  Description of Artificial Sequence: Synthetic oligonucleotide
caguuggcccuugaauuug

SEQ ID NO: 1166957 - RNA, 19 nt, Artificial Sequence
  Description of Artificial Sequence: Synthetic oligonucleotide
cauccuaaaggcgguuguc

SEQ ID NO: 1166958 - RNA, 19 nt, Artificial Sequence
  Description of Artificial Sequence: Synthetic oligonucleotide
aggaacucgccgguugcug

SEQ ID NO: 1166959 - RNA, 19 nt, Artificial Sequence
  Description of Artificial Sequence: Synthetic oligonucleotide
gccguuuugcugcagaacu

SEQ ID NO: 1166960 - RNA, 19 nt, Artificial Sequence
  Description of Artificial Sequence: Synthetic oligonucleotide
cuucacaguuaaggaacuc

SEQ ID NO: 1166961 - RNA, 19 nt, Artificial Sequence
  Description of Artificial Sequence: Synthetic oligonucleotide
gcaagggaauaucaguucu

SEQ ID NO: 1166962 - RNA, 19 nt, Artificial Sequence
  Description of Artificial Sequence: Synthetic oligonucleotide
cucggugguauugcuccgc

SEQ ID NO: 1166963 - RNA, 19 nt, Artificial Sequence
  Description of Artificial Sequence: Synthetic oligonucleotide
uagcauaggcacggguccu

SEQ ID NO: 1166964 - RNA, 19 nt, Artificial Sequence
  Description of Artificial Sequence: Synthetic oligonucleotide
cuacaguggagcguggcaa

SEQ ID NO: 1166965 - RNA, 19 nt, Artificial Sequence
  Description of Artificial Sequence: Synthetic oligonucleotide
agggccgaugcagcucagc

SEQ ID NO: 1166966 - RNA, 19 nt, Artificial Sequence
  Description of Artificial Sequence: Synthetic oligonucleotide
cagggaagauuggagcauc

SEQ ID NO: 1166967 - RNA, 19 nt, Artificial Sequence
  Description of Artificial Sequence: Synthetic oligonucleotide
cacguucuaccuguuccac

SEQ ID NO: 1166968 - RNA, 19 nt, Artificial Sequence
  Description of Artificial Sequence: Synthetic oligonucleotide
aggcgguaacaugcaaaag

SEQ ID NO: 1166969 - RNA, 19 nt, Artificial Sequence
  Description of Artificial Sequence: Synthetic oligonucleotide
gggccagucaggcacguuc

SEQ ID NO: 1166970 - RNA, 19 nt, Artificial Sequence
  Description of Artificial Sequence: Synthetic oligonucleotide
auaggugaguaugggccaa

SEQ ID NO: 1166971 - RNA, 19 nt, Artificial Sequence
  Description of Artificial Sequence: Synthetic oligonucleotide
ucgccuggcuuaauaucuu

SEQ ID NO: 1166972 - RNA, 19 nt, Artificial Sequence
  Description of Artificial Sequence: Synthetic oligonucleotide
gucucacggcuacagugga

SEQ ID NO: 1166973 - RNA, 19 nt, Artificial Sequence
  Description of Artificial Sequence: Synthetic oligonucleotide
ccucgagagaccggaaucc

SEQ ID NO: 1166974 - RNA, 19 nt, Artificial Sequence
  Description of Artificial Sequence: Synthetic oligonucleotide
cuacgcagaaguuccaguu

SEQ ID NO: 1166975 - RNA, 19 nt, Artificial Sequence
  Description of Artificial Sequence: Synthetic oligonucleotide
agcagucuaaguagcugau

SEQ ID NO: 1166976 - RNA, 19 nt, Artificial Sequence
  Description of Artificial Sequence: Synthetic oligonucleotide
caaugggugcaaggaugag

SEQ ID NO: 1166977 - RNA, 19 nt, Artificial Sequence
  Description of Artificial Sequence: Synthetic oligonucleotide
guuuucugggaaggagguc

SEQ ID NO: 1166978 - RNA, 19 nt, Artificial Sequence
  Description of Artificial Sequence: Synthetic oligonucleotide
gcuacaguggagcguggca

SEQ ID NO: 1166979 - RNA, 19 nt, Artificial Sequence
  Description of Artificial Sequence: Synthetic oligonucleotide
aagagccuacgcagaaguu

SEQ ID NO: 1166980 - RNA, 19 nt, Artificial Sequence
  Description of Artificial Sequence: Synthetic oligonucleotide
ggcgugaaccacuggcuca

SEQ ID NO: 1166981 - RNA, 19 nt, Artificial Sequence
  Description of Artificial Sequence: Synthetic oligonucleotide
gcaaugggugcaaggauga

SEQ ID NO: 1166982 - RNA, 19 nt, Artificial Sequence
  Description of Artificial Sequence: Synthetic oligonucleotide
gcaggguuacgucacacgu

SEQ ID NO: 1166983 - RNA, 19 nt, Artificial Sequence
  Description of Artificial Sequence: Synthetic oligonucleotide
auuuccucgccuggcuuaa

SEQ ID NO: 1166984 - RNA, 19 nt, Artificial Sequence
  Description of Artificial Sequence: Synthetic oligonucleotide
augccaccccaagaaugag

SEQ ID NO: 1166985 - RNA, 19 nt, Artificial Sequence
  Description of Artificial Sequence: Synthetic oligonucleotide
gccucgagagaccggaauc

SEQ ID NO: 1166986 - RNA, 19 nt, Artificial Sequence
  Description of Artificial Sequence: Synthetic oligonucleotide
cauuagccguuuugcugca

SEQ ID NO: 1166987 - RNA, 19 nt, Artificial Sequence
  Description of Artificial Sequence: Synthetic oligonucleotide
agucuccggaggauaguga

SEQ ID NO: 1166988 - RNA, 19 nt, Artificial Sequence
  Description of Artificial Sequence: Synthetic oligonucleotide
gguuacgucacacgucagu

SEQ ID NO: 1166989 - RNA, 19 nt, Artificial Sequence
  Description of Artificial Sequence: Synthetic oligonucleotide
gacagcagucuaaguagcu

SEQ ID NO: 1166990 - RNA, 19 nt, Artificial Sequence
  Description of Artificial Sequence: Synthetic oligonucleotide
gcugccagccggcauucug

SEQ ID NO: 1166991 - RNA, 19 nt, Artificial Sequence
  Description of Artificial Sequence: Synthetic oligonucleotide
cacaaagaggccagacccu

SEQ ID NO: 1166992 - RNA, 19 nt, Artificial Sequence
  Description of Artificial Sequence: Synthetic oligonucleotide
cgagagaccggaauccauc

SEQ ID NO: 1166993 - RNA, 19 nt, Artificial Sequence
  Description of Artificial Sequence: Synthetic oligonucleotide
cacacgucagucaucucau

SEQ ID NO: 1166994 - RNA, 19 nt, Artificial Sequence
  Description of Artificial Sequence: Synthetic oligonucleotide
agcaggcaaugggugcaag

SEQ ID NO: 1166995 - RNA, 19 nt, Artificial Sequence
  Description of Artificial Sequence: Synthetic oligonucleotide
auccuaaaguaaggagcau

SEQ ID NO: 1166996 - RNA, 19 nt, Artificial Sequence
  Description of Artificial Sequence: Synthetic oligonucleotide
gcgugaaccacuggcucag

SEQ ID NO: 1166997 - RNA, 19 nt, Artificial Sequence
  Description of Artificial Sequence: Synthetic oligonucleotide
ccggcauucugcacugcag

SEQ ID NO: 1166998 - RNA, 19 nt, Artificial Sequence
  Description of Artificial Sequence: Synthetic oligonucleotide
acgucacacgucagucauc

SEQ ID NO: 1166999 - RNA, 19 nt, Artificial Sequence
  Description of Artificial Sequence: Synthetic oligonucleotide
cucgagagaccggaaucca

SEQ ID NO: 1167000 - RNA, 19 nt, Artificial Sequence
  Description of Artificial Sequence: Synthetic oligonucleotide
agccucagguggauaggug

SEQ ID NO: 1167001 - RNA, 19 nt, Artificial Sequence
  Description of Artificial Sequence: Synthetic oligonucleotide
gcugccucgagagaccgga

SEQ ID NO: 1167002 - RNA, 19 nt, Artificial Sequence
  Description of Artificial Sequence: Synthetic oligonucleotide
ccucuauagacauccuaaa

SEQ ID NO: 1167003 - RNA, 19 nt, Artificial Sequence
  Description of Artificial Sequence: Synthetic oligonucleotide
cugcgcucccgcugacagc

SEQ ID NO: 1167004 - RNA, 19 nt, Artificial Sequence
  Description of Artificial Sequence: Synthetic oligonucleotide
agguccuuugcugggccau

SEQ ID NO: 1167005 - RNA, 19 nt, Artificial Sequence
  Description of Artificial Sequence: Synthetic oligonucleotide
ccucgccuggcuuaauauc

SEQ ID NO: 1167006 - RNA, 19 nt, Artificial Sequence
  Description of Artificial Sequence: Synthetic oligonucleotide
caggcgugaaccacuggcu

SEQ ID NO: 1167007 - RNA, 19 nt, Artificial Sequence
  Description of Artificial Sequence: Synthetic oligonucleotide
ggucacccugcgaugggcc

SEQ ID NO: 1167008 - RNA, 19 nt, Artificial Sequence
  Description of Artificial Sequence: Synthetic oligonucleotide
ggggucacccugcgauggg

SEQ ID NO: 1167009 - RNA, 19 nt, Artificial Sequence
  Description of Artificial Sequence: Synthetic oligonucleotide
cacagggccgaugcagcuc

SEQ ID NO: 1167010 - RNA, 19 nt, Artificial Sequence
  Description of Artificial Sequence: Synthetic oligonucleotide
cuccaagaugccaccccaa

SEQ ID NO: 1167011 - RNA, 19 nt, Artificial Sequence
  Description of Artificial Sequence: Synthetic oligonucleotide
gagcgguagcugucaucuc

SEQ ID NO: 1167012 - RNA, 19 nt, Artificial Sequence
  Description of Artificial Sequence: Synthetic oligonucleotide
ggcuacaguggagcguggc

SEQ ID NO: 1167013 - RNA, 19 nt, Artificial Sequence
  Description of Artificial Sequence: Synthetic oligonucleotide
auucugcacugcaguacau

SEQ ID NO: 1167014 - RNA, 19 nt, Artificial Sequence
  Description of Artificial Sequence: Synthetic oligonucleotide
ccagucaggcacguucuac

SEQ ID NO: 1167015 - RNA, 19 nt, Artificial Sequence
  Description of Artificial Sequence: Synthetic oligonucleotide
agacauccuaaaggcgguu

SEQ ID NO: 1167016 - RNA, 19 nt, Artificial Sequence
  Description of Artificial Sequence: Synthetic oligonucleotide
ucgccgguugcugccucga

SEQ ID NO: 1167017 - RNA, 19 nt, Artificial Sequence
  Description of Artificial Sequence: Synthetic oligonucleotide
uccccuagcucugcaucuu

SEQ ID NO: 1167018 - RNA, 19 nt, Artificial Sequence
  Description of Artificial Sequence: Synthetic oligonucleotide
guggagcguggcaagggaa

SEQ ID NO: 1167019 - RNA, 19 nt, Artificial Sequence
  Description of Artificial Sequence: Synthetic oligonucleotide
gccggcauucugcacugca

SEQ ID NO: 1167020 - RNA, 19 nt, Artificial Sequence
  Description of Artificial Sequence: Synthetic oligonucleotide
cccuagcucugcaucuuuc

SEQ ID NO: 1167021 - RNA, 19 nt, Artificial Sequence
  Description of Artificial Sequence: Synthetic oligonucleotide
caggaguuuguggacaauu

SEQ ID NO: 1167022 - RNA, 19 nt, Artificial Sequence
  Description of Artificial Sequence: Synthetic oligonucleotide
auacugcuaggaagaggua

SEQ ID NO: 1167023 - RNA, 19 nt, Artificial Sequence
  Description of Artificial Sequence: Synthetic oligonucleotide
caccuuggaaugagccugu

SEQ ID NO: 1167024 - RNA, 19 nt, Artificial Sequence
  Description of Artificial Sequence: Synthetic oligonucleotide
gggaaagaaugggagcggu

SEQ ID NO: 1167025 - RNA, 19 nt, Artificial Sequence
  Description of Artificial Sequence: Synthetic oligonucleotide
gagcguggcaagggaauau

SEQ ID NO: 1167026 - RNA, 19 nt, Artificial Sequence
  Description of Artificial Sequence: Synthetic oligonucleotide
caugccuccugcagccuau

SEQ ID NO: 1167027 - RNA, 19 nt, Artificial Sequence
  Description of Artificial Sequence: Synthetic oligonucleotide
gcgguugucugagucaggu

SEQ ID NO: 1167028 - RNA, 19 nt, Artificial Sequence
  Description of Artificial Sequence: Synthetic oligonucleotide
ggcgguugucugagucagg

SEQ ID NO: 1167029 - RNA, 19 nt, Artificial Sequence
  Description of Artificial Sequence: Synthetic oligonucleotide
ccuagcucugcaucuuucu

SEQ ID NO: 1167030 - RNA, 19 nt, Artificial Sequence
  Description of Artificial Sequence: Synthetic oligonucleotide
ccagacccuucacaguuaa

SEQ ID NO: 1167031 - RNA, 19 nt, Artificial Sequence
  Description of Artificial Sequence: Synthetic oligonucleotide
ggguuacgucacacgucag

SEQ ID NO: 1167032 - RNA, 19 nt, Artificial Sequence
  Description of Artificial Sequence: Synthetic oligonucleotide
ggagccuguuccagucuca

SEQ ID NO: 1167033 - RNA, 19 nt, Artificial Sequence
  Description of Artificial Sequence: Synthetic oligonucleotide
ggagcauaucugccauacu

SEQ ID NO: 1167034 - RNA, 19 nt, Artificial Sequence
  Description of Artificial Sequence: Synthetic oligonucleotide
gggaagauuggagcauccu

SEQ ID NO: 1167035 - RNA, 19 nt, Artificial Sequence
  Description of Artificial Sequence: Synthetic oligonucleotide
ccaucaggcgugaaccacu

SEQ ID NO: 1167036 - RNA, 19 nt, Artificial Sequence
  Description of Artificial Sequence: Synthetic oligonucleotide
ccuacgcagaaguuccagu

SEQ ID NO: 1167037 - RNA, 19 nt, Artificial Sequence
  Description of Artificial Sequence: Synthetic oligonucleotide
gcagucuaaguagcugaua

SEQ ID NO: 1167038 - RNA, 19 nt, Artificial Sequence
  Description of Artificial Sequence: Synthetic oligonucleotide
guuucacaguagccaccau

SEQ ID NO: 1167039 - RNA, 19 nt, Artificial Sequence
  Description of Artificial Sequence: Synthetic oligonucleotide
ggcgaggagggaacaaagu

SEQ ID NO: 1167040 - RNA, 19 nt, Artificial Sequence
  Description of Artificial Sequence: Synthetic oligonucleotide
accuuggaaugagccugua

SEQ ID NO: 1167041 - RNA, 19 nt, Artificial Sequence
  Description of Artificial Sequence: Synthetic oligonucleotide
cgguaacaugcaaaaggaa

SEQ ID NO: 1167042 - RNA, 19 nt, Artificial Sequence
  Description of Artificial Sequence: Synthetic oligonucleotide
agccccuugcugggccaug

SEQ ID NO: 1167043 - RNA, 19 nt, Artificial Sequence
  Description of Artificial Sequence: Synthetic oligonucleotide
caucuguggcgaggaggga

SEQ ID NO: 1167044 - RNA, 19 nt, Artificial Sequence
  Description of Artificial Sequence: Synthetic oligonucleotide
cacggcuacaguggagcgu

SEQ ID NO: 1167045 - RNA, 19 nt, Artificial Sequence
  Description of Artificial Sequence: Synthetic oligonucleotide
ccaguuggcccuugaauuu

SEQ ID NO: 1167046 - RNA, 19 nt, Artificial Sequence
  Description of Artificial Sequence: Synthetic oligonucleotide
cugccucgagagaccggaa

SEQ ID NO: 1167047 - RNA, 19 nt, Artificial Sequence
  Description of Artificial Sequence: Synthetic oligonucleotide
gcgaugggccugggcacag

SEQ ID NO: 1167048 - RNA, 19 nt, Artificial Sequence
  Description of Artificial Sequence: Synthetic oligonucleotide
ccaaggcgguaacaugcaa

SEQ ID NO: 1167049 - RNA, 19 nt, Artificial Sequence
  Description of Artificial Sequence: Synthetic oligonucleotide
cacaggacucggugguauu

SEQ ID NO: 1167050 - RNA, 19 nt, Artificial Sequence
  Description of Artificial Sequence: Synthetic oligonucleotide
gcacagggccgaugcagcu

SEQ ID NO: 1167051 - RNA, 19 nt, Artificial Sequence
  Description of Artificial Sequence: Synthetic oligonucleotide
cccugcgaugggccugggc

SEQ ID NO: 1167052 - RNA, 19 nt, Artificial Sequence
  Description of Artificial Sequence: Synthetic oligonucleotide
guccuuugcugggccauuu

SEQ ID NO: 1167053 - RNA, 19 nt, Artificial Sequence
  Description of Artificial Sequence: Synthetic oligonucleotide
ggaauccaucaggcgugaa

SEQ ID NO: 1167054 - RNA, 19 nt, Artificial Sequence
  Description of Artificial Sequence: Synthetic oligonucleotide
gcacaggacucggugguau

SEQ ID NO: 1167055 - RNA, 19 nt, Artificial Sequence
  Description of Artificial Sequence: Synthetic oligonucleotide
ccggaggauagugaacacu

SEQ ID NO: 1167056 - RNA, 19 nt, Artificial Sequence
  Description of Artificial Sequence: Synthetic oligonucleotide
gugauagcacagggccgau

SEQ ID NO: 1167057 - RNA, 19 nt, Artificial Sequence
  Description of Artificial Sequence: Synthetic oligonucleotide
cggcuacaguggagcgugg

SEQ ID NO: 1167058 - RNA, 19 nt, Artificial Sequence
  Description of Artificial Sequence: Synthetic oligonucleotide
ccagggaagauuggagcau

SEQ ID NO: 1167059 - RNA, 19 nt, Artificial Sequence
  Description of Artificial Sequence: Synthetic oligonucleotide
cugggccauuucagcuggu

SEQ ID NO: 1167060 - RNA, 19 nt, Artificial Sequence
  Description of Artificial Sequence: Synthetic oligonucleotide
gccaagccucagguggaua

SEQ ID NO: 1167061 - RNA, 19 nt, Artificial Sequence
  Description of Artificial Sequence: Synthetic oligonucleotide
caggcacguucuaccuguu

SEQ ID NO: 1167062 - RNA, 19 nt, Artificial Sequence
  Description of Artificial Sequence: Synthetic oligonucleotide
cggaauccaucaggcguga

SEQ ID NO: 1167063 - RNA, 19 nt, Artificial Sequence
  Description of Artificial Sequence: Synthetic oligonucleotide
cgguagcugucaucuccaa

SEQ ID NO: 1167064 - RNA, 19 nt, Artificial Sequence
  Description of Artificial Sequence: Synthetic oligonucleotide
gguccuuugcugggccauu

SEQ ID NO: 1167065 - RNA, 19 nt, Artificial Sequence
  Description of Artificial Sequence: Synthetic oligonucleotide
gcgcucccgcugacagcag

SEQ ID NO: 1167066 - RNA, 19 nt, Artificial Sequence
  Description of Artificial Sequence: Synthetic oligonucleotide
ccccuagcucugcaucuuu

SEQ ID NO: 1167067 - RNA, 19 nt, Artificial Sequence
  Description of Artificial Sequence: Synthetic oligonucleotide
ggggccagucaggcacguu

SEQ ID NO: 1167068 - RNA, 19 nt, Artificial Sequence
  Description of Artificial Sequence: Synthetic oligonucleotide
gagucguugacauugaugg

SEQ ID NO: 1167069 - RNA, 19 nt, Artificial Sequence
  Description of Artificial Sequence: Synthetic oligonucleotide
agaguaaccagccucagcg

SEQ ID NO: 1167070 - RNA, 19 nt, Artificial Sequence
  Description of Artificial Sequence: Synthetic oligonucleotide
acagcguucucauugagcc

SEQ ID NO: 1167071 - RNA, 19 nt, Artificial Sequence
  Description of Artificial Sequence: Synthetic oligonucleotide
aaugggcaugcccagauac

SEQ ID NO: 1167072 - RNA, 19 nt, Artificial Sequence
  Description of Artificial Sequence: Synthetic oligonucleotide
uuaucagacauguuggcgg

SEQ ID NO: 1167073 - RNA, 19 nt, Artificial Sequence
  Description of Artificial Sequence: Synthetic oligonucleotide
aagauguugcagcuggacc

SEQ ID NO: 1167074 - RNA, 19 nt, Artificial Sequence
  Description of Artificial Sequence: Synthetic oligonucleotide
aauggcaucguccuucauc

SEQ ID NO: 1167075 - RNA, 19 nt, Artificial Sequence
  Description of Artificial Sequence: Synthetic oligonucleotide
aagauauugcccuccuuac

SEQ ID NO: 1167076 - RNA, 19 nt, Artificial Sequence
  Description of Artificial Sequence: Synthetic oligonucleotide
gauauugcccuccuuacag

SEQ ID NO: 1167077 - RNA, 19 nt, Artificial Sequence
  Description of Artificial Sequence: Synthetic oligonucleotide
aaugauaucaacacagccu

SEQ ID NO: 1167078 - RNA, 19 nt, Artificial Sequence
  Description of Artificial Sequence: Synthetic oligonucleotide
ucaaucucggugaugauga

SEQ ID NO: 1167079 - RNA, 19 nt, Artificial Sequence
  Description of Artificial Sequence: Synthetic oligonucleotide
agaugcaugggcuugugac

SEQ ID NO: 1167080 - RNA, 19 nt, Artificial Sequence
  Description of Artificial Sequence: Synthetic oligonucleotide
aaagauauugcccuccuua

SEQ ID NO: 1167081 - RNA, 19 nt, Artificial Sequence
  Description of Artificial Sequence: Synthetic oligonucleotide
cuugugaccaccacuagcc

SEQ ID NO: 1167082 - RNA, 19 nt, Artificial Sequence
  Description of Artificial Sequence: Synthetic oligonucleotide
caagaagugaaccccaacg

SEQ ID NO: 1167083 - RNA, 19 nt, Artificial Sequence
  Description of Artificial Sequence: Synthetic oligonucleotide
uuggccaucaucuuguaga

SEQ ID NO: 1167084 - RNA, 19 nt, Artificial Sequence
  Description of Artificial Sequence: Synthetic oligonucleotide
uccaagacuccgaagcucg

SEQ ID NO: 1167085 - RNA, 19 nt, Artificial Sequence
  Description of Artificial Sequence: Synthetic oligonucleotide
guagagaagauguugcagc

SEQ ID NO: 1167086 - RNA, 19 nt, Artificial Sequence
  Description of Artificial Sequence: Synthetic oligonucleotide
uguccaauguuacacacaa

SEQ ID NO: 1167087 - RNA, 19 nt, Artificial Sequence
  Description of Artificial Sequence: Synthetic oligonucleotide
uucacaucaaucuccacgu

SEQ ID NO: 1167088 - RNA, 19 nt, Artificial Sequence
  Description of Artificial Sequence: Synthetic oligonucleotide
ugcucaaugcaccacaggu

SEQ ID NO: 1167089 - RNA, 19 nt, Artificial Sequence
  Description of Artificial Sequence: Synthetic oligonucleotide
uauggaugagguuaguuaa

SEQ ID NO: 1167090 - RNA, 19 nt, Artificial Sequence
  Description of Artificial Sequence: Synthetic oligonucleotide
uuggaugccgaguacaucu

SEQ ID NO: 1167091 - RNA, 19 nt, Artificial Sequence
  Description of Artificial Sequence: Synthetic oligonucleotide
aauguccgcgacuuuguag

SEQ ID NO: 1167092 - RNA, 19 nt, Artificial Sequence
  Description of Artificial Sequence: Synthetic oligonucleotide
aguguccaauguuacacac

SEQ ID NO: 1167093 - RNA, 19 nt, Artificial Sequence
  Description of Artificial Sequence: Synthetic oligonucleotide
guaccucuuaucuugacug

SEQ ID NO: 1167094 - RNA, 19 nt, Artificial Sequence
  Description of Artificial Sequence: Synthetic oligonucleotide
uucagcuauguccaaggcc

SEQ ID NO: 1167095 - RNA, 19 nt, Artificial Sequence
  Description of Artificial Sequence: Synthetic oligonucleotide
agcgagaguaaccagccuc

SEQ ID NO: 1167096 - RNA, 19 nt, Artificial Sequence
  Description of Artificial Sequence: Synthetic oligonucleotide
acuagccacauccagccuc

SEQ ID NO: 1167097 - RNA, 19 nt, Artificial Sequence
  Description of Artificial Sequence: Synthetic oligonucleotide
aguaaccagccucagcggg

SEQ ID NO: 1167098 - RNA, 19 nt, Artificial Sequence
  Description of Artificial Sequence: Synthetic oligonucleotide
ucuuaucuugacuggagac

SEQ ID NO: 1167099 - RNA, 19 nt, Artificial Sequence
  Description of Artificial Sequence: Synthetic oligonucleotide
uguagggcaguuuaucaga

SEQ ID NO: 1167100 - RNA, 19 nt, Artificial Sequence
  Description of Artificial Sequence: Synthetic oligonucleotide
agaaugauaucaacacagc

SEQ ID NO: 1167101 - RNA, 19 nt, Artificial Sequence
  Description of Artificial Sequence: Synthetic oligonucleotide
aucgccauagccugccacc

SEQ ID NO: 1167102 - RNA, 19 nt, Artificial Sequence
  Description of Artificial Sequence: Synthetic oligonucleotide
aaccuggcaucucauuuuc

SEQ ID NO: 1167103 - RNA, 19 nt, Artificial Sequence
  Description of Artificial Sequence: Synthetic oligonucleotide
uguagugcauugauggggu

SEQ ID NO: 1167104 - RNA, 19 nt, Artificial Sequence
  Description of Artificial Sequence: Synthetic oligonucleotide
aucuguucaaagugccggc

SEQ ID NO: 1167105 - RNA, 19 nt, Artificial Sequence
  Description of Artificial Sequence: Synthetic oligonucleotide
uucuuaggcaagaagugaa

SEQ ID NO: 1167106 - RNA, 19 nt, Artificial Sequence
  Description of Artificial Sequence: Synthetic oligonucleotide
auggcaucguccuucaucu

SEQ ID NO: 1167107 - RNA, 19 nt, Artificial Sequence
  Description of Artificial Sequence: Synthetic oligonucleotide
agaagcuguggguacuugg

SEQ ID NO: 1167108 - RNA, 19 nt, Artificial Sequence
  Description of Artificial Sequence: Synthetic oligonucleotide
ugggccaugaccugguuug

SEQ ID NO: 1167109 - RNA, 19 nt, Artificial Sequence
  Description of Artificial Sequence: Synthetic oligonucleotide
aucuaugagggacucccgg

SEQ ID NO: 1167110 - RNA, 19 nt, Artificial Sequence
  Description of Artificial Sequence: Synthetic oligonucleotide
uacuugguauggaugaggu

SEQ ID NO: 1167111 - RNA, 19 nt, Artificial Sequence
  Description of Artificial Sequence: Synthetic oligonucleotide
aagacuccgaagcucgugu

SEQ ID NO: 1167112 - RNA, 19 nt, Artificial Sequence
  Description of Artificial Sequence: Synthetic oligonucleotide
gaugcaugggcuugugacc

SEQ ID NO: 1167113 - RNA, 19 nt, Artificial Sequence
  Description of Artificial Sequence: Synthetic oligonucleotide
ucguugacauugauggcag

SEQ ID NO: 1167114 - RNA, 19 nt, Artificial Sequence
  Description of Artificial Sequence: Synthetic oligonucleotide
acacacaauggcaucgucc

SEQ ID NO: 1167115 - RNA, 19 nt, Artificial Sequence
  Description of Artificial Sequence: Synthetic oligonucleotide
agcguucucauugagccac

SEQ ID NO: 1167116 - RNA, 19 nt, Artificial Sequence
  Description of Artificial Sequence: Synthetic oligonucleotide
uccgcaucaaaccuggcau

SEQ ID NO: 1167117 - RNA, 19 nt, Artificial Sequence
  Description of Artificial Sequence: Synthetic oligonucleotide
uauugcccuccuuacaggc

SEQ ID NO: 1167118 - RNA, 19 nt, Artificial Sequence
  Description of Artificial Sequence: Synthetic oligonucleotide
cuuguagugcauugauggg

SEQ ID NO: 1167119 - RNA, 19 nt, Artificial Sequence
  Description of Artificial Sequence: Synthetic oligonucleotide
augaccugguuugugaagg

SEQ ID NO: 1167120 - RNA, 19 nt, Artificial Sequence
  Description of Artificial Sequence: Synthetic oligonucleotide
caacgggguauuuaucugg

SEQ ID NO: 1167121 - RNA, 19 nt, Artificial Sequence
  Description of Artificial Sequence: Synthetic oligonucleotide
uggcgaagcaacugcaaag

SEQ ID NO: 1167122 - RNA, 19 nt, Artificial Sequence
  Description of Artificial Sequence: Synthetic oligonucleotide
uggugacaaagauauugcc

SEQ ID NO: 1167123 - RNA, 19 nt, Artificial Sequence
  Description of Artificial Sequence: Synthetic oligonucleotide
uuaucuugacuggagacuc

SEQ ID NO: 1167124 - RNA, 19 nt, Artificial Sequence
  Description of Artificial Sequence: Synthetic oligonucleotide
ugacucgggccccaaaacc

SEQ ID NO: 1167125 - RNA, 19 nt, Artificial Sequence
  Description of Artificial Sequence: Synthetic oligonucleotide
agcuucuuaggcaagaagu

SEQ ID NO: 1167126 - RNA, 19 nt, Artificial Sequence
  Description of Artificial Sequence: Synthetic oligonucleotide
agguuaguuaagucaccac

SEQ ID NO: 1167127 - RNA, 19 nt, Artificial Sequence
  Description of Artificial Sequence: Synthetic oligonucleotide
guacucuucgucugucucg

SEQ ID NO: 1167128 - RNA, 19 nt, Artificial Sequence
  Description of Artificial Sequence: Synthetic oligonucleotide
uaucagacauguuggcggc

SEQ ID NO: 1167129 - RNA, 19 nt, Artificial Sequence
  Description of Artificial Sequence: Synthetic oligonucleotide
agucguugacauugauggc

SEQ ID NO: 1167130 - RNA, 19 nt, Artificial Sequence
  Description of Artificial Sequence: Synthetic oligonucleotide
uccgcuaggaaugacgaac

SEQ ID NO: 1167131 - RNA, 19 nt, Artificial Sequence
  Description of Artificial Sequence: Synthetic oligonucleotide
auauugcccuccuuacagg

SEQ ID NO: 1167132 - RNA, 19 nt, Artificial Sequence
  Description of Artificial Sequence: Synthetic oligonucleotide
agggcaguuuaucagacau

SEQ ID NO: 1167133 - RNA, 19 nt, Artificial Sequence
  Description of Artificial Sequence: Synthetic oligonucleotide
uggguacuugguauggaug

SEQ ID NO: 1167134 - RNA, 19 nt, Artificial Sequence
  Description of Artificial Sequence: Synthetic oligonucleotide
uuugaagugcagcgucugc

SEQ ID NO: 1167135 - RNA, 19 nt, Artificial Sequence
  Description of Artificial Sequence: Synthetic oligonucleotide
cacgagagucucaaugagg

SEQ ID NO: 1167136 - RNA, 19 nt, Artificial Sequence
  Description of Artificial Sequence: Synthetic oligonucleotide
ccaucuuugaagugcagcg

SEQ ID NO: 1167137 - RNA, 19 nt, Artificial Sequence
  Description of Artificial Sequence: Synthetic oligonucleotide
agguuguggaccccagucg

SEQ ID NO: 1167138 - RNA, 19 nt, Artificial Sequence
  Description of Artificial Sequence: Synthetic oligonucleotide
aacgggguauuuaucuggg

SEQ ID NO: 1167139 - RNA, 19 nt, Artificial Sequence
  Description of Artificial Sequence: Synthetic oligonucleotide
uuaguuaagucaccaccau

SEQ ID NO: 1167140 - RNA, 19 nt, Artificial Sequence
  Description of Artificial Sequence: Synthetic oligonucleotide
uaccucuuaucuugacugg

SEQ ID NO: 1167141 - RNA, 19 nt, Artificial Sequence
  Description of Artificial Sequence: Synthetic oligonucleotide
uggaaugcccgccuuggca

SEQ ID NO: 1167142 - RNA, 19 nt, Artificial Sequence
  Description of Artificial Sequence: Synthetic oligonucleotide
ugagguuaguuaagucacc

SEQ ID NO: 1167143 - RNA, 19 nt, Artificial Sequence
  Description of Artificial Sequence: Synthetic oligonucleotide
cucagcgggacgaacacug

SEQ ID NO: 1167144 - RNA, 19 nt, Artificial Sequence
  Description of Artificial Sequence: Synthetic oligonucleotide
guuaguuaagucaccacca

SEQ ID NO: 1167145 - RNA, 19 nt, Artificial Sequence
  Description of Artificial Sequence: Synthetic oligonucleotide
ugagagguccaucuuugaa

SEQ ID NO: 1167146 - RNA, 19 nt, Artificial Sequence
  Description of Artificial Sequence: Synthetic oligonucleotide
ugcugcgugguccugagua

SEQ ID NO: 1167147 - RNA, 19 nt, Artificial Sequence
  Description of Artificial Sequence: Synthetic oligonucleotide
auggcaggcaccuucagua

SEQ ID NO: 1167148 - RNA, 19 nt, Artificial Sequence
  Description of Artificial Sequence: Synthetic oligonucleotide
agagucucaaugaggacag

SEQ ID NO: 1167149 - RNA, 19 nt, Artificial Sequence
  Description of Artificial Sequence: Synthetic oligonucleotide
caucacgaagcugggaugg

SEQ ID NO: 1167150 - RNA, 19 nt, Artificial Sequence
  Description of Artificial Sequence: Synthetic oligonucleotide
caggcauacacuggaaugc

SEQ ID NO: 1167151 - RNA, 19 nt, Artificial Sequence
  Description of Artificial Sequence: Synthetic oligonucleotide
uugcccgcaaucaucacau

SEQ ID NO: 1167152 - RNA, 19 nt, Artificial Sequence
  Description of Artificial Sequence: Synthetic oligonucleotide
auacacuggaaugcccgcc

SEQ ID NO: 1167153 - RNA, 19 nt, Artificial Sequence
  Description of Artificial Sequence: Synthetic oligonucleotide
acgucaaaguguccaaugu

SEQ ID NO: 1167154 - RNA, 19 nt, Artificial Sequence
  Description of Artificial Sequence: Synthetic oligonucleotide
ucaucacgaagcugggaug

SEQ ID NO: 1167155 - RNA, 19 nt, Artificial Sequence
  Description of Artificial Sequence: Synthetic oligonucleotide
ucccgcauccgcaucaaac

SEQ ID NO: 1167156 - RNA, 19 nt, Artificial Sequence
  Description of Artificial Sequence: Synthetic oligonucleotide
ugugaccaccacuagccac

SEQ ID NO: 1167157 - RNA, 19 nt, Artificial Sequence
  Description of Artificial Sequence: Synthetic oligonucleotide
uuguggaccccagucgugg

SEQ ID NO: 1167158 - RNA, 19 nt, Artificial Sequence
  Description of Artificial Sequence: Synthetic oligonucleotide
agucguggucuccucagag

SEQ ID NO: 1167159 - RNA, 19 nt, Artificial Sequence
  Description of Artificial Sequence: Synthetic oligonucleotide
uccgcgacuuuguagggca

SEQ ID NO: 1167160 - RNA, 19 nt, Artificial Sequence
  Description of Artificial Sequence: Synthetic oligonucleotide
acaccuagaacaguuugug

SEQ ID NO: 1167161 - RNA, 19 nt, Artificial Sequence
  Description of Artificial Sequence: Synthetic oligonucleotide
auguuggcggcgcuuccgc

SEQ ID NO: 1167162 - RNA, 19 nt, Artificial Sequence
  Description of Artificial Sequence: Synthetic oligonucleotide
uggaguaaggauggcagcu

SEQ ID NO: 1167163 - RNA, 19 nt, Artificial Sequence
  Description of Artificial Sequence: Synthetic oligonucleotide
aggcauacacuggaaugcc

SEQ ID NO: 1167164 - RNA, 19 nt, Artificial Sequence
  Description of Artificial Sequence: Synthetic oligonucleotide
uguucaaagugccggccaa

SEQ ID NO: 1167165 - RNA, 19 nt, Artificial Sequence
  Description of Artificial Sequence: Synthetic oligonucleotide
accaccgcaccuccgcacc

SEQ ID NO: 1167166 - RNA, 19 nt, Artificial Sequence
  Description of Artificial Sequence: Synthetic oligonucleotide
guauuuaucuggguggguc

SEQ ID NO: 1167167 - RNA, 19 nt, Artificial Sequence
  Description of Artificial Sequence: Synthetic oligonucleotide
cuggcaucucauuuucagc

SEQ ID NO: 1167168 - RNA, 19 nt, Artificial Sequence
  Description of Artificial Sequence: Synthetic oligonucleotide
uacacuggaaugcccgccu

SEQ ID NO: 1167169 - RNA, 19 nt, Artificial Sequence
  Description of Artificial Sequence: Synthetic oligonucleotide
acucucaguuccccucacc

SEQ ID NO: 1167170 - RNA, 19 nt, Artificial Sequence
  Description of Artificial Sequence: Synthetic oligonucleotide
caccuagaacaguuugugg

SEQ ID NO: 1167171 - RNA, 19 nt, Artificial Sequence
  Description of Artificial Sequence: Synthetic oligonucleotide
agauauugcccuccuuaca

SEQ ID NO: 1167172 - RNA, 19 nt, Artificial Sequence
  Description of Artificial Sequence: Synthetic oligonucleotide
augccgaguacaucucccg

SEQ ID NO: 1167173 - RNA, 19 nt, Artificial Sequence
  Description of Artificial Sequence: Synthetic oligonucleotide
cuuucguccccacgcagcc

SEQ ID NO: 1167174 - RNA, 19 nt, Artificial Sequence
  Description of Artificial Sequence: Synthetic oligonucleotide
cacgucaaaguguccaaug

SEQ ID NO: 1167175 - RNA, 19 nt, Artificial Sequence
  Description of Artificial Sequence: Synthetic oligonucleotide
uggaugagguuaguuaagu

SEQ ID NO: 1167176 - RNA, 19 nt, Artificial Sequence
  Description of Artificial Sequence: Synthetic oligonucleotide
ucaugugcaggcagccagc

SEQ ID NO: 1167177 - RNA, 19 nt, Artificial Sequence
  Description of Artificial Sequence: Synthetic oligonucleotide
ugcaccacagguacucuuc

SEQ ID NO: 1167178 - RNA, 19 nt, Artificial Sequence
  Description of Artificial Sequence: Synthetic oligonucleotide
gauggcccauggcacaacc

SEQ ID NO: 1167179 - RNA, 19 nt, Artificial Sequence
  Description of Artificial Sequence: Synthetic oligonucleotide
auccgcaucaaaccuggca

SEQ ID NO: 1167180 - RNA, 19 nt, Artificial Sequence
  Description of Artificial Sequence: Synthetic oligonucleotide
aaucauguugagaggucca

SEQ ID NO: 1167181 - RNA, 19 nt, Artificial Sequence
  Description of Artificial Sequence: Synthetic oligonucleotide
agaaucauguugagagguc

SEQ ID NO: 1167182 - RNA, 19 nt, Artificial Sequence
  Description of Artificial Sequence: Synthetic oligonucleotide
ucguguccccuguggaucg

SEQ ID NO: 1167183 - RNA, 19 nt, Artificial Sequence
  Description of Artificial Sequence: Synthetic oligonucleotide
uauguccaaggccuuucgu

SEQ ID NO: 1167184 - RNA, 19 nt, Artificial Sequence
  Description of Artificial Sequence: Synthetic oligonucleotide
gaccagccggccuucagcc

SEQ ID NO: 1167185 - RNA, 19 nt, Artificial Sequence
  Description of Artificial Sequence: Synthetic oligonucleotide
gagaguaaccagccucagc

SEQ ID NO: 1167186 - RNA, 19 nt, Artificial Sequence
  Description of Artificial Sequence: Synthetic oligonucleotide
gaugccgaguacaucuccc

SEQ ID NO: 1167187 - RNA, 19 nt, Artificial Sequence
  Description of Artificial Sequence: Synthetic oligonucleotide
uggaccaccgcaccuccgc

SEQ ID NO: 1167188 - RNA, 19 nt, Artificial Sequence
  Description of Artificial Sequence: Synthetic oligonucleotide
gacauugauggcaggcacc

SEQ ID NO: 1167189 - RNA, 19 nt, Artificial Sequence
  Description of Artificial Sequence: Synthetic oligonucleotide
gacucgggccccaaaaccc

SEQ ID NO: 1167190 - RNA, 19 nt, Artificial Sequence
  Description of Artificial Sequence: Synthetic oligonucleotide
aagaugcaugggcuuguga

SEQ ID NO: 1167191 - RNA, 19 nt, Artificial Sequence
  Description of Artificial Sequence: Synthetic oligonucleotide
aucgcucccagguaccucu

SEQ ID NO: 1167192 - RNA, 19 nt, Artificial Sequence
  Description of Artificial Sequence: Synthetic oligonucleotide
ucaguuccccucaccacac

SEQ ID NO: 1167193 - RNA, 19 nt, Artificial Sequence
  Description of Artificial Sequence: Synthetic oligonucleotide
gaugacucgggccccaaaa

SEQ ID NO: 1167194 - RNA, 19 nt, Artificial Sequence
  Description of Artificial Sequence: Synthetic oligonucleotide
ucagcgggacgaacacugg

SEQ ID NO: 1167195 - RNA, 19 nt, Artificial Sequence
  Description of Artificial Sequence: Synthetic oligonucleotide
agccaguccaauguccgcg

SEQ ID NO: 1167196 - RNA, 19 nt, Artificial Sequence
  Description of Artificial Sequence: Synthetic oligonucleotide
agagucguugacauugaug

SEQ ID NO: 1167197 - RNA, 19 nt, Artificial Sequence
  Description of Artificial Sequence: Synthetic oligonucleotide
aagugaaccccaacggggu

SEQ ID NO: 1167198 - RNA, 19 nt, Artificial Sequence
  Description of Artificial Sequence: Synthetic oligonucleotide
uccaggcauacacuggaau

SEQ ID NO: 1167199 - RNA, 19 nt, Artificial Sequence
  Description of Artificial Sequence: Synthetic oligonucleotide
ugccggccaagaaugauau

SEQ ID NO: 1167200 - RNA, 19 nt, Artificial Sequence
  Description of Artificial Sequence: Synthetic oligonucleotide
gagguuaguuaagucacca

SEQ ID NO: 1167201 - RNA, 19 nt, Artificial Sequence
  Description of Artificial Sequence: Synthetic oligonucleotide
cucaguagcgguagugauc

SEQ ID NO: 1167202 - RNA, 19 nt, Artificial Sequence
  Description of Artificial Sequence: Synthetic oligonucleotide
ucucaguagcgguagugau

SEQ ID NO: 1167203 - RNA, 19 nt, Artificial Sequence
  Description of Artificial Sequence: Synthetic oligonucleotide
augguaagaugcaugggcu

SEQ ID NO: 1167204 - RNA, 19 nt, Artificial Sequence
  Description of Artificial Sequence: Synthetic oligonucleotide
ugccgaguacaucucccgc

SEQ ID NO: 1167205 - RNA, 19 nt, Artificial Sequence
  Description of Artificial Sequence: Synthetic oligonucleotide
gcauacacuggaaugcccg

SEQ ID NO: 1167206 - RNA, 19 nt, Artificial Sequence
  Description of Artificial Sequence: Synthetic oligonucleotide
cuuccgcuaggaaugacga

SEQ ID NO: 1167207 - RNA, 19 nt, Artificial Sequence
  Description of Artificial Sequence: Synthetic oligonucleotide
caucuaugagggacucccg

SEQ ID NO: 1167208 - RNA, 19 nt, Artificial Sequence
  Description of Artificial Sequence: Synthetic oligonucleotide
aguuccccucaccacaccu

SEQ ID NO: 1167209 - RNA, 19 nt, Artificial Sequence
  Description of Artificial Sequence: Synthetic oligonucleotide
gacuuccaagacuccgaag

SEQ ID NO: 1167210 - RNA, 19 nt, Artificial Sequence
  Description of Artificial Sequence: Synthetic oligonucleotide
cagauacugggccugcuuc

SEQ ID NO: 1167211 - RNA, 19 nt, Artificial Sequence
  Description of Artificial Sequence: Synthetic oligonucleotide
cugggauggcccauggcac

SEQ ID NO: 1167212 - RNA, 19 nt, Artificial Sequence
  Description of Artificial Sequence: Synthetic oligonucleotide
agacuccgaagcucguguc

SEQ ID NO: 1167213 - RNA, 19 nt, Artificial Sequence
  Description of Artificial Sequence: Synthetic oligonucleotide
agcgggacgaacacuggcg

SEQ ID NO: 1167214 - RNA, 19 nt, Artificial Sequence
  Description of Artificial Sequence: Synthetic oligonucleotide
caaugcaccacagguacuc

SEQ ID NO: 1167215 - RNA, 19 nt, Artificial Sequence
  Description of Artificial Sequence: Synthetic oligonucleotide
uguccgcgacuuuguaggg

SEQ ID NO: 1167216 - RNA, 19 nt, Artificial Sequence
  Description of Artificial Sequence: Synthetic oligonucleotide
ugacaaagauauugcccuc

SEQ ID NO: 1167217 - RNA, 19 nt, Artificial Sequence
  Description of Artificial Sequence: Synthetic oligonucleotide
ucaaugcaccacagguacu

SEQ ID NO: 1167218 - RNA, 19 nt, Artificial Sequence
  Description of Artificial Sequence: Synthetic oligonucleotide
aucguccuucaucuguuca

SEQ ID NO: 1167219 - RNA, 19 nt, Artificial Sequence
  Description of Artificial Sequence: Synthetic oligonucleotide
cucaguuccccucaccaca

SEQ ID NO: 1167220 - RNA, 19 nt, Artificial Sequence
  Description of Artificial Sequence: Synthetic oligonucleotide
uugagagguccaucuuuga

SEQ ID NO: 1167221 - RNA, 19 nt, Artificial Sequence
  Description of Artificial Sequence: Synthetic oligonucleotide
uccccuguggaucgcuccc

SEQ ID NO: 1167222 - RNA, 19 nt, Artificial Sequence
  Description of Artificial Sequence: Synthetic oligonucleotide
ccuggcaucucauuuucag

SEQ ID NO: 1167223 - RNA, 19 nt, Artificial Sequence
  Description of Artificial Sequence: Synthetic oligonucleotide
acaguccugucucucagua

SEQ ID NO: 1167224 - RNA, 19 nt, Artificial Sequence
  Description of Artificial Sequence: Synthetic oligonucleotide
agacucucaguuccccuca

SEQ ID NO: 1167225 - RNA, 19 nt, Artificial Sequence
  Description of Artificial Sequence: Synthetic oligonucleotide
aagugcagcgucugcucaa

SEQ ID NO: 1167226 - RNA, 19 nt, Artificial Sequence
  Description of Artificial Sequence: Synthetic oligonucleotide
auguuacacacaauggcau

SEQ ID NO: 1167227 - RNA, 19 nt, Artificial Sequence
  Description of Artificial Sequence: Synthetic oligonucleotide
agagaugccucggaugccu

SEQ ID NO: 1167228 - RNA, 19 nt, Artificial Sequence
  Description of Artificial Sequence: Synthetic oligonucleotide
gguaagaugcaugggcuug

SEQ ID NO: 1167229 - RNA, 19 nt, Artificial Sequence
  Description of Artificial Sequence: Synthetic oligonucleotide
ggccacgagagucucaaug

SEQ ID NO: 1167230 - RNA, 19 nt, Artificial Sequence
  Description of Artificial Sequence: Synthetic oligonucleotide
cuuugaagugcagcgucug

SEQ ID NO: 1167231 - RNA, 19 nt, Artificial Sequence
  Description of Artificial Sequence: Synthetic oligonucleotide
uacacacaauggcaucguc

SEQ ID NO: 1167232 - RNA, 19 nt, Artificial Sequence
  Description of Artificial Sequence: Synthetic oligonucleotide
auuuaucugggugggucca

SEQ ID NO: 1167233 - RNA, 19 nt, Artificial Sequence
  Description of Artificial Sequence: Synthetic oligonucleotide
caacugcaaaguuggugac

SEQ ID NO: 1167234 - RNA, 19 nt, Artificial Sequence
  Description of Artificial Sequence: Synthetic oligonucleotide
accccaacgggguauuuau

SEQ ID NO: 1167235 - RNA, 19 nt, Artificial Sequence
  Description of Artificial Sequence: Synthetic oligonucleotide
gucugcucaaugcaccaca

SEQ ID NO: 1167236 - RNA, 19 nt, Artificial Sequence
  Description of Artificial Sequence: Synthetic oligonucleotide
cuguggguacuugguaugg

SEQ ID NO: 1167237 - RNA, 19 nt, Artificial Sequence
  Description of Artificial Sequence: Synthetic oligonucleotide
ugucucgcccuuccaggca

SEQ ID NO: 1167238 - RNA, 19 nt, Artificial Sequence
  Description of Artificial Sequence: Synthetic oligonucleotide
uccacgucaaaguguccaa

SEQ ID NO: 1167239 - RNA, 19 nt, Artificial Sequence
  Description of Artificial Sequence: Synthetic oligonucleotide
gcuugugaccaccacuagc

SEQ ID NO: 1167240 - RNA, 19 nt, Artificial Sequence
  Description of Artificial Sequence: Synthetic oligonucleotide
gcuucuuaggcaagaagug

SEQ ID NO: 1167241 - RNA, 19 nt, Artificial Sequence
  Description of Artificial Sequence: Synthetic oligonucleotide
ccaggcauacacuggaaug

SEQ ID NO: 1167242 - RNA, 19 nt, Artificial Sequence
  Description of Artificial Sequence: Synthetic oligonucleotide
uagggcaguuuaucagaca

SEQ ID NO: 1167243 - RNA, 19 nt, Artificial Sequence
  Description of Artificial Sequence: Synthetic oligonucleotide
uguggaucgcucccaggua

SEQ ID NO: 1167244 - RNA, 19 nt, Artificial Sequence
  Description of Artificial Sequence: Synthetic oligonucleotide
aaaccccucagggccuggg

SEQ ID NO: 1167245 - RNA, 19 nt, Artificial Sequence
  Description of Artificial Sequence: Synthetic oligonucleotide
cuaugagggacucccggca

SEQ ID NO: 1167246 - RNA, 19 nt, Artificial Sequence
  Description of Artificial Sequence: Synthetic oligonucleotide
cugcucaaugcaccacagg

SEQ ID NO: 1167247 - RNA, 19 nt, Artificial Sequence
  Description of Artificial Sequence: Synthetic oligonucleotide
ccagcgagaguaaccagcc

SEQ ID NO: 1167248 - RNA, 19 nt, Artificial Sequence
  Description of Artificial Sequence: Synthetic oligonucleotide
augugcucuugggaaagag

SEQ ID NO: 1167249 - RNA, 19 nt, Artificial Sequence
  Description of Artificial Sequence: Synthetic oligonucleotide
gcuuccgcuaggaaugacg

SEQ ID NO: 1167250 - RNA, 19 nt, Artificial Sequence
  Description of Artificial Sequence: Synthetic oligonucleotide
cuugcccgcaaucaucaca

SEQ ID NO: 1167251 - RNA, 19 nt, Artificial Sequence
  Description of Artificial Sequence: Synthetic oligonucleotide
agcccagcgagaguaacca

SEQ ID NO: 1167252 - RNA, 19 nt, Artificial Sequence
  Description of Artificial Sequence: Synthetic oligonucleotide
cauguuggcggcgcuuccg

SEQ ID NO: 1167253 - RNA, 19 nt, Artificial Sequence
  Description of Artificial Sequence: Synthetic oligonucleotide
agugcauugauggggucaa

SEQ ID NO: 1167254 - RNA, 19 nt, Artificial Sequence
  Description of Artificial Sequence: Synthetic oligonucleotide
aaagcccaagugagggucu

SEQ ID NO: 1167255 - RNA, 19 nt, Artificial Sequence
  Description of Artificial Sequence: Synthetic oligonucleotide
acgcagccaguccaauguc

SEQ ID NO: 1167256 - RNA, 19 nt, Artificial Sequence
  Description of Artificial Sequence: Synthetic oligonucleotide
cagcccagcgagaguaacc

SEQ ID NO: 1167257 - RNA, 19 nt, Artificial Sequence
  Description of Artificial Sequence: Synthetic oligonucleotide
guagggcaguuuaucagac

SEQ ID NO: 1167258 - RNA, 19 nt, Artificial Sequence
  Description of Artificial Sequence: Synthetic oligonucleotide
uggaccccagucguggucu

SEQ ID NO: 1167259 - RNA, 19 nt, Artificial Sequence
  Description of Artificial Sequence: Synthetic oligonucleotide
ggcgcuuccgcuaggaaug

SEQ ID NO: 1167260 - RNA, 19 nt, Artificial Sequence
  Description of Artificial Sequence: Synthetic oligonucleotide
accucuuaucuugacugga

SEQ ID NO: 1167261 - RNA, 19 nt, Artificial Sequence
  Description of Artificial Sequence: Synthetic oligonucleotide
gcgagcacccuucagcggc

SEQ ID NO: 1167262 - RNA, 19 nt, Artificial Sequence
  Description of Artificial Sequence: Synthetic oligonucleotide
gaagcucguguccccugug

SEQ ID NO: 1167263 - RNA, 19 nt, Artificial Sequence
  Description of Artificial Sequence: Synthetic oligonucleotide
gaugccucggaugccugac

SEQ ID NO: 1167264 - RNA, 19 nt, Artificial Sequence
  Description of Artificial Sequence: Synthetic oligonucleotide
uggaugccgaguacaucuc

SEQ ID NO: 1167265 - RNA, 19 nt, Artificial Sequence
  Description of Artificial Sequence: Synthetic oligonucleotide
agcucguguccccugugga

SEQ ID NO: 1167266 - RNA, 19 nt, Artificial Sequence
  Description of Artificial Sequence: Synthetic oligonucleotide
gacagccgucuccacaguc

SEQ ID NO: 1167267 - RNA, 19 nt, Artificial Sequence
  Description of Artificial Sequence: Synthetic oligonucleotide
cuuaucuugacuggagacu

SEQ ID NO: 1167268 - RNA, 19 nt, Artificial Sequence
  Description of Artificial Sequence: Synthetic oligonucleotide
aaccagccucagcgggacg

SEQ ID NO: 1167269 - RNA, 19 nt, Artificial Sequence
  Description of Artificial Sequence: Synthetic oligonucleotide
gcacaacccagguugacca

SEQ ID NO: 1167270 - RNA, 19 nt, Artificial Sequence
  Description of Artificial Sequence: Synthetic oligonucleotide
aaugcccgccuuggcaaug

SEQ ID NO: 1167271 - RNA, 19 nt, Artificial Sequence
  Description of Artificial Sequence: Synthetic oligonucleotide
gccauagagguugucaaac

SEQ ID NO: 1167272 - RNA, 19 nt, Artificial Sequence
  Description of Artificial Sequence: Synthetic oligonucleotide
cagcgucugcucaaugcac

SEQ ID NO: 1167273 - RNA, 19 nt, Artificial Sequence
  Description of Artificial Sequence: Synthetic oligonucleotide
ugcggcgcccauucuucag

SEQ ID NO: 1167274 - RNA, 19 nt, Artificial Sequence
  Description of Artificial Sequence: Synthetic oligonucleotide
caucgccauagccugccac

SEQ ID NO: 1167275 - RNA, 19 nt, Artificial Sequence
  Description of Artificial Sequence: Synthetic oligonucleotide
cagucaugugcaggcagcc

SEQ ID NO: 1167276 - RNA, 19 nt, Artificial Sequence
  Description of Artificial Sequence: Synthetic oligonucleotide
ggaugagguuaguuaaguc

SEQ ID NO: 1167277 - RNA, 19 nt, Artificial Sequence
  Description of Artificial Sequence: Synthetic oligonucleotide
aucagacauguuggcggcg

SEQ ID NO: 1167278 - RNA, 19 nt, Artificial Sequence
  Description of Artificial Sequence: Synthetic oligonucleotide
ggcaguuuaucagacaugu

SEQ ID NO: 1167279 - RNA, 19 nt, Artificial Sequence
  Description of Artificial Sequence: Synthetic oligonucleotide
gcuguggguacuugguaug

SEQ ID NO: 1167280 - RNA, 19 nt, Artificial Sequence
  Description of Artificial Sequence: Synthetic oligonucleotide
agggucuggaugguaagau

SEQ ID NO: 1167281 - RNA, 19 nt, Artificial Sequence
  Description of Artificial Sequence: Synthetic oligonucleotide
ggaugguaagaugcauggg

SEQ ID NO: 1167282 - RNA, 19 nt, Artificial Sequence
  Description of Artificial Sequence: Synthetic oligonucleotide
cucguguccccuguggauc

SEQ ID NO: 1167283 - RNA, 19 nt, Artificial Sequence
  Description of Artificial Sequence: Synthetic oligonucleotide
cucggaugccugacagaag

SEQ ID NO: 1167284 - RNA, 19 nt, Artificial Sequence
  Description of Artificial Sequence: Synthetic oligonucleotide
gaagcuguggguacuuggu

SEQ ID NO: 1167285 - RNA, 19 nt, Artificial Sequence
  Description of Artificial Sequence: Synthetic oligonucleotide
aucauguugagagguccau

SEQ ID NO: 1167286 - RNA, 19 nt, Artificial Sequence
  Description of Artificial Sequence: Synthetic oligonucleotide
gccauagccugccaccacc

SEQ ID NO: 1167287 - RNA, 19 nt, Artificial Sequence
  Description of Artificial Sequence: Synthetic oligonucleotide
ggaugccgaguacaucucc

SEQ ID NO: 1167288 - RNA, 19 nt, Artificial Sequence
  Description of Artificial Sequence: Synthetic oligonucleotide
caagacuccgaagcucgug

SEQ ID NO: 1167289 - RNA, 19 nt, Artificial Sequence
  Description of Artificial Sequence: Synthetic oligonucleotide
caaagugccggccaagaau

SEQ ID NO: 1167290 - RNA, 19 nt, Artificial Sequence
  Description of Artificial Sequence: Synthetic oligonucleotide
ccggccaagaaugauauca

SEQ ID NO: 1167291 - RNA, 19 nt, Artificial Sequence
  Description of Artificial Sequence: Synthetic oligonucleotide
guagagguuguggacccca

SEQ ID NO: 1167292 - RNA, 19 nt, Artificial Sequence
  Description of Artificial Sequence: Synthetic oligonucleotide
gagccacuucacaucaauc

SEQ ID NO: 1167293 - RNA, 19 nt, Artificial Sequence
  Description of Artificial Sequence: Synthetic oligonucleotide
ggaaugcccgccuuggcaa

SEQ ID NO: 1167294 - RNA, 19 nt, Artificial Sequence
  Description of Artificial Sequence: Synthetic oligonucleotide
ccuuucguccccacgcagc

SEQ ID NO: 1167295 - RNA, 19 nt, Artificial Sequence
  Description of Artificial Sequence: Synthetic oligonucleotide
cuggaaugcccgccuuggc

SEQ ID NO: 1167296 - RNA, 19 nt, Artificial Sequence
  Description of Artificial Sequence: Synthetic oligonucleotide
ugaugacucgggccccaaa

SEQ ID NO: 1167297 - RNA, 19 nt, Artificial Sequence
  Description of Artificial Sequence: Synthetic oligonucleotide
uagcgguagugaucaggcu

SEQ ID NO: 1167298 - RNA, 19 nt, Artificial Sequence
  Description of Artificial Sequence: Synthetic oligonucleotide
cuuggaugccgaguacauc

SEQ ID NO: 1167299 - RNA, 19 nt, Artificial Sequence
  Description of Artificial Sequence: Synthetic oligonucleotide
ggcacaacccagguugacc

SEQ ID NO: 1167300 - RNA, 19 nt, Artificial Sequence
  Description of Artificial Sequence: Synthetic oligonucleotide
uuccgcuaggaaugacgaa

SEQ ID NO: 1167301 - RNA, 19 nt, Artificial Sequence
  Description of Artificial Sequence: Synthetic oligonucleotide
caaucucggugaugaugac

SEQ ID NO: 1167302 - RNA, 19 nt, Artificial Sequence
  Description of Artificial Sequence: Synthetic oligonucleotide
cacaccuagaacaguuugu

SEQ ID NO: 1167303 - RNA, 19 nt, Artificial Sequence
  Description of Artificial Sequence: Synthetic oligonucleotide
uguuggcggcgcuuccgcu

SEQ ID NO: 1167304 - RNA, 19 nt, Artificial Sequence
  Description of Artificial Sequence: Synthetic oligonucleotide
acgggguauuuaucugggu

SEQ ID NO: 1167305 - RNA, 19 nt, Artificial Sequence
  Description of Artificial Sequence: Synthetic oligonucleotide
gacgaacacuggcgaagca

SEQ ID NO: 1167306 - RNA, 19 nt, Artificial Sequence
  Description of Artificial Sequence: Synthetic oligonucleotide
cuggcgaagcaacugcaaa

SEQ ID NO: 1167307 - RNA, 19 nt, Artificial Sequence
  Description of Artificial Sequence: Synthetic oligonucleotide
caaaccuggcaucucauuu

SEQ ID NO: 1167308 - RNA, 19 nt, Artificial Sequence
  Description of Artificial Sequence: Synthetic oligonucleotide
cuguggaucgcucccaggu

SEQ ID NO: 1167309 - RNA, 19 nt, Artificial Sequence
  Description of Artificial Sequence: Synthetic oligonucleotide
gagcagcccagcgagagua

SEQ ID NO: 1167310 - RNA, 19 nt, Artificial Sequence
  Description of Artificial Sequence: Synthetic oligonucleotide
gcaagaagugaaccccaac

SEQ ID NO: 1167311 - RNA, 19 nt, Artificial Sequence
  Description of Artificial Sequence: Synthetic oligonucleotide
cguuugaugccaucuauga

SEQ ID NO: 1167312 - RNA, 19 nt, Artificial Sequence
  Description of Artificial Sequence: Synthetic oligonucleotide
cacgcagccaguccaaugu

SEQ ID NO: 1167313 - RNA, 19 nt, Artificial Sequence
  Description of Artificial Sequence: Synthetic oligonucleotide
aggcaagaagugaacccca

SEQ ID NO: 1167314 - RNA, 19 nt, Artificial Sequence
  Description of Artificial Sequence: Synthetic oligonucleotide
agugaaccccaacggggua

SEQ ID NO: 1167315 - RNA, 19 nt, Artificial Sequence
  Description of Artificial Sequence: Synthetic oligonucleotide
gcgguagugaucaggcuug

SEQ ID NO: 1167316 - RNA, 19 nt, Artificial Sequence
  Description of Artificial Sequence: Synthetic oligonucleotide
guaaccagccucagcggga

SEQ ID NO: 1167317 - RNA, 19 nt, Artificial Sequence
  Description of Artificial Sequence: Synthetic oligonucleotide
ccaacgggguauuuaucug

SEQ ID NO: 1167318 - RNA, 19 nt, Artificial Sequence
  Description of Artificial Sequence: Synthetic oligonucleotide
agccuguagcgguccaccu

SEQ ID NO: 1167319 - RNA, 19 nt, Artificial Sequence
  Description of Artificial Sequence: Synthetic oligonucleotide
gccaugaccugguuuguga

SEQ ID NO: 1167320 - RNA, 19 nt, Artificial Sequence
  Description of Artificial Sequence: Synthetic oligonucleotide
cgggguauuuaucugggug

SEQ ID NO: 1167321 - RNA, 19 nt, Artificial Sequence
  Description of Artificial Sequence: Synthetic oligonucleotide
guuguggaccccagucgug

SEQ ID NO: 1167322 - RNA, 19 nt, Artificial Sequence
  Description of Artificial Sequence: Synthetic oligonucleotide
aagugagggucuggauggu

SEQ ID NO: 1167323 - RNA, 19 nt, Artificial Sequence
  Description of Artificial Sequence: Synthetic oligonucleotide
uccgaagcucguguccccu

SEQ ID NO: 1167324 - RNA, 19 nt, Artificial Sequence
  Description of Artificial Sequence: Synthetic oligonucleotide
guguccaauguuacacaca

SEQ ID NO: 1167325 - RNA, 19 nt, Artificial Sequence
  Description of Artificial Sequence: Synthetic oligonucleotide
gcgcccauucuucagccug

SEQ ID NO: 1167326 - RNA, 19 nt, Artificial Sequence
  Description of Artificial Sequence: Synthetic oligonucleotide
ggacgaacacuggcgaagc

SEQ ID NO: 1167327 - RNA, 19 nt, Artificial Sequence
  Description of Artificial Sequence: Synthetic oligonucleotide
agucaugugcaggcagcca

SEQ ID NO: 1167328 - RNA, 19 nt, Artificial Sequence
  Description of Artificial Sequence: Synthetic oligonucleotide
cuggaccaccgcaccuccg

SEQ ID NO: 1167329 - RNA, 19 nt, Artificial Sequence
  Description of Artificial Sequence: Synthetic oligonucleotide
augcccgccuuggcaaugg

SEQ ID NO: 1167330 - RNA, 19 nt, Artificial Sequence
  Description of Artificial Sequence: Synthetic oligonucleotide
gcucuuggugacagagucg

SEQ ID NO: 1167331 - RNA, 19 nt, Artificial Sequence
  Description of Artificial Sequence: Synthetic oligonucleotide
guggguccacagcucaauc

SEQ ID NO: 1167332 - RNA, 19 nt, Artificial Sequence
  Description of Artificial Sequence: Synthetic oligonucleotide
aggcagccagcaaugcgag

SEQ ID NO: 1167333 - RNA, 19 nt, Artificial Sequence
  Description of Artificial Sequence: Synthetic oligonucleotide
acagagucguugacauuga

SEQ ID NO: 1167334 - RNA, 19 nt, Artificial Sequence
  Description of Artificial Sequence: Synthetic oligonucleotide
gcacccuucagcggcuugg

SEQ ID NO: 1167335 - RNA, 19 nt, Artificial Sequence
  Description of Artificial Sequence: Synthetic oligonucleotide
cagagaugccucggaugcc

SEQ ID NO: 1167336 - RNA, 19 nt, Artificial Sequence
  Description of Artificial Sequence: Synthetic oligonucleotide
cagguaccucuuaucuuga

SEQ ID NO: 1167337 - RNA, 19 nt, Artificial Sequence
  Description of Artificial Sequence: Synthetic oligonucleotide
agcggcuuggaugccgagu

SEQ ID NO: 1167338 - RNA, 19 nt, Artificial Sequence
  Description of Artificial Sequence: Synthetic oligonucleotide
cauccgcaucaaaccuggc

SEQ ID NO: 1167339 - RNA, 19 nt, Artificial Sequence
  Description of Artificial Sequence: Synthetic oligonucleotide
augccucggaugccugaca

SEQ ID NO: 1167340 - RNA, 19 nt, Artificial Sequence
  Description of Artificial Sequence: Synthetic oligonucleotide
gccgaguacaucucccgca

SEQ ID NO: 1167341 - RNA, 19 nt, Artificial Sequence
  Description of Artificial Sequence: Synthetic oligonucleotide
ggcaucguccuucaucugu

SEQ ID NO: 1167342 - RNA, 19 nt, Artificial Sequence
  Description of Artificial Sequence: Synthetic oligonucleotide
uuucguccccacgcagcca

SEQ ID NO: 1167343 - RNA, 19 nt, Artificial Sequence
  Description of Artificial Sequence: Synthetic oligonucleotide
ggcuugugaccaccacuag

SEQ ID NO: 1167344 - RNA, 19 nt, Artificial Sequence
  Description of Artificial Sequence: Synthetic oligonucleotide
guccgcgacuuuguagggc

SEQ ID NO: 1167345 - RNA, 19 nt, Artificial Sequence
  Description of Artificial Sequence: Synthetic oligonucleotide
acuggcgaagcaacugcaa

SEQ ID NO: 1167346 - RNA, 19 nt, Artificial Sequence
  Description of Artificial Sequence: Synthetic oligonucleotide
caaaaccccucagggccug

SEQ ID NO: 1167347 - RNA, 19 nt, Artificial Sequence
  Description of Artificial Sequence: Synthetic oligonucleotide
uacaggccucguccauggu

SEQ ID NO: 1167348 - RNA, 19 nt, Artificial Sequence
  Description of Artificial Sequence: Synthetic oligonucleotide
gggccaucaaugggcaugc

SEQ ID NO: 1167349 - RNA, 19 nt, Artificial Sequence
  Description of Artificial Sequence: Synthetic oligonucleotide
ugaaccccaacgggguauu

SEQ ID NO: 1167350 - RNA, 19 nt, Artificial Sequence
  Description of Artificial Sequence: Synthetic oligonucleotide
augaugcggcgcccauucu

SEQ ID NO: 1167351 - RNA, 19 nt, Artificial Sequence
  Description of Artificial Sequence: Synthetic oligonucleotide
guuggcggcgcuuccgcua

SEQ ID NO: 1167352 - RNA, 19 nt, Artificial Sequence
  Description of Artificial Sequence: Synthetic oligonucleotide
acaucgccauagccugcca

SEQ ID NO: 1167353 - RNA, 19 nt, Artificial Sequence
  Description of Artificial Sequence: Synthetic oligonucleotide
gcgagaguaaccagccuca

SEQ ID NO: 1167354 - RNA, 19 nt, Artificial Sequence
  Description of Artificial Sequence: Synthetic oligonucleotide
gcuauguccaaggccuuuc

SEQ ID NO: 1167355 - RNA, 19 nt, Artificial Sequence
  Description of Artificial Sequence: Synthetic oligonucleotide
gaucgcucccagguaccuc

SEQ ID NO: 1167356 - RNA, 19 nt, Artificial Sequence
  Description of Artificial Sequence: Synthetic oligonucleotide
caaggccuuucguccccac

SEQ ID NO: 1167357 - RNA, 19 nt, Artificial Sequence
  Description of Artificial Sequence: Synthetic oligonucleotide
gggcaguuuaucagacaug

SEQ ID NO: 1167358 - RNA, 19 nt, Artificial Sequence
  Description of Artificial Sequence: Synthetic oligonucleotide
gccuuucguccccacgcag

SEQ ID NO: 1167359 - RNA, 19 nt, Artificial Sequence
  Description of Artificial Sequence: Synthetic oligonucleotide
caucuuugaagugcagcgu

SEQ ID NO: 1167360 - RNA, 19 nt, Artificial Sequence
  Description of Artificial Sequence: Synthetic oligonucleotide
ugaccaccacuagccacau

SEQ ID NO: 1167361 - RNA, 19 nt, Artificial Sequence
  Description of Artificial Sequence: Synthetic oligonucleotide
cagcguucucauugagcca

SEQ ID NO: 1167362 - RNA, 19 nt, Artificial Sequence
  Description of Artificial Sequence: Synthetic oligonucleotide
cccaacgggguauuuaucu

SEQ ID NO: 1167363 - RNA, 19 nt, Artificial Sequence
  Description of Artificial Sequence: Synthetic oligonucleotide
ccuguggaucgcucccagg

SEQ ID NO: 1167364 - RNA, 19 nt, Artificial Sequence
  Description of Artificial Sequence: Synthetic oligonucleotide
ggcaucucauuuucagcua

SEQ ID NO: 1167365 - RNA, 19 nt, Artificial Sequence
  Description of Artificial Sequence: Synthetic oligonucleotide
ggcgaagcaacugcaaagu

SEQ ID NO: 1167366 - RNA, 19 nt, Artificial Sequence
  Description of Artificial Sequence: Synthetic oligonucleotide
accgccaccuugcccgcaa

SEQ ID NO: 1167367 - RNA, 19 nt, Artificial Sequence
  Description of Artificial Sequence: Synthetic oligonucleotide
agacauguuggcggcgcuu

SEQ ID NO: 1167368 - RNA, 19 nt, Artificial Sequence
  Description of Artificial Sequence: Synthetic oligonucleotide
gggcuugugaccaccacua

SEQ ID NO: 1167369 - RNA, 19 nt, Artificial Sequence
  Description of Artificial Sequence: Synthetic oligonucleotide
cucuugggaaagagaggua

SEQ ID NO: 1167370 - RNA, 19 nt, Artificial Sequence
  Description of Artificial Sequence: Synthetic oligonucleotide
gcggcuuggaugccgagua

SEQ ID NO: 1167371 - RNA, 19 nt, Artificial Sequence
  Description of Artificial Sequence: Synthetic oligonucleotide
ggcaccuucaguaucccau

SEQ ID NO: 1167372 - RNA, 19 nt, Artificial Sequence
  Description of Artificial Sequence: Synthetic oligonucleotide
gcgggacgaacacuggcga

SEQ ID NO: 1167373 - RNA, 19 nt, Artificial Sequence
  Description of Artificial Sequence: Synthetic oligonucleotide
cucgcccuuccaggcauac

SEQ ID NO: 1167374 - RNA, 19 nt, Artificial Sequence
  Description of Artificial Sequence: Synthetic oligonucleotide
gcccgcaaucaucacaucu

SEQ ID NO: 1167375 - RNA, 19 nt, Artificial Sequence
  Description of Artificial Sequence: Synthetic oligonucleotide
gugccggccaagaaugaua

SEQ ID NO: 1167376 - RNA, 19 nt, Artificial Sequence
  Description of Artificial Sequence: Synthetic oligonucleotide
ccuccuuacaggccucguc

SEQ ID NO: 1167377 - RNA, 19 nt, Artificial Sequence
  Description of Artificial Sequence: Synthetic oligonucleotide
cugcgugguccugaguaga

SEQ ID NO: 1167378 - RNA, 19 nt, Artificial Sequence
  Description of Artificial Sequence: Synthetic oligonucleotide
uggcggcgcuuccgcuagg

SEQ ID NO: 1167379 - RNA, 19 nt, Artificial Sequence
  Description of Artificial Sequence: Synthetic oligonucleotide
acccuucagcggcuuggau

SEQ ID NO: 1167380 - RNA, 19 nt, Artificial Sequence
  Description of Artificial Sequence: Synthetic oligonucleotide
caauguccgcgacuuugua

SEQ ID NO: 1167381 - RNA, 19 nt, Artificial Sequence
  Description of Artificial Sequence: Synthetic oligonucleotide
ugcccgcaaucaucacauc

SEQ ID NO: 1167382 - RNA, 19 nt, Artificial Sequence
  Description of Artificial Sequence: Synthetic oligonucleotide
cgcaaucaucacaucugug

SEQ ID NO: 1167383 - RNA, 19 nt, Artificial Sequence
  Description of Artificial Sequence: Synthetic oligonucleotide
ccgcaucaaaccuggcauc

SEQ ID NO: 1167384 - RNA, 19 nt, Artificial Sequence
  Description of Artificial Sequence: Synthetic oligonucleotide
cagucguggucuccucaga

SEQ ID NO: 1167385 - RNA, 19 nt, Artificial Sequence
  Description of Artificial Sequence: Synthetic oligonucleotide
cccauucuucagccuguag

SEQ ID NO: 1167386 - RNA, 19 nt, Artificial Sequence
  Description of Artificial Sequence: Synthetic oligonucleotide
gccaguccaauguccgcga

SEQ ID NO: 1167387 - RNA, 19 nt, Artificial Sequence
  Description of Artificial Sequence: Synthetic oligonucleotide
gaaugcccgccuuggcaau

SEQ ID NO: 1167388 - RNA, 19 nt, Artificial Sequence
  Description of Artificial Sequence: Synthetic oligonucleotide
gcaaugcgagcacccuuca

SEQ ID NO: 1167389 - RNA, 19 nt, Artificial Sequence
  Description of Artificial Sequence: Synthetic oligonucleotide
ggagacucucaguuccccu

SEQ ID NO: 1167390 - RNA, 19 nt, Artificial Sequence
  Description of Artificial Sequence: Synthetic oligonucleotide
ccacagcguucucauugag

SEQ ID NO: 1167391 - RNA, 19 nt, Artificial Sequence
  Description of Artificial Sequence: Synthetic oligonucleotide
cagcggcuuggaugccgag

SEQ ID NO: 1167392 - RNA, 19 nt, Artificial Sequence
  Description of Artificial Sequence: Synthetic oligonucleotide
ggcucguuugaugccaucu

SEQ ID NO: 1167393 - RNA, 19 nt, Artificial Sequence
  Description of Artificial Sequence: Synthetic oligonucleotide
gucucgcccuuccaggcau

SEQ ID NO: 1167394 - RNA, 19 nt, Artificial Sequence
  Description of Artificial Sequence: Synthetic oligonucleotide
cauuggccaucaucuugua

SEQ ID NO: 1167395 - RNA, 19 nt, Artificial Sequence
  Description of Artificial Sequence: Synthetic oligonucleotide
gcccagcgagaguaaccag

SEQ ID NO: 1167396 - RNA, 19 nt, Artificial Sequence
  Description of Artificial Sequence: Synthetic oligonucleotide
caaugggcaugcccagaua

SEQ ID NO: 1167397 - RNA, 19 nt, Artificial Sequence
  Description of Artificial Sequence: Synthetic oligonucleotide
ggccuuucguccccacgca

SEQ ID NO: 1167398 - RNA, 19 nt, Artificial Sequence
  Description of Artificial Sequence: Synthetic oligonucleotide
caguccaauguccgcgacu

SEQ ID NO: 1167399 - RNA, 19 nt, Artificial Sequence
  Description of Artificial Sequence: Synthetic oligonucleotide
ccacaucgccauagccugc

SEQ ID NO: 1167400 - RNA, 19 nt, Artificial Sequence
  Description of Artificial Sequence: Synthetic oligonucleotide
ccaugaccugguuugugaa

SEQ ID NO: 1167401 - RNA, 19 nt, Artificial Sequence
  Description of Artificial Sequence: Synthetic oligonucleotide
cccucaccacaccuagaac

SEQ ID NO: 1167402 - RNA, 19 nt, Artificial Sequence
  Description of Artificial Sequence: Synthetic oligonucleotide
caaagauauugcccuccuu

SEQ ID NO: 1167403 - RNA, 19 nt, Artificial Sequence
  Description of Artificial Sequence: Synthetic oligonucleotide
ggcaagaagugaaccccaa

SEQ ID NO: 1167404 - RNA, 19 nt, Artificial Sequence
  Description of Artificial Sequence: Synthetic oligonucleotide
ucgcucccagguaccucuu

SEQ ID NO: 1167405 - RNA, 19 nt, Artificial Sequence
  Description of Artificial Sequence: Synthetic oligonucleotide
ggaccaccgcaccuccgca

SEQ ID NO: 1167406 - RNA, 19 nt, Artificial Sequence
  Description of Artificial Sequence: Synthetic oligonucleotide
ccaguccaauguccgcgac

SEQ ID NO: 1167407 - RNA, 19 nt, Artificial Sequence
  Description of Artificial Sequence: Synthetic oligonucleotide
caucacaucuguggcucgu

SEQ ID NO: 1167408 - RNA, 19 nt, Artificial Sequence
  Description of Artificial Sequence: Synthetic oligonucleotide
gguauuuaucugggugggu

SEQ ID NO: 1167409 - RNA, 19 nt, Artificial Sequence
  Description of Artificial Sequence: Synthetic oligonucleotide
ccgaagcucguguccccug

SEQ ID NO: 1167410 - RNA, 19 nt, Artificial Sequence
  Description of Artificial Sequence: Synthetic oligonucleotide
ccaauguccgcgacuuugu

SEQ ID NO: 1167411 - RNA, 19 nt, Artificial Sequence
  Description of Artificial Sequence: Synthetic oligonucleotide
ccccaacgggguauuuauc

SEQ ID NO: 1167412 - RNA, 19 nt, Artificial Sequence
  Description of Artificial Sequence: Synthetic oligonucleotide
agcagcccagcgagaguaa

SEQ ID NO: 1167413 - RNA, 19 nt, Artificial Sequence
  Description of Artificial Sequence: Synthetic oligonucleotide
agcgagcagcccagcgaga

SEQ ID NO: 1167414 - RNA, 19 nt, Artificial Sequence
  Description of Artificial Sequence: Synthetic oligonucleotide
gguagugaucaggcuugaa

SEQ ID NO: 1167415 - RNA, 19 nt, Artificial Sequence
  Description of Artificial Sequence: Synthetic oligonucleotide
gccucggaugccugacaga

SEQ ID NO: 1167416 - RNA, 19 nt, Artificial Sequence
  Description of Artificial Sequence: Synthetic oligonucleotide
caccagcgagcagcccagc

SEQ ID NO: 1167417 - RNA, 19 nt, Artificial Sequence
  Description of Artificial Sequence: Synthetic oligonucleotide
ccgcuaggaaugacgaacu

SEQ ID NO: 1167418 - RNA, 19 nt, Artificial Sequence
  Description of Artificial Sequence: Synthetic oligonucleotide
cagagucguugacauugau

SEQ ID NO: 1167419 - RNA, 19 nt, Artificial Sequence
  Description of Artificial Sequence: Synthetic oligonucleotide
ccaccgcaccuccgcaccc

SEQ ID NO: 1167420 - RNA, 19 nt, Artificial Sequence
  Description of Artificial Sequence: Synthetic oligonucleotide
cagacauguuggcggcgcu

SEQ ID NO: 1167421 - RNA, 19 nt, Artificial Sequence
  Description of Artificial Sequence: Synthetic oligonucleotide
ccgcgacuuuguagggcag

SEQ ID NO: 1167422 - RNA, 19 nt, Artificial Sequence
  Description of Artificial Sequence: Synthetic oligonucleotide
ccgcaaucaucacaucugu

SEQ ID NO: 1167423 - RNA, 19 nt, Artificial Sequence
  Description of Artificial Sequence: Synthetic oligonucleotide
ggauggcccauggcacaac

SEQ ID NO: 1167424 - RNA, 19 nt, Artificial Sequence
  Description of Artificial Sequence: Synthetic oligonucleotide
gcccagauacugggccugc

SEQ ID NO: 1167425 - RNA, 19 nt, Artificial Sequence
  Description of Artificial Sequence: Synthetic oligonucleotide
ccaaaaccccucagggccu

SEQ ID NO: 1167426 - RNA, 19 nt, Artificial Sequence
  Description of Artificial Sequence: Synthetic oligonucleotide
gcucguguccccuguggau

SEQ ID NO: 1167427 - RNA, 19 nt, Artificial Sequence
  Description of Artificial Sequence: Synthetic oligonucleotide
gcgugguccugaguagaga

SEQ ID NO: 1167428 - RNA, 19 nt, Artificial Sequence
  Description of Artificial Sequence: Synthetic oligonucleotide
gcgaagcaacugcaaaguu

SEQ ID NO: 1167429 - RNA, 19 nt, Artificial Sequence
  Description of Artificial Sequence: Synthetic oligonucleotide
ccucguccaugguggucac

SEQ ID NO: 1167430 - RNA, 19 nt, Artificial Sequence
  Description of Artificial Sequence: Synthetic oligonucleotide
gguggguccacagcucaau

SEQ ID NO: 1167431 - RNA, 19 nt, Artificial Sequence
  Description of Artificial Sequence: Synthetic oligonucleotide
ccugaguagagaagauguu

SEQ ID NO: 1167432 - RNA, 19 nt, Artificial Sequence
  Description of Artificial Sequence: Synthetic oligonucleotide
cagcgagaguaaccagccu

SEQ ID NO: 1167433 - RNA, 19 nt, Artificial Sequence
  Description of Artificial Sequence: Synthetic oligonucleotide
caccgcaccuccgcaccca

SEQ ID NO: 1167434 - RNA, 19 nt, Artificial Sequence
  Description of Artificial Sequence: Synthetic oligonucleotide
guccaauguuacacacaau

SEQ ID NO: 1167435 - RNA, 19 nt, Artificial Sequence
  Description of Artificial Sequence: Synthetic oligonucleotide
cucccgcauccgcaucaaa

SEQ ID NO: 1167436 - RNA, 19 nt, Artificial Sequence
  Description of Artificial Sequence: Synthetic oligonucleotide
ggcggcgcuuccgcuagga

SEQ ID NO: 1167437 - RNA, 19 nt, Artificial Sequence
  Description of Artificial Sequence: Synthetic oligonucleotide
ccgaguacaucucccgcau

SEQ ID NO: 1167438 - RNA, 19 nt, Artificial Sequence
  Description of Artificial Sequence: Synthetic oligonucleotide
cuucgucugucucgcccuu

SEQ ID NO: 1167439 - RNA, 19 nt, Artificial Sequence
  Description of Artificial Sequence: Synthetic oligonucleotide
guggcucguuugaugccau

SEQ ID NO: 1167440 - RNA, 19 nt, Artificial Sequence
  Description of Artificial Sequence: Synthetic oligonucleotide
gcgacuuuguagggcaguu

SEQ ID NO: 1167441 - RNA, 19 nt, Artificial Sequence
  Description of Artificial Sequence: Synthetic oligonucleotide
cggcuuggaugccgaguac

SEQ ID NO: 1167442 - RNA, 19 nt, Artificial Sequence
  Description of Artificial Sequence: Synthetic oligonucleotide
ccagauacugggccugcuu

SEQ ID NO: 1167443 - RNA, 19 nt, Artificial Sequence
  Description of Artificial Sequence: Synthetic oligonucleotide
gcgcuuccgcuaggaauga

SEQ ID NO: 1167444 - RNA, 19 nt, Artificial Sequence
  Description of Artificial Sequence: Synthetic oligonucleotide
gcggcgcuuccgcuaggaa

SEQ ID NO: 1167445 - RNA, 19 nt, Artificial Sequence
  Description of Artificial Sequence: Synthetic oligonucleotide
ccaagacuccgaagcucgu

SEQ ID NO: 1167446 - RNA, 19 nt, Artificial Sequence
  Description of Artificial Sequence: Synthetic oligonucleotide
ccaccuugcccgcaaucau

SEQ ID NO: 1167447 - RNA, 19 nt, Artificial Sequence
  Description of Artificial Sequence: Synthetic oligonucleotide
ggaugaugcggcgcccauu

SEQ ID NO: 1167448 - RNA, 19 nt, Artificial Sequence
  Description of Artificial Sequence: Synthetic oligonucleotide
cggcgcuuccgcuaggaau

SEQ ID NO: 1167449 - RNA, 19 nt, Artificial Sequence
  Description of Artificial Sequence: Synthetic oligonucleotide
cgaagcucguguccccugu

SEQ ID NO: 1167450 - RNA, 19 nt, Artificial Sequence
  Description of Artificial Sequence: Synthetic oligonucleotide
ccccuguggaucgcuccca

SEQ ID NO: 1167451 - RNA, 19 nt, Artificial Sequence
  Description of Artificial Sequence: Synthetic oligonucleotide
gggccaugaccugguuugu

SEQ ID NO: 1167452 - RNA, 19 nt, Artificial Sequence
  Description of Artificial Sequence: Synthetic oligonucleotide
ccacgucaaaguguccaau

SEQ ID NO: 1167453 - RNA, 19 nt, Artificial Sequence
  Description of Artificial Sequence: Synthetic oligonucleotide
caccgccaccuugcccgca

SEQ ID NO: 1167454 - RNA, 19 nt, Artificial Sequence
  Description of Artificial Sequence: Synthetic oligonucleotide
ccucagcgggacgaacacu

SEQ ID NO: 1167455 - RNA, 19 nt, Artificial Sequence
  Description of Artificial Sequence: Synthetic oligonucleotide
cgagcacccuucagcggcu

SEQ ID NO: 1167456 - RNA, 19 nt, Artificial Sequence
  Description of Artificial Sequence: Synthetic oligonucleotide
cgcgacuuuguagggcagu

SEQ ID NO: 1167457 - RNA, 19 nt, Artificial Sequence
  Description of Artificial Sequence: Synthetic oligonucleotide
cccacgcagccaguccaau

SEQ ID NO: 1167458 - RNA, 19 nt, Artificial Sequence
  Description of Artificial Sequence: Synthetic oligonucleotide
acuaggauaaaucauaggc

SEQ ID NO: 1167459 - RNA, 19 nt, Artificial Sequence
  Description of Artificial Sequence: Synthetic oligonucleotide
aaaucgguaauuuaaucac

SEQ ID NO: 1167460 - RNA, 19 nt, Artificial Sequence
  Description of Artificial Sequence: Synthetic oligonucleotide
aaaacuaacucccagagau

SEQ ID NO: 1167461 - RNA, 19 nt, Artificial Sequence
  Description of Artificial Sequence: Synthetic oligonucleotide
gauuucaacauccugacag

SEQ ID NO: 1167462 - RNA, 19 nt, Artificial Sequence
  Description of Artificial Sequence: Synthetic oligonucleotide
cacaauauuucuuacaugg

SEQ ID NO: 1167463 - RNA, 19 nt, Artificial Sequence
  Description of Artificial Sequence: Synthetic oligonucleotide
aaucuauaccaccaaggcc

SEQ ID NO: 1167464 - RNA, 19 nt, Artificial Sequence
  Description of Artificial Sequence: Synthetic oligonucleotide
aauuguuagaaccaagacu

SEQ ID NO: 1167465 - RNA, 19 nt, Artificial Sequence
  Description of Artificial Sequence: Synthetic oligonucleotide
aauuguuugcuugaguggc

SEQ ID NO: 1167466 - RNA, 19 nt, Artificial Sequence
  Description of Artificial Sequence: Synthetic oligonucleotide
auaggcuuuagguugaugg

SEQ ID NO: 1167467 - RNA, 19 nt, Artificial Sequence
  Description of Artificial Sequence: Synthetic oligonucleotide
uguauucacagcauaaacc

SEQ ID NO: 1167468 - RNA, 19 nt, Artificial Sequence
  Description of Artificial Sequence: Synthetic oligonucleotide
uuaauacuaggauaaauca

SEQ ID NO: 1167469 - RNA, 19 nt, Artificial Sequence
  Description of Artificial Sequence: Synthetic oligonucleotide
agcauuuuguccgagaccc

SEQ ID NO: 1167470 - RNA, 19 nt, Artificial Sequence
  Description of Artificial Sequence: Synthetic oligonucleotide
uaaaucgguaauuuaauca

SEQ ID NO: 1167471 - RNA, 19 nt, Artificial Sequence
  Description of Artificial Sequence: Synthetic oligonucleotide
auuaauacuaggauaaauc

SEQ ID NO: 1167472 - RNA, 19 nt, Artificial Sequence
  Description of Artificial Sequence: Synthetic oligonucleotide
ugaggauguacuaaaaucu

SEQ ID NO: 1167473 - RNA, 19 nt, Artificial Sequence
  Description of Artificial Sequence: Synthetic oligonucleotide
aaaaucuauaccaccaagg

SEQ ID NO: 1167474 - RNA, 19 nt, Artificial Sequence
  Description of Artificial Sequence: Synthetic oligonucleotide
acuacuuuuagcauaggcc

SEQ ID NO: 1167475 - RNA, 19 nt, Artificial Sequence
  Description of Artificial Sequence: Synthetic oligonucleotide
agcuuaaagcauuuugucc

SEQ ID NO: 1167476 - RNA, 19 nt, Artificial Sequence
  Description of Artificial Sequence: Synthetic oligonucleotide
ugcuugaguggcaagaugg

SEQ ID NO: 1167477 - RNA, 19 nt, Artificial Sequence
  Description of Artificial Sequence: Synthetic oligonucleotide
cuacuuuuagcauaggccc

SEQ ID NO: 1167478 - RNA, 19 nt, Artificial Sequence
  Description of Artificial Sequence: Synthetic oligonucleotide
gaagcuguaccucaaauug

SEQ ID NO: 1167479 - RNA, 19 nt, Artificial Sequence
  Description of Artificial Sequence: Synthetic oligonucleotide
ugugcauguauucacagca

SEQ ID NO: 1167480 - RNA, 19 nt, Artificial Sequence
  Description of Artificial Sequence: Synthetic oligonucleotide
aacuuuauaaaucucccaa

SEQ ID NO: 1167481 - RNA, 19 nt, Artificial Sequence
  Description of Artificial Sequence: Synthetic oligonucleotide
uuauaugugaauuguuugc

SEQ ID NO: 1167482 - RNA, 19 nt, Artificial Sequence
  Description of Artificial Sequence: Synthetic oligonucleotide
aauaccugagccgaauggc

SEQ ID NO: 1167483 - RNA, 19 nt, Artificial Sequence
  Description of Artificial Sequence: Synthetic oligonucleotide
agcuuuacuauccucuggc

SEQ ID NO: 1167484 - RNA, 19 nt, Artificial Sequence
  Description of Artificial Sequence: Synthetic oligonucleotide
aaaggaguagguccagugg

SEQ ID NO: 1167485 - RNA, 19 nt, Artificial Sequence
  Description of Artificial Sequence: Synthetic oligonucleotide
aacuaacucccagagaugg

SEQ ID NO: 1167486 - RNA, 19 nt, Artificial Sequence
  Description of Artificial Sequence: Synthetic oligonucleotide
aguucuucgaucugcugcc

SEQ ID NO: 1167487 - RNA, 19 nt, Artificial Sequence
  Description of Artificial Sequence: Synthetic oligonucleotide
uuuccuguagcugagauac

SEQ ID NO: 1167488 - RNA, 19 nt, Artificial Sequence
  Description of Artificial Sequence: Synthetic oligonucleotide
aacaaaguucaauuuccag

SEQ ID NO: 1167489 - RNA, 19 nt, Artificial Sequence
  Description of Artificial Sequence: Synthetic oligonucleotide
cauugauaaaucuugagga

SEQ ID NO: 1167490 - RNA, 19 nt, Artificial Sequence
  Description of Artificial Sequence: Synthetic oligonucleotide
aacgcauugacccguaugu

SEQ ID NO: 1167491 - RNA, 19 nt, Artificial Sequence
  Description of Artificial Sequence: Synthetic oligonucleotide
auaaaucgguaauuuaauc

SEQ ID NO: 1167492 - RNA, 19 nt, Artificial Sequence
  Description of Artificial Sequence: Synthetic oligonucleotide
aaacauugcuauuaauacu

SEQ ID NO: 1167493 - RNA, 19 nt, Artificial Sequence
  Description of Artificial Sequence: Synthetic oligonucleotide
gaaucauagaaugagcggc

SEQ ID NO: 1167494 - RNA, 19 nt, Artificial Sequence
  Description of Artificial Sequence: Synthetic oligonucleotide
uggauuuugaauucacaag

SEQ ID NO: 1167495 - RNA, 19 nt, Artificial Sequence
  Description of Artificial Sequence: Synthetic oligonucleotide
aagaugguuuucuaguucu

SEQ ID NO: 1167496 - RNA, 19 nt, Artificial Sequence
  Description of Artificial Sequence: Synthetic oligonucleotide
ugcacuaagacuuccugag

SEQ ID NO: 1167497 - RNA, 19 nt, Artificial Sequence
  Description of Artificial Sequence: Synthetic oligonucleotide
aacccagacguacuugagc

SEQ ID NO: 1167498 - RNA, 19 nt, Artificial Sequence
  Description of Artificial Sequence: Synthetic oligonucleotide
aagaaagauguuugguaag

SEQ ID NO: 1167499 - RNA, 19 nt, Artificial Sequence
  Description of Artificial Sequence: Synthetic oligonucleotide
uuagguuguguaaauauau

SEQ ID NO: 1167500 - RNA, 19 nt, Artificial Sequence
  Description of Artificial Sequence: Synthetic oligonucleotide
cauugcaugcaguugaagc

SEQ ID NO: 1167501 - RNA, 19 nt, Artificial Sequence
  Description of Artificial Sequence: Synthetic oligonucleotide
uuuuaccacuauaaaucgg

SEQ ID NO: 1167502 - RNA, 19 nt, Artificial Sequence
  Description of Artificial Sequence: Synthetic oligonucleotide
cauaauaucugcauaagaa

SEQ ID NO: 1167503 - RNA, 19 nt, Artificial Sequence
  Description of Artificial Sequence: Synthetic oligonucleotide
uuuuagguuguguaaauau

SEQ ID NO: 1167504 - RNA, 19 nt, Artificial Sequence
  Description of Artificial Sequence: Synthetic oligonucleotide
aauacuaggauaaaucaua

SEQ ID NO: 1167505 - RNA, 19 nt, Artificial Sequence
  Description of Artificial Sequence: Synthetic oligonucleotide
uuaugugcacacauugugc

SEQ ID NO: 1167506 - RNA, 19 nt, Artificial Sequence
  Description of Artificial Sequence: Synthetic oligonucleotide
ucauaauaucugcauaaga

SEQ ID NO: 1167507 - RNA, 19 nt, Artificial Sequence
  Description of Artificial Sequence: Synthetic oligonucleotide
aucacaauauuucuuacau

SEQ ID NO: 1167508 - RNA, 19 nt, Artificial Sequence
  Description of Artificial Sequence: Synthetic oligonucleotide
ucaaauuguuagaaccaag

SEQ ID NO: 1167509 - RNA, 19 nt, Artificial Sequence
  Description of Artificial Sequence: Synthetic oligonucleotide
auaaaucauaggcuuuagg

SEQ ID NO: 1167510 - RNA, 19 nt, Artificial Sequence
  Description of Artificial Sequence: Synthetic oligonucleotide
aucuauaccaccaaggccu

SEQ ID NO: 1167511 - RNA, 19 nt, Artificial Sequence
  Description of Artificial Sequence: Synthetic oligonucleotide
uacuaaaaucuauaccacc

SEQ ID NO: 1167512 - RNA, 19 nt, Artificial Sequence
  Description of Artificial Sequence: Synthetic oligonucleotide
aaguucaauuuccagagua

SEQ ID NO: 1167513 - RNA, 19 nt, Artificial Sequence
  Description of Artificial Sequence: Synthetic oligonucleotide
aaagccugcacuaagacuu

SEQ ID NO: 1167514 - RNA, 19 nt, Artificial Sequence
  Description of Artificial Sequence: Synthetic oligonucleotide
aagaauaucaaaacuuuau

SEQ ID NO: 1167515 - RNA, 19 nt, Artificial Sequence
  Description of Artificial Sequence: Synthetic oligonucleotide
aauuacauacauauccaca

SEQ ID NO: 1167516 - RNA, 19 nt, Artificial Sequence
  Description of Artificial Sequence: Synthetic oligonucleotide
aaucauagaaugagcggcg

SEQ ID NO: 1167517 - RNA, 19 nt, Artificial Sequence
  Description of Artificial Sequence: Synthetic oligonucleotide
aacauugcuauuaauacua

SEQ ID NO: 1167518 - RNA, 19 nt, Artificial Sequence
  Description of Artificial Sequence: Synthetic oligonucleotide
cacuaagacuuccugaggg

SEQ ID NO: 1167519 - RNA, 19 nt, Artificial Sequence
  Description of Artificial Sequence: Synthetic oligonucleotide
uuagcauaggcccuagagu

SEQ ID NO: 1167520 - RNA, 19 nt, Artificial Sequence
  Description of Artificial Sequence: Synthetic oligonucleotide
uuacucucuauauaauuac

SEQ ID NO: 1167521 - RNA, 19 nt, Artificial Sequence
  Description of Artificial Sequence: Synthetic oligonucleotide
aaauccaaauguggaggcc

SEQ ID NO: 1167522 - RNA, 19 nt, Artificial Sequence
  Description of Artificial Sequence: Synthetic oligonucleotide
ucuuacauggagaaucaaa

SEQ ID NO: 1167523 - RNA, 19 nt, Artificial Sequence
  Description of Artificial Sequence: Synthetic oligonucleotide
aagccacuugauugcaagc

SEQ ID NO: 1167524 - RNA, 19 nt, Artificial Sequence
  Description of Artificial Sequence: Synthetic oligonucleotide
ucacaagaaagauguuugg

SEQ ID NO: 1167525 - RNA, 19 nt, Artificial Sequence
  Description of Artificial Sequence: Synthetic oligonucleotide
cugaggauguacuaaaauc

SEQ ID NO: 1167526 - RNA, 19 nt, Artificial Sequence
  Description of Artificial Sequence: Synthetic oligonucleotide
uugucaagggacaaacuac

SEQ ID NO: 1167527 - RNA, 19 nt, Artificial Sequence
  Description of Artificial Sequence: Synthetic oligonucleotide
agaaagauguuugguaagg

SEQ ID NO: 1167528 - RNA, 19 nt, Artificial Sequence
  Description of Artificial Sequence: Synthetic oligonucleotide
uaagccacuugauugcaag

SEQ ID NO: 1167529 - RNA, 19 nt, Artificial Sequence
  Description of Artificial Sequence: Synthetic oligonucleotide
uaauuacauacauauccac

SEQ ID NO: 1167530 - RNA, 19 nt, Artificial Sequence
  Description of Artificial Sequence: Synthetic oligonucleotide
uaggauaaaucauaggcuu

SEQ ID NO: 1167531 - RNA, 19 nt, Artificial Sequence
  Description of Artificial Sequence: Synthetic oligonucleotide
ugucaaaccagcugaugcc

SEQ ID NO: 1167532 - RNA, 19 nt, Artificial Sequence
  Description of Artificial Sequence: Synthetic oligonucleotide
uuuagguuguguaaauaua

SEQ ID NO: 1167533 - RNA, 19 nt, Artificial Sequence
  Description of Artificial Sequence: Synthetic oligonucleotide
ugcuauuaauacuaggaua

SEQ ID NO: 1167534 - RNA, 19 nt, Artificial Sequence
  Description of Artificial Sequence: Synthetic oligonucleotide
aagauguuugguaagguaa

SEQ ID NO: 1167535 - RNA, 19 nt, Artificial Sequence
  Description of Artificial Sequence: Synthetic oligonucleotide
gaaaggaguagguccagug

SEQ ID NO: 1167536 - RNA, 19 nt, Artificial Sequence
  Description of Artificial Sequence: Synthetic oligonucleotide
uguaccucaaauuguuaga

SEQ ID NO: 1167537 - RNA, 19 nt, Artificial Sequence
  Description of Artificial Sequence: Synthetic oligonucleotide
cuguaccucaaauuguuag

SEQ ID NO: 1167538 - RNA, 19 nt, Artificial Sequence
  Description of Artificial Sequence: Synthetic oligonucleotide
cuuacauggagaaucaaaa

SEQ ID NO: 1167539 - RNA, 19 nt, Artificial Sequence
  Description of Artificial Sequence: Synthetic oligonucleotide
ugauaaaucuugaggaguu

SEQ ID NO: 1167540 - RNA, 19 nt, Artificial Sequence
  Description of Artificial Sequence: Synthetic oligonucleotide
agcuaagcauucccaacgc

SEQ ID NO: 1167541 - RNA, 19 nt, Artificial Sequence
  Description of Artificial Sequence: Synthetic oligonucleotide
uugcuauuaauacuaggau

SEQ ID NO: 1167542 - RNA, 19 nt, Artificial Sequence
  Description of Artificial Sequence: Synthetic oligonucleotide
guaaguguugcagccaugg

SEQ ID NO: 1167543 - RNA, 19 nt, Artificial Sequence
  Description of Artificial Sequence: Synthetic oligonucleotide
caagaugcaguccaauuac

SEQ ID NO: 1167544 - RNA, 19 nt, Artificial Sequence
  Description of Artificial Sequence: Synthetic oligonucleotide
uugauaaaucuugaggagu

SEQ ID NO: 1167545 - RNA, 19 nt, Artificial Sequence
  Description of Artificial Sequence: Synthetic oligonucleotide
uucgacuaauuucuucuug

SEQ ID NO: 1167546 - RNA, 19 nt, Artificial Sequence
  Description of Artificial Sequence: Synthetic oligonucleotide
ggacaaacuacuuuuagca

SEQ ID NO: 1167547 - RNA, 19 nt, Artificial Sequence
  Description of Artificial Sequence: Synthetic oligonucleotide
uagauugaaguugugcagc

SEQ ID NO: 1167548 - RNA, 19 nt, Artificial Sequence
  Description of Artificial Sequence: Synthetic oligonucleotide
accacuauaaaucgguaau

SEQ ID NO: 1167549 - RNA, 19 nt, Artificial Sequence
  Description of Artificial Sequence: Synthetic oligonucleotide
acauucgacuaauuucuuc

SEQ ID NO: 1167550 - RNA, 19 nt, Artificial Sequence
  Description of Artificial Sequence: Synthetic oligonucleotide
caaagacaagcuuaaagca

SEQ ID NO: 1167551 - RNA, 19 nt, Artificial Sequence
  Description of Artificial Sequence: Synthetic oligonucleotide
cucuauauaauuacauaca

SEQ ID NO: 1167552 - RNA, 19 nt, Artificial Sequence
  Description of Artificial Sequence: Synthetic oligonucleotide
uaaaucucccaagaugcag

SEQ ID NO: 1167553 - RNA, 19 nt, Artificial Sequence
  Description of Artificial Sequence: Synthetic oligonucleotide
cacauugugcacauuacuc

SEQ ID NO: 1167554 - RNA, 19 nt, Artificial Sequence
  Description of Artificial Sequence: Synthetic oligonucleotide
uuuacuauccucuggccuu

SEQ ID NO: 1167555 - RNA, 19 nt, Artificial Sequence
  Description of Artificial Sequence: Synthetic oligonucleotide
uucauaauaucugcauaag

SEQ ID NO: 1167556 - RNA, 19 nt, Artificial Sequence
  Description of Artificial Sequence: Synthetic oligonucleotide
ugagcaucgcuuuggaaga

SEQ ID NO: 1167557 - RNA, 19 nt, Artificial Sequence
  Description of Artificial Sequence: Synthetic oligonucleotide
uuacuacaucauuagaaaa

SEQ ID NO: 1167558 - RNA, 19 nt, Artificial Sequence
  Description of Artificial Sequence: Synthetic oligonucleotide
agacauucgacuaauuucu

SEQ ID NO: 1167559 - RNA, 19 nt, Artificial Sequence
  Description of Artificial Sequence: Synthetic oligonucleotide
ucaacugcaggaguugucc

SEQ ID NO: 1167560 - RNA, 19 nt, Artificial Sequence
  Description of Artificial Sequence: Synthetic oligonucleotide
aacucugggugcauucugc

SEQ ID NO: 1167561 - RNA, 19 nt, Artificial Sequence
  Description of Artificial Sequence: Synthetic oligonucleotide
guauucacagcauaaaccu

SEQ ID NO: 1167562 - RNA, 19 nt, Artificial Sequence
  Description of Artificial Sequence: Synthetic oligonucleotide
cagcuaagcauucccaacg

SEQ ID NO: 1167563 - RNA, 19 nt, Artificial Sequence
  Description of Artificial Sequence: Synthetic oligonucleotide
caauaccugagccgaaugg

SEQ ID NO: 1167564 - RNA, 19 nt, Artificial Sequence
  Description of Artificial Sequence: Synthetic oligonucleotide
agcaacaaaacugcaacug

SEQ ID NO: 1167565 - RNA, 19 nt, Artificial Sequence
  Description of Artificial Sequence: Synthetic oligonucleotide
uagcauaggcccuagaguu

SEQ ID NO: 1167566 - RNA, 19 nt, Artificial Sequence
  Description of Artificial Sequence: Synthetic oligonucleotide
ucugaggauguacuaaaau

SEQ ID NO: 1167567 - RNA, 19 nt, Artificial Sequence
  Description of Artificial Sequence: Synthetic oligonucleotide
cacauuacucucuauauaa

SEQ ID NO: 1167568 - RNA, 19 nt, Artificial Sequence
  Description of Artificial Sequence: Synthetic oligonucleotide
ugcacauuacucucuauau

SEQ ID NO: 1167569 - RNA, 19 nt, Artificial Sequence
  Description of Artificial Sequence: Synthetic oligonucleotide
uucacagcauaaaccuuag

SEQ ID NO: 1167570 - RNA, 19 nt, Artificial Sequence
  Description of Artificial Sequence: Synthetic oligonucleotide
acuuccugaggguuuaucu

SEQ ID NO: 1167571 - RNA, 19 nt, Artificial Sequence
  Description of Artificial Sequence: Synthetic oligonucleotide
augcaguccaauuacuaca

SEQ ID NO: 1167572 - RNA, 19 nt, Artificial Sequence
  Description of Artificial Sequence: Synthetic oligonucleotide
uuacauuuucaugaauaga

SEQ ID NO: 1167573 - RNA, 19 nt, Artificial Sequence
  Description of Artificial Sequence: Synthetic oligonucleotide
uaaucacaauauuucuuac

SEQ ID NO: 1167574 - RNA, 19 nt, Artificial Sequence
  Description of Artificial Sequence: Synthetic oligonucleotide
uuagaaccaagacucugaa

SEQ ID NO: 1167575 - RNA, 19 nt, Artificial Sequence
  Description of Artificial Sequence: Synthetic oligonucleotide
auaucugcauaagaaacca

SEQ ID NO: 1167576 - RNA, 19 nt, Artificial Sequence
  Description of Artificial Sequence: Synthetic oligonucleotide
acaagaugcccugaugcac

SEQ ID NO: 1167577 - RNA, 19 nt, Artificial Sequence
  Description of Artificial Sequence: Synthetic oligonucleotide
ucgcuuuggaagacauucg

SEQ ID NO: 1167578 - RNA, 19 nt, Artificial Sequence
  Description of Artificial Sequence: Synthetic oligonucleotide
uggcguuccaaaacuaacu

SEQ ID NO: 1167579 - RNA, 19 nt, Artificial Sequence
  Description of Artificial Sequence: Synthetic oligonucleotide
caguucaguucuaaaggcc

SEQ ID NO: 1167580 - RNA, 19 nt, Artificial Sequence
  Description of Artificial Sequence: Synthetic oligonucleotide
ugcaguugaagcaggugcu

SEQ ID NO: 1167581 - RNA, 19 nt, Artificial Sequence
  Description of Artificial Sequence: Synthetic oligonucleotide
uguuagaaccaagacucug

SEQ ID NO: 1167582 - RNA, 19 nt, Artificial Sequence
  Description of Artificial Sequence: Synthetic oligonucleotide
ucauagaaugagcggcgcc

SEQ ID NO: 1167583 - RNA, 19 nt, Artificial Sequence
  Description of Artificial Sequence: Synthetic oligonucleotide
uuuaucugaggauguacua

SEQ ID NO: 1167584 - RNA, 19 nt, Artificial Sequence
  Description of Artificial Sequence: Synthetic oligonucleotide
guucaauuuccagaguaag

SEQ ID NO: 1167585 - RNA, 19 nt, Artificial Sequence
  Description of Artificial Sequence: Synthetic oligonucleotide
aaaucucccaagaugcagu

SEQ ID NO: 1167586 - RNA, 19 nt, Artificial Sequence
  Description of Artificial Sequence: Synthetic oligonucleotide
cuccaagguuugaagaacc

SEQ ID NO: 1167587 - RNA, 19 nt, Artificial Sequence
  Description of Artificial Sequence: Synthetic oligonucleotide
ccaauuacuacaucauuag

SEQ ID NO: 1167588 - RNA, 19 nt, Artificial Sequence
  Description of Artificial Sequence: Synthetic oligonucleotide
guucuaaaggccuugucaa

SEQ ID NO: 1167589 - RNA, 19 nt, Artificial Sequence
  Description of Artificial Sequence: Synthetic oligonucleotide
gauaaaucauaggcuuuag

SEQ ID NO: 1167590 - RNA, 19 nt, Artificial Sequence
  Description of Artificial Sequence: Synthetic oligonucleotide
uugaggaguuauaugugaa

SEQ ID NO: 1167591 - RNA, 19 nt, Artificial Sequence
  Description of Artificial Sequence: Synthetic oligonucleotide
acuuugagcaucgcuuugg

SEQ ID NO: 1167592 - RNA, 19 nt, Artificial Sequence
  Description of Artificial Sequence: Synthetic oligonucleotide
aguucauaauaucugcaua

SEQ ID NO: 1167593 - RNA, 19 nt, Artificial Sequence
  Description of Artificial Sequence: Synthetic oligonucleotide
uuuuguccgagacccgaug

SEQ ID NO: 1167594 - RNA, 19 nt, Artificial Sequence
  Description of Artificial Sequence: Synthetic oligonucleotide
uugacccguauguuuaucu

SEQ ID NO: 1167595 - RNA, 19 nt, Artificial Sequence
  Description of Artificial Sequence: Synthetic oligonucleotide
aucauagaaugagcggcgc

SEQ ID NO: 1167596 - RNA, 19 nt, Artificial Sequence
  Description of Artificial Sequence: Synthetic oligonucleotide
uccgaaaccagagcuagcu

SEQ ID NO: 1167597 - RNA, 19 nt, Artificial Sequence
  Description of Artificial Sequence: Synthetic oligonucleotide
uacuuuuagcauaggcccu

SEQ ID NO: 1167598 - RNA, 19 nt, Artificial Sequence
  Description of Artificial Sequence: Synthetic oligonucleotide
auaagaaaccaaugugcau

SEQ ID NO: 1167599 - RNA, 19 nt, Artificial Sequence
  Description of Artificial Sequence: Synthetic oligonucleotide
auucacaagaaagauguuu

SEQ ID NO: 1167600 - RNA, 19 nt, Artificial Sequence
  Description of Artificial Sequence: Synthetic oligonucleotide
aagacaagcuuaaagcauu

SEQ ID NO: 1167601 - RNA, 19 nt, Artificial Sequence
  Description of Artificial Sequence: Synthetic oligonucleotide
aaucgguaauuuaaucaca

SEQ ID NO: 1167602 - RNA, 19 nt, Artificial Sequence
  Description of Artificial Sequence: Synthetic oligonucleotide
uaccacuauaaaucgguaa

SEQ ID NO: 1167603 - RNA, 19 nt, Artificial Sequence
  Description of Artificial Sequence: Synthetic oligonucleotide
ugcaguccaauuacuacau

SEQ ID NO: 1167604 - RNA, 19 nt, Artificial Sequence
  Description of Artificial Sequence: Synthetic oligonucleotide
gcuauuaauacuaggauaa

SEQ ID NO: 1167605 - RNA, 19 nt, Artificial Sequence
  Description of Artificial Sequence: Synthetic oligonucleotide
ugccgugaugccaggauug

SEQ ID NO: 1167606 - RNA, 19 nt, Artificial Sequence
  Description of Artificial Sequence: Synthetic oligonucleotide
augugaauuguuugcuuga

SEQ ID NO: 1167607 - RNA, 19 nt, Artificial Sequence
  Description of Artificial Sequence: Synthetic oligonucleotide
agauugaaguugugcagcu

SEQ ID NO: 1167608 - RNA, 19 nt, Artificial Sequence
  Description of Artificial Sequence: Synthetic oligonucleotide
aacggcugcugcauuuggc

SEQ ID NO: 1167609 - RNA, 19 nt, Artificial Sequence
  Description of Artificial Sequence: Synthetic oligonucleotide
uaagcauucccaacgcauu

SEQ ID NO: 1167610 - RNA, 19 nt, Artificial Sequence
  Description of Artificial Sequence: Synthetic oligonucleotide
acuaagacuuccugagggu

SEQ ID NO: 1167611 - RNA, 19 nt, Artificial Sequence
  Description of Artificial Sequence: Synthetic oligonucleotide
ugcauguauucacagcaua

SEQ ID NO: 1167612 - RNA, 19 nt, Artificial Sequence
  Description of Artificial Sequence: Synthetic oligonucleotide
uccuccaagguuugaagaa

SEQ ID NO: 1167613 - RNA, 19 nt, Artificial Sequence
  Description of Artificial Sequence: Synthetic oligonucleotide
uaacucugggugcauucug

SEQ ID NO: 1167614 - RNA, 19 nt, Artificial Sequence
  Description of Artificial Sequence: Synthetic oligonucleotide
uccacaagaugcccugaug

SEQ ID NO: 1167615 - RNA, 19 nt, Artificial Sequence
  Description of Artificial Sequence: Synthetic oligonucleotide
ugaggaguuauaugugaau

SEQ ID NO: 1167616 - RNA, 19 nt, Artificial Sequence
  Description of Artificial Sequence: Synthetic oligonucleotide
gggacaaacuacuuuuagc

SEQ ID NO: 1167617 - RNA, 19 nt, Artificial Sequence
  Description of Artificial Sequence: Synthetic oligonucleotide
cuaggauaaaucauaggcu

SEQ ID NO: 1167618 - RNA, 19 nt, Artificial Sequence
  Description of Artificial Sequence: Synthetic oligonucleotide
auaaaucuugaggaguuau

SEQ ID NO: 1167619 - RNA, 19 nt, Artificial Sequence
  Description of Artificial Sequence: Synthetic oligonucleotide
uagcaacaaaacugcaacu

SEQ ID NO: 1167620 - RNA, 19 nt, Artificial Sequence
  Description of Artificial Sequence: Synthetic oligonucleotide
ccaaaacuaacucccagag

SEQ ID NO: 1167621 - RNA, 19 nt, Artificial Sequence
  Description of Artificial Sequence: Synthetic oligonucleotide
auggcguuccaaaacuaac

SEQ ID NO: 1167622 - RNA, 19 nt, Artificial Sequence
  Description of Artificial Sequence: Synthetic oligonucleotide
uccaagguuugaagaaccu

SEQ ID NO: 1167623 - RNA, 19 nt, Artificial Sequence
  Description of Artificial Sequence: Synthetic oligonucleotide
auaccugagccgaauggcg

SEQ ID NO: 1167624 - RNA, 19 nt, Artificial Sequence
  Description of Artificial Sequence: Synthetic oligonucleotide
cacacauugugcacauuac

SEQ ID NO: 1167625 - RNA, 19 nt, Artificial Sequence
  Description of Artificial Sequence: Synthetic oligonucleotide
acaaaacugcaacuggauu

SEQ ID NO: 1167626 - RNA, 19 nt, Artificial Sequence
  Description of Artificial Sequence: Synthetic oligonucleotide
aggaguuguccuccuguuc

SEQ ID NO: 1167627 - RNA, 19 nt, Artificial Sequence
  Description of Artificial Sequence: Synthetic oligonucleotide
uuaaagcauuuuguccgag

SEQ ID NO: 1167628 - RNA, 19 nt, Artificial Sequence
  Description of Artificial Sequence: Synthetic oligonucleotide
cccaaagacaagcuuaaag

SEQ ID NO: 1167629 - RNA, 19 nt, Artificial Sequence
  Description of Artificial Sequence: Synthetic oligonucleotide
guuagaaccaagacucuga

SEQ ID NO: 1167630 - RNA, 19 nt, Artificial Sequence
  Description of Artificial Sequence: Synthetic oligonucleotide
gauguuugguaagguaaac

SEQ ID NO: 1167631 - RNA, 19 nt, Artificial Sequence
  Description of Artificial Sequence: Synthetic oligonucleotide
gaagacauucgacuaauuu

SEQ ID NO: 1167632 - RNA, 19 nt, Artificial Sequence
  Description of Artificial Sequence: Synthetic oligonucleotide
uauucacagcauaaaccuu

SEQ ID NO: 1167633 - RNA, 19 nt, Artificial Sequence
  Description of Artificial Sequence: Synthetic oligonucleotide
uguguaaguguugcagcca

SEQ ID NO: 1167634 - RNA, 19 nt, Artificial Sequence
  Description of Artificial Sequence: Synthetic oligonucleotide
aguguugcagccauggcaa

SEQ ID NO: 1167635 - RNA, 19 nt, Artificial Sequence
  Description of Artificial Sequence: Synthetic oligonucleotide
uuguuagaaccaagacucu

SEQ ID NO: 1167636 - RNA, 19 nt, Artificial Sequence
  Description of Artificial Sequence: Synthetic oligonucleotide
gacuaauuucuucuuggua

SEQ ID NO: 1167637 - RNA, 19 nt, Artificial Sequence
  Description of Artificial Sequence: Synthetic oligonucleotide
uaggcccuagaguucauaa

SEQ ID NO: 1167638 - RNA, 19 nt, Artificial Sequence
  Description of Artificial Sequence: Synthetic oligonucleotide
aucugcauaagaaaccaau

SEQ ID NO: 1167639 - RNA, 19 nt, Artificial Sequence
  Description of Artificial Sequence: Synthetic oligonucleotide
auucacagcauaaaccuua

SEQ ID NO: 1167640 - RNA, 19 nt, Artificial Sequence
  Description of Artificial Sequence: Synthetic oligonucleotide
auaugugaauuguuugcuu

SEQ ID NO: 1167641 - RNA, 19 nt, Artificial Sequence
  Description of Artificial Sequence: Synthetic oligonucleotide
uuaccacuauaaaucggua

SEQ ID NO: 1167642 - RNA, 19 nt, Artificial Sequence
  Description of Artificial Sequence: Synthetic oligonucleotide
gcugcauuuggcauggugc

SEQ ID NO: 1167643 - RNA, 19 nt, Artificial Sequence
  Description of Artificial Sequence: Synthetic oligonucleotide
uguuugcuugaguggcaag

SEQ ID NO: 1167644 - RNA, 19 nt, Artificial Sequence
  Description of Artificial Sequence: Synthetic oligonucleotide
agaguucauaauaucugca

SEQ ID NO: 1167645 - RNA, 19 nt, Artificial Sequence
  Description of Artificial Sequence: Synthetic oligonucleotide
ugaguggcaagaugguuuu

SEQ ID NO: 1167646 - RNA, 19 nt, Artificial Sequence
  Description of Artificial Sequence: Synthetic oligonucleotide
gguaagguaaacaaacaaa

SEQ ID NO: 1167647 - RNA, 19 nt, Artificial Sequence
  Description of Artificial Sequence: Synthetic oligonucleotide
auuggacaccccaaauguc

SEQ ID NO: 1167648 - RNA, 19 nt, Artificial Sequence
  Description of Artificial Sequence: Synthetic oligonucleotide
uucauugcaugcaguugaa

SEQ ID NO: 1167649 - RNA, 19 nt, Artificial Sequence
  Description of Artificial Sequence: Synthetic oligonucleotide
gacuuugagcaucgcuuug

SEQ ID NO: 1167650 - RNA, 19 nt, Artificial Sequence
  Description of Artificial Sequence: Synthetic oligonucleotide
cuuaaagcauuuuguccga

SEQ ID NO: 1167651 - RNA, 19 nt, Artificial Sequence
  Description of Artificial Sequence: Synthetic oligonucleotide
acuaacucccagagauggc

SEQ ID NO: 1167652 - RNA, 19 nt, Artificial Sequence
  Description of Artificial Sequence: Synthetic oligonucleotide
cuaaaaucuauaccaccaa

SEQ ID NO: 1167653 - RNA, 19 nt, Artificial Sequence
  Description of Artificial Sequence: Synthetic oligonucleotide
agaaugagcggcgccagcu

SEQ ID NO: 1167654 - RNA, 19 nt, Artificial Sequence
  Description of Artificial Sequence: Synthetic oligonucleotide
gaguucauaauaucugcau

SEQ ID NO: 1167655 - RNA, 19 nt, Artificial Sequence
  Description of Artificial Sequence: Synthetic oligonucleotide
ugacccguauguuuaucuc

SEQ ID NO: 1167656 - RNA, 19 nt, Artificial Sequence
  Description of Artificial Sequence: Synthetic oligonucleotide
aagaugcaguccaauuacu

SEQ ID NO: 1167657 - RNA, 19 nt, Artificial Sequence
  Description of Artificial Sequence: Synthetic oligonucleotide
gcuguguaaguguugcagc

SEQ ID NO: 1167658 - RNA, 19 nt, Artificial Sequence
  Description of Artificial Sequence: Synthetic oligonucleotide
cagugguaacucugggugc

SEQ ID NO: 1167659 - RNA, 19 nt, Artificial Sequence
  Description of Artificial Sequence: Synthetic oligonucleotide
aacugcaacuggauuuuga

SEQ ID NO: 1167660 - RNA, 19 nt, Artificial Sequence
  Description of Artificial Sequence: Synthetic oligonucleotide
caagaugcccugaugcaca

SEQ ID NO: 1167661 - RNA, 19 nt, Artificial Sequence
  Description of Artificial Sequence: Synthetic oligonucleotide
guuccaaaccccgcagagg

SEQ ID NO: 1167662 - RNA, 19 nt, Artificial Sequence
  Description of Artificial Sequence: Synthetic oligonucleotide
ucccagagauggcuguggc

SEQ ID NO: 1167663 - RNA, 19 nt, Artificial Sequence
  Description of Artificial Sequence: Synthetic oligonucleotide
ucauugcaugcaguugaag

SEQ ID NO: 1167664 - RNA, 19 nt, Artificial Sequence
  Description of Artificial Sequence: Synthetic oligonucleotide
agauuucaacauccugaca

SEQ ID NO: 1167665 - RNA, 19 nt, Artificial Sequence
  Description of Artificial Sequence: Synthetic oligonucleotide
cauagaaugagcggcgcca

SEQ ID NO: 1167666 - RNA, 19 nt, Artificial Sequence
  Description of Artificial Sequence: Synthetic oligonucleotide
acaauauuucuuacaugga

SEQ ID NO: 1167667 - RNA, 19 nt, Artificial Sequence
  Description of Artificial Sequence: Synthetic oligonucleotide
uguccgagacccgaugcug

SEQ ID NO: 1167668 - RNA, 19 nt, Artificial Sequence
  Description of Artificial Sequence: Synthetic oligonucleotide
aguuaaacccagacguacu

SEQ ID NO: 1167669 - RNA, 19 nt, Artificial Sequence
  Description of Artificial Sequence: Synthetic oligonucleotide
caacgcauugacccguaug

SEQ ID NO: 1167670 - RNA, 19 nt, Artificial Sequence
  Description of Artificial Sequence: Synthetic oligonucleotide
uugugcacauuacucucua

SEQ ID NO: 1167671 - RNA, 19 nt, Artificial Sequence
  Description of Artificial Sequence: Synthetic oligonucleotide
gaggcaggauuggacaccc

SEQ ID NO: 1167672 - RNA, 19 nt, Artificial Sequence
  Description of Artificial Sequence: Synthetic oligonucleotide
gaaccaagacucugaagua

SEQ ID NO: 1167673 - RNA, 19 nt, Artificial Sequence
  Description of Artificial Sequence: Synthetic oligonucleotide
aaaccagcugaugccguga

SEQ ID NO: 1167674 - RNA, 19 nt, Artificial Sequence
  Description of Artificial Sequence: Synthetic oligonucleotide
cugcauaagaaaccaaugu

SEQ ID NO: 1167675 - RNA, 19 nt, Artificial Sequence
  Description of Artificial Sequence: Synthetic oligonucleotide
aucucccaagaugcagucc

SEQ ID NO: 1167676 - RNA, 19 nt, Artificial Sequence
  Description of Artificial Sequence: Synthetic oligonucleotide
acauugcuauuaauacuag

SEQ ID NO: 1167677 - RNA, 19 nt, Artificial Sequence
  Description of Artificial Sequence: Synthetic oligonucleotide
auugacccguauguuuauc

SEQ ID NO: 1167678 - RNA, 19 nt, Artificial Sequence
  Description of Artificial Sequence: Synthetic oligonucleotide
aguucaauuuccagaguaa

SEQ ID NO: 1167679 - RNA, 19 nt, Artificial Sequence
  Description of Artificial Sequence: Synthetic oligonucleotide
uuacuauccucuggccuug

SEQ ID NO: 1167680 - RNA, 19 nt, Artificial Sequence
  Description of Artificial Sequence: Synthetic oligonucleotide
aggauuggacaccccaaau

SEQ ID NO: 1167681 - RNA, 19 nt, Artificial Sequence
  Description of Artificial Sequence: Synthetic oligonucleotide
guaccucaaauuguuagaa

SEQ ID NO: 1167682 - RNA, 19 nt, Artificial Sequence
  Description of Artificial Sequence: Synthetic oligonucleotide
agauguuugguaagguaaa

SEQ ID NO: 1167683 - RNA, 19 nt, Artificial Sequence
  Description of Artificial Sequence: Synthetic oligonucleotide
caaaacuaacucccagaga

SEQ ID NO: 1167684 - RNA, 19 nt, Artificial Sequence
  Description of Artificial Sequence: Synthetic oligonucleotide
gcguuccaaaacuaacucc

SEQ ID NO: 1167685 - RNA, 19 nt, Artificial Sequence
  Description of Artificial Sequence: Synthetic oligonucleotide
gugcacauuacucucuaua

SEQ ID NO: 1167686 - RNA, 19 nt, Artificial Sequence
  Description of Artificial Sequence: Synthetic oligonucleotide
acguacuugagcugccaaa

SEQ ID NO: 1167687 - RNA, 19 nt, Artificial Sequence
  Description of Artificial Sequence: Synthetic oligonucleotide
gacaaacuacuuuuagcau

SEQ ID NO: 1167688 - RNA, 19 nt, Artificial Sequence
  Description of Artificial Sequence: Synthetic oligonucleotide
guugugcagcuaaagcuac

SEQ ID NO: 1167689 - RNA, 19 nt, Artificial Sequence
  Description of Artificial Sequence: Synthetic oligonucleotide
auaaaucucccaagaugca

SEQ ID NO: 1167690 - RNA, 19 nt, Artificial Sequence
  Description of Artificial Sequence: Synthetic oligonucleotide
cuaagcauucccaacgcau

SEQ ID NO: 1167691 - RNA, 19 nt, Artificial Sequence
  Description of Artificial Sequence: Synthetic oligonucleotide
gaggauguacuaaaaucua

SEQ ID NO: 1167692 - RNA, 19 nt, Artificial Sequence
  Description of Artificial Sequence: Synthetic oligonucleotide
ggcguuccaaaacuaacuc

SEQ ID NO: 1167693 - RNA, 19 nt, Artificial Sequence
  Description of Artificial Sequence: Synthetic oligonucleotide
aagacuuccugaggguuua

SEQ ID NO: 1167694 - RNA, 19 nt, Artificial Sequence
  Description of Artificial Sequence: Synthetic oligonucleotide
gacccguauguuuaucucu

SEQ ID NO: 1167695 - RNA, 19 nt, Artificial Sequence
  Description of Artificial Sequence: Synthetic oligonucleotide
aagccugcacuaagacuuc

SEQ ID NO: 1167696 - RNA, 19 nt, Artificial Sequence
  Description of Artificial Sequence: Synthetic oligonucleotide
ugcaggaguuguccuccug

SEQ ID NO: 1167697 - RNA, 19 nt, Artificial Sequence
  Description of Artificial Sequence: Synthetic oligonucleotide
agcauaggcccuagaguuc

SEQ ID NO: 1167698 - RNA, 19 nt, Artificial Sequence
  Description of Artificial Sequence: Synthetic oligonucleotide
ucuauaccaccaaggccuu

SEQ ID NO: 1167699 - RNA, 19 nt, Artificial Sequence
  Description of Artificial Sequence: Synthetic oligonucleotide
cucaaauuguuagaaccaa

SEQ ID NO: 1167700 - RNA, 19 nt, Artificial Sequence
  Description of Artificial Sequence: Synthetic oligonucleotide
gugccaauaccugagccga

SEQ ID NO: 1167701 - RNA, 19 nt, Artificial Sequence
  Description of Artificial Sequence: Synthetic oligonucleotide
uugcaagccagugccaaua

SEQ ID NO: 1167702 - RNA, 19 nt, Artificial Sequence
  Description of Artificial Sequence: Synthetic oligonucleotide
gcacuaagacuuccugagg

SEQ ID NO: 1167703 - RNA, 19 nt, Artificial Sequence
  Description of Artificial Sequence: Synthetic oligonucleotide
aggcuuuagguugauggau

SEQ ID NO: 1167704 - RNA, 19 nt, Artificial Sequence
  Description of Artificial Sequence: Synthetic oligonucleotide
agccugcacuaagacuucc

SEQ ID NO: 1167705 - RNA, 19 nt, Artificial Sequence
  Description of Artificial Sequence: Synthetic oligonucleotide
gcugaugccgugaugccag

SEQ ID NO: 1167706 - RNA, 19 nt, Artificial Sequence
  Description of Artificial Sequence: Synthetic oligonucleotide
gcuuuacuauccucuggcc

SEQ ID NO: 1167707 - RNA, 19 nt, Artificial Sequence
  Description of Artificial Sequence: Synthetic oligonucleotide
cauuuuguccgagacccga

SEQ ID NO: 1167708 - RNA, 19 nt, Artificial Sequence
  Description of Artificial Sequence: Synthetic oligonucleotide
ccuagaguucauaauaucu

SEQ ID NO: 1167709 - RNA, 19 nt, Artificial Sequence
  Description of Artificial Sequence: Synthetic oligonucleotide
gaaagauguuugguaaggu

SEQ ID NO: 1167710 - RNA, 19 nt, Artificial Sequence
  Description of Artificial Sequence: Synthetic oligonucleotide
caacggcugcugcauuugg

SEQ ID NO: 1167711 - RNA, 19 nt, Artificial Sequence
  Description of Artificial Sequence: Synthetic oligonucleotide
cagacguacuugagcugcc

SEQ ID NO: 1167712 - RNA, 19 nt, Artificial Sequence
  Description of Artificial Sequence: Synthetic oligonucleotide
gguuuucaucuuucagagc

SEQ ID NO: 1167713 - RNA, 19 nt, Artificial Sequence
  Description of Artificial Sequence: Synthetic oligonucleotide
ugugcacauuacucucuau

SEQ ID NO: 1167714 - RNA, 19 nt, Artificial Sequence
  Description of Artificial Sequence: Synthetic oligonucleotide
acauuacucucuauauaau

SEQ ID NO: 1167715 - RNA, 19 nt, Artificial Sequence
  Description of Artificial Sequence: Synthetic oligonucleotide
gauaaaucuugaggaguua

SEQ ID NO: 1167716 - RNA, 19 nt, Artificial Sequence
  Description of Artificial Sequence: Synthetic oligonucleotide
uccgagacccgaugcugcu

SEQ ID NO: 1167717 - RNA, 19 nt, Artificial Sequence
  Description of Artificial Sequence: Synthetic oligonucleotide
acuuuuagcauaggcccua

SEQ ID NO: 1167718 - RNA, 19 nt, Artificial Sequence
  Description of Artificial Sequence: Synthetic oligonucleotide
caaaccccgcagaggcagg

SEQ ID NO: 1167719 - RNA, 19 nt, Artificial Sequence
  Description of Artificial Sequence: Synthetic oligonucleotide
agaugcaguccaauuacua

SEQ ID NO: 1167720 - RNA, 19 nt, Artificial Sequence
  Description of Artificial Sequence: Synthetic oligonucleotide
ggauguacuaaaaucuaua

SEQ ID NO: 1167721 - RNA, 19 nt, Artificial Sequence
  Description of Artificial Sequence: Synthetic oligonucleotide
uucuuacauggagaaucaa

SEQ ID NO: 1167722 - RNA, 19 nt, Artificial Sequence
  Description of Artificial Sequence: Synthetic oligonucleotide
gacguacuugagcugccaa

SEQ ID NO: 1167723 - RNA, 19 nt, Artificial Sequence
  Description of Artificial Sequence: Synthetic oligonucleotide
caacauccugacagaugac

SEQ ID NO: 1167724 - RNA, 19 nt, Artificial Sequence
  Description of Artificial Sequence: Synthetic oligonucleotide
cuguguuugcacucuggaa

SEQ ID NO: 1167725 - RNA, 19 nt, Artificial Sequence
  Description of Artificial Sequence: Synthetic oligonucleotide
aaaccccgcagaggcagga

SEQ ID NO: 1167726 - RNA, 19 nt, Artificial Sequence
  Description of Artificial Sequence: Synthetic oligonucleotide
ugagccgaauggcguucca

SEQ ID NO: 1167727 - RNA, 19 nt, Artificial Sequence
  Description of Artificial Sequence: Synthetic oligonucleotide
cuaacucccagagauggcu

SEQ ID NO: 1167728 - RNA, 19 nt, Artificial Sequence
  Description of Artificial Sequence: Synthetic oligonucleotide
ggauaaaucauaggcuuua

SEQ ID NO: 1167729 - RNA, 19 nt, Artificial Sequence
  Description of Artificial Sequence: Synthetic oligonucleotide
aggauaaaucauaggcuuu

SEQ ID NO: 1167730 - RNA, 19 nt, Artificial Sequence
  Description of Artificial Sequence: Synthetic oligonucleotide
cugaaaggaguagguccag

SEQ ID NO: 1167731 - RNA, 19 nt, Artificial Sequence
  Description of Artificial Sequence: Synthetic oligonucleotide
cuuuaagcaccuuuacauu

SEQ ID NO: 1167732 - RNA, 19 nt, Artificial Sequence
  Description of Artificial Sequence: Synthetic oligonucleotide
ccgaauggcguuccaaaac

SEQ ID NO: 1167733 - RNA, 19 nt, Artificial Sequence
  Description of Artificial Sequence: Synthetic oligonucleotide
augccgugaugccaggauu

SEQ ID NO: 1167734 - RNA, 19 nt, Artificial Sequence
  Description of Artificial Sequence: Synthetic oligonucleotide
caaagccugcacuaagacu

SEQ ID NO: 1167735 - RNA, 19 nt, Artificial Sequence
  Description of Artificial Sequence: Synthetic oligonucleotide
ucccaacgcauugacccgu

SEQ ID NO: 1167736 - RNA, 19 nt, Artificial Sequence
  Description of Artificial Sequence: Synthetic oligonucleotide
gaugccgugaugccaggau

SEQ ID NO: 1167737 - RNA, 19 nt, Artificial Sequence
  Description of Artificial Sequence: Synthetic oligonucleotide
gccuguacugcugaagcug

SEQ ID NO: 1167738 - RNA, 19 nt, Artificial Sequence
  Description of Artificial Sequence: Synthetic oligonucleotide
cuauuaauacuaggauaaa

SEQ ID NO: 1167739 - RNA, 19 nt, Artificial Sequence
  Description of Artificial Sequence: Synthetic oligonucleotide
uggugccgcuuccgaaacc

SEQ ID NO: 1167740 - RNA, 19 nt, Artificial Sequence
  Description of Artificial Sequence: Synthetic oligonucleotide
cauaaaccuuagcaacaaa

SEQ ID NO: 1167741 - RNA, 19 nt, Artificial Sequence
  Description of Artificial Sequence: Synthetic oligonucleotide
accagcugaugccgugaug

SEQ ID NO: 1167742 - RNA, 19 nt, Artificial Sequence
  Description of Artificial Sequence: Synthetic oligonucleotide
cguacuugagcugccaaag

SEQ ID NO: 1167743 - RNA, 19 nt, Artificial Sequence
  Description of Artificial Sequence: Synthetic oligonucleotide
uuccuguagcugagauacu

SEQ ID NO: 1167744 - RNA, 19 nt, Artificial Sequence
  Description of Artificial Sequence: Synthetic oligonucleotide
gugaauuguuugcuugagu

SEQ ID NO: 1167745 - RNA, 19 nt, Artificial Sequence
  Description of Artificial Sequence: Synthetic oligonucleotide
gcuuuggaagacauucgac

SEQ ID NO: 1167746 - RNA, 19 nt, Artificial Sequence
  Description of Artificial Sequence: Synthetic oligonucleotide
gccuugucaagggacaaac

SEQ ID NO: 1167747 - RNA, 19 nt, Artificial Sequence
  Description of Artificial Sequence: Synthetic oligonucleotide
cgguaauuuaaucacaaua

SEQ ID NO: 1167748 - RNA, 19 nt, Artificial Sequence
  Description of Artificial Sequence: Synthetic oligonucleotide
agcaucgcuuuggaagaca

SEQ ID NO: 1167749 - RNA, 19 nt, Artificial Sequence
  Description of Artificial Sequence: Synthetic oligonucleotide
guggugccgcuuccgaaac

SEQ ID NO: 1167750 - RNA, 19 nt, Artificial Sequence
  Description of Artificial Sequence: Synthetic oligonucleotide
accaaggccuucauugcau

SEQ ID NO: 1167751 - RNA, 19 nt, Artificial Sequence
  Description of Artificial Sequence: Synthetic oligonucleotide
gaaugagcggcgccagcua

SEQ ID NO: 1167752 - RNA, 19 nt, Artificial Sequence
  Description of Artificial Sequence: Synthetic oligonucleotide
ugaugccgugaugccagga

SEQ ID NO: 1167753 - RNA, 19 nt, Artificial Sequence
  Description of Artificial Sequence: Synthetic oligonucleotide
gugcugaaaggaguagguc

SEQ ID NO: 1167754 - RNA, 19 nt, Artificial Sequence
  Description of Artificial Sequence: Synthetic oligonucleotide
ccucuuuuguuuccagcug

SEQ ID NO: 1167755 - RNA, 19 nt, Artificial Sequence
  Description of Artificial Sequence: Synthetic oligonucleotide
ccguauguuuaucucuuuc

SEQ ID NO: 1167756 - RNA, 19 nt, Artificial Sequence
  Description of Artificial Sequence: Synthetic oligonucleotide
ccaaaccccgcagaggcag

SEQ ID NO: 1167757 - RNA, 19 nt, Artificial Sequence
  Description of Artificial Sequence: Synthetic oligonucleotide
auuuuguccgagacccgau

SEQ ID NO: 1167758 - RNA, 19 nt, Artificial Sequence
  Description of Artificial Sequence: Synthetic oligonucleotide
acccguauguuuaucucuu

SEQ ID NO: 1167759 - RNA, 19 nt, Artificial Sequence
  Description of Artificial Sequence: Synthetic oligonucleotide
cccuagaguucauaauauc

SEQ ID NO: 1167760 - RNA, 19 nt, Artificial Sequence
  Description of Artificial Sequence: Synthetic oligonucleotide
cugagccgaauggcguucc

SEQ ID NO: 1167761 - RNA, 19 nt, Artificial Sequence
  Description of Artificial Sequence: Synthetic oligonucleotide
ccaauaccugagccgaaug

SEQ ID NO: 1167762 - RNA, 19 nt, Artificial Sequence
  Description of Artificial Sequence: Synthetic oligonucleotide
cacuauaaaucgguaauuu

SEQ ID NO: 1167763 - RNA, 19 nt, Artificial Sequence
  Description of Artificial Sequence: Synthetic oligonucleotide
augagcggcgccagcuaag

SEQ ID NO: 1167764 - RNA, 19 nt, Artificial Sequence
  Description of Artificial Sequence: Synthetic oligonucleotide
cuggacuuugagcaucgcu

SEQ ID NO: 1167765 - RNA, 19 nt, Artificial Sequence
  Description of Artificial Sequence: Synthetic oligonucleotide
gaguuauaugugaauuguu

SEQ ID NO: 1167766 - RNA, 19 nt, Artificial Sequence
  Description of Artificial Sequence: Synthetic oligonucleotide
agacccgaugcugcugugu

SEQ ID NO: 1167767 - RNA, 19 nt, Artificial Sequence
  Description of Artificial Sequence: Synthetic oligonucleotide
ccuccaagguuugaagaac

SEQ ID NO: 1167768 - RNA, 19 nt, Artificial Sequence
  Description of Artificial Sequence: Synthetic oligonucleotide
uagcugagauacuguucuu

SEQ ID NO: 1167769 - RNA, 19 nt, Artificial Sequence
  Description of Artificial Sequence: Synthetic oligonucleotide
guaacucugggugcauucu

SEQ ID NO: 1167770 - RNA, 19 nt, Artificial Sequence
  Description of Artificial Sequence: Synthetic oligonucleotide
gagcaucgcuuuggaagac

SEQ ID NO: 1167771 - RNA, 19 nt, Artificial Sequence
  Description of Artificial Sequence: Synthetic oligonucleotide
gccagcuaagcauucccaa

SEQ ID NO: 1167772 - RNA, 19 nt, Artificial Sequence
  Description of Artificial Sequence: Synthetic oligonucleotide
gcauugacccguauguuua

SEQ ID NO: 1167773 - RNA, 19 nt, Artificial Sequence
  Description of Artificial Sequence: Synthetic oligonucleotide
guguugcagccauggcaac

SEQ ID NO: 1167774 - RNA, 19 nt, Artificial Sequence
  Description of Artificial Sequence: Synthetic oligonucleotide
acuauccucuggccuuguu

SEQ ID NO: 1167775 - RNA, 19 nt, Artificial Sequence
  Description of Artificial Sequence: Synthetic oligonucleotide
gcaguugaagcaggugcug

SEQ ID NO: 1167776 - RNA, 19 nt, Artificial Sequence
  Description of Artificial Sequence: Synthetic oligonucleotide
cacuugauugcaagccagu

SEQ ID NO: 1167777 - RNA, 19 nt, Artificial Sequence
  Description of Artificial Sequence: Synthetic oligonucleotide
ggugcugaaaggaguaggu

SEQ ID NO: 1167778 - RNA, 19 nt, Artificial Sequence
  Description of Artificial Sequence: Synthetic oligonucleotide
caggauugcugaaguuaaa

SEQ ID NO: 1167779 - RNA, 19 nt, Artificial Sequence
  Description of Artificial Sequence: Synthetic oligonucleotide
gcauuuuguccgagacccg

SEQ ID NO: 1167780 - RNA, 19 nt, Artificial Sequence
  Description of Artificial Sequence: Synthetic oligonucleotide
ccccgcagaggcaggauug

SEQ ID NO: 1167781 - RNA, 19 nt, Artificial Sequence
  Description of Artificial Sequence: Synthetic oligonucleotide
auaggcccuagaguucaua

SEQ ID NO: 1167782 - RNA, 19 nt, Artificial Sequence
  Description of Artificial Sequence: Synthetic oligonucleotide
gacccgaugcugcuguguu

SEQ ID NO: 1167783 - RNA, 19 nt, Artificial Sequence
  Description of Artificial Sequence: Synthetic oligonucleotide
cuaagacuuccugaggguu

SEQ ID NO: 1167784 - RNA, 19 nt, Artificial Sequence
  Description of Artificial Sequence: Synthetic oligonucleotide
gcaacggcugcugcauuug

SEQ ID NO: 1167785 - RNA, 19 nt, Artificial Sequence
  Description of Artificial Sequence: Synthetic oligonucleotide
gccgaauggcguuccaaaa

SEQ ID NO: 1167786 - RNA, 19 nt, Artificial Sequence
  Description of Artificial Sequence: Synthetic oligonucleotide
cuucaacugcaggaguugu

SEQ ID NO: 1167787 - RNA, 19 nt, Artificial Sequence
  Description of Artificial Sequence: Synthetic oligonucleotide
uacuauccucuggccuugu

SEQ ID NO: 1167788 - RNA, 19 nt, Artificial Sequence
  Description of Artificial Sequence: Synthetic oligonucleotide
acgcauugacccguauguu

SEQ ID NO: 1167789 - RNA, 19 nt, Artificial Sequence
  Description of Artificial Sequence: Synthetic oligonucleotide
aaccccgcagaggcaggau

SEQ ID NO: 1167790 - RNA, 19 nt, Artificial Sequence
  Description of Artificial Sequence: Synthetic oligonucleotide
gcaguccaauuacuacauc

SEQ ID NO: 1167791 - RNA, 19 nt, Artificial Sequence
  Description of Artificial Sequence: Synthetic oligonucleotide
ggcgccagcuaagcauucc

SEQ ID NO: 1167792 - RNA, 19 nt, Artificial Sequence
  Description of Artificial Sequence: Synthetic oligonucleotide
gccgugaugccaggauugc

SEQ ID NO: 1167793 - RNA, 19 nt, Artificial Sequence
  Description of Artificial Sequence: Synthetic oligonucleotide
gacauucgacuaauuucuu

SEQ ID NO: 1167794 - RNA, 19 nt, Artificial Sequence
  Description of Artificial Sequence: Synthetic oligonucleotide
ccgaaaccagagcuagcuc

SEQ ID NO: 1167795 - RNA, 19 nt, Artificial Sequence
  Description of Artificial Sequence: Synthetic oligonucleotide
ccuguuuuaucacucuuuu

SEQ ID NO: 1167796 - RNA, 19 nt, Artificial Sequence
  Description of Artificial Sequence: Synthetic oligonucleotide
cauugacccguauguuuau

SEQ ID NO: 1167797 - RNA, 19 nt, Artificial Sequence
  Description of Artificial Sequence: Synthetic oligonucleotide
gcuuuagguugauggauuu

SEQ ID NO: 1167798 - RNA, 19 nt, Artificial Sequence
  Description of Artificial Sequence: Synthetic oligonucleotide
cuugaguggcaagaugguu

SEQ ID NO: 1167799 - RNA, 19 nt, Artificial Sequence
  Description of Artificial Sequence: Synthetic oligonucleotide
gcaggauuggacaccccaa

SEQ ID NO: 1167800 - RNA, 19 nt, Artificial Sequence
  Description of Artificial Sequence: Synthetic oligonucleotide
gccauggcaacggcugcug

SEQ ID NO: 1167801 - RNA, 19 nt, Artificial Sequence
  Description of Artificial Sequence: Synthetic oligonucleotide
cugccaaagccugcacuaa

SEQ ID NO: 1167802 - RNA, 19 nt, Artificial Sequence
  Description of Artificial Sequence: Synthetic oligonucleotide
ugcacacauugugcacauu

SEQ ID NO: 1167803 - RNA, 19 nt, Artificial Sequence
  Description of Artificial Sequence: Synthetic oligonucleotide
cuucgaucugcugccugua

SEQ ID NO: 1167804 - RNA, 19 nt, Artificial Sequence
  Description of Artificial Sequence: Synthetic oligonucleotide
gccccuguggugccgcuuc

SEQ ID NO: 1167805 - RNA, 19 nt, Artificial Sequence
  Description of Artificial Sequence: Synthetic oligonucleotide
ccuaagccacuugauugca

SEQ ID NO: 1167806 - RNA, 19 nt, Artificial Sequence
  Description of Artificial Sequence: Synthetic oligonucleotide
ccgaugcugcuguguuugc

SEQ ID NO: 1167807 - RNA, 19 nt, Artificial Sequence
  Description of Artificial Sequence: Synthetic oligonucleotide
agacuuccugaggguuuau

SEQ ID NO: 1167808 - RNA, 19 nt, Artificial Sequence
  Description of Artificial Sequence: Synthetic oligonucleotide
gcccuagaguucauaauau

SEQ ID NO: 1167809 - RNA, 19 nt, Artificial Sequence
  Description of Artificial Sequence: Synthetic oligonucleotide
cgcuuccgaaaccagagcu

SEQ ID NO: 1167810 - RNA, 19 nt, Artificial Sequence
  Description of Artificial Sequence: Synthetic oligonucleotide
guucuucgaucugcugccu

SEQ ID NO: 1167811 - RNA, 19 nt, Artificial Sequence
  Description of Artificial Sequence: Synthetic oligonucleotide
ggcaacggcugcugcauuu

SEQ ID NO: 1167812 - RNA, 19 nt, Artificial Sequence
  Description of Artificial Sequence: Synthetic oligonucleotide
caucgcuuuggaagacauu

SEQ ID NO: 1167813 - RNA, 19 nt, Artificial Sequence
  Description of Artificial Sequence: Synthetic oligonucleotide
ccuugucaagggacaaacu

SEQ ID NO: 1167814 - RNA, 19 nt, Artificial Sequence
  Description of Artificial Sequence: Synthetic oligonucleotide
ccuuuacauuuucaugaau

SEQ ID NO: 1167815 - RNA, 19 nt, Artificial Sequence
  Description of Artificial Sequence: Synthetic oligonucleotide
gccaauaccugagccgaau

SEQ ID NO: 1167816 - RNA, 19 nt, Artificial Sequence
  Description of Artificial Sequence: Synthetic oligonucleotide
ccacuauaaaucgguaauu

SEQ ID NO: 1167817 - RNA, 19 nt, Artificial Sequence
  Description of Artificial Sequence: Synthetic oligonucleotide
cauaggcccuagaguucau

SEQ ID NO: 1167818 - RNA, 19 nt, Artificial Sequence
  Description of Artificial Sequence: Synthetic oligonucleotide
ggaagacauucgacuaauu

SEQ ID NO: 1167819 - RNA, 19 nt, Artificial Sequence
  Description of Artificial Sequence: Synthetic oligonucleotide
cccugaugcacaguucagu

SEQ ID NO: 1167820 - RNA, 19 nt, Artificial Sequence
  Description of Artificial Sequence: Synthetic oligonucleotide
ggccuucauugcaugcagu

SEQ ID NO: 1167821 - RNA, 19 nt, Artificial Sequence
  Description of Artificial Sequence: Synthetic oligonucleotide
cccaacgcauugacccgua

SEQ ID NO: 1167822 - RNA, 19 nt, Artificial Sequence
  Description of Artificial Sequence: Synthetic oligonucleotide
ccgcagaggcaggauugga

SEQ ID NO: 1167823 - RNA, 19 nt, Artificial Sequence
  Description of Artificial Sequence: Synthetic oligonucleotide
cccguauguuuaucucuuu

SEQ ID NO: 1167824 - RNA, 19 nt, Artificial Sequence
  Description of Artificial Sequence: Synthetic oligonucleotide
cggcgccagcuaagcauuc

SEQ ID NO: 1167825 - RNA, 19 nt, Artificial Sequence
  Description of Artificial Sequence: Synthetic oligonucleotide
ccgugaugccaggauugcu

SEQ ID NO: 1167826 - RNA, 19 nt, Artificial Sequence
  Description of Artificial Sequence: Synthetic oligonucleotide
ccaacgcauugacccguau

SEQ ID NO: 1167827 - RNA, 19 nt, Artificial Sequence
  Description of Artificial Sequence: Synthetic oligonucleotide
augaagguaaguuaggugc

SEQ ID NO: 1167828 - RNA, 19 nt, Artificial Sequence
  Description of Artificial Sequence: Synthetic oligonucleotide
ucaagaaccaaacauauca

SEQ ID NO: 1167829 - RNA, 19 nt, Artificial Sequence
  Description of Artificial Sequence: Synthetic oligonucleotide
uauuguagcauuuauaaug

SEQ ID NO: 1167830 - RNA, 19 nt, Artificial Sequence
  Description of Artificial Sequence: Synthetic oligonucleotide
aacaaucccauaugaagcc

SEQ ID NO: 1167831 - RNA, 19 nt, Artificial Sequence
  Description of Artificial Sequence: Synthetic oligonucleotide
ugugaaagccagaagaggg

SEQ ID NO: 1167832 - RNA, 19 nt, Artificial Sequence
  Description of Artificial Sequence: Synthetic oligonucleotide
auaucaaguccccagaaac

SEQ ID NO: 1167833 - RNA, 19 nt, Artificial Sequence
  Description of Artificial Sequence: Synthetic oligonucleotide
aaacguaggaccuuggcug

SEQ ID NO: 1167834 - RNA, 19 nt, Artificial Sequence
  Description of Artificial Sequence: Synthetic oligonucleotide
aaacauaucaaguccccag

SEQ ID NO: 1167835 - RNA, 19 nt, Artificial Sequence
  Description of Artificial Sequence: Synthetic oligonucleotide
aacauagcaugccgcaucc

SEQ ID NO: 1167836 - RNA, 19 nt, Artificial Sequence
  Description of Artificial Sequence: Synthetic oligonucleotide
aaaacguggucugaguggc

SEQ ID NO: 1167837 - RNA, 19 nt, Artificial Sequence
  Description of Artificial Sequence: Synthetic oligonucleotide
uguuguucaauguaauugc

SEQ ID NO: 1167838 - RNA, 19 nt, Artificial Sequence
  Description of Artificial Sequence: Synthetic oligonucleotide
caacauuuugacuaggccc

SEQ ID NO: 1167839 - RNA, 19 nt, Artificial Sequence
  Description of Artificial Sequence: Synthetic oligonucleotide
aucccgaagauacaaacac

SEQ ID NO: 1167840 - RNA, 19 nt, Artificial Sequence
  Description of Artificial Sequence: Synthetic oligonucleotide
guaagagaggguuaggucc

SEQ ID NO: 1167841 - RNA, 19 nt, Artificial Sequence
  Description of Artificial Sequence: Synthetic oligonucleotide
gauacaaacaccgccacag

SEQ ID NO: 1167842 - RNA, 19 nt, Artificial Sequence
  Description of Artificial Sequence: Synthetic oligonucleotide
uccaaaagucggaagaugc

SEQ ID NO: 1167843 - RNA, 19 nt, Artificial Sequence
  Description of Artificial Sequence: Synthetic oligonucleotide
aauugacucggcuucaaca

SEQ ID NO: 1167844 - RNA, 19 nt, Artificial Sequence
  Description of Artificial Sequence: Synthetic oligonucleotide
aaugggacggaaugggauc

SEQ ID NO: 1167845 - RNA, 19 nt, Artificial Sequence
  Description of Artificial Sequence: Synthetic oligonucleotide
aagauacaaacaccgccac

SEQ ID NO: 1167846 - RNA, 19 nt, Artificial Sequence
  Description of Artificial Sequence: Synthetic oligonucleotide
uuccacuccacaaacguag

SEQ ID NO: 1167847 - RNA, 19 nt, Artificial Sequence
  Description of Artificial Sequence: Synthetic oligonucleotide
uuguuguucaauguaauug

SEQ ID NO: 1167848 - RNA, 19 nt, Artificial Sequence
  Description of Artificial Sequence: Synthetic oligonucleotide
agcauuuauaaugaugagg

SEQ ID NO: 1167849 - RNA, 19 nt, Artificial Sequence
  Description of Artificial Sequence: Synthetic oligonucleotide
guaguuucagcuccaacgg

SEQ ID NO: 1167850 - RNA, 19 nt, Artificial Sequence
  Description of Artificial Sequence: Synthetic oligonucleotide
gacagcaccaucuugaaaa

SEQ ID NO: 1167851 - RNA, 19 nt, Artificial Sequence
  Description of Artificial Sequence: Synthetic oligonucleotide
uauguagccugacucaagc

SEQ ID NO: 1167852 - RNA, 19 nt, Artificial Sequence
  Description of Artificial Sequence: Synthetic oligonucleotide
ugugccucuuucuauacag

SEQ ID NO: 1167853 - RNA, 19 nt, Artificial Sequence
  Description of Artificial Sequence: Synthetic oligonucleotide
gaugcguaguuucagcucc

SEQ ID NO: 1167854 - RNA, 19 nt, Artificial Sequence
  Description of Artificial Sequence: Synthetic oligonucleotide
uguucaauguaauugcaaa

SEQ ID NO: 1167855 - RNA, 19 nt, Artificial Sequence
  Description of Artificial Sequence: Synthetic oligonucleotide
agaagguuggucauuauuc

SEQ ID NO: 1167856 - RNA, 19 nt, Artificial Sequence
  Description of Artificial Sequence: Synthetic oligonucleotide
ucaaaacguggucugagug

SEQ ID NO: 1167857 - RNA, 19 nt, Artificial Sequence
  Description of Artificial Sequence: Synthetic oligonucleotide
gaaccaaacauaucaaguc

SEQ ID NO: 1167858 - RNA, 19 nt, Artificial Sequence
  Description of Artificial Sequence: Synthetic oligonucleotide
aaugaacauccaaaagucg

SEQ ID NO: 1167859 - RNA, 19 nt, Artificial Sequence
  Description of Artificial Sequence: Synthetic oligonucleotide
ugcaaaucggguaucagaa

SEQ ID NO: 1167860 - RNA, 19 nt, Artificial Sequence
  Description of Artificial Sequence: Synthetic oligonucleotide
gacggaaugggaucgagug

SEQ ID NO: 1167861 - RNA, 19 nt, Artificial Sequence
  Description of Artificial Sequence: Synthetic oligonucleotide
aaagucggaagaugcguag

SEQ ID NO: 1167862 - RNA, 19 nt, Artificial Sequence
  Description of Artificial Sequence: Synthetic oligonucleotide
aacauuuugacuaggcccu

SEQ ID NO: 1167863 - RNA, 19 nt, Artificial Sequence
  Description of Artificial Sequence: Synthetic oligonucleotide
gaugaagguaaguuaggug

SEQ ID NO: 1167864 - RNA, 19 nt, Artificial Sequence
  Description of Artificial Sequence: Synthetic oligonucleotide
acugacagcagagaucagc

SEQ ID NO: 1167865 - RNA, 19 nt, Artificial Sequence
  Description of Artificial Sequence: Synthetic oligonucleotide
gaaugaacauccaaaaguc

SEQ ID NO: 1167866 - RNA, 19 nt, Artificial Sequence
  Description of Artificial Sequence: Synthetic oligonucleotide
augucaggaacauagcaug

SEQ ID NO: 1167867 - RNA, 19 nt, Artificial Sequence
  Description of Artificial Sequence: Synthetic oligonucleotide
aacauaucaaguccccaga

SEQ ID NO: 1167868 - RNA, 19 nt, Artificial Sequence
  Description of Artificial Sequence: Synthetic oligonucleotide
ucacaugaaugguagccgg

SEQ ID NO: 1167869 - RNA, 19 nt, Artificial Sequence
  Description of Artificial Sequence: Synthetic oligonucleotide
aacggaaggacaaccaguc

SEQ ID NO: 1167870 - RNA, 19 nt, Artificial Sequence
  Description of Artificial Sequence: Synthetic oligonucleotide
aacauccaaaagucggaag

SEQ ID NO: 1167871 - RNA, 19 nt, Artificial Sequence
  Description of Artificial Sequence: Synthetic oligonucleotide
aagaugcguaguuucagcu

SEQ ID NO: 1167872 - RNA, 19 nt, Artificial Sequence
  Description of Artificial Sequence: Synthetic oligonucleotide
caaaacguggucugagugg

SEQ ID NO: 1167873 - RNA, 19 nt, Artificial Sequence
  Description of Artificial Sequence: Synthetic oligonucleotide
ggaccauaggaucaaaacg

SEQ ID NO: 1167874 - RNA, 19 nt, Artificial Sequence
  Description of Artificial Sequence: Synthetic oligonucleotide
ugaacauccaaaagucgga

SEQ ID NO: 1167875 - RNA, 19 nt, Artificial Sequence
  Description of Artificial Sequence: Synthetic oligonucleotide
aguacuugccgugugaaag

SEQ ID NO: 1167876 - RNA, 19 nt, Artificial Sequence
  Description of Artificial Sequence: Synthetic oligonucleotide
ugaagguaaguuaggugcc

SEQ ID NO: 1167877 - RNA, 19 nt, Artificial Sequence
  Description of Artificial Sequence: Synthetic oligonucleotide
aaugguagccggcuaucag

SEQ ID NO: 1167878 - RNA, 19 nt, Artificial Sequence
  Description of Artificial Sequence: Synthetic oligonucleotide
uccaaucugugucuggacc

SEQ ID NO: 1167879 - RNA, 19 nt, Artificial Sequence
  Description of Artificial Sequence: Synthetic oligonucleotide
cugugguuucaauaaagcc

SEQ ID NO: 1167880 - RNA, 19 nt, Artificial Sequence
  Description of Artificial Sequence: Synthetic oligonucleotide
guagacaggaaugggacgg

SEQ ID NO: 1167881 - RNA, 19 nt, Artificial Sequence
  Description of Artificial Sequence: Synthetic oligonucleotide
ucccauaugaagccaaggu

SEQ ID NO: 1167882 - RNA, 19 nt, Artificial Sequence
  Description of Artificial Sequence: Synthetic oligonucleotide
aacauugggcaguaugggu

SEQ ID NO: 1167883 - RNA, 19 nt, Artificial Sequence
  Description of Artificial Sequence: Synthetic oligonucleotide
cuugacuuccacuucucag

SEQ ID NO: 1167884 - RNA, 19 nt, Artificial Sequence
  Description of Artificial Sequence: Synthetic oligonucleotide
aagguuggucauuauucug

SEQ ID NO: 1167885 - RNA, 19 nt, Artificial Sequence
  Description of Artificial Sequence: Synthetic oligonucleotide
uaaguuaggugccggcaag

SEQ ID NO: 1167886 - RNA, 19 nt, Artificial Sequence
  Description of Artificial Sequence: Synthetic oligonucleotide
gaucuuuguacacuuucac

SEQ ID NO: 1167887 - RNA, 19 nt, Artificial Sequence
  Description of Artificial Sequence: Synthetic oligonucleotide
gaagauacaaacaccgcca

SEQ ID NO: 1167888 - RNA, 19 nt, Artificial Sequence
  Description of Artificial Sequence: Synthetic oligonucleotide
uuaagaucuuuguacacuu

SEQ ID NO: 1167889 - RNA, 19 nt, Artificial Sequence
  Description of Artificial Sequence: Synthetic oligonucleotide
auacugucaucauuccagg

SEQ ID NO: 1167890 - RNA, 19 nt, Artificial Sequence
  Description of Artificial Sequence: Synthetic oligonucleotide
uugcaaaucggguaucaga

SEQ ID NO: 1167891 - RNA, 19 nt, Artificial Sequence
  Description of Artificial Sequence: Synthetic oligonucleotide
ucggguaucagaacugaac

SEQ ID NO: 1167892 - RNA, 19 nt, Artificial Sequence
  Description of Artificial Sequence: Synthetic oligonucleotide
uuugaucccaccaucgauu

SEQ ID NO: 1167893 - RNA, 19 nt, Artificial Sequence
  Description of Artificial Sequence: Synthetic oligonucleotide
cauuccaggcaucaaacug

SEQ ID NO: 1167894 - RNA, 19 nt, Artificial Sequence
  Description of Artificial Sequence: Synthetic oligonucleotide
gaagaugcguaguuucagc

SEQ ID NO: 1167895 - RNA, 19 nt, Artificial Sequence
  Description of Artificial Sequence: Synthetic oligonucleotide
acuaucaaggcaucacuga

SEQ ID NO: 1167896 - RNA, 19 nt, Artificial Sequence
  Description of Artificial Sequence: Synthetic oligonucleotide
uguacacuuucacugcacu

SEQ ID NO: 1167897 - RNA, 19 nt, Artificial Sequence
  Description of Artificial Sequence: Synthetic oligonucleotide
cuuuguaugugccucuuuc

SEQ ID NO: 1167898 - RNA, 19 nt, Artificial Sequence
  Description of Artificial Sequence: Synthetic oligonucleotide
uguguagugcagcuuguac

SEQ ID NO: 1167899 - RNA, 19 nt, Artificial Sequence
  Description of Artificial Sequence: Synthetic oligonucleotide
aauacaucuggaagguuca

SEQ ID NO: 1167900 - RNA, 19 nt, Artificial Sequence
  Description of Artificial Sequence: Synthetic oligonucleotide
cuugccgugugaaagccag

SEQ ID NO: 1167901 - RNA, 19 nt, Artificial Sequence
  Description of Artificial Sequence: Synthetic oligonucleotide
guagccggcuaucagcugg

SEQ ID NO: 1167902 - RNA, 19 nt, Artificial Sequence
  Description of Artificial Sequence: Synthetic oligonucleotide
uuguacacaccacuugacu

SEQ ID NO: 1167903 - RNA, 19 nt, Artificial Sequence
  Description of Artificial Sequence: Synthetic oligonucleotide
uuuugaucccaccaucgau

SEQ ID NO: 1167904 - RNA, 19 nt, Artificial Sequence
  Description of Artificial Sequence: Synthetic oligonucleotide
agaugcguaguuucagcuc

SEQ ID NO: 1167905 - RNA, 19 nt, Artificial Sequence
  Description of Artificial Sequence: Synthetic oligonucleotide
uuugacuaggcccuuccau

SEQ ID NO: 1167906 - RNA, 19 nt, Artificial Sequence
  Description of Artificial Sequence: Synthetic oligonucleotide
auugacucggcuucaacau

SEQ ID NO: 1167907 - RNA, 19 nt, Artificial Sequence
  Description of Artificial Sequence: Synthetic oligonucleotide
cguaguuucagcuccaacg

SEQ ID NO: 1167908 - RNA, 19 nt, Artificial Sequence
  Description of Artificial Sequence: Synthetic oligonucleotide
uguacacaccacuugacuu

SEQ ID NO: 1167909 - RNA, 19 nt, Artificial Sequence
  Description of Artificial Sequence: Synthetic oligonucleotide
agcacuaucaaggcaucac

SEQ ID NO: 1167910 - RNA, 19 nt, Artificial Sequence
  Description of Artificial Sequence: Synthetic oligonucleotide
gacagcagagaucagcguc

SEQ ID NO: 1167911 - RNA, 19 nt, Artificial Sequence
  Description of Artificial Sequence: Synthetic oligonucleotide
agguaaguuaggugccggc

SEQ ID NO: 1167912 - RNA, 19 nt, Artificial Sequence
  Description of Artificial Sequence: Synthetic oligonucleotide
aaaucuguuguuggggcca

SEQ ID NO: 1167913 - RNA, 19 nt, Artificial Sequence
  Description of Artificial Sequence: Synthetic oligonucleotide
gucuccggcaccucuagcg

SEQ ID NO: 1167914 - RNA, 19 nt, Artificial Sequence
  Description of Artificial Sequence: Synthetic oligonucleotide
ugaaaaucccgaagauaca

SEQ ID NO: 1167915 - RNA, 19 nt, Artificial Sequence
  Description of Artificial Sequence: Synthetic oligonucleotide
cccgaagauacaaacaccg

SEQ ID NO: 1167916 - RNA, 19 nt, Artificial Sequence
  Description of Artificial Sequence: Synthetic oligonucleotide
gaucaaaacguggucugag

SEQ ID NO: 1167917 - RNA, 19 nt, Artificial Sequence
  Description of Artificial Sequence: Synthetic oligonucleotide
aagguucaguacuugccgu

SEQ ID NO: 1167918 - RNA, 19 nt, Artificial Sequence
  Description of Artificial Sequence: Synthetic oligonucleotide
ggcgaugucaggaacauag

SEQ ID NO: 1167919 - RNA, 19 nt, Artificial Sequence
  Description of Artificial Sequence: Synthetic oligonucleotide
cauuauucugaagugagga

SEQ ID NO: 1167920 - RNA, 19 nt, Artificial Sequence
  Description of Artificial Sequence: Synthetic oligonucleotide
ccaacauugggcaguaugg

SEQ ID NO: 1167921 - RNA, 19 nt, Artificial Sequence
  Description of Artificial Sequence: Synthetic oligonucleotide
aggacaaccaguccaaaua

SEQ ID NO: 1167922 - RNA, 19 nt, Artificial Sequence
  Description of Artificial Sequence: Synthetic oligonucleotide
aauugcaaaucggguauca

SEQ ID NO: 1167923 - RNA, 19 nt, Artificial Sequence
  Description of Artificial Sequence: Synthetic oligonucleotide
ucccgaagauacaaacacc

SEQ ID NO: 1167924 - RNA, 19 nt, Artificial Sequence
  Description of Artificial Sequence: Synthetic oligonucleotide
gguaucagaacugaacccc

SEQ ID NO: 1167925 - RNA, 19 nt, Artificial Sequence
  Description of Artificial Sequence: Synthetic oligonucleotide
gaagguaaguuaggugccg

SEQ ID NO: 1167926 - RNA, 19 nt, Artificial Sequence
  Description of Artificial Sequence: Synthetic oligonucleotide
aaaucggguaucagaacug

SEQ ID NO: 1167927 - RNA, 19 nt, Artificial Sequence
  Description of Artificial Sequence: Synthetic oligonucleotide
gucacaugaaugguagccg

SEQ ID NO: 1167928 - RNA, 19 nt, Artificial Sequence
  Description of Artificial Sequence: Synthetic oligonucleotide
gaaaaucccgaagauacaa

SEQ ID NO: 1167929 - RNA, 19 nt, Artificial Sequence
  Description of Artificial Sequence: Synthetic oligonucleotide
uccaacggaaggacaacca

SEQ ID NO: 1167930 - RNA, 19 nt, Artificial Sequence
  Description of Artificial Sequence: Synthetic oligonucleotide
gagagagcuucuuaagauc

SEQ ID NO: 1167931 - RNA, 19 nt, Artificial Sequence
  Description of Artificial Sequence: Synthetic oligonucleotide
cacuaucaaggcaucacug

SEQ ID NO: 1167932 - RNA, 19 nt, Artificial Sequence
  Description of Artificial Sequence: Synthetic oligonucleotide
gaagaggcgagagagcuuc

SEQ ID NO: 1167933 - RNA, 19 nt, Artificial Sequence
  Description of Artificial Sequence: Synthetic oligonucleotide
acuaggcccuuccauacug

SEQ ID NO: 1167934 - RNA, 19 nt, Artificial Sequence
  Description of Artificial Sequence: Synthetic oligonucleotide
agaugcaccagcacuauca

SEQ ID NO: 1167935 - RNA, 19 nt, Artificial Sequence
  Description of Artificial Sequence: Synthetic oligonucleotide
ugguuccacuccacaaacg

SEQ ID NO: 1167936 - RNA, 19 nt, Artificial Sequence
  Description of Artificial Sequence: Synthetic oligonucleotide
agaucagcguccaagaaaa

SEQ ID NO: 1167937 - RNA, 19 nt, Artificial Sequence
  Description of Artificial Sequence: Synthetic oligonucleotide
acggaaggacaaccagucc

SEQ ID NO: 1167938 - RNA, 19 nt, Artificial Sequence
  Description of Artificial Sequence: Synthetic oligonucleotide
gagaucagcguccaagaaa

SEQ ID NO: 1167939 - RNA, 19 nt, Artificial Sequence
  Description of Artificial Sequence: Synthetic oligonucleotide
acggaaugggaucgagugg

SEQ ID NO: 1167940 - RNA, 19 nt, Artificial Sequence
  Description of Artificial Sequence: Synthetic oligonucleotide
agcagugggucauuugaug

SEQ ID NO: 1167941 - RNA, 19 nt, Artificial Sequence
  Description of Artificial Sequence: Synthetic oligonucleotide
cauaugaagccaaggucuc

SEQ ID NO: 1167942 - RNA, 19 nt, Artificial Sequence
  Description of Artificial Sequence: Synthetic oligonucleotide
ugguagccggcuaucagcu

SEQ ID NO: 1167943 - RNA, 19 nt, Artificial Sequence
  Description of Artificial Sequence: Synthetic oligonucleotide
ugacuaggcccuuccauac

SEQ ID NO: 1167944 - RNA, 19 nt, Artificial Sequence
  Description of Artificial Sequence: Synthetic oligonucleotide
ugacugauacagagucucc

SEQ ID NO: 1167945 - RNA, 19 nt, Artificial Sequence
  Description of Artificial Sequence: Synthetic oligonucleotide
ugguaagagaggguuaggu

SEQ ID NO: 1167946 - RNA, 19 nt, Artificial Sequence
  Description of Artificial Sequence: Synthetic oligonucleotide
aaucggguaucagaacuga

SEQ ID NO: 1167947 - RNA, 19 nt, Artificial Sequence
  Description of Artificial Sequence: Synthetic oligonucleotide
gaagaggguacaccagcug

SEQ ID NO: 1167948 - RNA, 19 nt, Artificial Sequence
  Description of Artificial Sequence: Synthetic oligonucleotide
cucggcuucaacauuuuga

SEQ ID NO: 1167949 - RNA, 19 nt, Artificial Sequence
  Description of Artificial Sequence: Synthetic oligonucleotide
ucauuccaggcaucaaacu

SEQ ID NO: 1167950 - RNA, 19 nt, Artificial Sequence
  Description of Artificial Sequence: Synthetic oligonucleotide
aagaggcccugguguagac

SEQ ID NO: 1167951 - RNA, 19 nt, Artificial Sequence
  Description of Artificial Sequence: Synthetic oligonucleotide
aaguggauggcaacaagaa

SEQ ID NO: 1167952 - RNA, 19 nt, Artificial Sequence
  Description of Artificial Sequence: Synthetic oligonucleotide
agcuggucgaccccugccg

SEQ ID NO: 1167953 - RNA, 19 nt, Artificial Sequence
  Description of Artificial Sequence: Synthetic oligonucleotide
cucaagcaugaggagaugc

SEQ ID NO: 1167954 - RNA, 19 nt, Artificial Sequence
  Description of Artificial Sequence: Synthetic oligonucleotide
aucaaaacguggucugagu

SEQ ID NO: 1167955 - RNA, 19 nt, Artificial Sequence
  Description of Artificial Sequence: Synthetic oligonucleotide
aaucuguuguuggggccac

SEQ ID NO: 1167956 - RNA, 19 nt, Artificial Sequence
  Description of Artificial Sequence: Synthetic oligonucleotide
caguaugggucucacauca

SEQ ID NO: 1167957 - RNA, 19 nt, Artificial Sequence
  Description of Artificial Sequence: Synthetic oligonucleotide
caacauugggcaguauggg

SEQ ID NO: 1167958 - RNA, 19 nt, Artificial Sequence
  Description of Artificial Sequence: Synthetic oligonucleotide
ugacucggcuucaacauuu

SEQ ID NO: 1167959 - RNA, 19 nt, Artificial Sequence
  Description of Artificial Sequence: Synthetic oligonucleotide
cuucugaagccgcacgcgc

SEQ ID NO: 1167960 - RNA, 19 nt, Artificial Sequence
  Description of Artificial Sequence: Synthetic oligonucleotide
aaucccauaugaagccaag

SEQ ID NO: 1167961 - RNA, 19 nt, Artificial Sequence
  Description of Artificial Sequence: Synthetic oligonucleotide
uaugugccucuuucuauac

SEQ ID NO: 1167962 - RNA, 19 nt, Artificial Sequence
  Description of Artificial Sequence: Synthetic oligonucleotide
uucugaagccgcacgcgca

SEQ ID NO: 1167963 - RNA, 19 nt, Artificial Sequence
  Description of Artificial Sequence: Synthetic oligonucleotide
guaauugcaaaucggguau

SEQ ID NO: 1167964 - RNA, 19 nt, Artificial Sequence
  Description of Artificial Sequence: Synthetic oligonucleotide
uaguuucagcuccaacgga

SEQ ID NO: 1167965 - RNA, 19 nt, Artificial Sequence
  Description of Artificial Sequence: Synthetic oligonucleotide
auggcggcaagacgggcgg

SEQ ID NO: 1167966 - RNA, 19 nt, Artificial Sequence
  Description of Artificial Sequence: Synthetic oligonucleotide
uguuucacugcagagcauu

SEQ ID NO: 1167967 - RNA, 19 nt, Artificial Sequence
  Description of Artificial Sequence: Synthetic oligonucleotide
acauaucaaguccccagaa

SEQ ID NO: 1167968 - RNA, 19 nt, Artificial Sequence
  Description of Artificial Sequence: Synthetic oligonucleotide
gaagguuggucauuauucu

SEQ ID NO: 1167969 - RNA, 19 nt, Artificial Sequence
  Description of Artificial Sequence: Synthetic oligonucleotide
cacaugaaugguagccggc

SEQ ID NO: 1167970 - RNA, 19 nt, Artificial Sequence
  Description of Artificial Sequence: Synthetic oligonucleotide
aaaagucggaagaugcgua

SEQ ID NO: 1167971 - RNA, 19 nt, Artificial Sequence
  Description of Artificial Sequence: Synthetic oligonucleotide
ugaggaggucaugacagac

SEQ ID NO: 1167972 - RNA, 19 nt, Artificial Sequence
  Description of Artificial Sequence: Synthetic oligonucleotide
accgccacagcaguggguc

SEQ ID NO: 1167973 - RNA, 19 nt, Artificial Sequence
  Description of Artificial Sequence: Synthetic oligonucleotide
gaggaaugcucugaaucug

SEQ ID NO: 1167974 - RNA, 19 nt, Artificial Sequence
  Description of Artificial Sequence: Synthetic oligonucleotide
accagcacuaucaaggcau

SEQ ID NO: 1167975 - RNA, 19 nt, Artificial Sequence
  Description of Artificial Sequence: Synthetic oligonucleotide
gaauugacucggcuucaac

SEQ ID NO: 1167976 - RNA, 19 nt, Artificial Sequence
  Description of Artificial Sequence: Synthetic oligonucleotide
aagugggaccauaggauca

SEQ ID NO: 1167977 - RNA, 19 nt, Artificial Sequence
  Description of Artificial Sequence: Synthetic oligonucleotide
uccccagaaacaaucccau

SEQ ID NO: 1167978 - RNA, 19 nt, Artificial Sequence
  Description of Artificial Sequence: Synthetic oligonucleotide
aaagaagguuggucauuau

SEQ ID NO: 1167979 - RNA, 19 nt, Artificial Sequence
  Description of Artificial Sequence: Synthetic oligonucleotide
gcgagguaagcaaagaggc

SEQ ID NO: 1167980 - RNA, 19 nt, Artificial Sequence
  Description of Artificial Sequence: Synthetic oligonucleotide
acaaccaguccaaauacau

SEQ ID NO: 1167981 - RNA, 19 nt, Artificial Sequence
  Description of Artificial Sequence: Synthetic oligonucleotide
cagcgagguaagcaaagag

SEQ ID NO: 1167982 - RNA, 19 nt, Artificial Sequence
  Description of Artificial Sequence: Synthetic oligonucleotide
agguucaguacuugccgug

SEQ ID NO: 1167983 - RNA, 19 nt, Artificial Sequence
  Description of Artificial Sequence: Synthetic oligonucleotide
ggcauugacacugcuuugg

SEQ ID NO: 1167984 - RNA, 19 nt, Artificial Sequence
  Description of Artificial Sequence: Synthetic oligonucleotide
caucuggaagguucaguac

SEQ ID NO: 1167985 - RNA, 19 nt, Artificial Sequence
  Description of Artificial Sequence: Synthetic oligonucleotide
uggcuuccugaauugacuc

SEQ ID NO: 1167986 - RNA, 19 nt, Artificial Sequence
  Description of Artificial Sequence: Synthetic oligonucleotide
cugacucaagcaugaggag

SEQ ID NO: 1167987 - RNA, 19 nt, Artificial Sequence
  Description of Artificial Sequence: Synthetic oligonucleotide
ugggguauguagccugacu

SEQ ID NO: 1167988 - RNA, 19 nt, Artificial Sequence
  Description of Artificial Sequence: Synthetic oligonucleotide
ggacaaccaguccaaauac

SEQ ID NO: 1167989 - RNA, 19 nt, Artificial Sequence
  Description of Artificial Sequence: Synthetic oligonucleotide
ccaaaagucggaagaugcg

SEQ ID NO: 1167990 - RNA, 19 nt, Artificial Sequence
  Description of Artificial Sequence: Synthetic oligonucleotide
aguuaggugccggcaaguc

SEQ ID NO: 1167991 - RNA, 19 nt, Artificial Sequence
  Description of Artificial Sequence: Synthetic oligonucleotide
ggucaugacagacugcaga

SEQ ID NO: 1167992 - RNA, 19 nt, Artificial Sequence
  Description of Artificial Sequence: Synthetic oligonucleotide
caugccgcauccucugggc

SEQ ID NO: 1167993 - RNA, 19 nt, Artificial Sequence
  Description of Artificial Sequence: Synthetic oligonucleotide
aggcaucaaacuggguggc

SEQ ID NO: 1167994 - RNA, 19 nt, Artificial Sequence
  Description of Artificial Sequence: Synthetic oligonucleotide
gcuaucagcuggucgaccc

SEQ ID NO: 1167995 - RNA, 19 nt, Artificial Sequence
  Description of Artificial Sequence: Synthetic oligonucleotide
gguaagagaggguuagguc

SEQ ID NO: 1167996 - RNA, 19 nt, Artificial Sequence
  Description of Artificial Sequence: Synthetic oligonucleotide
ggguaucagaacugaaccc

SEQ ID NO: 1167997 - RNA, 19 nt, Artificial Sequence
  Description of Artificial Sequence: Synthetic oligonucleotide
gucaggaacauagcaugcc

SEQ ID NO: 1167998 - RNA, 19 nt, Artificial Sequence
  Description of Artificial Sequence: Synthetic oligonucleotide
gcuuccugaauugacucgg

SEQ ID NO: 1167999 - RNA, 19 nt, Artificial Sequence
  Description of Artificial Sequence: Synthetic oligonucleotide
gcagagaucagcguccaag

SEQ ID NO: 1168000 - RNA, 19 nt, Artificial Sequence
  Description of Artificial Sequence: Synthetic oligonucleotide
ucuguuguuggggccaccu

SEQ ID NO: 1168001 - RNA, 19 nt, Artificial Sequence
  Description of Artificial Sequence: Synthetic oligonucleotide
ugguuucaauaaagccucc

SEQ ID NO: 1168002 - RNA, 19 nt, Artificial Sequence
  Description of Artificial Sequence: Synthetic oligonucleotide
cacaaacguaggaccuugg

SEQ ID NO: 1168003 - RNA, 19 nt, Artificial Sequence
  Description of Artificial Sequence: Synthetic oligonucleotide
gggguauguagccugacuc

SEQ ID NO: 1168004 - RNA, 19 nt, Artificial Sequence
  Description of Artificial Sequence: Synthetic oligonucleotide
gguuagguccuggaagugg

SEQ ID NO: 1168005 - RNA, 19 nt, Artificial Sequence
  Description of Artificial Sequence: Synthetic oligonucleotide
cugaugugagcuggcagcc

SEQ ID NO: 1168006 - RNA, 19 nt, Artificial Sequence
  Description of Artificial Sequence: Synthetic oligonucleotide
agccucauggcggcaagac

SEQ ID NO: 1168007 - RNA, 19 nt, Artificial Sequence
  Description of Artificial Sequence: Synthetic oligonucleotide
cuuccugaauugacucggc

SEQ ID NO: 1168008 - RNA, 19 nt, Artificial Sequence
  Description of Artificial Sequence: Synthetic oligonucleotide
guaaguuaggugccggcaa

SEQ ID NO: 1168009 - RNA, 19 nt, Artificial Sequence
  Description of Artificial Sequence: Synthetic oligonucleotide
caucauuccaggcaucaaa

SEQ ID NO: 1168010 - RNA, 19 nt, Artificial Sequence
  Description of Artificial Sequence: Synthetic oligonucleotide
ggcaacaagaauccucuuc

SEQ ID NO: 1168011 - RNA, 19 nt, Artificial Sequence
  Description of Artificial Sequence: Synthetic oligonucleotide
uugaucccaccaucgauuu

SEQ ID NO: 1168012 - RNA, 19 nt, Artificial Sequence
  Description of Artificial Sequence: Synthetic oligonucleotide
guuaggugccggcaaguca

SEQ ID NO: 1168013 - RNA, 19 nt, Artificial Sequence
  Description of Artificial Sequence: Synthetic oligonucleotide
acaccacuugacuuccacu

SEQ ID NO: 1168014 - RNA, 19 nt, Artificial Sequence
  Description of Artificial Sequence: Synthetic oligonucleotide
aagucggaagaugcguagu

SEQ ID NO: 1168015 - RNA, 19 nt, Artificial Sequence
  Description of Artificial Sequence: Synthetic oligonucleotide
aggcgagagagcuucuuaa

SEQ ID NO: 1168016 - RNA, 19 nt, Artificial Sequence
  Description of Artificial Sequence: Synthetic oligonucleotide
gaagaaucacuccauuguu

SEQ ID NO: 1168017 - RNA, 19 nt, Artificial Sequence
  Description of Artificial Sequence: Synthetic oligonucleotide
aaguuaggugccggcaagu

SEQ ID NO: 1168018 - RNA, 19 nt, Artificial Sequence
  Description of Artificial Sequence: Synthetic oligonucleotide
ggcggcaagccucugucgg

SEQ ID NO: 1168019 - RNA, 19 nt, Artificial Sequence
  Description of Artificial Sequence: Synthetic oligonucleotide
gaauccucuuccauaccca

SEQ ID NO: 1168020 - RNA, 19 nt, Artificial Sequence
  Description of Artificial Sequence: Synthetic oligonucleotide
uggcucaaguggauggcaa

SEQ ID NO: 1168021 - RNA, 19 nt, Artificial Sequence
  Description of Artificial Sequence: Synthetic oligonucleotide
agucggaagaugcguaguu

SEQ ID NO: 1168022 - RNA, 19 nt, Artificial Sequence
  Description of Artificial Sequence: Synthetic oligonucleotide
guaugugccucuuucuaua

SEQ ID NO: 1168023 - RNA, 19 nt, Artificial Sequence
  Description of Artificial Sequence: Synthetic oligonucleotide
cuuaagaucuuuguacacu

SEQ ID NO: 1168024 - RNA, 19 nt, Artificial Sequence
  Description of Artificial Sequence: Synthetic oligonucleotide
auagcaugccgcauccucu

SEQ ID NO: 1168025 - RNA, 19 nt, Artificial Sequence
  Description of Artificial Sequence: Synthetic oligonucleotide
uuauaaugaugagguuuuc

SEQ ID NO: 1168026 - RNA, 19 nt, Artificial Sequence
  Description of Artificial Sequence: Synthetic oligonucleotide
gacagacugcagacaaagc

SEQ ID NO: 1168027 - RNA, 19 nt, Artificial Sequence
  Description of Artificial Sequence: Synthetic oligonucleotide
ugccgugugaaagccagaa

SEQ ID NO: 1168028 - RNA, 19 nt, Artificial Sequence
  Description of Artificial Sequence: Synthetic oligonucleotide
cagggaguguggcaccugc

SEQ ID NO: 1168029 - RNA, 19 nt, Artificial Sequence
  Description of Artificial Sequence: Synthetic oligonucleotide
ggaagaugcguaguuucag

SEQ ID NO: 1168030 - RNA, 19 nt, Artificial Sequence
  Description of Artificial Sequence: Synthetic oligonucleotide
cauaucaaguccccagaaa

SEQ ID NO: 1168031 - RNA, 19 nt, Artificial Sequence
  Description of Artificial Sequence: Synthetic oligonucleotide
ccggcugacugauacagag

SEQ ID NO: 1168032 - RNA, 19 nt, Artificial Sequence
  Description of Artificial Sequence: Synthetic oligonucleotide
gaacauccaaaagucggaa

SEQ ID NO: 1168033 - RNA, 19 nt, Artificial Sequence
  Description of Artificial Sequence: Synthetic oligonucleotide
uugacucggcuucaacauu

SEQ ID NO: 1168034 - RNA, 19 nt, Artificial Sequence
  Description of Artificial Sequence: Synthetic oligonucleotide
gacaaccaguccaaauaca

SEQ ID NO: 1168035 - RNA, 19 nt, Artificial Sequence
  Description of Artificial Sequence: Synthetic oligonucleotide
gaggugcgcgcgcagcugc

SEQ ID NO: 1168036 - RNA, 19 nt, Artificial Sequence
  Description of Artificial Sequence: Synthetic oligonucleotide
gguguagacaggaauggga

SEQ ID NO: 1168037 - RNA, 19 nt, Artificial Sequence
  Description of Artificial Sequence: Synthetic oligonucleotide
cacgcgcagccucauggcg

SEQ ID NO: 1168038 - RNA, 19 nt, Artificial Sequence
  Description of Artificial Sequence: Synthetic oligonucleotide
ucgagugggguggcgaugu

SEQ ID NO: 1168039 - RNA, 19 nt, Artificial Sequence
  Description of Artificial Sequence: Synthetic oligonucleotide
ggcgagagagcuucuuaag

SEQ ID NO: 1168040 - RNA, 19 nt, Artificial Sequence
  Description of Artificial Sequence: Synthetic oligonucleotide
acaaucccauaugaagcca

SEQ ID NO: 1168041 - RNA, 19 nt, Artificial Sequence
  Description of Artificial Sequence: Synthetic oligonucleotide
ugaaugguagccggcuauc

SEQ ID NO: 1168042 - RNA, 19 nt, Artificial Sequence
  Description of Artificial Sequence: Synthetic oligonucleotide
uccggcaccucuagcggcu

SEQ ID NO: 1168043 - RNA, 19 nt, Artificial Sequence
  Description of Artificial Sequence: Synthetic oligonucleotide
aacuggguggccuguccuu

SEQ ID NO: 1168044 - RNA, 19 nt, Artificial Sequence
  Description of Artificial Sequence: Synthetic oligonucleotide
uaauugcaaaucggguauc

SEQ ID NO: 1168045 - RNA, 19 nt, Artificial Sequence
  Description of Artificial Sequence: Synthetic oligonucleotide
guauguagccugacucaag

SEQ ID NO: 1168046 - RNA, 19 nt, Artificial Sequence
  Description of Artificial Sequence: Synthetic oligonucleotide
cuugggacaaguggguuga

SEQ ID NO: 1168047 - RNA, 19 nt, Artificial Sequence
  Description of Artificial Sequence: Synthetic oligonucleotide
ccauaugaagccaaggucu

SEQ ID NO: 1168048 - RNA, 19 nt, Artificial Sequence
  Description of Artificial Sequence: Synthetic oligonucleotide
aggcauugacacugcuuug

SEQ ID NO: 1168049 - RNA, 19 nt, Artificial Sequence
  Description of Artificial Sequence: Synthetic oligonucleotide
caucuucaagaaccaaaca

SEQ ID NO: 1168050 - RNA, 19 nt, Artificial Sequence
  Description of Artificial Sequence: Synthetic oligonucleotide
uccugguaagagaggguua

SEQ ID NO: 1168051 - RNA, 19 nt, Artificial Sequence
  Description of Artificial Sequence: Synthetic oligonucleotide
gugccggcaagucaucuuc

SEQ ID NO: 1168052 - RNA, 19 nt, Artificial Sequence
  Description of Artificial Sequence: Synthetic oligonucleotide
ggcaguaugggucucacau

SEQ ID NO: 1168053 - RNA, 19 nt, Artificial Sequence
  Description of Artificial Sequence: Synthetic oligonucleotide
aggaaugcucugaaucugu

SEQ ID NO: 1168054 - RNA, 19 nt, Artificial Sequence
  Description of Artificial Sequence: Synthetic oligonucleotide
cuggucuuugaagaggcga

SEQ ID NO: 1168055 - RNA, 19 nt, Artificial Sequence
  Description of Artificial Sequence: Synthetic oligonucleotide
cccaacauugggcaguaug

SEQ ID NO: 1168056 - RNA, 19 nt, Artificial Sequence
  Description of Artificial Sequence: Synthetic oligonucleotide
gaaugguagccggcuauca

SEQ ID NO: 1168057 - RNA, 19 nt, Artificial Sequence
  Description of Artificial Sequence: Synthetic oligonucleotide
ugccggcaagucaucuuca

SEQ ID NO: 1168058 - RNA, 19 nt, Artificial Sequence
  Description of Artificial Sequence: Synthetic oligonucleotide
ugaauugacucggcuucaa

SEQ ID NO: 1168059 - RNA, 19 nt, Artificial Sequence
  Description of Artificial Sequence: Synthetic oligonucleotide
auaugaagccaaggucucu

SEQ ID NO: 1168060 - RNA, 19 nt, Artificial Sequence
  Description of Artificial Sequence: Synthetic oligonucleotide
caaacauaucaagucccca

SEQ ID NO: 1168061 - RNA, 19 nt, Artificial Sequence
  Description of Artificial Sequence: Synthetic oligonucleotide
caaagaagguuggucauua

SEQ ID NO: 1168062 - RNA, 19 nt, Artificial Sequence
  Description of Artificial Sequence: Synthetic oligonucleotide
ggguauguagccugacuca

SEQ ID NO: 1168063 - RNA, 19 nt, Artificial Sequence
  Description of Artificial Sequence: Synthetic oligonucleotide
gcauugacacugcuuuggc

SEQ ID NO: 1168064 - RNA, 19 nt, Artificial Sequence
  Description of Artificial Sequence: Synthetic oligonucleotide
uggguccgcuucugaagcc

SEQ ID NO: 1168065 - RNA, 19 nt, Artificial Sequence
  Description of Artificial Sequence: Synthetic oligonucleotide
agcuccaacggaaggacaa

SEQ ID NO: 1168066 - RNA, 19 nt, Artificial Sequence
  Description of Artificial Sequence: Synthetic oligonucleotide
cugguaagagaggguuagg

SEQ ID NO: 1168067 - RNA, 19 nt, Artificial Sequence
  Description of Artificial Sequence: Synthetic oligonucleotide
cuccggcaccucuagcggc

SEQ ID NO: 1168068 - RNA, 19 nt, Artificial Sequence
  Description of Artificial Sequence: Synthetic oligonucleotide
cuggucgaccccugccggg

SEQ ID NO: 1168069 - RNA, 19 nt, Artificial Sequence
  Description of Artificial Sequence: Synthetic oligonucleotide
aaacaccgccacagcagug

SEQ ID NO: 1168070 - RNA, 19 nt, Artificial Sequence
  Description of Artificial Sequence: Synthetic oligonucleotide
ccgaagauacaaacaccgc

SEQ ID NO: 1168071 - RNA, 19 nt, Artificial Sequence
  Description of Artificial Sequence: Synthetic oligonucleotide
aggagaugcaccagcacua

SEQ ID NO: 1168072 - RNA, 19 nt, Artificial Sequence
  Description of Artificial Sequence: Synthetic oligonucleotide
guaggaccuuggcugcagc

SEQ ID NO: 1168073 - RNA, 19 nt, Artificial Sequence
  Description of Artificial Sequence: Synthetic oligonucleotide
caaaagucggaagaugcgu

SEQ ID NO: 1168074 - RNA, 19 nt, Artificial Sequence
  Description of Artificial Sequence: Synthetic oligonucleotide
acgcgcagccucauggcgg

SEQ ID NO: 1168075 - RNA, 19 nt, Artificial Sequence
  Description of Artificial Sequence: Synthetic oligonucleotide
gguaaguuaggugccggca

SEQ ID NO: 1168076 - RNA, 19 nt, Artificial Sequence
  Description of Artificial Sequence: Synthetic oligonucleotide
gcgagagagcuucuuaaga

SEQ ID NO: 1168077 - RNA, 19 nt, Artificial Sequence
  Description of Artificial Sequence: Synthetic oligonucleotide
gaggcgagagagcuucuua

SEQ ID NO: 1168078 - RNA, 19 nt, Artificial Sequence
  Description of Artificial Sequence: Synthetic oligonucleotide
caacggaaggacaaccagu

SEQ ID NO: 1168079 - RNA, 19 nt, Artificial Sequence
  Description of Artificial Sequence: Synthetic oligonucleotide
uacccauggcuuccugaau

SEQ ID NO: 1168080 - RNA, 19 nt, Artificial Sequence
  Description of Artificial Sequence: Synthetic oligonucleotide
ccuugggacaaguggguug

SEQ ID NO: 1168081 - RNA, 19 nt, Artificial Sequence
  Description of Artificial Sequence: Synthetic oligonucleotide
gcaaaucggguaucagaac

SEQ ID NO: 1168082 - RNA, 19 nt, Artificial Sequence
  Description of Artificial Sequence: Synthetic oligonucleotide
uccgcuucugaagccgcac

SEQ ID NO: 1168083 - RNA, 19 nt, Artificial Sequence
  Description of Artificial Sequence: Synthetic oligonucleotide
guuggggccaccucuuccu

SEQ ID NO: 1168084 - RNA, 19 nt, Artificial Sequence
  Description of Artificial Sequence: Synthetic oligonucleotide
auugggcaguaugggucuc

SEQ ID NO: 1168085 - RNA, 19 nt, Artificial Sequence
  Description of Artificial Sequence: Synthetic oligonucleotide
gcuggucgaccccugccgg

SEQ ID NO: 1168086 - RNA, 19 nt, Artificial Sequence
  Description of Artificial Sequence: Synthetic oligonucleotide
gguuggucauuauucugaa

SEQ ID NO: 1168087 - RNA, 19 nt, Artificial Sequence
  Description of Artificial Sequence: Synthetic oligonucleotide
aucuguuguuggggccacc

SEQ ID NO: 1168088 - RNA, 19 nt, Artificial Sequence
  Description of Artificial Sequence: Synthetic oligonucleotide
ggcaagacgggcggcaagc

SEQ ID NO: 1168089 - RNA, 19 nt, Artificial Sequence
  Description of Artificial Sequence: Synthetic oligonucleotide
cuccacaaacguaggaccu

SEQ ID NO: 1168090 - RNA, 19 nt, Artificial Sequence
  Description of Artificial Sequence: Synthetic oligonucleotide
cauauucaccaccaaugau

SEQ ID NO: 1168091 - RNA, 19 nt, Artificial Sequence
  Description of Artificial Sequence: Synthetic oligonucleotide
ccucuuucuauacaguucu

SEQ ID NO: 1168092 - RNA, 19 nt, Artificial Sequence
  Description of Artificial Sequence: Synthetic oligonucleotide
ggcucaaguggauggcaac

SEQ ID NO: 1168093 - RNA, 19 nt, Artificial Sequence
  Description of Artificial Sequence: Synthetic oligonucleotide
gggucucacaucauauuca

SEQ ID NO: 1168094 - RNA, 19 nt, Artificial Sequence
  Description of Artificial Sequence: Synthetic oligonucleotide
gcuagccugaugugagcug

SEQ ID NO: 1168095 - RNA, 19 nt, Artificial Sequence
  Description of Artificial Sequence: Synthetic oligonucleotide
gguauguagccugacucaa

SEQ ID NO: 1168096 - RNA, 19 nt, Artificial Sequence
  Description of Artificial Sequence: Synthetic oligonucleotide
cauugacacugcuuuggcu

SEQ ID NO: 1168097 - RNA, 19 nt, Artificial Sequence
  Description of Artificial Sequence: Synthetic oligonucleotide
ccggcuaucagcuggucga

SEQ ID NO: 1168098 - RNA, 19 nt, Artificial Sequence
  Description of Artificial Sequence: Synthetic oligonucleotide
cucaaguggauggcaacaa

SEQ ID NO: 1168099 - RNA, 19 nt, Artificial Sequence
  Description of Artificial Sequence: Synthetic oligonucleotide
gugcgcgcgcagcugcccg

SEQ ID NO: 1168100 - RNA, 19 nt, Artificial Sequence
  Description of Artificial Sequence: Synthetic oligonucleotide
ggguccgcuucugaagccg

SEQ ID NO: 1168101 - RNA, 19 nt, Artificial Sequence
  Description of Artificial Sequence: Synthetic oligonucleotide
uuccuggaggaagcagcga

SEQ ID NO: 1168102 - RNA, 19 nt, Artificial Sequence
  Description of Artificial Sequence: Synthetic oligonucleotide
caccucuagcggcuggguc

SEQ ID NO: 1168103 - RNA, 19 nt, Artificial Sequence
  Description of Artificial Sequence: Synthetic oligonucleotide
uggucgaccccugccgggu

SEQ ID NO: 1168104 - RNA, 19 nt, Artificial Sequence
  Description of Artificial Sequence: Synthetic oligonucleotide
caugaaugguagccggcua

SEQ ID NO: 1168105 - RNA, 19 nt, Artificial Sequence
  Description of Artificial Sequence: Synthetic oligonucleotide
aucgagugggguggcgaug

SEQ ID NO: 1168106 - RNA, 19 nt, Artificial Sequence
  Description of Artificial Sequence: Synthetic oligonucleotide
ggaagugggaccauaggau

SEQ ID NO: 1168107 - RNA, 19 nt, Artificial Sequence
  Description of Artificial Sequence: Synthetic oligonucleotide
cugaauugacucggcuuca

SEQ ID NO: 1168108 - RNA, 19 nt, Artificial Sequence
  Description of Artificial Sequence: Synthetic oligonucleotide
cugcccgagcgucggcucc

SEQ ID NO: 1168109 - RNA, 19 nt, Artificial Sequence
  Description of Artificial Sequence: Synthetic oligonucleotide
cauuuauaaugaugagguu

SEQ ID NO: 1168110 - RNA, 19 nt, Artificial Sequence
  Description of Artificial Sequence: Synthetic oligonucleotide
ggcaagccucugucggccg

SEQ ID NO: 1168111 - RNA, 19 nt, Artificial Sequence
  Description of Artificial Sequence: Synthetic oligonucleotide
uccuggaagugggaccaua

SEQ ID NO: 1168112 - RNA, 19 nt, Artificial Sequence
  Description of Artificial Sequence: Synthetic oligonucleotide
agaggcccugguguagaca

SEQ ID NO: 1168113 - RNA, 19 nt, Artificial Sequence
  Description of Artificial Sequence: Synthetic oligonucleotide
acgggcggcaagccucugu

SEQ ID NO: 1168114 - RNA, 19 nt, Artificial Sequence
  Description of Artificial Sequence: Synthetic oligonucleotide
gaucgagugggguggcgau

SEQ ID NO: 1168115 - RNA, 19 nt, Artificial Sequence
  Description of Artificial Sequence: Synthetic oligonucleotide
ccggcaagucaucuucaag

SEQ ID NO: 1168116 - RNA, 19 nt, Artificial Sequence
  Description of Artificial Sequence: Synthetic oligonucleotide
gacuaggcccuuccauacu

SEQ ID NO: 1168117 - RNA, 19 nt, Artificial Sequence
  Description of Artificial Sequence: Synthetic oligonucleotide
cccagaaacaaucccauau

SEQ ID NO: 1168118 - RNA, 19 nt, Artificial Sequence
  Description of Artificial Sequence: Synthetic oligonucleotide
cgaugucaggaacauagca

SEQ ID NO: 1168119 - RNA, 19 nt, Artificial Sequence
  Description of Artificial Sequence: Synthetic oligonucleotide
ugggacggaaugggaucga

SEQ ID NO: 1168120 - RNA, 19 nt, Artificial Sequence
  Description of Artificial Sequence: Synthetic oligonucleotide
acuugccgugugaaagcca

SEQ ID NO: 1168121 - RNA, 19 nt, Artificial Sequence
  Description of Artificial Sequence: Synthetic oligonucleotide
augacagacugcagacaaa

SEQ ID NO: 1168122 - RNA, 19 nt, Artificial Sequence
  Description of Artificial Sequence: Synthetic oligonucleotide
aagaggcgagagagcuucu

SEQ ID NO: 1168123 - RNA, 19 nt, Artificial Sequence
  Description of Artificial Sequence: Synthetic oligonucleotide
gguaagcaaagaggcccug

SEQ ID NO: 1168124 - RNA, 19 nt, Artificial Sequence
  Description of Artificial Sequence: Synthetic oligonucleotide
uccccaacauugggcagua

SEQ ID NO: 1168125 - RNA, 19 nt, Artificial Sequence
  Description of Artificial Sequence: Synthetic oligonucleotide
gcaaagaggcccuggugua

SEQ ID NO: 1168126 - RNA, 19 nt, Artificial Sequence
  Description of Artificial Sequence: Synthetic oligonucleotide
ccccugccgggucugaggg

SEQ ID NO: 1168127 - RNA, 19 nt, Artificial Sequence
  Description of Artificial Sequence: Synthetic oligonucleotide
aucggguaucagaacugaa

SEQ ID NO: 1168128 - RNA, 19 nt, Artificial Sequence
  Description of Artificial Sequence: Synthetic oligonucleotide
aguaugggucucacaucau

SEQ ID NO: 1168129 - RNA, 19 nt, Artificial Sequence
  Description of Artificial Sequence: Synthetic oligonucleotide
aggugccggcaagucaucu

SEQ ID NO: 1168130 - RNA, 19 nt, Artificial Sequence
  Description of Artificial Sequence: Synthetic oligonucleotide
cuuccugguaagagagggu

SEQ ID NO: 1168131 - RNA, 19 nt, Artificial Sequence
  Description of Artificial Sequence: Synthetic oligonucleotide
gggacggaaugggaucgag

SEQ ID NO: 1168132 - RNA, 19 nt, Artificial Sequence
  Description of Artificial Sequence: Synthetic oligonucleotide
cagcuccaacggaaggaca

SEQ ID NO: 1168133 - RNA, 19 nt, Artificial Sequence
  Description of Artificial Sequence: Synthetic oligonucleotide
agaggcgagagagcuucuu

SEQ ID NO: 1168134 - RNA, 19 nt, Artificial Sequence
  Description of Artificial Sequence: Synthetic oligonucleotide
gcguaguuucagcuccaac

SEQ ID NO: 1168135 - RNA, 19 nt, Artificial Sequence
  Description of Artificial Sequence: Synthetic oligonucleotide
gagcgucggcuccgucucc

SEQ ID NO: 1168136 - RNA, 19 nt, Artificial Sequence
  Description of Artificial Sequence: Synthetic oligonucleotide
gaccccugccgggucugag

SEQ ID NO: 1168137 - RNA, 19 nt, Artificial Sequence
  Description of Artificial Sequence: Synthetic oligonucleotide
cgcuucugaagccgcacgc

SEQ ID NO: 1168138 - RNA, 19 nt, Artificial Sequence
  Description of Artificial Sequence: Synthetic oligonucleotide
gcggcaagccucugucggc

SEQ ID NO: 1168139 - RNA, 19 nt, Artificial Sequence
  Description of Artificial Sequence: Synthetic oligonucleotide
ccucuagcggcuggguccg

SEQ ID NO: 1168140 - RNA, 19 nt, Artificial Sequence
  Description of Artificial Sequence: Synthetic oligonucleotide
ggaucgagugggguggcga

SEQ ID NO: 1168141 - RNA, 19 nt, Artificial Sequence
  Description of Artificial Sequence: Synthetic oligonucleotide
ggguggcgaugucaggaac

SEQ ID NO: 1168142 - RNA, 19 nt, Artificial Sequence
  Description of Artificial Sequence: Synthetic oligonucleotide
ccagcacuaucaaggcauc

SEQ ID NO: 1168143 - RNA, 19 nt, Artificial Sequence
  Description of Artificial Sequence: Synthetic oligonucleotide
augcguaguuucagcucca

SEQ ID NO: 1168144 - RNA, 19 nt, Artificial Sequence
  Description of Artificial Sequence: Synthetic oligonucleotide
guggucugaguggcucccc

SEQ ID NO: 1168145 - RNA, 19 nt, Artificial Sequence
  Description of Artificial Sequence: Synthetic oligonucleotide
agacgggcggcaagccucu

SEQ ID NO: 1168146 - RNA, 19 nt, Artificial Sequence
  Description of Artificial Sequence: Synthetic oligonucleotide
cuaggcccuuccauacugu

SEQ ID NO: 1168147 - RNA, 19 nt, Artificial Sequence
  Description of Artificial Sequence: Synthetic oligonucleotide
ggguuagguccuggaagug

SEQ ID NO: 1168148 - RNA, 19 nt, Artificial Sequence
  Description of Artificial Sequence: Synthetic oligonucleotide
gcugaggugcgcgcgcagc

SEQ ID NO: 1168149 - RNA, 19 nt, Artificial Sequence
  Description of Artificial Sequence: Synthetic oligonucleotide
cagcacuaucaaggcauca

SEQ ID NO: 1168150 - RNA, 19 nt, Artificial Sequence
  Description of Artificial Sequence: Synthetic oligonucleotide
gcagcgagguaagcaaaga

SEQ ID NO: 1168151 - RNA, 19 nt, Artificial Sequence
  Description of Artificial Sequence: Synthetic oligonucleotide
gcaucaaacuggguggccu

SEQ ID NO: 1168152 - RNA, 19 nt, Artificial Sequence
  Description of Artificial Sequence: Synthetic oligonucleotide
gcaagacgggcggcaagcc

SEQ ID NO: 1168153 - RNA, 19 nt, Artificial Sequence
  Description of Artificial Sequence: Synthetic oligonucleotide
ccaacuuggucacaugaau

SEQ ID NO: 1168154 - RNA, 19 nt, Artificial Sequence
  Description of Artificial Sequence: Synthetic oligonucleotide
agccggcuaucagcugguc

SEQ ID NO: 1168155 - RNA, 19 nt, Artificial Sequence
  Description of Artificial Sequence: Synthetic oligonucleotide
caagacgggcggcaagccu

SEQ ID NO: 1168156 - RNA, 19 nt, Artificial Sequence
  Description of Artificial Sequence: Synthetic oligonucleotide
gguucaguacuugccgugu

SEQ ID NO: 1168157 - RNA, 19 nt, Artificial Sequence
  Description of Artificial Sequence: Synthetic oligonucleotide
gcuccaacggaaggacaac

SEQ ID NO: 1168158 - RNA, 19 nt, Artificial Sequence
  Description of Artificial Sequence: Synthetic oligonucleotide
ggaaugcucugaaucugua

SEQ ID NO: 1168159 - RNA, 19 nt, Artificial Sequence
  Description of Artificial Sequence: Synthetic oligonucleotide
guggguugacugggucccc

SEQ ID NO: 1168160 - RNA, 19 nt, Artificial Sequence
  Description of Artificial Sequence: Synthetic oligonucleotide
gggguggcgaugucaggaa

SEQ ID NO: 1168161 - RNA, 19 nt, Artificial Sequence
  Description of Artificial Sequence: Synthetic oligonucleotide
cggaagaugcguaguuuca

SEQ ID NO: 1168162 - RNA, 19 nt, Artificial Sequence
  Description of Artificial Sequence: Synthetic oligonucleotide
cagcagugggucauuugau

SEQ ID NO: 1168163 - RNA, 19 nt, Artificial Sequence
  Description of Artificial Sequence: Synthetic oligonucleotide
uggcgaugucaggaacaua

SEQ ID NO: 1168164 - RNA, 19 nt, Artificial Sequence
  Description of Artificial Sequence: Synthetic oligonucleotide
gggaucgagugggguggcg

SEQ ID NO: 1168165 - RNA, 19 nt, Artificial Sequence
  Description of Artificial Sequence: Synthetic oligonucleotide
cgagagagcuucuuaagau

SEQ ID NO: 1168166 - RNA, 19 nt, Artificial Sequence
  Description of Artificial Sequence: Synthetic oligonucleotide
cugaggugcgcgcgcagcu

SEQ ID NO: 1168167 - RNA, 19 nt, Artificial Sequence
  Description of Artificial Sequence: Synthetic oligonucleotide
cagccggcugacugauaca

SEQ ID NO: 1168168 - RNA, 19 nt, Artificial Sequence
  Description of Artificial Sequence: Synthetic oligonucleotide
cucaggcauugacacugcu

SEQ ID NO: 1168169 - RNA, 19 nt, Artificial Sequence
  Description of Artificial Sequence: Synthetic oligonucleotide
cgagcgucggcuccgucuc

SEQ ID NO: 1168170 - RNA, 19 nt, Artificial Sequence
  Description of Artificial Sequence: Synthetic oligonucleotide
ccgucuccggcaccucuag

SEQ ID NO: 1168171 - RNA, 19 nt, Artificial Sequence
  Description of Artificial Sequence: Synthetic oligonucleotide
guccgcuucugaagccgca

SEQ ID NO: 1168172 - RNA, 19 nt, Artificial Sequence
  Description of Artificial Sequence: Synthetic oligonucleotide
ccugggguauguagccuga

SEQ ID NO: 1168173 - RNA, 19 nt, Artificial Sequence
  Description of Artificial Sequence: Synthetic oligonucleotide
gccggcaagucaucuucaa

SEQ ID NO: 1168174 - RNA, 19 nt, Artificial Sequence
  Description of Artificial Sequence: Synthetic oligonucleotide
cguaggaccuuggcugcag

SEQ ID NO: 1168175 - RNA, 19 nt, Artificial Sequence
  Description of Artificial Sequence: Synthetic oligonucleotide
gcugcccgagcgucggcuc

SEQ ID NO: 1168176 - RNA, 19 nt, Artificial Sequence
  Description of Artificial Sequence: Synthetic oligonucleotide
ggugcgcgcgcagcugccc

SEQ ID NO: 1168177 - RNA, 19 nt, Artificial Sequence
  Description of Artificial Sequence: Synthetic oligonucleotide
cggcaagccucugucggcc

SEQ ID NO: 1168178 - RNA, 19 nt, Artificial Sequence
  Description of Artificial Sequence: Synthetic oligonucleotide
cccucacagagugggugug

SEQ ID NO: 1168179 - RNA, 19 nt, Artificial Sequence
  Description of Artificial Sequence: Synthetic oligonucleotide
ggacggaaugggaucgagu

SEQ ID NO: 1168180 - RNA, 19 nt, Artificial Sequence
  Description of Artificial Sequence: Synthetic oligonucleotide
gcguccaagaaaacagcau

SEQ ID NO: 1168181 - RNA, 19 nt, Artificial Sequence
  Description of Artificial Sequence: Synthetic oligonucleotide
gacucggcuucaacauuuu

SEQ ID NO: 1168182 - RNA, 19 nt, Artificial Sequence
  Description of Artificial Sequence: Synthetic oligonucleotide
ggucgaccccugccggguc

SEQ ID NO: 1168183 - RNA, 19 nt, Artificial Sequence
  Description of Artificial Sequence: Synthetic oligonucleotide
ggagaugcaccagcacuau

SEQ ID NO: 1168184 - RNA, 19 nt, Artificial Sequence
  Description of Artificial Sequence: Synthetic oligonucleotide
ggugccggcaagucaucuu

SEQ ID NO: 1168185 - RNA, 19 nt, Artificial Sequence
  Description of Artificial Sequence: Synthetic oligonucleotide
ccccacgugggcagcagaa

SEQ ID NO: 1168186 - RNA, 19 nt, Artificial Sequence
  Description of Artificial Sequence: Synthetic oligonucleotide
gugggucauuugaugcaau

SEQ ID NO: 1168187 - RNA, 19 nt, Artificial Sequence
  Description of Artificial Sequence: Synthetic oligonucleotide
ccgggucugaggggaaauc

SEQ ID NO: 1168188 - RNA, 19 nt, Artificial Sequence
  Description of Artificial Sequence: Synthetic oligonucleotide
cuagcggcuggguccgcuu

SEQ ID NO: 1168189 - RNA, 19 nt, Artificial Sequence
  Description of Artificial Sequence: Synthetic oligonucleotide
ccgagcgucggcuccgucu

SEQ ID NO: 1168190 - RNA, 19 nt, Artificial Sequence
  Description of Artificial Sequence: Synthetic oligonucleotide
caccgccacagcagugggu

SEQ ID NO: 1168191 - RNA, 19 nt, Artificial Sequence
  Description of Artificial Sequence: Synthetic oligonucleotide
cggcaagacgggcggcaag

SEQ ID NO: 1168192 - RNA, 19 nt, Artificial Sequence
  Description of Artificial Sequence: Synthetic oligonucleotide
gccggcugacugauacaga

SEQ ID NO: 1168193 - RNA, 19 nt, Artificial Sequence
  Description of Artificial Sequence: Synthetic oligonucleotide
ccccucacagagugggugu

SEQ ID NO: 1168194 - RNA, 19 nt, Artificial Sequence
  Description of Artificial Sequence: Synthetic oligonucleotide
cggcuaucagcuggucgac

SEQ ID NO: 1168195 - RNA, 19 nt, Artificial Sequence
  Description of Artificial Sequence: Synthetic oligonucleotide
agcagccggcugacugaua

SEQ ID NO: 1168196 - RNA, 19 nt, Artificial Sequence
  Description of Artificial Sequence: Synthetic oligonucleotide
gcggcaagacgggcggcaa

SEQ ID NO: 1168197 - RNA, 19 nt, Artificial Sequence
  Description of Artificial Sequence: Synthetic oligonucleotide
gcaccucuagcggcugggu

SEQ ID NO: 1168198 - RNA, 19 nt, Artificial Sequence
  Description of Artificial Sequence: Synthetic oligonucleotide
ccggcaccucuagcggcug

SEQ ID NO: 1168199 - RNA, 19 nt, Artificial Sequence
  Description of Artificial Sequence: Synthetic oligonucleotide
cgagugggguggcgauguc

SEQ ID NO: 1168200 - RNA, 19 nt, Artificial Sequence
  Description of Artificial Sequence: Synthetic oligonucleotide
gccgggucugaggggaaau

SEQ ID NO: 1168201 - RNA, 19 nt, Artificial Sequence
  Description of Artificial Sequence: Synthetic oligonucleotide
cgcgcgcagcugcccgagc

SEQ ID NO: 1168202 - RNA, 19 nt, Artificial Sequence
  Description of Artificial Sequence: Synthetic oligonucleotide
cgcagccucauggcggcaa

SEQ ID NO: 1168203 - RNA, 19 nt, Artificial Sequence
  Description of Artificial Sequence: Synthetic oligonucleotide
gcgcagccucauggcggca

SEQ ID NO: 1168204 - RNA, 19 nt, Artificial Sequence
  Description of Artificial Sequence: Synthetic oligonucleotide
ccacagcagugggucauuu

SEQ ID NO: 1168205 - RNA, 19 nt, Artificial Sequence
  Description of Artificial Sequence: Synthetic oligonucleotide
gcccgagcgucggcuccgu

SEQ ID NO: 1168206 - RNA, 19 nt, Artificial Sequence
  Description of Artificial Sequence: Synthetic oligonucleotide
ccccaacauugggcaguau

SEQ ID NO: 1168207 - RNA, 19 nt, Artificial Sequence
  Description of Artificial Sequence: Synthetic oligonucleotide
aaugcuuuaauuuacuacg

SEQ ID NO: 1168208 - RNA, 19 nt, Artificial Sequence
  Description of Artificial Sequence: Synthetic oligonucleotide
aaaguuuccauauaacugg

SEQ ID NO: 1168209 - RNA, 19 nt, Artificial Sequence
  Description of Artificial Sequence: Synthetic oligonucleotide
uguacaaucaucuuuauug

SEQ ID NO: 1168210 - RNA, 19 nt, Artificial Sequence
  Description of Artificial Sequence: Synthetic oligonucleotide
uauguaguuauuuacaugc

SEQ ID NO: 1168211 - RNA, 19 nt, Artificial Sequence
  Description of Artificial Sequence: Synthetic oligonucleotide
agaaauagaagacaagggg

SEQ ID NO: 1168212 - RNA, 19 nt, Artificial Sequence
  Description of Artificial Sequence: Synthetic oligonucleotide
aauaaauacuuugcaaugc

SEQ ID NO: 1168213 - RNA, 19 nt, Artificial Sequence
  Description of Artificial Sequence: Synthetic oligonucleotide
uaucaauacacauacauca

SEQ ID NO: 1168214 - RNA, 19 nt, Artificial Sequence
  Description of Artificial Sequence: Synthetic oligonucleotide
gaaaagaucuuauaggacc

SEQ ID NO: 1168215 - RNA, 19 nt, Artificial Sequence
  Description of Artificial Sequence: Synthetic oligonucleotide
aaauccccaauauuuaugg

SEQ ID NO: 1168216 - RNA, 19 nt, Artificial Sequence
  Description of Artificial Sequence: Synthetic oligonucleotide
acuaacaauacuuaaaaga

SEQ ID NO: 1168217 - RNA, 19 nt, Artificial Sequence
  Description of Artificial Sequence: Synthetic oligonucleotide
gaaacuagguucuagcagg

SEQ ID NO: 1168218 - RNA, 19 nt, Artificial Sequence
  Description of Artificial Sequence: Synthetic oligonucleotide
uuaauaagagacaacagaa

SEQ ID NO: 1168219 - RNA, 19 nt, Artificial Sequence
  Description of Artificial Sequence: Synthetic oligonucleotide
aaaccaauauaucaaaaga

SEQ ID NO: 1168220 - RNA, 19 nt, Artificial Sequence
  Description of Artificial Sequence: Synthetic oligonucleotide
ugugacuaacuacauaugg

SEQ ID NO: 1168221 - RNA, 19 nt, Artificial Sequence
  Description of Artificial Sequence: Synthetic oligonucleotide
uuuauaccaagcuacauca

SEQ ID NO: 1168222 - RNA, 19 nt, Artificial Sequence
  Description of Artificial Sequence: Synthetic oligonucleotide
aacgaaaugcuauagaaaa

SEQ ID NO: 1168223 - RNA, 19 nt, Artificial Sequence
  Description of Artificial Sequence: Synthetic oligonucleotide
aaaguagucauuugugguc

SEQ ID NO: 1168224 - RNA, 19 nt, Artificial Sequence
  Description of Artificial Sequence: Synthetic oligonucleotide
aaggauuaguugcacaugg

SEQ ID NO: 1168225 - RNA, 19 nt, Artificial Sequence
  Description of Artificial Sequence: Synthetic oligonucleotide
aaacuuaucauacaagaaa

SEQ ID NO: 1168226 - RNA, 19 nt, Artificial Sequence
  Description of Artificial Sequence: Synthetic oligonucleotide
cuuuguaugaaaauauggc

SEQ ID NO: 1168227 - RNA, 19 nt, Artificial Sequence
  Description of Artificial Sequence: Synthetic oligonucleotide
aaaugaccauuguagaaac

SEQ ID NO: 1168228 - RNA, 19 nt, Artificial Sequence
  Description of Artificial Sequence: Synthetic oligonucleotide
ucuuauaggaccccaaacc

SEQ ID NO: 1168229 - RNA, 19 nt, Artificial Sequence
  Description of Artificial Sequence: Synthetic oligonucleotide
acagauuacucaaauaucc

SEQ ID NO: 1168230 - RNA, 19 nt, Artificial Sequence
  Description of Artificial Sequence: Synthetic oligonucleotide
agcugauuaaauuaaaaug

SEQ ID NO: 1168231 - RNA, 19 nt, Artificial Sequence
  Description of Artificial Sequence: Synthetic oligonucleotide
aaccaauauaucaaaagac

SEQ ID NO: 1168232 - RNA, 19 nt, Artificial Sequence
  Description of Artificial Sequence: Synthetic oligonucleotide
aaacccuaaauuuacuuug

SEQ ID NO: 1168233 - RNA, 19 nt, Artificial Sequence
  Description of Artificial Sequence: Synthetic oligonucleotide
uugaaaagaucuuauagga

SEQ ID NO: 1168234 - RNA, 19 nt, Artificial Sequence
  Description of Artificial Sequence: Synthetic oligonucleotide
augacuuauuaauuaaugg

SEQ ID NO: 1168235 - RNA, 19 nt, Artificial Sequence
  Description of Artificial Sequence: Synthetic oligonucleotide
uaaccaugaauccaauugg

SEQ ID NO: 1168236 - RNA, 19 nt, Artificial Sequence
  Description of Artificial Sequence: Synthetic oligonucleotide
aauuacacuguuguuuacc

SEQ ID NO: 1168237 - RNA, 19 nt, Artificial Sequence
  Description of Artificial Sequence: Synthetic oligonucleotide
aacucaagauaucauuaac

SEQ ID NO: 1168238 - RNA, 19 nt, Artificial Sequence
  Description of Artificial Sequence: Synthetic oligonucleotide
uuuguaugaaaauauggcu

SEQ ID NO: 1168239 - RNA, 19 nt, Artificial Sequence
  Description of Artificial Sequence: Synthetic oligonucleotide
uaauuaaugguuauaaauu

SEQ ID NO: 1168240 - RNA, 19 nt, Artificial Sequence
  Description of Artificial Sequence: Synthetic oligonucleotide
cuuuaauuuacuacggcag

SEQ ID NO: 1168241 - RNA, 19 nt, Artificial Sequence
  Description of Artificial Sequence: Synthetic oligonucleotide
uauuuauggacuuugucac

SEQ ID NO: 1168242 - RNA, 19 nt, Artificial Sequence
  Description of Artificial Sequence: Synthetic oligonucleotide
ugacuuauuaauuaauggu

SEQ ID NO: 1168243 - RNA, 19 nt, Artificial Sequence
  Description of Artificial Sequence: Synthetic oligonucleotide
uacuaaaugugacauagcu

SEQ ID NO: 1168244 - RNA, 19 nt, Artificial Sequence
  Description of Artificial Sequence: Synthetic oligonucleotide
ugcuuuaugguaauguagc

SEQ ID NO: 1168245 - RNA, 19 nt, Artificial Sequence
  Description of Artificial Sequence: Synthetic oligonucleotide
uuacaugcuacuuuauuag

SEQ ID NO: 1168246 - RNA, 19 nt, Artificial Sequence
  Description of Artificial Sequence: Synthetic oligonucleotide
agcuacaugaauuuucuag

SEQ ID NO: 1168247 - RNA, 19 nt, Artificial Sequence
  Description of Artificial Sequence: Synthetic oligonucleotide
uguuauguaguuauuuaca

SEQ ID NO: 1168248 - RNA, 19 nt, Artificial Sequence
  Description of Artificial Sequence: Synthetic oligonucleotide
uuuaugguaauguagcuau

SEQ ID NO: 1168249 - RNA, 19 nt, Artificial Sequence
  Description of Artificial Sequence: Synthetic oligonucleotide
cucaagauaucauuaacag

SEQ ID NO: 1168250 - RNA, 19 nt, Artificial Sequence
  Description of Artificial Sequence: Synthetic oligonucleotide
aauguagguaaguuguuca

SEQ ID NO: 1168251 - RNA, 19 nt, Artificial Sequence
  Description of Artificial Sequence: Synthetic oligonucleotide
uaucaaaagacccuguaaa

SEQ ID NO: 1168252 - RNA, 19 nt, Artificial Sequence
  Description of Artificial Sequence: Synthetic oligonucleotide
auauuuagaauccagugaa

SEQ ID NO: 1168253 - RNA, 19 nt, Artificial Sequence
  Description of Artificial Sequence: Synthetic oligonucleotide
auaaugcacucuuuagugc

SEQ ID NO: 1168254 - RNA, 19 nt, Artificial Sequence
  Description of Artificial Sequence: Synthetic oligonucleotide
uguuguuuaccuuuguaug

SEQ ID NO: 1168255 - RNA, 19 nt, Artificial Sequence
  Description of Artificial Sequence: Synthetic oligonucleotide
agagcauaaauauaugacu

SEQ ID NO: 1168256 - RNA, 19 nt, Artificial Sequence
  Description of Artificial Sequence: Synthetic oligonucleotide
uauagaaaagagcacugga

SEQ ID NO: 1168257 - RNA, 19 nt, Artificial Sequence
  Description of Artificial Sequence: Synthetic oligonucleotide
uucagcaacaguugaaaag

SEQ ID NO: 1168258 - RNA, 19 nt, Artificial Sequence
  Description of Artificial Sequence: Synthetic oligonucleotide
uuuacuacggcagauacaa

SEQ ID NO: 1168259 - RNA, 19 nt, Artificial Sequence
  Description of Artificial Sequence: Synthetic oligonucleotide
aucaaaagacccuguaaac

SEQ ID NO: 1168260 - RNA, 19 nt, Artificial Sequence
  Description of Artificial Sequence: Synthetic oligonucleotide
uaugcugguacuaaaugcu

SEQ ID NO: 1168261 - RNA, 19 nt, Artificial Sequence
  Description of Artificial Sequence: Synthetic oligonucleotide
uuuacaugcuacuuuauua

SEQ ID NO: 1168262 - RNA, 19 nt, Artificial Sequence
  Description of Artificial Sequence: Synthetic oligonucleotide
uauuacauuguaaaccaaa

SEQ ID NO: 1168263 - RNA, 19 nt, Artificial Sequence
  Description of Artificial Sequence: Synthetic oligonucleotide
aauagaagacaagggguac

SEQ ID NO: 1168264 - RNA, 19 nt, Artificial Sequence
  Description of Artificial Sequence: Synthetic oligonucleotide
aauauaaccaugaauccaa

SEQ ID NO: 1168265 - RNA, 19 nt, Artificial Sequence
  Description of Artificial Sequence: Synthetic oligonucleotide
uauuguauuucacucuugu

SEQ ID NO: 1168266 - RNA, 19 nt, Artificial Sequence
  Description of Artificial Sequence: Synthetic oligonucleotide
ugagguauuauuacauugu

SEQ ID NO: 1168267 - RNA, 19 nt, Artificial Sequence
  Description of Artificial Sequence: Synthetic oligonucleotide
uuguaugaaaauauggcua

SEQ ID NO: 1168268 - RNA, 19 nt, Artificial Sequence
  Description of Artificial Sequence: Synthetic oligonucleotide
uggacuuugucacuuaaac

SEQ ID NO: 1168269 - RNA, 19 nt, Artificial Sequence
  Description of Artificial Sequence: Synthetic oligonucleotide
aaauguagguaaguuguuc

SEQ ID NO: 1168270 - RNA, 19 nt, Artificial Sequence
  Description of Artificial Sequence: Synthetic oligonucleotide
uacauauggaaaacaacga

SEQ ID NO: 1168271 - RNA, 19 nt, Artificial Sequence
  Description of Artificial Sequence: Synthetic oligonucleotide
acaugaauuuucuagcuga

SEQ ID NO: 1168272 - RNA, 19 nt, Artificial Sequence
  Description of Artificial Sequence: Synthetic oligonucleotide
ucaaauggaaaguagucau

SEQ ID NO: 1168273 - RNA, 19 nt, Artificial Sequence
  Description of Artificial Sequence: Synthetic oligonucleotide
acuaacuacauauggaaaa

SEQ ID NO: 1168274 - RNA, 19 nt, Artificial Sequence
  Description of Artificial Sequence: Synthetic oligonucleotide
uuagccaaaaugucaaacu

SEQ ID NO: 1168275 - RNA, 19 nt, Artificial Sequence
  Description of Artificial Sequence: Synthetic oligonucleotide
uuguaaaagcuguauacac

SEQ ID NO: 1168276 - RNA, 19 nt, Artificial Sequence
  Description of Artificial Sequence: Synthetic oligonucleotide
ugacuaacuacauauggaa

SEQ ID NO: 1168277 - RNA, 19 nt, Artificial Sequence
  Description of Artificial Sequence: Synthetic oligonucleotide
auuucaacuuaauaagaga

SEQ ID NO: 1168278 - RNA, 19 nt, Artificial Sequence
  Description of Artificial Sequence: Synthetic oligonucleotide
aucuuauaggaccccaaac

SEQ ID NO: 1168279 - RNA, 19 nt, Artificial Sequence
  Description of Artificial Sequence: Synthetic oligonucleotide
auagaaaagagcacuggac

SEQ ID NO: 1168280 - RNA, 19 nt, Artificial Sequence
  Description of Artificial Sequence: Synthetic oligonucleotide
uguauuucacucuugucaa

SEQ ID NO: 1168281 - RNA, 19 nt, Artificial Sequence
  Description of Artificial Sequence: Synthetic oligonucleotide
acaacgaaaugcuauagaa

SEQ ID NO: 1168282 - RNA, 19 nt, Artificial Sequence
  Description of Artificial Sequence: Synthetic oligonucleotide
uacucaaauggaaaguagu

SEQ ID NO: 1168283 - RNA, 19 nt, Artificial Sequence
  Description of Artificial Sequence: Synthetic oligonucleotide
auauaugacuuauuaauua

SEQ ID NO: 1168284 - RNA, 19 nt, Artificial Sequence
  Description of Artificial Sequence: Synthetic oligonucleotide
uguagaaacauuacagauu

SEQ ID NO: 1168285 - RNA, 19 nt, Artificial Sequence
  Description of Artificial Sequence: Synthetic oligonucleotide
gucacuuaaacuuggcuug

SEQ ID NO: 1168286 - RNA, 19 nt, Artificial Sequence
  Description of Artificial Sequence: Synthetic oligonucleotide
cauagcaacgaggagaggc

SEQ ID NO: 1168287 - RNA, 19 nt, Artificial Sequence
  Description of Artificial Sequence: Synthetic oligonucleotide
aagcauagcaacgaggaga

SEQ ID NO: 1168288 - RNA, 19 nt, Artificial Sequence
  Description of Artificial Sequence: Synthetic oligonucleotide
gguauuauuacauuguaaa

SEQ ID NO: 1168289 - RNA, 19 nt, Artificial Sequence
  Description of Artificial Sequence: Synthetic oligonucleotide
aacaacgaaaugcuauaga

SEQ ID NO: 1168290 - RNA, 19 nt, Artificial Sequence
  Description of Artificial Sequence: Synthetic oligonucleotide
auguuaaaacuucagaguu

SEQ ID NO: 1168291 - RNA, 19 nt, Artificial Sequence
  Description of Artificial Sequence: Synthetic oligonucleotide
uucuuaggcuguuauguag

SEQ ID NO: 1168292 - RNA, 19 nt, Artificial Sequence
  Description of Artificial Sequence: Synthetic oligonucleotide
aacuuaucauacaagaaaa

SEQ ID NO: 1168293 - RNA, 19 nt, Artificial Sequence
  Description of Artificial Sequence: Synthetic oligonucleotide
auggaucauaugcugguac

SEQ ID NO: 1168294 - RNA, 19 nt, Artificial Sequence
  Description of Artificial Sequence: Synthetic oligonucleotide
augagagaagucuugagau

SEQ ID NO: 1168295 - RNA, 19 nt, Artificial Sequence
  Description of Artificial Sequence: Synthetic oligonucleotide
ugucacuuaaacuuggcuu

SEQ ID NO: 1168296 - RNA, 19 nt, Artificial Sequence
  Description of Artificial Sequence: Synthetic oligonucleotide
cuaaaugugacauagcuau

SEQ ID NO: 1168297 - RNA, 19 nt, Artificial Sequence
  Description of Artificial Sequence: Synthetic oligonucleotide
aauauaugacuuauuaauu

SEQ ID NO: 1168298 - RNA, 19 nt, Artificial Sequence
  Description of Artificial Sequence: Synthetic oligonucleotide
uauggcuacaugcuuuaug

SEQ ID NO: 1168299 - RNA, 19 nt, Artificial Sequence
  Description of Artificial Sequence: Synthetic oligonucleotide
auuguauuucacucuuguc

SEQ ID NO: 1168300 - RNA, 19 nt, Artificial Sequence
  Description of Artificial Sequence: Synthetic oligonucleotide
ugagauggaauguuuguaa

SEQ ID NO: 1168301 - RNA, 19 nt, Artificial Sequence
  Description of Artificial Sequence: Synthetic oligonucleotide
acuacauauggaaaacaac

SEQ ID NO: 1168302 - RNA, 19 nt, Artificial Sequence
  Description of Artificial Sequence: Synthetic oligonucleotide
cuguuauguaguuauuuac

SEQ ID NO: 1168303 - RNA, 19 nt, Artificial Sequence
  Description of Artificial Sequence: Synthetic oligonucleotide
uacagauuacucaaauauc

SEQ ID NO: 1168304 - RNA, 19 nt, Artificial Sequence
  Description of Artificial Sequence: Synthetic oligonucleotide
cauuagacaugguauacuc

SEQ ID NO: 1168305 - RNA, 19 nt, Artificial Sequence
  Description of Artificial Sequence: Synthetic oligonucleotide
uaccuuuguaugaaaauau

SEQ ID NO: 1168306 - RNA, 19 nt, Artificial Sequence
  Description of Artificial Sequence: Synthetic oligonucleotide
aaguuaucaaagaaugaga

SEQ ID NO: 1168307 - RNA, 19 nt, Artificial Sequence
  Description of Artificial Sequence: Synthetic oligonucleotide
aaaugagguauuauuacau

SEQ ID NO: 1168308 - RNA, 19 nt, Artificial Sequence
  Description of Artificial Sequence: Synthetic oligonucleotide
uaggcuguuauguaguuau

SEQ ID NO: 1168309 - RNA, 19 nt, Artificial Sequence
  Description of Artificial Sequence: Synthetic oligonucleotide
aaaauggcagcuaucuugu

SEQ ID NO: 1168310 - RNA, 19 nt, Artificial Sequence
  Description of Artificial Sequence: Synthetic oligonucleotide
aaacaacgaaaugcuauag

SEQ ID NO: 1168311 - RNA, 19 nt, Artificial Sequence
  Description of Artificial Sequence: Synthetic oligonucleotide
gucauaaugcacucuuuag

SEQ ID NO: 1168312 - RNA, 19 nt, Artificial Sequence
  Description of Artificial Sequence: Synthetic oligonucleotide
uuuguaacauggcaauaaa

SEQ ID NO: 1168313 - RNA, 19 nt, Artificial Sequence
  Description of Artificial Sequence: Synthetic oligonucleotide
gacaugguauacucaaaug

SEQ ID NO: 1168314 - RNA, 19 nt, Artificial Sequence
  Description of Artificial Sequence: Synthetic oligonucleotide
aaaucccaugauucuuagg

SEQ ID NO: 1168315 - RNA, 19 nt, Artificial Sequence
  Description of Artificial Sequence: Synthetic oligonucleotide
aaugagguauuauuacauu

SEQ ID NO: 1168316 - RNA, 19 nt, Artificial Sequence
  Description of Artificial Sequence: Synthetic oligonucleotide
gacaagacuauuuuauaaa

SEQ ID NO: 1168317 - RNA, 19 nt, Artificial Sequence
  Description of Artificial Sequence: Synthetic oligonucleotide
gaaugagagaagucuugag

SEQ ID NO: 1168318 - RNA, 19 nt, Artificial Sequence
  Description of Artificial Sequence: Synthetic oligonucleotide
cagauuacucaaauauccc

SEQ ID NO: 1168319 - RNA, 19 nt, Artificial Sequence
  Description of Artificial Sequence: Synthetic oligonucleotide
uaaaacccuaaauuuacuu

SEQ ID NO: 1168320 - RNA, 19 nt, Artificial Sequence
  Description of Artificial Sequence: Synthetic oligonucleotide
uaugguaauguagcuaucu

SEQ ID NO: 1168321 - RNA, 19 nt, Artificial Sequence
  Description of Artificial Sequence: Synthetic oligonucleotide
ugguauacucaaauggaaa

SEQ ID NO: 1168322 - RNA, 19 nt, Artificial Sequence
  Description of Artificial Sequence: Synthetic oligonucleotide
cuuugcuacagugugcugc

SEQ ID NO: 1168323 - RNA, 19 nt, Artificial Sequence
  Description of Artificial Sequence: Synthetic oligonucleotide
ugucauaaugcacucuuua

SEQ ID NO: 1168324 - RNA, 19 nt, Artificial Sequence
  Description of Artificial Sequence: Synthetic oligonucleotide
acauauggaaaacaacgaa

SEQ ID NO: 1168325 - RNA, 19 nt, Artificial Sequence
  Description of Artificial Sequence: Synthetic oligonucleotide
acucuuuagugcauguggc

SEQ ID NO: 1168326 - RNA, 19 nt, Artificial Sequence
  Description of Artificial Sequence: Synthetic oligonucleotide
acucaaauggaaaguaguc

SEQ ID NO: 1168327 - RNA, 19 nt, Artificial Sequence
  Description of Artificial Sequence: Synthetic oligonucleotide
acagaaauccccaauauuu

SEQ ID NO: 1168328 - RNA, 19 nt, Artificial Sequence
  Description of Artificial Sequence: Synthetic oligonucleotide
agaaaugaccauuguagaa

SEQ ID NO: 1168329 - RNA, 19 nt, Artificial Sequence
  Description of Artificial Sequence: Synthetic oligonucleotide
cuagcucugagaagauucg

SEQ ID NO: 1168330 - RNA, 19 nt, Artificial Sequence
  Description of Artificial Sequence: Synthetic oligonucleotide
uguaguuauuuacaugcuu

SEQ ID NO: 1168331 - RNA, 19 nt, Artificial Sequence
  Description of Artificial Sequence: Synthetic oligonucleotide
cacauggaucauaugcugg

SEQ ID NO: 1168332 - RNA, 19 nt, Artificial Sequence
  Description of Artificial Sequence: Synthetic oligonucleotide
cauaugcugguacuaaaug

SEQ ID NO: 1168333 - RNA, 19 nt, Artificial Sequence
  Description of Artificial Sequence: Synthetic oligonucleotide
ugguaauguagcuaucuuc

SEQ ID NO: 1168334 - RNA, 19 nt, Artificial Sequence
  Description of Artificial Sequence: Synthetic oligonucleotide
gcuacaugaauuuucuagc

SEQ ID NO: 1168335 - RNA, 19 nt, Artificial Sequence
  Description of Artificial Sequence: Synthetic oligonucleotide
ucaauacacauacaucauu

SEQ ID NO: 1168336 - RNA, 19 nt, Artificial Sequence
  Description of Artificial Sequence: Synthetic oligonucleotide
caugguauacucaaaugga

SEQ ID NO: 1168337 - RNA, 19 nt, Artificial Sequence
  Description of Artificial Sequence: Synthetic oligonucleotide
gauuaguugcacauggauc

SEQ ID NO: 1168338 - RNA, 19 nt, Artificial Sequence
  Description of Artificial Sequence: Synthetic oligonucleotide
guuguuuaccuuuguauga

SEQ ID NO: 1168339 - RNA, 19 nt, Artificial Sequence
  Description of Artificial Sequence: Synthetic oligonucleotide
agauggaauguuuguaaca

SEQ ID NO: 1168340 - RNA, 19 nt, Artificial Sequence
  Description of Artificial Sequence: Synthetic oligonucleotide
ucauaugcugguacuaaau

SEQ ID NO: 1168341 - RNA, 19 nt, Artificial Sequence
  Description of Artificial Sequence: Synthetic oligonucleotide
uuauaggaccccaaaccaa

SEQ ID NO: 1168342 - RNA, 19 nt, Artificial Sequence
  Description of Artificial Sequence: Synthetic oligonucleotide
accuuaaccuacauuuccc

SEQ ID NO: 1168343 - RNA, 19 nt, Artificial Sequence
  Description of Artificial Sequence: Synthetic oligonucleotide
ugcaguuuuacaugcuacu

SEQ ID NO: 1168344 - RNA, 19 nt, Artificial Sequence
  Description of Artificial Sequence: Synthetic oligonucleotide
acuacggcagauacaaaac

SEQ ID NO: 1168345 - RNA, 19 nt, Artificial Sequence
  Description of Artificial Sequence: Synthetic oligonucleotide
cuuauaggaccccaaacca

SEQ ID NO: 1168346 - RNA, 19 nt, Artificial Sequence
  Description of Artificial Sequence: Synthetic oligonucleotide
gaaauagaagacaaggggu

SEQ ID NO: 1168347 - RNA, 19 nt, Artificial Sequence
  Description of Artificial Sequence: Synthetic oligonucleotide
ugcuacuuuauuagaaaua

SEQ ID NO: 1168348 - RNA, 19 nt, Artificial Sequence
  Description of Artificial Sequence: Synthetic oligonucleotide
uauacacaucuaaaacccu

SEQ ID NO: 1168349 - RNA, 19 nt, Artificial Sequence
  Description of Artificial Sequence: Synthetic oligonucleotide
uuauuguauuucacucuug

SEQ ID NO: 1168350 - RNA, 19 nt, Artificial Sequence
  Description of Artificial Sequence: Synthetic oligonucleotide
gaaauccccaauauuuaug

SEQ ID NO: 1168351 - RNA, 19 nt, Artificial Sequence
  Description of Artificial Sequence: Synthetic oligonucleotide
cuaacuacauauggaaaac

SEQ ID NO: 1168352 - RNA, 19 nt, Artificial Sequence
  Description of Artificial Sequence: Synthetic oligonucleotide
aacgaggagaggccuagcu

SEQ ID NO: 1168353 - RNA, 19 nt, Artificial Sequence
  Description of Artificial Sequence: Synthetic oligonucleotide
ucuagcugauuaaauuaaa

SEQ ID NO: 1168354 - RNA, 19 nt, Artificial Sequence
  Description of Artificial Sequence: Synthetic oligonucleotide
gacaccugugacuaacuac

SEQ ID NO: 1168355 - RNA, 19 nt, Artificial Sequence
  Description of Artificial Sequence: Synthetic oligonucleotide
uguuaaaacuucagaguuu

SEQ ID NO: 1168356 - RNA, 19 nt, Artificial Sequence
  Description of Artificial Sequence: Synthetic oligonucleotide
agacaugguauacucaaau

SEQ ID NO: 1168357 - RNA, 19 nt, Artificial Sequence
  Description of Artificial Sequence: Synthetic oligonucleotide
ggaaacuagguucuagcag

SEQ ID NO: 1168358 - RNA, 19 nt, Artificial Sequence
  Description of Artificial Sequence: Synthetic oligonucleotide
acucaagauaucauuaaca

SEQ ID NO: 1168359 - RNA, 19 nt, Artificial Sequence
  Description of Artificial Sequence: Synthetic oligonucleotide
gauucuuaggcuguuaugu

SEQ ID NO: 1168360 - RNA, 19 nt, Artificial Sequence
  Description of Artificial Sequence: Synthetic oligonucleotide
agcugauguguuccuacac

SEQ ID NO: 1168361 - RNA, 19 nt, Artificial Sequence
  Description of Artificial Sequence: Synthetic oligonucleotide
ugguacuaaaugcugguuu

SEQ ID NO: 1168362 - RNA, 19 nt, Artificial Sequence
  Description of Artificial Sequence: Synthetic oligonucleotide
ucauuuugacacaaauguu

SEQ ID NO: 1168363 - RNA, 19 nt, Artificial Sequence
  Description of Artificial Sequence: Synthetic oligonucleotide
agaaauccccaauauuuau

SEQ ID NO: 1168364 - RNA, 19 nt, Artificial Sequence
  Description of Artificial Sequence: Synthetic oligonucleotide
ugcagacuaacaauacuua

SEQ ID NO: 1168365 - RNA, 19 nt, Artificial Sequence
  Description of Artificial Sequence: Synthetic oligonucleotide
acaguagugguuuuacuuu

SEQ ID NO: 1168366 - RNA, 19 nt, Artificial Sequence
  Description of Artificial Sequence: Synthetic oligonucleotide
uacaugcuacuuuauuaga

SEQ ID NO: 1168367 - RNA, 19 nt, Artificial Sequence
  Description of Artificial Sequence: Synthetic oligonucleotide
agaguuuucugaagaaaag

SEQ ID NO: 1168368 - RNA, 19 nt, Artificial Sequence
  Description of Artificial Sequence: Synthetic oligonucleotide
uguuccuacaccccuugaa

SEQ ID NO: 1168369 - RNA, 19 nt, Artificial Sequence
  Description of Artificial Sequence: Synthetic oligonucleotide
acuauuuuauaaauacuaa

SEQ ID NO: 1168370 - RNA, 19 nt, Artificial Sequence
  Description of Artificial Sequence: Synthetic oligonucleotide
cuuuagcaauaaauggcac

SEQ ID NO: 1168371 - RNA, 19 nt, Artificial Sequence
  Description of Artificial Sequence: Synthetic oligonucleotide
ugauuuguaaaagcuguau

SEQ ID NO: 1168372 - RNA, 19 nt, Artificial Sequence
  Description of Artificial Sequence: Synthetic oligonucleotide
ugcuuguguacuuacuaaa

SEQ ID NO: 1168373 - RNA, 19 nt, Artificial Sequence
  Description of Artificial Sequence: Synthetic oligonucleotide
gguacuuuugaauuuacua

SEQ ID NO: 1168374 - RNA, 19 nt, Artificial Sequence
  Description of Artificial Sequence: Synthetic oligonucleotide
accuacauuucccaaaguu

SEQ ID NO: 1168375 - RNA, 19 nt, Artificial Sequence
  Description of Artificial Sequence: Synthetic oligonucleotide
uuaauuuacuacggcagau

SEQ ID NO: 1168376 - RNA, 19 nt, Artificial Sequence
  Description of Artificial Sequence: Synthetic oligonucleotide
uauuuagaauccagugaaa

SEQ ID NO: 1168377 - RNA, 19 nt, Artificial Sequence
  Description of Artificial Sequence: Synthetic oligonucleotide
aagacaagggguacuuuug

SEQ ID NO: 1168378 - RNA, 19 nt, Artificial Sequence
  Description of Artificial Sequence: Synthetic oligonucleotide
guacaaucaucuuuauuga

SEQ ID NO: 1168379 - RNA, 19 nt, Artificial Sequence
  Description of Artificial Sequence: Synthetic oligonucleotide
gaagcauagcaacgaggag

SEQ ID NO: 1168380 - RNA, 19 nt, Artificial Sequence
  Description of Artificial Sequence: Synthetic oligonucleotide
guagcuaucuucuuugcua

SEQ ID NO: 1168381 - RNA, 19 nt, Artificial Sequence
  Description of Artificial Sequence: Synthetic oligonucleotide
uguguuccuacaccccuug

SEQ ID NO: 1168382 - RNA, 19 nt, Artificial Sequence
  Description of Artificial Sequence: Synthetic oligonucleotide
uauuucacucuugucaaau

SEQ ID NO: 1168383 - RNA, 19 nt, Artificial Sequence
  Description of Artificial Sequence: Synthetic oligonucleotide
aauccccaauauuuaugga

SEQ ID NO: 1168384 - RNA, 19 nt, Artificial Sequence
  Description of Artificial Sequence: Synthetic oligonucleotide
gaaaacaacgaaaugcuau

SEQ ID NO: 1168385 - RNA, 19 nt, Artificial Sequence
  Description of Artificial Sequence: Synthetic oligonucleotide
auauaaaauggcagcuauc

SEQ ID NO: 1168386 - RNA, 19 nt, Artificial Sequence
  Description of Artificial Sequence: Synthetic oligonucleotide
agaggccuagcucugagaa

SEQ ID NO: 1168387 - RNA, 19 nt, Artificial Sequence
  Description of Artificial Sequence: Synthetic oligonucleotide
guacuuacuaaaugugaca

SEQ ID NO: 1168388 - RNA, 19 nt, Artificial Sequence
  Description of Artificial Sequence: Synthetic oligonucleotide
ucuugucaaauaccuuaac

SEQ ID NO: 1168389 - RNA, 19 nt, Artificial Sequence
  Description of Artificial Sequence: Synthetic oligonucleotide
uuauuacauuguaaaccaa

SEQ ID NO: 1168390 - RNA, 19 nt, Artificial Sequence
  Description of Artificial Sequence: Synthetic oligonucleotide
augcuuuaugguaauguag

SEQ ID NO: 1168391 - RNA, 19 nt, Artificial Sequence
  Description of Artificial Sequence: Synthetic oligonucleotide
gcuuuaauuuacuacggca

SEQ ID NO: 1168392 - RNA, 19 nt, Artificial Sequence
  Description of Artificial Sequence: Synthetic oligonucleotide
augauucuuaggcuguuau

SEQ ID NO: 1168393 - RNA, 19 nt, Artificial Sequence
  Description of Artificial Sequence: Synthetic oligonucleotide
uuuauggacuuugucacuu

SEQ ID NO: 1168394 - RNA, 19 nt, Artificial Sequence
  Description of Artificial Sequence: Synthetic oligonucleotide
gcugauuaaauuaaaaugu

SEQ ID NO: 1168395 - RNA, 19 nt, Artificial Sequence
  Description of Artificial Sequence: Synthetic oligonucleotide
augcuuuaauuuacuacgg

SEQ ID NO: 1168396 - RNA, 19 nt, Artificial Sequence
  Description of Artificial Sequence: Synthetic oligonucleotide
aagaucuuauaggacccca

SEQ ID NO: 1168397 - RNA, 19 nt, Artificial Sequence
  Description of Artificial Sequence: Synthetic oligonucleotide
aaccaugaauccaauuggu

SEQ ID NO: 1168398 - RNA, 19 nt, Artificial Sequence
  Description of Artificial Sequence: Synthetic oligonucleotide
accaagcuacaucauuuug

SEQ ID NO: 1168399 - RNA, 19 nt, Artificial Sequence
  Description of Artificial Sequence: Synthetic oligonucleotide
auccaauuggucugaaaau

SEQ ID NO: 1168400 - RNA, 19 nt, Artificial Sequence
  Description of Artificial Sequence: Synthetic oligonucleotide
uuggucugaaaauacucuu

SEQ ID NO: 1168401 - RNA, 19 nt, Artificial Sequence
  Description of Artificial Sequence: Synthetic oligonucleotide
auuuauggacuuugucacu

SEQ ID NO: 1168402 - RNA, 19 nt, Artificial Sequence
  Description of Artificial Sequence: Synthetic oligonucleotide
caacuuaauaagagacaac

SEQ ID NO: 1168403 - RNA, 19 nt, Artificial Sequence
  Description of Artificial Sequence: Synthetic oligonucleotide
aagggguacuuuugaauuu

SEQ ID NO: 1168404 - RNA, 19 nt, Artificial Sequence
  Description of Artificial Sequence: Synthetic oligonucleotide
agcucugagaagauucggg

SEQ ID NO: 1168405 - RNA, 19 nt, Artificial Sequence
  Description of Artificial Sequence: Synthetic oligonucleotide
gcugccagcacacaucugc

SEQ ID NO: 1168406 - RNA, 19 nt, Artificial Sequence
  Description of Artificial Sequence: Synthetic oligonucleotide
agcaacaguugaaaagauc

SEQ ID NO: 1168407 - RNA, 19 nt, Artificial Sequence
  Description of Artificial Sequence: Synthetic oligonucleotide
guuuguaacauggcaauaa

SEQ ID NO: 1168408 - RNA, 19 nt, Artificial Sequence
  Description of Artificial Sequence: Synthetic oligonucleotide
uauaaccaugaauccaauu

SEQ ID NO: 1168409 - RNA, 19 nt, Artificial Sequence
  Description of Artificial Sequence: Synthetic oligonucleotide
gguacuaaaugcugguuuc

SEQ ID NO: 1168410 - RNA, 19 nt, Artificial Sequence
  Description of Artificial Sequence: Synthetic oligonucleotide
gacuuauuaauuaaugguu

SEQ ID NO: 1168411 - RNA, 19 nt, Artificial Sequence
  Description of Artificial Sequence: Synthetic oligonucleotide
gaucuuauaggaccccaaa

SEQ ID NO: 1168412 - RNA, 19 nt, Artificial Sequence
  Description of Artificial Sequence: Synthetic oligonucleotide
auacaaaacucaagauauc

SEQ ID NO: 1168413 - RNA, 19 nt, Artificial Sequence
  Description of Artificial Sequence: Synthetic oligonucleotide
auaucccauuuacugccag

SEQ ID NO: 1168414 - RNA, 19 nt, Artificial Sequence
  Description of Artificial Sequence: Synthetic oligonucleotide
aggccuagcucugagaaga

SEQ ID NO: 1168415 - RNA, 19 nt, Artificial Sequence
  Description of Artificial Sequence: Synthetic oligonucleotide
aacccuaaauuuacuuugu

SEQ ID NO: 1168416 - RNA, 19 nt, Artificial Sequence
  Description of Artificial Sequence: Synthetic oligonucleotide
uaauuuacuacggcagaua

SEQ ID NO: 1168417 - RNA, 19 nt, Artificial Sequence
  Description of Artificial Sequence: Synthetic oligonucleotide
acgaaaugcuauagaaaag

SEQ ID NO: 1168418 - RNA, 19 nt, Artificial Sequence
  Description of Artificial Sequence: Synthetic oligonucleotide
ggaagcauagcaacgagga

SEQ ID NO: 1168419 - RNA, 19 nt, Artificial Sequence
  Description of Artificial Sequence: Synthetic oligonucleotide
aacuuggcuugcuugugua

SEQ ID NO: 1168420 - RNA, 19 nt, Artificial Sequence
  Description of Artificial Sequence: Synthetic oligonucleotide
ccuagcucugagaagauuc

SEQ ID NO: 1168421 - RNA, 19 nt, Artificial Sequence
  Description of Artificial Sequence: Synthetic oligonucleotide
uugagauggaauguuugua

SEQ ID NO: 1168422 - RNA, 19 nt, Artificial Sequence
  Description of Artificial Sequence: Synthetic oligonucleotide
aucauaugcugguacuaaa

SEQ ID NO: 1168423 - RNA, 19 nt, Artificial Sequence
  Description of Artificial Sequence: Synthetic oligonucleotide
aacuuuucuuuuauaccaa

SEQ ID NO: 1168424 - RNA, 19 nt, Artificial Sequence
  Description of Artificial Sequence: Synthetic oligonucleotide
uagcucugagaagauucgg

SEQ ID NO: 1168425 - RNA, 19 nt, Artificial Sequence
  Description of Artificial Sequence: Synthetic oligonucleotide
aucccaugauucuuaggcu

SEQ ID NO: 1168426 - RNA, 19 nt, Artificial Sequence
  Description of Artificial Sequence: Synthetic oligonucleotide
cacuaucaaaaucccauga

SEQ ID NO: 1168427 - RNA, 19 nt, Artificial Sequence
  Description of Artificial Sequence: Synthetic oligonucleotide
gugacuaacuacauaugga

SEQ ID NO: 1168428 - RNA, 19 nt, Artificial Sequence
  Description of Artificial Sequence: Synthetic oligonucleotide
agugagcaugcagacuaac

SEQ ID NO: 1168429 - RNA, 19 nt, Artificial Sequence
  Description of Artificial Sequence: Synthetic oligonucleotide
cugugacuaacuacauaug

SEQ ID NO: 1168430 - RNA, 19 nt, Artificial Sequence
  Description of Artificial Sequence: Synthetic oligonucleotide
auaaaauggcagcuaucuu

SEQ ID NO: 1168431 - RNA, 19 nt, Artificial Sequence
  Description of Artificial Sequence: Synthetic oligonucleotide
uuacugccagugagcaugc

SEQ ID NO: 1168432 - RNA, 19 nt, Artificial Sequence
  Description of Artificial Sequence: Synthetic oligonucleotide
gagggaaacuagguucuag

SEQ ID NO: 1168433 - RNA, 19 nt, Artificial Sequence
  Description of Artificial Sequence: Synthetic oligonucleotide
acuaaaugcugguuucauu

SEQ ID NO: 1168434 - RNA, 19 nt, Artificial Sequence
  Description of Artificial Sequence: Synthetic oligonucleotide
uguuuaccuuuguaugaaa

SEQ ID NO: 1168435 - RNA, 19 nt, Artificial Sequence
  Description of Artificial Sequence: Synthetic oligonucleotide
ucccauuuacugccaguga

SEQ ID NO: 1168436 - RNA, 19 nt, Artificial Sequence
  Description of Artificial Sequence: Synthetic oligonucleotide
uagacaugguauacucaaa

SEQ ID NO: 1168437 - RNA, 19 nt, Artificial Sequence
  Description of Artificial Sequence: Synthetic oligonucleotide
gcuaucaauacacauacau

SEQ ID NO: 1168438 - RNA, 19 nt, Artificial Sequence
  Description of Artificial Sequence: Synthetic oligonucleotide
auguagguaaguuguucau

SEQ ID NO: 1168439 - RNA, 19 nt, Artificial Sequence
  Description of Artificial Sequence: Synthetic oligonucleotide
uuauaccaagcuacaucau

SEQ ID NO: 1168440 - RNA, 19 nt, Artificial Sequence
  Description of Artificial Sequence: Synthetic oligonucleotide
augcagacuaacaauacuu

SEQ ID NO: 1168441 - RNA, 19 nt, Artificial Sequence
  Description of Artificial Sequence: Synthetic oligonucleotide
auagaagacaagggguacu

SEQ ID NO: 1168442 - RNA, 19 nt, Artificial Sequence
  Description of Artificial Sequence: Synthetic oligonucleotide
uuaugguaauguagcuauc

SEQ ID NO: 1168443 - RNA, 19 nt, Artificial Sequence
  Description of Artificial Sequence: Synthetic oligonucleotide
ucccaguggacaccuguga

SEQ ID NO: 1168444 - RNA, 19 nt, Artificial Sequence
  Description of Artificial Sequence: Synthetic oligonucleotide
caucauuagacaugguaua

SEQ ID NO: 1168445 - RNA, 19 nt, Artificial Sequence
  Description of Artificial Sequence: Synthetic oligonucleotide
uguaacaguagugguuuua

SEQ ID NO: 1168446 - RNA, 19 nt, Artificial Sequence
  Description of Artificial Sequence: Synthetic oligonucleotide
uuccuacaccccuugaauu

SEQ ID NO: 1168447 - RNA, 19 nt, Artificial Sequence
  Description of Artificial Sequence: Synthetic oligonucleotide
aaaauguagguaaguuguu

SEQ ID NO: 1168448 - RNA, 19 nt, Artificial Sequence
  Description of Artificial Sequence: Synthetic oligonucleotide
auuuucuagcugauuaaau

SEQ ID NO: 1168449 - RNA, 19 nt, Artificial Sequence
  Description of Artificial Sequence: Synthetic oligonucleotide
acaugcuacuuuauuagaa

SEQ ID NO: 1168450 - RNA, 19 nt, Artificial Sequence
  Description of Artificial Sequence: Synthetic oligonucleotide
aaccuacauuucccaaagu

SEQ ID NO: 1168451 - RNA, 19 nt, Artificial Sequence
  Description of Artificial Sequence: Synthetic oligonucleotide
acaaaacucaagauaucau

SEQ ID NO: 1168452 - RNA, 19 nt, Artificial Sequence
  Description of Artificial Sequence: Synthetic oligonucleotide
acuuugcaaugcuuuaauu

SEQ ID NO: 1168453 - RNA, 19 nt, Artificial Sequence
  Description of Artificial Sequence: Synthetic oligonucleotide
caugcuuuaugguaaugua

SEQ ID NO: 1168454 - RNA, 19 nt, Artificial Sequence
  Description of Artificial Sequence: Synthetic oligonucleotide
cuuauuaauuaaugguuau

SEQ ID NO: 1168455 - RNA, 19 nt, Artificial Sequence
  Description of Artificial Sequence: Synthetic oligonucleotide
gaucauaugcugguacuaa

SEQ ID NO: 1168456 - RNA, 19 nt, Artificial Sequence
  Description of Artificial Sequence: Synthetic oligonucleotide
cauuuacugccagugagca

SEQ ID NO: 1168457 - RNA, 19 nt, Artificial Sequence
  Description of Artificial Sequence: Synthetic oligonucleotide
acuaaaugugacauagcua

SEQ ID NO: 1168458 - RNA, 19 nt, Artificial Sequence
  Description of Artificial Sequence: Synthetic oligonucleotide
gaagacaagggguacuuuu

SEQ ID NO: 1168459 - RNA, 19 nt, Artificial Sequence
  Description of Artificial Sequence: Synthetic oligonucleotide
augguauacucaaauggaa

SEQ ID NO: 1168460 - RNA, 19 nt, Artificial Sequence
  Description of Artificial Sequence: Synthetic oligonucleotide
gacuaacuacauauggaaa

SEQ ID NO: 1168461 - RNA, 19 nt, Artificial Sequence
  Description of Artificial Sequence: Synthetic oligonucleotide
guuuaccuuuguaugaaaa

SEQ ID NO: 1168462 - RNA, 19 nt, Artificial Sequence
  Description of Artificial Sequence: Synthetic oligonucleotide
uacuaaaugcugguuucau

SEQ ID NO: 1168463 - RNA, 19 nt, Artificial Sequence
  Description of Artificial Sequence: Synthetic oligonucleotide
aguugcacauggaucauau

SEQ ID NO: 1168464 - RNA, 19 nt, Artificial Sequence
  Description of Artificial Sequence: Synthetic oligonucleotide
ugccagugagcaugcagac

SEQ ID NO: 1168465 - RNA, 19 nt, Artificial Sequence
  Description of Artificial Sequence: Synthetic oligonucleotide
caaggauuaguugcacaug

SEQ ID NO: 1168466 - RNA, 19 nt, Artificial Sequence
  Description of Artificial Sequence: Synthetic oligonucleotide
aagauaucauuaacagaua

SEQ ID NO: 1168467 - RNA, 19 nt, Artificial Sequence
  Description of Artificial Sequence: Synthetic oligonucleotide
cuuaaccuacauuucccaa

SEQ ID NO: 1168468 - RNA, 19 nt, Artificial Sequence
  Description of Artificial Sequence: Synthetic oligonucleotide
acacaucuaaaacccuaaa

SEQ ID NO: 1168469 - RNA, 19 nt, Artificial Sequence
  Description of Artificial Sequence: Synthetic oligonucleotide
uggacaccugugacuaacu

SEQ ID NO: 1168470 - RNA, 19 nt, Artificial Sequence
  Description of Artificial Sequence: Synthetic oligonucleotide
ccauuuacugccagugagc

SEQ ID NO: 1168471 - RNA, 19 nt, Artificial Sequence
  Description of Artificial Sequence: Synthetic oligonucleotide
auacacaucuaaaacccua

SEQ ID NO: 1168472 - RNA, 19 nt, Artificial Sequence
  Description of Artificial Sequence: Synthetic oligonucleotide
agguauuauuacauuguaa

SEQ ID NO: 1168473 - RNA, 19 nt, Artificial Sequence
  Description of Artificial Sequence: Synthetic oligonucleotide
aucaauacacauacaucau

SEQ ID NO: 1168474 - RNA, 19 nt, Artificial Sequence
  Description of Artificial Sequence: Synthetic oligonucleotide
cuguuguuuaccuuuguau

SEQ ID NO: 1168475 - RNA, 19 nt, Artificial Sequence
  Description of Artificial Sequence: Synthetic oligonucleotide
auuuacuacggcagauaca

SEQ ID NO: 1168476 - RNA, 19 nt, Artificial Sequence
  Description of Artificial Sequence: Synthetic oligonucleotide
uuagugcauguggccaucc

SEQ ID NO: 1168477 - RNA, 19 nt, Artificial Sequence
  Description of Artificial Sequence: Synthetic oligonucleotide
uucgggccaaggauuaguu

SEQ ID NO: 1168478 - RNA, 19 nt, Artificial Sequence
  Description of Artificial Sequence: Synthetic oligonucleotide
aagcuacaugaauuuucua

SEQ ID NO: 1168479 - RNA, 19 nt, Artificial Sequence
  Description of Artificial Sequence: Synthetic oligonucleotide
uguuuguaacauggcaaua

SEQ ID NO: 1168480 - RNA, 19 nt, Artificial Sequence
  Description of Artificial Sequence: Synthetic oligonucleotide
ccaagcuacaucauuuuga

SEQ ID NO: 1168481 - RNA, 19 nt, Artificial Sequence
  Description of Artificial Sequence: Synthetic oligonucleotide
agaagucuugagauggaau

SEQ ID NO: 1168482 - RNA, 19 nt, Artificial Sequence
  Description of Artificial Sequence: Synthetic oligonucleotide
uuauggacuuugucacuua

SEQ ID NO: 1168483 - RNA, 19 nt, Artificial Sequence
  Description of Artificial Sequence: Synthetic oligonucleotide
uuacacuguuguuuaccuu

SEQ ID NO: 1168484 - RNA, 19 nt, Artificial Sequence
  Description of Artificial Sequence: Synthetic oligonucleotide
cuuuaugguaauguagcua

SEQ ID NO: 1168485 - RNA, 19 nt, Artificial Sequence
  Description of Artificial Sequence: Synthetic oligonucleotide
aaagagcacuggacccagg

SEQ ID NO: 1168486 - RNA, 19 nt, Artificial Sequence
  Description of Artificial Sequence: Synthetic oligonucleotide
gcuguuauguaguuauuua

SEQ ID NO: 1168487 - RNA, 19 nt, Artificial Sequence
  Description of Artificial Sequence: Synthetic oligonucleotide
auguaguuauuuacaugcu

SEQ ID NO: 1168488 - RNA, 19 nt, Artificial Sequence
  Description of Artificial Sequence: Synthetic oligonucleotide
uuaggcuguuauguaguua

SEQ ID NO: 1168489 - RNA, 19 nt, Artificial Sequence
  Description of Artificial Sequence: Synthetic oligonucleotide
ggcuacaugcuuuauggua

SEQ ID NO: 1168490 - RNA, 19 nt, Artificial Sequence
  Description of Artificial Sequence: Synthetic oligonucleotide
acucuuguacaaucaucuu

SEQ ID NO: 1168491 - RNA, 19 nt, Artificial Sequence
  Description of Artificial Sequence: Synthetic oligonucleotide
auucgggccaaggauuagu

SEQ ID NO: 1168492 - RNA, 19 nt, Artificial Sequence
  Description of Artificial Sequence: Synthetic oligonucleotide
caugucauaaugcacucuu

SEQ ID NO: 1168493 - RNA, 19 nt, Artificial Sequence
  Description of Artificial Sequence: Synthetic oligonucleotide
ggucugaaaauacucuugu

SEQ ID NO: 1168494 - RNA, 19 nt, Artificial Sequence
  Description of Artificial Sequence: Synthetic oligonucleotide
gcuacaugcuuuaugguaa

SEQ ID NO: 1168495 - RNA, 19 nt, Artificial Sequence
  Description of Artificial Sequence: Synthetic oligonucleotide
guggacaccugugacuaac

SEQ ID NO: 1168496 - RNA, 19 nt, Artificial Sequence
  Description of Artificial Sequence: Synthetic oligonucleotide
ccugugacuaacuacauau

SEQ ID NO: 1168497 - RNA, 19 nt, Artificial Sequence
  Description of Artificial Sequence: Synthetic oligonucleotide
gaccccaaaccaauauauc

SEQ ID NO: 1168498 - RNA, 19 nt, Artificial Sequence
  Description of Artificial Sequence: Synthetic oligonucleotide
gcagacuaacaauacuuaa

SEQ ID NO: 1168499 - RNA, 19 nt, Artificial Sequence
  Description of Artificial Sequence: Synthetic oligonucleotide
gugagcaugcagacuaaca

SEQ ID NO: 1168500 - RNA, 19 nt, Artificial Sequence
  Description of Artificial Sequence: Synthetic oligonucleotide
acccuguaaacugcauuug

SEQ ID NO: 1168501 - RNA, 19 nt, Artificial Sequence
  Description of Artificial Sequence: Synthetic oligonucleotide
acccuaaauuuacuuugua

SEQ ID NO: 1168502 - RNA, 19 nt, Artificial Sequence
  Description of Artificial Sequence: Synthetic oligonucleotide
cacaucuaaaacccuaaau

SEQ ID NO: 1168503 - RNA, 19 nt, Artificial Sequence
  Description of Artificial Sequence: Synthetic oligonucleotide
cuacaccccuugaauucug

SEQ ID NO: 1168504 - RNA, 19 nt, Artificial Sequence
  Description of Artificial Sequence: Synthetic oligonucleotide
gauucgggccaaggauuag

SEQ ID NO: 1168505 - RNA, 19 nt, Artificial Sequence
  Description of Artificial Sequence: Synthetic oligonucleotide
guuccuacaccccuugaau

SEQ ID NO: 1168506 - RNA, 19 nt, Artificial Sequence
  Description of Artificial Sequence: Synthetic oligonucleotide
uuaguugcacauggaucau

SEQ ID NO: 1168507 - RNA, 19 nt, Artificial Sequence
  Description of Artificial Sequence: Synthetic oligonucleotide
cgaaaugcuauagaaaaga

SEQ ID NO: 1168508 - RNA, 19 nt, Artificial Sequence
  Description of Artificial Sequence: Synthetic oligonucleotide
accugugacuaacuacaua

SEQ ID NO: 1168509 - RNA, 19 nt, Artificial Sequence
  Description of Artificial Sequence: Synthetic oligonucleotide
cucuuguacaaucaucuuu

SEQ ID NO: 1168510 - RNA, 19 nt, Artificial Sequence
  Description of Artificial Sequence: Synthetic oligonucleotide
cuacggcagauacaaaacu

SEQ ID NO: 1168511 - RNA, 19 nt, Artificial Sequence
  Description of Artificial Sequence: Synthetic oligonucleotide
cauucuuauugcaaauguu

SEQ ID NO: 1168512 - RNA, 19 nt, Artificial Sequence
  Description of Artificial Sequence: Synthetic oligonucleotide
cccuaaauuuacuuuguaa

SEQ ID NO: 1168513 - RNA, 19 nt, Artificial Sequence
  Description of Artificial Sequence: Synthetic oligonucleotide
auauaaccaugaauccaau

SEQ ID NO: 1168514 - RNA, 19 nt, Artificial Sequence
  Description of Artificial Sequence: Synthetic oligonucleotide
cugcugguuggggugcagg

SEQ ID NO: 1168515 - RNA, 19 nt, Artificial Sequence
  Description of Artificial Sequence: Synthetic oligonucleotide
gcaggaagcauagcaacga

SEQ ID NO: 1168516 - RNA, 19 nt, Artificial Sequence
  Description of Artificial Sequence: Synthetic oligonucleotide
aagacccuguaaacugcau

SEQ ID NO: 1168517 - RNA, 19 nt, Artificial Sequence
  Description of Artificial Sequence: Synthetic oligonucleotide
uaguugcacauggaucaua

SEQ ID NO: 1168518 - RNA, 19 nt, Artificial Sequence
  Description of Artificial Sequence: Synthetic oligonucleotide
agauucgggccaaggauua

SEQ ID NO: 1168519 - RNA, 19 nt, Artificial Sequence
  Description of Artificial Sequence: Synthetic oligonucleotide
gcaacgaggagaggccuag

SEQ ID NO: 1168520 - RNA, 19 nt, Artificial Sequence
  Description of Artificial Sequence: Synthetic oligonucleotide
gcuuuaugguaauguagcu

SEQ ID NO: 1168521 - RNA, 19 nt, Artificial Sequence
  Description of Artificial Sequence: Synthetic oligonucleotide
aguggacaccugugacuaa

SEQ ID NO: 1168522 - RNA, 19 nt, Artificial Sequence
  Description of Artificial Sequence: Synthetic oligonucleotide
ccaaggauuaguugcacau

SEQ ID NO: 1168523 - RNA, 19 nt, Artificial Sequence
  Description of Artificial Sequence: Synthetic oligonucleotide
auauggcuacaugcuuuau

SEQ ID NO: 1168524 - RNA, 19 nt, Artificial Sequence
  Description of Artificial Sequence: Synthetic oligonucleotide
caguagugguuuuacuuuu

SEQ ID NO: 1168525 - RNA, 19 nt, Artificial Sequence
  Description of Artificial Sequence: Synthetic oligonucleotide
cuuguacaaucaucuuuau

SEQ ID NO: 1168526 - RNA, 19 nt, Artificial Sequence
  Description of Artificial Sequence: Synthetic oligonucleotide
ggaccccaaaccaauauau

SEQ ID NO: 1168527 - RNA, 19 nt, Artificial Sequence
  Description of Artificial Sequence: Synthetic oligonucleotide
guguuccuacaccccuuga

SEQ ID NO: 1168528 - RNA, 19 nt, Artificial Sequence
  Description of Artificial Sequence: Synthetic oligonucleotide
cuacaugcuuuaugguaau

SEQ ID NO: 1168529 - RNA, 19 nt, Artificial Sequence
  Description of Artificial Sequence: Synthetic oligonucleotide
caugauucuuaggcuguua

SEQ ID NO: 1168530 - RNA, 19 nt, Artificial Sequence
  Description of Artificial Sequence: Synthetic oligonucleotide
ggacaccugugacuaacua

SEQ ID NO: 1168531 - RNA, 19 nt, Artificial Sequence
  Description of Artificial Sequence: Synthetic oligonucleotide
gggccaaggauuaguugca

SEQ ID NO: 1168532 - RNA, 19 nt, Artificial Sequence
  Description of Artificial Sequence: Synthetic oligonucleotide
agcaacgaggagaggccua

SEQ ID NO: 1168533 - RNA, 19 nt, Artificial Sequence
  Description of Artificial Sequence: Synthetic oligonucleotide
ggcuguuauguaguuauuu

SEQ ID NO: 1168534 - RNA, 19 nt, Artificial Sequence
  Description of Artificial Sequence: Synthetic oligonucleotide
ggccaaggauuaguugcac

SEQ ID NO: 1168535 - RNA, 19 nt, Artificial Sequence
  Description of Artificial Sequence: Synthetic oligonucleotide
gguucuagcaggggugggu

SEQ ID NO: 1168536 - RNA, 19 nt, Artificial Sequence
  Description of Artificial Sequence: Synthetic oligonucleotide
gcauagcaacgaggagagg

SEQ ID NO: 1168537 - RNA, 19 nt, Artificial Sequence
  Description of Artificial Sequence: Synthetic oligonucleotide
aggcuguuauguaguuauu

SEQ ID NO: 1168538 - RNA, 19 nt, Artificial Sequence
  Description of Artificial Sequence: Synthetic oligonucleotide
cggcagauacaaaacucaa

SEQ ID NO: 1168539 - RNA, 19 nt, Artificial Sequence
  Description of Artificial Sequence: Synthetic oligonucleotide
ccuacaccccuugaauucu

SEQ ID NO: 1168540 - RNA, 19 nt, Artificial Sequence
  Description of Artificial Sequence: Synthetic oligonucleotide
ccaucccaguggacaccug

SEQ ID NO: 1168541 - RNA, 19 nt, Artificial Sequence
  Description of Artificial Sequence: Synthetic oligonucleotide
ccccaauauuuauggacuu

SEQ ID NO: 1168542 - RNA, 19 nt, Artificial Sequence
  Description of Artificial Sequence: Synthetic oligonucleotide
cacuggacccaggacuguu

SEQ ID NO: 1168543 - RNA, 19 nt, Artificial Sequence
  Description of Artificial Sequence: Synthetic oligonucleotide
gccuagcucugagaagauu

SEQ ID NO: 1168544 - RNA, 19 nt, Artificial Sequence
  Description of Artificial Sequence: Synthetic oligonucleotide
ggccuagcucugagaagau

SEQ ID NO: 1168545 - RNA, 19 nt, Artificial Sequence
  Description of Artificial Sequence: Synthetic oligonucleotide
gcacuggacccaggacugu

SEQ ID NO: 1168546 - RNA, 19 nt, Artificial Sequence
  Description of Artificial Sequence: Synthetic oligonucleotide
aauguauagcgcuucagcc

SEQ ID NO: 1168547 - RNA, 19 nt, Artificial Sequence
  Description of Artificial Sequence: Synthetic oligonucleotide
aauuguguaacccuuugcg

SEQ ID NO: 1168548 - RNA, 19 nt, Artificial Sequence
  Description of Artificial Sequence: Synthetic oligonucleotide
uuuagaaccaccaugcugu

SEQ ID NO: 1168549 - RNA, 19 nt, Artificial Sequence
  Description of Artificial Sequence: Synthetic oligonucleotide
aaaacuccuuaucagguac

SEQ ID NO: 1168550 - RNA, 19 nt, Artificial Sequence
  Description of Artificial Sequence: Synthetic oligonucleotide
uuuauccaaaccaaaagga

SEQ ID NO: 1168551 - RNA, 19 nt, Artificial Sequence
  Description of Artificial Sequence: Synthetic oligonucleotide
ucuaccauccgaauaaccc

SEQ ID NO: 1168552 - RNA, 19 nt, Artificial Sequence
  Description of Artificial Sequence: Synthetic oligonucleotide
uuauuaaucuugaaucuug

SEQ ID NO: 1168553 - RNA, 19 nt, Artificial Sequence
  Description of Artificial Sequence: Synthetic oligonucleotide
aauccagccuuuccgauac

SEQ ID NO: 1168554 - RNA, 19 nt, Artificial Sequence
  Description of Artificial Sequence: Synthetic oligonucleotide
uuuaacaagaggccuaucu

SEQ ID NO: 1168555 - RNA, 19 nt, Artificial Sequence
  Description of Artificial Sequence: Synthetic oligonucleotide
aagugcgaggauuaggcac

SEQ ID NO: 1168556 - RNA, 19 nt, Artificial Sequence
  Description of Artificial Sequence: Synthetic oligonucleotide
uauuaaucuugaaucuugg

SEQ ID NO: 1168557 - RNA, 19 nt, Artificial Sequence
  Description of Artificial Sequence: Synthetic oligonucleotide
acaaucgaggaauccagcc

SEQ ID NO: 1168558 - RNA, 19 nt, Artificial Sequence
  Description of Artificial Sequence: Synthetic oligonucleotide
accauacauaucuuugucc

SEQ ID NO: 1168559 - RNA, 19 nt, Artificial Sequence
  Description of Artificial Sequence: Synthetic oligonucleotide
uuuuagaaccaccaugcug

SEQ ID NO: 1168560 - RNA, 19 nt, Artificial Sequence
  Description of Artificial Sequence: Synthetic oligonucleotide
auuaaucuugaaucuuggc

SEQ ID NO: 1168561 - RNA, 19 nt, Artificial Sequence
  Description of Artificial Sequence: Synthetic oligonucleotide
uguauagcgcuucagccag

SEQ ID NO: 1168562 - RNA, 19 nt, Artificial Sequence
  Description of Artificial Sequence: Synthetic oligonucleotide
gucaugacggauuucaucc

SEQ ID NO: 1168563 - RNA, 19 nt, Artificial Sequence
  Description of Artificial Sequence: Synthetic oligonucleotide
uucaaguugguccugagau

SEQ ID NO: 1168564 - RNA, 19 nt, Artificial Sequence
  Description of Artificial Sequence: Synthetic oligonucleotide
ucuuauuaaucuugaaucu

SEQ ID NO: 1168565 - RNA, 19 nt, Artificial Sequence
  Description of Artificial Sequence: Synthetic oligonucleotide
aaaccuguuggucuuuauc

SEQ ID NO: 1168566 - RNA, 19 nt, Artificial Sequence
  Description of Artificial Sequence: Synthetic oligonucleotide
cuccuuaucagguacaaac

SEQ ID NO: 1168567 - RNA, 19 nt, Artificial Sequence
  Description of Artificial Sequence: Synthetic oligonucleotide
uuuucguuuauguguacag

SEQ ID NO: 1168568 - RNA, 19 nt, Artificial Sequence
  Description of Artificial Sequence: Synthetic oligonucleotide
aauccucuaacaaucgagg

SEQ ID NO: 1168569 - RNA, 19 nt, Artificial Sequence
  Description of Artificial Sequence: Synthetic oligonucleotide
uugagccauaucuuuaccg

SEQ ID NO: 1168570 - RNA, 19 nt, Artificial Sequence
  Description of Artificial Sequence: Synthetic oligonucleotide
uuaauuuucccuucagggu

SEQ ID NO: 1168571 - RNA, 19 nt, Artificial Sequence
  Description of Artificial Sequence: Synthetic oligonucleotide
auuucuaccauccgaauaa

SEQ ID NO: 1168572 - RNA, 19 nt, Artificial Sequence
  Description of Artificial Sequence: Synthetic oligonucleotide
aaugcauuacaggugcagg

SEQ ID NO: 1168573 - RNA, 19 nt, Artificial Sequence
  Description of Artificial Sequence: Synthetic oligonucleotide
auaucuuuaccgccucucc

SEQ ID NO: 1168574 - RNA, 19 nt, Artificial Sequence
  Description of Artificial Sequence: Synthetic oligonucleotide
aaggaucuuccucaaacug

SEQ ID NO: 1168575 - RNA, 19 nt, Artificial Sequence
  Description of Artificial Sequence: Synthetic oligonucleotide
aaugcuacuccuugcugag

SEQ ID NO: 1168576 - RNA, 19 nt, Artificial Sequence
  Description of Artificial Sequence: Synthetic oligonucleotide
uacugaacuucauuggaag

SEQ ID NO: 1168577 - RNA, 19 nt, Artificial Sequence
  Description of Artificial Sequence: Synthetic oligonucleotide
uuagcuccagaguugaaug

SEQ ID NO: 1168578 - RNA, 19 nt, Artificial Sequence
  Description of Artificial Sequence: Synthetic oligonucleotide
ugagauaguugugugggcg

SEQ ID NO: 1168579 - RNA, 19 nt, Artificial Sequence
  Description of Artificial Sequence: Synthetic oligonucleotide
uaacccucuguuuagcucc

SEQ ID NO: 1168580 - RNA, 19 nt, Artificial Sequence
  Description of Artificial Sequence: Synthetic oligonucleotide
ugagccauaucuuuaccgc

SEQ ID NO: 1168581 - RNA, 19 nt, Artificial Sequence
  Description of Artificial Sequence: Synthetic oligonucleotide
aucguauuuaauuuucccu

SEQ ID NO: 1168582 - RNA, 19 nt, Artificial Sequence
  Description of Artificial Sequence: Synthetic oligonucleotide
ccuguagauacuuugagcc

SEQ ID NO: 1168583 - RNA, 19 nt, Artificial Sequence
  Description of Artificial Sequence: Synthetic oligonucleotide
gaggauuaggcacaccaag

SEQ ID NO: 1168584 - RNA, 19 nt, Artificial Sequence
  Description of Artificial Sequence: Synthetic oligonucleotide
uuuauccagaggaauugug

SEQ ID NO: 1168585 - RNA, 19 nt, Artificial Sequence
  Description of Artificial Sequence: Synthetic oligonucleotide
aauuuucguuuauguguac

SEQ ID NO: 1168586 - RNA, 19 nt, Artificial Sequence
  Description of Artificial Sequence: Synthetic oligonucleotide
uuaauagccucuucaucag

SEQ ID NO: 1168587 - RNA, 19 nt, Artificial Sequence
  Description of Artificial Sequence: Synthetic oligonucleotide
uguguagcggauauacuga

SEQ ID NO: 1168588 - RNA, 19 nt, Artificial Sequence
  Description of Artificial Sequence: Synthetic oligonucleotide
uaacaagaggccuaucuac

SEQ ID NO: 1168589 - RNA, 19 nt, Artificial Sequence
  Description of Artificial Sequence: Synthetic oligonucleotide
uuuccgccugucaugacgg

SEQ ID NO: 1168590 - RNA, 19 nt, Artificial Sequence
  Description of Artificial Sequence: Synthetic oligonucleotide
uccuuaucagguacaaacc

SEQ ID NO: 1168591 - RNA, 19 nt, Artificial Sequence
  Description of Artificial Sequence: Synthetic oligonucleotide
aaauuuauccaaaccaaaa

SEQ ID NO: 1168592 - RNA, 19 nt, Artificial Sequence
  Description of Artificial Sequence: Synthetic oligonucleotide
aaaauccucuaacaaucga

SEQ ID NO: 1168593 - RNA, 19 nt, Artificial Sequence
  Description of Artificial Sequence: Synthetic oligonucleotide
auugcaucguauuuaauuu

SEQ ID NO: 1168594 - RNA, 19 nt, Artificial Sequence
  Description of Artificial Sequence: Synthetic oligonucleotide
uucacgagccuuccgauca

SEQ ID NO: 1168595 - RNA, 19 nt, Artificial Sequence
  Description of Artificial Sequence: Synthetic oligonucleotide
uccaaaauccucuaacaau

SEQ ID NO: 1168596 - RNA, 19 nt, Artificial Sequence
  Description of Artificial Sequence: Synthetic oligonucleotide
aguuuugaccucuuaucag

SEQ ID NO: 1168597 - RNA, 19 nt, Artificial Sequence
  Description of Artificial Sequence: Synthetic oligonucleotide
uuauuuaacaagaggccua

SEQ ID NO: 1168598 - RNA, 19 nt, Artificial Sequence
  Description of Artificial Sequence: Synthetic oligonucleotide
aauaacccucuguuuagcu

SEQ ID NO: 1168599 - RNA, 19 nt, Artificial Sequence
  Description of Artificial Sequence: Synthetic oligonucleotide
cuuuccgauacccguaugg

SEQ ID NO: 1168600 - RNA, 19 nt, Artificial Sequence
  Description of Artificial Sequence: Synthetic oligonucleotide
cuugguuugguugaagagc

SEQ ID NO: 1168601 - RNA, 19 nt, Artificial Sequence
  Description of Artificial Sequence: Synthetic oligonucleotide
caauguauagcgcuucagc

SEQ ID NO: 1168602 - RNA, 19 nt, Artificial Sequence
  Description of Artificial Sequence: Synthetic oligonucleotide
ugcauuucuaccauccgaa

SEQ ID NO: 1168603 - RNA, 19 nt, Artificial Sequence
  Description of Artificial Sequence: Synthetic oligonucleotide
cuaggagaaugcauuacag

SEQ ID NO: 1168604 - RNA, 19 nt, Artificial Sequence
  Description of Artificial Sequence: Synthetic oligonucleotide
caucguauuuaauuuuccc

SEQ ID NO: 1168605 - RNA, 19 nt, Artificial Sequence
  Description of Artificial Sequence: Synthetic oligonucleotide
auuaggcacaccaagagca

SEQ ID NO: 1168606 - RNA, 19 nt, Artificial Sequence
  Description of Artificial Sequence: Synthetic oligonucleotide
guguguagcggauauacug

SEQ ID NO: 1168607 - RNA, 19 nt, Artificial Sequence
  Description of Artificial Sequence: Synthetic oligonucleotide
caaaauccucuaacaaucg

SEQ ID NO: 1168608 - RNA, 19 nt, Artificial Sequence
  Description of Artificial Sequence: Synthetic oligonucleotide
ugcacgaacaggcauggcu

SEQ ID NO: 1168609 - RNA, 19 nt, Artificial Sequence
  Description of Artificial Sequence: Synthetic oligonucleotide
uuuggaaccaggucagugu

SEQ ID NO: 1168610 - RNA, 19 nt, Artificial Sequence
  Description of Artificial Sequence: Synthetic oligonucleotide
uuaacaagaggccuaucua

SEQ ID NO: 1168611 - RNA, 19 nt, Artificial Sequence
  Description of Artificial Sequence: Synthetic oligonucleotide
ucguauuuaauuuucccuu

SEQ ID NO: 1168612 - RNA, 19 nt, Artificial Sequence
  Description of Artificial Sequence: Synthetic oligonucleotide
auaacccucuguuuagcuc

SEQ ID NO: 1168613 - RNA, 19 nt, Artificial Sequence
  Description of Artificial Sequence: Synthetic oligonucleotide
acuaggagaaugcauuaca

SEQ ID NO: 1168614 - RNA, 19 nt, Artificial Sequence
  Description of Artificial Sequence: Synthetic oligonucleotide
ucugucugcggucggaacc

SEQ ID NO: 1168615 - RNA, 19 nt, Artificial Sequence
  Description of Artificial Sequence: Synthetic oligonucleotide
ugaacuucauuggaagugc

SEQ ID NO: 1168616 - RNA, 19 nt, Artificial Sequence
  Description of Artificial Sequence: Synthetic oligonucleotide
uauccaguggauacugggc

SEQ ID NO: 1168617 - RNA, 19 nt, Artificial Sequence
  Description of Artificial Sequence: Synthetic oligonucleotide
uugaaugcuacuccuugcu

SEQ ID NO: 1168618 - RNA, 19 nt, Artificial Sequence
  Description of Artificial Sequence: Synthetic oligonucleotide
aaucgaggaauccagccuu

SEQ ID NO: 1168619 - RNA, 19 nt, Artificial Sequence
  Description of Artificial Sequence: Synthetic oligonucleotide
cuaucuacuccuuccuccg

SEQ ID NO: 1168620 - RNA, 19 nt, Artificial Sequence
  Description of Artificial Sequence: Synthetic oligonucleotide
aaagguuccggucgugcug

SEQ ID NO: 1168621 - RNA, 19 nt, Artificial Sequence
  Description of Artificial Sequence: Synthetic oligonucleotide
guaguuuugaccucuuauc

SEQ ID NO: 1168622 - RNA, 19 nt, Artificial Sequence
  Description of Artificial Sequence: Synthetic oligonucleotide
ugcaucguauuuaauuuuc

SEQ ID NO: 1168623 - RNA, 19 nt, Artificial Sequence
  Description of Artificial Sequence: Synthetic oligonucleotide
uccacuugggcucucauuu

SEQ ID NO: 1168624 - RNA, 19 nt, Artificial Sequence
  Description of Artificial Sequence: Synthetic oligonucleotide
guagcggauauacugagca

SEQ ID NO: 1168625 - RNA, 19 nt, Artificial Sequence
  Description of Artificial Sequence: Synthetic oligonucleotide
ucguuuauguguacagucu

SEQ ID NO: 1168626 - RNA, 19 nt, Artificial Sequence
  Description of Artificial Sequence: Synthetic oligonucleotide
agcggauauacugagcagg

SEQ ID NO: 1168627 - RNA, 19 nt, Artificial Sequence
  Description of Artificial Sequence: Synthetic oligonucleotide
aacugaacuggucccucuc

SEQ ID NO: 1168628 - RNA, 19 nt, Artificial Sequence
  Description of Artificial Sequence: Synthetic oligonucleotide
acuucauuggaagugcgag

SEQ ID NO: 1168629 - RNA, 19 nt, Artificial Sequence
  Description of Artificial Sequence: Synthetic oligonucleotide
caaguugguccugagauag

SEQ ID NO: 1168630 - RNA, 19 nt, Artificial Sequence
  Description of Artificial Sequence: Synthetic oligonucleotide
aucuuuaccgccucuccag

SEQ ID NO: 1168631 - RNA, 19 nt, Artificial Sequence
  Description of Artificial Sequence: Synthetic oligonucleotide
ucuuucgccccauauccag

SEQ ID NO: 1168632 - RNA, 19 nt, Artificial Sequence
  Description of Artificial Sequence: Synthetic oligonucleotide
uuuccgauacccguauggg

SEQ ID NO: 1168633 - RNA, 19 nt, Artificial Sequence
  Description of Artificial Sequence: Synthetic oligonucleotide
uccaccugcaaauccacug

SEQ ID NO: 1168634 - RNA, 19 nt, Artificial Sequence
  Description of Artificial Sequence: Synthetic oligonucleotide
ugaccucuuaucaggagcu

SEQ ID NO: 1168635 - RNA, 19 nt, Artificial Sequence
  Description of Artificial Sequence: Synthetic oligonucleotide
auggguuuugauuccagcu

SEQ ID NO: 1168636 - RNA, 19 nt, Artificial Sequence
  Description of Artificial Sequence: Synthetic oligonucleotide
cuuugagccauaucuuuac

SEQ ID NO: 1168637 - RNA, 19 nt, Artificial Sequence
  Description of Artificial Sequence: Synthetic oligonucleotide
auuguguaacccuuugcgu

SEQ ID NO: 1168638 - RNA, 19 nt, Artificial Sequence
  Description of Artificial Sequence: Synthetic oligonucleotide
uuuaccgccucuccaggcc

SEQ ID NO: 1168639 - RNA, 19 nt, Artificial Sequence
  Description of Artificial Sequence: Synthetic oligonucleotide
acaagaggccuaucuacuc

SEQ ID NO: 1168640 - RNA, 19 nt, Artificial Sequence
  Description of Artificial Sequence: Synthetic oligonucleotide
uuccgauacccguaugggg

SEQ ID NO: 1168641 - RNA, 19 nt, Artificial Sequence
  Description of Artificial Sequence: Synthetic oligonucleotide
cuuuccgccugucaugacg

SEQ ID NO: 1168642 - RNA, 19 nt, Artificial Sequence
  Description of Artificial Sequence: Synthetic oligonucleotide
aaauuuucguuuaugugua

SEQ ID NO: 1168643 - RNA, 19 nt, Artificial Sequence
  Description of Artificial Sequence: Synthetic oligonucleotide
uccucuaacaaucgaggaa

SEQ ID NO: 1168644 - RNA, 19 nt, Artificial Sequence
  Description of Artificial Sequence: Synthetic oligonucleotide
ucuuuaccgccucuccagg

SEQ ID NO: 1168645 - RNA, 19 nt, Artificial Sequence
  Description of Artificial Sequence: Synthetic oligonucleotide
uaucuuuaccgccucucca

SEQ ID NO: 1168646 - RNA, 19 nt, Artificial Sequence
  Description of Artificial Sequence: Synthetic oligonucleotide
aggucaucaccauacauau

SEQ ID NO: 1168647 - RNA, 19 nt, Artificial Sequence
  Description of Artificial Sequence: Synthetic oligonucleotide
ucuaacaaucgaggaaucc

SEQ ID NO: 1168648 - RNA, 19 nt, Artificial Sequence
  Description of Artificial Sequence: Synthetic oligonucleotide
aucagguacaaaccuguug

SEQ ID NO: 1168649 - RNA, 19 nt, Artificial Sequence
  Description of Artificial Sequence: Synthetic oligonucleotide
aucgcgauuaauuaaccuu

SEQ ID NO: 1168650 - RNA, 19 nt, Artificial Sequence
  Description of Artificial Sequence: Synthetic oligonucleotide
ugcggucggaaccagaaaa

SEQ ID NO: 1168651 - RNA, 19 nt, Artificial Sequence
  Description of Artificial Sequence: Synthetic oligonucleotide
uggguuuugauuccagcuc

SEQ ID NO: 1168652 - RNA, 19 nt, Artificial Sequence
  Description of Artificial Sequence: Synthetic oligonucleotide
uccauuggaucuuucugca

SEQ ID NO: 1168653 - RNA, 19 nt, Artificial Sequence
  Description of Artificial Sequence: Synthetic oligonucleotide
ucucgauuuucauuucucu

SEQ ID NO: 1168654 - RNA, 19 nt, Artificial Sequence
  Description of Artificial Sequence: Synthetic oligonucleotide
auguauagcgcuucagcca

SEQ ID NO: 1168655 - RNA, 19 nt, Artificial Sequence
  Description of Artificial Sequence: Synthetic oligonucleotide
ugucagagggucuuuuaga

SEQ ID NO: 1168656 - RNA, 19 nt, Artificial Sequence
  Description of Artificial Sequence: Synthetic oligonucleotide
uuuuacugggccuguagau

SEQ ID NO: 1168657 - RNA, 19 nt, Artificial Sequence
  Description of Artificial Sequence: Synthetic oligonucleotide
ugcagcaaccuucugcgac

SEQ ID NO: 1168658 - RNA, 19 nt, Artificial Sequence
  Description of Artificial Sequence: Synthetic oligonucleotide
agaccagugaggucugccg

SEQ ID NO: 1168659 - RNA, 19 nt, Artificial Sequence
  Description of Artificial Sequence: Synthetic oligonucleotide
ugcgacacagacuucucca

SEQ ID NO: 1168660 - RNA, 19 nt, Artificial Sequence
  Description of Artificial Sequence: Synthetic oligonucleotide
ugaaugcuacuccuugcug

SEQ ID NO: 1168661 - RNA, 19 nt, Artificial Sequence
  Description of Artificial Sequence: Synthetic oligonucleotide
cuuccgacuaggagaaugc

SEQ ID NO: 1168662 - RNA, 19 nt, Artificial Sequence
  Description of Artificial Sequence: Synthetic oligonucleotide
cuuuggacugccccugucg

SEQ ID NO: 1168663 - RNA, 19 nt, Artificial Sequence
  Description of Artificial Sequence: Synthetic oligonucleotide
ucgcgauuaauuaaccuuu

SEQ ID NO: 1168664 - RNA, 19 nt, Artificial Sequence
  Description of Artificial Sequence: Synthetic oligonucleotide
gugagcgccaucuucuucc

SEQ ID NO: 1168665 - RNA, 19 nt, Artificial Sequence
  Description of Artificial Sequence: Synthetic oligonucleotide
ucuuccgacuaggagaaug

SEQ ID NO: 1168666 - RNA, 19 nt, Artificial Sequence
  Description of Artificial Sequence: Synthetic oligonucleotide
acugauaucucgauuuuca

SEQ ID NO: 1168667 - RNA, 19 nt, Artificial Sequence
  Description of Artificial Sequence: Synthetic oligonucleotide
uucuaccauccgaauaacc

SEQ ID NO: 1168668 - RNA, 19 nt, Artificial Sequence
  Description of Artificial Sequence: Synthetic oligonucleotide
uuguguaacccuuugcguu

SEQ ID NO: 1168669 - RNA, 19 nt, Artificial Sequence
  Description of Artificial Sequence: Synthetic oligonucleotide
uuugaccucuuaucaggag

SEQ ID NO: 1168670 - RNA, 19 nt, Artificial Sequence
  Description of Artificial Sequence: Synthetic oligonucleotide
gaaugcauuacaggugcag

SEQ ID NO: 1168671 - RNA, 19 nt, Artificial Sequence
  Description of Artificial Sequence: Synthetic oligonucleotide
uguccauacccuugguuug

SEQ ID NO: 1168672 - RNA, 19 nt, Artificial Sequence
  Description of Artificial Sequence: Synthetic oligonucleotide
gagauaguugugugggcgc

SEQ ID NO: 1168673 - RNA, 19 nt, Artificial Sequence
  Description of Artificial Sequence: Synthetic oligonucleotide
cugaacuucauuggaagug

SEQ ID NO: 1168674 - RNA, 19 nt, Artificial Sequence
  Description of Artificial Sequence: Synthetic oligonucleotide
ugguguguagcggauauac

SEQ ID NO: 1168675 - RNA, 19 nt, Artificial Sequence
  Description of Artificial Sequence: Synthetic oligonucleotide
ucugccgagaucucugaga

SEQ ID NO: 1168676 - RNA, 19 nt, Artificial Sequence
  Description of Artificial Sequence: Synthetic oligonucleotide
uuuauguguacagucugaa

SEQ ID NO: 1168677 - RNA, 19 nt, Artificial Sequence
  Description of Artificial Sequence: Synthetic oligonucleotide
gaacuggucccucucggcc

SEQ ID NO: 1168678 - RNA, 19 nt, Artificial Sequence
  Description of Artificial Sequence: Synthetic oligonucleotide
guugaaugcuacuccuugc

SEQ ID NO: 1168679 - RNA, 19 nt, Artificial Sequence
  Description of Artificial Sequence: Synthetic oligonucleotide
agaaaacuccuuaucaggu

SEQ ID NO: 1168680 - RNA, 19 nt, Artificial Sequence
  Description of Artificial Sequence: Synthetic oligonucleotide
uuuagcuccagaguugaau

SEQ ID NO: 1168681 - RNA, 19 nt, Artificial Sequence
  Description of Artificial Sequence: Synthetic oligonucleotide
ugucaugacggauuucauc

SEQ ID NO: 1168682 - RNA, 19 nt, Artificial Sequence
  Description of Artificial Sequence: Synthetic oligonucleotide
cauacauaucuuuguccag

SEQ ID NO: 1168683 - RNA, 19 nt, Artificial Sequence
  Description of Artificial Sequence: Synthetic oligonucleotide
uuaucaggagcugcccugg

SEQ ID NO: 1168684 - RNA, 19 nt, Artificial Sequence
  Description of Artificial Sequence: Synthetic oligonucleotide
aacaagaggccuaucuacu

SEQ ID NO: 1168685 - RNA, 19 nt, Artificial Sequence
  Description of Artificial Sequence: Synthetic oligonucleotide
uguagcggauauacugagc

SEQ ID NO: 1168686 - RNA, 19 nt, Artificial Sequence
  Description of Artificial Sequence: Synthetic oligonucleotide
acugaacuucauuggaagu

SEQ ID NO: 1168687 - RNA, 19 nt, Artificial Sequence
  Description of Artificial Sequence: Synthetic oligonucleotide
ggauuaggcacaccaagag

SEQ ID NO: 1168688 - RNA, 19 nt, Artificial Sequence
  Description of Artificial Sequence: Synthetic oligonucleotide
gcauucauaaccuccuuug

SEQ ID NO: 1168689 - RNA, 19 nt, Artificial Sequence
  Description of Artificial Sequence: Synthetic oligonucleotide
ucugcggucggaaccagaa

SEQ ID NO: 1168690 - RNA, 19 nt, Artificial Sequence
  Description of Artificial Sequence: Synthetic oligonucleotide
ugcuacuccuugcugagau

SEQ ID NO: 1168691 - RNA, 19 nt, Artificial Sequence
  Description of Artificial Sequence: Synthetic oligonucleotide
augcauuacaggugcagga

SEQ ID NO: 1168692 - RNA, 19 nt, Artificial Sequence
  Description of Artificial Sequence: Synthetic oligonucleotide
uccgaucagcaauguauag

SEQ ID NO: 1168693 - RNA, 19 nt, Artificial Sequence
  Description of Artificial Sequence: Synthetic oligonucleotide
uggucuuuauccugguuuc

SEQ ID NO: 1168694 - RNA, 19 nt, Artificial Sequence
  Description of Artificial Sequence: Synthetic oligonucleotide
uuccacauggguuuugauu

SEQ ID NO: 1168695 - RNA, 19 nt, Artificial Sequence
  Description of Artificial Sequence: Synthetic oligonucleotide
cuaacaaucgaggaaucca

SEQ ID NO: 1168696 - RNA, 19 nt, Artificial Sequence
  Description of Artificial Sequence: Synthetic oligonucleotide
uuucgccccauauccagug

SEQ ID NO: 1168697 - RNA, 19 nt, Artificial Sequence
  Description of Artificial Sequence: Synthetic oligonucleotide
auccgaauaacccucuguu

SEQ ID NO: 1168698 - RNA, 19 nt, Artificial Sequence
  Description of Artificial Sequence: Synthetic oligonucleotide
uguuccuuagggcgacugc

SEQ ID NO: 1168699 - RNA, 19 nt, Artificial Sequence
  Description of Artificial Sequence: Synthetic oligonucleotide
uggaagugcgaggauuagg

SEQ ID NO: 1168700 - RNA, 19 nt, Artificial Sequence
  Description of Artificial Sequence: Synthetic oligonucleotide
uaccauccgaauaacccuc

SEQ ID NO: 1168701 - RNA, 19 nt, Artificial Sequence
  Description of Artificial Sequence: Synthetic oligonucleotide
cugucagagggucuuuuag

SEQ ID NO: 1168702 - RNA, 19 nt, Artificial Sequence
  Description of Artificial Sequence: Synthetic oligonucleotide
uuacagucaucuuccgacu

SEQ ID NO: 1168703 - RNA, 19 nt, Artificial Sequence
  Description of Artificial Sequence: Synthetic oligonucleotide
ggaagugcgaggauuaggc

SEQ ID NO: 1168704 - RNA, 19 nt, Artificial Sequence
  Description of Artificial Sequence: Synthetic oligonucleotide
cagccguuuauccagagga

SEQ ID NO: 1168705 - RNA, 19 nt, Artificial Sequence
  Description of Artificial Sequence: Synthetic oligonucleotide
agcuucacgagccuuccga

SEQ ID NO: 1168706 - RNA, 19 nt, Artificial Sequence
  Description of Artificial Sequence: Synthetic oligonucleotide
ucaugacggauuucauccc

SEQ ID NO: 1168707 - RNA, 19 nt, Artificial Sequence
  Description of Artificial Sequence: Synthetic oligonucleotide
uucugcgacacagacuucu

SEQ ID NO: 1168708 - RNA, 19 nt, Artificial Sequence
  Description of Artificial Sequence: Synthetic oligonucleotide
agguacaaaccuguugguc

SEQ ID NO: 1168709 - RNA, 19 nt, Artificial Sequence
  Description of Artificial Sequence: Synthetic oligonucleotide
uuccgaucagcaauguaua

SEQ ID NO: 1168710 - RNA, 19 nt, Artificial Sequence
  Description of Artificial Sequence: Synthetic oligonucleotide
uuucguuuauguguacagu

SEQ ID NO: 1168711 - RNA, 19 nt, Artificial Sequence
  Description of Artificial Sequence: Synthetic oligonucleotide
auuuucguuuauguguaca

SEQ ID NO: 1168712 - RNA, 19 nt, Artificial Sequence
  Description of Artificial Sequence: Synthetic oligonucleotide
uguguaacccuuugcguuu

SEQ ID NO: 1168713 - RNA, 19 nt, Artificial Sequence
  Description of Artificial Sequence: Synthetic oligonucleotide
auccucuaacaaucgagga

SEQ ID NO: 1168714 - RNA, 19 nt, Artificial Sequence
  Description of Artificial Sequence: Synthetic oligonucleotide
aucucgauuuucauuucuc

SEQ ID NO: 1168715 - RNA, 19 nt, Artificial Sequence
  Description of Artificial Sequence: Synthetic oligonucleotide
guguagcggauauacugag

SEQ ID NO: 1168716 - RNA, 19 nt, Artificial Sequence
  Description of Artificial Sequence: Synthetic oligonucleotide
uacauaucuuuguccagau

SEQ ID NO: 1168717 - RNA, 19 nt, Artificial Sequence
  Description of Artificial Sequence: Synthetic oligonucleotide
cuguuuagcuccagaguug

SEQ ID NO: 1168718 - RNA, 19 nt, Artificial Sequence
  Description of Artificial Sequence: Synthetic oligonucleotide
ucgagcaauugcaucguau

SEQ ID NO: 1168719 - RNA, 19 nt, Artificial Sequence
  Description of Artificial Sequence: Synthetic oligonucleotide
uuuuccacauggguuuuga

SEQ ID NO: 1168720 - RNA, 19 nt, Artificial Sequence
  Description of Artificial Sequence: Synthetic oligonucleotide
aggaauccagccuuuccga

SEQ ID NO: 1168721 - RNA, 19 nt, Artificial Sequence
  Description of Artificial Sequence: Synthetic oligonucleotide
ccuaucuacuccuuccucc

SEQ ID NO: 1168722 - RNA, 19 nt, Artificial Sequence
  Description of Artificial Sequence: Synthetic oligonucleotide
ucggaaccagaaaacuccu

SEQ ID NO: 1168723 - RNA, 19 nt, Artificial Sequence
  Description of Artificial Sequence: Synthetic oligonucleotide
gguugaagagccuuugguc

SEQ ID NO: 1168724 - RNA, 19 nt, Artificial Sequence
  Description of Artificial Sequence: Synthetic oligonucleotide
auuggaucuuucugcauuu

SEQ ID NO: 1168725 - RNA, 19 nt, Artificial Sequence
  Description of Artificial Sequence: Synthetic oligonucleotide
uuccuuagggcgacugcug

SEQ ID NO: 1168726 - RNA, 19 nt, Artificial Sequence
  Description of Artificial Sequence: Synthetic oligonucleotide
cuuccgaucagcaauguau

SEQ ID NO: 1168727 - RNA, 19 nt, Artificial Sequence
  Description of Artificial Sequence: Synthetic oligonucleotide
cuugaaucuuggcggcucc

SEQ ID NO: 1168728 - RNA, 19 nt, Artificial Sequence
  Description of Artificial Sequence: Synthetic oligonucleotide
uagcggauauacugagcag

SEQ ID NO: 1168729 - RNA, 19 nt, Artificial Sequence
  Description of Artificial Sequence: Synthetic oligonucleotide
cagccagccguuuauccag

SEQ ID NO: 1168730 - RNA, 19 nt, Artificial Sequence
  Description of Artificial Sequence: Synthetic oligonucleotide
gaaaacuccuuaucaggua

SEQ ID NO: 1168731 - RNA, 19 nt, Artificial Sequence
  Description of Artificial Sequence: Synthetic oligonucleotide
uucuuucgccccauaucca

SEQ ID NO: 1168732 - RNA, 19 nt, Artificial Sequence
  Description of Artificial Sequence: Synthetic oligonucleotide
uucugcgccauuucucuaa

SEQ ID NO: 1168733 - RNA, 19 nt, Artificial Sequence
  Description of Artificial Sequence: Synthetic oligonucleotide
ggauuucaucccuuucacg

SEQ ID NO: 1168734 - RNA, 19 nt, Artificial Sequence
  Description of Artificial Sequence: Synthetic oligonucleotide
uccaguggauacugggcca

SEQ ID NO: 1168735 - RNA, 19 nt, Artificial Sequence
  Description of Artificial Sequence: Synthetic oligonucleotide
auaguugugugggcgcagg

SEQ ID NO: 1168736 - RNA, 19 nt, Artificial Sequence
  Description of Artificial Sequence: Synthetic oligonucleotide
cuuuaccgccucuccaggc

SEQ ID NO: 1168737 - RNA, 19 nt, Artificial Sequence
  Description of Artificial Sequence: Synthetic oligonucleotide
ggaauuguguaacccuuug

SEQ ID NO: 1168738 - RNA, 19 nt, Artificial Sequence
  Description of Artificial Sequence: Synthetic oligonucleotide
uucgccccauauccagugg

SEQ ID NO: 1168739 - RNA, 19 nt, Artificial Sequence
  Description of Artificial Sequence: Synthetic oligonucleotide
uccuuagggcgacugcugu

SEQ ID NO: 1168740 - RNA, 19 nt, Artificial Sequence
  Description of Artificial Sequence: Synthetic oligonucleotide
uugcaucguauuuaauuuu

SEQ ID NO: 1168741 - RNA, 19 nt, Artificial Sequence
  Description of Artificial Sequence: Synthetic oligonucleotide
guugugugggcgcagguaa

SEQ ID NO: 1168742 - RNA, 19 nt, Artificial Sequence
  Description of Artificial Sequence: Synthetic oligonucleotide
agcaauguauagcgcuuca

SEQ ID NO: 1168743 - RNA, 19 nt, Artificial Sequence
  Description of Artificial Sequence: Synthetic oligonucleotide
guggauuucugggaaagca

SEQ ID NO: 1168744 - RNA, 19 nt, Artificial Sequence
  Description of Artificial Sequence: Synthetic oligonucleotide
aggaucuuccucaaacuga

SEQ ID NO: 1168745 - RNA, 19 nt, Artificial Sequence
  Description of Artificial Sequence: Synthetic oligonucleotide
gcaaccuucugcgacacag

SEQ ID NO: 1168746 - RNA, 19 nt, Artificial Sequence
  Description of Artificial Sequence: Synthetic oligonucleotide
cauaucuuuaccgccucuc

SEQ ID NO: 1168747 - RNA, 19 nt, Artificial Sequence
  Description of Artificial Sequence: Synthetic oligonucleotide
uccagccuuuccgauaccc

SEQ ID NO: 1168748 - RNA, 19 nt, Artificial Sequence
  Description of Artificial Sequence: Synthetic oligonucleotide
uggacugccccugucgagc

SEQ ID NO: 1168749 - RNA, 19 nt, Artificial Sequence
  Description of Artificial Sequence: Synthetic oligonucleotide
uacugggccacguggauuu

SEQ ID NO: 1168750 - RNA, 19 nt, Artificial Sequence
  Description of Artificial Sequence: Synthetic oligonucleotide
cugagauaguugugugggc

SEQ ID NO: 1168751 - RNA, 19 nt, Artificial Sequence
  Description of Artificial Sequence: Synthetic oligonucleotide
ucuggaucaucugcauuca

SEQ ID NO: 1168752 - RNA, 19 nt, Artificial Sequence
  Description of Artificial Sequence: Synthetic oligonucleotide
acguggauuucugggaaag

SEQ ID NO: 1168753 - RNA, 19 nt, Artificial Sequence
  Description of Artificial Sequence: Synthetic oligonucleotide
gaagugcgaggauuaggca

SEQ ID NO: 1168754 - RNA, 19 nt, Artificial Sequence
  Description of Artificial Sequence: Synthetic oligonucleotide
aaacuccuuaucagguaca

SEQ ID NO: 1168755 - RNA, 19 nt, Artificial Sequence
  Description of Artificial Sequence: Synthetic oligonucleotide
gacuaggagaaugcauuac

SEQ ID NO: 1168756 - RNA, 19 nt, Artificial Sequence
  Description of Artificial Sequence: Synthetic oligonucleotide
agugcgaggauuaggcaca

SEQ ID NO: 1168757 - RNA, 19 nt, Artificial Sequence
  Description of Artificial Sequence: Synthetic oligonucleotide
aacuccuuaucagguacaa

SEQ ID NO: 1168758 - RNA, 19 nt, Artificial Sequence
  Description of Artificial Sequence: Synthetic oligonucleotide
caucuuccgacuaggagaa

SEQ ID NO: 1168759 - RNA, 19 nt, Artificial Sequence
  Description of Artificial Sequence: Synthetic oligonucleotide
ucgccccauauccagugga

SEQ ID NO: 1168760 - RNA, 19 nt, Artificial Sequence
  Description of Artificial Sequence: Synthetic oligonucleotide
uccgaauaacccucuguuu

SEQ ID NO: 1168761 - RNA, 19 nt, Artificial Sequence
  Description of Artificial Sequence: Synthetic oligonucleotide
gaucagcaauguauagcgc

SEQ ID NO: 1168762 - RNA, 19 nt, Artificial Sequence
  Description of Artificial Sequence: Synthetic oligonucleotide
uuaccgccucuccaggccu

SEQ ID NO: 1168763 - RNA, 19 nt, Artificial Sequence
  Description of Artificial Sequence: Synthetic oligonucleotide
uuggcggcuccauuggauc

SEQ ID NO: 1168764 - RNA, 19 nt, Artificial Sequence
  Description of Artificial Sequence: Synthetic oligonucleotide
guuuauguguacagucuga

SEQ ID NO: 1168765 - RNA, 19 nt, Artificial Sequence
  Description of Artificial Sequence: Synthetic oligonucleotide
ggcaaaauuuucguuuaug

SEQ ID NO: 1168766 - RNA, 19 nt, Artificial Sequence
  Description of Artificial Sequence: Synthetic oligonucleotide
cuguagauacuuugagcca

SEQ ID NO: 1168767 - RNA, 19 nt, Artificial Sequence
  Description of Artificial Sequence: Synthetic oligonucleotide
cugcauuucuaccauccga

SEQ ID NO: 1168768 - RNA, 19 nt, Artificial Sequence
  Description of Artificial Sequence: Synthetic oligonucleotide
uggaaccaggucaguguac

SEQ ID NO: 1168769 - RNA, 19 nt, Artificial Sequence
  Description of Artificial Sequence: Synthetic oligonucleotide
uuucuaccauccgaauaac

SEQ ID NO: 1168770 - RNA, 19 nt, Artificial Sequence
  Description of Artificial Sequence: Synthetic oligonucleotide
uguuggucuuuauccuggu

SEQ ID NO: 1168771 - RNA, 19 nt, Artificial Sequence
  Description of Artificial Sequence: Synthetic oligonucleotide
gcgaggauuaggcacacca

SEQ ID NO: 1168772 - RNA, 19 nt, Artificial Sequence
  Description of Artificial Sequence: Synthetic oligonucleotide
gaugguguguagcggauau

SEQ ID NO: 1168773 - RNA, 19 nt, Artificial Sequence
  Description of Artificial Sequence: Synthetic oligonucleotide
cucuaacaaucgaggaauc

SEQ ID NO: 1168774 - RNA, 19 nt, Artificial Sequence
  Description of Artificial Sequence: Synthetic oligonucleotide
gacggauuucaucccuuuc

SEQ ID NO: 1168775 - RNA, 19 nt, Artificial Sequence
  Description of Artificial Sequence: Synthetic oligonucleotide
cauuucuaccauccgaaua

SEQ ID NO: 1168776 - RNA, 19 nt, Artificial Sequence
  Description of Artificial Sequence: Synthetic oligonucleotide
uuggaagugcgaggauuag

SEQ ID NO: 1168777 - RNA, 19 nt, Artificial Sequence
  Description of Artificial Sequence: Synthetic oligonucleotide
ucacgagccuuccgaucag

SEQ ID NO: 1168778 - RNA, 19 nt, Artificial Sequence
  Description of Artificial Sequence: Synthetic oligonucleotide
auuuaacaagaggccuauc

SEQ ID NO: 1168779 - RNA, 19 nt, Artificial Sequence
  Description of Artificial Sequence: Synthetic oligonucleotide
gaaccagaaaacuccuuau

SEQ ID NO: 1168780 - RNA, 19 nt, Artificial Sequence
  Description of Artificial Sequence: Synthetic oligonucleotide
auuggaagugcgaggauua

SEQ ID NO: 1168781 - RNA, 19 nt, Artificial Sequence
  Description of Artificial Sequence: Synthetic oligonucleotide
aucaggccuuugcaggucu

SEQ ID NO: 1168782 - RNA, 19 nt, Artificial Sequence
  Description of Artificial Sequence: Synthetic oligonucleotide
guccauacccuugguuugg

SEQ ID NO: 1168783 - RNA, 19 nt, Artificial Sequence
  Description of Artificial Sequence: Synthetic oligonucleotide
uggcaaaauuuucguuuau

SEQ ID NO: 1168784 - RNA, 19 nt, Artificial Sequence
  Description of Artificial Sequence: Synthetic oligonucleotide
ggccugaucauaaacauua

SEQ ID NO: 1168785 - RNA, 19 nt, Artificial Sequence
  Description of Artificial Sequence: Synthetic oligonucleotide
uacugagcaggagccagcu

SEQ ID NO: 1168786 - RNA, 19 nt, Artificial Sequence
  Description of Artificial Sequence: Synthetic oligonucleotide
agccauaucuuuaccgccu

SEQ ID NO: 1168787 - RNA, 19 nt, Artificial Sequence
  Description of Artificial Sequence: Synthetic oligonucleotide
ugucgagcaauugcaucgu

SEQ ID NO: 1168788 - RNA, 19 nt, Artificial Sequence
  Description of Artificial Sequence: Synthetic oligonucleotide
uccccggggaauuuucuua

SEQ ID NO: 1168789 - RNA, 19 nt, Artificial Sequence
  Description of Artificial Sequence: Synthetic oligonucleotide
cuuagggcgacugcuguca

SEQ ID NO: 1168790 - RNA, 19 nt, Artificial Sequence
  Description of Artificial Sequence: Synthetic oligonucleotide
agauaguugugugggcgca

SEQ ID NO: 1168791 - RNA, 19 nt, Artificial Sequence
  Description of Artificial Sequence: Synthetic oligonucleotide
auaucuuuguccagauuuu

SEQ ID NO: 1168792 - RNA, 19 nt, Artificial Sequence
  Description of Artificial Sequence: Synthetic oligonucleotide
gaggccuaucuacuccuuc

SEQ ID NO: 1168793 - RNA, 19 nt, Artificial Sequence
  Description of Artificial Sequence: Synthetic oligonucleotide
ccccauauccaguggauac

SEQ ID NO: 1168794 - RNA, 19 nt, Artificial Sequence
  Description of Artificial Sequence: Synthetic oligonucleotide
guuccggucgugcugccuc

SEQ ID NO: 1168795 - RNA, 19 nt, Artificial Sequence
  Description of Artificial Sequence: Synthetic oligonucleotide
ugacggauuucaucccuuu

SEQ ID NO: 1168796 - RNA, 19 nt, Artificial Sequence
  Description of Artificial Sequence: Synthetic oligonucleotide
ucggccucucugucugcgg

SEQ ID NO: 1168797 - RNA, 19 nt, Artificial Sequence
  Description of Artificial Sequence: Synthetic oligonucleotide
uuccgacuaggagaaugca

SEQ ID NO: 1168798 - RNA, 19 nt, Artificial Sequence
  Description of Artificial Sequence: Synthetic oligonucleotide
ugaaucuuggcggcuccau

SEQ ID NO: 1168799 - RNA, 19 nt, Artificial Sequence
  Description of Artificial Sequence: Synthetic oligonucleotide
ugugugggcgcagguaaaa

SEQ ID NO: 1168800 - RNA, 19 nt, Artificial Sequence
  Description of Artificial Sequence: Synthetic oligonucleotide
gggucuuuuagaaccacca

SEQ ID NO: 1168801 - RNA, 19 nt, Artificial Sequence
  Description of Artificial Sequence: Synthetic oligonucleotide
cacugauaucucgauuuuc

SEQ ID NO: 1168802 - RNA, 19 nt, Artificial Sequence
  Description of Artificial Sequence: Synthetic oligonucleotide
uugugugggcgcagguaaa

SEQ ID NO: 1168803 - RNA, 19 nt, Artificial Sequence
  Description of Artificial Sequence: Synthetic oligonucleotide
auguuccuuagggcgacug

SEQ ID NO: 1168804 - RNA, 19 nt, Artificial Sequence
  Description of Artificial Sequence: Synthetic oligonucleotide
uuugcaggucuggaucauc

SEQ ID NO: 1168805 - RNA, 19 nt, Artificial Sequence
  Description of Artificial Sequence: Synthetic oligonucleotide
uugaaucuuggcggcucca

SEQ ID NO: 1168806 - RNA, 19 nt, Artificial Sequence
  Description of Artificial Sequence: Synthetic oligonucleotide
gcaucguauuuaauuuucc

SEQ ID NO: 1168807 - RNA, 19 nt, Artificial Sequence
  Description of Artificial Sequence: Synthetic oligonucleotide
ccuguuggucuuuauccug

SEQ ID NO: 1168808 - RNA, 19 nt, Artificial Sequence
  Description of Artificial Sequence: Synthetic oligonucleotide
ccagaguugaaugcuacuc

SEQ ID NO: 1168809 - RNA, 19 nt, Artificial Sequence
  Description of Artificial Sequence: Synthetic oligonucleotide
cguuuauguguacagucug

SEQ ID NO: 1168810 - RNA, 19 nt, Artificial Sequence
  Description of Artificial Sequence: Synthetic oligonucleotide
caccugcaaauccacuguc

SEQ ID NO: 1168811 - RNA, 19 nt, Artificial Sequence
  Description of Artificial Sequence: Synthetic oligonucleotide
ggaaagguuccggucgugc

SEQ ID NO: 1168812 - RNA, 19 nt, Artificial Sequence
  Description of Artificial Sequence: Synthetic oligonucleotide
gccgagaucucugagaucu

SEQ ID NO: 1168813 - RNA, 19 nt, Artificial Sequence
  Description of Artificial Sequence: Synthetic oligonucleotide
aguggauacugggccacgu

SEQ ID NO: 1168814 - RNA, 19 nt, Artificial Sequence
  Description of Artificial Sequence: Synthetic oligonucleotide
cuuauuaaucuugaaucuu

SEQ ID NO: 1168815 - RNA, 19 nt, Artificial Sequence
  Description of Artificial Sequence: Synthetic oligonucleotide
ccagaggaauuguguaacc

SEQ ID NO: 1168816 - RNA, 19 nt, Artificial Sequence
  Description of Artificial Sequence: Synthetic oligonucleotide
ccagccuuuccgauacccg

SEQ ID NO: 1168817 - RNA, 19 nt, Artificial Sequence
  Description of Artificial Sequence: Synthetic oligonucleotide
caaucgaggaauccagccu

SEQ ID NO: 1168818 - RNA, 19 nt, Artificial Sequence
  Description of Artificial Sequence: Synthetic oligonucleotide
gccccugucgagcaauugc

SEQ ID NO: 1168819 - RNA, 19 nt, Artificial Sequence
  Description of Artificial Sequence: Synthetic oligonucleotide
ccagcuugucagcugcacg

SEQ ID NO: 1168820 - RNA, 19 nt, Artificial Sequence
  Description of Artificial Sequence: Synthetic oligonucleotide
ggaucuuccucaaacugaa

SEQ ID NO: 1168821 - RNA, 19 nt, Artificial Sequence
  Description of Artificial Sequence: Synthetic oligonucleotide
uuucugcgccauuucucua

SEQ ID NO: 1168822 - RNA, 19 nt, Artificial Sequence
  Description of Artificial Sequence: Synthetic oligonucleotide
cucugucugcggucggaac

SEQ ID NO: 1168823 - RNA, 19 nt, Artificial Sequence
  Description of Artificial Sequence: Synthetic oligonucleotide
gagcaauugcaucguauuu

SEQ ID NO: 1168824 - RNA, 19 nt, Artificial Sequence
  Description of Artificial Sequence: Synthetic oligonucleotide
cagcaauguauagcgcuuc

SEQ ID NO: 1168825 - RNA, 19 nt, Artificial Sequence
  Description of Artificial Sequence: Synthetic oligonucleotide
gaccucuuaucaggagcug

SEQ ID NO: 1168826 - RNA, 19 nt, Artificial Sequence
  Description of Artificial Sequence: Synthetic oligonucleotide
uagggcgacugcugucaga

SEQ ID NO: 1168827 - RNA, 19 nt, Artificial Sequence
  Description of Artificial Sequence: Synthetic oligonucleotide
aaguugguccugagauagu

SEQ ID NO: 1168828 - RNA, 19 nt, Artificial Sequence
  Description of Artificial Sequence: Synthetic oligonucleotide
gucgugcugccucucuuuc

SEQ ID NO: 1168829 - RNA, 19 nt, Artificial Sequence
  Description of Artificial Sequence: Synthetic oligonucleotide
cguuuauccagaggaauug

SEQ ID NO: 1168830 - RNA, 19 nt, Artificial Sequence
  Description of Artificial Sequence: Synthetic oligonucleotide
ugaagagccuuuggucaua

SEQ ID NO: 1168831 - RNA, 19 nt, Artificial Sequence
  Description of Artificial Sequence: Synthetic oligonucleotide
ccgaauaacccucuguuua

SEQ ID NO: 1168832 - RNA, 19 nt, Artificial Sequence
  Description of Artificial Sequence: Synthetic oligonucleotide
aucuugaaucuuggcggcu

SEQ ID NO: 1168833 - RNA, 19 nt, Artificial Sequence
  Description of Artificial Sequence: Synthetic oligonucleotide
uggaaagguuccggucgug

SEQ ID NO: 1168834 - RNA, 19 nt, Artificial Sequence
  Description of Artificial Sequence: Synthetic oligonucleotide
guuccuuagggcgacugcu

SEQ ID NO: 1168835 - RNA, 19 nt, Artificial Sequence
  Description of Artificial Sequence: Synthetic oligonucleotide
caugacggauuucaucccu

SEQ ID NO: 1168836 - RNA, 19 nt, Artificial Sequence
  Description of Artificial Sequence: Synthetic oligonucleotide
agaaugcauuacaggugca

SEQ ID NO: 1168837 - RNA, 19 nt, Artificial Sequence
  Description of Artificial Sequence: Synthetic oligonucleotide
cuuuuagaaccaccaugcu

SEQ ID NO: 1168838 - RNA, 19 nt, Artificial Sequence
  Description of Artificial Sequence: Synthetic oligonucleotide
uuccggucgugcugccucu

SEQ ID NO: 1168839 - RNA, 19 nt, Artificial Sequence
  Description of Artificial Sequence: Synthetic oligonucleotide
cauccgaauaacccucugu

SEQ ID NO: 1168840 - RNA, 19 nt, Artificial Sequence
  Description of Artificial Sequence: Synthetic oligonucleotide
aggaauuguguaacccuuu

SEQ ID NO: 1168841 - RNA, 19 nt, Artificial Sequence
  Description of Artificial Sequence: Synthetic oligonucleotide
ucuuuccgccugucaugac

SEQ ID NO: 1168842 - RNA, 19 nt, Artificial Sequence
  Description of Artificial Sequence: Synthetic oligonucleotide
ucgaggaauccagccuuuc

SEQ ID NO: 1168843 - RNA, 19 nt, Artificial Sequence
  Description of Artificial Sequence: Synthetic oligonucleotide
guugcuccuuuacagucau

SEQ ID NO: 1168844 - RNA, 19 nt, Artificial Sequence
  Description of Artificial Sequence: Synthetic oligonucleotide
guacaaaccuguuggucuu

SEQ ID NO: 1168845 - RNA, 19 nt, Artificial Sequence
  Description of Artificial Sequence: Synthetic oligonucleotide
caguggauacugggccacg

SEQ ID NO: 1168846 - RNA, 19 nt, Artificial Sequence
  Description of Artificial Sequence: Synthetic oligonucleotide
gccucucugucugcggucg

SEQ ID NO: 1168847 - RNA, 19 nt, Artificial Sequence
  Description of Artificial Sequence: Synthetic oligonucleotide
ugucugcggucggaaccag

SEQ ID NO: 1168848 - RNA, 19 nt, Artificial Sequence
  Description of Artificial Sequence: Synthetic oligonucleotide
accauccgaauaacccucu

SEQ ID NO: 1168849 - RNA, 19 nt, Artificial Sequence
  Description of Artificial Sequence: Synthetic oligonucleotide
cugccgagaucucugagau

SEQ ID NO: 1168850 - RNA, 19 nt, Artificial Sequence
  Description of Artificial Sequence: Synthetic oligonucleotide
acugccccugucgagcaau

SEQ ID NO: 1168851 - RNA, 19 nt, Artificial Sequence
  Description of Artificial Sequence: Synthetic oligonucleotide
cugucugcggucggaacca

SEQ ID NO: 1168852 - RNA, 19 nt, Artificial Sequence
  Description of Artificial Sequence: Synthetic oligonucleotide
ccuuaucagguacaaaccu

SEQ ID NO: 1168853 - RNA, 19 nt, Artificial Sequence
  Description of Artificial Sequence: Synthetic oligonucleotide
acuccuuaucagguacaaa

SEQ ID NO: 1168854 - RNA, 19 nt, Artificial Sequence
  Description of Artificial Sequence: Synthetic oligonucleotide
gcuacuccuugcugagaug

SEQ ID NO: 1168855 - RNA, 19 nt, Artificial Sequence
  Description of Artificial Sequence: Synthetic oligonucleotide
cagccuuuccgauacccgu

SEQ ID NO: 1168856 - RNA, 19 nt, Artificial Sequence
  Description of Artificial Sequence: Synthetic oligonucleotide
cacgagccuuccgaucagc

SEQ ID NO: 1168857 - RNA, 19 nt, Artificial Sequence
  Description of Artificial Sequence: Synthetic oligonucleotide
acgaacaggcauggcugca

SEQ ID NO: 1168858 - RNA, 19 nt, Artificial Sequence
  Description of Artificial Sequence: Synthetic oligonucleotide
uuccgccugucaugacgga

SEQ ID NO: 1168859 - RNA, 19 nt, Artificial Sequence
  Description of Artificial Sequence: Synthetic oligonucleotide
caucaggccuuugcagguc

SEQ ID NO: 1168860 - RNA, 19 nt, Artificial Sequence
  Description of Artificial Sequence: Synthetic oligonucleotide
ugcgaggauuaggcacacc

SEQ ID NO: 1168861 - RNA, 19 nt, Artificial Sequence
  Description of Artificial Sequence: Synthetic oligonucleotide
gcggauauacugagcagga

SEQ ID NO: 1168862 - RNA, 19 nt, Artificial Sequence
  Description of Artificial Sequence: Synthetic oligonucleotide
agccguuuauccagaggaa

SEQ ID NO: 1168863 - RNA, 19 nt, Artificial Sequence
  Description of Artificial Sequence: Synthetic oligonucleotide
gccauaucuuuaccgccuc

SEQ ID NO: 1168864 - RNA, 19 nt, Artificial Sequence
  Description of Artificial Sequence: Synthetic oligonucleotide
cacagacuucuccaaggcu

SEQ ID NO: 1168865 - RNA, 19 nt, Artificial Sequence
  Description of Artificial Sequence: Synthetic oligonucleotide
auagcgcuucagccaguuu

SEQ ID NO: 1168866 - RNA, 19 nt, Artificial Sequence
  Description of Artificial Sequence: Synthetic oligonucleotide
agcaaccuucugcgacaca

SEQ ID NO: 1168867 - RNA, 19 nt, Artificial Sequence
  Description of Artificial Sequence: Synthetic oligonucleotide
uacccuugguuugguugaa

SEQ ID NO: 1168868 - RNA, 19 nt, Artificial Sequence
  Description of Artificial Sequence: Synthetic oligonucleotide
cacguggauuucugggaaa

SEQ ID NO: 1168869 - RNA, 19 nt, Artificial Sequence
  Description of Artificial Sequence: Synthetic oligonucleotide
cauuggaagugcgaggauu

SEQ ID NO: 1168870 - RNA, 19 nt, Artificial Sequence
  Description of Artificial Sequence: Synthetic oligonucleotide
gccuaucuacuccuuccuc

SEQ ID NO: 1168871 - RNA, 19 nt, Artificial Sequence
  Description of Artificial Sequence: Synthetic oligonucleotide
cuuggcggcuccauuggau

SEQ ID NO: 1168872 - RNA, 19 nt, Artificial Sequence
  Description of Artificial Sequence: Synthetic oligonucleotide
aggccugaucauaaacauu

SEQ ID NO: 1168873 - RNA, 19 nt, Artificial Sequence
  Description of Artificial Sequence: Synthetic oligonucleotide
cuuucgccccauauccagu

SEQ ID NO: 1168874 - RNA, 19 nt, Artificial Sequence
  Description of Artificial Sequence: Synthetic oligonucleotide
ccccugucgagcaauugca

SEQ ID NO: 1168875 - RNA, 19 nt, Artificial Sequence
  Description of Artificial Sequence: Synthetic oligonucleotide
ccucuaacaaucgaggaau

SEQ ID NO: 1168876 - RNA, 19 nt, Artificial Sequence
  Description of Artificial Sequence: Synthetic oligonucleotide
ggucuuuuagaaccaccau

SEQ ID NO: 1168877 - RNA, 19 nt, Artificial Sequence
  Description of Artificial Sequence: Synthetic oligonucleotide
gcggucggaaccagaaaac

SEQ ID NO: 1168878 - RNA, 19 nt, Artificial Sequence
  Description of Artificial Sequence: Synthetic oligonucleotide
agccuuuccgauacccgua

SEQ ID NO: 1168879 - RNA, 19 nt, Artificial Sequence
  Description of Artificial Sequence: Synthetic oligonucleotide
gggccuguagauacuuuga

SEQ ID NO: 1168880 - RNA, 19 nt, Artificial Sequence
  Description of Artificial Sequence: Synthetic oligonucleotide
augcuacuccuugcugaga

SEQ ID NO: 1168881 - RNA, 19 nt, Artificial Sequence
  Description of Artificial Sequence: Synthetic oligonucleotide
ggucugccgagaucucuga

SEQ ID NO: 1168882 - RNA, 19 nt, Artificial Sequence
  Description of Artificial Sequence: Synthetic oligonucleotide
ccuuagggcgacugcuguc

SEQ ID NO: 1168883 - RNA, 19 nt, Artificial Sequence
  Description of Artificial Sequence: Synthetic oligonucleotide
ccgacuaggagaaugcauu

SEQ ID NO: 1168884 - RNA, 19 nt, Artificial Sequence
  Description of Artificial Sequence: Synthetic oligonucleotide
aucgaggaauccagccuuu

SEQ ID NO: 1168885 - RNA, 19 nt, Artificial Sequence
  Description of Artificial Sequence: Synthetic oligonucleotide
gucgagcaauugcaucgua

SEQ ID NO: 1168886 - RNA, 19 nt, Artificial Sequence
  Description of Artificial Sequence: Synthetic oligonucleotide
cugcagcaaccuucugcga

SEQ ID NO: 1168887 - RNA, 19 nt, Artificial Sequence
  Description of Artificial Sequence: Synthetic oligonucleotide
ggacugccccugucgagca

SEQ ID NO: 1168888 - RNA, 19 nt, Artificial Sequence
  Description of Artificial Sequence: Synthetic oligonucleotide
augguguguagcggauaua

SEQ ID NO: 1168889 - RNA, 19 nt, Artificial Sequence
  Description of Artificial Sequence: Synthetic oligonucleotide
cugcacgaacaggcauggc

SEQ ID NO: 1168890 - RNA, 19 nt, Artificial Sequence
  Description of Artificial Sequence: Synthetic oligonucleotide
ccauccgaauaacccucug

SEQ ID NO: 1168891 - RNA, 19 nt, Artificial Sequence
  Description of Artificial Sequence: Synthetic oligonucleotide
ccggggaauuuucuuauua

SEQ ID NO: 1168892 - RNA, 19 nt, Artificial Sequence
  Description of Artificial Sequence: Synthetic oligonucleotide
gguuugguugaagagccuu

SEQ ID NO: 1168893 - RNA, 19 nt, Artificial Sequence
  Description of Artificial Sequence: Synthetic oligonucleotide
caauugcaucguauuuaau

SEQ ID NO: 1168894 - RNA, 19 nt, Artificial Sequence
  Description of Artificial Sequence: Synthetic oligonucleotide
cgaacaggcauggcugcag

SEQ ID NO: 1168895 - RNA, 19 nt, Artificial Sequence
  Description of Artificial Sequence: Synthetic oligonucleotide
agccagccguuuauccaga

SEQ ID NO: 1168896 - RNA, 19 nt, Artificial Sequence
  Description of Artificial Sequence: Synthetic oligonucleotide
cguggauuucugggaaagc

SEQ ID NO: 1168897 - RNA, 19 nt, Artificial Sequence
  Description of Artificial Sequence: Synthetic oligonucleotide
acccucuguuuagcuccag

SEQ ID NO: 1168898 - RNA, 19 nt, Artificial Sequence
  Description of Artificial Sequence: Synthetic oligonucleotide
caaaccuguuggucuuuau

SEQ ID NO: 1168899 - RNA, 19 nt, Artificial Sequence
  Description of Artificial Sequence: Synthetic oligonucleotide
cugucaugacggauuucau

SEQ ID NO: 1168900 - RNA, 19 nt, Artificial Sequence
  Description of Artificial Sequence: Synthetic oligonucleotide
agaggccuaucuacuccuu

SEQ ID NO: 1168901 - RNA, 19 nt, Artificial Sequence
  Description of Artificial Sequence: Synthetic oligonucleotide
cugcggucggaaccagaaa

SEQ ID NO: 1168902 - RNA, 19 nt, Artificial Sequence
  Description of Artificial Sequence: Synthetic oligonucleotide
ccuuuccgauacccguaug

SEQ ID NO: 1168903 - RNA, 19 nt, Artificial Sequence
  Description of Artificial Sequence: Synthetic oligonucleotide
gacugccccugucgagcaa

SEQ ID NO: 1168904 - RNA, 19 nt, Artificial Sequence
  Description of Artificial Sequence: Synthetic oligonucleotide
cggauauacugagcaggag

SEQ ID NO: 1168905 - RNA, 19 nt, Artificial Sequence
  Description of Artificial Sequence: Synthetic oligonucleotide
gguguguagcggauauacu

SEQ ID NO: 1168906 - RNA, 19 nt, Artificial Sequence
  Description of Artificial Sequence: Synthetic oligonucleotide
uccggucgugcugccucuc

SEQ ID NO: 1168907 - RNA, 19 nt, Artificial Sequence
  Description of Artificial Sequence: Synthetic oligonucleotide
gcuucacgagccuuccgau

SEQ ID NO: 1168908 - RNA, 19 nt, Artificial Sequence
  Description of Artificial Sequence: Synthetic oligonucleotide
gucugcggucggaaccaga

SEQ ID NO: 1168909 - RNA, 19 nt, Artificial Sequence
  Description of Artificial Sequence: Synthetic oligonucleotide
ccucucugucugcggucgg

SEQ ID NO: 1168910 - RNA, 19 nt, Artificial Sequence
  Description of Artificial Sequence: Synthetic oligonucleotide
ccguuuauccagaggaauu

SEQ ID NO: 1168911 - RNA, 19 nt, Artificial Sequence
  Description of Artificial Sequence: Synthetic oligonucleotide
cgaggauuaggcacaccaa

SEQ ID NO: 1168912 - RNA, 19 nt, Artificial Sequence
  Description of Artificial Sequence: Synthetic oligonucleotide
cgagcaauugcaucguauu

SEQ ID NO: 1168913 - RNA, 19 nt, Artificial Sequence
  Description of Artificial Sequence: Synthetic oligonucleotide
cgacuaggagaaugcauua

SEQ ID NO: 1168914 - RNA, 19 nt, Artificial Sequence
  Description of Artificial Sequence: Synthetic oligonucleotide
ggucgugcugccucucuuu

SEQ ID NO: 1168915 - RNA, 19 nt, Artificial Sequence
  Description of Artificial Sequence: Synthetic oligonucleotide
aucuuccgacuaggagaau

SEQ ID NO: 1168916 - RNA, 19 nt, Artificial Sequence
  Description of Artificial Sequence: Synthetic oligonucleotide
gccuuuccgauacccguau

SEQ ID NO: 1168917 - RNA, 19 nt, Artificial Sequence
  Description of Artificial Sequence: Synthetic oligonucleotide
cugcgccauuucucuaagu

SEQ ID NO: 1168918 - RNA, 19 nt, Artificial Sequence
  Description of Artificial Sequence: Synthetic oligonucleotide
gccccauauccaguggaua

SEQ ID NO: 1168919 - RNA, 19 nt, Artificial Sequence
  Description of Artificial Sequence: Synthetic oligonucleotide
guguaacccuuugcguuuu

SEQ ID NO: 1168920 - RNA, 19 nt, Artificial Sequence
  Description of Artificial Sequence: Synthetic oligonucleotide
cgagccuuccgaucagcaa

SEQ ID NO: 1168921 - RNA, 19 nt, Artificial Sequence
  Description of Artificial Sequence: Synthetic oligonucleotide
ccuuccgaucagcaaugua

SEQ ID NO: 1168922 - RNA, 19 nt, Artificial Sequence
  Description of Artificial Sequence: Synthetic oligonucleotide
cugggccacguggauuucu

SEQ ID NO: 1168923 - RNA, 19 nt, Artificial Sequence
  Description of Artificial Sequence: Synthetic oligonucleotide
gcgacugcugucagagggu

SEQ ID NO: 1168924 - RNA, 19 nt, Artificial Sequence
  Description of Artificial Sequence: Synthetic oligonucleotide
ccauaucuuuaccgccucu

SEQ ID NO: 1168925 - RNA, 19 nt, Artificial Sequence
  Description of Artificial Sequence: Synthetic oligonucleotide
gccugaucauaaacauuau

SEQ ID NO: 1168926 - RNA, 19 nt, Artificial Sequence
  Description of Artificial Sequence: Synthetic oligonucleotide
ccccggggaauuuucuuau

SEQ ID NO: 1168927 - RNA, 19 nt, Artificial Sequence
  Description of Artificial Sequence: Synthetic oligonucleotide
gccugucaugacggauuuc

SEQ ID NO: 1168928 - RNA, 19 nt, Artificial Sequence
  Description of Artificial Sequence: Synthetic oligonucleotide
cgccucuccaggccugauc

SEQ ID NO: 1168929 - RNA, 19 nt, Artificial Sequence
  Description of Artificial Sequence: Synthetic oligonucleotide
ggucccucucggccucucu

SEQ ID NO: 1168930 - RNA, 19 nt, Artificial Sequence
  Description of Artificial Sequence: Synthetic oligonucleotide
cccugucgagcaauugcau

SEQ ID NO: 1168931 - RNA, 19 nt, Artificial Sequence
  Description of Artificial Sequence: Synthetic oligonucleotide
ccuugcugagauggugugu

SEQ ID NO: 1168932 - RNA, 19 nt, Artificial Sequence
  Description of Artificial Sequence: Synthetic oligonucleotide
cgcgauuaauuaaccuuuu

SEQ ID NO: 1168933 - RNA, 19 nt, Artificial Sequence
  Description of Artificial Sequence: Synthetic oligonucleotide
gcauggcugcagcaaccuu

SEQ ID NO: 1168934 - RNA, 19 nt, Artificial Sequence
  Description of Artificial Sequence: Synthetic oligonucleotide
cucuggcuuucugcgccau

SEQ ID NO: 1168935 - RNA, 19 nt, Artificial Sequence
  Description of Artificial Sequence: Synthetic oligonucleotide
ccauacccuugguuugguu

SEQ ID NO: 1168936 - RNA, 19 nt, Artificial Sequence
  Description of Artificial Sequence: Synthetic oligonucleotide
ggugguccccggggaauuu

SEQ ID NO: 1168937 - RNA, 19 nt, Artificial Sequence
  Description of Artificial Sequence: Synthetic oligonucleotide
cgccccauauccaguggau

SEQ ID NO: 1168938 - RNA, 19 nt, Artificial Sequence
  Description of Artificial Sequence: Synthetic oligonucleotide
ccggucgugcugccucucu

SEQ ID NO: 1168939 - RNA, 19 nt, Artificial Sequence
  Description of Artificial Sequence: Synthetic oligonucleotide
cgccugucaugacggauuu

SEQ ID NO: 1168940 - RNA, 19 nt, Artificial Sequence
  Description of Artificial Sequence: Synthetic oligonucleotide
aauaagguaugacuggggc

SEQ ID NO: 1168941 - RNA, 19 nt, Artificial Sequence
  Description of Artificial Sequence: Synthetic oligonucleotide
uggauuaccuuaaauaugg

SEQ ID NO: 1168942 - RNA, 19 nt, Artificial Sequence
  Description of Artificial Sequence: Synthetic oligonucleotide
uuaaaugagaugaaaagac

SEQ ID NO: 1168943 - RNA, 19 nt, Artificial Sequence
  Description of Artificial Sequence: Synthetic oligonucleotide
uuugguuuuaucuuacggg

SEQ ID NO: 1168944 - RNA, 19 nt, Artificial Sequence
  Description of Artificial Sequence: Synthetic oligonucleotide
aauaguuuauucuauguau

SEQ ID NO: 1168945 - RNA, 19 nt, Artificial Sequence
  Description of Artificial Sequence: Synthetic oligonucleotide
aauaaguagcuccaacagg

SEQ ID NO: 1168946 - RNA, 19 nt, Artificial Sequence
  Description of Artificial Sequence: Synthetic oligonucleotide
ucugauagcgagcagcugg

SEQ ID NO: 1168947 - RNA, 19 nt, Artificial Sequence
  Description of Artificial Sequence: Synthetic oligonucleotide
uccgcaguaguacacaucg

SEQ ID NO: 1168948 - RNA, 19 nt, Artificial Sequence
  Description of Artificial Sequence: Synthetic oligonucleotide
uaauaaguagcuccaacag

SEQ ID NO: 1168949 - RNA, 19 nt, Artificial Sequence
  Description of Artificial Sequence: Synthetic oligonucleotide
uuuauauugcauugcacag

SEQ ID NO: 1168950 - RNA, 19 nt, Artificial Sequence
  Description of Artificial Sequence: Synthetic oligonucleotide
uuaagguccagauaagcag

SEQ ID NO: 1168951 - RNA, 19 nt, Artificial Sequence
  Description of Artificial Sequence: Synthetic oligonucleotide
aauugaaguuuccacaaca

SEQ ID NO: 1168952 - RNA, 19 nt, Artificial Sequence
  Description of Artificial Sequence: Synthetic oligonucleotide
aaaugagaugaaaagacag

SEQ ID NO: 1168953 - RNA, 19 nt, Artificial Sequence
  Description of Artificial Sequence: Synthetic oligonucleotide
agucgauaaaugaagaagc

SEQ ID NO: 1168954 - RNA, 19 nt, Artificial Sequence
  Description of Artificial Sequence: Synthetic oligonucleotide
uuugcgauauuuauauugc

SEQ ID NO: 1168955 - RNA, 19 nt, Artificial Sequence
  Description of Artificial Sequence: Synthetic oligonucleotide
uccucaaagaucuuaaugu

SEQ ID NO: 1168956 - RNA, 19 nt, Artificial Sequence
  Description of Artificial Sequence: Synthetic oligonucleotide
aaaucauacucuaaaguag

SEQ ID NO: 1168957 - RNA, 19 nt, Artificial Sequence
  Description of Artificial Sequence: Synthetic oligonucleotide
auggaauuaaaugagauga

SEQ ID NO: 1168958 - RNA, 19 nt, Artificial Sequence
  Description of Artificial Sequence: Synthetic oligonucleotide
ucgguaaucaccaugugcu

SEQ ID NO: 1168959 - RNA, 19 nt, Artificial Sequence
  Description of Artificial Sequence: Synthetic oligonucleotide
ugaagugcaaaauacuugu

SEQ ID NO: 1168960 - RNA, 19 nt, Artificial Sequence
  Description of Artificial Sequence: Synthetic oligonucleotide
agaggaaucacguagcacu

SEQ ID NO: 1168961 - RNA, 19 nt, Artificial Sequence
  Description of Artificial Sequence: Synthetic oligonucleotide
uguggauuaccuuaaauau

SEQ ID NO: 1168962 - RNA, 19 nt, Artificial Sequence
  Description of Artificial Sequence: Synthetic oligonucleotide
aguuaaaugcaacaccgag

SEQ ID NO: 1168963 - RNA, 19 nt, Artificial Sequence
  Description of Artificial Sequence: Synthetic oligonucleotide
aggccuaggauguugagac

SEQ ID NO: 1168964 - RNA, 19 nt, Artificial Sequence
  Description of Artificial Sequence: Synthetic oligonucleotide
augaacgccaguccaaagc

SEQ ID NO: 1168965 - RNA, 19 nt, Artificial Sequence
  Description of Artificial Sequence: Synthetic oligonucleotide
ugaaaagacagugaagccc

SEQ ID NO: 1168966 - RNA, 19 nt, Artificial Sequence
  Description of Artificial Sequence: Synthetic oligonucleotide
auaacacacagucucauca

SEQ ID NO: 1168967 - RNA, 19 nt, Artificial Sequence
  Description of Artificial Sequence: Synthetic oligonucleotide
uuaauggaauuaaaugaga

SEQ ID NO: 1168968 - RNA, 19 nt, Artificial Sequence
  Description of Artificial Sequence: Synthetic oligonucleotide
uugguuuuaucuuacggga

SEQ ID NO: 1168969 - RNA, 19 nt, Artificial Sequence
  Description of Artificial Sequence: Synthetic oligonucleotide
augacaauuccuuagguaa

SEQ ID NO: 1168970 - RNA, 19 nt, Artificial Sequence
  Description of Artificial Sequence: Synthetic oligonucleotide
ugaauaagguaugacuggg

SEQ ID NO: 1168971 - RNA, 19 nt, Artificial Sequence
  Description of Artificial Sequence: Synthetic oligonucleotide
aaacugauuuuguaagugu

SEQ ID NO: 1168972 - RNA, 19 nt, Artificial Sequence
  Description of Artificial Sequence: Synthetic oligonucleotide
auauuuauauugcauugca

SEQ ID NO: 1168973 - RNA, 19 nt, Artificial Sequence
  Description of Artificial Sequence: Synthetic oligonucleotide
uauauugcauugcacagau

SEQ ID NO: 1168974 - RNA, 19 nt, Artificial Sequence
  Description of Artificial Sequence: Synthetic oligonucleotide
aggaauauuagagcugggc

SEQ ID NO: 1168975 - RNA, 19 nt, Artificial Sequence
  Description of Artificial Sequence: Synthetic oligonucleotide
gaauauuagagcugggcuc

SEQ ID NO: 1168976 - RNA, 19 nt, Artificial Sequence
  Description of Artificial Sequence: Synthetic oligonucleotide
cuuaguuaaaggaauauua

SEQ ID NO: 1168977 - RNA, 19 nt, Artificial Sequence
  Description of Artificial Sequence: Synthetic oligonucleotide
auauggagaaccaaauuuc

SEQ ID NO: 1168978 - RNA, 19 nt, Artificial Sequence
  Description of Artificial Sequence: Synthetic oligonucleotide
aaugccgaauggcaaaaca

SEQ ID NO: 1168979 - RNA, 19 nt, Artificial Sequence
  Description of Artificial Sequence: Synthetic oligonucleotide
uucucgaaaugccgaaugg

SEQ ID NO: 1168980 - RNA, 19 nt, Artificial Sequence
  Description of Artificial Sequence: Synthetic oligonucleotide
accucuaauacuuucucug

SEQ ID NO: 1168981 - RNA, 19 nt, Artificial Sequence
  Description of Artificial Sequence: Synthetic oligonucleotide
aaaugacaauuccuuaggu

SEQ ID NO: 1168982 - RNA, 19 nt, Artificial Sequence
  Description of Artificial Sequence: Synthetic oligonucleotide
aaauauucuuacagcagag

SEQ ID NO: 1168983 - RNA, 19 nt, Artificial Sequence
  Description of Artificial Sequence: Synthetic oligonucleotide
aauugucugauagcgagca

SEQ ID NO: 1168984 - RNA, 19 nt, Artificial Sequence
  Description of Artificial Sequence: Synthetic oligonucleotide
uguaaguguauguaaggaa

SEQ ID NO: 1168985 - RNA, 19 nt, Artificial Sequence
  Description of Artificial Sequence: Synthetic oligonucleotide
aaucauacucuaaaguagu

SEQ ID NO: 1168986 - RNA, 19 nt, Artificial Sequence
  Description of Artificial Sequence: Synthetic oligonucleotide
ugugcagccucgucgaccg

SEQ ID NO: 1168987 - RNA, 19 nt, Artificial Sequence
  Description of Artificial Sequence: Synthetic oligonucleotide
auaaguagcuccaacaggu

SEQ ID NO: 1168988 - RNA, 19 nt, Artificial Sequence
  Description of Artificial Sequence: Synthetic oligonucleotide
auauacuucaguccgcagu

SEQ ID NO: 1168989 - RNA, 19 nt, Artificial Sequence
  Description of Artificial Sequence: Synthetic oligonucleotide
guuucuggguggcauaacg

SEQ ID NO: 1168990 - RNA, 19 nt, Artificial Sequence
  Description of Artificial Sequence: Synthetic oligonucleotide
ucgucgaccgagcucaggg

SEQ ID NO: 1168991 - RNA, 19 nt, Artificial Sequence
  Description of Artificial Sequence: Synthetic oligonucleotide
auaacgauggacguguuca

SEQ ID NO: 1168992 - RNA, 19 nt, Artificial Sequence
  Description of Artificial Sequence: Synthetic oligonucleotide
aguaguacacaucgucggg

SEQ ID NO: 1168993 - RNA, 19 nt, Artificial Sequence
  Description of Artificial Sequence: Synthetic oligonucleotide
ugcagcuuaguuaaaggaa

SEQ ID NO: 1168994 - RNA, 19 nt, Artificial Sequence
  Description of Artificial Sequence: Synthetic oligonucleotide
uguaaggaauuuaacuuua

SEQ ID NO: 1168995 - RNA, 19 nt, Artificial Sequence
  Description of Artificial Sequence: Synthetic oligonucleotide
ggcuauacaaaucaguaac

SEQ ID NO: 1168996 - RNA, 19 nt, Artificial Sequence
  Description of Artificial Sequence: Synthetic oligonucleotide
uagguaacccuuccucucg

SEQ ID NO: 1168997 - RNA, 19 nt, Artificial Sequence
  Description of Artificial Sequence: Synthetic oligonucleotide
aauaccucuaauacuuucu

SEQ ID NO: 1168998 - RNA, 19 nt, Artificial Sequence
  Description of Artificial Sequence: Synthetic oligonucleotide
ucgauaaaugaagaagccc

SEQ ID NO: 1168999 - RNA, 19 nt, Artificial Sequence
  Description of Artificial Sequence: Synthetic oligonucleotide
ugcgauauuuauauugcau

SEQ ID NO: 1169000 - RNA, 19 nt, Artificial Sequence
  Description of Artificial Sequence: Synthetic oligonucleotide
cucuaauacuuucucugcg

SEQ ID NO: 1169001 - RNA, 19 nt, Artificial Sequence
  Description of Artificial Sequence: Synthetic oligonucleotide
cugaagugcaaaauacuug

SEQ ID NO: 1169002 - RNA, 19 nt, Artificial Sequence
  Description of Artificial Sequence: Synthetic oligonucleotide
caguaguacacaucgucgg

SEQ ID NO: 1169003 - RNA, 19 nt, Artificial Sequence
  Description of Artificial Sequence: Synthetic oligonucleotide
uauucuauguauguggauu

SEQ ID NO: 1169004 - RNA, 19 nt, Artificial Sequence
  Description of Artificial Sequence: Synthetic oligonucleotide
augugggcuauacaaauca

SEQ ID NO: 1169005 - RNA, 19 nt, Artificial Sequence
  Description of Artificial Sequence: Synthetic oligonucleotide
cauacucuaaaguaguuaa

SEQ ID NO: 1169006 - RNA, 19 nt, Artificial Sequence
  Description of Artificial Sequence: Synthetic oligonucleotide
gguggcauaacgauggacg

SEQ ID NO: 1169007 - RNA, 19 nt, Artificial Sequence
  Description of Artificial Sequence: Synthetic oligonucleotide
cuuaaguuccaaacauuug

SEQ ID NO: 1169008 - RNA, 19 nt, Artificial Sequence
  Description of Artificial Sequence: Synthetic oligonucleotide
ucaguaacacgagugguug

SEQ ID NO: 1169009 - RNA, 19 nt, Artificial Sequence
  Description of Artificial Sequence: Synthetic oligonucleotide
agagguaugcgccuccgag

SEQ ID NO: 1169010 - RNA, 19 nt, Artificial Sequence
  Description of Artificial Sequence: Synthetic oligonucleotide
auaagcagugaguuucuug

SEQ ID NO: 1169011 - RNA, 19 nt, Artificial Sequence
  Description of Artificial Sequence: Synthetic oligonucleotide
acugcgcgaaagcagcagc

SEQ ID NO: 1169012 - RNA, 19 nt, Artificial Sequence
  Description of Artificial Sequence: Synthetic oligonucleotide
agugaguuucuuguuaaag

SEQ ID NO: 1169013 - RNA, 19 nt, Artificial Sequence
  Description of Artificial Sequence: Synthetic oligonucleotide
cagguuaagguccagauaa

SEQ ID NO: 1169014 - RNA, 19 nt, Artificial Sequence
  Description of Artificial Sequence: Synthetic oligonucleotide
aguugaacgucaccuucac

SEQ ID NO: 1169015 - RNA, 19 nt, Artificial Sequence
  Description of Artificial Sequence: Synthetic oligonucleotide
aguuccaaacauuuguuua

SEQ ID NO: 1169016 - RNA, 19 nt, Artificial Sequence
  Description of Artificial Sequence: Synthetic oligonucleotide
ugagacgucaaggugaaau

SEQ ID NO: 1169017 - RNA, 19 nt, Artificial Sequence
  Description of Artificial Sequence: Synthetic oligonucleotide
gaugcggucgguaaucacc

SEQ ID NO: 1169018 - RNA, 19 nt, Artificial Sequence
  Description of Artificial Sequence: Synthetic oligonucleotide
ugggcucaaaggcuaacag

SEQ ID NO: 1169019 - RNA, 19 nt, Artificial Sequence
  Description of Artificial Sequence: Synthetic oligonucleotide
uuauauugcauugcacaga

SEQ ID NO: 1169020 - RNA, 19 nt, Artificial Sequence
  Description of Artificial Sequence: Synthetic oligonucleotide
agcccuguuugcuacuuac

SEQ ID NO: 1169021 - RNA, 19 nt, Artificial Sequence
  Description of Artificial Sequence: Synthetic oligonucleotide
ugccgaauggcaaaacagu

SEQ ID NO: 1169022 - RNA, 19 nt, Artificial Sequence
  Description of Artificial Sequence: Synthetic oligonucleotide
gagugguugcuuaaguucc

SEQ ID NO: 1169023 - RNA, 19 nt, Artificial Sequence
  Description of Artificial Sequence: Synthetic oligonucleotide
gaauaagguaugacugggg

SEQ ID NO: 1169024 - RNA, 19 nt, Artificial Sequence
  Description of Artificial Sequence: Synthetic oligonucleotide
ugugggcuauacaaaucag

SEQ ID NO: 1169025 - RNA, 19 nt, Artificial Sequence
  Description of Artificial Sequence: Synthetic oligonucleotide
augagcgccuccucgcugc

SEQ ID NO: 1169026 - RNA, 19 nt, Artificial Sequence
  Description of Artificial Sequence: Synthetic oligonucleotide
ugacaauuccuuagguaac

SEQ ID NO: 1169027 - RNA, 19 nt, Artificial Sequence
  Description of Artificial Sequence: Synthetic oligonucleotide
cacguuuucgaugcggucg

SEQ ID NO: 1169028 - RNA, 19 nt, Artificial Sequence
  Description of Artificial Sequence: Synthetic oligonucleotide
ucuggguggcauaacgaug

SEQ ID NO: 1169029 - RNA, 19 nt, Artificial Sequence
  Description of Artificial Sequence: Synthetic oligonucleotide
auaagguaugacuggggca

SEQ ID NO: 1169030 - RNA, 19 nt, Artificial Sequence
  Description of Artificial Sequence: Synthetic oligonucleotide
gucgguaaucaccaugugc

SEQ ID NO: 1169031 - RNA, 19 nt, Artificial Sequence
  Description of Artificial Sequence: Synthetic oligonucleotide
gaauaccucuaauacuuuc

SEQ ID NO: 1169032 - RNA, 19 nt, Artificial Sequence
  Description of Artificial Sequence: Synthetic oligonucleotide
gagguaugcgccuccgagg

SEQ ID NO: 1169033 - RNA, 19 nt, Artificial Sequence
  Description of Artificial Sequence: Synthetic oligonucleotide
ucuauguauguggauuacc

SEQ ID NO: 1169034 - RNA, 19 nt, Artificial Sequence
  Description of Artificial Sequence: Synthetic oligonucleotide
ugacugcucaagaacaaau

SEQ ID NO: 1169035 - RNA, 19 nt, Artificial Sequence
  Description of Artificial Sequence: Synthetic oligonucleotide
uggaauuaaaugagaugaa

SEQ ID NO: 1169036 - RNA, 19 nt, Artificial Sequence
  Description of Artificial Sequence: Synthetic oligonucleotide
uaaguguauguaaggaauu

SEQ ID NO: 1169037 - RNA, 19 nt, Artificial Sequence
  Description of Artificial Sequence: Synthetic oligonucleotide
uuuucgaugcggucgguaa

SEQ ID NO: 1169038 - RNA, 19 nt, Artificial Sequence
  Description of Artificial Sequence: Synthetic oligonucleotide
auacuuguagagguaugcg

SEQ ID NO: 1169039 - RNA, 19 nt, Artificial Sequence
  Description of Artificial Sequence: Synthetic oligonucleotide
ugauauacuucaguccgca

SEQ ID NO: 1169040 - RNA, 19 nt, Artificial Sequence
  Description of Artificial Sequence: Synthetic oligonucleotide
acacagucgauaaaugaag

SEQ ID NO: 1169041 - RNA, 19 nt, Artificial Sequence
  Description of Artificial Sequence: Synthetic oligonucleotide
ucgaaaugccgaauggcaa

SEQ ID NO: 1169042 - RNA, 19 nt, Artificial Sequence
  Description of Artificial Sequence: Synthetic oligonucleotide
gauguugagacgucaaggu

SEQ ID NO: 1169043 - RNA, 19 nt, Artificial Sequence
  Description of Artificial Sequence: Synthetic oligonucleotide
gguugcuuaaguuccaaac

SEQ ID NO: 1169044 - RNA, 19 nt, Artificial Sequence
  Description of Artificial Sequence: Synthetic oligonucleotide
guucucgaaaugccgaaug

SEQ ID NO: 1169045 - RNA, 19 nt, Artificial Sequence
  Description of Artificial Sequence: Synthetic oligonucleotide
acguuuucgaugcggucgg

SEQ ID NO: 1169046 - RNA, 19 nt, Artificial Sequence
  Description of Artificial Sequence: Synthetic oligonucleotide
gacaccagcgagcaugaac

SEQ ID NO: 1169047 - RNA, 19 nt, Artificial Sequence
  Description of Artificial Sequence: Synthetic oligonucleotide
aaaugccgaauggcaaaac

SEQ ID NO: 1169048 - RNA, 19 nt, Artificial Sequence
  Description of Artificial Sequence: Synthetic oligonucleotide
ggugaaaucauacucuaaa

SEQ ID NO: 1169049 - RNA, 19 nt, Artificial Sequence
  Description of Artificial Sequence: Synthetic oligonucleotide
cucgucucuguccaacugg

SEQ ID NO: 1169050 - RNA, 19 nt, Artificial Sequence
  Description of Artificial Sequence: Synthetic oligonucleotide
ugcguugcagcuuguaggu

SEQ ID NO: 1169051 - RNA, 19 nt, Artificial Sequence
  Description of Artificial Sequence: Synthetic oligonucleotide
cucaucacauggcuuugcg

SEQ ID NO: 1169052 - RNA, 19 nt, Artificial Sequence
  Description of Artificial Sequence: Synthetic oligonucleotide
aucuacaagucagucacug

SEQ ID NO: 1169053 - RNA, 19 nt, Artificial Sequence
  Description of Artificial Sequence: Synthetic oligonucleotide
uucacgcuucugaauaccu

SEQ ID NO: 1169054 - RNA, 19 nt, Artificial Sequence
  Description of Artificial Sequence: Synthetic oligonucleotide
ucuuacagcagaggccuag

SEQ ID NO: 1169055 - RNA, 19 nt, Artificial Sequence
  Description of Artificial Sequence: Synthetic oligonucleotide
acugaugaauucaaccuca

SEQ ID NO: 1169056 - RNA, 19 nt, Artificial Sequence
  Description of Artificial Sequence: Synthetic oligonucleotide
ggauguugagacgucaagg

SEQ ID NO: 1169057 - RNA, 19 nt, Artificial Sequence
  Description of Artificial Sequence: Synthetic oligonucleotide
uugcgauauuuauauugca

SEQ ID NO: 1169058 - RNA, 19 nt, Artificial Sequence
  Description of Artificial Sequence: Synthetic oligonucleotide
cucgaaaugccgaauggca

SEQ ID NO: 1169059 - RNA, 19 nt, Artificial Sequence
  Description of Artificial Sequence: Synthetic oligonucleotide
uccacguuuucgaugcggu

SEQ ID NO: 1169060 - RNA, 19 nt, Artificial Sequence
  Description of Artificial Sequence: Synthetic oligonucleotide
acaucgucgggcugaagug

SEQ ID NO: 1169061 - RNA, 19 nt, Artificial Sequence
  Description of Artificial Sequence: Synthetic oligonucleotide
gucgaccgagcucagggcg

SEQ ID NO: 1169062 - RNA, 19 nt, Artificial Sequence
  Description of Artificial Sequence: Synthetic oligonucleotide
gagacgucaaggugaaauc

SEQ ID NO: 1169063 - RNA, 19 nt, Artificial Sequence
  Description of Artificial Sequence: Synthetic oligonucleotide
acagucgauaaaugaagaa

SEQ ID NO: 1169064 - RNA, 19 nt, Artificial Sequence
  Description of Artificial Sequence: Synthetic oligonucleotide
ugugcucaugaauaaggua

SEQ ID NO: 1169065 - RNA, 19 nt, Artificial Sequence
  Description of Artificial Sequence: Synthetic oligonucleotide
uucaguccgcaguaguaca

SEQ ID NO: 1169066 - RNA, 19 nt, Artificial Sequence
  Description of Artificial Sequence: Synthetic oligonucleotide
caauugucugauagcgagc

SEQ ID NO: 1169067 - RNA, 19 nt, Artificial Sequence
  Description of Artificial Sequence: Synthetic oligonucleotide
uaacgauggacguguucag

SEQ ID NO: 1169068 - RNA, 19 nt, Artificial Sequence
  Description of Artificial Sequence: Synthetic oligonucleotide
guggauuaccuuaaauaug

SEQ ID NO: 1169069 - RNA, 19 nt, Artificial Sequence
  Description of Artificial Sequence: Synthetic oligonucleotide
ugguuuuaucuuacgggaa

SEQ ID NO: 1169070 - RNA, 19 nt, Artificial Sequence
  Description of Artificial Sequence: Synthetic oligonucleotide
uaccucuaauacuuucucu

SEQ ID NO: 1169071 - RNA, 19 nt, Artificial Sequence
  Description of Artificial Sequence: Synthetic oligonucleotide
uaguacacaucgucgggcu

SEQ ID NO: 1169072 - RNA, 19 nt, Artificial Sequence
  Description of Artificial Sequence: Synthetic oligonucleotide
uacuucaguccgcaguagu

SEQ ID NO: 1169073 - RNA, 19 nt, Artificial Sequence
  Description of Artificial Sequence: Synthetic oligonucleotide
uucuggguggcauaacgau

SEQ ID NO: 1169074 - RNA, 19 nt, Artificial Sequence
  Description of Artificial Sequence: Synthetic oligonucleotide
agguaugcgccuccgagga

SEQ ID NO: 1169075 - RNA, 19 nt, Artificial Sequence
  Description of Artificial Sequence: Synthetic oligonucleotide
aaguguauguaaggaauuu

SEQ ID NO: 1169076 - RNA, 19 nt, Artificial Sequence
  Description of Artificial Sequence: Synthetic oligonucleotide
gaguacugcagcuuaguua

SEQ ID NO: 1169077 - RNA, 19 nt, Artificial Sequence
  Description of Artificial Sequence: Synthetic oligonucleotide
uuauucuauguauguggau

SEQ ID NO: 1169078 - RNA, 19 nt, Artificial Sequence
  Description of Artificial Sequence: Synthetic oligonucleotide
cuauguauguggauuaccu

SEQ ID NO: 1169079 - RNA, 19 nt, Artificial Sequence
  Description of Artificial Sequence: Synthetic oligonucleotide
augccgaauggcaaaacag

SEQ ID NO: 1169080 - RNA, 19 nt, Artificial Sequence
  Description of Artificial Sequence: Synthetic oligonucleotide
auguuaauaaguagcucca

SEQ ID NO: 1169081 - RNA, 19 nt, Artificial Sequence
  Description of Artificial Sequence: Synthetic oligonucleotide
aguaacacgagugguugcu

SEQ ID NO: 1169082 - RNA, 19 nt, Artificial Sequence
  Description of Artificial Sequence: Synthetic oligonucleotide
ugcuuaaguuccaaacauu

SEQ ID NO: 1169083 - RNA, 19 nt, Artificial Sequence
  Description of Artificial Sequence: Synthetic oligonucleotide
ucaguccgcaguaguacac

SEQ ID NO: 1169084 - RNA, 19 nt, Artificial Sequence
  Description of Artificial Sequence: Synthetic oligonucleotide
aacgccaguccaaagcaca

SEQ ID NO: 1169085 - RNA, 19 nt, Artificial Sequence
  Description of Artificial Sequence: Synthetic oligonucleotide
guaguacacaucgucgggc

SEQ ID NO: 1169086 - RNA, 19 nt, Artificial Sequence
  Description of Artificial Sequence: Synthetic oligonucleotide
gcaguaguacacaucgucg

SEQ ID NO: 1169087 - RNA, 19 nt, Artificial Sequence
  Description of Artificial Sequence: Synthetic oligonucleotide
cucaugaauaagguaugac

SEQ ID NO: 1169088 - RNA, 19 nt, Artificial Sequence
  Description of Artificial Sequence: Synthetic oligonucleotide
gacguguucagaggaauca

SEQ ID NO: 1169089 - RNA, 19 nt, Artificial Sequence
  Description of Artificial Sequence: Synthetic oligonucleotide
accagcgagcaugaacgcc

SEQ ID NO: 1169090 - RNA, 19 nt, Artificial Sequence
  Description of Artificial Sequence: Synthetic oligonucleotide
cugcgcgaaagcagcagcg

SEQ ID NO: 1169091 - RNA, 19 nt, Artificial Sequence
  Description of Artificial Sequence: Synthetic oligonucleotide
agccuugauguuaauaagu

SEQ ID NO: 1169092 - RNA, 19 nt, Artificial Sequence
  Description of Artificial Sequence: Synthetic oligonucleotide
gggagcaucuacaagucag

SEQ ID NO: 1169093 - RNA, 19 nt, Artificial Sequence
  Description of Artificial Sequence: Synthetic oligonucleotide
acguguucagaggaaucac

SEQ ID NO: 1169094 - RNA, 19 nt, Artificial Sequence
  Description of Artificial Sequence: Synthetic oligonucleotide
cugcagcuuaguuaaagga

SEQ ID NO: 1169095 - RNA, 19 nt, Artificial Sequence
  Description of Artificial Sequence: Synthetic oligonucleotide
gaacgucaccuucaccaug

SEQ ID NO: 1169096 - RNA, 19 nt, Artificial Sequence
  Description of Artificial Sequence: Synthetic oligonucleotide
agacgucaaggugaaauca

SEQ ID NO: 1169097 - RNA, 19 nt, Artificial Sequence
  Description of Artificial Sequence: Synthetic oligonucleotide
auccggguccuugcaaucc

SEQ ID NO: 1169098 - RNA, 19 nt, Artificial Sequence
  Description of Artificial Sequence: Synthetic oligonucleotide
uguucagaggaaucacgua

SEQ ID NO: 1169099 - RNA, 19 nt, Artificial Sequence
  Description of Artificial Sequence: Synthetic oligonucleotide
cuucaguccgcaguaguac

SEQ ID NO: 1169100 - RNA, 19 nt, Artificial Sequence
  Description of Artificial Sequence: Synthetic oligonucleotide
ugcgcgaaagcagcagcgg

SEQ ID NO: 1169101 - RNA, 19 nt, Artificial Sequence
  Description of Artificial Sequence: Synthetic oligonucleotide
ggaauauuagagcugggcu

SEQ ID NO: 1169102 - RNA, 19 nt, Artificial Sequence
  Description of Artificial Sequence: Synthetic oligonucleotide
ugaauaccucuaauacuuu

SEQ ID NO: 1169103 - RNA, 19 nt, Artificial Sequence
  Description of Artificial Sequence: Synthetic oligonucleotide
cacagucgauaaaugaaga

SEQ ID NO: 1169104 - RNA, 19 nt, Artificial Sequence
  Description of Artificial Sequence: Synthetic oligonucleotide
guaaguguauguaaggaau

SEQ ID NO: 1169105 - RNA, 19 nt, Artificial Sequence
  Description of Artificial Sequence: Synthetic oligonucleotide
ucacgcuucugaauaccuc

SEQ ID NO: 1169106 - RNA, 19 nt, Artificial Sequence
  Description of Artificial Sequence: Synthetic oligonucleotide
cuuacagcagaggccuagg

SEQ ID NO: 1169107 - RNA, 19 nt, Artificial Sequence
  Description of Artificial Sequence: Synthetic oligonucleotide
uuucgaugcggucgguaau

SEQ ID NO: 1169108 - RNA, 19 nt, Artificial Sequence
  Description of Artificial Sequence: Synthetic oligonucleotide
ucacauggcuuugcgauau

SEQ ID NO: 1169109 - RNA, 19 nt, Artificial Sequence
  Description of Artificial Sequence: Synthetic oligonucleotide
ugggagcaucuacaaguca

SEQ ID NO: 1169110 - RNA, 19 nt, Artificial Sequence
  Description of Artificial Sequence: Synthetic oligonucleotide
caugaacgccaguccaaag

SEQ ID NO: 1169111 - RNA, 19 nt, Artificial Sequence
  Description of Artificial Sequence: Synthetic oligonucleotide
uaacacgagugguugcuua

SEQ ID NO: 1169112 - RNA, 19 nt, Artificial Sequence
  Description of Artificial Sequence: Synthetic oligonucleotide
uaugcgccuccgaggauga

SEQ ID NO: 1169113 - RNA, 19 nt, Artificial Sequence
  Description of Artificial Sequence: Synthetic oligonucleotide
ucaugacacagucgauaaa

SEQ ID NO: 1169114 - RNA, 19 nt, Artificial Sequence
  Description of Artificial Sequence: Synthetic oligonucleotide
cucguucaagaugacauca

SEQ ID NO: 1169115 - RNA, 19 nt, Artificial Sequence
  Description of Artificial Sequence: Synthetic oligonucleotide
cauaacgauggacguguuc

SEQ ID NO: 1169116 - RNA, 19 nt, Artificial Sequence
  Description of Artificial Sequence: Synthetic oligonucleotide
gaugugggcuauacaaauc

SEQ ID NO: 1169117 - RNA, 19 nt, Artificial Sequence
  Description of Artificial Sequence: Synthetic oligonucleotide
cuucacgcuucugaauacc

SEQ ID NO: 1169118 - RNA, 19 nt, Artificial Sequence
  Description of Artificial Sequence: Synthetic oligonucleotide
ucgaccgagcucagggcgc

SEQ ID NO: 1169119 - RNA, 19 nt, Artificial Sequence
  Description of Artificial Sequence: Synthetic oligonucleotide
caucacauggcuuugcgau

SEQ ID NO: 1169120 - RNA, 19 nt, Artificial Sequence
  Description of Artificial Sequence: Synthetic oligonucleotide
guaugcgccuccgaggaug

SEQ ID NO: 1169121 - RNA, 19 nt, Artificial Sequence
  Description of Artificial Sequence: Synthetic oligonucleotide
ccuuuuaacacacauaaau

SEQ ID NO: 1169122 - RNA, 19 nt, Artificial Sequence
  Description of Artificial Sequence: Synthetic oligonucleotide
guuuccuugucaugacaca

SEQ ID NO: 1169123 - RNA, 19 nt, Artificial Sequence
  Description of Artificial Sequence: Synthetic oligonucleotide
caguaacacgagugguugc

SEQ ID NO: 1169124 - RNA, 19 nt, Artificial Sequence
  Description of Artificial Sequence: Synthetic oligonucleotide
uucgaugcggucgguaauc

SEQ ID NO: 1169125 - RNA, 19 nt, Artificial Sequence
  Description of Artificial Sequence: Synthetic oligonucleotide
gucaaggugaaaucauacu

SEQ ID NO: 1169126 - RNA, 19 nt, Artificial Sequence
  Description of Artificial Sequence: Synthetic oligonucleotide
ugcagccucgucgaccgag

SEQ ID NO: 1169127 - RNA, 19 nt, Artificial Sequence
  Description of Artificial Sequence: Synthetic oligonucleotide
uggcauaacgauggacgug

SEQ ID NO: 1169128 - RNA, 19 nt, Artificial Sequence
  Description of Artificial Sequence: Synthetic oligonucleotide
ggcuuugcgauauuuauau

SEQ ID NO: 1169129 - RNA, 19 nt, Artificial Sequence
  Description of Artificial Sequence: Synthetic oligonucleotide
agaggccuaggauguugag

SEQ ID NO: 1169130 - RNA, 19 nt, Artificial Sequence
  Description of Artificial Sequence: Synthetic oligonucleotide
caucgucgggcugaagugc

SEQ ID NO: 1169131 - RNA, 19 nt, Artificial Sequence
  Description of Artificial Sequence: Synthetic oligonucleotide
aggcacacugaugaauuca

SEQ ID NO: 1169132 - RNA, 19 nt, Artificial Sequence
  Description of Artificial Sequence: Synthetic oligonucleotide
gaaaugccgaauggcaaaa

SEQ ID NO: 1169133 - RNA, 19 nt, Artificial Sequence
  Description of Artificial Sequence: Synthetic oligonucleotide
ccuuagguaacccuuccuc

SEQ ID NO: 1169134 - RNA, 19 nt, Artificial Sequence
  Description of Artificial Sequence: Synthetic oligonucleotide
uagagguaugcgccuccga

SEQ ID NO: 1169135 - RNA, 19 nt, Artificial Sequence
  Description of Artificial Sequence: Synthetic oligonucleotide
aucaguaacacgagugguu

SEQ ID NO: 1169136 - RNA, 19 nt, Artificial Sequence
  Description of Artificial Sequence: Synthetic oligonucleotide
caaguagguuccagccuug

SEQ ID NO: 1169137 - RNA, 19 nt, Artificial Sequence
  Description of Artificial Sequence: Synthetic oligonucleotide
agccucgucgaccgagcuc

SEQ ID NO: 1169138 - RNA, 19 nt, Artificial Sequence
  Description of Artificial Sequence: Synthetic oligonucleotide
cugauagcgagcagcugga

SEQ ID NO: 1169139 - RNA, 19 nt, Artificial Sequence
  Description of Artificial Sequence: Synthetic oligonucleotide
gaggccuaggauguugaga

SEQ ID NO: 1169140 - RNA, 19 nt, Artificial Sequence
  Description of Artificial Sequence: Synthetic oligonucleotide
uggacguguucagaggaau

SEQ ID NO: 1169141 - RNA, 19 nt, Artificial Sequence
  Description of Artificial Sequence: Synthetic oligonucleotide
gagcggacugcgcgaaagc

SEQ ID NO: 1169142 - RNA, 19 nt, Artificial Sequence
  Description of Artificial Sequence: Synthetic oligonucleotide
aguccgcaguaguacacau

SEQ ID NO: 1169143 - RNA, 19 nt, Artificial Sequence
  Description of Artificial Sequence: Synthetic oligonucleotide
uguucucgaaaugccgaau

SEQ ID NO: 1169144 - RNA, 19 nt, Artificial Sequence
  Description of Artificial Sequence: Synthetic oligonucleotide
auacuucaguccgcaguag

SEQ ID NO: 1169145 - RNA, 19 nt, Artificial Sequence
  Description of Artificial Sequence: Synthetic oligonucleotide
gggcugaagugcaaaauac

SEQ ID NO: 1169146 - RNA, 19 nt, Artificial Sequence
  Description of Artificial Sequence: Synthetic oligonucleotide
cagaggaaucacguagcac

SEQ ID NO: 1169147 - RNA, 19 nt, Artificial Sequence
  Description of Artificial Sequence: Synthetic oligonucleotide
agguuaagguccagauaag

SEQ ID NO: 1169148 - RNA, 19 nt, Artificial Sequence
  Description of Artificial Sequence: Synthetic oligonucleotide
augcggucgguaaucacca

SEQ ID NO: 1169149 - RNA, 19 nt, Artificial Sequence
  Description of Artificial Sequence: Synthetic oligonucleotide
cgagugguugcuuaaguuc

SEQ ID NO: 1169150 - RNA, 19 nt, Artificial Sequence
  Description of Artificial Sequence: Synthetic oligonucleotide
guaacccuuccucucggaa

SEQ ID NO: 1169151 - RNA, 19 nt, Artificial Sequence
  Description of Artificial Sequence: Synthetic oligonucleotide
cauugcacagaugugggcu

SEQ ID NO: 1169152 - RNA, 19 nt, Artificial Sequence
  Description of Artificial Sequence: Synthetic oligonucleotide
auacucuaaaguaguuaaa

SEQ ID NO: 1169153 - RNA, 19 nt, Artificial Sequence
  Description of Artificial Sequence: Synthetic oligonucleotide
ggcuucacgcuucugaaua

SEQ ID NO: 1169154 - RNA, 19 nt, Artificial Sequence
  Description of Artificial Sequence: Synthetic oligonucleotide
cgucaaggugaaaucauac

SEQ ID NO: 1169155 - RNA, 19 nt, Artificial Sequence
  Description of Artificial Sequence: Synthetic oligonucleotide
ucgaugcggucgguaauca

SEQ ID NO: 1169156 - RNA, 19 nt, Artificial Sequence
  Description of Artificial Sequence: Synthetic oligonucleotide
gaacgccaguccaaagcac

SEQ ID NO: 1169157 - RNA, 19 nt, Artificial Sequence
  Description of Artificial Sequence: Synthetic oligonucleotide
ucgggcugaagugcaaaau

SEQ ID NO: 1169158 - RNA, 19 nt, Artificial Sequence
  Description of Artificial Sequence: Synthetic oligonucleotide
guugagacgucaaggugaa

SEQ ID NO: 1169159 - RNA, 19 nt, Artificial Sequence
  Description of Artificial Sequence: Synthetic oligonucleotide
agcggacugcgcgaaagca

SEQ ID NO: 1169160 - RNA, 19 nt, Artificial Sequence
  Description of Artificial Sequence: Synthetic oligonucleotide
caccagcgagcaugaacgc

SEQ ID NO: 1169161 - RNA, 19 nt, Artificial Sequence
  Description of Artificial Sequence: Synthetic oligonucleotide
guggcauaacgauggacgu

SEQ ID NO: 1169162 - RNA, 19 nt, Artificial Sequence
  Description of Artificial Sequence: Synthetic oligonucleotide
gcgauauuuauauugcauu

SEQ ID NO: 1169163 - RNA, 19 nt, Artificial Sequence
  Description of Artificial Sequence: Synthetic oligonucleotide
uggcuucacgcuucugaau

SEQ ID NO: 1169164 - RNA, 19 nt, Artificial Sequence
  Description of Artificial Sequence: Synthetic oligonucleotide
gcaacaccgagaguacugc

SEQ ID NO: 1169165 - RNA, 19 nt, Artificial Sequence
  Description of Artificial Sequence: Synthetic oligonucleotide
uauuagagcugggcucaaa

SEQ ID NO: 1169166 - RNA, 19 nt, Artificial Sequence
  Description of Artificial Sequence: Synthetic oligonucleotide
gaagugcaaaauacuugua

SEQ ID NO: 1169167 - RNA, 19 nt, Artificial Sequence
  Description of Artificial Sequence: Synthetic oligonucleotide
gggcuauacaaaucaguaa

SEQ ID NO: 1169168 - RNA, 19 nt, Artificial Sequence
  Description of Artificial Sequence: Synthetic oligonucleotide
cauccggguccuugcaauc

SEQ ID NO: 1169169 - RNA, 19 nt, Artificial Sequence
  Description of Artificial Sequence: Synthetic oligonucleotide
gucgcgggcggugggaucc

SEQ ID NO: 1169170 - RNA, 19 nt, Artificial Sequence
  Description of Artificial Sequence: Synthetic oligonucleotide
aucauacucuaaaguaguu

SEQ ID NO: 1169171 - RNA, 19 nt, Artificial Sequence
  Description of Artificial Sequence: Synthetic oligonucleotide
cuguucucgaaaugccgaa

SEQ ID NO: 1169172 - RNA, 19 nt, Artificial Sequence
  Description of Artificial Sequence: Synthetic oligonucleotide
ggcauaacgauggacgugu

SEQ ID NO: 1169173 - RNA, 19 nt, Artificial Sequence
  Description of Artificial Sequence: Synthetic oligonucleotide
cagcgagcaugaacgccag

SEQ ID NO: 1169174 - RNA, 19 nt, Artificial Sequence
  Description of Artificial Sequence: Synthetic oligonucleotide
cgcaguaguacacaucguc

SEQ ID NO: 1169175 - RNA, 19 nt, Artificial Sequence
  Description of Artificial Sequence: Synthetic oligonucleotide
gcauugcacagaugugggc

SEQ ID NO: 1169176 - RNA, 19 nt, Artificial Sequence
  Description of Artificial Sequence: Synthetic oligonucleotide
ccagcgagcaugaacgcca

SEQ ID NO: 1169177 - RNA, 19 nt, Artificial Sequence
  Description of Artificial Sequence: Synthetic oligonucleotide
ggagcggacugcgcgaaag

SEQ ID NO: 1169178 - RNA, 19 nt, Artificial Sequence
  Description of Artificial Sequence: Synthetic oligonucleotide
gcggucgguaaucaccaug

SEQ ID NO: 1169179 - RNA, 19 nt, Artificial Sequence
  Description of Artificial Sequence: Synthetic oligonucleotide
cuaauacuuucucugcguu

SEQ ID NO: 1169180 - RNA, 19 nt, Artificial Sequence
  Description of Artificial Sequence: Synthetic oligonucleotide
ggccuaggauguugagacg

SEQ ID NO: 1169181 - RNA, 19 nt, Artificial Sequence
  Description of Artificial Sequence: Synthetic oligonucleotide
gcuucacgcuucugaauac

SEQ ID NO: 1169182 - RNA, 19 nt, Artificial Sequence
  Description of Artificial Sequence: Synthetic oligonucleotide
aucgucgggcugaagugca

SEQ ID NO: 1169183 - RNA, 19 nt, Artificial Sequence
  Description of Artificial Sequence: Synthetic oligonucleotide
gcucguucaagaugacauc

SEQ ID NO: 1169184 - RNA, 19 nt, Artificial Sequence
  Description of Artificial Sequence: Synthetic oligonucleotide
agguaugacuggggcaagu

SEQ ID NO: 1169185 - RNA, 19 nt, Artificial Sequence
  Description of Artificial Sequence: Synthetic oligonucleotide
gccucgucgaccgagcuca

SEQ ID NO: 1169186 - RNA, 19 nt, Artificial Sequence
  Description of Artificial Sequence: Synthetic oligonucleotide
acgucaaggugaaaucaua

SEQ ID NO: 1169187 - RNA, 19 nt, Artificial Sequence
  Description of Artificial Sequence: Synthetic oligonucleotide
ggcucguucaagaugacau

SEQ ID NO: 1169188 - RNA, 19 nt, Artificial Sequence
  Description of Artificial Sequence: Synthetic oligonucleotide
auauugcauugcacagaug

SEQ ID NO: 1169189 - RNA, 19 nt, Artificial Sequence
  Description of Artificial Sequence: Synthetic oligonucleotide
ggcaaaacaguuacuggcu

SEQ ID NO: 1169190 - RNA, 19 nt, Artificial Sequence
  Description of Artificial Sequence: Synthetic oligonucleotide
gcuuaaguuccaaacauuu

SEQ ID NO: 1169191 - RNA, 19 nt, Artificial Sequence
  Description of Artificial Sequence: Synthetic oligonucleotide
cugggcucaaaggcuaaca

SEQ ID NO: 1169192 - RNA, 19 nt, Artificial Sequence
  Description of Artificial Sequence: Synthetic oligonucleotide
gcgcgaaagcagcagcggc

SEQ ID NO: 1169193 - RNA, 19 nt, Artificial Sequence
  Description of Artificial Sequence: Synthetic oligonucleotide
gucgggcugaagugcaaaa

SEQ ID NO: 1169194 - RNA, 19 nt, Artificial Sequence
  Description of Artificial Sequence: Synthetic oligonucleotide
ggucgguaaucaccaugug

SEQ ID NO: 1169195 - RNA, 19 nt, Artificial Sequence
  Description of Artificial Sequence: Synthetic oligonucleotide
cgaguugaacgucaccuuc

SEQ ID NO: 1169196 - RNA, 19 nt, Artificial Sequence
  Description of Artificial Sequence: Synthetic oligonucleotide
gucugauagcgagcagcug

SEQ ID NO: 1169197 - RNA, 19 nt, Artificial Sequence
  Description of Artificial Sequence: Synthetic oligonucleotide
auacaaggggagggcuaug

SEQ ID NO: 1169198 - RNA, 19 nt, Artificial Sequence
  Description of Artificial Sequence: Synthetic oligonucleotide
caucauccggguccuugca

SEQ ID NO: 1169199 - RNA, 19 nt, Artificial Sequence
  Description of Artificial Sequence: Synthetic oligonucleotide
ggcacacugaugaauucaa

SEQ ID NO: 1169200 - RNA, 19 nt, Artificial Sequence
  Description of Artificial Sequence: Synthetic oligonucleotide
gccgaguugaacgucaccu

SEQ ID NO: 1169201 - RNA, 19 nt, Artificial Sequence
  Description of Artificial Sequence: Synthetic oligonucleotide
gcagcuuaguuaaaggaau

SEQ ID NO: 1169202 - RNA, 19 nt, Artificial Sequence
  Description of Artificial Sequence: Synthetic oligonucleotide
ucgucgggcugaagugcaa

SEQ ID NO: 1169203 - RNA, 19 nt, Artificial Sequence
  Description of Artificial Sequence: Synthetic oligonucleotide
gguccuuuuaacacacaua

SEQ ID NO: 1169204 - RNA, 19 nt, Artificial Sequence
  Description of Artificial Sequence: Synthetic oligonucleotide
cucgucgaccgagcucagg

SEQ ID NO: 1169205 - RNA, 19 nt, Artificial Sequence
  Description of Artificial Sequence: Synthetic oligonucleotide
gcucaugaauaagguauga

SEQ ID NO: 1169206 - RNA, 19 nt, Artificial Sequence
  Description of Artificial Sequence: Synthetic oligonucleotide
ccuaggauguugagacguc

SEQ ID NO: 1169207 - RNA, 19 nt, Artificial Sequence
  Description of Artificial Sequence: Synthetic oligonucleotide
ggcgacgaaggcugggguc

SEQ ID NO: 1169208 - RNA, 19 nt, Artificial Sequence
  Description of Artificial Sequence: Synthetic oligonucleotide
guuuucgaugcggucggua

SEQ ID NO: 1169209 - RNA, 19 nt, Artificial Sequence
  Description of Artificial Sequence: Synthetic oligonucleotide
ggaggagcggacugcgcga

SEQ ID NO: 1169210 - RNA, 19 nt, Artificial Sequence
  Description of Artificial Sequence: Synthetic oligonucleotide
auggacguguucagaggaa

SEQ ID NO: 1169211 - RNA, 19 nt, Artificial Sequence
  Description of Artificial Sequence: Synthetic oligonucleotide
ucucugcguugcagcuugu

SEQ ID NO: 1169212 - RNA, 19 nt, Artificial Sequence
  Description of Artificial Sequence: Synthetic oligonucleotide
cgagaguacugcagcuuag

SEQ ID NO: 1169213 - RNA, 19 nt, Artificial Sequence
  Description of Artificial Sequence: Synthetic oligonucleotide
ccgaauggcaaaacaguua

SEQ ID NO: 1169214 - RNA, 19 nt, Artificial Sequence
  Description of Artificial Sequence: Synthetic oligonucleotide
agcgagcaugaacgccagu

SEQ ID NO: 1169215 - RNA, 19 nt, Artificial Sequence
  Description of Artificial Sequence: Synthetic oligonucleotide
caguuacuggcuucacgcu

SEQ ID NO: 1169216 - RNA, 19 nt, Artificial Sequence
  Description of Artificial Sequence: Synthetic oligonucleotide
ggcgcgacucugcagcgga

SEQ ID NO: 1169217 - RNA, 19 nt, Artificial Sequence
  Description of Artificial Sequence: Synthetic oligonucleotide
ggacguguucagaggaauc

SEQ ID NO: 1169218 - RNA, 19 nt, Artificial Sequence
  Description of Artificial Sequence: Synthetic oligonucleotide
guccgcaguaguacacauc

SEQ ID NO: 1169219 - RNA, 19 nt, Artificial Sequence
  Description of Artificial Sequence: Synthetic oligonucleotide
gcggcgacgaaggcugggg

SEQ ID NO: 1169220 - RNA, 19 nt, Artificial Sequence
  Description of Artificial Sequence: Synthetic oligonucleotide
ugcggucgguaaucaccau

SEQ ID NO: 1169221 - RNA, 19 nt, Artificial Sequence
  Description of Artificial Sequence: Synthetic oligonucleotide
ggcugaagugcaaaauacu

SEQ ID NO: 1169222 - RNA, 19 nt, Artificial Sequence
  Description of Artificial Sequence: Synthetic oligonucleotide
gccuaggauguugagacgu

SEQ ID NO: 1169223 - RNA, 19 nt, Artificial Sequence
  Description of Artificial Sequence: Synthetic oligonucleotide
gguaugacuggggcaagua

SEQ ID NO: 1169224 - RNA, 19 nt, Artificial Sequence
  Description of Artificial Sequence: Synthetic oligonucleotide
acgccaguccaaagcacau

SEQ ID NO: 1169225 - RNA, 19 nt, Artificial Sequence
  Description of Artificial Sequence: Synthetic oligonucleotide
gaggagcggacugcgcgaa

SEQ ID NO: 1169226 - RNA, 19 nt, Artificial Sequence
  Description of Artificial Sequence: Synthetic oligonucleotide
gcgccuccgaggaugacac

SEQ ID NO: 1169227 - RNA, 19 nt, Artificial Sequence
  Description of Artificial Sequence: Synthetic oligonucleotide
caucuacaagucagucacu

SEQ ID NO: 1169228 - RNA, 19 nt, Artificial Sequence
  Description of Artificial Sequence: Synthetic oligonucleotide
uugagacgucaaggugaaa

SEQ ID NO: 1169229 - RNA, 19 nt, Artificial Sequence
  Description of Artificial Sequence: Synthetic oligonucleotide
gguuucuggguggcauaac

SEQ ID NO: 1169230 - RNA, 19 nt, Artificial Sequence
  Description of Artificial Sequence: Synthetic oligonucleotide
aggagcggacugcgcgaaa

SEQ ID NO: 1169231 - RNA, 19 nt, Artificial Sequence
  Description of Artificial Sequence: Synthetic oligonucleotide
gcagccucgucgaccgagc

SEQ ID NO: 1169232 - RNA, 19 nt, Artificial Sequence
  Description of Artificial Sequence: Synthetic oligonucleotide
ccagguuaagguccagaua

SEQ ID NO: 1169233 - RNA, 19 nt, Artificial Sequence
  Description of Artificial Sequence: Synthetic oligonucleotide
cgguaaucaccaugugcuc

SEQ ID NO: 1169234 - RNA, 19 nt, Artificial Sequence
  Description of Artificial Sequence: Synthetic oligonucleotide
cccuguuugcuacuuacau

SEQ ID NO: 1169235 - RNA, 19 nt, Artificial Sequence
  Description of Artificial Sequence: Synthetic oligonucleotide
gcugggcucaaaggcuaac

SEQ ID NO: 1169236 - RNA, 19 nt, Artificial Sequence
  Description of Artificial Sequence: Synthetic oligonucleotide
cggucgguaaucaccaugu

SEQ ID NO: 1169237 - RNA, 19 nt, Artificial Sequence
  Description of Artificial Sequence: Synthetic oligonucleotide
guaacacgagugguugcuu

SEQ ID NO: 1169238 - RNA, 19 nt, Artificial Sequence
  Description of Artificial Sequence: Synthetic oligonucleotide
gcccuguuugcuacuuaca

SEQ ID NO: 1169239 - RNA, 19 nt, Artificial Sequence
  Description of Artificial Sequence: Synthetic oligonucleotide
gggcgcgacucugcagcgg

SEQ ID NO: 1169240 - RNA, 19 nt, Artificial Sequence
  Description of Artificial Sequence: Synthetic oligonucleotide
ucgcgggcggugggauccc

SEQ ID NO: 1169241 - RNA, 19 nt, Artificial Sequence
  Description of Artificial Sequence: Synthetic oligonucleotide
cgaugcggucgguaaucac

SEQ ID NO: 1169242 - RNA, 19 nt, Artificial Sequence
  Description of Artificial Sequence: Synthetic oligonucleotide
cucugcguugcagcuugua

SEQ ID NO: 1169243 - RNA, 19 nt, Artificial Sequence
  Description of Artificial Sequence: Synthetic oligonucleotide
cgaccgagcucagggcgcg

SEQ ID NO: 1169244 - RNA, 19 nt, Artificial Sequence
  Description of Artificial Sequence: Synthetic oligonucleotide
ccagcgccgaguugaacgu

SEQ ID NO: 1169245 - RNA, 19 nt, Artificial Sequence
  Description of Artificial Sequence: Synthetic oligonucleotide
gcgggcggugggaucccgg

SEQ ID NO: 1169246 - RNA, 19 nt, Artificial Sequence
  Description of Artificial Sequence: Synthetic oligonucleotide
ggucgcgggcggugggauc

SEQ ID NO: 1169247 - RNA, 19 nt, Artificial Sequence
  Description of Artificial Sequence: Synthetic oligonucleotide
cgcgaaagcagcagcggcu

SEQ ID NO: 1169248 - RNA, 19 nt, Artificial Sequence
  Description of Artificial Sequence: Synthetic oligonucleotide
cuggggcaaguagguucca

SEQ ID NO: 1169249 - RNA, 19 nt, Artificial Sequence
  Description of Artificial Sequence: Synthetic oligonucleotide
cagccucgucgaccgagcu

SEQ ID NO: 1169250 - RNA, 19 nt, Artificial Sequence
  Description of Artificial Sequence: Synthetic oligonucleotide
gcggaggagcggacugcgc

SEQ ID NO: 1169251 - RNA, 19 nt, Artificial Sequence
  Description of Artificial Sequence: Synthetic oligonucleotide
ccucgucgaccgagcucag

SEQ ID NO: 1169252 - RNA, 19 nt, Artificial Sequence
  Description of Artificial Sequence: Synthetic oligonucleotide
gcgccgaguugaacgucac

SEQ ID NO: 1169253 - RNA, 19 nt, Artificial Sequence
  Description of Artificial Sequence: Synthetic oligonucleotide
gguaugcgccuccgaggau

SEQ ID NO: 1169254 - RNA, 19 nt, Artificial Sequence
  Description of Artificial Sequence: Synthetic oligonucleotide
cacauggcuuugcgauauu

SEQ ID NO: 1169255 - RNA, 19 nt, Artificial Sequence
  Description of Artificial Sequence: Synthetic oligonucleotide
ccgcaguaguacacaucgu

SEQ ID NO: 1169256 - RNA, 19 nt, Artificial Sequence
  Description of Artificial Sequence: Synthetic oligonucleotide
cgucgggcugaagugcaaa

SEQ ID NO: 1169257 - RNA, 19 nt, Artificial Sequence
  Description of Artificial Sequence: Synthetic oligonucleotide
gggcgcccugcgggcggcg

SEQ ID NO: 1169258 - RNA, 19 nt, Artificial Sequence
  Description of Artificial Sequence: Synthetic oligonucleotide
gcauaacgauggacguguu

SEQ ID NO: 1169259 - RNA, 19 nt, Artificial Sequence
  Description of Artificial Sequence: Synthetic oligonucleotide
cgcgggcggugggaucccg

SEQ ID NO: 1169260 - RNA, 19 nt, Artificial Sequence
  Description of Artificial Sequence: Synthetic oligonucleotide
gcguugcagcuuguagguu

SEQ ID NO: 1169261 - RNA, 19 nt, Artificial Sequence
  Description of Artificial Sequence: Synthetic oligonucleotide
cguuuucgaugcggucggu

SEQ ID NO: 1169262 - RNA, 19 nt, Artificial Sequence
  Description of Artificial Sequence: Synthetic oligonucleotide
ucaacauuagacaauagag

SEQ ID NO: 1169263 - RNA, 19 nt, Artificial Sequence
  Description of Artificial Sequence: Synthetic oligonucleotide
  modified_base (8)..(8): a, c, u, g, unknown or other
aacaaaanaaaaccguccg

SEQ ID NO: 1169264 - RNA, 19 nt, Artificial Sequence
  Description of Artificial Sequence: Synthetic oligonucleotide
  modified_base (4)..(4): a, c, u, g, unknown or other
aaanaaaaccguccgcacc

SEQ ID NO: 1169265 - RNA, 19 nt, Artificial Sequence
  Description of Artificial Sequence: Synthetic oligonucleotide
  modified_base (3)..(3): a, c, u, g, unknown or other
aanaaaaccguccgcaccg

SEQ ID NO: 1169266 - RNA, 19 nt, Artificial Sequence
  Description of Artificial Sequence: Synthetic oligonucleotide
aaauuuggaaauuugauaa

SEQ ID NO: 1169267 - RNA, 19 nt, Artificial Sequence
  Description of Artificial Sequence: Synthetic oligonucleotide
aaggauaccguauuaugcc

SEQ ID NO: 1169268 - RNA, 19 nt, Artificial Sequence
  Description of Artificial Sequence: Synthetic oligonucleotide
uuauuaacugcuuacaacc

SEQ ID NO: 1169269 - RNA, 19 nt, Artificial Sequence
  Description of Artificial Sequence: Synthetic oligonucleotide
uuugaaaugauucuguuaa

SEQ ID NO: 1169270 - RNA, 19 nt, Artificial Sequence
  Description of Artificial Sequence: Synthetic oligonucleotide
uucgauaugacuuugcacc

SEQ ID NO: 1169271 - RNA, 19 nt, Artificial Sequence
  Description of Artificial Sequence: Synthetic oligonucleotide
ucuagauuguuucaaauca

SEQ ID NO: 1169272 - RNA, 19 nt, Artificial Sequence
  Description of Artificial Sequence: Synthetic oligonucleotide
cuaaguauguucuuaaagc

SEQ ID NO: 1169273 - RNA, 19 nt, Artificial Sequence
  Description of Artificial Sequence: Synthetic oligonucleotide
uuaagcuucacuuaagugu

SEQ ID NO: 1169274 - RNA, 19 nt, Artificial Sequence
  Description of Artificial Sequence: Synthetic oligonucleotide
  modified_base (5)..(5): a, c, u, g, unknown or other
aaaanaaaaccguccgcac

SEQ ID NO: 1169275 - RNA, 19 nt, Artificial Sequence
  Description of Artificial Sequence: Synthetic oligonucleotide
acauaucccacauaaagac

SEQ ID NO: 1169276 - RNA, 19 nt, Artificial Sequence
  Description of Artificial Sequence: Synthetic oligonucleotide
uauauaacggagcugggag

SEQ ID NO: 1169277 - RNA, 19 nt, Artificial Sequence
  Description of Artificial Sequence: Synthetic oligonucleotide
aaaggauaccguauuaugc

SEQ ID NO: 1169278 - RNA, 19 nt, Artificial Sequence
  Description of Artificial Sequence: Synthetic oligonucleotide
aaauagcccuuauauaacg

SEQ ID NO: 1169279 - RNA, 19 nt, Artificial Sequence
  Description of Artificial Sequence: Synthetic oligonucleotide
  modified_base (7)..(7): a, c, u, g, unknown or other
acaaaanaaaaccguccgc

SEQ ID NO: 1169280 - RNA, 19 nt, Artificial Sequence
  Description of Artificial Sequence: Synthetic oligonucleotide
gaaaauucuagauuguuuc

SEQ ID NO: 1169281 - RNA, 19 nt, Artificial Sequence
  Description of Artificial Sequence: Synthetic oligonucleotide
aaagacacacaccaaaagu

SEQ ID NO: 1169282 - RNA, 19 nt, Artificial Sequence
  Description of Artificial Sequence: Synthetic oligonucleotide
auauguuacaaucucaacu

SEQ ID NO: 1169283 - RNA, 19 nt, Artificial Sequence
  Description of Artificial Sequence: Synthetic oligonucleotide
aauauauucgauaugacuu

SEQ ID NO: 1169284 - RNA, 19 nt, Artificial Sequence
  Description of Artificial Sequence: Synthetic oligonucleotide
aaauucagaggcuaggagu

SEQ ID NO: 1169285 - RNA, 19 nt, Artificial Sequence
  Description of Artificial Sequence: Synthetic oligonucleotide
caguguuucaaauaaauac

SEQ ID NO: 1169286 - RNA, 19 nt, Artificial Sequence
  Description of Artificial Sequence: Synthetic oligonucleotide
accuguuacacacacacac

SEQ ID NO: 1169287 - RNA, 19 nt, Artificial Sequence
  Description of Artificial Sequence: Synthetic oligonucleotide
auuuaaaucccuuaaaaua

SEQ ID NO: 1169288 - RNA, 19 nt, Artificial Sequence
  Description of Artificial Sequence: Synthetic oligonucleotide
uccauuaagaguuuuauua

SEQ ID NO: 1169289 - RNA, 19 nt, Artificial Sequence
  Description of Artificial Sequence: Synthetic oligonucleotide
ugucacaugagaaacuaag

SEQ ID NO: 1169290 - RNA, 19 nt, Artificial Sequence
  Description of Artificial Sequence: Synthetic oligonucleotide
aguauguucuuaaagcucc

SEQ ID NO: 1169291 - RNA, 19 nt, Artificial Sequence
  Description of Artificial Sequence: Synthetic oligonucleotide
uucacuuaaguguggaagg

SEQ ID NO: 1169292 - RNA, 19 nt, Artificial Sequence
  Description of Artificial Sequence: Synthetic oligonucleotide
acuaaguauguucuuaaag

SEQ ID NO: 1169293 - RNA, 19 nt, Artificial Sequence
  Description of Artificial Sequence: Synthetic oligonucleotide
aaucccuuaaaauaggcua

SEQ ID NO: 1169294 - RNA, 19 nt, Artificial Sequence
  Description of Artificial Sequence: Synthetic oligonucleotide
uguaacaacuuuagaauca

SEQ ID NO: 1169295 - RNA, 19 nt, Artificial Sequence
  Description of Artificial Sequence: Synthetic oligonucleotide
uuauugaagggagagaagc

SEQ ID NO: 1169296 - RNA, 19 nt, Artificial Sequence
  Description of Artificial Sequence: Synthetic oligonucleotide
agauacaauaauuucgucu

SEQ ID NO: 1169297 - RNA, 19 nt, Artificial Sequence
  Description of Artificial Sequence: Synthetic oligonucleotide
aacuuuagaaucaaggcca

SEQ ID NO: 1169298 - RNA, 19 nt, Artificial Sequence
  Description of Artificial Sequence: Synthetic oligonucleotide
uaagcuucacuuaagugug

SEQ ID NO: 1169299 - RNA, 19 nt, Artificial Sequence
  Description of Artificial Sequence: Synthetic oligonucleotide
  modified_base (10)..(10): a, c, u, g, unknown or other
acaacaaaanaaaaccguc

SEQ ID NO: 1169300 - RNA, 19 nt, Artificial Sequence
  Description of Artificial Sequence: Synthetic oligonucleotide
ucauggaauucuuaaaggc

SEQ ID NO: 1169301 - RNA, 19 nt, Artificial Sequence
  Description of Artificial Sequence: Synthetic oligonucleotide
aacaugauaagcucccucu

SEQ ID NO: 1169302 - RNA, 19 nt, Artificial Sequence
  Description of Artificial Sequence: Synthetic oligonucleotide
aacgugacguacuuuagug

SEQ ID NO: 1169303 - RNA, 19 nt, Artificial Sequence
  Description of Artificial Sequence: Synthetic oligonucleotide
uauugagugauuugggagc

SEQ ID NO: 1169304 - RNA, 19 nt, Artificial Sequence
  Description of Artificial Sequence: Synthetic oligonucleotide
ugauauugagugauuuggg

SEQ ID NO: 1169305 - RNA, 19 nt, Artificial Sequence
  Description of Artificial Sequence: Synthetic oligonucleotide
uaauucccuaacaagaaac

SEQ ID NO: 1169306 - RNA, 19 nt, Artificial Sequence
  Description of Artificial Sequence: Synthetic oligonucleotide
uacuacuuugaaaugauuc

SEQ ID NO: 1169307 - RNA, 19 nt, Artificial Sequence
  Description of Artificial Sequence: Synthetic oligonucleotide
uuugagcaugcacaguugg

SEQ ID NO: 1169308 - RNA, 19 nt, Artificial Sequence
  Description of Artificial Sequence: Synthetic oligonucleotide
aaaauagcccuuauauaac

SEQ ID NO: 1169309 - RNA, 19 nt, Artificial Sequence
  Description of Artificial Sequence: Synthetic oligonucleotide
  modified_base (9)..(9): a, c, u, g, unknown or other
caacaaaanaaaaccgucc

SEQ ID NO: 1169310 - RNA, 19 nt, Artificial Sequence
  Description of Artificial Sequence: Synthetic oligonucleotide
aaacaugauaagcucccuc

SEQ ID NO: 1169311 - RNA, 19 nt, Artificial Sequence
  Description of Artificial Sequence: Synthetic oligonucleotide
acauuccugauauugagug

SEQ ID NO: 1169312 - RNA, 19 nt, Artificial Sequence
  Description of Artificial Sequence: Synthetic oligonucleotide
aaugauucuguuaacauua

SEQ ID NO: 1169313 - RNA, 19 nt, Artificial Sequence
  Description of Artificial Sequence: Synthetic oligonucleotide
uacgcuauaguguaccaag

SEQ ID NO: 1169314 - RNA, 19 nt, Artificial Sequence
  Description of Artificial Sequence: Synthetic oligonucleotide
ucugauauaaucugugcaa

SEQ ID NO: 1169315 - RNA, 19 nt, Artificial Sequence
  Description of Artificial Sequence: Synthetic oligonucleotide
uaaaucaguacacucugcu

SEQ ID NO: 1169316 - RNA, 19 nt, Artificial Sequence
  Description of Artificial Sequence: Synthetic oligonucleotide
uggaaauuugauaacuaac

SEQ ID NO: 1169317 - RNA, 19 nt, Artificial Sequence
  Description of Artificial Sequence: Synthetic oligonucleotide
uacaauuaauuauuuaaau

SEQ ID NO: 1169318 - RNA, 19 nt, Artificial Sequence
  Description of Artificial Sequence: Synthetic oligonucleotide
uaaauucagaggcuaggag

SEQ ID NO: 1169319 - RNA, 19 nt, Artificial Sequence
  Description of Artificial Sequence: Synthetic oligonucleotide
acuacuuugaaaugauucu

SEQ ID NO: 1169320 - RNA, 19 nt, Artificial Sequence
  Description of Artificial Sequence: Synthetic oligonucleotide
uugacaaguuauugaaggg

SEQ ID NO: 1169321 - RNA, 19 nt, Artificial Sequence
  Description of Artificial Sequence: Synthetic oligonucleotide
uacacacacacacacacac

SEQ ID NO: 1169322 - RNA, 19 nt, Artificial Sequence
  Description of Artificial Sequence: Synthetic oligonucleotide
auucgauaugacuuugcac

SEQ ID NO: 1169323 - RNA, 19 nt, Artificial Sequence
  Description of Artificial Sequence: Synthetic oligonucleotide
auaagcucccucuggacac

SEQ ID NO: 1169324 - RNA, 19 nt, Artificial Sequence
  Description of Artificial Sequence: Synthetic oligonucleotide
accuaaagcaagcauuuuc

SEQ ID NO: 1169325 - RNA, 19 nt, Artificial Sequence
  Description of Artificial Sequence: Synthetic oligonucleotide
aacacuacugauuguacaa

SEQ ID NO: 1169326 - RNA, 19 nt, Artificial Sequence
  Description of Artificial Sequence: Synthetic oligonucleotide
uccuaaaucaguacacucu

SEQ ID NO: 1169327 - RNA, 19 nt, Artificial Sequence
  Description of Artificial Sequence: Synthetic oligonucleotide
uaugaauauauucgauaug

SEQ ID NO: 1169328 - RNA, 19 nt, Artificial Sequence
  Description of Artificial Sequence: Synthetic oligonucleotide
uggacgucagaacacaggc

SEQ ID NO: 1169329 - RNA, 19 nt, Artificial Sequence
  Description of Artificial Sequence: Synthetic oligonucleotide
guuacacacacacacacac

SEQ ID NO: 1169330 - RNA, 19 nt, Artificial Sequence
  Description of Artificial Sequence: Synthetic oligonucleotide
aagauacaauaauuucguc

SEQ ID NO: 1169331 - RNA, 19 nt, Artificial Sequence
  Description of Artificial Sequence: Synthetic oligonucleotide
ugugagaugaggacagacc

SEQ ID NO: 1169332 - RNA, 19 nt, Artificial Sequence
  Description of Artificial Sequence: Synthetic oligonucleotide
aggcaaacggaaccaaugc

SEQ ID NO: 1169333 - RNA, 19 nt, Artificial Sequence
  Description of Artificial Sequence: Synthetic oligonucleotide
auuaaauucagaggcuagg

SEQ ID NO: 1169334 - RNA, 19 nt, Artificial Sequence
  Description of Artificial Sequence: Synthetic oligonucleotide
aaacacuacugauuguaca

SEQ ID NO: 1169335 - RNA, 19 nt, Artificial Sequence
  Description of Artificial Sequence: Synthetic oligonucleotide
uugaagggagagaagcuag

SEQ ID NO: 1169336 - RNA, 19 nt, Artificial Sequence
  Description of Artificial Sequence: Synthetic oligonucleotide
aaguauguucuuaaagcuc

SEQ ID NO: 1169337 - RNA, 19 nt, Artificial Sequence
  Description of Artificial Sequence: Synthetic oligonucleotide
gaaauuuggaaauuugaua

SEQ ID NO: 1169338 - RNA, 19 nt, Artificial Sequence
  Description of Artificial Sequence: Synthetic oligonucleotide
ugaaaugauucuguuaaca

SEQ ID NO: 1169339 - RNA, 19 nt, Artificial Sequence
  Description of Artificial Sequence: Synthetic oligonucleotide
aguaauacauuccuugaaa

SEQ ID NO: 1169340 - RNA, 19 nt, Artificial Sequence
  Description of Artificial Sequence: Synthetic oligonucleotide
uuggcuuaaacaaaacaau

SEQ ID NO: 1169341 - RNA, 19 nt, Artificial Sequence
  Description of Artificial Sequence: Synthetic oligonucleotide
aggauaccguauuaugccc

SEQ ID NO: 1169342 - RNA, 19 nt, Artificial Sequence
  Description of Artificial Sequence: Synthetic oligonucleotide
aacaacacguggcaaagaa

SEQ ID NO: 1169343 - RNA, 19 nt, Artificial Sequence
  Description of Artificial Sequence: Synthetic oligonucleotide
uaauacauuccuugaaagu

SEQ ID NO: 1169344 - RNA, 19 nt, Artificial Sequence
  Description of Artificial Sequence: Synthetic oligonucleotide
aacauaucagacaaagccu

SEQ ID NO: 1169345 - RNA, 19 nt, Artificial Sequence
  Description of Artificial Sequence: Synthetic oligonucleotide
uguucuuaaagcuccagua

SEQ ID NO: 1169346 - RNA, 19 nt, Artificial Sequence
  Description of Artificial Sequence: Synthetic oligonucleotide
aaagagcacuuguugaccu

SEQ ID NO: 1169347 - RNA, 19 nt, Artificial Sequence
  Description of Artificial Sequence: Synthetic oligonucleotide
ucuuaagcuucacuuaagu

SEQ ID NO: 1169348 - RNA, 19 nt, Artificial Sequence
  Description of Artificial Sequence: Synthetic oligonucleotide
aggaagaaacauaucagac

SEQ ID NO: 1169349 - RNA, 19 nt, Artificial Sequence
  Description of Artificial Sequence: Synthetic oligonucleotide
agguauguaccuuauuuug

SEQ ID NO: 1169350 - RNA, 19 nt, Artificial Sequence
  Description of Artificial Sequence: Synthetic oligonucleotide
acaaauguaacaacuuuag

SEQ ID NO: 1169351 - RNA, 19 nt, Artificial Sequence
  Description of Artificial Sequence: Synthetic oligonucleotide
uuguugaccuguuacacac

SEQ ID NO: 1169352 - RNA, 19 nt, Artificial Sequence
  Description of Artificial Sequence: Synthetic oligonucleotide
uaugcugugauauguuaca

SEQ ID NO: 1169353 - RNA, 19 nt, Artificial Sequence
  Description of Artificial Sequence: Synthetic oligonucleotide
cuguuaacauuauuaacug

SEQ ID NO: 1169354 - RNA, 19 nt, Artificial Sequence
  Description of Artificial Sequence: Synthetic oligonucleotide
uuaacugcuuacaaccuaa

SEQ ID NO: 1169355 - RNA, 19 nt, Artificial Sequence
  Description of Artificial Sequence: Synthetic oligonucleotide
gauuugggagcuaaaacug

SEQ ID NO: 1169356 - RNA, 19 nt, Artificial Sequence
  Description of Artificial Sequence: Synthetic oligonucleotide
uuagaaucaaggccagaug

SEQ ID NO: 1169357 - RNA, 19 nt, Artificial Sequence
  Description of Artificial Sequence: Synthetic oligonucleotide
uaacaagaaacaugauaag

SEQ ID NO: 1169358 - RNA, 19 nt, Artificial Sequence
  Description of Artificial Sequence: Synthetic oligonucleotide
guacuuuagugacagcagg

SEQ ID NO: 1169359 - RNA, 19 nt, Artificial Sequence
  Description of Artificial Sequence: Synthetic oligonucleotide
gauaugacuuugcaccaag

SEQ ID NO: 1169360 - RNA, 19 nt, Artificial Sequence
  Description of Artificial Sequence: Synthetic oligonucleotide
gauauugagugauuuggga

SEQ ID NO: 1169361 - RNA, 19 nt, Artificial Sequence
  Description of Artificial Sequence: Synthetic oligonucleotide
uguuaacauuauuaacugc

SEQ ID NO: 1169362 - RNA, 19 nt, Artificial Sequence
  Description of Artificial Sequence: Synthetic oligonucleotide
ucaaagagcacuuguugac

SEQ ID NO: 1169363 - RNA, 19 nt, Artificial Sequence
  Description of Artificial Sequence: Synthetic oligonucleotide
cauaucugcccuaauuccc

SEQ ID NO: 1169364 - RNA, 19 nt, Artificial Sequence
  Description of Artificial Sequence: Synthetic oligonucleotide
auuuugagcaugcacaguu

SEQ ID NO: 1169365 - RNA, 19 nt, Artificial Sequence
  Description of Artificial Sequence: Synthetic oligonucleotide
aauagcccuuauauaacgg

SEQ ID NO: 1169366 - RNA, 19 nt, Artificial Sequence
  Description of Artificial Sequence: Synthetic oligonucleotide
uuauaaaauauagugccua

SEQ ID NO: 1169367 - RNA, 19 nt, Artificial Sequence
  Description of Artificial Sequence: Synthetic oligonucleotide
uaugacuuugcaccaagaa

SEQ ID NO: 1169368 - RNA, 19 nt, Artificial Sequence
  Description of Artificial Sequence: Synthetic oligonucleotide
uuggaaauuugauaacuaa

SEQ ID NO: 1169369 - RNA, 19 nt, Artificial Sequence
  Description of Artificial Sequence: Synthetic oligonucleotide
aauucuaccucgaacugcu

SEQ ID NO: 1169370 - RNA, 19 nt, Artificial Sequence
  Description of Artificial Sequence: Synthetic oligonucleotide
uuggacgucagaacacagg

SEQ ID NO: 1169371 - RNA, 19 nt, Artificial Sequence
  Description of Artificial Sequence: Synthetic oligonucleotide
uggcuuaaacaaaacaauc

SEQ ID NO: 1169372 - RNA, 19 nt, Artificial Sequence
  Description of Artificial Sequence: Synthetic oligonucleotide
uacaaucucaacucuuuac

SEQ ID NO: 1169373 - RNA, 19 nt, Artificial Sequence
  Description of Artificial Sequence: Synthetic oligonucleotide
ccuuauauaacggagcugg

SEQ ID NO: 1169374 - RNA, 19 nt, Artificial Sequence
  Description of Artificial Sequence: Synthetic oligonucleotide
auauaacggagcugggagg

SEQ ID NO: 1169375 - RNA, 19 nt, Artificial Sequence
  Description of Artificial Sequence: Synthetic oligonucleotide
uuaaauucagaggcuagga

SEQ ID NO: 1169376 - RNA, 19 nt, Artificial Sequence
  Description of Artificial Sequence: Synthetic oligonucleotide
caaguuauugaagggagag

SEQ ID NO: 1169377 - RNA, 19 nt, Artificial Sequence
  Description of Artificial Sequence: Synthetic oligonucleotide
ugaauauauucgauaugac

SEQ ID NO: 1169378 - RNA, 19 nt, Artificial Sequence
  Description of Artificial Sequence: Synthetic oligonucleotide
gauacaauaauuucgucuu

SEQ ID NO: 1169379 - RNA, 19 nt, Artificial Sequence
  Description of Artificial Sequence: Synthetic oligonucleotide
cauaauucuaccucgaacu

SEQ ID NO: 1169380 - RNA, 19 nt, Artificial Sequence
  Description of Artificial Sequence: Synthetic oligonucleotide
uagcccuuauauaacggag

SEQ ID NO: 1169381 - RNA, 19 nt, Artificial Sequence
  Description of Artificial Sequence: Synthetic oligonucleotide
aguuauugaagggagagaa

SEQ ID NO: 1169382 - RNA, 19 nt, Artificial Sequence
  Description of Artificial Sequence: Synthetic oligonucleotide
cuuaagcuucacuuaagug

SEQ ID NO: 1169383 - RNA, 19 nt, Artificial Sequence
  Description of Artificial Sequence: Synthetic oligonucleotide
uacauuuacuacuaauuuu

SEQ ID NO: 1169384 - RNA, 19 nt, Artificial Sequence
  Description of Artificial Sequence: Synthetic oligonucleotide
acaauuauugcuccauuaa

SEQ ID NO: 1169385 - RNA, 19 nt, Artificial Sequence
  Description of Artificial Sequence: Synthetic oligonucleotide
cuuuagugacagcaggagg

SEQ ID NO: 1169386 - RNA, 19 nt, Artificial Sequence
  Description of Artificial Sequence: Synthetic oligonucleotide
aaacgugacguacuuuagu

SEQ ID NO: 1169387 - RNA, 19 nt, Artificial Sequence
  Description of Artificial Sequence: Synthetic oligonucleotide
aaaaccguccgcaccgggc

SEQ ID NO: 1169388 - RNA, 19 nt, Artificial Sequence
  Description of Artificial Sequence: Synthetic oligonucleotide
ugacaaguuauugaaggga

SEQ ID NO: 1169389 - RNA, 19 nt, Artificial Sequence
  Description of Artificial Sequence: Synthetic oligonucleotide
gagcacucuacaaugaggc

SEQ ID NO: 1169390 - RNA, 19 nt, Artificial Sequence
  Description of Artificial Sequence: Synthetic oligonucleotide
ugacguacuuuagugacag

SEQ ID NO: 1169391 - RNA, 19 nt, Artificial Sequence
  Description of Artificial Sequence: Synthetic oligonucleotide
ugaguaaacgugacguacu

SEQ ID NO: 1169392 - RNA, 19 nt, Artificial Sequence
  Description of Artificial Sequence: Synthetic oligonucleotide
uauugaagggagagaagcu

SEQ ID NO: 1169393 - RNA, 19 nt, Artificial Sequence
  Description of Artificial Sequence: Synthetic oligonucleotide
uaucauaucugcccuaauu

SEQ ID NO: 1169394 - RNA, 19 nt, Artificial Sequence
  Description of Artificial Sequence: Synthetic oligonucleotide
cucacucaaaaggauaccg

SEQ ID NO: 1169395 - RNA, 19 nt, Artificial Sequence
  Description of Artificial Sequence: Synthetic oligonucleotide
gauauguuacaaucucaac

SEQ ID NO: 1169396 - RNA, 19 nt, Artificial Sequence
  Description of Artificial Sequence: Synthetic oligonucleotide
uuauuggacgucagaacac

SEQ ID NO: 1169397 - RNA, 19 nt, Artificial Sequence
  Description of Artificial Sequence: Synthetic oligonucleotide
uguauagguauguaccuua

SEQ ID NO: 1169398 - RNA, 19 nt, Artificial Sequence
  Description of Artificial Sequence: Synthetic oligonucleotide
aaauucuagauuguuucaa

SEQ ID NO: 1169399 - RNA, 19 nt, Artificial Sequence
  Description of Artificial Sequence: Synthetic oligonucleotide
  modified_base (6)..(6): a, c, u, g, unknown or other
caaaanaaaaccguccgca

SEQ ID NO: 1169400 - RNA, 19 nt, Artificial Sequence
  Description of Artificial Sequence: Synthetic oligonucleotide
auuaugcccuaguacacug

SEQ ID NO: 1169401 - RNA, 19 nt, Artificial Sequence
  Description of Artificial Sequence: Synthetic oligonucleotide
uaaacgugacguacuuuag

SEQ ID NO: 1169402 - RNA, 19 nt, Artificial Sequence
  Description of Artificial Sequence: Synthetic oligonucleotide
ugggagcuaaaacugcacc

SEQ ID NO: 1169403 - RNA, 19 nt, Artificial Sequence
  Description of Artificial Sequence: Synthetic oligonucleotide
aguguaccaagggaaauuc

SEQ ID NO: 1169404 - RNA, 19 nt, Artificial Sequence
  Description of Artificial Sequence: Synthetic oligonucleotide
ugcacauuccugauauuga

SEQ ID NO: 1169405 - RNA, 19 nt, Artificial Sequence
  Description of Artificial Sequence: Synthetic oligonucleotide
cacacacacacacacacac

SEQ ID NO: 1169406 - RNA, 19 nt, Artificial Sequence
  Description of Artificial Sequence: Synthetic oligonucleotide
cucagaaugcacuuugguc

SEQ ID NO: 1169407 - RNA, 19 nt, Artificial Sequence
  Description of Artificial Sequence: Synthetic oligonucleotide
uuaaagcuccaguaauaca

SEQ ID NO: 1169408 - RNA, 19 nt, Artificial Sequence
  Description of Artificial Sequence: Synthetic oligonucleotide
cuuaaagcuccaguaauac

SEQ ID NO: 1169409 - RNA, 19 nt, Artificial Sequence
  Description of Artificial Sequence: Synthetic oligonucleotide
ucuuaaagcuccaguaaua

SEQ ID NO: 1169410 - RNA, 19 nt, Artificial Sequence
  Description of Artificial Sequence: Synthetic oligonucleotide
uuauugcuccauuaagagu

SEQ ID NO: 1169411 - RNA, 19 nt, Artificial Sequence
  Description of Artificial Sequence: Synthetic oligonucleotide
gggacuaucauaucugccc

SEQ ID NO: 1169412 - RNA, 19 nt, Artificial Sequence
  Description of Artificial Sequence: Synthetic oligonucleotide
gauaagcucccucuggaca

SEQ ID NO: 1169413 - RNA, 19 nt, Artificial Sequence
  Description of Artificial Sequence: Synthetic oligonucleotide
uuauauaacggagcuggga

SEQ ID NO: 1169414 - RNA, 19 nt, Artificial Sequence
  Description of Artificial Sequence: Synthetic oligonucleotide
gaaucaaggccagaugcag

SEQ ID NO: 1169415 - RNA, 19 nt, Artificial Sequence
  Description of Artificial Sequence: Synthetic oligonucleotide
cuguuacacacacacacac

SEQ ID NO: 1169416 - RNA, 19 nt, Artificial Sequence
  Description of Artificial Sequence: Synthetic oligonucleotide
aaucugugcaaaauguuaa

SEQ ID NO: 1169417 - RNA, 19 nt, Artificial Sequence
  Description of Artificial Sequence: Synthetic oligonucleotide
aauucccuaacaagaaaca

SEQ ID NO: 1169418 - RNA, 19 nt, Artificial Sequence
  Description of Artificial Sequence: Synthetic oligonucleotide
augacuuugcaccaagaaa

SEQ ID NO: 1169419 - RNA, 19 nt, Artificial Sequence
  Description of Artificial Sequence: Synthetic oligonucleotide
uuucucuaugcugugauau

SEQ ID NO: 1169420 - RNA, 19 nt, Artificial Sequence
  Description of Artificial Sequence: Synthetic oligonucleotide
caucuuacuacuuugaaau

SEQ ID NO: 1169421 - RNA, 19 nt, Artificial Sequence
  Description of Artificial Sequence: Synthetic oligonucleotide
uacaaugaggcuguacuga

SEQ ID NO: 1169422 - RNA, 19 nt, Artificial Sequence
  Description of Artificial Sequence: Synthetic oligonucleotide
auauauucgauaugacuuu

SEQ ID NO: 1169423 - RNA, 19 nt, Artificial Sequence
  Description of Artificial Sequence: Synthetic oligonucleotide
cuauaguguaccaagggaa

SEQ ID NO: 1169424 - RNA, 19 nt, Artificial Sequence
  Description of Artificial Sequence: Synthetic oligonucleotide
gacgucagaacacaggcaa

SEQ ID NO: 1169425 - RNA, 19 nt, Artificial Sequence
  Description of Artificial Sequence: Synthetic oligonucleotide
auuuuacaguaugguaacc

SEQ ID NO: 1169426 - RNA, 19 nt, Artificial Sequence
  Description of Artificial Sequence: Synthetic oligonucleotide
uauaacggagcugggagga

SEQ ID NO: 1169427 - RNA, 19 nt, Artificial Sequence
  Description of Artificial Sequence: Synthetic oligonucleotide
uguuacacacacacacaca

SEQ ID NO: 1169428 - RNA, 19 nt, Artificial Sequence
  Description of Artificial Sequence: Synthetic oligonucleotide
aaaucccuuaaaauaggcu

SEQ ID NO: 1169429 - RNA, 19 nt, Artificial Sequence
  Description of Artificial Sequence: Synthetic oligonucleotide
guaaacgugacguacuuua

SEQ ID NO: 1169430 - RNA, 19 nt, Artificial Sequence
  Description of Artificial Sequence: Synthetic oligonucleotide
ucacucaaaaggauaccgu

SEQ ID NO: 1169431 - RNA, 19 nt, Artificial Sequence
  Description of Artificial Sequence: Synthetic oligonucleotide
auagcccuuauauaacgga

SEQ ID NO: 1169432 - RNA, 19 nt, Artificial Sequence
  Description of Artificial Sequence: Synthetic oligonucleotide
uauauucgauaugacuuug

SEQ ID NO: 1169433 - RNA, 19 nt, Artificial Sequence
  Description of Artificial Sequence: Synthetic oligonucleotide
gagaagcuagcuuuccaug

SEQ ID NO: 1169434 - RNA, 19 nt, Artificial Sequence
  Description of Artificial Sequence: Synthetic oligonucleotide
gacaaagccuaacuuguca

SEQ ID NO: 1169435 - RNA, 19 nt, Artificial Sequence
  Description of Artificial Sequence: Synthetic oligonucleotide
acugauuguacaaauguaa

SEQ ID NO: 1169436 - RNA, 19 nt, Artificial Sequence
  Description of Artificial Sequence: Synthetic oligonucleotide
aucugugcaaaauguuaag

SEQ ID NO: 1169437 - RNA, 19 nt, Artificial Sequence
  Description of Artificial Sequence: Synthetic oligonucleotide
cuaaaucaguacacucugc

SEQ ID NO: 1169438 - RNA, 19 nt, Artificial Sequence
  Description of Artificial Sequence: Synthetic oligonucleotide
cuuauauaacggagcuggg

SEQ ID NO: 1169439 - RNA, 19 nt, Artificial Sequence
  Description of Artificial Sequence: Synthetic oligonucleotide
uacugauuguacaaaugua

SEQ ID NO: 1169440 - RNA, 19 nt, Artificial Sequence
  Description of Artificial Sequence: Synthetic oligonucleotide
uaggagugguagaaugaag

SEQ ID NO: 1169441 - RNA, 19 nt, Artificial Sequence
  Description of Artificial Sequence: Synthetic oligonucleotide
acguacuuuagugacagca

SEQ ID NO: 1169442 - RNA, 19 nt, Artificial Sequence
  Description of Artificial Sequence: Synthetic oligonucleotide
auauucgauaugacuuugc

SEQ ID NO: 1169443 - RNA, 19 nt, Artificial Sequence
  Description of Artificial Sequence: Synthetic oligonucleotide
ucugugcaaaauguuaagu

SEQ ID NO: 1169444 - RNA, 19 nt, Artificial Sequence
  Description of Artificial Sequence: Synthetic oligonucleotide
uguuacaaucucaacucuu

SEQ ID NO: 1169445 - RNA, 19 nt, Artificial Sequence
  Description of Artificial Sequence: Synthetic oligonucleotide
ucucuaugcugugauaugu

SEQ ID NO: 1169446 - RNA, 19 nt, Artificial Sequence
  Description of Artificial Sequence: Synthetic oligonucleotide
ugcccuaauucccuaacaa

SEQ ID NO: 1169447 - RNA, 19 nt, Artificial Sequence
  Description of Artificial Sequence: Synthetic oligonucleotide
aaaccguccgcaccgggcu

SEQ ID NO: 1169448 - RNA, 19 nt, Artificial Sequence
  Description of Artificial Sequence: Synthetic oligonucleotide
augauaagcucccucugga

SEQ ID NO: 1169449 - RNA, 19 nt, Artificial Sequence
  Description of Artificial Sequence: Synthetic oligonucleotide
ucgauaugacuuugcacca

SEQ ID NO: 1169450 - RNA, 19 nt, Artificial Sequence
  Description of Artificial Sequence: Synthetic oligonucleotide
agagaagcuagcuuuccau

SEQ ID NO: 1169451 - RNA, 19 nt, Artificial Sequence
  Description of Artificial Sequence: Synthetic oligonucleotide
acauuauuaacugcuuaca

SEQ ID NO: 1169452 - RNA, 19 nt, Artificial Sequence
  Description of Artificial Sequence: Synthetic oligonucleotide
  modified_base (2)..(2): a, c, u, g, unknown or other
anaaaaccguccgcaccgg

SEQ ID NO: 1169453 - RNA, 19 nt, Artificial Sequence
  Description of Artificial Sequence: Synthetic oligonucleotide
ggaagaaacauaucagaca

SEQ ID NO: 1169454 - RNA, 19 nt, Artificial Sequence
  Description of Artificial Sequence: Synthetic oligonucleotide
cuucugaguaaacgugacg

SEQ ID NO: 1169455 - RNA, 19 nt, Artificial Sequence
  Description of Artificial Sequence: Synthetic oligonucleotide
uucuaacagaauucaugcu

SEQ ID NO: 1169456 - RNA, 19 nt, Artificial Sequence
  Description of Artificial Sequence: Synthetic oligonucleotide
guugaccuguuacacacac

SEQ ID NO: 1169457 - RNA, 19 nt, Artificial Sequence
  Description of Artificial Sequence: Synthetic oligonucleotide
aggaaauuuggaaauuuga

SEQ ID NO: 1169458 - RNA, 19 nt, Artificial Sequence
  Description of Artificial Sequence: Synthetic oligonucleotide
ucuaugcugugauauguua

SEQ ID NO: 1169459 - RNA, 19 nt, Artificial Sequence
  Description of Artificial Sequence: Synthetic oligonucleotide
uuacacacacacacacaca

SEQ ID NO: 1169460 - RNA, 19 nt, Artificial Sequence
  Description of Artificial Sequence: Synthetic oligonucleotide
uauuggacgucagaacaca

SEQ ID NO: 1169461 - RNA, 19 nt, Artificial Sequence
  Description of Artificial Sequence: Synthetic oligonucleotide
cugaguaaacgugacguac

SEQ ID NO: 1169462 - RNA, 19 nt, Artificial Sequence
  Description of Artificial Sequence: Synthetic oligonucleotide
agcuaaaacugcaccaauc

SEQ ID NO: 1169463 - RNA, 19 nt, Artificial Sequence
  Description of Artificial Sequence: Synthetic oligonucleotide
cacacacacacacacaaca

SEQ ID NO: 1169464 - RNA, 19 nt, Artificial Sequence
  Description of Artificial Sequence: Synthetic oligonucleotide
aaacaaccucaacauuaga

SEQ ID NO: 1169465 - RNA, 19 nt, Artificial Sequence
  Description of Artificial Sequence: Synthetic oligonucleotide
acagcauacgcuauagugu

SEQ ID NO: 1169466 - RNA, 19 nt, Artificial Sequence
  Description of Artificial Sequence: Synthetic oligonucleotide
cagagcaacacaucucaug

SEQ ID NO: 1169467 - RNA, 19 nt, Artificial Sequence
  Description of Artificial Sequence: Synthetic oligonucleotide
uucucuaugcugugauaug

SEQ ID NO: 1169468 - RNA, 19 nt, Artificial Sequence
  Description of Artificial Sequence: Synthetic oligonucleotide
gaaacuaaguauguucuua

SEQ ID NO: 1169469 - RNA, 19 nt, Artificial Sequence
  Description of Artificial Sequence: Synthetic oligonucleotide
aagccuaacuugucacaug

SEQ ID NO: 1169470 - RNA, 19 nt, Artificial Sequence
  Description of Artificial Sequence: Synthetic oligonucleotide
auuccugauauugagugau

SEQ ID NO: 1169471 - RNA, 19 nt, Artificial Sequence
  Description of Artificial Sequence: Synthetic oligonucleotide
uuacaguaugguaaccauu

SEQ ID NO: 1169472 - RNA, 19 nt, Artificial Sequence
  Description of Artificial Sequence: Synthetic oligonucleotide
guauguaccuuauuuugaa

SEQ ID NO: 1169473 - RNA, 19 nt, Artificial Sequence
  Description of Artificial Sequence: Synthetic oligonucleotide
aagagcacuuguugaccug

SEQ ID NO: 1169474 - RNA, 19 nt, Artificial Sequence
  Description of Artificial Sequence: Synthetic oligonucleotide
cacguggcaaagaaccagc

SEQ ID NO: 1169475 - RNA, 19 nt, Artificial Sequence
  Description of Artificial Sequence: Synthetic oligonucleotide
cugcacauuccugauauug

SEQ ID NO: 1169476 - RNA, 19 nt, Artificial Sequence
  Description of Artificial Sequence: Synthetic oligonucleotide
uugagcaugcacaguugga

SEQ ID NO: 1169477 - RNA, 19 nt, Artificial Sequence
  Description of Artificial Sequence: Synthetic oligonucleotide
caaagagcacuuguugacc

SEQ ID NO: 1169478 - RNA, 19 nt, Artificial Sequence
  Description of Artificial Sequence: Synthetic oligonucleotide
aaagagcacucuacaauga

SEQ ID NO: 1169479 - RNA, 19 nt, Artificial Sequence
  Description of Artificial Sequence: Synthetic oligonucleotide
aaguuauugaagggagaga

SEQ ID NO: 1169480 - RNA, 19 nt, Artificial Sequence
  Description of Artificial Sequence: Synthetic oligonucleotide
agcauuuuccuaaaucagu

SEQ ID NO: 1169481 - RNA, 19 nt, Artificial Sequence
  Description of Artificial Sequence: Synthetic oligonucleotide
ggaauucuuaaaggcagcg

SEQ ID NO: 1169482 - RNA, 19 nt, Artificial Sequence
  Description of Artificial Sequence: Synthetic oligonucleotide
cacuugacaaguuauugaa

SEQ ID NO: 1169483 - RNA, 19 nt, Artificial Sequence
  Description of Artificial Sequence: Synthetic oligonucleotide
gaugcagggacuaucauau

SEQ ID NO: 1169484 - RNA, 19 nt, Artificial Sequence
  Description of Artificial Sequence: Synthetic oligonucleotide
auguuacaaucucaacucu

SEQ ID NO: 1169485 - RNA, 19 nt, Artificial Sequence
  Description of Artificial Sequence: Synthetic oligonucleotide
guucuuaaagcuccaguaa

SEQ ID NO: 1169486 - RNA, 19 nt, Artificial Sequence
  Description of Artificial Sequence: Synthetic oligonucleotide
cauuauuaacugcuuacaa

SEQ ID NO: 1169487 - RNA, 19 nt, Artificial Sequence
  Description of Artificial Sequence: Synthetic oligonucleotide
cagggacuaucauaucugc

SEQ ID NO: 1169488 - RNA, 19 nt, Artificial Sequence
  Description of Artificial Sequence: Synthetic oligonucleotide
uaacggagcugggaggagg

SEQ ID NO: 1169489 - RNA, 19 nt, Artificial Sequence
  Description of Artificial Sequence: Synthetic oligonucleotide
acuacugauuguacaaaug

SEQ ID NO: 1169490 - RNA, 19 nt, Artificial Sequence
  Description of Artificial Sequence: Synthetic oligonucleotide
uaugcccuaguacacugua

SEQ ID NO: 1169491 - RNA, 19 nt, Artificial Sequence
  Description of Artificial Sequence: Synthetic oligonucleotide
gacagaccucacucaaaag

SEQ ID NO: 1169492 - RNA, 19 nt, Artificial Sequence
  Description of Artificial Sequence: Synthetic oligonucleotide
agauuaaauucagaggcua

SEQ ID NO: 1169493 - RNA, 19 nt, Artificial Sequence
  Description of Artificial Sequence: Synthetic oligonucleotide
agggacuaucauaucugcc

SEQ ID NO: 1169494 - RNA, 19 nt, Artificial Sequence
  Description of Artificial Sequence: Synthetic oligonucleotide
agaaaauucuagauuguuu

SEQ ID NO: 1169495 - RNA, 19 nt, Artificial Sequence
  Description of Artificial Sequence: Synthetic oligonucleotide
caaugaggcuguacugagg

SEQ ID NO: 1169496 - RNA, 19 nt, Artificial Sequence
  Description of Artificial Sequence: Synthetic oligonucleotide
ucacuuaaguguggaagga

SEQ ID NO: 1169497 - RNA, 19 nt, Artificial Sequence
  Description of Artificial Sequence: Synthetic oligonucleotide
acaacacguggcaaagaac

SEQ ID NO: 1169498 - RNA, 19 nt, Artificial Sequence
  Description of Artificial Sequence: Synthetic oligonucleotide
uaccguauuaugcccuagu

SEQ ID NO: 1169499 - RNA, 19 nt, Artificial Sequence
  Description of Artificial Sequence: Synthetic oligonucleotide
agaugcagggacuaucaua

SEQ ID NO: 1169500 - RNA, 19 nt, Artificial Sequence
  Description of Artificial Sequence: Synthetic oligonucleotide
aacggagcugggaggaggg

SEQ ID NO: 1169501 - RNA, 19 nt, Artificial Sequence
  Description of Artificial Sequence: Synthetic oligonucleotide
ugccauaauucuaccucga

SEQ ID NO: 1169502 - RNA, 19 nt, Artificial Sequence
  Description of Artificial Sequence: Synthetic oligonucleotide
ugagugauuugggagcuaa

SEQ ID NO: 1169503 - RNA, 19 nt, Artificial Sequence
  Description of Artificial Sequence: Synthetic oligonucleotide
aagcuagcuuuccauguua

SEQ ID NO: 1169504 - RNA, 19 nt, Artificial Sequence
  Description of Artificial Sequence: Synthetic oligonucleotide
ggcuuaaacaaaacaauca

SEQ ID NO: 1169505 - RNA, 19 nt, Artificial Sequence
  Description of Artificial Sequence: Synthetic oligonucleotide
ccuaaaucaguacacucug

SEQ ID NO: 1169506 - RNA, 19 nt, Artificial Sequence
  Description of Artificial Sequence: Synthetic oligonucleotide
uugugagaugaggacagac

SEQ ID NO: 1169507 - RNA, 19 nt, Artificial Sequence
  Description of Artificial Sequence: Synthetic oligonucleotide
cguauuaugcccuaguaca

SEQ ID NO: 1169508 - RNA, 19 nt, Artificial Sequence
  Description of Artificial Sequence: Synthetic oligonucleotide
ugcaccaaucaaacaaauu

SEQ ID NO: 1169509 - RNA, 19 nt, Artificial Sequence
  Description of Artificial Sequence: Synthetic oligonucleotide
cacaugagaaacuaaguau

SEQ ID NO: 1169510 - RNA, 19 nt, Artificial Sequence
  Description of Artificial Sequence: Synthetic oligonucleotide
uuccuacacaaagagcacu

SEQ ID NO: 1169511 - RNA, 19 nt, Artificial Sequence
  Description of Artificial Sequence: Synthetic oligonucleotide
caaaucaaaugcuuuggcu

SEQ ID NO: 1169512 - RNA, 19 nt, Artificial Sequence
  Description of Artificial Sequence: Synthetic oligonucleotide
cuagauuguuucaaaucaa

SEQ ID NO: 1169513 - RNA, 19 nt, Artificial Sequence
  Description of Artificial Sequence: Synthetic oligonucleotide
cacacacacacacacacaa

SEQ ID NO: 1169514 - RNA, 19 nt, Artificial Sequence
  Description of Artificial Sequence: Synthetic oligonucleotide
agauuguuucaaaucaaau

SEQ ID NO: 1169515 - RNA, 19 nt, Artificial Sequence
  Description of Artificial Sequence: Synthetic oligonucleotide
caauagaggaagaaacaua

SEQ ID NO: 1169516 - RNA, 19 nt, Artificial Sequence
  Description of Artificial Sequence: Synthetic oligonucleotide
gcuauaguguaccaaggga

SEQ ID NO: 1169517 - RNA, 19 nt, Artificial Sequence
  Description of Artificial Sequence: Synthetic oligonucleotide
gaauucuuaaaggcagcga

SEQ ID NO: 1169518 - RNA, 19 nt, Artificial Sequence
  Description of Artificial Sequence: Synthetic oligonucleotide
uuaugcccuaguacacugu

SEQ ID NO: 1169519 - RNA, 19 nt, Artificial Sequence
  Description of Artificial Sequence: Synthetic oligonucleotide
acacguggcaaagaaccag

SEQ ID NO: 1169520 - RNA, 19 nt, Artificial Sequence
  Description of Artificial Sequence: Synthetic oligonucleotide
auugaagggagagaagcua

SEQ ID NO: 1169521 - RNA, 19 nt, Artificial Sequence
  Description of Artificial Sequence: Synthetic oligonucleotide
guuaaguucuguauaggua

SEQ ID NO: 1169522 - RNA, 19 nt, Artificial Sequence
  Description of Artificial Sequence: Synthetic oligonucleotide
acggaaccaaugcugucug

SEQ ID NO: 1169523 - RNA, 19 nt, Artificial Sequence
  Description of Artificial Sequence: Synthetic oligonucleotide
acacuguaacauaucccac

SEQ ID NO: 1169524 - RNA, 19 nt, Artificial Sequence
  Description of Artificial Sequence: Synthetic oligonucleotide
gcaaacggaaccaaugcug

SEQ ID NO: 1169525 - RNA, 19 nt, Artificial Sequence
  Description of Artificial Sequence: Synthetic oligonucleotide
acacacacacacaacaaaa

SEQ ID NO: 1169526 - RNA, 19 nt, Artificial Sequence
  Description of Artificial Sequence: Synthetic oligonucleotide
acgugacguacuuuaguga

SEQ ID NO: 1169527 - RNA, 19 nt, Artificial Sequence
  Description of Artificial Sequence: Synthetic oligonucleotide
uugucacaugagaaacuaa

SEQ ID NO: 1169528 - RNA, 19 nt, Artificial Sequence
  Description of Artificial Sequence: Synthetic oligonucleotide
ggcagagcaacacaucuca

SEQ ID NO: 1169529 - RNA, 19 nt, Artificial Sequence
  Description of Artificial Sequence: Synthetic oligonucleotide
cacuucacuugugagauga

SEQ ID NO: 1169530 - RNA, 19 nt, Artificial Sequence
  Description of Artificial Sequence: Synthetic oligonucleotide
  modified_base (15)..(15): a, c, u, g, unknown or other
cacacacaacaaaanaaaa

SEQ ID NO: 1169531 - RNA, 19 nt, Artificial Sequence
  Description of Artificial Sequence: Synthetic oligonucleotide
uuuucucuaugcugugaua

SEQ ID NO: 1169532 - RNA, 19 nt, Artificial Sequence
  Description of Artificial Sequence: Synthetic oligonucleotide
ucuuaaaggcagcgauguc

SEQ ID NO: 1169533 - RNA, 19 nt, Artificial Sequence
  Description of Artificial Sequence: Synthetic oligonucleotide
guggaaggaacagcauacg

SEQ ID NO: 1169534 - RNA, 19 nt, Artificial Sequence
  Description of Artificial Sequence: Synthetic oligonucleotide
uugaccuguuacacacaca

SEQ ID NO: 1169535 - RNA, 19 nt, Artificial Sequence
  Description of Artificial Sequence: Synthetic oligonucleotide
acuaucauaucugcccuaa

SEQ ID NO: 1169536 - RNA, 19 nt, Artificial Sequence
  Description of Artificial Sequence: Synthetic oligonucleotide
auaucugcccuaauucccu

SEQ ID NO: 1169537 - RNA, 19 nt, Artificial Sequence
  Description of Artificial Sequence: Synthetic oligonucleotide
  modified_base (19)..(19): a, c, u, g, unknown or other
cacacacacacaacaaaan

SEQ ID NO: 1169538 - RNA, 19 nt, Artificial Sequence
  Description of Artificial Sequence: Synthetic oligonucleotide
cuaauucccuaacaagaaa

SEQ ID NO: 1169539 - RNA, 19 nt, Artificial Sequence
  Description of Artificial Sequence: Synthetic oligonucleotide
cacucaaaaggauaccgua

SEQ ID NO: 1169540 - RNA, 19 nt, Artificial Sequence
  Description of Artificial Sequence: Synthetic oligonucleotide
gcccuaauucccuaacaag

SEQ ID NO: 1169541 - RNA, 19 nt, Artificial Sequence
  Description of Artificial Sequence: Synthetic oligonucleotide
acucaaaaggauaccguau

SEQ ID NO: 1169542 - RNA, 19 nt, Artificial Sequence
  Description of Artificial Sequence: Synthetic oligonucleotide
accguauuaugcccuagua

SEQ ID NO: 1169543 - RNA, 19 nt, Artificial Sequence
  Description of Artificial Sequence: Synthetic oligonucleotide
acauuagacaauagaggaa

SEQ ID NO: 1169544 - RNA, 19 nt, Artificial Sequence
  Description of Artificial Sequence: Synthetic oligonucleotide
cccuaauucccuaacaaga

SEQ ID NO: 1169545 - RNA, 19 nt, Artificial Sequence
  Description of Artificial Sequence: Synthetic oligonucleotide
aaccucaacauuagacaau

SEQ ID NO: 1169546 - RNA, 19 nt, Artificial Sequence
  Description of Artificial Sequence: Synthetic oligonucleotide
aacacaucucauggcucug

SEQ ID NO: 1169547 - RNA, 19 nt, Artificial Sequence
  Description of Artificial Sequence: Synthetic oligonucleotide
caugagaaacuaaguaugu

SEQ ID NO: 1169548 - RNA, 19 nt, Artificial Sequence
  Description of Artificial Sequence: Synthetic oligonucleotide
aacuaacaaucagaacuuu

SEQ ID NO: 1169549 - RNA, 19 nt, Artificial Sequence
  Description of Artificial Sequence: Synthetic oligonucleotide
acgcuauaguguaccaagg

SEQ ID NO: 1169550 - RNA, 19 nt, Artificial Sequence
  Description of Artificial Sequence: Synthetic oligonucleotide
agcacucuacaaugaggcu

SEQ ID NO: 1169551 - RNA, 19 nt, Artificial Sequence
  Description of Artificial Sequence: Synthetic oligonucleotide
agagcacuuguugaccugu

SEQ ID NO: 1169552 - RNA, 19 nt, Artificial Sequence
  Description of Artificial Sequence: Synthetic oligonucleotide
uccauguuaaaagcaucua

SEQ ID NO: 1169553 - RNA, 19 nt, Artificial Sequence
  Description of Artificial Sequence: Synthetic oligonucleotide
acacacacacacacacaac

SEQ ID NO: 1169554 - RNA, 19 nt, Artificial Sequence
  Description of Artificial Sequence: Synthetic oligonucleotide
gcacauuuugagcaugcac

SEQ ID NO: 1169555 - RNA, 19 nt, Artificial Sequence
  Description of Artificial Sequence: Synthetic oligonucleotide
auuggacgucagaacacag

SEQ ID NO: 1169556 - RNA, 19 nt, Artificial Sequence
  Description of Artificial Sequence: Synthetic oligonucleotide
cacuuuggucauuauugga

SEQ ID NO: 1169557 - RNA, 19 nt, Artificial Sequence
  Description of Artificial Sequence: Synthetic oligonucleotide
aaccguccgcaccgggcuc

SEQ ID NO: 1169558 - RNA, 19 nt, Artificial Sequence
  Description of Artificial Sequence: Synthetic oligonucleotide
gauaccguauuaugcccua

SEQ ID NO: 1169559 - RNA, 19 nt, Artificial Sequence
  Description of Artificial Sequence: Synthetic oligonucleotide
cagcauacgcuauagugua

SEQ ID NO: 1169560 - RNA, 19 nt, Artificial Sequence
  Description of Artificial Sequence: Synthetic oligonucleotide
caguaauacauuccuugaa

SEQ ID NO: 1169561 - RNA, 19 nt, Artificial Sequence
  Description of Artificial Sequence: Synthetic oligonucleotide
cgugacguacuuuagugac

SEQ ID NO: 1169562 - RNA, 19 nt, Artificial Sequence
  Description of Artificial Sequence: Synthetic oligonucleotide
gguauguaccuuauuuuga

SEQ ID NO: 1169563 - RNA, 19 nt, Artificial Sequence
  Description of Artificial Sequence: Synthetic oligonucleotide
cauuccugauauugaguga

SEQ ID NO: 1169564 - RNA, 19 nt, Artificial Sequence
  Description of Artificial Sequence: Synthetic oligonucleotide
gcauacgcuauaguguacc

SEQ ID NO: 1169565 - RNA, 19 nt, Artificial Sequence
  Description of Artificial Sequence: Synthetic oligonucleotide
cacacacacacacaacaaa

SEQ ID NO: 1169566 - RNA, 19 nt, Artificial Sequence
  Description of Artificial Sequence: Synthetic oligonucleotide
augagaaacuaaguauguu

SEQ ID NO: 1169567 - RNA, 19 nt, Artificial Sequence
  Description of Artificial Sequence: Synthetic oligonucleotide
ggaggggugcaccagauua

SEQ ID NO: 1169568 - RNA, 19 nt, Artificial Sequence
  Description of Artificial Sequence: Synthetic oligonucleotide
gaaugcacuuuggucauua

SEQ ID NO: 1169569 - RNA, 19 nt, Artificial Sequence
  Description of Artificial Sequence: Synthetic oligonucleotide
cauacgcuauaguguacca

SEQ ID NO: 1169570 - RNA, 19 nt, Artificial Sequence
  Description of Artificial Sequence: Synthetic oligonucleotide
cuaaagcaagcauuuuccu

SEQ ID NO: 1169571 - RNA, 19 nt, Artificial Sequence
  Description of Artificial Sequence: Synthetic oligonucleotide
ccguauuaugcccuaguac

SEQ ID NO: 1169572 - RNA, 19 nt, Artificial Sequence
  Description of Artificial Sequence: Synthetic oligonucleotide
agcauacgcuauaguguac

SEQ ID NO: 1169573 - RNA, 19 nt, Artificial Sequence
  Description of Artificial Sequence: Synthetic oligonucleotide
ucuggacacuugacaaguu

SEQ ID NO: 1169574 - RNA, 19 nt, Artificial Sequence
  Description of Artificial Sequence: Synthetic oligonucleotide
cuaggagugguagaaugaa

SEQ ID NO: 1169575 - RNA, 19 nt, Artificial Sequence
  Description of Artificial Sequence: Synthetic oligonucleotide
auaugacuuugcaccaaga

SEQ ID NO: 1169576 - RNA, 19 nt, Artificial Sequence
  Description of Artificial Sequence: Synthetic oligonucleotide
cuacacaaagagcacucua

SEQ ID NO: 1169577 - RNA, 19 nt, Artificial Sequence
  Description of Artificial Sequence: Synthetic oligonucleotide
gacguacuuuagugacagc

SEQ ID NO: 1169578 - RNA, 19 nt, Artificial Sequence
  Description of Artificial Sequence: Synthetic oligonucleotide
uuccugauauugagugauu

SEQ ID NO: 1169579 - RNA, 19 nt, Artificial Sequence
  Description of Artificial Sequence: Synthetic oligonucleotide
auacgcuauaguguaccaa

SEQ ID NO: 1169580 - RNA, 19 nt, Artificial Sequence
  Description of Artificial Sequence: Synthetic oligonucleotide
auaccguauuaugcccuag

SEQ ID NO: 1169581 - RNA, 19 nt, Artificial Sequence
  Description of Artificial Sequence: Synthetic oligonucleotide
cgcuauaguguaccaaggg

SEQ ID NO: 1169582 - RNA, 19 nt, Artificial Sequence
  Description of Artificial Sequence: Synthetic oligonucleotide
gaagggagagaagcuagcu

SEQ ID NO: 1169583 - RNA, 19 nt, Artificial Sequence
  Description of Artificial Sequence: Synthetic oligonucleotide
accguccgcaccgggcucc

SEQ ID NO: 1169584 - RNA, 19 nt, Artificial Sequence
  Description of Artificial Sequence: Synthetic oligonucleotide
acacacacacacacaacaa

SEQ ID NO: 1169585 - RNA, 19 nt, Artificial Sequence
  Description of Artificial Sequence: Synthetic oligonucleotide
acauaaagacacacaccaa

SEQ ID NO: 1169586 - RNA, 19 nt, Artificial Sequence
  Description of Artificial Sequence: Synthetic oligonucleotide
guaacauaucccacauaaa

SEQ ID NO: 1169587 - RNA, 19 nt, Artificial Sequence
  Description of Artificial Sequence: Synthetic oligonucleotide
agcacuuguugaccuguua

SEQ ID NO: 1169588 - RNA, 19 nt, Artificial Sequence
  Description of Artificial Sequence: Synthetic oligonucleotide
acuuugcaccaagaaaauu

SEQ ID NO: 1169589 - RNA, 19 nt, Artificial Sequence
  Description of Artificial Sequence: Synthetic oligonucleotide
gacuaucauaucugcccua

SEQ ID NO: 1169590 - RNA, 19 nt, Artificial Sequence
  Description of Artificial Sequence: Synthetic oligonucleotide
uaucugcccuaauucccua

SEQ ID NO: 1169591 - RNA, 19 nt, Artificial Sequence
  Description of Artificial Sequence: Synthetic oligonucleotide
auaacggagcugggaggag

SEQ ID NO: 1169592 - RNA, 19 nt, Artificial Sequence
  Description of Artificial Sequence: Synthetic oligonucleotide
ccauguuaaaagcaucuaa

SEQ ID NO: 1169593 - RNA, 19 nt, Artificial Sequence
  Description of Artificial Sequence: Synthetic oligonucleotide
aguaaacgugacguacuuu

SEQ ID NO: 1169594 - RNA, 19 nt, Artificial Sequence
  Description of Artificial Sequence: Synthetic oligonucleotide
cuggacacuugacaaguua

SEQ ID NO: 1169595 - RNA, 19 nt, Artificial Sequence
  Description of Artificial Sequence: Synthetic oligonucleotide
aucugcccuaauucccuaa

SEQ ID NO: 1169596 - RNA, 19 nt, Artificial Sequence
  Description of Artificial Sequence: Synthetic oligonucleotide
gaagcuagcuuuccauguu

SEQ ID NO: 1169597 - RNA, 19 nt, Artificial Sequence
  Description of Artificial Sequence: Synthetic oligonucleotide
augcugugauauguuacaa

SEQ ID NO: 1169598 - RNA, 19 nt, Artificial Sequence
  Description of Artificial Sequence: Synthetic oligonucleotide
gaguaaacgugacguacuu

SEQ ID NO: 1169599 - RNA, 19 nt, Artificial Sequence
  Description of Artificial Sequence: Synthetic oligonucleotide
uaagcucccucuggacacu

SEQ ID NO: 1169600 - RNA, 19 nt, Artificial Sequence
  Description of Artificial Sequence: Synthetic oligonucleotide
acacacacacacacacaca

SEQ ID NO: 1169601 - RNA, 19 nt, Artificial Sequence
  Description of Artificial Sequence: Synthetic oligonucleotide
gugacguacuuuagugaca

SEQ ID NO: 1169602 - RNA, 19 nt, Artificial Sequence
  Description of Artificial Sequence: Synthetic oligonucleotide
gaaacaugauaagcucccu

SEQ ID NO: 1169603 - RNA, 19 nt, Artificial Sequence
  Description of Artificial Sequence: Synthetic oligonucleotide
agcuagcuuuccauguuaa

SEQ ID NO: 1169604 - RNA, 19 nt, Artificial Sequence
  Description of Artificial Sequence: Synthetic oligonucleotide
cugcccuaauucccuaaca

SEQ ID NO: 1169605 - RNA, 19 nt, Artificial Sequence
  Description of Artificial Sequence: Synthetic oligonucleotide
ggacuaucauaucugcccu

SEQ ID NO: 1169606 - RNA, 19 nt, Artificial Sequence
  Description of Artificial Sequence: Synthetic oligonucleotide
gcuaggagugguagaauga

SEQ ID NO: 1169607 - RNA, 19 nt, Artificial Sequence
  Description of Artificial Sequence: Synthetic oligonucleotide
ccuaguacacuguaacaua

SEQ ID NO: 1169608 - RNA, 19 nt, Artificial Sequence
  Description of Artificial Sequence: Synthetic oligonucleotide
gguagaaugaagccaucuu

SEQ ID NO: 1169609 - RNA, 19 nt, Artificial Sequence
  Description of Artificial Sequence: Synthetic oligonucleotide
ccuguuacacacacacaca

SEQ ID NO: 1169610 - RNA, 19 nt, Artificial Sequence
  Description of Artificial Sequence: Synthetic oligonucleotide
gaggggugcaccagauuaa

SEQ ID NO: 1169611 - RNA, 19 nt, Artificial Sequence
  Description of Artificial Sequence: Synthetic oligonucleotide
acguggcaaagaaccagca

SEQ ID NO: 1169612 - RNA, 19 nt, Artificial Sequence
  Description of Artificial Sequence: Synthetic oligonucleotide
ccucaacauuagacaauag

SEQ ID NO: 1169613 - RNA, 19 nt, Artificial Sequence
  Description of Artificial Sequence: Synthetic oligonucleotide
cuuuagaaucaaggccaga

SEQ ID NO: 1169614 - RNA, 19 nt, Artificial Sequence
  Description of Artificial Sequence: Synthetic oligonucleotide
gcccuuauauaacggagcu

SEQ ID NO: 1169615 - RNA, 19 nt, Artificial Sequence
  Description of Artificial Sequence: Synthetic oligonucleotide
ggcagcgaugucaucuuac

SEQ ID NO: 1169616 - RNA, 19 nt, Artificial Sequence
  Description of Artificial Sequence: Synthetic oligonucleotide
gcccuaguacacuguaaca

SEQ ID NO: 1169617 - RNA, 19 nt, Artificial Sequence
  Description of Artificial Sequence: Synthetic oligonucleotide
cgucagaacacaggcaaac

SEQ ID NO: 1169618 - RNA, 19 nt, Artificial Sequence
  Description of Artificial Sequence: Synthetic oligonucleotide
ccucacucaaaaggauacc

SEQ ID NO: 1169619 - RNA, 19 nt, Artificial Sequence
  Description of Artificial Sequence: Synthetic oligonucleotide
gccauaauucuaccucgaa

SEQ ID NO: 1169620 - RNA, 19 nt, Artificial Sequence
  Description of Artificial Sequence: Synthetic oligonucleotide
guauagguauguaccuuau

SEQ ID NO: 1169621 - RNA, 19 nt, Artificial Sequence
  Description of Artificial Sequence: Synthetic oligonucleotide
uugagugauuugggagcua

SEQ ID NO: 1169622 - RNA, 19 nt, Artificial Sequence
  Description of Artificial Sequence: Synthetic oligonucleotide
cuugugagaugaggacaga

SEQ ID NO: 1169623 - RNA, 19 nt, Artificial Sequence
  Description of Artificial Sequence: Synthetic oligonucleotide
gcuucacuuaaguguggaa

SEQ ID NO: 1169624 - RNA, 19 nt, Artificial Sequence
  Description of Artificial Sequence: Synthetic oligonucleotide
cuguaacauaucccacaua

SEQ ID NO: 1169625 - RNA, 19 nt, Artificial Sequence
  Description of Artificial Sequence: Synthetic oligonucleotide
gcagcgaugucaucuuacu

SEQ ID NO: 1169626 - RNA, 19 nt, Artificial Sequence
  Description of Artificial Sequence: Synthetic oligonucleotide
augcccuaguacacuguaa

SEQ ID NO: 1169627 - RNA, 19 nt, Artificial Sequence
  Description of Artificial Sequence: Synthetic oligonucleotide
aggcagcgaugucaucuua

SEQ ID NO: 1169628 - RNA, 19 nt, Artificial Sequence
  Description of Artificial Sequence: Synthetic oligonucleotide
ggauaccguauuaugcccu

SEQ ID NO: 1169629 - RNA, 19 nt, Artificial Sequence
  Description of Artificial Sequence: Synthetic oligonucleotide
ccgggcuccgcaucccggg

SEQ ID NO: 1169630 - RNA, 19 nt, Artificial Sequence
  Description of Artificial Sequence: Synthetic oligonucleotide
gcacuucacuugugagaug

SEQ ID NO: 1169631 - RNA, 19 nt, Artificial Sequence
  Description of Artificial Sequence: Synthetic oligonucleotide
gcaccagauuaaauucaga

SEQ ID NO: 1169632 - RNA, 19 nt, Artificial Sequence
  Description of Artificial Sequence: Synthetic oligonucleotide
cuguauagguauguaccuu

SEQ ID NO: 1169633 - RNA, 19 nt, Artificial Sequence
  Description of Artificial Sequence: Synthetic oligonucleotide
cccuaguacacuguaacau

SEQ ID NO: 1169634 - RNA, 19 nt, Artificial Sequence
  Description of Artificial Sequence: Synthetic oligonucleotide
auucuaccucgaacugcuu

SEQ ID NO: 1169635 - RNA, 19 nt, Artificial Sequence
  Description of Artificial Sequence: Synthetic oligonucleotide
cgauaugacuuugcaccaa

SEQ ID NO: 1169636 - RNA, 19 nt, Artificial Sequence
  Description of Artificial Sequence: Synthetic oligonucleotide
cccuaacaagaaacaugau

SEQ ID NO: 1169637 - RNA, 19 nt, Artificial Sequence
  Description of Artificial Sequence: Synthetic oligonucleotide
cguccgcaccgggcuccgc

SEQ ID NO: 1169638 - RNA, 19 nt, Artificial Sequence
  Description of Artificial Sequence: Synthetic oligonucleotide
  modified_base (1)..(1): a, c, u, g, unknown or other
naaaaccguccgcaccggg

SEQ ID NO: 1169639 - RNA, 19 nt, Artificial Sequence
  Description of Artificial Sequence: Synthetic oligonucleotide
aaucggagacagcauagcc

SEQ ID NO: 1169640 - RNA, 19 nt, Artificial Sequence
  Description of Artificial Sequence: Synthetic oligonucleotide
aauaccucggggcuguugg

SEQ ID NO: 1169641 - RNA, 19 nt, Artificial Sequence
  Description of Artificial Sequence: Synthetic oligonucleotide
aacuuuacguccuggaugu

SEQ ID NO: 1169642 - RNA, 19 nt, Artificial Sequence
  Description of Artificial Sequence: Synthetic oligonucleotide
aacgcugucagcccgcugg

SEQ ID NO: 1169643 - RNA, 19 nt, Artificial Sequence
  Description of Artificial Sequence: Synthetic oligonucleotide
uuaaagagugugaaggggu

SEQ ID NO: 1169644 - RNA, 19 nt, Artificial Sequence
  Description of Artificial Sequence: Synthetic oligonucleotide
aaguccuccccacacacgg

SEQ ID NO: 1169645 - RNA, 19 nt, Artificial Sequence
  Description of Artificial Sequence: Synthetic oligonucleotide
gaagcuugaacuuuacguc

SEQ ID NO: 1169646 - RNA, 19 nt, Artificial Sequence
  Description of Artificial Sequence: Synthetic oligonucleotide
acuguuaaaugcaucgggc

SEQ ID NO: 1169647 - RNA, 19 nt, Artificial Sequence
  Description of Artificial Sequence: Synthetic oligonucleotide
agaguuuccgaagaggccg

SEQ ID NO: 1169648 - RNA, 19 nt, Artificial Sequence
  Description of Artificial Sequence: Synthetic oligonucleotide
uucaccugcacccaggcgu

SEQ ID NO: 1169649 - RNA, 19 nt, Artificial Sequence
  Description of Artificial Sequence: Synthetic oligonucleotide
uguuaaaugcaucgggcac

SEQ ID NO: 1169650 - RNA, 19 nt, Artificial Sequence
  Description of Artificial Sequence: Synthetic oligonucleotide
ugugugugcaauaccucgg

SEQ ID NO: 1169651 - RNA, 19 nt, Artificial Sequence
  Description of Artificial Sequence: Synthetic oligonucleotide
aaaucggagacagcauagc

SEQ ID NO: 1169652 - RNA, 19 nt, Artificial Sequence
  Description of Artificial Sequence: Synthetic oligonucleotide
ucugguccgagucuuugcg

SEQ ID NO: 1169653 - RNA, 19 nt, Artificial Sequence
  Description of Artificial Sequence: Synthetic oligonucleotide
ugagcgaugcgcuccaggg

SEQ ID NO: 1169654 - RNA, 19 nt, Artificial Sequence
  Description of Artificial Sequence: Synthetic oligonucleotide
cuguagggaaccuuggccg

SEQ ID NO: 1169655 - RNA, 19 nt, Artificial Sequence
  Description of Artificial Sequence: Synthetic oligonucleotide
ucggagacagcauagcccc

SEQ ID NO: 1169656 - RNA, 19 nt, Artificial Sequence
  Description of Artificial Sequence: Synthetic oligonucleotide
aauggaccggcugaacagc

SEQ ID NO: 1169657 - RNA, 19 nt, Artificial Sequence
  Description of Artificial Sequence: Synthetic oligonucleotide
ugugcaauaccucggggcu

SEQ ID NO: 1169658 - RNA, 19 nt, Artificial Sequence
  Description of Artificial Sequence: Synthetic oligonucleotide
guugccaggagccggacgg

SEQ ID NO: 1169659 - RNA, 19 nt, Artificial Sequence
  Description of Artificial Sequence: Synthetic oligonucleotide
ucaauggaccggcugaaca

SEQ ID NO: 1169660 - RNA, 19 nt, Artificial Sequence
  Description of Artificial Sequence: Synthetic oligonucleotide
aguuguaggugagaaaauc

SEQ ID NO: 1169661 - RNA, 19 nt, Artificial Sequence
  Description of Artificial Sequence: Synthetic oligonucleotide
cacuguuaaaugcaucggg

SEQ ID NO: 1169662 - RNA, 19 nt, Artificial Sequence
  Description of Artificial Sequence: Synthetic oligonucleotide
gaugcggacacaauucacc

SEQ ID NO: 1169663 - RNA, 19 nt, Artificial Sequence
  Description of Artificial Sequence: Synthetic oligonucleotide
ucacucgugaggcaguugu

SEQ ID NO: 1169664 - RNA, 19 nt, Artificial Sequence
  Description of Artificial Sequence: Synthetic oligonucleotide
aucggagacagcauagccc

SEQ ID NO: 1169665 - RNA, 19 nt, Artificial Sequence
  Description of Artificial Sequence: Synthetic oligonucleotide
ugucaacgcugucagcccg

SEQ ID NO: 1169666 - RNA, 19 nt, Artificial Sequence
  Description of Artificial Sequence: Synthetic oligonucleotide
acuucaccugcacccaggc

SEQ ID NO: 1169667 - RNA, 19 nt, Artificial Sequence
  Description of Artificial Sequence: Synthetic oligonucleotide
augucaacgcugucagccc

SEQ ID NO: 1169668 - RNA, 19 nt, Artificial Sequence
  Description of Artificial Sequence: Synthetic oligonucleotide
uuugcggccacuguuaaau

SEQ ID NO: 1169669 - RNA, 19 nt, Artificial Sequence
  Description of Artificial Sequence: Synthetic oligonucleotide
ugaacuuuacguccuggau

SEQ ID NO: 1169670 - RNA, 19 nt, Artificial Sequence
  Description of Artificial Sequence: Synthetic oligonucleotide
uugaacuuuacguccugga

SEQ ID NO: 1169671 - RNA, 19 nt, Artificial Sequence
  Description of Artificial Sequence: Synthetic oligonucleotide
uuuacguccuggaugucaa

SEQ ID NO: 1169672 - RNA, 19 nt, Artificial Sequence
  Description of Artificial Sequence: Synthetic oligonucleotide
caugcugucgcuucagcug

SEQ ID NO: 1169673 - RNA, 19 nt, Artificial Sequence
  Description of Artificial Sequence: Synthetic oligonucleotide
uaaagagugugaagggguc

SEQ ID NO: 1169674 - RNA, 19 nt, Artificial Sequence
  Description of Artificial Sequence: Synthetic oligonucleotide
acucagcaacccgugaucc

SEQ ID NO: 1169675 - RNA, 19 nt, Artificial Sequence
  Description of Artificial Sequence: Synthetic oligonucleotide
gucggugucacucgugagg

SEQ ID NO: 1169676 - RNA, 19 nt, Artificial Sequence
  Description of Artificial Sequence: Synthetic oligonucleotide
uacguccuggaugucaacg

SEQ ID NO: 1169677 - RNA, 19 nt, Artificial Sequence
  Description of Artificial Sequence: Synthetic oligonucleotide
ggugaauggugacuggacg

SEQ ID NO: 1169678 - RNA, 19 nt, Artificial Sequence
  Description of Artificial Sequence: Synthetic oligonucleotide
ucucuucacggcccgaggc

SEQ ID NO: 1169679 - RNA, 19 nt, Artificial Sequence
  Description of Artificial Sequence: Synthetic oligonucleotide
caauggaccggcugaacag

SEQ ID NO: 1169680 - RNA, 19 nt, Artificial Sequence
  Description of Artificial Sequence: Synthetic oligonucleotide
agcgccgagguuuucugcg

SEQ ID NO: 1169681 - RNA, 19 nt, Artificial Sequence
  Description of Artificial Sequence: Synthetic oligonucleotide
ucuaaccucugucgcuggg

SEQ ID NO: 1169682 - RNA, 19 nt, Artificial Sequence
  Description of Artificial Sequence: Synthetic oligonucleotide
cuggucacuuuccaggggc

SEQ ID NO: 1169683 - RNA, 19 nt, Artificial Sequence
  Description of Artificial Sequence: Synthetic oligonucleotide
gaagaggccggguagacua

SEQ ID NO: 1169684 - RNA, 19 nt, Artificial Sequence
  Description of Artificial Sequence: Synthetic oligonucleotide
cuaaacauggagcccagga

SEQ ID NO: 1169685 - RNA, 19 nt, Artificial Sequence
  Description of Artificial Sequence: Synthetic oligonucleotide
uugcgagaguuccugcucc

SEQ ID NO: 1169686 - RNA, 19 nt, Artificial Sequence
  Description of Artificial Sequence: Synthetic oligonucleotide
uuccgaagaggccggguag

SEQ ID NO: 1169687 - RNA, 19 nt, Artificial Sequence
  Description of Artificial Sequence: Synthetic oligonucleotide
uggaaaaucugguccgagu

SEQ ID NO: 1169688 - RNA, 19 nt, Artificial Sequence
  Description of Artificial Sequence: Synthetic oligonucleotide
ugcggccacuguuaaaugc

SEQ ID NO: 1169689 - RNA, 19 nt, Artificial Sequence
  Description of Artificial Sequence: Synthetic oligonucleotide
aaaaucugguccgagucuu

SEQ ID NO: 1169690 - RNA, 19 nt, Artificial Sequence
  Description of Artificial Sequence: Synthetic oligonucleotide
uuggccgccaugaacugga

SEQ ID NO: 1169691 - RNA, 19 nt, Artificial Sequence
  Description of Artificial Sequence: Synthetic oligonucleotide
uguagggaaccuuggccgc

SEQ ID NO: 1169692 - RNA, 19 nt, Artificial Sequence
  Description of Artificial Sequence: Synthetic oligonucleotide
gcggacacaauucaccagg

SEQ ID NO: 1169693 - RNA, 19 nt, Artificial Sequence
  Description of Artificial Sequence: Synthetic oligonucleotide
agcucauuugguccuuguc

SEQ ID NO: 1169694 - RNA, 19 nt, Artificial Sequence
  Description of Artificial Sequence: Synthetic oligonucleotide
acacaauucaccagguaug

SEQ ID NO: 1169695 - RNA, 19 nt, Artificial Sequence
  Description of Artificial Sequence: Synthetic oligonucleotide
cucgugaggcaguuguagg

SEQ ID NO: 1169696 - RNA, 19 nt, Artificial Sequence
  Description of Artificial Sequence: Synthetic oligonucleotide
caaccgucagccaccaggc

SEQ ID NO: 1169697 - RNA, 19 nt, Artificial Sequence
  Description of Artificial Sequence: Synthetic oligonucleotide
ucgugguccucaucgcugg

SEQ ID NO: 1169698 - RNA, 19 nt, Artificial Sequence
  Description of Artificial Sequence: Synthetic oligonucleotide
uucucgugagcgaugcgcu

SEQ ID NO: 1169699 - RNA, 19 nt, Artificial Sequence
  Description of Artificial Sequence: Synthetic oligonucleotide
ugagaaaaucggagacagc

SEQ ID NO: 1169700 - RNA, 19 nt, Artificial Sequence
  Description of Artificial Sequence: Synthetic oligonucleotide
gugugugcaauaccucggg

SEQ ID NO: 1169701 - RNA, 19 nt, Artificial Sequence
  Description of Artificial Sequence: Synthetic oligonucleotide
ugaggcaguuguaggugag

SEQ ID NO: 1169702 - RNA, 19 nt, Artificial Sequence
  Description of Artificial Sequence: Synthetic oligonucleotide
augugcaggccacagugug

SEQ ID NO: 1169703 - RNA, 19 nt, Artificial Sequence
  Description of Artificial Sequence: Synthetic oligonucleotide
aacggcaugugcaggccac

SEQ ID NO: 1169704 - RNA, 19 nt, Artificial Sequence
  Description of Artificial Sequence: Synthetic oligonucleotide
ugguccucaucgcuggagc

SEQ ID NO: 1169705 - RNA, 19 nt, Artificial Sequence
  Description of Artificial Sequence: Synthetic oligonucleotide
gguagaguuuccgaagagg

SEQ ID NO: 1169706 - RNA, 19 nt, Artificial Sequence
  Description of Artificial Sequence: Synthetic oligonucleotide
aacccgugauccuccagca

SEQ ID NO: 1169707 - RNA, 19 nt, Artificial Sequence
  Description of Artificial Sequence: Synthetic oligonucleotide
aggguagaguuuccgaaga

SEQ ID NO: 1169708 - RNA, 19 nt, Artificial Sequence
  Description of Artificial Sequence: Synthetic oligonucleotide
cuguuaaaugcaucgggca

SEQ ID NO: 1169709 - RNA, 19 nt, Artificial Sequence
  Description of Artificial Sequence: Synthetic oligonucleotide
ucggugucacucgugaggc

SEQ ID NO: 1169710 - RNA, 19 nt, Artificial Sequence
  Description of Artificial Sequence: Synthetic oligonucleotide
ucgugaggcaguuguaggu

SEQ ID NO: 1169711 - RNA, 19 nt, Artificial Sequence
  Description of Artificial Sequence: Synthetic oligonucleotide
uuuccgaagaggccgggua

SEQ ID NO: 1169712 - RNA, 19 nt, Artificial Sequence
  Description of Artificial Sequence: Synthetic oligonucleotide
uguugccaggagccggacg

SEQ ID NO: 1169713 - RNA, 19 nt, Artificial Sequence
  Description of Artificial Sequence: Synthetic oligonucleotide
cuugaacuggcgccgcagg

SEQ ID NO: 1169714 - RNA, 19 nt, Artificial Sequence
  Description of Artificial Sequence: Synthetic oligonucleotide
guucucgugagcgaugcgc

SEQ ID NO: 1169715 - RNA, 19 nt, Artificial Sequence
  Description of Artificial Sequence: Synthetic oligonucleotide
gcguugaagacauuaaaga

SEQ ID NO: 1169716 - RNA, 19 nt, Artificial Sequence
  Description of Artificial Sequence: Synthetic oligonucleotide
cuugaacuuuacguccugg

SEQ ID NO: 1169717 - RNA, 19 nt, Artificial Sequence
  Description of Artificial Sequence: Synthetic oligonucleotide
agggugcuuucccaguggg

SEQ ID NO: 1169718 - RNA, 19 nt, Artificial Sequence
  Description of Artificial Sequence: Synthetic oligonucleotide
gugaacggcaugugcaggc

SEQ ID NO: 1169719 - RNA, 19 nt, Artificial Sequence
  Description of Artificial Sequence: Synthetic oligonucleotide
ucacgggucagguccuggg

SEQ ID NO: 1169720 - RNA, 19 nt, Artificial Sequence
  Description of Artificial Sequence: Synthetic oligonucleotide
ugcgggugaauggugacug

SEQ ID NO: 1169721 - RNA, 19 nt, Artificial Sequence
  Description of Artificial Sequence: Synthetic oligonucleotide
accguuggugucaauggac

SEQ ID NO: 1169722 - RNA, 19 nt, Artificial Sequence
  Description of Artificial Sequence: Synthetic oligonucleotide
ccugcgaugucucagcacc

SEQ ID NO: 1169723 - RNA, 19 nt, Artificial Sequence
  Description of Artificial Sequence: Synthetic oligonucleotide
uggcgaagacacagguggg

SEQ ID NO: 1169724 - RNA, 19 nt, Artificial Sequence
  Description of Artificial Sequence: Synthetic oligonucleotide
uguggguagaggccccgcc

SEQ ID NO: 1169725 - RNA, 19 nt, Artificial Sequence
  Description of Artificial Sequence: Synthetic oligonucleotide
ccaaccgucagccaccagg

SEQ ID NO: 1169726 - RNA, 19 nt, Artificial Sequence
  Description of Artificial Sequence: Synthetic oligonucleotide
acuugcgagaguuccugcu

SEQ ID NO: 1169727 - RNA, 19 nt, Artificial Sequence
  Description of Artificial Sequence: Synthetic oligonucleotide
acuaccugggcuccacuca

SEQ ID NO: 1169728 - RNA, 19 nt, Artificial Sequence
  Description of Artificial Sequence: Synthetic oligonucleotide
ugguagggucucugcagcg

SEQ ID NO: 1169729 - RNA, 19 nt, Artificial Sequence
  Description of Artificial Sequence: Synthetic oligonucleotide
acucgugaggcaguuguag

SEQ ID NO: 1169730 - RNA, 19 nt, Artificial Sequence
  Description of Artificial Sequence: Synthetic oligonucleotide
aucucguacagccggugcu

SEQ ID NO: 1169731 - RNA, 19 nt, Artificial Sequence
  Description of Artificial Sequence: Synthetic oligonucleotide
ugcucuaaccucugucgcu

SEQ ID NO: 1169732 - RNA, 19 nt, Artificial Sequence
  Description of Artificial Sequence: Synthetic oligonucleotide
aucgggcacagccagcugu

SEQ ID NO: 1169733 - RNA, 19 nt, Artificial Sequence
  Description of Artificial Sequence: Synthetic oligonucleotide
gagcgaugcgcuccagggg

SEQ ID NO: 1169734 - RNA, 19 nt, Artificial Sequence
  Description of Artificial Sequence: Synthetic oligonucleotide
gaaaaucugguccgagucu

SEQ ID NO: 1169735 - RNA, 19 nt, Artificial Sequence
  Description of Artificial Sequence: Synthetic oligonucleotide
gcucauuugguccuuguca

SEQ ID NO: 1169736 - RNA, 19 nt, Artificial Sequence
  Description of Artificial Sequence: Synthetic oligonucleotide
agccgacuguagcuguccc

SEQ ID NO: 1169737 - RNA, 19 nt, Artificial Sequence
  Description of Artificial Sequence: Synthetic oligonucleotide
ucacacaugcugccugcga

SEQ ID NO: 1169738 - RNA, 19 nt, Artificial Sequence
  Description of Artificial Sequence: Synthetic oligonucleotide
uguucucgugagcgaugcg

SEQ ID NO: 1169739 - RNA, 19 nt, Artificial Sequence
  Description of Artificial Sequence: Synthetic oligonucleotide
cuguuggcgaagacacagg

SEQ ID NO: 1169740 - RNA, 19 nt, Artificial Sequence
  Description of Artificial Sequence: Synthetic oligonucleotide
uggccaucucguacagccg

SEQ ID NO: 1169741 - RNA, 19 nt, Artificial Sequence
  Description of Artificial Sequence: Synthetic oligonucleotide
uugcagcucauuugguccu

SEQ ID NO: 1169742 - RNA, 19 nt, Artificial Sequence
  Description of Artificial Sequence: Synthetic oligonucleotide
acacaugcugccugcgaug

SEQ ID NO: 1169743 - RNA, 19 nt, Artificial Sequence
  Description of Artificial Sequence: Synthetic oligonucleotide
augaacuggagcagcucgg

SEQ ID NO: 1169744 - RNA, 19 nt, Artificial Sequence
  Description of Artificial Sequence: Synthetic oligonucleotide
ucuuugcggccacuguuaa

SEQ ID NO: 1169745 - RNA, 19 nt, Artificial Sequence
  Description of Artificial Sequence: Synthetic oligonucleotide
cuugcgagaguuccugcuc

SEQ ID NO: 1169746 - RNA, 19 nt, Artificial Sequence
  Description of Artificial Sequence: Synthetic oligonucleotide
agacccuggaucaucccuc

SEQ ID NO: 1169747 - RNA, 19 nt, Artificial Sequence
  Description of Artificial Sequence: Synthetic oligonucleotide
cuaccugggcuccacucag

SEQ ID NO: 1169748 - RNA, 19 nt, Artificial Sequence
  Description of Artificial Sequence: Synthetic oligonucleotide
caccacuugcgagaguucc

SEQ ID NO: 1169749 - RNA, 19 nt, Artificial Sequence
  Description of Artificial Sequence: Synthetic oligonucleotide
ggccaucucguacagccgg

SEQ ID NO: 1169750 - RNA, 19 nt, Artificial Sequence
  Description of Artificial Sequence: Synthetic oligonucleotide
aggucggugucacucguga

SEQ ID NO: 1169751 - RNA, 19 nt, Artificial Sequence
  Description of Artificial Sequence: Synthetic oligonucleotide
cugguccgagucuuugcgg

SEQ ID NO: 1169752 - RNA, 19 nt, Artificial Sequence
  Description of Artificial Sequence: Synthetic oligonucleotide
cagagcagccaccucccgg

SEQ ID NO: 1169753 - RNA, 19 nt, Artificial Sequence
  Description of Artificial Sequence: Synthetic oligonucleotide
gccgccaugaacuggagca

SEQ ID NO: 1169754 - RNA, 19 nt, Artificial Sequence
  Description of Artificial Sequence: Synthetic oligonucleotide
ugcaauaccucggggcugu

SEQ ID NO: 1169755 - RNA, 19 nt, Artificial Sequence
  Description of Artificial Sequence: Synthetic oligonucleotide
aggggugugaacggcaugu

SEQ ID NO: 1169756 - RNA, 19 nt, Artificial Sequence
  Description of Artificial Sequence: Synthetic oligonucleotide
gugagcgaugcgcuccagg

SEQ ID NO: 1169757 - RNA, 19 nt, Artificial Sequence
  Description of Artificial Sequence: Synthetic oligonucleotide
ucgggcacagccagcugug

SEQ ID NO: 1169758 - RNA, 19 nt, Artificial Sequence
  Description of Artificial Sequence: Synthetic oligonucleotide
guacaggucggugucacuc

SEQ ID NO: 1169759 - RNA, 19 nt, Artificial Sequence
  Description of Artificial Sequence: Synthetic oligonucleotide
agccggacggcgcucucac

SEQ ID NO: 1169760 - RNA, 19 nt, Artificial Sequence
  Description of Artificial Sequence: Synthetic oligonucleotide
ugaacggcaugugcaggcc

SEQ ID NO: 1169761 - RNA, 19 nt, Artificial Sequence
  Description of Artificial Sequence: Synthetic oligonucleotide
guccagaaggagcggagac

SEQ ID NO: 1169762 - RNA, 19 nt, Artificial Sequence
  Description of Artificial Sequence: Synthetic oligonucleotide
uccacucagcaacccguga

SEQ ID NO: 1169763 - RNA, 19 nt, Artificial Sequence
  Description of Artificial Sequence: Synthetic oligonucleotide
acauagagguucugggcuu

SEQ ID NO: 1169764 - RNA, 19 nt, Artificial Sequence
  Description of Artificial Sequence: Synthetic oligonucleotide
ugaacuggagcagcucggu

SEQ ID NO: 1169765 - RNA, 19 nt, Artificial Sequence
  Description of Artificial Sequence: Synthetic oligonucleotide
ggagcggagacagucacug

SEQ ID NO: 1169766 - RNA, 19 nt, Artificial Sequence
  Description of Artificial Sequence: Synthetic oligonucleotide
uggaccggcugaacagcag

SEQ ID NO: 1169767 - RNA, 19 nt, Artificial Sequence
  Description of Artificial Sequence: Synthetic oligonucleotide
cucgugagcgaugcgcucc

SEQ ID NO: 1169768 - RNA, 19 nt, Artificial Sequence
  Description of Artificial Sequence: Synthetic oligonucleotide
ggccggguagacuaggggc

SEQ ID NO: 1169769 - RNA, 19 nt, Artificial Sequence
  Description of Artificial Sequence: Synthetic oligonucleotide
acuaggggcggucgugaug

SEQ ID NO: 1169770 - RNA, 19 nt, Artificial Sequence
  Description of Artificial Sequence: Synthetic oligonucleotide
agccgucggaggcuguagg

SEQ ID NO: 1169771 - RNA, 19 nt, Artificial Sequence
  Description of Artificial Sequence: Synthetic oligonucleotide
uagacuaggggcggucgug

SEQ ID NO: 1169772 - RNA, 19 nt, Artificial Sequence
  Description of Artificial Sequence: Synthetic oligonucleotide
cacauagagguucugggcu

SEQ ID NO: 1169773 - RNA, 19 nt, Artificial Sequence
  Description of Artificial Sequence: Synthetic oligonucleotide
ucgacgcugcugcagccga

SEQ ID NO: 1169774 - RNA, 19 nt, Artificial Sequence
  Description of Artificial Sequence: Synthetic oligonucleotide
ccuggaucaucccucggcg

SEQ ID NO: 1169775 - RNA, 19 nt, Artificial Sequence
  Description of Artificial Sequence: Synthetic oligonucleotide
ggcuguggcacaauccagg

SEQ ID NO: 1169776 - RNA, 19 nt, Artificial Sequence
  Description of Artificial Sequence: Synthetic oligonucleotide
cagccaaccgucagccacc

SEQ ID NO: 1169777 - RNA, 19 nt, Artificial Sequence
  Description of Artificial Sequence: Synthetic oligonucleotide
cugccugcgaugucucagc

SEQ ID NO: 1169778 - RNA, 19 nt, Artificial Sequence
  Description of Artificial Sequence: Synthetic oligonucleotide
cucuaaccucugucgcugg

SEQ ID NO: 1169779 - RNA, 19 nt, Artificial Sequence
  Description of Artificial Sequence: Synthetic oligonucleotide
guguucucgugagcgaugc

SEQ ID NO: 1169780 - RNA, 19 nt, Artificial Sequence
  Description of Artificial Sequence: Synthetic oligonucleotide
ugccgaagcuugaacuuua

SEQ ID NO: 1169781 - RNA, 19 nt, Artificial Sequence
  Description of Artificial Sequence: Synthetic oligonucleotide
gaauggugacuggacgcug

SEQ ID NO: 1169782 - RNA, 19 nt, Artificial Sequence
  Description of Artificial Sequence: Synthetic oligonucleotide
guagggucagcuggucacg

SEQ ID NO: 1169783 - RNA, 19 nt, Artificial Sequence
  Description of Artificial Sequence: Synthetic oligonucleotide
cuucaccugcacccaggcg

SEQ ID NO: 1169784 - RNA, 19 nt, Artificial Sequence
  Description of Artificial Sequence: Synthetic oligonucleotide
aucgcuggagcagccaucu

SEQ ID NO: 1169785 - RNA, 19 nt, Artificial Sequence
  Description of Artificial Sequence: Synthetic oligonucleotide
guggguagaggccccgccc

SEQ ID NO: 1169786 - RNA, 19 nt, Artificial Sequence
  Description of Artificial Sequence: Synthetic oligonucleotide
cacucagcaacccgugauc

SEQ ID NO: 1169787 - RNA, 19 nt, Artificial Sequence
  Description of Artificial Sequence: Synthetic oligonucleotide
ugucagcccgcugggaggc

SEQ ID NO: 1169788 - RNA, 19 nt, Artificial Sequence
  Description of Artificial Sequence: Synthetic oligonucleotide
cucucuucacggcccgagg

SEQ ID NO: 1169789 - RNA, 19 nt, Artificial Sequence
  Description of Artificial Sequence: Synthetic oligonucleotide
agaaaaucggagacagcau

SEQ ID NO: 1169790 - RNA, 19 nt, Artificial Sequence
  Description of Artificial Sequence: Synthetic oligonucleotide
ucgugauggucuggggucc

SEQ ID NO: 1169791 - RNA, 19 nt, Artificial Sequence
  Description of Artificial Sequence: Synthetic oligonucleotide
ugucaauggaccggcugaa

SEQ ID NO: 1169792 - RNA, 19 nt, Artificial Sequence
  Description of Artificial Sequence: Synthetic oligonucleotide
gggcuucuaggccagugag

SEQ ID NO: 1169793 - RNA, 19 nt, Artificial Sequence
  Description of Artificial Sequence: Synthetic oligonucleotide
ggauguugccaggagccgg

SEQ ID NO: 1169794 - RNA, 19 nt, Artificial Sequence
  Description of Artificial Sequence: Synthetic oligonucleotide
cagcucggugcucagagca

SEQ ID NO: 1169795 - RNA, 19 nt, Artificial Sequence
  Description of Artificial Sequence: Synthetic oligonucleotide
ugggcacugcgggugaaug

SEQ ID NO: 1169796 - RNA, 19 nt, Artificial Sequence
  Description of Artificial Sequence: Synthetic oligonucleotide
ucgugagcgaugcgcucca

SEQ ID NO: 1169797 - RNA, 19 nt, Artificial Sequence
  Description of Artificial Sequence: Synthetic oligonucleotide
acuggcgccgcagguuggc

SEQ ID NO: 1169798 - RNA, 19 nt, Artificial Sequence
  Description of Artificial Sequence: Synthetic oligonucleotide
cagcaacccgugauccucc

SEQ ID NO: 1169799 - RNA, 19 nt, Artificial Sequence
  Description of Artificial Sequence: Synthetic oligonucleotide
auggucuggggucccacau

SEQ ID NO: 1169800 - RNA, 19 nt, Artificial Sequence
  Description of Artificial Sequence: Synthetic oligonucleotide
gaaggagcggagacaguca

SEQ ID NO: 1169801 - RNA, 19 nt, Artificial Sequence
  Description of Artificial Sequence: Synthetic oligonucleotide
gauggucuggggucccaca

SEQ ID NO: 1169802 - RNA, 19 nt, Artificial Sequence
  Description of Artificial Sequence: Synthetic oligonucleotide
caccagcuugaguaggguc

SEQ ID NO: 1169803 - RNA, 19 nt, Artificial Sequence
  Description of Artificial Sequence: Synthetic oligonucleotide
gguagacuaggggcggucg

SEQ ID NO: 1169804 - RNA, 19 nt, Artificial Sequence
  Description of Artificial Sequence: Synthetic oligonucleotide
uugcggccacuguuaaaug

SEQ ID NO: 1169805 - RNA, 19 nt, Artificial Sequence
  Description of Artificial Sequence: Synthetic oligonucleotide
cuuggccgccaugaacugg

SEQ ID NO: 1169806 - RNA, 19 nt, Artificial Sequence
  Description of Artificial Sequence: Synthetic oligonucleotide
gaugucucagcaccucagu

SEQ ID NO: 1169807 - RNA, 19 nt, Artificial Sequence
  Description of Artificial Sequence: Synthetic oligonucleotide
acggcgcucucacugucug

SEQ ID NO: 1169808 - RNA, 19 nt, Artificial Sequence
  Description of Artificial Sequence: Synthetic oligonucleotide
ucucguacagccggugcuc

SEQ ID NO: 1169809 - RNA, 19 nt, Artificial Sequence
  Description of Artificial Sequence: Synthetic oligonucleotide
ucugcagcgccgagguuuu

SEQ ID NO: 1169810 - RNA, 19 nt, Artificial Sequence
  Description of Artificial Sequence: Synthetic oligonucleotide
gaacggcaugugcaggcca

SEQ ID NO: 1169811 - RNA, 19 nt, Artificial Sequence
  Description of Artificial Sequence: Synthetic oligonucleotide
cucaggaccuugcgccugc

SEQ ID NO: 1169812 - RNA, 19 nt, Artificial Sequence
  Description of Artificial Sequence: Synthetic oligonucleotide
acgcugucagcccgcuggg

SEQ ID NO: 1169813 - RNA, 19 nt, Artificial Sequence
  Description of Artificial Sequence: Synthetic oligonucleotide
cacgggucagguccugggc

SEQ ID NO: 1169814 - RNA, 19 nt, Artificial Sequence
  Description of Artificial Sequence: Synthetic oligonucleotide
ggguagaguuuccgaagag

SEQ ID NO: 1169815 - RNA, 19 nt, Artificial Sequence
  Description of Artificial Sequence: Synthetic oligonucleotide
aagaggccggguagacuag

SEQ ID NO: 1169816 - RNA, 19 nt, Artificial Sequence
  Description of Artificial Sequence: Synthetic oligonucleotide
aucccucggcgccucgggg

SEQ ID NO: 1169817 - RNA, 19 nt, Artificial Sequence
  Description of Artificial Sequence: Synthetic oligonucleotide
caucccucggcgccucggg

SEQ ID NO: 1169818 - RNA, 19 nt, Artificial Sequence
  Description of Artificial Sequence: Synthetic oligonucleotide
guacagccggugcuccucc

SEQ ID NO: 1169819 - RNA, 19 nt, Artificial Sequence
  Description of Artificial Sequence: Synthetic oligonucleotide
agugagccgucggaggcug

SEQ ID NO: 1169820 - RNA, 19 nt, Artificial Sequence
  Description of Artificial Sequence: Synthetic oligonucleotide
ugacugcuggagaguccgc

SEQ ID NO: 1169821 - RNA, 19 nt, Artificial Sequence
  Description of Artificial Sequence: Synthetic oligonucleotide
gccggguagacuaggggcg

SEQ ID NO: 1169822 - RNA, 19 nt, Artificial Sequence
  Description of Artificial Sequence: Synthetic oligonucleotide
uuacguccuggaugucaac

SEQ ID NO: 1169823 - RNA, 19 nt, Artificial Sequence
  Description of Artificial Sequence: Synthetic oligonucleotide
ggcuguagggaaccuuggc

SEQ ID NO: 1169824 - RNA, 19 nt, Artificial Sequence
  Description of Artificial Sequence: Synthetic oligonucleotide
ugggcgugaagaggaaguc

SEQ ID NO: 1169825 - RNA, 19 nt, Artificial Sequence
  Description of Artificial Sequence: Synthetic oligonucleotide
ggaccuugcgccugcgccc

SEQ ID NO: 1169826 - RNA, 19 nt, Artificial Sequence
  Description of Artificial Sequence: Synthetic oligonucleotide
cgaagcuugaacuuuacgu

SEQ ID NO: 1169827 - RNA, 19 nt, Artificial Sequence
  Description of Artificial Sequence: Synthetic oligonucleotide
ccagugagccgucggaggc

SEQ ID NO: 1169828 - RNA, 19 nt, Artificial Sequence
  Description of Artificial Sequence: Synthetic oligonucleotide
gcucuaaccucugucgcug

SEQ ID NO: 1169829 - RNA, 19 nt, Artificial Sequence
  Description of Artificial Sequence: Synthetic oligonucleotide
gggaugcggacacaauuca

SEQ ID NO: 1169830 - RNA, 19 nt, Artificial Sequence
  Description of Artificial Sequence: Synthetic oligonucleotide
agguguucucgugagcgau

SEQ ID NO: 1169831 - RNA, 19 nt, Artificial Sequence
  Description of Artificial Sequence: Synthetic oligonucleotide
cugcagcuccagccaaccg

SEQ ID NO: 1169832 - RNA, 19 nt, Artificial Sequence
  Description of Artificial Sequence: Synthetic oligonucleotide
cacugcgggugaaugguga

SEQ ID NO: 1169833 - RNA, 19 nt, Artificial Sequence
  Description of Artificial Sequence: Synthetic oligonucleotide
agacuaggggcggucguga

SEQ ID NO: 1169834 - RNA, 19 nt, Artificial Sequence
  Description of Artificial Sequence: Synthetic oligonucleotide
caucgcuggagcagccauc

SEQ ID NO: 1169835 - RNA, 19 nt, Artificial Sequence
  Description of Artificial Sequence: Synthetic oligonucleotide
uccgagucuuugcggccac

SEQ ID NO: 1169836 - RNA, 19 nt, Artificial Sequence
  Description of Artificial Sequence: Synthetic oligonucleotide
uuucugcgguggugcagga

SEQ ID NO: 1169837 - RNA, 19 nt, Artificial Sequence
  Description of Artificial Sequence: Synthetic oligonucleotide
ccgaagcuugaacuuuacg

SEQ ID NO: 1169838 - RNA, 19 nt, Artificial Sequence
  Description of Artificial Sequence: Synthetic oligonucleotide
acccuggaucaucccucgg

SEQ ID NO: 1169839 - RNA, 19 nt, Artificial Sequence
  Description of Artificial Sequence: Synthetic oligonucleotide
gaccuugcgccugcgcccc

SEQ ID NO: 1169840 - RNA, 19 nt, Artificial Sequence
  Description of Artificial Sequence: Synthetic oligonucleotide
cagcgccgagguuuucugc

SEQ ID NO: 1169841 - RNA, 19 nt, Artificial Sequence
  Description of Artificial Sequence: Synthetic oligonucleotide
ggcggcaccacuugcgaga

SEQ ID NO: 1169842 - RNA, 19 nt, Artificial Sequence
  Description of Artificial Sequence: Synthetic oligonucleotide
ucguacagccggugcuccu

SEQ ID NO: 1169843 - RNA, 19 nt, Artificial Sequence
  Description of Artificial Sequence: Synthetic oligonucleotide
gucaacgcugucagcccgc

SEQ ID NO: 1169844 - RNA, 19 nt, Artificial Sequence
  Description of Artificial Sequence: Synthetic oligonucleotide
cagccgacuguagcugucc

SEQ ID NO: 1169845 - RNA, 19 nt, Artificial Sequence
  Description of Artificial Sequence: Synthetic oligonucleotide
ggcacaauccagguugcuc

SEQ ID NO: 1169846 - RNA, 19 nt, Artificial Sequence
  Description of Artificial Sequence: Synthetic oligonucleotide
aaaucugguccgagucuuu

SEQ ID NO: 1169847 - RNA, 19 nt, Artificial Sequence
  Description of Artificial Sequence: Synthetic oligonucleotide
agcaacccgugauccucca

SEQ ID NO: 1169848 - RNA, 19 nt, Artificial Sequence
  Description of Artificial Sequence: Synthetic oligonucleotide
uccagccaaccgucagcca

SEQ ID NO: 1169849 - RNA, 19 nt, Artificial Sequence
  Description of Artificial Sequence: Synthetic oligonucleotide
gggauguugccaggagccg

SEQ ID NO: 1169850 - RNA, 19 nt, Artificial Sequence
  Description of Artificial Sequence: Synthetic oligonucleotide
caccguuggugucaaugga

SEQ ID NO: 1169851 - RNA, 19 nt, Artificial Sequence
  Description of Artificial Sequence: Synthetic oligonucleotide
cugcagccgacuguagcug

SEQ ID NO: 1169852 - RNA, 19 nt, Artificial Sequence
  Description of Artificial Sequence: Synthetic oligonucleotide
agccgcagggauguugcca

SEQ ID NO: 1169853 - RNA, 19 nt, Artificial Sequence
  Description of Artificial Sequence: Synthetic oligonucleotide
gugcaauaccucggggcug

SEQ ID NO: 1169854 - RNA, 19 nt, Artificial Sequence
  Description of Artificial Sequence: Synthetic oligonucleotide
caauaccucggggcuguug

SEQ ID NO: 1169855 - RNA, 19 nt, Artificial Sequence
  Description of Artificial Sequence: Synthetic oligonucleotide
gguccgagucuuugcggcc

SEQ ID NO: 1169856 - RNA, 19 nt, Artificial Sequence
  Description of Artificial Sequence: Synthetic oligonucleotide
uagcuguccccuggggcca

SEQ ID NO: 1169857 - RNA, 19 nt, Artificial Sequence
  Description of Artificial Sequence: Synthetic oligonucleotide
caggucggugucacucgug

SEQ ID NO: 1169858 - RNA, 19 nt, Artificial Sequence
  Description of Artificial Sequence: Synthetic oligonucleotide
cuaggccagugagccgucg

SEQ ID NO: 1169859 - RNA, 19 nt, Artificial Sequence
  Description of Artificial Sequence: Synthetic oligonucleotide
cuccaggggugugaacggc

SEQ ID NO: 1169860 - RNA, 19 nt, Artificial Sequence
  Description of Artificial Sequence: Synthetic oligonucleotide
acuuuacguccuggauguc

SEQ ID NO: 1169861 - RNA, 19 nt, Artificial Sequence
  Description of Artificial Sequence: Synthetic oligonucleotide
gcggucgugauggucuggg

SEQ ID NO: 1169862 - RNA, 19 nt, Artificial Sequence
  Description of Artificial Sequence: Synthetic oligonucleotide
gagccgucggaggcuguag

SEQ ID NO: 1169863 - RNA, 19 nt, Artificial Sequence
  Description of Artificial Sequence: Synthetic oligonucleotide
aggggcggucgugaugguc

SEQ ID NO: 1169864 - RNA, 19 nt, Artificial Sequence
  Description of Artificial Sequence: Synthetic oligonucleotide
gaaccuuggccgccaugaa

SEQ ID NO: 1169865 - RNA, 19 nt, Artificial Sequence
  Description of Artificial Sequence: Synthetic oligonucleotide
ugucacucgugaggcaguu

SEQ ID NO: 1169866 - RNA, 19 nt, Artificial Sequence
  Description of Artificial Sequence: Synthetic oligonucleotide
auggaccggcugaacagca

SEQ ID NO: 1169867 - RNA, 19 nt, Artificial Sequence
  Description of Artificial Sequence: Synthetic oligonucleotide
uaaaugcaucgggcacagc

SEQ ID NO: 1169868 - RNA, 19 nt, Artificial Sequence
  Description of Artificial Sequence: Synthetic oligonucleotide
ugcuccagguugugccgaa

SEQ ID NO: 1169869 - RNA, 19 nt, Artificial Sequence
  Description of Artificial Sequence: Synthetic oligonucleotide
ugcuccgcucagacuucac

SEQ ID NO: 1169870 - RNA, 19 nt, Artificial Sequence
  Description of Artificial Sequence: Synthetic oligonucleotide
gagccgcagggauguugcc

SEQ ID NO: 1169871 - RNA, 19 nt, Artificial Sequence
  Description of Artificial Sequence: Synthetic oligonucleotide
gggugaauggugacuggac

SEQ ID NO: 1169872 - RNA, 19 nt, Artificial Sequence
  Description of Artificial Sequence: Synthetic oligonucleotide
agcccucgugguccucauc

SEQ ID NO: 1169873 - RNA, 19 nt, Artificial Sequence
  Description of Artificial Sequence: Synthetic oligonucleotide
ggaugucaacgcugucagc

SEQ ID NO: 1169874 - RNA, 19 nt, Artificial Sequence
  Description of Artificial Sequence: Synthetic oligonucleotide
gaugcgcuccaggggugug

SEQ ID NO: 1169875 - RNA, 19 nt, Artificial Sequence
  Description of Artificial Sequence: Synthetic oligonucleotide
ccgagguuuucugcggugg

SEQ ID NO: 1169876 - RNA, 19 nt, Artificial Sequence
  Description of Artificial Sequence: Synthetic oligonucleotide
ggcuucuaggccagugagc

SEQ ID NO: 1169877 - RNA, 19 nt, Artificial Sequence
  Description of Artificial Sequence: Synthetic oligonucleotide
ggaugcggacacaauucac

SEQ ID NO: 1169878 - RNA, 19 nt, Artificial Sequence
  Description of Artificial Sequence: Synthetic oligonucleotide
caggggugugaacggcaug

SEQ ID NO: 1169879 - RNA, 19 nt, Artificial Sequence
  Description of Artificial Sequence: Synthetic oligonucleotide
cgaugucucagcaccucag

SEQ ID NO: 1169880 - RNA, 19 nt, Artificial Sequence
  Description of Artificial Sequence: Synthetic oligonucleotide
gcacccaggcguugaagac

SEQ ID NO: 1169881 - RNA, 19 nt, Artificial Sequence
  Description of Artificial Sequence: Synthetic oligonucleotide
agcaccucagugggcguga

SEQ ID NO: 1169882 - RNA, 19 nt, Artificial Sequence
  Description of Artificial Sequence: Synthetic oligonucleotide
ccggacggcgcucucacug

SEQ ID NO: 1169883 - RNA, 19 nt, Artificial Sequence
  Description of Artificial Sequence: Synthetic oligonucleotide
cgggaugcggacacaauuc

SEQ ID NO: 1169884 - RNA, 19 nt, Artificial Sequence
  Description of Artificial Sequence: Synthetic oligonucleotide
cuucacggcccgaggccuc

SEQ ID NO: 1169885 - RNA, 19 nt, Artificial Sequence
  Description of Artificial Sequence: Synthetic oligonucleotide
gguuuucugcgguggugca

SEQ ID NO: 1169886 - RNA, 19 nt, Artificial Sequence
  Description of Artificial Sequence: Synthetic oligonucleotide
gcagcgccgagguuuucug

SEQ ID NO: 1169887 - RNA, 19 nt, Artificial Sequence
  Description of Artificial Sequence: Synthetic oligonucleotide
gccgacuguagcugucccc

SEQ ID NO: 1169888 - RNA, 19 nt, Artificial Sequence
  Description of Artificial Sequence: Synthetic oligonucleotide
cacagguggggugcagcac

SEQ ID NO: 1169889 - RNA, 19 nt, Artificial Sequence
  Description of Artificial Sequence: Synthetic oligonucleotide
ccgggcuguggcacaaucc

SEQ ID NO: 1169890 - RNA, 19 nt, Artificial Sequence
  Description of Artificial Sequence: Synthetic oligonucleotide
ugagccgucggaggcugua

SEQ ID NO: 1169891 - RNA, 19 nt, Artificial Sequence
  Description of Artificial Sequence: Synthetic oligonucleotide
guagacuaggggcggucgu

SEQ ID NO: 1169892 - RNA, 19 nt, Artificial Sequence
  Description of Artificial Sequence: Synthetic oligonucleotide
cugcgguggugcaggagca

SEQ ID NO: 1169893 - RNA, 19 nt, Artificial Sequence
  Description of Artificial Sequence: Synthetic oligonucleotide
gcggagacagucacuguac

SEQ ID NO: 1169894 - RNA, 19 nt, Artificial Sequence
  Description of Artificial Sequence: Synthetic oligonucleotide
gcucucuucacggcccgag

SEQ ID NO: 1169895 - RNA, 19 nt, Artificial Sequence
  Description of Artificial Sequence: Synthetic oligonucleotide
gcgggugaauggugacugg

SEQ ID NO: 1169896 - RNA, 19 nt, Artificial Sequence
  Description of Artificial Sequence: Synthetic oligonucleotide
gcggccacuguuaaaugca

SEQ ID NO: 1169897 - RNA, 19 nt, Artificial Sequence
  Description of Artificial Sequence: Synthetic oligonucleotide
acaccccggcggcggcacc

SEQ ID NO: 1169898 - RNA, 19 nt, Artificial Sequence
  Description of Artificial Sequence: Synthetic oligonucleotide
cuuugcggccacuguuaaa

SEQ ID NO: 1169899 - RNA, 19 nt, Artificial Sequence
  Description of Artificial Sequence: Synthetic oligonucleotide
cuguggguagaggccccgc

SEQ ID NO: 1169900 - RNA, 19 nt, Artificial Sequence
  Description of Artificial Sequence: Synthetic oligonucleotide
ccagcuugaguagggucag

SEQ ID NO: 1169901 - RNA, 19 nt, Artificial Sequence
  Description of Artificial Sequence: Synthetic oligonucleotide
gucacucgugaggcaguug

SEQ ID NO: 1169902 - RNA, 19 nt, Artificial Sequence
  Description of Artificial Sequence: Synthetic oligonucleotide
accugcacccaggcguuga

SEQ ID NO: 1169903 - RNA, 19 nt, Artificial Sequence
  Description of Artificial Sequence: Synthetic oligonucleotide
gcagcuccagccaaccguc

SEQ ID NO: 1169904 - RNA, 19 nt, Artificial Sequence
  Description of Artificial Sequence: Synthetic oligonucleotide
caucgggcacagccagcug

SEQ ID NO: 1169905 - RNA, 19 nt, Artificial Sequence
  Description of Artificial Sequence: Synthetic oligonucleotide
gcgaugucucagcaccuca

SEQ ID NO: 1169906 - RNA, 19 nt, Artificial Sequence
  Description of Artificial Sequence: Synthetic oligonucleotide
gccgagguuuucugcggug

SEQ ID NO: 1169907 - RNA, 19 nt, Artificial Sequence
  Description of Artificial Sequence: Synthetic oligonucleotide
aggagcggagacagucacu

SEQ ID NO: 1169908 - RNA, 19 nt, Artificial Sequence
  Description of Artificial Sequence: Synthetic oligonucleotide
gcaacccgugauccuccag

SEQ ID NO: 1169909 - RNA, 19 nt, Artificial Sequence
  Description of Artificial Sequence: Synthetic oligonucleotide
caguuguaggugagaaaau

SEQ ID NO: 1169910 - RNA, 19 nt, Artificial Sequence
  Description of Artificial Sequence: Synthetic oligonucleotide
agccaaccgucagccacca

SEQ ID NO: 1169911 - RNA, 19 nt, Artificial Sequence
  Description of Artificial Sequence: Synthetic oligonucleotide
uccccacacacggggcagu

SEQ ID NO: 1169912 - RNA, 19 nt, Artificial Sequence
  Description of Artificial Sequence: Synthetic oligonucleotide
ggacacaauucaccaggua

SEQ ID NO: 1169913 - RNA, 19 nt, Artificial Sequence
  Description of Artificial Sequence: Synthetic oligonucleotide
augcgcuccagggguguga

SEQ ID NO: 1169914 - RNA, 19 nt, Artificial Sequence
  Description of Artificial Sequence: Synthetic oligonucleotide
cucagcaacccgugauccu

SEQ ID NO: 1169915 - RNA, 19 nt, Artificial Sequence
  Description of Artificial Sequence: Synthetic oligonucleotide
gccccugugugugcaauac

SEQ ID NO: 1169916 - RNA, 19 nt, Artificial Sequence
  Description of Artificial Sequence: Synthetic oligonucleotide
acggcaugugcaggccaca

SEQ ID NO: 1169917 - RNA, 19 nt, Artificial Sequence
  Description of Artificial Sequence: Synthetic oligonucleotide
caacgcugucagcccgcug

SEQ ID NO: 1169918 - RNA, 19 nt, Artificial Sequence
  Description of Artificial Sequence: Synthetic oligonucleotide
gccugcgaugucucagcac

SEQ ID NO: 1169919 - RNA, 19 nt, Artificial Sequence
  Description of Artificial Sequence: Synthetic oligonucleotide
ggcacugcgggugaauggu

SEQ ID NO: 1169920 - RNA, 19 nt, Artificial Sequence
  Description of Artificial Sequence: Synthetic oligonucleotide
gcggcaccacuugcgagag

SEQ ID NO: 1169921 - RNA, 19 nt, Artificial Sequence
  Description of Artificial Sequence: Synthetic oligonucleotide
gguugugccgaagcuugaa

SEQ ID NO: 1169922 - RNA, 19 nt, Artificial Sequence
  Description of Artificial Sequence: Synthetic oligonucleotide
cuggcgccgcagguuggcc

SEQ ID NO: 1169923 - RNA, 19 nt, Artificial Sequence
  Description of Artificial Sequence: Synthetic oligonucleotide
ggccacuguuaaaugcauc

SEQ ID NO: 1169924 - RNA, 19 nt, Artificial Sequence
  Description of Artificial Sequence: Synthetic oligonucleotide
gugaaggggucacccuggu

SEQ ID NO: 1169925 - RNA, 19 nt, Artificial Sequence
  Description of Artificial Sequence: Synthetic oligonucleotide
ccggguagacuaggggcgg

SEQ ID NO: 1169926 - RNA, 19 nt, Artificial Sequence
  Description of Artificial Sequence: Synthetic oligonucleotide
gagcggagacagucacugu

SEQ ID NO: 1169927 - RNA, 19 nt, Artificial Sequence
  Description of Artificial Sequence: Synthetic oligonucleotide
agggaaccuuggccgccau

SEQ ID NO: 1169928 - RNA, 19 nt, Artificial Sequence
  Description of Artificial Sequence: Synthetic oligonucleotide
ggggcggucgugauggucu

SEQ ID NO: 1169929 - RNA, 19 nt, Artificial Sequence
  Description of Artificial Sequence: Synthetic oligonucleotide
cggugcucagagcagccac

SEQ ID NO: 1169930 - RNA, 19 nt, Artificial Sequence
  Description of Artificial Sequence: Synthetic oligonucleotide
guuuccgaagaggccgggu

SEQ ID NO: 1169931 - RNA, 19 nt, Artificial Sequence
  Description of Artificial Sequence: Synthetic oligonucleotide
gcagcucauuugguccuug

SEQ ID NO: 1169932 - RNA, 19 nt, Artificial Sequence
  Description of Artificial Sequence: Synthetic oligonucleotide
gacuaggggcggucgugau

SEQ ID NO: 1169933 - RNA, 19 nt, Artificial Sequence
  Description of Artificial Sequence: Synthetic oligonucleotide
gcgagaguuccugcuccgc

SEQ ID NO: 1169934 - RNA, 19 nt, Artificial Sequence
  Description of Artificial Sequence: Synthetic oligonucleotide
ccucagacccuggaucauc

SEQ ID NO: 1169935 - RNA, 19 nt, Artificial Sequence
  Description of Artificial Sequence: Synthetic oligonucleotide
cagcuccagccaaccguca

SEQ ID NO: 1169936 - RNA, 19 nt, Artificial Sequence
  Description of Artificial Sequence: Synthetic oligonucleotide
cugcgaugucucagcaccu

SEQ ID NO: 1169937 - RNA, 19 nt, Artificial Sequence
  Description of Artificial Sequence: Synthetic oligonucleotide
ccgccaugaacuggagcag

SEQ ID NO: 1169938 - RNA, 19 nt, Artificial Sequence
  Description of Artificial Sequence: Synthetic oligonucleotide
gacggcgcucucacugucu

SEQ ID NO: 1169939 - RNA, 19 nt, Artificial Sequence
  Description of Artificial Sequence: Synthetic oligonucleotide
gcacugcgggugaauggug

SEQ ID NO: 1169940 - RNA, 19 nt, Artificial Sequence
  Description of Artificial Sequence: Synthetic oligonucleotide
gcggcggcaccacuugcga

SEQ ID NO: 1169941 - RNA, 19 nt, Artificial Sequence
  Description of Artificial Sequence: Synthetic oligonucleotide
ggguagacuaggggcgguc

SEQ ID NO: 1169942 - RNA, 19 nt, Artificial Sequence
  Description of Artificial Sequence: Synthetic oligonucleotide
gcgaagacacagguggggu

SEQ ID NO: 1169943 - RNA, 19 nt, Artificial Sequence
  Description of Artificial Sequence: Synthetic oligonucleotide
ccgcagggauguugccagg

SEQ ID NO: 1169944 - RNA, 19 nt, Artificial Sequence
  Description of Artificial Sequence: Synthetic oligonucleotide
gugucacucgugaggcagu

SEQ ID NO: 1169945 - RNA, 19 nt, Artificial Sequence
  Description of Artificial Sequence: Synthetic oligonucleotide
cugcgggugaauggugacu

SEQ ID NO: 1169946 - RNA, 19 nt, Artificial Sequence
  Description of Artificial Sequence: Synthetic oligonucleotide
cagucaccguuggugucaa

SEQ ID NO: 1169947 - RNA, 19 nt, Artificial Sequence
  Description of Artificial Sequence: Synthetic oligonucleotide
ccgccccagcaccagcuug

SEQ ID NO: 1169948 - RNA, 19 nt, Artificial Sequence
  Description of Artificial Sequence: Synthetic oligonucleotide
ccgacuguagcuguccccu

SEQ ID NO: 1169949 - RNA, 19 nt, Artificial Sequence
  Description of Artificial Sequence: Synthetic oligonucleotide
cagugggcacggagccgca

SEQ ID NO: 1169950 - RNA, 19 nt, Artificial Sequence
  Description of Artificial Sequence: Synthetic oligonucleotide
ccacucagcaacccgugau

SEQ ID NO: 1169951 - RNA, 19 nt, Artificial Sequence
  Description of Artificial Sequence: Synthetic oligonucleotide
ccgucggaggcuguaggga

SEQ ID NO: 1169952 - RNA, 19 nt, Artificial Sequence
  Description of Artificial Sequence: Synthetic oligonucleotide
cagugagccgucggaggcu

SEQ ID NO: 1169953 - RNA, 19 nt, Artificial Sequence
  Description of Artificial Sequence: Synthetic oligonucleotide
cgacuguagcuguccccug

SEQ ID NO: 1169954 - RNA, 19 nt, Artificial Sequence
  Description of Artificial Sequence: Synthetic oligonucleotide
gccaaccgucagccaccag

SEQ ID NO: 1169955 - RNA, 19 nt, Artificial Sequence
  Description of Artificial Sequence: Synthetic oligonucleotide
gccucaggaccuugcgccu

SEQ ID NO: 1169956 - RNA, 19 nt, Artificial Sequence
  Description of Artificial Sequence: Synthetic oligonucleotide
cacggggcagugguagggu

SEQ ID NO: 1169957 - RNA, 19 nt, Artificial Sequence
  Description of Artificial Sequence: Synthetic oligonucleotide
ucggcgccucggggcaggu

SEQ ID NO: 1169958 - RNA, 19 nt, Artificial Sequence
  Description of Artificial Sequence: Synthetic oligonucleotide
ccgggaugcggacacaauu

SEQ ID NO: 1169959 - RNA, 19 nt, Artificial Sequence
  Description of Artificial Sequence: Synthetic oligonucleotide
cggcggcaccacuugcgag

SEQ ID NO: 1169960 - RNA, 19 nt, Artificial Sequence
  Description of Artificial Sequence: Synthetic oligonucleotide
ccucgugguccucaucgcu

SEQ ID NO: 1169961 - RNA, 19 nt, Artificial Sequence
  Description of Artificial Sequence: Synthetic oligonucleotide
ggaggcuguagggaaccuu

SEQ ID NO: 1169962 - RNA, 19 nt, Artificial Sequence
  Description of Artificial Sequence: Synthetic oligonucleotide
ggggugcagcacggugccc

SEQ ID NO: 1169963 - RNA, 19 nt, Artificial Sequence
  Description of Artificial Sequence: Synthetic oligonucleotide
cggcgcucucacugucugc

SEQ ID NO: 1169964 - RNA, 19 nt, Artificial Sequence
  Description of Artificial Sequence: Synthetic oligonucleotide
gucagcccgcugggaggca

SEQ ID NO: 1169965 - RNA, 19 nt, Artificial Sequence
  Description of Artificial Sequence: Synthetic oligonucleotide
cugcagcgccgagguuuuc

SEQ ID NO: 1169966 - RNA, 19 nt, Artificial Sequence
  Description of Artificial Sequence: Synthetic oligonucleotide
ccuugucaucuuggcucuc

SEQ ID NO: 1169967 - RNA, 19 nt, Artificial Sequence
  Description of Artificial Sequence: Synthetic oligonucleotide
cggacacaauucaccaggu

SEQ ID NO: 1169968 - RNA, 19 nt, Artificial Sequence
  Description of Artificial Sequence: Synthetic oligonucleotide
cgacgcugcugcagccgac

SEQ ID NO: 1169969 - RNA, 19 nt, Artificial Sequence
  Description of Artificial Sequence: Synthetic oligonucleotide
ggccacagugugggcaggu

SEQ ID NO: 1169970 - RNA, 19 nt, Artificial Sequence
  Description of Artificial Sequence: Synthetic oligonucleotide
cgugagcgaugcgcuccag

SEQ ID NO: 1169971 - RNA, 19 nt, Artificial Sequence
  Description of Artificial Sequence: Synthetic oligonucleotide
caggggccgccgggcugug

SEQ ID NO: 1169972 - RNA, 19 nt, Artificial Sequence
  Description of Artificial Sequence: Synthetic oligonucleotide
acggagccgcagggauguu

SEQ ID NO: 1169973 - RNA, 19 nt, Artificial Sequence
  Description of Artificial Sequence: Synthetic oligonucleotide
gcaccucagugggcgugaa

SEQ ID NO: 1169974 - RNA, 19 nt, Artificial Sequence
  Description of Artificial Sequence: Synthetic oligonucleotide
gugagccgucggaggcugu

SEQ ID NO: 1169975 - RNA, 19 nt, Artificial Sequence
  Description of Artificial Sequence: Synthetic oligonucleotide
cgaagaggccggguagacu

SEQ ID NO: 1169976 - RNA, 19 nt, Artificial Sequence
  Description of Artificial Sequence: Synthetic oligonucleotide
gccggacggcgcucucacu

SEQ ID NO: 1169977 - RNA, 19 nt, Artificial Sequence
  Description of Artificial Sequence: Synthetic oligonucleotide
ccgaggccuccugccccug

SEQ ID NO: 1169978 - RNA, 19 nt, Artificial Sequence
  Description of Artificial Sequence: Synthetic oligonucleotide
cccggcggcggcaccacuu

SEQ ID NO: 1169979 - RNA, 19 nt, Artificial Sequence
  Description of Artificial Sequence: Synthetic oligonucleotide
cgaugcgcuccaggggugu

SEQ ID NO: 1169980 - RNA, 19 nt, Artificial Sequence
  Description of Artificial Sequence: Synthetic oligonucleotide
ccgagucuuugcggccacu

SEQ ID NO: 1169981 - RNA, 19 nt, Artificial Sequence
  Description of Artificial Sequence: Synthetic oligonucleotide
gcccggcgcucucgacgcu

SEQ ID NO: 1169982 - RNA, 19 nt, Artificial Sequence
  Description of Artificial Sequence: Synthetic oligonucleotide
gcgccucggggcagguguu

SEQ ID NO: 1169983 - RNA, 19 nt, Artificial Sequence
  Description of Artificial Sequence: Synthetic oligonucleotide
uguuaaaagauaaaggaca

SEQ ID NO: 1169984 - RNA, 19 nt, Artificial Sequence
  Description of Artificial Sequence: Synthetic oligonucleotide
uguuguacaagccauagcc

SEQ ID NO: 1169985 - RNA, 19 nt, Artificial Sequence
  Description of Artificial Sequence: Synthetic oligonucleotide
auagcaauaggacuuaugg

SEQ ID NO: 1169986 - RNA, 19 nt, Artificial Sequence
  Description of Artificial Sequence: Synthetic oligonucleotide
aaagcacaagcacugacgc

SEQ ID NO: 1169987 - RNA, 19 nt, Artificial Sequence
  Description of Artificial Sequence: Synthetic oligonucleotide
caaaacauggcgaugaucc

SEQ ID NO: 1169988 - RNA, 19 nt, Artificial Sequence
  Description of Artificial Sequence: Synthetic oligonucleotide
aaauguguaacucucuuca

SEQ ID NO: 1169989 - RNA, 19 nt, Artificial Sequence
  Description of Artificial Sequence: Synthetic oligonucleotide
uguaacucucuucaggugg

SEQ ID NO: 1169990 - RNA, 19 nt, Artificial Sequence
  Description of Artificial Sequence: Synthetic oligonucleotide
aauguuggcauaauguugg

SEQ ID NO: 1169991 - RNA, 19 nt, Artificial Sequence
  Description of Artificial Sequence: Synthetic oligonucleotide
auugcuuggaucuggaaag

SEQ ID NO: 1169992 - RNA, 19 nt, Artificial Sequence
  Description of Artificial Sequence: Synthetic oligonucleotide
accuuguaggauuacaugg

SEQ ID NO: 1169993 - RNA, 19 nt, Artificial Sequence
  Description of Artificial Sequence: Synthetic oligonucleotide
ugcuauuacgcauagaauc

SEQ ID NO: 1169994 - RNA, 19 nt, Artificial Sequence
  Description of Artificial Sequence: Synthetic oligonucleotide
agaaacaauugcuuggauc

SEQ ID NO: 1169995 - RNA, 19 nt, Artificial Sequence
  Description of Artificial Sequence: Synthetic oligonucleotide
aagacuuacacccuacccu

SEQ ID NO: 1169996 - RNA, 19 nt, Artificial Sequence
  Description of Artificial Sequence: Synthetic oligonucleotide
cauagaaucuccgaguugg

SEQ ID NO: 1169997 - RNA, 19 nt, Artificial Sequence
  Description of Artificial Sequence: Synthetic oligonucleotide
aaaacauggcgaugauccc

SEQ ID NO: 1169998 - RNA, 19 nt, Artificial Sequence
  Description of Artificial Sequence: Synthetic oligonucleotide
aaucacaauacacucugcu

SEQ ID NO: 1169999 - RNA, 19 nt, Artificial Sequence
  Description of Artificial Sequence: Synthetic oligonucleotide
auuaguacacauuucacau

SEQ ID NO: 1170000 - RNA, 19 nt, Artificial Sequence
  Description of Artificial Sequence: Synthetic oligonucleotide
agaaccggaugauucagcc

SEQ ID NO: 1170001 - RNA, 19 nt, Artificial Sequence
  Description of Artificial Sequence: Synthetic oligonucleotide
aaauucucacuaugcaauc

SEQ ID NO: 1170002 - RNA, 19 nt, Artificial Sequence
  Description of Artificial Sequence: Synthetic oligonucleotide
ucauacaagaucaguucgg

SEQ ID NO: 1170003 - RNA, 19 nt, Artificial Sequence
  Description of Artificial Sequence: Synthetic oligonucleotide
aagucuucauacaagauca

SEQ ID NO: 1170004 - RNA, 19 nt, Artificial Sequence
  Description of Artificial Sequence: Synthetic oligonucleotide
ugaacaguccaccagucug

SEQ ID NO: 1170005 - RNA, 19 nt, Artificial Sequence
  Description of Artificial Sequence: Synthetic oligonucleotide
cagguaaccaccauggagc

SEQ ID NO: 1170006 - RNA, 19 nt, Artificial Sequence
  Description of Artificial Sequence: Synthetic oligonucleotide
gaaacaauugcuuggaucu

SEQ ID NO: 1170007 - RNA, 19 nt, Artificial Sequence
  Description of Artificial Sequence: Synthetic oligonucleotide
uauggcacauguaggaucc

SEQ ID NO: 1170008 - RNA, 19 nt, Artificial Sequence
  Description of Artificial Sequence: Synthetic oligonucleotide
aguacuggaccccaggguc

SEQ ID NO: 1170009 - RNA, 19 nt, Artificial Sequence
  Description of Artificial Sequence: Synthetic oligonucleotide
uuccucaacagaaugguga

SEQ ID NO: 1170010 - RNA, 19 nt, Artificial Sequence
  Description of Artificial Sequence: Synthetic oligonucleotide
ucugucauaaauucucacu

SEQ ID NO: 1170011 - RNA, 19 nt, Artificial Sequence
  Description of Artificial Sequence: Synthetic oligonucleotide
uguguaacucucuucaggu

SEQ ID NO: 1170012 - RNA, 19 nt, Artificial Sequence
  Description of Artificial Sequence: Synthetic oligonucleotide
agaacuccgaacucgagug

SEQ ID NO: 1170013 - RNA, 19 nt, Artificial Sequence
  Description of Artificial Sequence: Synthetic oligonucleotide
ucacuaugcaaucacaaua

SEQ ID NO: 1170014 - RNA, 19 nt, Artificial Sequence
  Description of Artificial Sequence: Synthetic oligonucleotide
cauuacugacuucauaggc

SEQ ID NO: 1170015 - RNA, 19 nt, Artificial Sequence
  Description of Artificial Sequence: Synthetic oligonucleotide
ugcaagucagaaacaauug

SEQ ID NO: 1170016 - RNA, 19 nt, Artificial Sequence
  Description of Artificial Sequence: Synthetic oligonucleotide
acuugcucacucaacaugc

SEQ ID NO: 1170017 - RNA, 19 nt, Artificial Sequence
  Description of Artificial Sequence: Synthetic oligonucleotide
auguguaacucucuucagg

SEQ ID NO: 1170018 - RNA, 19 nt, Artificial Sequence
  Description of Artificial Sequence: Synthetic oligonucleotide
ugcgcaguaggccacggcg

SEQ ID NO: 1170019 - RNA, 19 nt, Artificial Sequence
  Description of Artificial Sequence: Synthetic oligonucleotide
uauuacgcauagaaucucc

SEQ ID NO: 1170020 - RNA, 19 nt, Artificial Sequence
  Description of Artificial Sequence: Synthetic oligonucleotide
uagaauuccacaguuuccc

SEQ ID NO: 1170021 - RNA, 19 nt, Artificial Sequence
  Description of Artificial Sequence: Synthetic oligonucleotide
aggugggaagucuucauac

SEQ ID NO: 1170022 - RNA, 19 nt, Artificial Sequence
  Description of Artificial Sequence: Synthetic oligonucleotide
auaaauucucacuaugcaa

SEQ ID NO: 1170023 - RNA, 19 nt, Artificial Sequence
  Description of Artificial Sequence: Synthetic oligonucleotide
uauaaaagacuuacacccu

SEQ ID NO: 1170024 - RNA, 19 nt, Artificial Sequence
  Description of Artificial Sequence: Synthetic oligonucleotide
cuaugcaaucacaauacac

SEQ ID NO: 1170025 - RNA, 19 nt, Artificial Sequence
  Description of Artificial Sequence: Synthetic oligonucleotide
ucaaacugucccuaugagc

SEQ ID NO: 1170026 - RNA, 19 nt, Artificial Sequence
  Description of Artificial Sequence: Synthetic oligonucleotide
agugggauuugucacaaca

SEQ ID NO: 1170027 - RNA, 19 nt, Artificial Sequence
  Description of Artificial Sequence: Synthetic oligonucleotide
uugcaagucagaaacaauu

SEQ ID NO: 1170028 - RNA, 19 nt, Artificial Sequence
  Description of Artificial Sequence: Synthetic oligonucleotide
cacuaugcaaucacaauac

SEQ ID NO: 1170029 - RNA, 19 nt, Artificial Sequence
  Description of Artificial Sequence: Synthetic oligonucleotide
aaggcucucaaagcaaaac

SEQ ID NO: 1170030 - RNA, 19 nt, Artificial Sequence
  Description of Artificial Sequence: Synthetic oligonucleotide
acuuauggcacauguagga

SEQ ID NO: 1170031 - RNA, 19 nt, Artificial Sequence
  Description of Artificial Sequence: Synthetic oligonucleotide
uguaggauuacauggcaaa

SEQ ID NO: 1170032 - RNA, 19 nt, Artificial Sequence
  Description of Artificial Sequence: Synthetic oligonucleotide
ucuggaaaggcucccguug

SEQ ID NO: 1170033 - RNA, 19 nt, Artificial Sequence
  Description of Artificial Sequence: Synthetic oligonucleotide
uguacucccacucugccuc

SEQ ID NO: 1170034 - RNA, 19 nt, Artificial Sequence
  Description of Artificial Sequence: Synthetic oligonucleotide
uuacccacuauguuguaca

SEQ ID NO: 1170035 - RNA, 19 nt, Artificial Sequence
  Description of Artificial Sequence: Synthetic oligonucleotide
ggacuuauggcacauguag

SEQ ID NO: 1170036 - RNA, 19 nt, Artificial Sequence
  Description of Artificial Sequence: Synthetic oligonucleotide
ugcacagcgguaccuauag

SEQ ID NO: 1170037 - RNA, 19 nt, Artificial Sequence
  Description of Artificial Sequence: Synthetic oligonucleotide
aaauaaucugucauaaauu

SEQ ID NO: 1170038 - RNA, 19 nt, Artificial Sequence
  Description of Artificial Sequence: Synthetic oligonucleotide
uauagcaauaggacuuaug

SEQ ID NO: 1170039 - RNA, 19 nt, Artificial Sequence
  Description of Artificial Sequence: Synthetic oligonucleotide
ucaaguagccaguugaguu

SEQ ID NO: 1170040 - RNA, 19 nt, Artificial Sequence
  Description of Artificial Sequence: Synthetic oligonucleotide
aguuuguugccccagggga

SEQ ID NO: 1170041 - RNA, 19 nt, Artificial Sequence
  Description of Artificial Sequence: Synthetic oligonucleotide
ugcacaacggaaucccagg

SEQ ID NO: 1170042 - RNA, 19 nt, Artificial Sequence
  Description of Artificial Sequence: Synthetic oligonucleotide
cacgauaaagcacaagcac

SEQ ID NO: 1170043 - RNA, 19 nt, Artificial Sequence
  Description of Artificial Sequence: Synthetic oligonucleotide
caguuagcgccuuugacag

SEQ ID NO: 1170044 - RNA, 19 nt, Artificial Sequence
  Description of Artificial Sequence: Synthetic oligonucleotide
gaagaggacucucaccuug

SEQ ID NO: 1170045 - RNA, 19 nt, Artificial Sequence
  Description of Artificial Sequence: Synthetic oligonucleotide
uggagagagccucagagau

SEQ ID NO: 1170046 - RNA, 19 nt, Artificial Sequence
  Description of Artificial Sequence: Synthetic oligonucleotide
uaaaagacuuacacccuac

SEQ ID NO: 1170047 - RNA, 19 nt, Artificial Sequence
  Description of Artificial Sequence: Synthetic oligonucleotide
ugucaaguagccaguugag

SEQ ID NO: 1170048 - RNA, 19 nt, Artificial Sequence
  Description of Artificial Sequence: Synthetic oligonucleotide
aguuuggucacgcgagacg

SEQ ID NO: 1170049 - RNA, 19 nt, Artificial Sequence
  Description of Artificial Sequence: Synthetic oligonucleotide
ucucacuaugcaaucacaa

SEQ ID NO: 1170050 - RNA, 19 nt, Artificial Sequence
  Description of Artificial Sequence: Synthetic oligonucleotide
acucaacaugccuucaaag

SEQ ID NO: 1170051 - RNA, 19 nt, Artificial Sequence
  Description of Artificial Sequence: Synthetic oligonucleotide
acucccacgcauuacccac

SEQ ID NO: 1170052 - RNA, 19 nt, Artificial Sequence
  Description of Artificial Sequence: Synthetic oligonucleotide
uguccauccccucacuuga

SEQ ID NO: 1170053 - RNA, 19 nt, Artificial Sequence
  Description of Artificial Sequence: Synthetic oligonucleotide
ugcaaucacaauacacucu

SEQ ID NO: 1170054 - RNA, 19 nt, Artificial Sequence
  Description of Artificial Sequence: Synthetic oligonucleotide
cauaaauucucacuaugca

SEQ ID NO: 1170055 - RNA, 19 nt, Artificial Sequence
  Description of Artificial Sequence: Synthetic oligonucleotide
aggacgucaagguucucgg

SEQ ID NO: 1170056 - RNA, 19 nt, Artificial Sequence
  Description of Artificial Sequence: Synthetic oligonucleotide
guuuggucacgcgagacgg

SEQ ID NO: 1170057 - RNA, 19 nt, Artificial Sequence
  Description of Artificial Sequence: Synthetic oligonucleotide
uuacugacuucauaggcau

SEQ ID NO: 1170058 - RNA, 19 nt, Artificial Sequence
  Description of Artificial Sequence: Synthetic oligonucleotide
uaggacgucaagguucucg

SEQ ID NO: 1170059 - RNA, 19 nt, Artificial Sequence
  Description of Artificial Sequence: Synthetic oligonucleotide
acauguaggauccaccuuu

SEQ ID NO: 1170060 - RNA, 19 nt, Artificial Sequence
  Description of Artificial Sequence: Synthetic oligonucleotide
gacuuauggcacauguagg

SEQ ID NO: 1170061 - RNA, 19 nt, Artificial Sequence
  Description of Artificial Sequence: Synthetic oligonucleotide
uuguacaagccauagccau

SEQ ID NO: 1170062 - RNA, 19 nt, Artificial Sequence
  Description of Artificial Sequence: Synthetic oligonucleotide
guucagaacuccgaacucg

SEQ ID NO: 1170063 - RNA, 19 nt, Artificial Sequence
  Description of Artificial Sequence: Synthetic oligonucleotide
ugucccuaugagccaaagg

SEQ ID NO: 1170064 - RNA, 19 nt, Artificial Sequence
  Description of Artificial Sequence: Synthetic oligonucleotide
uucagaacuccgaacucga

SEQ ID NO: 1170065 - RNA, 19 nt, Artificial Sequence
  Description of Artificial Sequence: Synthetic oligonucleotide
uucacgaacuucucaaaau

SEQ ID NO: 1170066 - RNA, 19 nt, Artificial Sequence
  Description of Artificial Sequence: Synthetic oligonucleotide
aauucucacuaugcaauca

SEQ ID NO: 1170067 - RNA, 19 nt, Artificial Sequence
  Description of Artificial Sequence: Synthetic oligonucleotide
aaguacuggaccccagggu

SEQ ID NO: 1170068 - RNA, 19 nt, Artificial Sequence
  Description of Artificial Sequence: Synthetic oligonucleotide
ugacgcacgaacgucagca

SEQ ID NO: 1170069 - RNA, 19 nt, Artificial Sequence
  Description of Artificial Sequence: Synthetic oligonucleotide
aacuccgaacucgaguguc

SEQ ID NO: 1170070 - RNA, 19 nt, Artificial Sequence
  Description of Artificial Sequence: Synthetic oligonucleotide
auaaaagacuuacacccua

SEQ ID NO: 1170071 - RNA, 19 nt, Artificial Sequence
  Description of Artificial Sequence: Synthetic oligonucleotide
cccacuauguuguacaagc

SEQ ID NO: 1170072 - RNA, 19 nt, Artificial Sequence
  Description of Artificial Sequence: Synthetic oligonucleotide
cugagguccacucccacgc

SEQ ID NO: 1170073 - RNA, 19 nt, Artificial Sequence
  Description of Artificial Sequence: Synthetic oligonucleotide
auuacccacuauguuguac

SEQ ID NO: 1170074 - RNA, 19 nt, Artificial Sequence
  Description of Artificial Sequence: Synthetic oligonucleotide
uguaggauccaccuuucuu

SEQ ID NO: 1170075 - RNA, 19 nt, Artificial Sequence
  Description of Artificial Sequence: Synthetic oligonucleotide
gagagagccucagagauca

SEQ ID NO: 1170076 - RNA, 19 nt, Artificial Sequence
  Description of Artificial Sequence: Synthetic oligonucleotide
aacucgcccugccaaaugu

SEQ ID NO: 1170077 - RNA, 19 nt, Artificial Sequence
  Description of Artificial Sequence: Synthetic oligonucleotide
cucaacaugccuucaaaga

SEQ ID NO: 1170078 - RNA, 19 nt, Artificial Sequence
  Description of Artificial Sequence: Synthetic oligonucleotide
uuccuuuggccacugggca

SEQ ID NO: 1170079 - RNA, 19 nt, Artificial Sequence
  Description of Artificial Sequence: Synthetic oligonucleotide
auacaagaucaguucggag

SEQ ID NO: 1170080 - RNA, 19 nt, Artificial Sequence
  Description of Artificial Sequence: Synthetic oligonucleotide
uucucacuaugcaaucaca

SEQ ID NO: 1170081 - RNA, 19 nt, Artificial Sequence
  Description of Artificial Sequence: Synthetic oligonucleotide
ggcacuuaauguuaaaaga

SEQ ID NO: 1170082 - RNA, 19 nt, Artificial Sequence
  Description of Artificial Sequence: Synthetic oligonucleotide
ucugucaaguagccaguug

SEQ ID NO: 1170083 - RNA, 19 nt, Artificial Sequence
  Description of Artificial Sequence: Synthetic oligonucleotide
uuacgcauagaaucuccga

SEQ ID NO: 1170084 - RNA, 19 nt, Artificial Sequence
  Description of Artificial Sequence: Synthetic oligonucleotide
aaggcacuuaauguuaaaa

SEQ ID NO: 1170085 - RNA, 19 nt, Artificial Sequence
  Description of Artificial Sequence: Synthetic oligonucleotide
guuggaugcagagcuaucc

SEQ ID NO: 1170086 - RNA, 19 nt, Artificial Sequence
  Description of Artificial Sequence: Synthetic oligonucleotide
uucccaaauuaguacacau

SEQ ID NO: 1170087 - RNA, 19 nt, Artificial Sequence
  Description of Artificial Sequence: Synthetic oligonucleotide
uacacucugcuauuacgca

SEQ ID NO: 1170088 - RNA, 19 nt, Artificial Sequence
  Description of Artificial Sequence: Synthetic oligonucleotide
aguugaguucacgaacuuc

SEQ ID NO: 1170089 - RNA, 19 nt, Artificial Sequence
  Description of Artificial Sequence: Synthetic oligonucleotide
auuacgcauagaaucuccg

SEQ ID NO: 1170090 - RNA, 19 nt, Artificial Sequence
  Description of Artificial Sequence: Synthetic oligonucleotide
aaggcaucaaccggugcag

SEQ ID NO: 1170091 - RNA, 19 nt, Artificial Sequence
  Description of Artificial Sequence: Synthetic oligonucleotide
gaguucacgaacuucucaa

SEQ ID NO: 1170092 - RNA, 19 nt, Artificial Sequence
  Description of Artificial Sequence: Synthetic oligonucleotide
caguucggaguuauugggg

SEQ ID NO: 1170093 - RNA, 19 nt, Artificial Sequence
  Description of Artificial Sequence: Synthetic oligonucleotide
uccgggugccuccaguuag

SEQ ID NO: 1170094 - RNA, 19 nt, Artificial Sequence
  Description of Artificial Sequence: Synthetic oligonucleotide
ugcagagcuauccggugug

SEQ ID NO: 1170095 - RNA, 19 nt, Artificial Sequence
  Description of Artificial Sequence: Synthetic oligonucleotide
cucaacagaauggugaaca

SEQ ID NO: 1170096 - RNA, 19 nt, Artificial Sequence
  Description of Artificial Sequence: Synthetic oligonucleotide
uagccaguugaguucacga

SEQ ID NO: 1170097 - RNA, 19 nt, Artificial Sequence
  Description of Artificial Sequence: Synthetic oligonucleotide
acauuucacauucucugaa

SEQ ID NO: 1170098 - RNA, 19 nt, Artificial Sequence
  Description of Artificial Sequence: Synthetic oligonucleotide
ucgcccugccaaauguugg

SEQ ID NO: 1170099 - RNA, 19 nt, Artificial Sequence
  Description of Artificial Sequence: Synthetic oligonucleotide
cugucaaguagccaguuga

SEQ ID NO: 1170100 - RNA, 19 nt, Artificial Sequence
  Description of Artificial Sequence: Synthetic oligonucleotide
cacagcgguaccuauagca

SEQ ID NO: 1170101 - RNA, 19 nt, Artificial Sequence
  Description of Artificial Sequence: Synthetic oligonucleotide
acgucaagguucucggcuc

SEQ ID NO: 1170102 - RNA, 19 nt, Artificial Sequence
  Description of Artificial Sequence: Synthetic oligonucleotide
cucccguuggcuaucaguc

SEQ ID NO: 1170103 - RNA, 19 nt, Artificial Sequence
  Description of Artificial Sequence: Synthetic oligonucleotide
acgauaaagcacaagcacu

SEQ ID NO: 1170104 - RNA, 19 nt, Artificial Sequence
  Description of Artificial Sequence: Synthetic oligonucleotide
caagcacugacgcacgaac

SEQ ID NO: 1170105 - RNA, 19 nt, Artificial Sequence
  Description of Artificial Sequence: Synthetic oligonucleotide
auguuggcauaauguuggc

SEQ ID NO: 1170106 - RNA, 19 nt, Artificial Sequence
  Description of Artificial Sequence: Synthetic oligonucleotide
aagcacugacgcacgaacg

SEQ ID NO: 1170107 - RNA, 19 nt, Artificial Sequence
  Description of Artificial Sequence: Synthetic oligonucleotide
acgaacuucucaaaaucag

SEQ ID NO: 1170108 - RNA, 19 nt, Artificial Sequence
  Description of Artificial Sequence: Synthetic oligonucleotide
uguucagaacuccgaacuc

SEQ ID NO: 1170109 - RNA, 19 nt, Artificial Sequence
  Description of Artificial Sequence: Synthetic oligonucleotide
gacaaaggagucaccaaac

SEQ ID NO: 1170110 - RNA, 19 nt, Artificial Sequence
  Description of Artificial Sequence: Synthetic oligonucleotide
aaguagccaguugaguuca

SEQ ID NO: 1170111 - RNA, 19 nt, Artificial Sequence
  Description of Artificial Sequence: Synthetic oligonucleotide
ggucgaaggggaaacaggg

SEQ ID NO: 1170112 - RNA, 19 nt, Artificial Sequence
  Description of Artificial Sequence: Synthetic oligonucleotide
acuauguuguacaagccau

SEQ ID NO: 1170113 - RNA, 19 nt, Artificial Sequence
  Description of Artificial Sequence: Synthetic oligonucleotide
aauaggacuuauggcacau

SEQ ID NO: 1170114 - RNA, 19 nt, Artificial Sequence
  Description of Artificial Sequence: Synthetic oligonucleotide
aucacaauacacucugcua

SEQ ID NO: 1170115 - RNA, 19 nt, Artificial Sequence
  Description of Artificial Sequence: Synthetic oligonucleotide
ggugcaguuccuuggaagc

SEQ ID NO: 1170116 - RNA, 19 nt, Artificial Sequence
  Description of Artificial Sequence: Synthetic oligonucleotide
aaacucgcccugccaaaug

SEQ ID NO: 1170117 - RNA, 19 nt, Artificial Sequence
  Description of Artificial Sequence: Synthetic oligonucleotide
guacaagccauagccauug

SEQ ID NO: 1170118 - RNA, 19 nt, Artificial Sequence
  Description of Artificial Sequence: Synthetic oligonucleotide
guaacucucuucagguggg

SEQ ID NO: 1170119 - RNA, 19 nt, Artificial Sequence
  Description of Artificial Sequence: Synthetic oligonucleotide
agcacugacgcacgaacgu

SEQ ID NO: 1170120 - RNA, 19 nt, Artificial Sequence
  Description of Artificial Sequence: Synthetic oligonucleotide
uagaaucuccgaguuggag

SEQ ID NO: 1170121 - RNA, 19 nt, Artificial Sequence
  Description of Artificial Sequence: Synthetic oligonucleotide
ucggucuuucccagaagug

SEQ ID NO: 1170122 - RNA, 19 nt, Artificial Sequence
  Description of Artificial Sequence: Synthetic oligonucleotide
aaacaauugcuuggaucug

SEQ ID NO: 1170123 - RNA, 19 nt, Artificial Sequence
  Description of Artificial Sequence: Synthetic oligonucleotide
caguuuguugccccagggg

SEQ ID NO: 1170124 - RNA, 19 nt, Artificial Sequence
  Description of Artificial Sequence: Synthetic oligonucleotide
aguugcaagucagaaacaa

SEQ ID NO: 1170125 - RNA, 19 nt, Artificial Sequence
  Description of Artificial Sequence: Synthetic oligonucleotide
gaugugcgccuucacuugc

SEQ ID NO: 1170126 - RNA, 19 nt, Artificial Sequence
  Description of Artificial Sequence: Synthetic oligonucleotide
aagugggauuugucacaac

SEQ ID NO: 1170127 - RNA, 19 nt, Artificial Sequence
  Description of Artificial Sequence: Synthetic oligonucleotide
uuucccaaauuaguacaca

SEQ ID NO: 1170128 - RNA, 19 nt, Artificial Sequence
  Description of Artificial Sequence: Synthetic oligonucleotide
uugcucacucaacaugccu

SEQ ID NO: 1170129 - RNA, 19 nt, Artificial Sequence
  Description of Artificial Sequence: Synthetic oligonucleotide
ccuagaauuccacaguuuc

SEQ ID NO: 1170130 - RNA, 19 nt, Artificial Sequence
  Description of Artificial Sequence: Synthetic oligonucleotide
acgaacgucagcaguuugg

SEQ ID NO: 1170131 - RNA, 19 nt, Artificial Sequence
  Description of Artificial Sequence: Synthetic oligonucleotide
cacuauguuguacaagcca

SEQ ID NO: 1170132 - RNA, 19 nt, Artificial Sequence
  Description of Artificial Sequence: Synthetic oligonucleotide
ugagccaaaggcacuuaau

SEQ ID NO: 1170133 - RNA, 19 nt, Artificial Sequence
  Description of Artificial Sequence: Synthetic oligonucleotide
cacgaacuucucaaaauca

SEQ ID NO: 1170134 - RNA, 19 nt, Artificial Sequence
  Description of Artificial Sequence: Synthetic oligonucleotide
aucuccgaguuggagagag

SEQ ID NO: 1170135 - RNA, 19 nt, Artificial Sequence
  Description of Artificial Sequence: Synthetic oligonucleotide
uacacccuacccuuuccug

SEQ ID NO: 1170136 - RNA, 19 nt, Artificial Sequence
  Description of Artificial Sequence: Synthetic oligonucleotide
cugcacaacggaaucccag

SEQ ID NO: 1170137 - RNA, 19 nt, Artificial Sequence
  Description of Artificial Sequence: Synthetic oligonucleotide
caacggaaucccagguugg

SEQ ID NO: 1170138 - RNA, 19 nt, Artificial Sequence
  Description of Artificial Sequence: Synthetic oligonucleotide
gaauuccacaguuucccaa

SEQ ID NO: 1170139 - RNA, 19 nt, Artificial Sequence
  Description of Artificial Sequence: Synthetic oligonucleotide
cucgagugucccaucacug

SEQ ID NO: 1170140 - RNA, 19 nt, Artificial Sequence
  Description of Artificial Sequence: Synthetic oligonucleotide
cuuacacccuacccuuucc

SEQ ID NO: 1170141 - RNA, 19 nt, Artificial Sequence
  Description of Artificial Sequence: Synthetic oligonucleotide
aggaaacucgcccugccaa

SEQ ID NO: 1170142 - RNA, 19 nt, Artificial Sequence
  Description of Artificial Sequence: Synthetic oligonucleotide
aagcacaagcacugacgca

SEQ ID NO: 1170143 - RNA, 19 nt, Artificial Sequence
  Description of Artificial Sequence: Synthetic oligonucleotide
acagcuguacucccacucu

SEQ ID NO: 1170144 - RNA, 19 nt, Artificial Sequence
  Description of Artificial Sequence: Synthetic oligonucleotide
ccuuguaggauuacauggc

SEQ ID NO: 1170145 - RNA, 19 nt, Artificial Sequence
  Description of Artificial Sequence: Synthetic oligonucleotide
ucacucaacaugccuucaa

SEQ ID NO: 1170146 - RNA, 19 nt, Artificial Sequence
  Description of Artificial Sequence: Synthetic oligonucleotide
uuugacagguaaccaccau

SEQ ID NO: 1170147 - RNA, 19 nt, Artificial Sequence
  Description of Artificial Sequence: Synthetic oligonucleotide
cagcggaaguacuggaccc

SEQ ID NO: 1170148 - RNA, 19 nt, Artificial Sequence
  Description of Artificial Sequence: Synthetic oligonucleotide
aacaguccaccagucugag

SEQ ID NO: 1170149 - RNA, 19 nt, Artificial Sequence
  Description of Artificial Sequence: Synthetic oligonucleotide
acacccuacccuuuccuga

SEQ ID NO: 1170150 - RNA, 19 nt, Artificial Sequence
  Description of Artificial Sequence: Synthetic oligonucleotide
aaguggggccuuuuggguu

SEQ ID NO: 1170151 - RNA, 19 nt, Artificial Sequence
  Description of Artificial Sequence: Synthetic oligonucleotide
caaaagaacaaagugcagu

SEQ ID NO: 1170152 - RNA, 19 nt, Artificial Sequence
  Description of Artificial Sequence: Synthetic oligonucleotide
cuauccgguguguucuggc

SEQ ID NO: 1170153 - RNA, 19 nt, Artificial Sequence
  Description of Artificial Sequence: Synthetic oligonucleotide
agaugcaccacacgauaaa

SEQ ID NO: 1170154 - RNA, 19 nt, Artificial Sequence
  Description of Artificial Sequence: Synthetic oligonucleotide
uucuccauccugcuugauu

SEQ ID NO: 1170155 - RNA, 19 nt, Artificial Sequence
  Description of Artificial Sequence: Synthetic oligonucleotide
uggauaggacgucaagguu

SEQ ID NO: 1170156 - RNA, 19 nt, Artificial Sequence
  Description of Artificial Sequence: Synthetic oligonucleotide
cauccauguaaaaggcauc

SEQ ID NO: 1170157 - RNA, 19 nt, Artificial Sequence
  Description of Artificial Sequence: Synthetic oligonucleotide
uucuucacucggucuuucc

SEQ ID NO: 1170158 - RNA, 19 nt, Artificial Sequence
  Description of Artificial Sequence: Synthetic oligonucleotide
uauccgguguguucuggcu

SEQ ID NO: 1170159 - RNA, 19 nt, Artificial Sequence
  Description of Artificial Sequence: Synthetic oligonucleotide
ccucacuugaugaugggac

SEQ ID NO: 1170160 - RNA, 19 nt, Artificial Sequence
  Description of Artificial Sequence: Synthetic oligonucleotide
uggaaaggcucccguuggc

SEQ ID NO: 1170161 - RNA, 19 nt, Artificial Sequence
  Description of Artificial Sequence: Synthetic oligonucleotide
uuggguugaguguuuccuc

SEQ ID NO: 1170162 - RNA, 19 nt, Artificial Sequence
  Description of Artificial Sequence: Synthetic oligonucleotide
cacggcgucauuccaggag

SEQ ID NO: 1170163 - RNA, 19 nt, Artificial Sequence
  Description of Artificial Sequence: Synthetic oligonucleotide
acacucugcuauuacgcau

SEQ ID NO: 1170164 - RNA, 19 nt, Artificial Sequence
  Description of Artificial Sequence: Synthetic oligonucleotide
agguaaccaccauggagca

SEQ ID NO: 1170165 - RNA, 19 nt, Artificial Sequence
  Description of Artificial Sequence: Synthetic oligonucleotide
ggauaggacgucaagguuc

SEQ ID NO: 1170166 - RNA, 19 nt, Artificial Sequence
  Description of Artificial Sequence: Synthetic oligonucleotide
cacauuucacauucucuga

SEQ ID NO: 1170167 - RNA, 19 nt, Artificial Sequence
  Description of Artificial Sequence: Synthetic oligonucleotide
acuccgaacucgagugucc

SEQ ID NO: 1170168 - RNA, 19 nt, Artificial Sequence
  Description of Artificial Sequence: Synthetic oligonucleotide
aacauggcgaugaucccaa

SEQ ID NO: 1170169 - RNA, 19 nt, Artificial Sequence
  Description of Artificial Sequence: Synthetic oligonucleotide
gauaaagcacaagcacuga

SEQ ID NO: 1170170 - RNA, 19 nt, Artificial Sequence
  Description of Artificial Sequence: Synthetic oligonucleotide
gacgucaagguucucggcu

SEQ ID NO: 1170171 - RNA, 19 nt, Artificial Sequence
  Description of Artificial Sequence: Synthetic oligonucleotide
guguaacucucuucaggug

SEQ ID NO: 1170172 - RNA, 19 nt, Artificial Sequence
  Description of Artificial Sequence: Synthetic oligonucleotide
guagccaguugaguucacg

SEQ ID NO: 1170173 - RNA, 19 nt, Artificial Sequence
  Description of Artificial Sequence: Synthetic oligonucleotide
gucuggauaggacgucaag

SEQ ID NO: 1170174 - RNA, 19 nt, Artificial Sequence
  Description of Artificial Sequence: Synthetic oligonucleotide
cucacccuguggcagaguc

SEQ ID NO: 1170175 - RNA, 19 nt, Artificial Sequence
  Description of Artificial Sequence: Synthetic oligonucleotide
gacgcacgaacgucagcag

SEQ ID NO: 1170176 - RNA, 19 nt, Artificial Sequence
  Description of Artificial Sequence: Synthetic oligonucleotide
cuauuacgcauagaaucuc

SEQ ID NO: 1170177 - RNA, 19 nt, Artificial Sequence
  Description of Artificial Sequence: Synthetic oligonucleotide
ucgagcugcacagcgguac

SEQ ID NO: 1170178 - RNA, 19 nt, Artificial Sequence
  Description of Artificial Sequence: Synthetic oligonucleotide
aacggaaucccagguugga

SEQ ID NO: 1170179 - RNA, 19 nt, Artificial Sequence
  Description of Artificial Sequence: Synthetic oligonucleotide
aguuagcgccuuugacagg

SEQ ID NO: 1170180 - RNA, 19 nt, Artificial Sequence
  Description of Artificial Sequence: Synthetic oligonucleotide
cauacaagaucaguucgga

SEQ ID NO: 1170181 - RNA, 19 nt, Artificial Sequence
  Description of Artificial Sequence: Synthetic oligonucleotide
cacugggcaaauguguaac

SEQ ID NO: 1170182 - RNA, 19 nt, Artificial Sequence
  Description of Artificial Sequence: Synthetic oligonucleotide
gcagcggaaguacuggacc

SEQ ID NO: 1170183 - RNA, 19 nt, Artificial Sequence
  Description of Artificial Sequence: Synthetic oligonucleotide
ggagucugggcccuccggg

SEQ ID NO: 1170184 - RNA, 19 nt, Artificial Sequence
  Description of Artificial Sequence: Synthetic oligonucleotide
uccgguguguucuggcuuc

SEQ ID NO: 1170185 - RNA, 19 nt, Artificial Sequence
  Description of Artificial Sequence: Synthetic oligonucleotide
guuguacaagccauagcca

SEQ ID NO: 1170186 - RNA, 19 nt, Artificial Sequence
  Description of Artificial Sequence: Synthetic oligonucleotide
uuuguugccccaggggaaa

SEQ ID NO: 1170187 - RNA, 19 nt, Artificial Sequence
  Description of Artificial Sequence: Synthetic oligonucleotide
augcgcaguaggccacggc

SEQ ID NO: 1170188 - RNA, 19 nt, Artificial Sequence
  Description of Artificial Sequence: Synthetic oligonucleotide
ccgaguuggagagaguugg

SEQ ID NO: 1170189 - RNA, 19 nt, Artificial Sequence
  Description of Artificial Sequence: Synthetic oligonucleotide
agcgccuuugacagguaac

SEQ ID NO: 1170190 - RNA, 19 nt, Artificial Sequence
  Description of Artificial Sequence: Synthetic oligonucleotide
agccaguugaguucacgaa

SEQ ID NO: 1170191 - RNA, 19 nt, Artificial Sequence
  Description of Artificial Sequence: Synthetic oligonucleotide
uccauccugcuugauuuga

SEQ ID NO: 1170192 - RNA, 19 nt, Artificial Sequence
  Description of Artificial Sequence: Synthetic oligonucleotide
caggcagcggaaguacugg

SEQ ID NO: 1170193 - RNA, 19 nt, Artificial Sequence
  Description of Artificial Sequence: Synthetic oligonucleotide
cagugacucuccuggcagg

SEQ ID NO: 1170194 - RNA, 19 nt, Artificial Sequence
  Description of Artificial Sequence: Synthetic oligonucleotide
gccaguugaguucacgaac

SEQ ID NO: 1170195 - RNA, 19 nt, Artificial Sequence
  Description of Artificial Sequence: Synthetic oligonucleotide
uuuggucacgcgagacggu

SEQ ID NO: 1170196 - RNA, 19 nt, Artificial Sequence
  Description of Artificial Sequence: Synthetic oligonucleotide
acaggcauugcuguguguu

SEQ ID NO: 1170197 - RNA, 19 nt, Artificial Sequence
  Description of Artificial Sequence: Synthetic oligonucleotide
gaugggacugaggcccagg

SEQ ID NO: 1170198 - RNA, 19 nt, Artificial Sequence
  Description of Artificial Sequence: Synthetic oligonucleotide
ccaaauuaguacacauuuc

SEQ ID NO: 1170199 - RNA, 19 nt, Artificial Sequence
  Description of Artificial Sequence: Synthetic oligonucleotide
cccuaugagccaaaggcac

SEQ ID NO: 1170200 - RNA, 19 nt, Artificial Sequence
  Description of Artificial Sequence: Synthetic oligonucleotide
gaaaggcucccguuggcua

SEQ ID NO: 1170201 - RNA, 19 nt, Artificial Sequence
  Description of Artificial Sequence: Synthetic oligonucleotide
uuggcauaauguuggccuu

SEQ ID NO: 1170202 - RNA, 19 nt, Artificial Sequence
  Description of Artificial Sequence: Synthetic oligonucleotide
caauaggacuuauggcaca

SEQ ID NO: 1170203 - RNA, 19 nt, Artificial Sequence
  Description of Artificial Sequence: Synthetic oligonucleotide
gauaggacgucaagguucu

SEQ ID NO: 1170204 - RNA, 19 nt, Artificial Sequence
  Description of Artificial Sequence: Synthetic oligonucleotide
gccuuugacagguaaccac

SEQ ID NO: 1170205 - RNA, 19 nt, Artificial Sequence
  Description of Artificial Sequence: Synthetic oligonucleotide
acgcacgaacgucagcagu

SEQ ID NO: 1170206 - RNA, 19 nt, Artificial Sequence
  Description of Artificial Sequence: Synthetic oligonucleotide
ccacgcauuacccacuaug

SEQ ID NO: 1170207 - RNA, 19 nt, Artificial Sequence
  Description of Artificial Sequence: Synthetic oligonucleotide
gcaauaggacuuauggcac

SEQ ID NO: 1170208 - RNA, 19 nt, Artificial Sequence
  Description of Artificial Sequence: Synthetic oligonucleotide
uguugccccaggggaaaag

SEQ ID NO: 1170209 - RNA, 19 nt, Artificial Sequence
  Description of Artificial Sequence: Synthetic oligonucleotide
uacccacuauguuguacaa

SEQ ID NO: 1170210 - RNA, 19 nt, Artificial Sequence
  Description of Artificial Sequence: Synthetic oligonucleotide
gaacgucagcaguuugguc

SEQ ID NO: 1170211 - RNA, 19 nt, Artificial Sequence
  Description of Artificial Sequence: Synthetic oligonucleotide
uagcgccuuugacagguaa

SEQ ID NO: 1170212 - RNA, 19 nt, Artificial Sequence
  Description of Artificial Sequence: Synthetic oligonucleotide
ugagguccacucccacgca

SEQ ID NO: 1170213 - RNA, 19 nt, Artificial Sequence
  Description of Artificial Sequence: Synthetic oligonucleotide
ggucacgcgagacgguucc

SEQ ID NO: 1170214 - RNA, 19 nt, Artificial Sequence
  Description of Artificial Sequence: Synthetic oligonucleotide
ggggaaaagccuguucugc

SEQ ID NO: 1170215 - RNA, 19 nt, Artificial Sequence
  Description of Artificial Sequence: Synthetic oligonucleotide
cacugacgcacgaacguca

SEQ ID NO: 1170216 - RNA, 19 nt, Artificial Sequence
  Description of Artificial Sequence: Synthetic oligonucleotide
uccauguaaaaggcaucaa

SEQ ID NO: 1170217 - RNA, 19 nt, Artificial Sequence
  Description of Artificial Sequence: Synthetic oligonucleotide
acaauugcuuggaucugga

SEQ ID NO: 1170218 - RNA, 19 nt, Artificial Sequence
  Description of Artificial Sequence: Synthetic oligonucleotide
uggcagagucuggauagga

SEQ ID NO: 1170219 - RNA, 19 nt, Artificial Sequence
  Description of Artificial Sequence: Synthetic oligonucleotide
ugugcgccuucacuugcuc

SEQ ID NO: 1170220 - RNA, 19 nt, Artificial Sequence
  Description of Artificial Sequence: Synthetic oligonucleotide
agucuucauacaagaucag

SEQ ID NO: 1170221 - RNA, 19 nt, Artificial Sequence
  Description of Artificial Sequence: Synthetic oligonucleotide
ggaugugcgccuucacuug

SEQ ID NO: 1170222 - RNA, 19 nt, Artificial Sequence
  Description of Artificial Sequence: Synthetic oligonucleotide
guuagcgccuuugacaggu

SEQ ID NO: 1170223 - RNA, 19 nt, Artificial Sequence
  Description of Artificial Sequence: Synthetic oligonucleotide
cacgcauuacccacuaugu

SEQ ID NO: 1170224 - RNA, 19 nt, Artificial Sequence
  Description of Artificial Sequence: Synthetic oligonucleotide
uggcacauguaggauccac

SEQ ID NO: 1170225 - RNA, 19 nt, Artificial Sequence
  Description of Artificial Sequence: Synthetic oligonucleotide
acccacuauguuguacaag

SEQ ID NO: 1170226 - RNA, 19 nt, Artificial Sequence
  Description of Artificial Sequence: Synthetic oligonucleotide
guaggauuacauggcaaaa

SEQ ID NO: 1170227 - RNA, 19 nt, Artificial Sequence
  Description of Artificial Sequence: Synthetic oligonucleotide
cuucccugcccaugcgcag

SEQ ID NO: 1170228 - RNA, 19 nt, Artificial Sequence
  Description of Artificial Sequence: Synthetic oligonucleotide
ggagaaccggaugauucag

SEQ ID NO: 1170229 - RNA, 19 nt, Artificial Sequence
  Description of Artificial Sequence: Synthetic oligonucleotide
gggucgaaggggaaacagg

SEQ ID NO: 1170230 - RNA, 19 nt, Artificial Sequence
  Description of Artificial Sequence: Synthetic oligonucleotide
acgcgagacgguuccuuug

SEQ ID NO: 1170231 - RNA, 19 nt, Artificial Sequence
  Description of Artificial Sequence: Synthetic oligonucleotide
acgcauuacccacuauguu

SEQ ID NO: 1170232 - RNA, 19 nt, Artificial Sequence
  Description of Artificial Sequence: Synthetic oligonucleotide
acagcgguaccuauagcaa

SEQ ID NO: 1170233 - RNA, 19 nt, Artificial Sequence
  Description of Artificial Sequence: Synthetic oligonucleotide
acugacgcacgaacgucag

SEQ ID NO: 1170234 - RNA, 19 nt, Artificial Sequence
  Description of Artificial Sequence: Synthetic oligonucleotide
gucgaaggggaaacagggc

SEQ ID NO: 1170235 - RNA, 19 nt, Artificial Sequence
  Description of Artificial Sequence: Synthetic oligonucleotide
agggucucacccuguggca

SEQ ID NO: 1170236 - RNA, 19 nt, Artificial Sequence
  Description of Artificial Sequence: Synthetic oligonucleotide
agguuggaugcagagcuau

SEQ ID NO: 1170237 - RNA, 19 nt, Artificial Sequence
  Description of Artificial Sequence: Synthetic oligonucleotide
gccacggcgucauuccagg

SEQ ID NO: 1170238 - RNA, 19 nt, Artificial Sequence
  Description of Artificial Sequence: Synthetic oligonucleotide
cacucugcuauuacgcaua

SEQ ID NO: 1170239 - RNA, 19 nt, Artificial Sequence
  Description of Artificial Sequence: Synthetic oligonucleotide
gaucuggaaaggcucccgu

SEQ ID NO: 1170240 - RNA, 19 nt, Artificial Sequence
  Description of Artificial Sequence: Synthetic oligonucleotide
caaagaugcaccacacgau

SEQ ID NO: 1170241 - RNA, 19 nt, Artificial Sequence
  Description of Artificial Sequence: Synthetic oligonucleotide
cacgaacgucagcaguuug

SEQ ID NO: 1170242 - RNA, 19 nt, Artificial Sequence
  Description of Artificial Sequence: Synthetic oligonucleotide
gcuauuacgcauagaaucu

SEQ ID NO: 1170243 - RNA, 19 nt, Artificial Sequence
  Description of Artificial Sequence: Synthetic oligonucleotide
ugguggaugugcgccuuca

SEQ ID NO: 1170244 - RNA, 19 nt, Artificial Sequence
  Description of Artificial Sequence: Synthetic oligonucleotide
cacucaacaugccuucaaa

SEQ ID NO: 1170245 - RNA, 19 nt, Artificial Sequence
  Description of Artificial Sequence: Synthetic oligonucleotide
auaggacuuauggcacaug

SEQ ID NO: 1170246 - RNA, 19 nt, Artificial Sequence
  Description of Artificial Sequence: Synthetic oligonucleotide
gcccaagugggauuuguca

SEQ ID NO: 1170247 - RNA, 19 nt, Artificial Sequence
  Description of Artificial Sequence: Synthetic oligonucleotide
uuggucacgcgagacgguu

SEQ ID NO: 1170248 - RNA, 19 nt, Artificial Sequence
  Description of Artificial Sequence: Synthetic oligonucleotide
uggucacgcgagacgguuc

SEQ ID NO: 1170249 - RNA, 19 nt, Artificial Sequence
  Description of Artificial Sequence: Synthetic oligonucleotide
agcuauccgguguguucug

SEQ ID NO: 1170250 - RNA, 19 nt, Artificial Sequence
  Description of Artificial Sequence: Synthetic oligonucleotide
cagagucuggauaggacgu

SEQ ID NO: 1170251 - RNA, 19 nt, Artificial Sequence
  Description of Artificial Sequence: Synthetic oligonucleotide
gagcuauccgguguguucu

SEQ ID NO: 1170252 - RNA, 19 nt, Artificial Sequence
  Description of Artificial Sequence: Synthetic oligonucleotide
gcgccuuugacagguaacc

SEQ ID NO: 1170253 - RNA, 19 nt, Artificial Sequence
  Description of Artificial Sequence: Synthetic oligonucleotide
cccaaagaugcaccacacg

SEQ ID NO: 1170254 - RNA, 19 nt, Artificial Sequence
  Description of Artificial Sequence: Synthetic oligonucleotide
guaggccacggcgucauuc

SEQ ID NO: 1170255 - RNA, 19 nt, Artificial Sequence
  Description of Artificial Sequence: Synthetic oligonucleotide
ucuccgaguuggagagagu

SEQ ID NO: 1170256 - RNA, 19 nt, Artificial Sequence
  Description of Artificial Sequence: Synthetic oligonucleotide
ucccacgcauuacccacua

SEQ ID NO: 1170257 - RNA, 19 nt, Artificial Sequence
  Description of Artificial Sequence: Synthetic oligonucleotide
ggaaaggcaucaaccggug

SEQ ID NO: 1170258 - RNA, 19 nt, Artificial Sequence
  Description of Artificial Sequence: Synthetic oligonucleotide
agcgguaccuauagcaaua

SEQ ID NO: 1170259 - RNA, 19 nt, Artificial Sequence
  Description of Artificial Sequence: Synthetic oligonucleotide
gugggcaaguggucagcug

SEQ ID NO: 1170260 - RNA, 19 nt, Artificial Sequence
  Description of Artificial Sequence: Synthetic oligonucleotide
ggacucucaccuuguagga

SEQ ID NO: 1170261 - RNA, 19 nt, Artificial Sequence
  Description of Artificial Sequence: Synthetic oligonucleotide
gccuuugggcugcaguuug

SEQ ID NO: 1170262 - RNA, 19 nt, Artificial Sequence
  Description of Artificial Sequence: Synthetic oligonucleotide
guuuguugccccaggggaa

SEQ ID NO: 1170263 - RNA, 19 nt, Artificial Sequence
  Description of Artificial Sequence: Synthetic oligonucleotide
cucacuugaugaugggacu

SEQ ID NO: 1170264 - RNA, 19 nt, Artificial Sequence
  Description of Artificial Sequence: Synthetic oligonucleotide
ccuuggaagccauccuccc

SEQ ID NO: 1170265 - RNA, 19 nt, Artificial Sequence
  Description of Artificial Sequence: Synthetic oligonucleotide
cagaacuccgaacucgagu

SEQ ID NO: 1170266 - RNA, 19 nt, Artificial Sequence
  Description of Artificial Sequence: Synthetic oligonucleotide
aaucuccgaguuggagaga

SEQ ID NO: 1170267 - RNA, 19 nt, Artificial Sequence
  Description of Artificial Sequence: Synthetic oligonucleotide
cugacgcacgaacgucagc

SEQ ID NO: 1170268 - RNA, 19 nt, Artificial Sequence
  Description of Artificial Sequence: Synthetic oligonucleotide
ggcauaauguuggccuuug

SEQ ID NO: 1170269 - RNA, 19 nt, Artificial Sequence
  Description of Artificial Sequence: Synthetic oligonucleotide
acaagcacugacgcacgaa

SEQ ID NO: 1170270 - RNA, 19 nt, Artificial Sequence
  Description of Artificial Sequence: Synthetic oligonucleotide
cuucgagcugcacagcggu

SEQ ID NO: 1170271 - RNA, 19 nt, Artificial Sequence
  Description of Artificial Sequence: Synthetic oligonucleotide
caagugggauuugucacaa

SEQ ID NO: 1170272 - RNA, 19 nt, Artificial Sequence
  Description of Artificial Sequence: Synthetic oligonucleotide
aggagucaccaaacuucuc

SEQ ID NO: 1170273 - RNA, 19 nt, Artificial Sequence
  Description of Artificial Sequence: Synthetic oligonucleotide
uucgagcugcacagcggua

SEQ ID NO: 1170274 - RNA, 19 nt, Artificial Sequence
  Description of Artificial Sequence: Synthetic oligonucleotide
cauaggcauccauguaaaa

SEQ ID NO: 1170275 - RNA, 19 nt, Artificial Sequence
  Description of Artificial Sequence: Synthetic oligonucleotide
uucccugcccaugcgcagu

SEQ ID NO: 1170276 - RNA, 19 nt, Artificial Sequence
  Description of Artificial Sequence: Synthetic oligonucleotide
guacucccacucugccucc

SEQ ID NO: 1170277 - RNA, 19 nt, Artificial Sequence
  Description of Artificial Sequence: Synthetic oligonucleotide
caugcgcaguaggccacgg

SEQ ID NO: 1170278 - RNA, 19 nt, Artificial Sequence
  Description of Artificial Sequence: Synthetic oligonucleotide
cacuugaugaugggacuga

SEQ ID NO: 1170279 - RNA, 19 nt, Artificial Sequence
  Description of Artificial Sequence: Synthetic oligonucleotide
uggcauaauguuggccuuu

SEQ ID NO: 1170280 - RNA, 19 nt, Artificial Sequence
  Description of Artificial Sequence: Synthetic oligonucleotide
cugucccuaugagccaaag

SEQ ID NO: 1170281 - RNA, 19 nt, Artificial Sequence
  Description of Artificial Sequence: Synthetic oligonucleotide
gugaacaguccaccagucu

SEQ ID NO: 1170282 - RNA, 19 nt, Artificial Sequence
  Description of Artificial Sequence: Synthetic oligonucleotide
cacauucucugaaggcuua

SEQ ID NO: 1170283 - RNA, 19 nt, Artificial Sequence
  Description of Artificial Sequence: Synthetic oligonucleotide
gaacuccgaacucgagugu

SEQ ID NO: 1170284 - RNA, 19 nt, Artificial Sequence
  Description of Artificial Sequence: Synthetic oligonucleotide
caggaaacucgcccugcca

SEQ ID NO: 1170285 - RNA, 19 nt, Artificial Sequence
  Description of Artificial Sequence: Synthetic oligonucleotide
ggacgucaagguucucggc

SEQ ID NO: 1170286 - RNA, 19 nt, Artificial Sequence
  Description of Artificial Sequence: Synthetic oligonucleotide
gcaaaacauggcgaugauc

SEQ ID NO: 1170287 - RNA, 19 nt, Artificial Sequence
  Description of Artificial Sequence: Synthetic oligonucleotide
cgagacgguuccuuuggcc

SEQ ID NO: 1170288 - RNA, 19 nt, Artificial Sequence
  Description of Artificial Sequence: Synthetic oligonucleotide
aggacuuauggcacaugua

SEQ ID NO: 1170289 - RNA, 19 nt, Artificial Sequence
  Description of Artificial Sequence: Synthetic oligonucleotide
gucaaguagccaguugagu

SEQ ID NO: 1170290 - RNA, 19 nt, Artificial Sequence
  Description of Artificial Sequence: Synthetic oligonucleotide
gcuauccgguguguucugg

SEQ ID NO: 1170291 - RNA, 19 nt, Artificial Sequence
  Description of Artificial Sequence: Synthetic oligonucleotide
uuagcgccuuugacaggua

SEQ ID NO: 1170292 - RNA, 19 nt, Artificial Sequence
  Description of Artificial Sequence: Synthetic oligonucleotide
cacccuacccuuuccugaa

SEQ ID NO: 1170293 - RNA, 19 nt, Artificial Sequence
  Description of Artificial Sequence: Synthetic oligonucleotide
cugcuauuacgcauagaau

SEQ ID NO: 1170294 - RNA, 19 nt, Artificial Sequence
  Description of Artificial Sequence: Synthetic oligonucleotide
acggaaucccagguuggau

SEQ ID NO: 1170295 - RNA, 19 nt, Artificial Sequence
  Description of Artificial Sequence: Synthetic oligonucleotide
aggggaaacagggcuucaa

SEQ ID NO: 1170296 - RNA, 19 nt, Artificial Sequence
  Description of Artificial Sequence: Synthetic oligonucleotide
gcgguaccuauagcaauag

SEQ ID NO: 1170297 - RNA, 19 nt, Artificial Sequence
  Description of Artificial Sequence: Synthetic oligonucleotide
aggcaucaacagugacucu

SEQ ID NO: 1170298 - RNA, 19 nt, Artificial Sequence
  Description of Artificial Sequence: Synthetic oligonucleotide
gcacaagcacugacgcacg

SEQ ID NO: 1170299 - RNA, 19 nt, Artificial Sequence
  Description of Artificial Sequence: Synthetic oligonucleotide
ggaaacucgcccugccaaa

SEQ ID NO: 1170300 - RNA, 19 nt, Artificial Sequence
  Description of Artificial Sequence: Synthetic oligonucleotide
gcaacugcuugguggaugu

SEQ ID NO: 1170301 - RNA, 19 nt, Artificial Sequence
  Description of Artificial Sequence: Synthetic oligonucleotide
cgcgagacgguuccuuugg

SEQ ID NO: 1170302 - RNA, 19 nt, Artificial Sequence
  Description of Artificial Sequence: Synthetic oligonucleotide
agucuggauaggacgucaa

SEQ ID NO: 1170303 - RNA, 19 nt, Artificial Sequence
  Description of Artificial Sequence: Synthetic oligonucleotide
aggccacggcgucauucca

SEQ ID NO: 1170304 - RNA, 19 nt, Artificial Sequence
  Description of Artificial Sequence: Synthetic oligonucleotide
ccaguugaguucacgaacu

SEQ ID NO: 1170305 - RNA, 19 nt, Artificial Sequence
  Description of Artificial Sequence: Synthetic oligonucleotide
gaaacucgcccugccaaau

SEQ ID NO: 1170306 - RNA, 19 nt, Artificial Sequence
  Description of Artificial Sequence: Synthetic oligonucleotide
auaggacgucaagguucuc

SEQ ID NO: 1170307 - RNA, 19 nt, Artificial Sequence
  Description of Artificial Sequence: Synthetic oligonucleotide
ccguuggcuaucagucagc

SEQ ID NO: 1170308 - RNA, 19 nt, Artificial Sequence
  Description of Artificial Sequence: Synthetic oligonucleotide
uuguugccccaggggaaaa

SEQ ID NO: 1170309 - RNA, 19 nt, Artificial Sequence
  Description of Artificial Sequence: Synthetic oligonucleotide
guuguccauccccucacuu

SEQ ID NO: 1170310 - RNA, 19 nt, Artificial Sequence
  Description of Artificial Sequence: Synthetic oligonucleotide
augugcgccuucacuugcu

SEQ ID NO: 1170311 - RNA, 19 nt, Artificial Sequence
  Description of Artificial Sequence: Synthetic oligonucleotide
aggcaucaaccggugcagu

SEQ ID NO: 1170312 - RNA, 19 nt, Artificial Sequence
  Description of Artificial Sequence: Synthetic oligonucleotide
accggaugauucagccugu

SEQ ID NO: 1170313 - RNA, 19 nt, Artificial Sequence
  Description of Artificial Sequence: Synthetic oligonucleotide
gagguccacucccacgcau

SEQ ID NO: 1170314 - RNA, 19 nt, Artificial Sequence
  Description of Artificial Sequence: Synthetic oligonucleotide
ggccacggcgucauuccag

SEQ ID NO: 1170315 - RNA, 19 nt, Artificial Sequence
  Description of Artificial Sequence: Synthetic oligonucleotide
accacacgauaaagcacaa

SEQ ID NO: 1170316 - RNA, 19 nt, Artificial Sequence
  Description of Artificial Sequence: Synthetic oligonucleotide
acccuacccuuuccugaaa

SEQ ID NO: 1170317 - RNA, 19 nt, Artificial Sequence
  Description of Artificial Sequence: Synthetic oligonucleotide
cuaugagccaaaggcacuu

SEQ ID NO: 1170318 - RNA, 19 nt, Artificial Sequence
  Description of Artificial Sequence: Synthetic oligonucleotide
cggaugauucagccugugc

SEQ ID NO: 1170319 - RNA, 19 nt, Artificial Sequence
  Description of Artificial Sequence: Synthetic oligonucleotide
gcgagacgguuccuuuggc

SEQ ID NO: 1170320 - RNA, 19 nt, Artificial Sequence
  Description of Artificial Sequence: Synthetic oligonucleotide
cugcacagcgguaccuaua

SEQ ID NO: 1170321 - RNA, 19 nt, Artificial Sequence
  Description of Artificial Sequence: Synthetic oligonucleotide
cuccgaguuggagagaguu

SEQ ID NO: 1170322 - RNA, 19 nt, Artificial Sequence
  Description of Artificial Sequence: Synthetic oligonucleotide
cagcgguaccuauagcaau

SEQ ID NO: 1170323 - RNA, 19 nt, Artificial Sequence
  Description of Artificial Sequence: Synthetic oligonucleotide
cauuacccacuauguugua

SEQ ID NO: 1170324 - RNA, 19 nt, Artificial Sequence
  Description of Artificial Sequence: Synthetic oligonucleotide
gacucucaccuuguaggau

SEQ ID NO: 1170325 - RNA, 19 nt, Artificial Sequence
  Description of Artificial Sequence: Synthetic oligonucleotide
gcacagcgguaccuauagc

SEQ ID NO: 1170326 - RNA, 19 nt, Artificial Sequence
  Description of Artificial Sequence: Synthetic oligonucleotide
gcucccguuggcuaucagu

SEQ ID NO: 1170327 - RNA, 19 nt, Artificial Sequence
  Description of Artificial Sequence: Synthetic oligonucleotide
cgguaccuauagcaauagg

SEQ ID NO: 1170328 - RNA, 19 nt, Artificial Sequence
  Description of Artificial Sequence: Synthetic oligonucleotide
cacaacggaaucccagguu

SEQ ID NO: 1170329 - RNA, 19 nt, Artificial Sequence
  Description of Artificial Sequence: Synthetic oligonucleotide
gcacugacgcacgaacguc

SEQ ID NO: 1170330 - RNA, 19 nt, Artificial Sequence
  Description of Artificial Sequence: Synthetic oligonucleotide
ucucacccuguggcagagu

SEQ ID NO: 1170331 - RNA, 19 nt, Artificial Sequence
  Description of Artificial Sequence: Synthetic oligonucleotide
agaucaguucggaguuauu

SEQ ID NO: 1170332 - RNA, 19 nt, Artificial Sequence
  Description of Artificial Sequence: Synthetic oligonucleotide
cagaaacaauugcuuggau

SEQ ID NO: 1170333 - RNA, 19 nt, Artificial Sequence
  Description of Artificial Sequence: Synthetic oligonucleotide
cagagaucauguuguccau

SEQ ID NO: 1170334 - RNA, 19 nt, Artificial Sequence
  Description of Artificial Sequence: Synthetic oligonucleotide
cuacagcuguacucccacu

SEQ ID NO: 1170335 - RNA, 19 nt, Artificial Sequence
  Description of Artificial Sequence: Synthetic oligonucleotide
gcgucauuccaggagacau

SEQ ID NO: 1170336 - RNA, 19 nt, Artificial Sequence
  Description of Artificial Sequence: Synthetic oligonucleotide
ggaaaggcucccguuggcu

SEQ ID NO: 1170337 - RNA, 19 nt, Artificial Sequence
  Description of Artificial Sequence: Synthetic oligonucleotide
aucaaccggugcaguuccu

SEQ ID NO: 1170338 - RNA, 19 nt, Artificial Sequence
  Description of Artificial Sequence: Synthetic oligonucleotide
acucgcccugccaaauguu

SEQ ID NO: 1170339 - RNA, 19 nt, Artificial Sequence
  Description of Artificial Sequence: Synthetic oligonucleotide
cgagcugcacagcgguacc

SEQ ID NO: 1170340 - RNA, 19 nt, Artificial Sequence
  Description of Artificial Sequence: Synthetic oligonucleotide
cacauguaggauccaccuu

SEQ ID NO: 1170341 - RNA, 19 nt, Artificial Sequence
  Description of Artificial Sequence: Synthetic oligonucleotide
cucugcuauuacgcauaga

SEQ ID NO: 1170342 - RNA, 19 nt, Artificial Sequence
  Description of Artificial Sequence: Synthetic oligonucleotide
ccuaugagccaaaggcacu

SEQ ID NO: 1170343 - RNA, 19 nt, Artificial Sequence
  Description of Artificial Sequence: Synthetic oligonucleotide
ggcgucauuccaggagaca

SEQ ID NO: 1170344 - RNA, 19 nt, Artificial Sequence
  Description of Artificial Sequence: Synthetic oligonucleotide
ccaugcgcaguaggccacg

SEQ ID NO: 1170345 - RNA, 19 nt, Artificial Sequence
  Description of Artificial Sequence: Synthetic oligonucleotide
aguaggccacggcgucauu

SEQ ID NO: 1170346 - RNA, 19 nt, Artificial Sequence
  Description of Artificial Sequence: Synthetic oligonucleotide
cuauagcaauaggacuuau

SEQ ID NO: 1170347 - RNA, 19 nt, Artificial Sequence
  Description of Artificial Sequence: Synthetic oligonucleotide
cucccacgcauuacccacu

SEQ ID NO: 1170348 - RNA, 19 nt, Artificial Sequence
  Description of Artificial Sequence: Synthetic oligonucleotide
gcugcacaacggaauccca

SEQ ID NO: 1170349 - RNA, 19 nt, Artificial Sequence
  Description of Artificial Sequence: Synthetic oligonucleotide
gggcccuccgggugccucc

SEQ ID NO: 1170350 - RNA, 19 nt, Artificial Sequence
  Description of Artificial Sequence: Synthetic oligonucleotide
ggcaucaaccggugcaguu

SEQ ID NO: 1170351 - RNA, 19 nt, Artificial Sequence
  Description of Artificial Sequence: Synthetic oligonucleotide
gggcugcaguuuguugccc

SEQ ID NO: 1170352 - RNA, 19 nt, Artificial Sequence
  Description of Artificial Sequence: Synthetic oligonucleotide
gacuuacacccuacccuuu

SEQ ID NO: 1170353 - RNA, 19 nt, Artificial Sequence
  Description of Artificial Sequence: Synthetic oligonucleotide
caguugaguucacgaacuu

SEQ ID NO: 1170354 - RNA, 19 nt, Artificial Sequence
  Description of Artificial Sequence: Synthetic oligonucleotide
cccucacuugaugauggga

SEQ ID NO: 1170355 - RNA, 19 nt, Artificial Sequence
  Description of Artificial Sequence: Synthetic oligonucleotide
gcccugccaaauguuggca

SEQ ID NO: 1170356 - RNA, 19 nt, Artificial Sequence
  Description of Artificial Sequence: Synthetic oligonucleotide
ggcuucaaacugucccuau

SEQ ID NO: 1170357 - RNA, 19 nt, Artificial Sequence
  Description of Artificial Sequence: Synthetic oligonucleotide
ggcucccguuggcuaucag

SEQ ID NO: 1170358 - RNA, 19 nt, Artificial Sequence
  Description of Artificial Sequence: Synthetic oligonucleotide
cgcaguaggccacggcguc

SEQ ID NO: 1170359 - RNA, 19 nt, Artificial Sequence
  Description of Artificial Sequence: Synthetic oligonucleotide
cacgcgagacgguuccuuu

SEQ ID NO: 1170360 - RNA, 19 nt, Artificial Sequence
  Description of Artificial Sequence: Synthetic oligonucleotide
cgaacucgagugucccauc

SEQ ID NO: 1170361 - RNA, 19 nt, Artificial Sequence
  Description of Artificial Sequence: Synthetic oligonucleotide
gcugcacagcgguaccuau

SEQ ID NO: 1170362 - RNA, 19 nt, Artificial Sequence
  Description of Artificial Sequence: Synthetic oligonucleotide
cgaguuggagagaguugga

SEQ ID NO: 1170363 - RNA, 19 nt, Artificial Sequence
  Description of Artificial Sequence: Synthetic oligonucleotide
cgggugccuccaguuagcg

SEQ ID NO: 1170364 - RNA, 19 nt, Artificial Sequence
  Description of Artificial Sequence: Synthetic oligonucleotide
cggcgucauuccaggagac

SEQ ID NO: 1170365 - RNA, 19 nt, Artificial Sequence
  Description of Artificial Sequence: Synthetic oligonucleotide
cucugucaaguagccaguu

SEQ ID NO: 1170366 - RNA, 19 nt, Artificial Sequence
  Description of Artificial Sequence: Synthetic oligonucleotide
cagagcuauccgguguguu

SEQ ID NO: 1170367 - RNA, 19 nt, Artificial Sequence
  Description of Artificial Sequence: Synthetic oligonucleotide
cgaacgucagcaguuuggu

SEQ ID NO: 1170368 - RNA, 19 nt, Artificial Sequence
  Description of Artificial Sequence: Synthetic oligonucleotide
cgcacgaacgucagcaguu

SEQ ID NO: 1170369 - RNA, 19 nt, Artificial Sequence
  Description of Artificial Sequence: Synthetic oligonucleotide
cccugccaaauguuggcau

SEQ ID NO: 1170370 - RNA, 19 nt, Artificial Sequence
  Description of Artificial Sequence: Synthetic oligonucleotide
ccgaacucgagugucccau

SEQ ID NO: 1170371 - RNA, 19 nt, Artificial Sequence
  Description of Artificial Sequence: Synthetic oligonucleotide
gcgcaguaggccacggcgu

SEQ ID NO: 1170372 - RNA, 19 nt, Artificial Sequence
  Description of Artificial Sequence: Synthetic oligonucleotide
cgccuuugacagguaacca

SEQ ID NO: 1170373 - RNA, 19 nt, Artificial Sequence
  Description of Artificial Sequence: Synthetic oligonucleotide
cgucagcaguuuggucacg

SEQ ID NO: 1170374 - RNA, 19 nt, Artificial Sequence
  Description of Artificial Sequence: Synthetic oligonucleotide
gguucucggcucucuccuu

SEQ ID NO: 1170375 - RNA, 19 nt, Artificial Sequence
  Description of Artificial Sequence: Synthetic oligonucleotide
gucacgcgagacgguuccu

SEQ ID NO: 1170376 - RNA, 19 nt, Artificial Sequence
  Description of Artificial Sequence: Synthetic oligonucleotide
gcagagcuauccggugugu

SEQ ID NO: 1170377 - RNA, 19 nt, Artificial Sequence
  Description of Artificial Sequence: Synthetic oligonucleotide
ccacggcgucauuccagga

SEQ ID NO: 1170378 - RNA, 19 nt, Artificial Sequence
  Description of Artificial Sequence: Synthetic oligonucleotide
gcacgaacgucagcaguuu

SEQ ID NO: 1170379 - RNA, 19 nt, Artificial Sequence
  Description of Artificial Sequence: Synthetic oligonucleotide
cccaggcagcggaaguacu

SEQ ID NO: 1170380 - RNA, 19 nt, Artificial Sequence
  Description of Artificial Sequence: Synthetic oligonucleotide
cgguguguucuggcuucga

SEQ ID NO: 1170381 - RNA, 19 nt, Artificial Sequence
  Description of Artificial Sequence: Synthetic oligonucleotide
cccacgcauuacccacuau

SEQ ID NO: 1170382 - RNA, 19 nt, Artificial Sequence
  Description of Artificial Sequence: Synthetic oligonucleotide
uauucauuguuucaagugg

SEQ ID NO: 1170383 - RNA, 19 nt, Artificial Sequence
  Description of Artificial Sequence: Synthetic oligonucleotide
acaaagugcauacaugugc

SEQ ID NO: 1170384 - RNA, 19 nt, Artificial Sequence
  Description of Artificial Sequence: Synthetic oligonucleotide
aaauuugggacggugauac

SEQ ID NO: 1170385 - RNA, 19 nt, Artificial Sequence
  Description of Artificial Sequence: Synthetic oligonucleotide
uguucuuaagaucugacuc

SEQ ID NO: 1170386 - RNA, 19 nt, Artificial Sequence
  Description of Artificial Sequence: Synthetic oligonucleotide
auacauagcacuaucaagg

SEQ ID NO: 1170387 - RNA, 19 nt, Artificial Sequence
  Description of Artificial Sequence: Synthetic oligonucleotide
ugugggaaaauuugggacg

SEQ ID NO: 1170388 - RNA, 19 nt, Artificial Sequence
  Description of Artificial Sequence: Synthetic oligonucleotide
aaaugcuauaaauugguau

SEQ ID NO: 1170389 - RNA, 19 nt, Artificial Sequence
  Description of Artificial Sequence: Synthetic oligonucleotide
aagaaaacccaagggaagc

SEQ ID NO: 1170390 - RNA, 19 nt, Artificial Sequence
  Description of Artificial Sequence: Synthetic oligonucleotide
gauacauagcacuaucaag

SEQ ID NO: 1170391 - RNA, 19 nt, Artificial Sequence
  Description of Artificial Sequence: Synthetic oligonucleotide
uuauucauuguuucaagug

SEQ ID NO: 1170392 - RNA, 19 nt, Artificial Sequence
  Description of Artificial Sequence: Synthetic oligonucleotide
acuaucaaggaucucagug

SEQ ID NO: 1170393 - RNA, 19 nt, Artificial Sequence
  Description of Artificial Sequence: Synthetic oligonucleotide
uucaccaucgggcugaggc

SEQ ID NO: 1170394 - RNA, 19 nt, Artificial Sequence
  Description of Artificial Sequence: Synthetic oligonucleotide
uuaagaucugacucuaggc

SEQ ID NO: 1170395 - RNA, 19 nt, Artificial Sequence
  Description of Artificial Sequence: Synthetic oligonucleotide
cauuaucccuuccagaagg

SEQ ID NO: 1170396 - RNA, 19 nt, Artificial Sequence
  Description of Artificial Sequence: Synthetic oligonucleotide
cuuaagaucugacucuagg

SEQ ID NO: 1170397 - RNA, 19 nt, Artificial Sequence
  Description of Artificial Sequence: Synthetic oligonucleotide
uccucuaugaaggagaagu

SEQ ID NO: 1170398 - RNA, 19 nt, Artificial Sequence
  Description of Artificial Sequence: Synthetic oligonucleotide
ugaugcacugucuucaccc

SEQ ID NO: 1170399 - RNA, 19 nt, Artificial Sequence
  Description of Artificial Sequence: Synthetic oligonucleotide
auggaaggacccuuggccc

SEQ ID NO: 1170400 - RNA, 19 nt, Artificial Sequence
  Description of Artificial Sequence: Synthetic oligonucleotide
auacaugugccucccagac

SEQ ID NO: 1170401 - RNA, 19 nt, Artificial Sequence
  Description of Artificial Sequence: Synthetic oligonucleotide
caaagugcauacaugugcc

SEQ ID NO: 1170402 - RNA, 19 nt, Artificial Sequence
  Description of Artificial Sequence: Synthetic oligonucleotide
uucaagugguaaaauguca

SEQ ID NO: 1170403 - RNA, 19 nt, Artificial Sequence
  Description of Artificial Sequence: Synthetic oligonucleotide
guuggcacgacuccgauac

SEQ ID NO: 1170404 - RNA, 19 nt, Artificial Sequence
  Description of Artificial Sequence: Synthetic oligonucleotide
agucccaaguccugggucc

SEQ ID NO: 1170405 - RNA, 19 nt, Artificial Sequence
  Description of Artificial Sequence: Synthetic oligonucleotide
gaaggaagcagagagggug

SEQ ID NO: 1170406 - RNA, 19 nt, Artificial Sequence
  Description of Artificial Sequence: Synthetic oligonucleotide
cucuguugaaucuuggaac

SEQ ID NO: 1170407 - RNA, 19 nt, Artificial Sequence
  Description of Artificial Sequence: Synthetic oligonucleotide
agagugagaggaccaaaac

SEQ ID NO: 1170408 - RNA, 19 nt, Artificial Sequence
  Description of Artificial Sequence: Synthetic oligonucleotide
aaggacauccguguccggc

SEQ ID NO: 1170409 - RNA, 19 nt, Artificial Sequence
  Description of Artificial Sequence: Synthetic oligonucleotide
uccuguauccauuccagug

SEQ ID NO: 1170410 - RNA, 19 nt, Artificial Sequence
  Description of Artificial Sequence: Synthetic oligonucleotide
aucaaaggcuuuuauaaaa

SEQ ID NO: 1170411 - RNA, 19 nt, Artificial Sequence
  Description of Artificial Sequence: Synthetic oligonucleotide
gacuuagaacgcuggacgg

SEQ ID NO: 1170412 - RNA, 19 nt, Artificial Sequence
  Description of Artificial Sequence: Synthetic oligonucleotide
ucuccuguauccauuccag

SEQ ID NO: 1170413 - RNA, 19 nt, Artificial Sequence
  Description of Artificial Sequence: Synthetic oligonucleotide
ugggcgaugauccuucuga

SEQ ID NO: 1170414 - RNA, 19 nt, Artificial Sequence
  Description of Artificial Sequence: Synthetic oligonucleotide
ggacuuagaacgcuggacg

SEQ ID NO: 1170415 - RNA, 19 nt, Artificial Sequence
  Description of Artificial Sequence: Synthetic oligonucleotide
aagugcauacaugugccuc

SEQ ID NO: 1170416 - RNA, 19 nt, Artificial Sequence
  Description of Artificial Sequence: Synthetic oligonucleotide
agauugagguuccggaguc

SEQ ID NO: 1170417 - RNA, 19 nt, Artificial Sequence
  Description of Artificial Sequence: Synthetic oligonucleotide
ugguaaaaugucauugguc

SEQ ID NO: 1170418 - RNA, 19 nt, Artificial Sequence
  Description of Artificial Sequence: Synthetic oligonucleotide
ucauuaucccuuccagaag

SEQ ID NO: 1170419 - RNA, 19 nt, Artificial Sequence
  Description of Artificial Sequence: Synthetic oligonucleotide
ugagacugccagauggaag

SEQ ID NO: 1170420 - RNA, 19 nt, Artificial Sequence
  Description of Artificial Sequence: Synthetic oligonucleotide
ucagcugagcgauuccggg

SEQ ID NO: 1170421 - RNA, 19 nt, Artificial Sequence
  Description of Artificial Sequence: Synthetic oligonucleotide
ucccuaacuucacuugggg

SEQ ID NO: 1170422 - RNA, 19 nt, Artificial Sequence
  Description of Artificial Sequence: Synthetic oligonucleotide
acgacuccgauacauagca

SEQ ID NO: 1170423 - RNA, 19 nt, Artificial Sequence
  Description of Artificial Sequence: Synthetic oligonucleotide
ggugauacaaagugcauac

SEQ ID NO: 1170424 - RNA, 19 nt, Artificial Sequence
  Description of Artificial Sequence: Synthetic oligonucleotide
uggaguaguugucuuugag

SEQ ID NO: 1170425 - RNA, 19 nt, Artificial Sequence
  Description of Artificial Sequence: Synthetic oligonucleotide
auugagguuccggaguccc

SEQ ID NO: 1170426 - RNA, 19 nt, Artificial Sequence
  Description of Artificial Sequence: Synthetic oligonucleotide
ugacuuucagcccuuuggu

SEQ ID NO: 1170427 - RNA, 19 nt, Artificial Sequence
  Description of Artificial Sequence: Synthetic oligonucleotide
gauccuucugacccugagg

SEQ ID NO: 1170428 - RNA, 19 nt, Artificial Sequence
  Description of Artificial Sequence: Synthetic oligonucleotide
uacauagcacuaucaagga

SEQ ID NO: 1170429 - RNA, 19 nt, Artificial Sequence
  Description of Artificial Sequence: Synthetic oligonucleotide
aacccugaggccugaagcu

SEQ ID NO: 1170430 - RNA, 19 nt, Artificial Sequence
  Description of Artificial Sequence: Synthetic oligonucleotide
aucucaguguccucuauga

SEQ ID NO: 1170431 - RNA, 19 nt, Artificial Sequence
  Description of Artificial Sequence: Synthetic oligonucleotide
guaguugucuuugagcuac

SEQ ID NO: 1170432 - RNA, 19 nt, Artificial Sequence
  Description of Artificial Sequence: Synthetic oligonucleotide
aggacuuagaacgcuggac

SEQ ID NO: 1170433 - RNA, 19 nt, Artificial Sequence
  Description of Artificial Sequence: Synthetic oligonucleotide
aaagugcauacaugugccu

SEQ ID NO: 1170434 - RNA, 19 nt, Artificial Sequence
  Description of Artificial Sequence: Synthetic oligonucleotide
gagccaagcaccugcuggg

SEQ ID NO: 1170435 - RNA, 19 nt, Artificial Sequence
  Description of Artificial Sequence: Synthetic oligonucleotide
gcgaugauccuucugaccc

SEQ ID NO: 1170436 - RNA, 19 nt, Artificial Sequence
  Description of Artificial Sequence: Synthetic oligonucleotide
cuuucagcccuuuggugcc

SEQ ID NO: 1170437 - RNA, 19 nt, Artificial Sequence
  Description of Artificial Sequence: Synthetic oligonucleotide
cuugcaggacuuagaacgc

SEQ ID NO: 1170438 - RNA, 19 nt, Artificial Sequence
  Description of Artificial Sequence: Synthetic oligonucleotide
agcugagcgauuccgggag

SEQ ID NO: 1170439 - RNA, 19 nt, Artificial Sequence
  Description of Artificial Sequence: Synthetic oligonucleotide
uuugggacggugauacaaa

SEQ ID NO: 1170440 - RNA, 19 nt, Artificial Sequence
  Description of Artificial Sequence: Synthetic oligonucleotide
ggaguaguugucuuugagc

SEQ ID NO: 1170441 - RNA, 19 nt, Artificial Sequence
  Description of Artificial Sequence: Synthetic oligonucleotide
uccgauacauagcacuauc

SEQ ID NO: 1170442 - RNA, 19 nt, Artificial Sequence
  Description of Artificial Sequence: Synthetic oligonucleotide
aggacauccguguccggcg

SEQ ID NO: 1170443 - RNA, 19 nt, Artificial Sequence
  Description of Artificial Sequence: Synthetic oligonucleotide
cagugugagccguaguggg

SEQ ID NO: 1170444 - RNA, 19 nt, Artificial Sequence
  Description of Artificial Sequence: Synthetic oligonucleotide
auuguuucaagugguaaaa

SEQ ID NO: 1170445 - RNA, 19 nt, Artificial Sequence
  Description of Artificial Sequence: Synthetic oligonucleotide
ugacucuaggccagggccc

SEQ ID NO: 1170446 - RNA, 19 nt, Artificial Sequence
  Description of Artificial Sequence: Synthetic oligonucleotide
uuagaacgcuggacggagg

SEQ ID NO: 1170447 - RNA, 19 nt, Artificial Sequence
  Description of Artificial Sequence: Synthetic oligonucleotide
uugggacggugauacaaag

SEQ ID NO: 1170448 - RNA, 19 nt, Artificial Sequence
  Description of Artificial Sequence: Synthetic oligonucleotide
gcuuguagccaguugggcg

SEQ ID NO: 1170449 - RNA, 19 nt, Artificial Sequence
  Description of Artificial Sequence: Synthetic oligonucleotide
cuuagaacgcuggacggag

SEQ ID NO: 1170450 - RNA, 19 nt, Artificial Sequence
  Description of Artificial Sequence: Synthetic oligonucleotide
gacccuuggccccugauca

SEQ ID NO: 1170451 - RNA, 19 nt, Artificial Sequence
  Description of Artificial Sequence: Synthetic oligonucleotide
ugggacaucuggcgguagg

SEQ ID NO: 1170452 - RNA, 19 nt, Artificial Sequence
  Description of Artificial Sequence: Synthetic oligonucleotide
uuagccuucaaggcugaug

SEQ ID NO: 1170453 - RNA, 19 nt, Artificial Sequence
  Description of Artificial Sequence: Synthetic oligonucleotide
auuaucccuuccagaaggc

SEQ ID NO: 1170454 - RNA, 19 nt, Artificial Sequence
  Description of Artificial Sequence: Synthetic oligonucleotide
guuccggagucccaagucc

SEQ ID NO: 1170455 - RNA, 19 nt, Artificial Sequence
  Description of Artificial Sequence: Synthetic oligonucleotide
cucccuaacuucacuuggg

SEQ ID NO: 1170456 - RNA, 19 nt, Artificial Sequence
  Description of Artificial Sequence: Synthetic oligonucleotide
ucgggcugaggccucgagg

SEQ ID NO: 1170457 - RNA, 19 nt, Artificial Sequence
  Description of Artificial Sequence: Synthetic oligonucleotide
cucugcuagacuccucggg

SEQ ID NO: 1170458 - RNA, 19 nt, Artificial Sequence
  Description of Artificial Sequence: Synthetic oligonucleotide
uucacccugugucucuggc

SEQ ID NO: 1170459 - RNA, 19 nt, Artificial Sequence
  Description of Artificial Sequence: Synthetic oligonucleotide
uucauuguuucaaguggua

SEQ ID NO: 1170460 - RNA, 19 nt, Artificial Sequence
  Description of Artificial Sequence: Synthetic oligonucleotide
gaaaauuugggacggugau

SEQ ID NO: 1170461 - RNA, 19 nt, Artificial Sequence
  Description of Artificial Sequence: Synthetic oligonucleotide
gagcgagccaagcaccugc

SEQ ID NO: 1170462 - RNA, 19 nt, Artificial Sequence
  Description of Artificial Sequence: Synthetic oligonucleotide
gacuccgauacauagcacu

SEQ ID NO: 1170463 - RNA, 19 nt, Artificial Sequence
  Description of Artificial Sequence: Synthetic oligonucleotide
cuaugaaggagaaguccuc

SEQ ID NO: 1170464 - RNA, 19 nt, Artificial Sequence
  Description of Artificial Sequence: Synthetic oligonucleotide
uacgcccuagguuggcacg

SEQ ID NO: 1170465 - RNA, 19 nt, Artificial Sequence
  Description of Artificial Sequence: Synthetic oligonucleotide
uuggaacagccgaguaucc

SEQ ID NO: 1170466 - RNA, 19 nt, Artificial Sequence
  Description of Artificial Sequence: Synthetic oligonucleotide
cuagguuggcacgacuccg

SEQ ID NO: 1170467 - RNA, 19 nt, Artificial Sequence
  Description of Artificial Sequence: Synthetic oligonucleotide
cuagguaaggggagccggc

SEQ ID NO: 1170468 - RNA, 19 nt, Artificial Sequence
  Description of Artificial Sequence: Synthetic oligonucleotide
ucggcucuguugaaucuug

SEQ ID NO: 1170469 - RNA, 19 nt, Artificial Sequence
  Description of Artificial Sequence: Synthetic oligonucleotide
ucaccaucgggcugaggcc

SEQ ID NO: 1170470 - RNA, 19 nt, Artificial Sequence
  Description of Artificial Sequence: Synthetic oligonucleotide
ucuggcgguagggagggag

SEQ ID NO: 1170471 - RNA, 19 nt, Artificial Sequence
  Description of Artificial Sequence: Synthetic oligonucleotide
guucuuaagaucugacucu

SEQ ID NO: 1170472 - RNA, 19 nt, Artificial Sequence
  Description of Artificial Sequence: Synthetic oligonucleotide
auagcacuaucaaggaucu

SEQ ID NO: 1170473 - RNA, 19 nt, Artificial Sequence
  Description of Artificial Sequence: Synthetic oligonucleotide
caaaaccucccaccgcuag

SEQ ID NO: 1170474 - RNA, 19 nt, Artificial Sequence
  Description of Artificial Sequence: Synthetic oligonucleotide
aggccguauggcuggggcc

SEQ ID NO: 1170475 - RNA, 19 nt, Artificial Sequence
  Description of Artificial Sequence: Synthetic oligonucleotide
aguugggcgaugauccuuc

SEQ ID NO: 1170476 - RNA, 19 nt, Artificial Sequence
  Description of Artificial Sequence: Synthetic oligonucleotide
agcggaggggaaaggaggc

SEQ ID NO: 1170477 - RNA, 19 nt, Artificial Sequence
  Description of Artificial Sequence: Synthetic oligonucleotide
cacgacuccgauacauagc

SEQ ID NO: 1170478 - RNA, 19 nt, Artificial Sequence
  Description of Artificial Sequence: Synthetic oligonucleotide
uccucagaagcggagggga

SEQ ID NO: 1170479 - RNA, 19 nt, Artificial Sequence
  Description of Artificial Sequence: Synthetic oligonucleotide
cuaucaaggaucucagugu

SEQ ID NO: 1170480 - RNA, 19 nt, Artificial Sequence
  Description of Artificial Sequence: Synthetic oligonucleotide
uagguuggcacgacuccga

SEQ ID NO: 1170481 - RNA, 19 nt, Artificial Sequence
  Description of Artificial Sequence: Synthetic oligonucleotide
aacccaagggaagcugaag

SEQ ID NO: 1170482 - RNA, 19 nt, Artificial Sequence
  Description of Artificial Sequence: Synthetic oligonucleotide
gaacagccgaguauccgag

SEQ ID NO: 1170483 - RNA, 19 nt, Artificial Sequence
  Description of Artificial Sequence: Synthetic oligonucleotide
ugggacggugauacaaagu

SEQ ID NO: 1170484 - RNA, 19 nt, Artificial Sequence
  Description of Artificial Sequence: Synthetic oligonucleotide
gaugauccuucugacccug

SEQ ID NO: 1170485 - RNA, 19 nt, Artificial Sequence
  Description of Artificial Sequence: Synthetic oligonucleotide
aacgcuggacggaggacuc

SEQ ID NO: 1170486 - RNA, 19 nt, Artificial Sequence
  Description of Artificial Sequence: Synthetic oligonucleotide
aauuugggacggugauaca

SEQ ID NO: 1170487 - RNA, 19 nt, Artificial Sequence
  Description of Artificial Sequence: Synthetic oligonucleotide
acauagcacuaucaaggau

SEQ ID NO: 1170488 - RNA, 19 nt, Artificial Sequence
  Description of Artificial Sequence: Synthetic oligonucleotide
uugagcuacuggcugucau

SEQ ID NO: 1170489 - RNA, 19 nt, Artificial Sequence
  Description of Artificial Sequence: Synthetic oligonucleotide
ugcucaucuugccuagcuc

SEQ ID NO: 1170490 - RNA, 19 nt, Artificial Sequence
  Description of Artificial Sequence: Synthetic oligonucleotide
gcauacaugugccucccag

SEQ ID NO: 1170491 - RNA, 19 nt, Artificial Sequence
  Description of Artificial Sequence: Synthetic oligonucleotide
agaaaacccaagggaagcu

SEQ ID NO: 1170492 - RNA, 19 nt, Artificial Sequence
  Description of Artificial Sequence: Synthetic oligonucleotide
gagauugagguuccggagu

SEQ ID NO: 1170493 - RNA, 19 nt, Artificial Sequence
  Description of Artificial Sequence: Synthetic oligonucleotide
uuggaguaguugucuuuga

SEQ ID NO: 1170494 - RNA, 19 nt, Artificial Sequence
  Description of Artificial Sequence: Synthetic oligonucleotide
ggugugggaaaauuuggga

SEQ ID NO: 1170495 - RNA, 19 nt, Artificial Sequence
  Description of Artificial Sequence: Synthetic oligonucleotide
gccaguugggcgaugaucc

SEQ ID NO: 1170496 - RNA, 19 nt, Artificial Sequence
  Description of Artificial Sequence: Synthetic oligonucleotide
gaccccacaggaauggcac

SEQ ID NO: 1170497 - RNA, 19 nt, Artificial Sequence
  Description of Artificial Sequence: Synthetic oligonucleotide
ugccacuguucuuaagauc

SEQ ID NO: 1170498 - RNA, 19 nt, Artificial Sequence
  Description of Artificial Sequence: Synthetic oligonucleotide
aucugaagauggcacccga

SEQ ID NO: 1170499 - RNA, 19 nt, Artificial Sequence
  Description of Artificial Sequence: Synthetic oligonucleotide
uuuagcuucagggcuugua

SEQ ID NO: 1170500 - RNA, 19 nt, Artificial Sequence
  Description of Artificial Sequence: Synthetic oligonucleotide
uuacgcccuagguuggcac

SEQ ID NO: 1170501 - RNA, 19 nt, Artificial Sequence
  Description of Artificial Sequence: Synthetic oligonucleotide
aacagccgaguauccgagu

SEQ ID NO: 1170502 - RNA, 19 nt, Artificial Sequence
  Description of Artificial Sequence: Synthetic oligonucleotide
uauccgagucugcugucuc

SEQ ID NO: 1170503 - RNA, 19 nt, Artificial Sequence
  Description of Artificial Sequence: Synthetic oligonucleotide
gguaaggggagccggcugc

SEQ ID NO: 1170504 - RNA, 19 nt, Artificial Sequence
  Description of Artificial Sequence: Synthetic oligonucleotide
uuaucccuuccagaaggcu

SEQ ID NO: 1170505 - RNA, 19 nt, Artificial Sequence
  Description of Artificial Sequence: Synthetic oligonucleotide
gcacgacuccgauacauag

SEQ ID NO: 1170506 - RNA, 19 nt, Artificial Sequence
  Description of Artificial Sequence: Synthetic oligonucleotide
agcagagagggugaaggga

SEQ ID NO: 1170507 - RNA, 19 nt, Artificial Sequence
  Description of Artificial Sequence: Synthetic oligonucleotide
caucuggcgguagggaggg

SEQ ID NO: 1170508 - RNA, 19 nt, Artificial Sequence
  Description of Artificial Sequence: Synthetic oligonucleotide
cauacaugugccucccaga

SEQ ID NO: 1170509 - RNA, 19 nt, Artificial Sequence
  Description of Artificial Sequence: Synthetic oligonucleotide
gguaaugugaggggcuucc

SEQ ID NO: 1170510 - RNA, 19 nt, Artificial Sequence
  Description of Artificial Sequence: Synthetic oligonucleotide
uucccuagcccugggaccu

SEQ ID NO: 1170511 - RNA, 19 nt, Artificial Sequence
  Description of Artificial Sequence: Synthetic oligonucleotide
acacucccuaacuucacuu

SEQ ID NO: 1170512 - RNA, 19 nt, Artificial Sequence
  Description of Artificial Sequence: Synthetic oligonucleotide
aguaguugucuuugagcua

SEQ ID NO: 1170513 - RNA, 19 nt, Artificial Sequence
  Description of Artificial Sequence: Synthetic oligonucleotide
cugagcgauuccgggagcg

SEQ ID NO: 1170514 - RNA, 19 nt, Artificial Sequence
  Description of Artificial Sequence: Synthetic oligonucleotide
gugguaaaaugucauuggu

SEQ ID NO: 1170515 - RNA, 19 nt, Artificial Sequence
  Description of Artificial Sequence: Synthetic oligonucleotide
ugagguuccggagucccaa

SEQ ID NO: 1170516 - RNA, 19 nt, Artificial Sequence
  Description of Artificial Sequence: Synthetic oligonucleotide
gugugagccguaguggggc

SEQ ID NO: 1170517 - RNA, 19 nt, Artificial Sequence
  Description of Artificial Sequence: Synthetic oligonucleotide
ccucaucugaagauggcac

SEQ ID NO: 1170518 - RNA, 19 nt, Artificial Sequence
  Description of Artificial Sequence: Synthetic oligonucleotide
cuaccuccucaucugaaga

SEQ ID NO: 1170519 - RNA, 19 nt, Artificial Sequence
  Description of Artificial Sequence: Synthetic oligonucleotide
uggcuugauuugcucucug

SEQ ID NO: 1170520 - RNA, 19 nt, Artificial Sequence
  Description of Artificial Sequence: Synthetic oligonucleotide
ggaaaauuugggacgguga

SEQ ID NO: 1170521 - RNA, 19 nt, Artificial Sequence
  Description of Artificial Sequence: Synthetic oligonucleotide
ucccuuggaguaguugucu

SEQ ID NO: 1170522 - RNA, 19 nt, Artificial Sequence
  Description of Artificial Sequence: Synthetic oligonucleotide
auuccgggagcgcagcuua

SEQ ID NO: 1170523 - RNA, 19 nt, Artificial Sequence
  Description of Artificial Sequence: Synthetic oligonucleotide
ccgcuuacgcccuagguug

SEQ ID NO: 1170524 - RNA, 19 nt, Artificial Sequence
  Description of Artificial Sequence: Synthetic oligonucleotide
ggguccacccauuacaaaa

SEQ ID NO: 1170525 - RNA, 19 nt, Artificial Sequence
  Description of Artificial Sequence: Synthetic oligonucleotide
gcuagguaaggggagccgg

SEQ ID NO: 1170526 - RNA, 19 nt, Artificial Sequence
  Description of Artificial Sequence: Synthetic oligonucleotide
acugccugagacugccaga

SEQ ID NO: 1170527 - RNA, 19 nt, Artificial Sequence
  Description of Artificial Sequence: Synthetic oligonucleotide
cucaaaggaaggugaugca

SEQ ID NO: 1170528 - RNA, 19 nt, Artificial Sequence
  Description of Artificial Sequence: Synthetic oligonucleotide
agccgaguauccgagucug

SEQ ID NO: 1170529 - RNA, 19 nt, Artificial Sequence
  Description of Artificial Sequence: Synthetic oligonucleotide
ccaaggacauccguguccg

SEQ ID NO: 1170530 - RNA, 19 nt, Artificial Sequence
  Description of Artificial Sequence: Synthetic oligonucleotide
gggaaaauuugggacggug

SEQ ID NO: 1170531 - RNA, 19 nt, Artificial Sequence
  Description of Artificial Sequence: Synthetic oligonucleotide
ugaggccucgaggaaggca

SEQ ID NO: 1170532 - RNA, 19 nt, Artificial Sequence
  Description of Artificial Sequence: Synthetic oligonucleotide
gcucuguugaaucuuggaa

SEQ ID NO: 1170533 - RNA, 19 nt, Artificial Sequence
  Description of Artificial Sequence: Synthetic oligonucleotide
agcugaccccugcucaucu

SEQ ID NO: 1170534 - RNA, 19 nt, Artificial Sequence
  Description of Artificial Sequence: Synthetic oligonucleotide
caccgcuagguaaggggag

SEQ ID NO: 1170535 - RNA, 19 nt, Artificial Sequence
  Description of Artificial Sequence: Synthetic oligonucleotide
cacccgagaaguccucggc

SEQ ID NO: 1170536 - RNA, 19 nt, Artificial Sequence
  Description of Artificial Sequence: Synthetic oligonucleotide
gagguuccggagucccaag

SEQ ID NO: 1170537 - RNA, 19 nt, Artificial Sequence
  Description of Artificial Sequence: Synthetic oligonucleotide
gcuacuggcugucauuauc

SEQ ID NO: 1170538 - RNA, 19 nt, Artificial Sequence
  Description of Artificial Sequence: Synthetic oligonucleotide
cuguucuuaagaucugacu

SEQ ID NO: 1170539 - RNA, 19 nt, Artificial Sequence
  Description of Artificial Sequence: Synthetic oligonucleotide
ggcgaugauccuucugacc

SEQ ID NO: 1170540 - RNA, 19 nt, Artificial Sequence
  Description of Artificial Sequence: Synthetic oligonucleotide
aaacccaagggaagcugaa

SEQ ID NO: 1170541 - RNA, 19 nt, Artificial Sequence
  Description of Artificial Sequence: Synthetic oligonucleotide
uuugagcuacuggcuguca

SEQ ID NO: 1170542 - RNA, 19 nt, Artificial Sequence
  Description of Artificial Sequence: Synthetic oligonucleotide
auuggucucugugggacau

SEQ ID NO: 1170543 - RNA, 19 nt, Artificial Sequence
  Description of Artificial Sequence: Synthetic oligonucleotide
ucuaggccagggcccacuc

SEQ ID NO: 1170544 - RNA, 19 nt, Artificial Sequence
  Description of Artificial Sequence: Synthetic oligonucleotide
ugcauacaugugccuccca

SEQ ID NO: 1170545 - RNA, 19 nt, Artificial Sequence
  Description of Artificial Sequence: Synthetic oligonucleotide
aaggggucuucagucucca

SEQ ID NO: 1170546 - RNA, 19 nt, Artificial Sequence
  Description of Artificial Sequence: Synthetic oligonucleotide
agguuccggagucccaagu

SEQ ID NO: 1170547 - RNA, 19 nt, Artificial Sequence
  Description of Artificial Sequence: Synthetic oligonucleotide
cuuugagcuacuggcuguc

SEQ ID NO: 1170548 - RNA, 19 nt, Artificial Sequence
  Description of Artificial Sequence: Synthetic oligonucleotide
uggcacgacuccgauacau

SEQ ID NO: 1170549 - RNA, 19 nt, Artificial Sequence
  Description of Artificial Sequence: Synthetic oligonucleotide
ugugagccguaguggggcu

SEQ ID NO: 1170550 - RNA, 19 nt, Artificial Sequence
  Description of Artificial Sequence: Synthetic oligonucleotide
uccccgcuuacgcccuagg

SEQ ID NO: 1170551 - RNA, 19 nt, Artificial Sequence
  Description of Artificial Sequence: Synthetic oligonucleotide
cgagccaagcaccugcugg

SEQ ID NO: 1170552 - RNA, 19 nt, Artificial Sequence
  Description of Artificial Sequence: Synthetic oligonucleotide
ccuagguuggcacgacucc

SEQ ID NO: 1170553 - RNA, 19 nt, Artificial Sequence
  Description of Artificial Sequence: Synthetic oligonucleotide
gcaggacuuagaacgcugg

SEQ ID NO: 1170554 - RNA, 19 nt, Artificial Sequence
  Description of Artificial Sequence: Synthetic oligonucleotide
agcugaugauucccuugga

SEQ ID NO: 1170555 - RNA, 19 nt, Artificial Sequence
  Description of Artificial Sequence: Synthetic oligonucleotide
ugagcgauuccgggagcgc

SEQ ID NO: 1170556 - RNA, 19 nt, Artificial Sequence
  Description of Artificial Sequence: Synthetic oligonucleotide
uucagggcuuguagccagu

SEQ ID NO: 1170557 - RNA, 19 nt, Artificial Sequence
  Description of Artificial Sequence: Synthetic oligonucleotide
gggacaucuggcgguaggg

SEQ ID NO: 1170558 - RNA, 19 nt, Artificial Sequence
  Description of Artificial Sequence: Synthetic oligonucleotide
guaaugugaggggcuuccc

SEQ ID NO: 1170559 - RNA, 19 nt, Artificial Sequence
  Description of Artificial Sequence: Synthetic oligonucleotide
cuggacggaggacuccuuc

SEQ ID NO: 1170560 - RNA, 19 nt, Artificial Sequence
  Description of Artificial Sequence: Synthetic oligonucleotide
uuccgggagcgcagcuuag

SEQ ID NO: 1170561 - RNA, 19 nt, Artificial Sequence
  Description of Artificial Sequence: Synthetic oligonucleotide
gacauccguguccggcggc

SEQ ID NO: 1170562 - RNA, 19 nt, Artificial Sequence
  Description of Artificial Sequence: Synthetic oligonucleotide
ggacggugauacaaagugc

SEQ ID NO: 1170563 - RNA, 19 nt, Artificial Sequence
  Description of Artificial Sequence: Synthetic oligonucleotide
gagcuacuggcugucauua

SEQ ID NO: 1170564 - RNA, 19 nt, Artificial Sequence
  Description of Artificial Sequence: Synthetic oligonucleotide
caaaggugugggaaaauuu

SEQ ID NO: 1170565 - RNA, 19 nt, Artificial Sequence
  Description of Artificial Sequence: Synthetic oligonucleotide
gaacgcuggacggaggacu

SEQ ID NO: 1170566 - RNA, 19 nt, Artificial Sequence
  Description of Artificial Sequence: Synthetic oligonucleotide
guaguggggcuccagcugu

SEQ ID NO: 1170567 - RNA, 19 nt, Artificial Sequence
  Description of Artificial Sequence: Synthetic oligonucleotide
gugagaggaccaaaaccuc

SEQ ID NO: 1170568 - RNA, 19 nt, Artificial Sequence
  Description of Artificial Sequence: Synthetic oligonucleotide
ggacauccguguccggcgg

SEQ ID NO: 1170569 - RNA, 19 nt, Artificial Sequence
  Description of Artificial Sequence: Synthetic oligonucleotide
ucccaccgcuagguaaggg

SEQ ID NO: 1170570 - RNA, 19 nt, Artificial Sequence
  Description of Artificial Sequence: Synthetic oligonucleotide
ugcaaaggugugggaaaau

SEQ ID NO: 1170571 - RNA, 19 nt, Artificial Sequence
  Description of Artificial Sequence: Synthetic oligonucleotide
gguuccggagucccaaguc

SEQ ID NO: 1170572 - RNA, 19 nt, Artificial Sequence
  Description of Artificial Sequence: Synthetic oligonucleotide
auggcacccgagaaguccu

SEQ ID NO: 1170573 - RNA, 19 nt, Artificial Sequence
  Description of Artificial Sequence: Synthetic oligonucleotide
agcgauuccgggagcgcag

SEQ ID NO: 1170574 - RNA, 19 nt, Artificial Sequence
  Description of Artificial Sequence: Synthetic oligonucleotide
gugauacaaagugcauaca

SEQ ID NO: 1170575 - RNA, 19 nt, Artificial Sequence
  Description of Artificial Sequence: Synthetic oligonucleotide
uccgggagcgcagcuuagc

SEQ ID NO: 1170576 - RNA, 19 nt, Artificial Sequence
  Description of Artificial Sequence: Synthetic oligonucleotide
uuucagcccuuuggugccc

SEQ ID NO: 1170577 - RNA, 19 nt, Artificial Sequence
  Description of Artificial Sequence: Synthetic oligonucleotide
ugugggacaucuggcggua

SEQ ID NO: 1170578 - RNA, 19 nt, Artificial Sequence
  Description of Artificial Sequence: Synthetic oligonucleotide
cacagagauugagguuccg

SEQ ID NO: 1170579 - RNA, 19 nt, Artificial Sequence
  Description of Artificial Sequence: Synthetic oligonucleotide
gacucuaggccagggccca

SEQ ID NO: 1170580 - RNA, 19 nt, Artificial Sequence
  Description of Artificial Sequence: Synthetic oligonucleotide
agcaccugcagugguuccu

SEQ ID NO: 1170581 - RNA, 19 nt, Artificial Sequence
  Description of Artificial Sequence: Synthetic oligonucleotide
uuggcacgacuccgauaca

SEQ ID NO: 1170582 - RNA, 19 nt, Artificial Sequence
  Description of Artificial Sequence: Synthetic oligonucleotide
ggcucuguugaaucuugga

SEQ ID NO: 1170583 - RNA, 19 nt, Artificial Sequence
  Description of Artificial Sequence: Synthetic oligonucleotide
gcacccgagaaguccucgg

SEQ ID NO: 1170584 - RNA, 19 nt, Artificial Sequence
  Description of Artificial Sequence: Synthetic oligonucleotide
cuagacuccucgggcuccc

SEQ ID NO: 1170585 - RNA, 19 nt, Artificial Sequence
  Description of Artificial Sequence: Synthetic oligonucleotide
uggcgguagggagggagac

SEQ ID NO: 1170586 - RNA, 19 nt, Artificial Sequence
  Description of Artificial Sequence: Synthetic oligonucleotide
cagcuuagccuucaaggcu

SEQ ID NO: 1170587 - RNA, 19 nt, Artificial Sequence
  Description of Artificial Sequence: Synthetic oligonucleotide
agauggcacccgagaaguc

SEQ ID NO: 1170588 - RNA, 19 nt, Artificial Sequence
  Description of Artificial Sequence: Synthetic oligonucleotide
agguuggcacgacuccgau

SEQ ID NO: 1170589 - RNA, 19 nt, Artificial Sequence
  Description of Artificial Sequence: Synthetic oligonucleotide
ggccguauggcuggggccc

SEQ ID NO: 1170590 - RNA, 19 nt, Artificial Sequence
  Description of Artificial Sequence: Synthetic oligonucleotide
cagcugagcgauuccggga

SEQ ID NO: 1170591 - RNA, 19 nt, Artificial Sequence
  Description of Artificial Sequence: Synthetic oligonucleotide
cccuagguuggcacgacuc

SEQ ID NO: 1170592 - RNA, 19 nt, Artificial Sequence
  Description of Artificial Sequence: Synthetic oligonucleotide
ugauucccuuggaguaguu

SEQ ID NO: 1170593 - RNA, 19 nt, Artificial Sequence
  Description of Artificial Sequence: Synthetic oligonucleotide
ccgauacauagcacuauca

SEQ ID NO: 1170594 - RNA, 19 nt, Artificial Sequence
  Description of Artificial Sequence: Synthetic oligonucleotide
gagccggcugcaaaggugu

SEQ ID NO: 1170595 - RNA, 19 nt, Artificial Sequence
  Description of Artificial Sequence: Synthetic oligonucleotide
cuuggggaccccacaggaa

SEQ ID NO: 1170596 - RNA, 19 nt, Artificial Sequence
  Description of Artificial Sequence: Synthetic oligonucleotide
guauggcuggggcccggug

SEQ ID NO: 1170597 - RNA, 19 nt, Artificial Sequence
  Description of Artificial Sequence: Synthetic oligonucleotide
acauccguguccggcggcu

SEQ ID NO: 1170598 - RNA, 19 nt, Artificial Sequence
  Description of Artificial Sequence: Synthetic oligonucleotide
ggcuuguagccaguugggc

SEQ ID NO: 1170599 - RNA, 19 nt, Artificial Sequence
  Description of Artificial Sequence: Synthetic oligonucleotide
gccguaguggggcuccagc

SEQ ID NO: 1170600 - RNA, 19 nt, Artificial Sequence
  Description of Artificial Sequence: Synthetic oligonucleotide
cuggcgguagggagggaga

SEQ ID NO: 1170601 - RNA, 19 nt, Artificial Sequence
  Description of Artificial Sequence: Synthetic oligonucleotide
uagccaguugggcgaugau

SEQ ID NO: 1170602 - RNA, 19 nt, Artificial Sequence
  Description of Artificial Sequence: Synthetic oligonucleotide
gggcgaugauccuucugac

SEQ ID NO: 1170603 - RNA, 19 nt, Artificial Sequence
  Description of Artificial Sequence: Synthetic oligonucleotide
acggugauacaaagugcau

SEQ ID NO: 1170604 - RNA, 19 nt, Artificial Sequence
  Description of Artificial Sequence: Synthetic oligonucleotide
cccgagaaguccucggcuc

SEQ ID NO: 1170605 - RNA, 19 nt, Artificial Sequence
  Description of Artificial Sequence: Synthetic oligonucleotide
ggggagcgagccaagcacc

SEQ ID NO: 1170606 - RNA, 19 nt, Artificial Sequence
  Description of Artificial Sequence: Synthetic oligonucleotide
ucagggcuuguagccaguu

SEQ ID NO: 1170607 - RNA, 19 nt, Artificial Sequence
  Description of Artificial Sequence: Synthetic oligonucleotide
ggugaagggaggagaguga

SEQ ID NO: 1170608 - RNA, 19 nt, Artificial Sequence
  Description of Artificial Sequence: Synthetic oligonucleotide
acuuggggcuccacagaga

SEQ ID NO: 1170609 - RNA, 19 nt, Artificial Sequence
  Description of Artificial Sequence: Synthetic oligonucleotide
ccacuuguuuccccacccc

SEQ ID NO: 1170610 - RNA, 19 nt, Artificial Sequence
  Description of Artificial Sequence: Synthetic oligonucleotide
caguguccucuaugaagga

SEQ ID NO: 1170611 - RNA, 19 nt, Artificial Sequence
  Description of Artificial Sequence: Synthetic oligonucleotide
ccgguguccccgcuuacgc

SEQ ID NO: 1170612 - RNA, 19 nt, Artificial Sequence
  Description of Artificial Sequence: Synthetic oligonucleotide
gcgcagcuuagccuucaag

SEQ ID NO: 1170613 - RNA, 19 nt, Artificial Sequence
  Description of Artificial Sequence: Synthetic oligonucleotide
cucccaccgcuagguaagg

SEQ ID NO: 1170614 - RNA, 19 nt, Artificial Sequence
  Description of Artificial Sequence: Synthetic oligonucleotide
cuuacgcccuagguuggca

SEQ ID NO: 1170615 - RNA, 19 nt, Artificial Sequence
  Description of Artificial Sequence: Synthetic oligonucleotide
ccgggagcgcagcuuagcc

SEQ ID NO: 1170616 - RNA, 19 nt, Artificial Sequence
  Description of Artificial Sequence: Synthetic oligonucleotide
cugccacuguucuuaagau

SEQ ID NO: 1170617 - RNA, 19 nt, Artificial Sequence
  Description of Artificial Sequence: Synthetic oligonucleotide
gcuagacuccucgggcucc

SEQ ID NO: 1170618 - RNA, 19 nt, Artificial Sequence
  Description of Artificial Sequence: Synthetic oligonucleotide
acgcccuagguuggcacga

SEQ ID NO: 1170619 - RNA, 19 nt, Artificial Sequence
  Description of Artificial Sequence: Synthetic oligonucleotide
ccaccgcuagguaagggga

SEQ ID NO: 1170620 - RNA, 19 nt, Artificial Sequence
  Description of Artificial Sequence: Synthetic oligonucleotide
guaaggggagccggcugca

SEQ ID NO: 1170621 - RNA, 19 nt, Artificial Sequence
  Description of Artificial Sequence: Synthetic oligonucleotide
gagcugaccccugcucauc

SEQ ID NO: 1170622 - RNA, 19 nt, Artificial Sequence
  Description of Artificial Sequence: Synthetic oligonucleotide
agcgagccaagcaccugcu

SEQ ID NO: 1170623 - RNA, 19 nt, Artificial Sequence
  Description of Artificial Sequence: Synthetic oligonucleotide
cacacucccuaacuucacu

SEQ ID NO: 1170624 - RNA, 19 nt, Artificial Sequence
  Description of Artificial Sequence: Synthetic oligonucleotide
gcugagcgauuccgggagc

SEQ ID NO: 1170625 - RNA, 19 nt, Artificial Sequence
  Description of Artificial Sequence: Synthetic oligonucleotide
cacuaucaaggaucucagu

SEQ ID NO: 1170626 - RNA, 19 nt, Artificial Sequence
  Description of Artificial Sequence: Synthetic oligonucleotide
caccugcagugguuccuuc

SEQ ID NO: 1170627 - RNA, 19 nt, Artificial Sequence
  Description of Artificial Sequence: Synthetic oligonucleotide
ccggagucccaaguccugg

SEQ ID NO: 1170628 - RNA, 19 nt, Artificial Sequence
  Description of Artificial Sequence: Synthetic oligonucleotide
cugaggccucgaggaaggc

SEQ ID NO: 1170629 - RNA, 19 nt, Artificial Sequence
  Description of Artificial Sequence: Synthetic oligonucleotide
ccucacuuggggaccccac

SEQ ID NO: 1170630 - RNA, 19 nt, Artificial Sequence
  Description of Artificial Sequence: Synthetic oligonucleotide
gugggacaucuggcgguag

SEQ ID NO: 1170631 - RNA, 19 nt, Artificial Sequence
  Description of Artificial Sequence: Synthetic oligonucleotide
gucccaaguccugggucca

SEQ ID NO: 1170632 - RNA, 19 nt, Artificial Sequence
  Description of Artificial Sequence: Synthetic oligonucleotide
ggcgguagggagggagacc

SEQ ID NO: 1170633 - RNA, 19 nt, Artificial Sequence
  Description of Artificial Sequence: Synthetic oligonucleotide
gcgguagggagggagaccu

SEQ ID NO: 1170634 - RNA, 19 nt, Artificial Sequence
  Description of Artificial Sequence: Synthetic oligonucleotide
cagccgaguauccgagucu

SEQ ID NO: 1170635 - RNA, 19 nt, Artificial Sequence
  Description of Artificial Sequence: Synthetic oligonucleotide
cuccacagagauugagguu

SEQ ID NO: 1170636 - RNA, 19 nt, Artificial Sequence
  Description of Artificial Sequence: Synthetic oligonucleotide
cgcuuacgcccuagguugg

SEQ ID NO: 1170637 - RNA, 19 nt, Artificial Sequence
  Description of Artificial Sequence: Synthetic oligonucleotide
gcaaaggugugggaaaauu

SEQ ID NO: 1170638 - RNA, 19 nt, Artificial Sequence
  Description of Artificial Sequence: Synthetic oligonucleotide
gcuuacgcccuagguuggc

SEQ ID NO: 1170639 - RNA, 19 nt, Artificial Sequence
  Description of Artificial Sequence: Synthetic oligonucleotide
agguggggagcgagccaag

SEQ ID NO: 1170640 - RNA, 19 nt, Artificial Sequence
  Description of Artificial Sequence: Synthetic oligonucleotide
ccgcuagguaaggggagcc

SEQ ID NO: 1170641 - RNA, 19 nt, Artificial Sequence
  Description of Artificial Sequence: Synthetic oligonucleotide
guccccgcuuacgcccuag

SEQ ID NO: 1170642 - RNA, 19 nt, Artificial Sequence
  Description of Artificial Sequence: Synthetic oligonucleotide
gcgagccaagcaccugcug

SEQ ID NO: 1170643 - RNA, 19 nt, Artificial Sequence
  Description of Artificial Sequence: Synthetic oligonucleotide
cccgguguccccgcuuacg

SEQ ID NO: 1170644 - RNA, 19 nt, Artificial Sequence
  Description of Artificial Sequence: Synthetic oligonucleotide
gugagccguaguggggcuc

SEQ ID NO: 1170645 - RNA, 19 nt, Artificial Sequence
  Description of Artificial Sequence: Synthetic oligonucleotide
caccaucgggcugaggccu

SEQ ID NO: 1170646 - RNA, 19 nt, Artificial Sequence
  Description of Artificial Sequence: Synthetic oligonucleotide
uguccccgcuuacgcccua

SEQ ID NO: 1170647 - RNA, 19 nt, Artificial Sequence
  Description of Artificial Sequence: Synthetic oligonucleotide
uucugacccugaggauuuu

SEQ ID NO: 1170648 - RNA, 19 nt, Artificial Sequence
  Description of Artificial Sequence: Synthetic oligonucleotide
cuggcuugauuugcucucu

SEQ ID NO: 1170649 - RNA, 19 nt, Artificial Sequence
  Description of Artificial Sequence: Synthetic oligonucleotide
gcccaaggacauccguguc

SEQ ID NO: 1170650 - RNA, 19 nt, Artificial Sequence
  Description of Artificial Sequence: Synthetic oligonucleotide
ggcuucccuagcccuggga

SEQ ID NO: 1170651 - RNA, 19 nt, Artificial Sequence
  Description of Artificial Sequence: Synthetic oligonucleotide
cgcuagguaaggggagccg

SEQ ID NO: 1170652 - RNA, 19 nt, Artificial Sequence
  Description of Artificial Sequence: Synthetic oligonucleotide
gccguauggcuggggcccg

SEQ ID NO: 1170653 - RNA, 19 nt, Artificial Sequence
  Description of Artificial Sequence: Synthetic oligonucleotide
ggcacgacuccgauacaua

SEQ ID NO: 1170654 - RNA, 19 nt, Artificial Sequence
  Description of Artificial Sequence: Synthetic oligonucleotide
cgacuccgauacauagcac

SEQ ID NO: 1170655 - RNA, 19 nt, Artificial Sequence
  Description of Artificial Sequence: Synthetic oligonucleotide
gccgaguauccgagucugc

SEQ ID NO: 1170656 - RNA, 19 nt, Artificial Sequence
  Description of Artificial Sequence: Synthetic oligonucleotide
caugugccucccagacacu

SEQ ID NO: 1170657 - RNA, 19 nt, Artificial Sequence
  Description of Artificial Sequence: Synthetic oligonucleotide
cggugauacaaagugcaua

SEQ ID NO: 1170658 - RNA, 19 nt, Artificial Sequence
  Description of Artificial Sequence: Synthetic oligonucleotide
ccgaguauccgagucugcu

SEQ ID NO: 1170659 - RNA, 19 nt, Artificial Sequence
  Description of Artificial Sequence: Synthetic oligonucleotide
gagccguaguggggcucca

SEQ ID NO: 1170660 - RNA, 19 nt, Artificial Sequence
  Description of Artificial Sequence: Synthetic oligonucleotide
ccguaguggggcuccagcu

SEQ ID NO: 1170661 - RNA, 19 nt, Artificial Sequence
  Description of Artificial Sequence: Synthetic oligonucleotide
ggaaggacccuuggccccu

SEQ ID NO: 1170662 - RNA, 19 nt, Artificial Sequence
  Description of Artificial Sequence: Synthetic oligonucleotide
caguugggcgaugauccuu

SEQ ID NO: 1170663 - RNA, 19 nt, Artificial Sequence
  Description of Artificial Sequence: Synthetic oligonucleotide
ccgagucugcugucucuga

SEQ ID NO: 1170664 - RNA, 19 nt, Artificial Sequence
  Description of Artificial Sequence: Synthetic oligonucleotide
cccgcuuacgcccuagguu

SEQ ID NO: 1170665 - RNA, 19 nt, Artificial Sequence
  Description of Artificial Sequence: Synthetic oligonucleotide
gggagcgagccaagcaccu

SEQ ID NO: 1170666 - RNA, 19 nt, Artificial Sequence
  Description of Artificial Sequence: Synthetic oligonucleotide
ggauugggaugggguccac

SEQ ID NO: 1170667 - RNA, 19 nt, Artificial Sequence
  Description of Artificial Sequence: Synthetic oligonucleotide
ucccuagcccugggaccuu

SEQ ID NO: 1170668 - RNA, 19 nt, Artificial Sequence
  Description of Artificial Sequence: Synthetic oligonucleotide
caucgggcugaggccucga

SEQ ID NO: 1170669 - RNA, 19 nt, Artificial Sequence
  Description of Artificial Sequence: Synthetic oligonucleotide
guguccccgcuuacgcccu

SEQ ID NO: 1170670 - RNA, 19 nt, Artificial Sequence
  Description of Artificial Sequence: Synthetic oligonucleotide
ccguauggcuggggcccgg

SEQ ID NO: 1170671 - RNA, 19 nt, Artificial Sequence
  Description of Artificial Sequence: Synthetic oligonucleotide
cccuagcccugggaccuug

SEQ ID NO: 1170672 - RNA, 19 nt, Artificial Sequence
  Description of Artificial Sequence: Synthetic oligonucleotide
cguguccggcggcucugag

SEQ ID NO: 1170673 - RNA, 19 nt, Artificial Sequence
  Description of Artificial Sequence: Synthetic oligonucleotide
cuuagccuucaaggcugau

SEQ ID NO: 1170674 - RNA, 19 nt, Artificial Sequence
  Description of Artificial Sequence: Synthetic oligonucleotide
cgaugauccuucugacccu

SEQ ID NO: 1170675 - RNA, 19 nt, Artificial Sequence
  Description of Artificial Sequence: Synthetic oligonucleotide
ccaguugggcgaugauccu

SEQ ID NO: 1170676 - RNA, 19 nt, Artificial Sequence
  Description of Artificial Sequence: Synthetic oligonucleotide
ccccgcuuacgcccuaggu

SEQ ID NO: 1170677 - RNA, 19 nt, Artificial Sequence
  Description of Artificial Sequence: Synthetic oligonucleotide
cgcuggacggaggacuccu

SEQ ID NO: 1170678 - RNA, 19 nt, Artificial Sequence
  Description of Artificial Sequence: Synthetic oligonucleotide
ccguguccggcggcucuga

SEQ ID NO: 1170679 - RNA, 19 nt, Artificial Sequence
  Description of Artificial Sequence: Synthetic oligonucleotide
ggggcccgguguccccgcu

SEQ ID NO: 1170680 - RNA, 19 nt, Artificial Sequence
  Description of Artificial Sequence: Synthetic oligonucleotide
cguauggcuggggcccggu

SEQ ID NO: 1170681 - RNA, 19 nt, Artificial Sequence
  Description of Artificial Sequence: Synthetic oligonucleotide
auuuagaucagauacuggc

SEQ ID NO: 1170682 - RNA, 19 nt, Artificial Sequence
  Description of Artificial Sequence: Synthetic oligonucleotide
aauaaguuaacacacaaaa

SEQ ID NO: 1170683 - RNA, 19 nt, Artificial Sequence
  Description of Artificial Sequence: Synthetic oligonucleotide
aauuagauaguguacagug

SEQ ID NO: 1170684 - RNA, 19 nt, Artificial Sequence
  Description of Artificial Sequence: Synthetic oligonucleotide
ucugcuauaaucaaguccu

SEQ ID NO: 1170685 - RNA, 19 nt, Artificial Sequence
  Description of Artificial Sequence: Synthetic oligonucleotide
aaguaucuauuuuaguugg

SEQ ID NO: 1170686 - RNA, 19 nt, Artificial Sequence
  Description of Artificial Sequence: Synthetic oligonucleotide
uucacuugaaacaugcuug

SEQ ID NO: 1170687 - RNA, 19 nt, Artificial Sequence
  Description of Artificial Sequence: Synthetic oligonucleotide
aaugccuccacuaugacug

SEQ ID NO: 1170688 - RNA, 19 nt, Artificial Sequence
  Description of Artificial Sequence: Synthetic oligonucleotide
agugauuagauacugaaaa

SEQ ID NO: 1170689 - RNA, 19 nt, Artificial Sequence
  Description of Artificial Sequence: Synthetic oligonucleotide
uucuuaucuccauagagag

SEQ ID NO: 1170690 - RNA, 19 nt, Artificial Sequence
  Description of Artificial Sequence: Synthetic oligonucleotide
agaacgguaaaggugaggc

SEQ ID NO: 1170691 - RNA, 19 nt, Artificial Sequence
  Description of Artificial Sequence: Synthetic oligonucleotide
cuauaaucaaguccuagcg

SEQ ID NO: 1170692 - RNA, 19 nt, Artificial Sequence
  Description of Artificial Sequence: Synthetic oligonucleotide
uggauuuugaguacuagca

SEQ ID NO: 1170693 - RNA, 19 nt, Artificial Sequence
  Description of Artificial Sequence: Synthetic oligonucleotide
uugacagcgaagaaaaucu

SEQ ID NO: 1170694 - RNA, 19 nt, Artificial Sequence
  Description of Artificial Sequence: Synthetic oligonucleotide
uuaggaauuagauagugua

SEQ ID NO: 1170695 - RNA, 19 nt, Artificial Sequence
  Description of Artificial Sequence: Synthetic oligonucleotide
uuaacuacuguaaggcugc

SEQ ID NO: 1170696 - RNA, 19 nt, Artificial Sequence
  Description of Artificial Sequence: Synthetic oligonucleotide
uucaagauacugaaaauaa

SEQ ID NO: 1170697 - RNA, 19 nt, Artificial Sequence
  Description of Artificial Sequence: Synthetic oligonucleotide
aaaagaguaucuaagucug

SEQ ID NO: 1170698 - RNA, 19 nt, Artificial Sequence
  Description of Artificial Sequence: Synthetic oligonucleotide
cuauaagucggcuuccucg

SEQ ID NO: 1170699 - RNA, 19 nt, Artificial Sequence
  Description of Artificial Sequence: Synthetic oligonucleotide
uucuaaacagacuguagag

SEQ ID NO: 1170700 - RNA, 19 nt, Artificial Sequence
  Description of Artificial Sequence: Synthetic oligonucleotide
agaaccaauguuugggugg

SEQ ID NO: 1170701 - RNA, 19 nt, Artificial Sequence
  Description of Artificial Sequence: Synthetic oligonucleotide
ucugcggugguucacuugg

SEQ ID NO: 1170702 - RNA, 19 nt, Artificial Sequence
  Description of Artificial Sequence: Synthetic oligonucleotide
uguucuauaagucggcuuc

SEQ ID NO: 1170703 - RNA, 19 nt, Artificial Sequence
  Description of Artificial Sequence: Synthetic oligonucleotide
ucuaccauuuuagaaagcc

SEQ ID NO: 1170704 - RNA, 19 nt, Artificial Sequence
  Description of Artificial Sequence: Synthetic oligonucleotide
agaguuuguguucaguuag

SEQ ID NO: 1170705 - RNA, 19 nt, Artificial Sequence
  Description of Artificial Sequence: Synthetic oligonucleotide
uaauaguuucacaucagcu

SEQ ID NO: 1170706 - RNA, 19 nt, Artificial Sequence
  Description of Artificial Sequence: Synthetic oligonucleotide
aacaacugagguuugggga

SEQ ID NO: 1170707 - RNA, 19 nt, Artificial Sequence
  Description of Artificial Sequence: Synthetic oligonucleotide
ugaguacuagcauuuauca

SEQ ID NO: 1170708 - RNA, 19 nt, Artificial Sequence
  Description of Artificial Sequence: Synthetic oligonucleotide
aacucuggcuaacuugcgc

SEQ ID NO: 1170709 - RNA, 19 nt, Artificial Sequence
  Description of Artificial Sequence: Synthetic oligonucleotide
uagugaguuaacaacugag

SEQ ID NO: 1170710 - RNA, 19 nt, Artificial Sequence
  Description of Artificial Sequence: Synthetic oligonucleotide
uaugacuggugcaaaaucu

SEQ ID NO: 1170711 - RNA, 19 nt, Artificial Sequence
  Description of Artificial Sequence: Synthetic oligonucleotide
aucuauuuuaguuggauau

SEQ ID NO: 1170712 - RNA, 19 nt, Artificial Sequence
  Description of Artificial Sequence: Synthetic oligonucleotide
uuuagaucagauacuggca

SEQ ID NO: 1170713 - RNA, 19 nt, Artificial Sequence
  Description of Artificial Sequence: Synthetic oligonucleotide
ggauauaucaccaugucag

SEQ ID NO: 1170714 - RNA, 19 nt, Artificial Sequence
  Description of Artificial Sequence: Synthetic oligonucleotide
uucuuugcgaaccagggaa

SEQ ID NO: 1170715 - RNA, 19 nt, Artificial Sequence
  Description of Artificial Sequence: Synthetic oligonucleotide
uauuuagaucagauacugg

SEQ ID NO: 1170716 - RNA, 19 nt, Artificial Sequence
  Description of Artificial Sequence: Synthetic oligonucleotide
aaaucugcuaacauucgag

SEQ ID NO: 1170717 - RNA, 19 nt, Artificial Sequence
  Description of Artificial Sequence: Synthetic oligonucleotide
uuagcuuuaaaugggaaaa

SEQ ID NO: 1170718 - RNA, 19 nt, Artificial Sequence
  Description of Artificial Sequence: Synthetic oligonucleotide
aagaguaucuaagucuguc

SEQ ID NO: 1170719 - RNA, 19 nt, Artificial Sequence
  Description of Artificial Sequence: Synthetic oligonucleotide
auaaucaaguccuagcgau

SEQ ID NO: 1170720 - RNA, 19 nt, Artificial Sequence
  Description of Artificial Sequence: Synthetic oligonucleotide
accauaauaguuucacauc

SEQ ID NO: 1170721 - RNA, 19 nt, Artificial Sequence
  Description of Artificial Sequence: Synthetic oligonucleotide
aguugcucaacucggacag

SEQ ID NO: 1170722 - RNA, 19 nt, Artificial Sequence
  Description of Artificial Sequence: Synthetic oligonucleotide
uaccauaauaguuucacau

SEQ ID NO: 1170723 - RNA, 19 nt, Artificial Sequence
  Description of Artificial Sequence: Synthetic oligonucleotide
gauaccauaauaguuucac

SEQ ID NO: 1170724 - RNA, 19 nt, Artificial Sequence
  Description of Artificial Sequence: Synthetic oligonucleotide
caaauagacaguacucugc

SEQ ID NO: 1170725 - RNA, 19 nt, Artificial Sequence
  Description of Artificial Sequence: Synthetic oligonucleotide
uguacagugauuagauacu

SEQ ID NO: 1170726 - RNA, 19 nt, Artificial Sequence
  Description of Artificial Sequence: Synthetic oligonucleotide
agauaagucuggcaggcuc

SEQ ID NO: 1170727 - RNA, 19 nt, Artificial Sequence
  Description of Artificial Sequence: Synthetic oligonucleotide
uuuucauacacagaucgcu

SEQ ID NO: 1170728 - RNA, 19 nt, Artificial Sequence
  Description of Artificial Sequence: Synthetic oligonucleotide
uaacaacugagguuugggg

SEQ ID NO: 1170729 - RNA, 19 nt, Artificial Sequence
  Description of Artificial Sequence: Synthetic oligonucleotide
aacgguaaaggugaggcug

SEQ ID NO: 1170730 - RNA, 19 nt, Artificial Sequence
  Description of Artificial Sequence: Synthetic oligonucleotide
aaucugcuaacauucgagu

SEQ ID NO: 1170731 - RNA, 19 nt, Artificial Sequence
  Description of Artificial Sequence: Synthetic oligonucleotide
auauuuagaucagauacug

SEQ ID NO: 1170732 - RNA, 19 nt, Artificial Sequence
  Description of Artificial Sequence: Synthetic oligonucleotide
uuaacaacugagguuuggg

SEQ ID NO: 1170733 - RNA, 19 nt, Artificial Sequence
  Description of Artificial Sequence: Synthetic oligonucleotide
uaacauucgagugaguugu

SEQ ID NO: 1170734 - RNA, 19 nt, Artificial Sequence
  Description of Artificial Sequence: Synthetic oligonucleotide
gaggcugcaacauuuaguc

SEQ ID NO: 1170735 - RNA, 19 nt, Artificial Sequence
  Description of Artificial Sequence: Synthetic oligonucleotide
uugaguacuagcauuuauc

SEQ ID NO: 1170736 - RNA, 19 nt, Artificial Sequence
  Description of Artificial Sequence: Synthetic oligonucleotide
uuagaucagauacuggcau

SEQ ID NO: 1170737 - RNA, 19 nt, Artificial Sequence
  Description of Artificial Sequence: Synthetic oligonucleotide
ucuugaucgguucuucuca

SEQ ID NO: 1170738 - RNA, 19 nt, Artificial Sequence
  Description of Artificial Sequence: Synthetic oligonucleotide
uggauauaucaccauguca

SEQ ID NO: 1170739 - RNA, 19 nt, Artificial Sequence
  Description of Artificial Sequence: Synthetic oligonucleotide
aguaucuaagucugucuuc

SEQ ID NO: 1170740 - RNA, 19 nt, Artificial Sequence
  Description of Artificial Sequence: Synthetic oligonucleotide
ugcgaguugcucaacucgg

SEQ ID NO: 1170741 - RNA, 19 nt, Artificial Sequence
  Description of Artificial Sequence: Synthetic oligonucleotide
uauaucuucccaagaguac

SEQ ID NO: 1170742 - RNA, 19 nt, Artificial Sequence
  Description of Artificial Sequence: Synthetic oligonucleotide
uguaaugcucuaacaaggu

SEQ ID NO: 1170743 - RNA, 19 nt, Artificial Sequence
  Description of Artificial Sequence: Synthetic oligonucleotide
ugggcaaucgagauaaguc

SEQ ID NO: 1170744 - RNA, 19 nt, Artificial Sequence
  Description of Artificial Sequence: Synthetic oligonucleotide
caguuagugaguuaacaac

SEQ ID NO: 1170745 - RNA, 19 nt, Artificial Sequence
  Description of Artificial Sequence: Synthetic oligonucleotide
auucgagugaguuguuuuc

SEQ ID NO: 1170746 - RNA, 19 nt, Artificial Sequence
  Description of Artificial Sequence: Synthetic oligonucleotide
guaagaacgguaaagguga

SEQ ID NO: 1170747 - RNA, 19 nt, Artificial Sequence
  Description of Artificial Sequence: Synthetic oligonucleotide
ucccacaccgugacgaugg

SEQ ID NO: 1170748 - RNA, 19 nt, Artificial Sequence
  Description of Artificial Sequence: Synthetic oligonucleotide
cacaccgugacgaugggcc

SEQ ID NO: 1170749 - RNA, 19 nt, Artificial Sequence
  Description of Artificial Sequence: Synthetic oligonucleotide
ucgagauaagucuggcagg

SEQ ID NO: 1170750 - RNA, 19 nt, Artificial Sequence
  Description of Artificial Sequence: Synthetic oligonucleotide
aagcuauccuuugaugaac

SEQ ID NO: 1170751 - RNA, 19 nt, Artificial Sequence
  Description of Artificial Sequence: Synthetic oligonucleotide
gauaguguacagugauuag

SEQ ID NO: 1170752 - RNA, 19 nt, Artificial Sequence
  Description of Artificial Sequence: Synthetic oligonucleotide
auagacaguacucugccaa

SEQ ID NO: 1170753 - RNA, 19 nt, Artificial Sequence
  Description of Artificial Sequence: Synthetic oligonucleotide
auagagagcgugcuuaagu

SEQ ID NO: 1170754 - RNA, 19 nt, Artificial Sequence
  Description of Artificial Sequence: Synthetic oligonucleotide
gcaaucauaaauaaguuca

SEQ ID NO: 1170755 - RNA, 19 nt, Artificial Sequence
  Description of Artificial Sequence: Synthetic oligonucleotide
gugguaagaacgguaaagg

SEQ ID NO: 1170756 - RNA, 19 nt, Artificial Sequence
  Description of Artificial Sequence: Synthetic oligonucleotide
auuuguucuauaagucggc

SEQ ID NO: 1170757 - RNA, 19 nt, Artificial Sequence
  Description of Artificial Sequence: Synthetic oligonucleotide
cuaacauucgagugaguug

SEQ ID NO: 1170758 - RNA, 19 nt, Artificial Sequence
  Description of Artificial Sequence: Synthetic oligonucleotide
ugaguuaacaacugagguu

SEQ ID NO: 1170759 - RNA, 19 nt, Artificial Sequence
  Description of Artificial Sequence: Synthetic oligonucleotide
agcgaagaaaaucugcuaa

SEQ ID NO: 1170760 - RNA, 19 nt, Artificial Sequence
  Description of Artificial Sequence: Synthetic oligonucleotide
guaaaggugaggcugcaac

SEQ ID NO: 1170761 - RNA, 19 nt, Artificial Sequence
  Description of Artificial Sequence: Synthetic oligonucleotide
aguuagugaguuaacaacu

SEQ ID NO: 1170762 - RNA, 19 nt, Artificial Sequence
  Description of Artificial Sequence: Synthetic oligonucleotide
uauaagucggcuuccucgu

SEQ ID NO: 1170763 - RNA, 19 nt, Artificial Sequence
  Description of Artificial Sequence: Synthetic oligonucleotide
uaaauaaguucaagauacu

SEQ ID NO: 1170764 - RNA, 19 nt, Artificial Sequence
  Description of Artificial Sequence: Synthetic oligonucleotide
aaucgagauaagucuggca

SEQ ID NO: 1170765 - RNA, 19 nt, Artificial Sequence
  Description of Artificial Sequence: Synthetic oligonucleotide
ucaaguccuagcgauacca

SEQ ID NO: 1170766 - RNA, 19 nt, Artificial Sequence
  Description of Artificial Sequence: Synthetic oligonucleotide
ugaggcugcaacauuuagu

SEQ ID NO: 1170767 - RNA, 19 nt, Artificial Sequence
  Description of Artificial Sequence: Synthetic oligonucleotide
cuucuaaacagacuguaga

SEQ ID NO: 1170768 - RNA, 19 nt, Artificial Sequence
  Description of Artificial Sequence: Synthetic oligonucleotide
aucaucuauuucugccgcc

SEQ ID NO: 1170769 - RNA, 19 nt, Artificial Sequence
  Description of Artificial Sequence: Synthetic oligonucleotide
aauagacaguacucugcca

SEQ ID NO: 1170770 - RNA, 19 nt, Artificial Sequence
  Description of Artificial Sequence: Synthetic oligonucleotide
uuugcguagcucccgcucc

SEQ ID NO: 1170771 - RNA, 19 nt, Artificial Sequence
  Description of Artificial Sequence: Synthetic oligonucleotide
uucauacacagaucgcucu

SEQ ID NO: 1170772 - RNA, 19 nt, Artificial Sequence
  Description of Artificial Sequence: Synthetic oligonucleotide
cuauccuuugaugaacugc

SEQ ID NO: 1170773 - RNA, 19 nt, Artificial Sequence
  Description of Artificial Sequence: Synthetic oligonucleotide
agaguaucuaagucugucu

SEQ ID NO: 1170774 - RNA, 19 nt, Artificial Sequence
  Description of Artificial Sequence: Synthetic oligonucleotide
ugcgcuuauauucuuccaa

SEQ ID NO: 1170775 - RNA, 19 nt, Artificial Sequence
  Description of Artificial Sequence: Synthetic oligonucleotide
gcuauaaucaaguccuagc

SEQ ID NO: 1170776 - RNA, 19 nt, Artificial Sequence
  Description of Artificial Sequence: Synthetic oligonucleotide
ucuuaucuccauagagagc

SEQ ID NO: 1170777 - RNA, 19 nt, Artificial Sequence
  Description of Artificial Sequence: Synthetic oligonucleotide
ugguaagaacgguaaaggu

SEQ ID NO: 1170778 - RNA, 19 nt, Artificial Sequence
  Description of Artificial Sequence: Synthetic oligonucleotide
ccuagcgauaccauaauag

SEQ ID NO: 1170779 - RNA, 19 nt, Artificial Sequence
  Description of Artificial Sequence: Synthetic oligonucleotide
ugaucgguucuucucauua

SEQ ID NO: 1170780 - RNA, 19 nt, Artificial Sequence
  Description of Artificial Sequence: Synthetic oligonucleotide
caagacuuacuucuaaaca

SEQ ID NO: 1170781 - RNA, 19 nt, Artificial Sequence
  Description of Artificial Sequence: Synthetic oligonucleotide
gauccugucuccaugucug

SEQ ID NO: 1170782 - RNA, 19 nt, Artificial Sequence
  Description of Artificial Sequence: Synthetic oligonucleotide
aaugcucuaacaaggucga

SEQ ID NO: 1170783 - RNA, 19 nt, Artificial Sequence
  Description of Artificial Sequence: Synthetic oligonucleotide
uaucuauuuuaguuggaua

SEQ ID NO: 1170784 - RNA, 19 nt, Artificial Sequence
  Description of Artificial Sequence: Synthetic oligonucleotide
auaguguacagugauuaga

SEQ ID NO: 1170785 - RNA, 19 nt, Artificial Sequence
  Description of Artificial Sequence: Synthetic oligonucleotide
acaaggucgagagucugcg

SEQ ID NO: 1170786 - RNA, 19 nt, Artificial Sequence
  Description of Artificial Sequence: Synthetic oligonucleotide
cauuaggaauuagauagug

SEQ ID NO: 1170787 - RNA, 19 nt, Artificial Sequence
  Description of Artificial Sequence: Synthetic oligonucleotide
uugcgaugguggaugagcc

SEQ ID NO: 1170788 - RNA, 19 nt, Artificial Sequence
  Description of Artificial Sequence: Synthetic oligonucleotide
ggaauuagauaguguacag

SEQ ID NO: 1170789 - RNA, 19 nt, Artificial Sequence
  Description of Artificial Sequence: Synthetic oligonucleotide
guacuagcauuuaucacag

SEQ ID NO: 1170790 - RNA, 19 nt, Artificial Sequence
  Description of Artificial Sequence: Synthetic oligonucleotide
ugcucuaacaaggucgaga

SEQ ID NO: 1170791 - RNA, 19 nt, Artificial Sequence
  Description of Artificial Sequence: Synthetic oligonucleotide
uacuguaaggcugcaagac

SEQ ID NO: 1170792 - RNA, 19 nt, Artificial Sequence
  Description of Artificial Sequence: Synthetic oligonucleotide
caagcagggacacuucuug

SEQ ID NO: 1170793 - RNA, 19 nt, Artificial Sequence
  Description of Artificial Sequence: Synthetic oligonucleotide
aagaacgguaaaggugagg

SEQ ID NO: 1170794 - RNA, 19 nt, Artificial Sequence
  Description of Artificial Sequence: Synthetic oligonucleotide
agauaguguacagugauua

SEQ ID NO: 1170795 - RNA, 19 nt, Artificial Sequence
  Description of Artificial Sequence: Synthetic oligonucleotide
cugcgaguugcucaacucg

SEQ ID NO: 1170796 - RNA, 19 nt, Artificial Sequence
  Description of Artificial Sequence: Synthetic oligonucleotide
ugggugguaagaacgguaa

SEQ ID NO: 1170797 - RNA, 19 nt, Artificial Sequence
  Description of Artificial Sequence: Synthetic oligonucleotide
gaguacuagcauuuaucac

SEQ ID NO: 1170798 - RNA, 19 nt, Artificial Sequence
  Description of Artificial Sequence: Synthetic oligonucleotide
agagagcgugcuuaaguug

SEQ ID NO: 1170799 - RNA, 19 nt, Artificial Sequence
  Description of Artificial Sequence: Synthetic oligonucleotide
uagcgauaccauaauaguu

SEQ ID NO: 1170800 - RNA, 19 nt, Artificial Sequence
  Description of Artificial Sequence: Synthetic oligonucleotide
ugcggugguucacuugggg

SEQ ID NO: 1170801 - RNA, 19 nt, Artificial Sequence
  Description of Artificial Sequence: Synthetic oligonucleotide
guuugggugguaagaacgg

SEQ ID NO: 1170802 - RNA, 19 nt, Artificial Sequence
  Description of Artificial Sequence: Synthetic oligonucleotide
cuaugacuggugcaaaauc

SEQ ID NO: 1170803 - RNA, 19 nt, Artificial Sequence
  Description of Artificial Sequence: Synthetic oligonucleotide
ugcaagacuuacuucuaaa

SEQ ID NO: 1170804 - RNA, 19 nt, Artificial Sequence
  Description of Artificial Sequence: Synthetic oligonucleotide
ugacagcgaagaaaaucug

SEQ ID NO: 1170805 - RNA, 19 nt, Artificial Sequence
  Description of Artificial Sequence: Synthetic oligonucleotide
auaccauaauaguuucaca

SEQ ID NO: 1170806 - RNA, 19 nt, Artificial Sequence
  Description of Artificial Sequence: Synthetic oligonucleotide
augucugguaaaguccugg

SEQ ID NO: 1170807 - RNA, 19 nt, Artificial Sequence
  Description of Artificial Sequence: Synthetic oligonucleotide
uaagaacgguaaaggugag

SEQ ID NO: 1170808 - RNA, 19 nt, Artificial Sequence
  Description of Artificial Sequence: Synthetic oligonucleotide
ucaucuauuucugccgcca

SEQ ID NO: 1170809 - RNA, 19 nt, Artificial Sequence
  Description of Artificial Sequence: Synthetic oligonucleotide
agaucagauacuggcauca

SEQ ID NO: 1170810 - RNA, 19 nt, Artificial Sequence
  Description of Artificial Sequence: Synthetic oligonucleotide
ggugguaagaacgguaaag

SEQ ID NO: 1170811 - RNA, 19 nt, Artificial Sequence
  Description of Artificial Sequence: Synthetic oligonucleotide
uuuguucuauaagucggcu

SEQ ID NO: 1170812 - RNA, 19 nt, Artificial Sequence
  Description of Artificial Sequence: Synthetic oligonucleotide
aggaagcuauccuuugaug

SEQ ID NO: 1170813 - RNA, 19 nt, Artificial Sequence
  Description of Artificial Sequence: Synthetic oligonucleotide
uuuucucaagcagggacac

SEQ ID NO: 1170814 - RNA, 19 nt, Artificial Sequence
  Description of Artificial Sequence: Synthetic oligonucleotide
uacacagaucgcucuuucc

SEQ ID NO: 1170815 - RNA, 19 nt, Artificial Sequence
  Description of Artificial Sequence: Synthetic oligonucleotide
uuauguucuuucucugcaa

SEQ ID NO: 1170816 - RNA, 19 nt, Artificial Sequence
  Description of Artificial Sequence: Synthetic oligonucleotide
ucuauaagucggcuuccuc

SEQ ID NO: 1170817 - RNA, 19 nt, Artificial Sequence
  Description of Artificial Sequence: Synthetic oligonucleotide
agcgauaccauaauaguuu

SEQ ID NO: 1170818 - RNA, 19 nt, Artificial Sequence
  Description of Artificial Sequence: Synthetic oligonucleotide
guaucuaagucugucuuca

SEQ ID NO: 1170819 - RNA, 19 nt, Artificial Sequence
  Description of Artificial Sequence: Synthetic oligonucleotide
gacuuacuucuaaacagac

SEQ ID NO: 1170820 - RNA, 19 nt, Artificial Sequence
  Description of Artificial Sequence: Synthetic oligonucleotide
uccauagagagcgugcuua

SEQ ID NO: 1170821 - RNA, 19 nt, Artificial Sequence
  Description of Artificial Sequence: Synthetic oligonucleotide
gaguuaacaacugagguuu

SEQ ID NO: 1170822 - RNA, 19 nt, Artificial Sequence
  Description of Artificial Sequence: Synthetic oligonucleotide
uggcaucaaaagaguaucu

SEQ ID NO: 1170823 - RNA, 19 nt, Artificial Sequence
  Description of Artificial Sequence: Synthetic oligonucleotide
auuaggaauuagauagugu

SEQ ID NO: 1170824 - RNA, 19 nt, Artificial Sequence
  Description of Artificial Sequence: Synthetic oligonucleotide
guaaugcucuaacaagguc

SEQ ID NO: 1170825 - RNA, 19 nt, Artificial Sequence
  Description of Artificial Sequence: Synthetic oligonucleotide
acgguaaaggugaggcugc

SEQ ID NO: 1170826 - RNA, 19 nt, Artificial Sequence
  Description of Artificial Sequence: Synthetic oligonucleotide
agcgugcuuaaguuguucu

SEQ ID NO: 1170827 - RNA, 19 nt, Artificial Sequence
  Description of Artificial Sequence: Synthetic oligonucleotide
auuagauaguguacaguga

SEQ ID NO: 1170828 - RNA, 19 nt, Artificial Sequence
  Description of Artificial Sequence: Synthetic oligonucleotide
aaguccuagcgauaccaua

SEQ ID NO: 1170829 - RNA, 19 nt, Artificial Sequence
  Description of Artificial Sequence: Synthetic oligonucleotide
aaggcggacaucccuccga

SEQ ID NO: 1170830 - RNA, 19 nt, Artificial Sequence
  Description of Artificial Sequence: Synthetic oligonucleotide
gcaagacuuacuucuaaac

SEQ ID NO: 1170831 - RNA, 19 nt, Artificial Sequence
  Description of Artificial Sequence: Synthetic oligonucleotide
agacuuacuucuaaacaga

SEQ ID NO: 1170832 - RNA, 19 nt, Artificial Sequence
  Description of Artificial Sequence: Synthetic oligonucleotide
ucuuugcgaaccagggaaa

SEQ ID NO: 1170833 - RNA, 19 nt, Artificial Sequence
  Description of Artificial Sequence: Synthetic oligonucleotide
uaaucaaguccuagcgaua

SEQ ID NO: 1170834 - RNA, 19 nt, Artificial Sequence
  Description of Artificial Sequence: Synthetic oligonucleotide
ugggccgcgaguguuugcg

SEQ ID NO: 1170835 - RNA, 19 nt, Artificial Sequence
  Description of Artificial Sequence: Synthetic oligonucleotide
uucgagugaguuguuuucu

SEQ ID NO: 1170836 - RNA, 19 nt, Artificial Sequence
  Description of Artificial Sequence: Synthetic oligonucleotide
ucauacacagaucgcucuu

SEQ ID NO: 1170837 - RNA, 19 nt, Artificial Sequence
  Description of Artificial Sequence: Synthetic oligonucleotide
uugcucaacucggacagcu

SEQ ID NO: 1170838 - RNA, 19 nt, Artificial Sequence
  Description of Artificial Sequence: Synthetic oligonucleotide
ugcgaaccagggaaacucu

SEQ ID NO: 1170839 - RNA, 19 nt, Artificial Sequence
  Description of Artificial Sequence: Synthetic oligonucleotide
auaagucggcuuccucguc

SEQ ID NO: 1170840 - RNA, 19 nt, Artificial Sequence
  Description of Artificial Sequence: Synthetic oligonucleotide
uagauaguguacagugauu

SEQ ID NO: 1170841 - RNA, 19 nt, Artificial Sequence
  Description of Artificial Sequence: Synthetic oligonucleotide
acagaucgcucuuucccca

SEQ ID NO: 1170842 - RNA, 19 nt, Artificial Sequence
  Description of Artificial Sequence: Synthetic oligonucleotide
ccaaauagacaguacucug

SEQ ID NO: 1170843 - RNA, 19 nt, Artificial Sequence
  Description of Artificial Sequence: Synthetic oligonucleotide
aucagauacuggcaucaaa

SEQ ID NO: 1170844 - RNA, 19 nt, Artificial Sequence
  Description of Artificial Sequence: Synthetic oligonucleotide
aguccuagcgauaccauaa

SEQ ID NO: 1170845 - RNA, 19 nt, Artificial Sequence
  Description of Artificial Sequence: Synthetic oligonucleotide
ugcugcgaguugcucaacu

SEQ ID NO: 1170846 - RNA, 19 nt, Artificial Sequence
  Description of Artificial Sequence: Synthetic oligonucleotide
cuagcgauaccauaauagu

SEQ ID NO: 1170847 - RNA, 19 nt, Artificial Sequence
  Description of Artificial Sequence: Synthetic oligonucleotide
uuguucuauaagucggcuu

SEQ ID NO: 1170848 - RNA, 19 nt, Artificial Sequence
  Description of Artificial Sequence: Synthetic oligonucleotide
caaggugcuucuuacaacu

SEQ ID NO: 1170849 - RNA, 19 nt, Artificial Sequence
  Description of Artificial Sequence: Synthetic oligonucleotide
caaucgagauaagucuggc

SEQ ID NO: 1170850 - RNA, 19 nt, Artificial Sequence
  Description of Artificial Sequence: Synthetic oligonucleotide
uaacaaggucgagagucug

SEQ ID NO: 1170851 - RNA, 19 nt, Artificial Sequence
  Description of Artificial Sequence: Synthetic oligonucleotide
agaguacaccauuuauaaa

SEQ ID NO: 1170852 - RNA, 19 nt, Artificial Sequence
  Description of Artificial Sequence: Synthetic oligonucleotide
uuugcgaaccagggaaacu

SEQ ID NO: 1170853 - RNA, 19 nt, Artificial Sequence
  Description of Artificial Sequence: Synthetic oligonucleotide
aaagaguaucuaagucugu

SEQ ID NO: 1170854 - RNA, 19 nt, Artificial Sequence
  Description of Artificial Sequence: Synthetic oligonucleotide
acuaugacuggugcaaaau

SEQ ID NO: 1170855 - RNA, 19 nt, Artificial Sequence
  Description of Artificial Sequence: Synthetic oligonucleotide
uuugugaacucuggucccu

SEQ ID NO: 1170856 - RNA, 19 nt, Artificial Sequence
  Description of Artificial Sequence: Synthetic oligonucleotide
uguuugcgaugguggauga

SEQ ID NO: 1170857 - RNA, 19 nt, Artificial Sequence
  Description of Artificial Sequence: Synthetic oligonucleotide
acaccgugacgaugggccg

SEQ ID NO: 1170858 - RNA, 19 nt, Artificial Sequence
  Description of Artificial Sequence: Synthetic oligonucleotide
uugcgcuuauauucuucca

SEQ ID NO: 1170859 - RNA, 19 nt, Artificial Sequence
  Description of Artificial Sequence: Synthetic oligonucleotide
uccuagcgauaccauaaua

SEQ ID NO: 1170860 - RNA, 19 nt, Artificial Sequence
  Description of Artificial Sequence: Synthetic oligonucleotide
cuuugcguagcucccgcuc

SEQ ID NO: 1170861 - RNA, 19 nt, Artificial Sequence
  Description of Artificial Sequence: Synthetic oligonucleotide
aguacaccauuuauaaauu

SEQ ID NO: 1170862 - RNA, 19 nt, Artificial Sequence
  Description of Artificial Sequence: Synthetic oligonucleotide
gaauuagauaguguacagu

SEQ ID NO: 1170863 - RNA, 19 nt, Artificial Sequence
  Description of Artificial Sequence: Synthetic oligonucleotide
caucuauuucugccgccag

SEQ ID NO: 1170864 - RNA, 19 nt, Artificial Sequence
  Description of Artificial Sequence: Synthetic oligonucleotide
gcaaucgagauaagucugg

SEQ ID NO: 1170865 - RNA, 19 nt, Artificial Sequence
  Description of Artificial Sequence: Synthetic oligonucleotide
uucuauaagucggcuuccu

SEQ ID NO: 1170866 - RNA, 19 nt, Artificial Sequence
  Description of Artificial Sequence: Synthetic oligonucleotide
uauucucauccaccuuuau

SEQ ID NO: 1170867 - RNA, 19 nt, Artificial Sequence
  Description of Artificial Sequence: Synthetic oligonucleotide
ucucaagcagggacacuuc

SEQ ID NO: 1170868 - RNA, 19 nt, Artificial Sequence
  Description of Artificial Sequence: Synthetic oligonucleotide
uuaucuccauagagagcgu

SEQ ID NO: 1170869 - RNA, 19 nt, Artificial Sequence
  Description of Artificial Sequence: Synthetic oligonucleotide
gaguaucuaagucugucuu

SEQ ID NO: 1170870 - RNA, 19 nt, Artificial Sequence
  Description of Artificial Sequence: Synthetic oligonucleotide
agcauuuaucacagaucuc

SEQ ID NO: 1170871 - RNA, 19 nt, Artificial Sequence
  Description of Artificial Sequence: Synthetic oligonucleotide
uugcguagcucccgcuccc

SEQ ID NO: 1170872 - RNA, 19 nt, Artificial Sequence
  Description of Artificial Sequence: Synthetic oligonucleotide
caaggucgagagucugcgg

SEQ ID NO: 1170873 - RNA, 19 nt, Artificial Sequence
  Description of Artificial Sequence: Synthetic oligonucleotide
cuuugcgaaccagggaaac

SEQ ID NO: 1170874 - RNA, 19 nt, Artificial Sequence
  Description of Artificial Sequence: Synthetic oligonucleotide
ugcgaugguggaugagcca

SEQ ID NO: 1170875 - RNA, 19 nt, Artificial Sequence
  Description of Artificial Sequence: Synthetic oligonucleotide
aguaagcuuccuguugggu

SEQ ID NO: 1170876 - RNA, 19 nt, Artificial Sequence
  Description of Artificial Sequence: Synthetic oligonucleotide
ucgagugaguuguuuucua

SEQ ID NO: 1170877 - RNA, 19 nt, Artificial Sequence
  Description of Artificial Sequence: Synthetic oligonucleotide
cucugaguucuuugcgaac

SEQ ID NO: 1170878 - RNA, 19 nt, Artificial Sequence
  Description of Artificial Sequence: Synthetic oligonucleotide
ggcaaucgagauaagucug

SEQ ID NO: 1170879 - RNA, 19 nt, Artificial Sequence
  Description of Artificial Sequence: Synthetic oligonucleotide
ugccaaggugcuucuuaca

SEQ ID NO: 1170880 - RNA, 19 nt, Artificial Sequence
  Description of Artificial Sequence: Synthetic oligonucleotide
gagagcgugcuuaaguugu

SEQ ID NO: 1170881 - RNA, 19 nt, Artificial Sequence
  Description of Artificial Sequence: Synthetic oligonucleotide
gcggacaucccuccgaaac

SEQ ID NO: 1170882 - RNA, 19 nt, Artificial Sequence
  Description of Artificial Sequence: Synthetic oligonucleotide
ugugaacucuggucccuuc

SEQ ID NO: 1170883 - RNA, 19 nt, Artificial Sequence
  Description of Artificial Sequence: Synthetic oligonucleotide
cauagagagcgugcuuaag

SEQ ID NO: 1170884 - RNA, 19 nt, Artificial Sequence
  Description of Artificial Sequence: Synthetic oligonucleotide
agcuauccuuugaugaacu

SEQ ID NO: 1170885 - RNA, 19 nt, Artificial Sequence
  Description of Artificial Sequence: Synthetic oligonucleotide
ccgucaaucuucacuguag

SEQ ID NO: 1170886 - RNA, 19 nt, Artificial Sequence
  Description of Artificial Sequence: Synthetic oligonucleotide
aagucggcuuccucgucuu

SEQ ID NO: 1170887 - RNA, 19 nt, Artificial Sequence
  Description of Artificial Sequence: Synthetic oligonucleotide
cuauuuuaguuggauauau

SEQ ID NO: 1170888 - RNA, 19 nt, Artificial Sequence
  Description of Artificial Sequence: Synthetic oligonucleotide
guaaggcugcaagacuuac

SEQ ID NO: 1170889 - RNA, 19 nt, Artificial Sequence
  Description of Artificial Sequence: Synthetic oligonucleotide
guaagcuuccuguuggguu

SEQ ID NO: 1170890 - RNA, 19 nt, Artificial Sequence
  Description of Artificial Sequence: Synthetic oligonucleotide
gggcaaucgagauaagucu

SEQ ID NO: 1170891 - RNA, 19 nt, Artificial Sequence
  Description of Artificial Sequence: Synthetic oligonucleotide
guaucuauuuuaguuggau

SEQ ID NO: 1170892 - RNA, 19 nt, Artificial Sequence
  Description of Artificial Sequence: Synthetic oligonucleotide
augggccgcgaguguuugc

SEQ ID NO: 1170893 - RNA, 19 nt, Artificial Sequence
  Description of Artificial Sequence: Synthetic oligonucleotide
gcgauaccauaauaguuuc

SEQ ID NO: 1170894 - RNA, 19 nt, Artificial Sequence
  Description of Artificial Sequence: Synthetic oligonucleotide
ccccaaauagacaguacuc

SEQ ID NO: 1170895 - RNA, 19 nt, Artificial Sequence
  Description of Artificial Sequence: Synthetic oligonucleotide
uacuagcauuuaucacaga

SEQ ID NO: 1170896 - RNA, 19 nt, Artificial Sequence
  Description of Artificial Sequence: Synthetic oligonucleotide
cuaacaaggucgagagucu

SEQ ID NO: 1170897 - RNA, 19 nt, Artificial Sequence
  Description of Artificial Sequence: Synthetic oligonucleotide
accgugacgaugggccgcg

SEQ ID NO: 1170898 - RNA, 19 nt, Artificial Sequence
  Description of Artificial Sequence: Synthetic oligonucleotide
gaugggccgcgaguguuug

SEQ ID NO: 1170899 - RNA, 19 nt, Artificial Sequence
  Description of Artificial Sequence: Synthetic oligonucleotide
ggucgagagucugcggugg

SEQ ID NO: 1170900 - RNA, 19 nt, Artificial Sequence
  Description of Artificial Sequence: Synthetic oligonucleotide
gccgccucagagaaggcgg

SEQ ID NO: 1170901 - RNA, 19 nt, Artificial Sequence
  Description of Artificial Sequence: Synthetic oligonucleotide
gcuauccuuugaugaacug

SEQ ID NO: 1170902 - RNA, 19 nt, Artificial Sequence
  Description of Artificial Sequence: Synthetic oligonucleotide
uuucugccgccagucugcc

SEQ ID NO: 1170903 - RNA, 19 nt, Artificial Sequence
  Description of Artificial Sequence: Synthetic oligonucleotide
gaacgguaaaggugaggcu

SEQ ID NO: 1170904 - RNA, 19 nt, Artificial Sequence
  Description of Artificial Sequence: Synthetic oligonucleotide
gaaccaauguuuggguggu

SEQ ID NO: 1170905 - RNA, 19 nt, Artificial Sequence
  Description of Artificial Sequence: Synthetic oligonucleotide
cugaguucuuugcgaacca

SEQ ID NO: 1170906 - RNA, 19 nt, Artificial Sequence
  Description of Artificial Sequence: Synthetic oligonucleotide
uugaucgguucuucucauu

SEQ ID NO: 1170907 - RNA, 19 nt, Artificial Sequence
  Description of Artificial Sequence: Synthetic oligonucleotide
cugcggugguucacuuggg

SEQ ID NO: 1170908 - RNA, 19 nt, Artificial Sequence
  Description of Artificial Sequence: Synthetic oligonucleotide
cacuaugacuggugcaaaa

SEQ ID NO: 1170909 - RNA, 19 nt, Artificial Sequence
  Description of Artificial Sequence: Synthetic oligonucleotide
guuugcgaugguggaugag

SEQ ID NO: 1170910 - RNA, 19 nt, Artificial Sequence
  Description of Artificial Sequence: Synthetic oligonucleotide
ggacacacagaaccaaugu

SEQ ID NO: 1170911 - RNA, 19 nt, Artificial Sequence
  Description of Artificial Sequence: Synthetic oligonucleotide
ucaacucggacagcuucuu

SEQ ID NO: 1170912 - RNA, 19 nt, Artificial Sequence
  Description of Artificial Sequence: Synthetic oligonucleotide
gucugcggugguucacuug

SEQ ID NO: 1170913 - RNA, 19 nt, Artificial Sequence
  Description of Artificial Sequence: Synthetic oligonucleotide
uaacuacuguaaggcugca

SEQ ID NO: 1170914 - RNA, 19 nt, Artificial Sequence
  Description of Artificial Sequence: Synthetic oligonucleotide
gauccgggcucugaguucu

SEQ ID NO: 1170915 - RNA, 19 nt, Artificial Sequence
  Description of Artificial Sequence: Synthetic oligonucleotide
acauucgagugaguuguuu

SEQ ID NO: 1170916 - RNA, 19 nt, Artificial Sequence
  Description of Artificial Sequence: Synthetic oligonucleotide
cauucgagugaguuguuuu

SEQ ID NO: 1170917 - RNA, 19 nt, Artificial Sequence
  Description of Artificial Sequence: Synthetic oligonucleotide
gcgaugguggaugagccac

SEQ ID NO: 1170918 - RNA, 19 nt, Artificial Sequence
  Description of Artificial Sequence: Synthetic oligonucleotide
agaucgcucuuuccccaaa

SEQ ID NO: 1170919 - RNA, 19 nt, Artificial Sequence
  Description of Artificial Sequence: Synthetic oligonucleotide
gagcgugcuuaaguuguuc

SEQ ID NO: 1170920 - RNA, 19 nt, Artificial Sequence
  Description of Artificial Sequence: Synthetic oligonucleotide
aggcggacaucccuccgaa

SEQ ID NO: 1170921 - RNA, 19 nt, Artificial Sequence
  Description of Artificial Sequence: Synthetic oligonucleotide
cagcgaagaaaaucugcua

SEQ ID NO: 1170922 - RNA, 19 nt, Artificial Sequence
  Description of Artificial Sequence: Synthetic oligonucleotide
cagggaaacucuggcuaac

SEQ ID NO: 1170923 - RNA, 19 nt, Artificial Sequence
  Description of Artificial Sequence: Synthetic oligonucleotide
cagcaaucauaaauaaguu

SEQ ID NO: 1170924 - RNA, 19 nt, Artificial Sequence
  Description of Artificial Sequence: Synthetic oligonucleotide
caacucggacagcuucuuc

SEQ ID NO: 1170925 - RNA, 19 nt, Artificial Sequence
  Description of Artificial Sequence: Synthetic oligonucleotide
ggcuuugcguagcucccgc

SEQ ID NO: 1170926 - RNA, 19 nt, Artificial Sequence
  Description of Artificial Sequence: Synthetic oligonucleotide
gcugcgaguugcucaacuc

SEQ ID NO: 1170927 - RNA, 19 nt, Artificial Sequence
  Description of Artificial Sequence: Synthetic oligonucleotide
gcgaguguuugcgauggug

SEQ ID NO: 1170928 - RNA, 19 nt, Artificial Sequence
  Description of Artificial Sequence: Synthetic oligonucleotide
gaucgcucuuuccccaaau

SEQ ID NO: 1170929 - RNA, 19 nt, Artificial Sequence
  Description of Artificial Sequence: Synthetic oligonucleotide
cucccgcucccacaccgug

SEQ ID NO: 1170930 - RNA, 19 nt, Artificial Sequence
  Description of Artificial Sequence: Synthetic oligonucleotide
gcggugguucacuugggga

SEQ ID NO: 1170931 - RNA, 19 nt, Artificial Sequence
  Description of Artificial Sequence: Synthetic oligonucleotide
agucugcggugguucacuu

SEQ ID NO: 1170932 - RNA, 19 nt, Artificial Sequence
  Description of Artificial Sequence: Synthetic oligonucleotide
ccgcgaguguuugcgaugg

SEQ ID NO: 1170933 - RNA, 19 nt, Artificial Sequence
  Description of Artificial Sequence: Synthetic oligonucleotide
caccuuuauuuguucuaua

SEQ ID NO: 1170934 - RNA, 19 nt, Artificial Sequence
  Description of Artificial Sequence: Synthetic oligonucleotide
cuugaucgguucuucucau

SEQ ID NO: 1170935 - RNA, 19 nt, Artificial Sequence
  Description of Artificial Sequence: Synthetic oligonucleotide
gcuaacuugcgcuuauauu

SEQ ID NO: 1170936 - RNA, 19 nt, Artificial Sequence
  Description of Artificial Sequence: Synthetic oligonucleotide
ugcguagcucccgcuccca

SEQ ID NO: 1170937 - RNA, 19 nt, Artificial Sequence
  Description of Artificial Sequence: Synthetic oligonucleotide
cggacaucccuccgaaacc

SEQ ID NO: 1170938 - RNA, 19 nt, Artificial Sequence
  Description of Artificial Sequence: Synthetic oligonucleotide
cgggcucugaguucuuugc

SEQ ID NO: 1170939 - RNA, 19 nt, Artificial Sequence
  Description of Artificial Sequence: Synthetic oligonucleotide
cgaagaaaaucugcuaaca

SEQ ID NO: 1170940 - RNA, 19 nt, Artificial Sequence
  Description of Artificial Sequence: Synthetic oligonucleotide
uucugccgccagucugcca

SEQ ID NO: 1170941 - RNA, 19 nt, Artificial Sequence
  Description of Artificial Sequence: Synthetic oligonucleotide
ggggacccuagagaggaac

SEQ ID NO: 1170942 - RNA, 19 nt, Artificial Sequence
  Description of Artificial Sequence: Synthetic oligonucleotide
gccgcgaguguuugcgaug

SEQ ID NO: 1170943 - RNA, 19 nt, Artificial Sequence
  Description of Artificial Sequence: Synthetic oligonucleotide
ggcuaacuugcgcuuauau

SEQ ID NO: 1170944 - RNA, 19 nt, Artificial Sequence
  Description of Artificial Sequence: Synthetic oligonucleotide
cugcaacauuuagucucug

SEQ ID NO: 1170945 - RNA, 19 nt, Artificial Sequence
  Description of Artificial Sequence: Synthetic oligonucleotide
gcgaaccagggaaacucug

SEQ ID NO: 1170946 - RNA, 19 nt, Artificial Sequence
  Description of Artificial Sequence: Synthetic oligonucleotide
cccaaauagacaguacucu

SEQ ID NO: 1170947 - RNA, 19 nt, Artificial Sequence
  Description of Artificial Sequence: Synthetic oligonucleotide
cugcuauaaucaaguccua

SEQ ID NO: 1170948 - RNA, 19 nt, Artificial Sequence
  Description of Artificial Sequence: Synthetic oligonucleotide
gcgcuuauauucuuccaau

SEQ ID NO: 1170949 - RNA, 19 nt, Artificial Sequence
  Description of Artificial Sequence: Synthetic oligonucleotide
cagaucgcucuuuccccaa

SEQ ID NO: 1170950 - RNA, 19 nt, Artificial Sequence
  Description of Artificial Sequence: Synthetic oligonucleotide
uggcuaacuugcgcuuaua

SEQ ID NO: 1170951 - RNA, 19 nt, Artificial Sequence
  Description of Artificial Sequence: Synthetic oligonucleotide
gggacccuagagaggaaca

SEQ ID NO: 1170952 - RNA, 19 nt, Artificial Sequence
  Description of Artificial Sequence: Synthetic oligonucleotide
ccaagaguacaccauuuau

SEQ ID NO: 1170953 - RNA, 19 nt, Artificial Sequence
  Description of Artificial Sequence: Synthetic oligonucleotide
guccuagcgauaccauaau

SEQ ID NO: 1170954 - RNA, 19 nt, Artificial Sequence
  Description of Artificial Sequence: Synthetic oligonucleotide
gccgucaaucuucacugua

SEQ ID NO: 1170955 - RNA, 19 nt, Artificial Sequence
  Description of Artificial Sequence: Synthetic oligonucleotide
ugguucacuuggggacccu

SEQ ID NO: 1170956 - RNA, 19 nt, Artificial Sequence
  Description of Artificial Sequence: Synthetic oligonucleotide
ggacccuagagaggaacaa

SEQ ID NO: 1170957 - RNA, 19 nt, Artificial Sequence
  Description of Artificial Sequence: Synthetic oligonucleotide
gcgugcuuaaguuguucua

SEQ ID NO: 1170958 - RNA, 19 nt, Artificial Sequence
  Description of Artificial Sequence: Synthetic oligonucleotide
agagcgugcuuaaguuguu

SEQ ID NO: 1170959 - RNA, 19 nt, Artificial Sequence
  Description of Artificial Sequence: Synthetic oligonucleotide
ccuagagaggaacaauuuu

SEQ ID NO: 1170960 - RNA, 19 nt, Artificial Sequence
  Description of Artificial Sequence: Synthetic oligonucleotide
cgguucuucucauuaggaa

SEQ ID NO: 1170961 - RNA, 19 nt, Artificial Sequence
  Description of Artificial Sequence: Synthetic oligonucleotide
ggaggagacuggccgucaa

SEQ ID NO: 1170962 - RNA, 19 nt, Artificial Sequence
  Description of Artificial Sequence: Synthetic oligonucleotide
cgauaccauaauaguuuca

SEQ ID NO: 1170963 - RNA, 19 nt, Artificial Sequence
  Description of Artificial Sequence: Synthetic oligonucleotide
caggugcaugugacugcca

SEQ ID NO: 1170964 - RNA, 19 nt, Artificial Sequence
  Description of Artificial Sequence: Synthetic oligonucleotide
cuggcuaacuugcgcuuau

SEQ ID NO: 1170965 - RNA, 19 nt, Artificial Sequence
  Description of Artificial Sequence: Synthetic oligonucleotide
ugccgccagucugccauua

SEQ ID NO: 1170966 - RNA, 19 nt, Artificial Sequence
  Description of Artificial Sequence: Synthetic oligonucleotide
cucuggcuaacuugcgcuu

SEQ ID NO: 1170967 - RNA, 19 nt, Artificial Sequence
  Description of Artificial Sequence: Synthetic oligonucleotide
gucgagagucugcgguggu

SEQ ID NO: 1170968 - RNA, 19 nt, Artificial Sequence
  Description of Artificial Sequence: Synthetic oligonucleotide
cgugacgaugggccgcgag

SEQ ID NO: 1170969 - RNA, 19 nt, Artificial Sequence
  Description of Artificial Sequence: Synthetic oligonucleotide
gccagucugccauuauaau

SEQ ID NO: 1170970 - RNA, 19 nt, Artificial Sequence
  Description of Artificial Sequence: Synthetic oligonucleotide
cccacaccgugacgauggg

SEQ ID NO: 1170971 - RNA, 19 nt, Artificial Sequence
  Description of Artificial Sequence: Synthetic oligonucleotide
gcguagcucccgcucccac

SEQ ID NO: 1170972 - RNA, 19 nt, Artificial Sequence
  Description of Artificial Sequence: Synthetic oligonucleotide
gguucacuuggggacccua

SEQ ID NO: 1170973 - RNA, 19 nt, Artificial Sequence
  Description of Artificial Sequence: Synthetic oligonucleotide
cccuagagaggaacaauuu

SEQ ID NO: 1170974 - RNA, 19 nt, Artificial Sequence
  Description of Artificial Sequence: Synthetic oligonucleotide
cguagcucccgcucccaca

SEQ ID NO: 1170975 - RNA, 19 nt, Artificial Sequence
  Description of Artificial Sequence: Synthetic oligonucleotide
gcuuugcguagcucccgcu

SEQ ID NO: 1170976 - RNA, 19 nt, Artificial Sequence
  Description of Artificial Sequence: Synthetic oligonucleotide
ggccgcgaguguuugcgau

SEQ ID NO: 1170977 - RNA, 19 nt, Artificial Sequence
  Description of Artificial Sequence: Synthetic oligonucleotide
ggcggacaucccuccgaaa

SEQ ID NO: 1170978 - RNA, 19 nt, Artificial Sequence
  Description of Artificial Sequence: Synthetic oligonucleotide
gggccgcgaguguuugcga

SEQ ID NO: 1170979 - RNA, 19 nt, Artificial Sequence
  Description of Artificial Sequence: Synthetic oligonucleotide
ccgccucagagaaggcgga

SEQ ID NO: 1170980 - RNA, 19 nt, Artificial Sequence
  Description of Artificial Sequence: Synthetic oligonucleotide
ccgcucccacaccgugacg

SEQ ID NO: 1170981 - RNA, 19 nt, Artificial Sequence
  Description of Artificial Sequence: Synthetic oligonucleotide
gcacgcucugcugcgaguu

SEQ ID NO: 1170982 - RNA, 19 nt, Artificial Sequence
  Description of Artificial Sequence: Synthetic oligonucleotide
cgccucagagaaggcggac

SEQ ID NO: 1170983 - RNA, 19 nt, Artificial Sequence
  Description of Artificial Sequence: Synthetic oligonucleotide
auccgggcucugaguucuu

SEQ ID NO: 1170984 - RNA, 19 nt, Artificial Sequence
  Description of Artificial Sequence: Synthetic oligonucleotide
cgcgaguguuugcgauggu

SEQ ID NO: 1170985 - RNA, 19 nt, Artificial Sequence
  Description of Artificial Sequence: Synthetic oligonucleotide
ccgugacgaugggccgcga

SEQ ID NO: 1170986 - RNA, 19 nt, Artificial Sequence
  Description of Artificial Sequence: Synthetic oligonucleotide
aauuuuacuggacagcucc

SEQ ID NO: 1170987 - RNA, 19 nt, Artificial Sequence
  Description of Artificial Sequence: Synthetic oligonucleotide
acuauuacaaaguauagag

SEQ ID NO: 1170988 - RNA, 19 nt, Artificial Sequence
  Description of Artificial Sequence: Synthetic oligonucleotide
aaaagaucaugauucaagg

SEQ ID NO: 1170989 - RNA, 19 nt, Artificial Sequence
  Description of Artificial Sequence: Synthetic oligonucleotide
aacguuauguuccugcagc

SEQ ID NO: 1170990 - RNA, 19 nt, Artificial Sequence
  Description of Artificial Sequence: Synthetic oligonucleotide
uaucaaaagaucaugauuc

SEQ ID NO: 1170991 - RNA, 19 nt, Artificial Sequence
  Description of Artificial Sequence: Synthetic oligonucleotide
uauagagcaaaacacauga

SEQ ID NO: 1170992 - RNA, 19 nt, Artificial Sequence
  Description of Artificial Sequence: Synthetic oligonucleotide
ucaagauuuguuuaggagc

SEQ ID NO: 1170993 - RNA, 19 nt, Artificial Sequence
  Description of Artificial Sequence: Synthetic oligonucleotide
aaauacacccucuucagug

SEQ ID NO: 1170994 - RNA, 19 nt, Artificial Sequence
  Description of Artificial Sequence: Synthetic oligonucleotide
acaaucugagaguaaaccc

SEQ ID NO: 1170995 - RNA, 19 nt, Artificial Sequence
  Description of Artificial Sequence: Synthetic oligonucleotide
uuuauuucaggccaucuug

SEQ ID NO: 1170996 - RNA, 19 nt, Artificial Sequence
  Description of Artificial Sequence: Synthetic oligonucleotide
uccaauagcaucaaaggug

SEQ ID NO: 1170997 - RNA, 19 nt, Artificial Sequence
  Description of Artificial Sequence: Synthetic oligonucleotide
gauuucaaaaccuaguguc

SEQ ID NO: 1170998 - RNA, 19 nt, Artificial Sequence
  Description of Artificial Sequence: Synthetic oligonucleotide
aagaucaugauucaaggau

SEQ ID NO: 1170999 - RNA, 19 nt, Artificial Sequence
  Description of Artificial Sequence: Synthetic oligonucleotide
uuugauaccaggguuaucc

SEQ ID NO: 1171000 - RNA, 19 nt, Artificial Sequence
  Description of Artificial Sequence: Synthetic oligonucleotide
cuaacaaacuguuuguuag

SEQ ID NO: 1171001 - RNA, 19 nt, Artificial Sequence
  Description of Artificial Sequence: Synthetic oligonucleotide
aaagauugguuucugacau

SEQ ID NO: 1171002 - RNA, 19 nt, Artificial Sequence
  Description of Artificial Sequence: Synthetic oligonucleotide
uguuaauuuuacuggacag

SEQ ID NO: 1171003 - RNA, 19 nt, Artificial Sequence
  Description of Artificial Sequence: Synthetic oligonucleotide
caaaagaucaugauucaag

SEQ ID NO: 1171004 - RNA, 19 nt, Artificial Sequence
  Description of Artificial Sequence: Synthetic oligonucleotide
uuauuugcucuuaugcuag

SEQ ID NO: 1171005 - RNA, 19 nt, Artificial Sequence
  Description of Artificial Sequence: Synthetic oligonucleotide
ugggauguaagucaggaac

SEQ ID NO: 1171006 - RNA, 19 nt, Artificial Sequence
  Description of Artificial Sequence: Synthetic oligonucleotide
uuugccuuuagauuucugc

SEQ ID NO: 1171007 - RNA, 19 nt, Artificial Sequence
  Description of Artificial Sequence: Synthetic oligonucleotide
guguuguuaauuuuacugg

SEQ ID NO: 1171008 - RNA, 19 nt, Artificial Sequence
  Description of Artificial Sequence: Synthetic oligonucleotide
uuguuuaggagccagacuu

SEQ ID NO: 1171009 - RNA, 19 nt, Artificial Sequence
  Description of Artificial Sequence: Synthetic oligonucleotide
uagagcaaaacacaugaac

SEQ ID NO: 1171010 - RNA, 19 nt, Artificial Sequence
  Description of Artificial Sequence: Synthetic oligonucleotide
agauguuaccguuuuauug

SEQ ID NO: 1171011 - RNA, 19 nt, Artificial Sequence
  Description of Artificial Sequence: Synthetic oligonucleotide
uauucuugggacuggggcg

SEQ ID NO: 1171012 - RNA, 19 nt, Artificial Sequence
  Description of Artificial Sequence: Synthetic oligonucleotide
aacaguacgguuaacugag

SEQ ID NO: 1171013 - RNA, 19 nt, Artificial Sequence
  Description of Artificial Sequence: Synthetic oligonucleotide
uuaagagaagccacgacaa

SEQ ID NO: 1171014 - RNA, 19 nt, Artificial Sequence
  Description of Artificial Sequence: Synthetic oligonucleotide
ucaaagauugguuucugac

SEQ ID NO: 1171015 - RNA, 19 nt, Artificial Sequence
  Description of Artificial Sequence: Synthetic oligonucleotide
uuaucugugguguugcuac

SEQ ID NO: 1171016 - RNA, 19 nt, Artificial Sequence
  Description of Artificial Sequence: Synthetic oligonucleotide
uguuguuaauuuuacugga

SEQ ID NO: 1171017 - RNA, 19 nt, Artificial Sequence
  Description of Artificial Sequence: Synthetic oligonucleotide
aaagaucaugauucaagga

SEQ ID NO: 1171018 - RNA, 19 nt, Artificial Sequence
  Description of Artificial Sequence: Synthetic oligonucleotide
cuuacuuaugggauguaag

SEQ ID NO: 1171019 - RNA, 19 nt, Artificial Sequence
  Description of Artificial Sequence: Synthetic oligonucleotide
cacgacaacguuauguucc

SEQ ID NO: 1171020 - RNA, 19 nt, Artificial Sequence
  Description of Artificial Sequence: Synthetic oligonucleotide
aggaaauacacccucuuca

SEQ ID NO: 1171021 - RNA, 19 nt, Artificial Sequence
  Description of Artificial Sequence: Synthetic oligonucleotide
aacacaugaaccaaaaguu

SEQ ID NO: 1171022 - RNA, 19 nt, Artificial Sequence
  Description of Artificial Sequence: Synthetic oligonucleotide
gagucugugcuuuugguug

SEQ ID NO: 1171023 - RNA, 19 nt, Artificial Sequence
  Description of Artificial Sequence: Synthetic oligonucleotide
uaggaaacccuucaaagau

SEQ ID NO: 1171024 - RNA, 19 nt, Artificial Sequence
  Description of Artificial Sequence: Synthetic oligonucleotide
auuuguuuaggagccagac

SEQ ID NO: 1171025 - RNA, 19 nt, Artificial Sequence
  Description of Artificial Sequence: Synthetic oligonucleotide
auaucaaaagaucaugauu

SEQ ID NO: 1171026 - RNA, 19 nt, Artificial Sequence
  Description of Artificial Sequence: Synthetic oligonucleotide
gacaacguuauguuccugc

SEQ ID NO: 1171027 - RNA, 19 nt, Artificial Sequence
  Description of Artificial Sequence: Synthetic oligonucleotide
uuucagaacaguacgguua

SEQ ID NO: 1171028 - RNA, 19 nt, Artificial Sequence
  Description of Artificial Sequence: Synthetic oligonucleotide
aacuauuacaaaguauaga

SEQ ID NO: 1171029 - RNA, 19 nt, Artificial Sequence
  Description of Artificial Sequence: Synthetic oligonucleotide
guucuagcaagguuuggcg

SEQ ID NO: 1171030 - RNA, 19 nt, Artificial Sequence
  Description of Artificial Sequence: Synthetic oligonucleotide
uuauuucaggccaucuuga

SEQ ID NO: 1171031 - RNA, 19 nt, Artificial Sequence
  Description of Artificial Sequence: Synthetic oligonucleotide
uuuggcuuacuuaugggau

SEQ ID NO: 1171032 - RNA, 19 nt, Artificial Sequence
  Description of Artificial Sequence: Synthetic oligonucleotide
cagaugugacauuaguucc

SEQ ID NO: 1171033 - RNA, 19 nt, Artificial Sequence
  Description of Artificial Sequence: Synthetic oligonucleotide
auaggagccaguguuuggc

SEQ ID NO: 1171034 - RNA, 19 nt, Artificial Sequence
  Description of Artificial Sequence: Synthetic oligonucleotide
caagguuuggcgcacauuc

SEQ ID NO: 1171035 - RNA, 19 nt, Artificial Sequence
  Description of Artificial Sequence: Synthetic oligonucleotide
uuagaggaagacacggcug

SEQ ID NO: 1171036 - RNA, 19 nt, Artificial Sequence
  Description of Artificial Sequence: Synthetic oligonucleotide
aaucuccagcaguucuugc

SEQ ID NO: 1171037 - RNA, 19 nt, Artificial Sequence
  Description of Artificial Sequence: Synthetic oligonucleotide
aaccuagugucacagguaa

SEQ ID NO: 1171038 - RNA, 19 nt, Artificial Sequence
  Description of Artificial Sequence: Synthetic oligonucleotide
aaaggugccuuuacuugcc

SEQ ID NO: 1171039 - RNA, 19 nt, Artificial Sequence
  Description of Artificial Sequence: Synthetic oligonucleotide
uaccguuuuauuguucugg

SEQ ID NO: 1171040 - RNA, 19 nt, Artificial Sequence
  Description of Artificial Sequence: Synthetic oligonucleotide
gauguuaccguuuuauugu

SEQ ID NO: 1171041 - RNA, 19 nt, Artificial Sequence
  Description of Artificial Sequence: Synthetic oligonucleotide
aauacacccucuucaguga

SEQ ID NO: 1171042 - RNA, 19 nt, Artificial Sequence
  Description of Artificial Sequence: Synthetic oligonucleotide
ucgcuuucaauuucauggg

SEQ ID NO: 1171043 - RNA, 19 nt, Artificial Sequence
  Description of Artificial Sequence: Synthetic oligonucleotide
aaacccuucaaagauuggu

SEQ ID NO: 1171044 - RNA, 19 nt, Artificial Sequence
  Description of Artificial Sequence: Synthetic oligonucleotide
uucccggaagacaaaauac

SEQ ID NO: 1171045 - RNA, 19 nt, Artificial Sequence
  Description of Artificial Sequence: Synthetic oligonucleotide
ucuagcaagguuuggcgca

SEQ ID NO: 1171046 - RNA, 19 nt, Artificial Sequence
  Description of Artificial Sequence: Synthetic oligonucleotide
uugguuucugacauggguc

SEQ ID NO: 1171047 - RNA, 19 nt, Artificial Sequence
  Description of Artificial Sequence: Synthetic oligonucleotide
agguaaagcuucauuuucc

SEQ ID NO: 1171048 - RNA, 19 nt, Artificial Sequence
  Description of Artificial Sequence: Synthetic oligonucleotide
ucuguagagaggugcugcg

SEQ ID NO: 1171049 - RNA, 19 nt, Artificial Sequence
  Description of Artificial Sequence: Synthetic oligonucleotide
aucuguagagaggugcugc

SEQ ID NO: 1171050 - RNA, 19 nt, Artificial Sequence
  Description of Artificial Sequence: Synthetic oligonucleotide
uugugggacauacaaucug

SEQ ID NO: 1171051 - RNA, 19 nt, Artificial Sequence
  Description of Artificial Sequence: Synthetic oligonucleotide
uugcucaagauuuguuuag

SEQ ID NO: 1171052 - RNA, 19 nt, Artificial Sequence
  Description of Artificial Sequence: Synthetic oligonucleotide
uguagagaggugcugcgac

SEQ ID NO: 1171053 - RNA, 19 nt, Artificial Sequence
  Description of Artificial Sequence: Synthetic oligonucleotide
aagucaggaaccggcuucc

SEQ ID NO: 1171054 - RNA, 19 nt, Artificial Sequence
  Description of Artificial Sequence: Synthetic oligonucleotide
uuuguuuaggagccagacu

SEQ ID NO: 1171055 - RNA, 19 nt, Artificial Sequence
  Description of Artificial Sequence: Synthetic oligonucleotide
uuucccggaagacaaaaua

SEQ ID NO: 1171056 - RNA, 19 nt, Artificial Sequence
  Description of Artificial Sequence: Synthetic oligonucleotide
ugcaucuguagagaggugc

SEQ ID NO: 1171057 - RNA, 19 nt, Artificial Sequence
  Description of Artificial Sequence: Synthetic oligonucleotide
ugguguugcuacaaucugc

SEQ ID NO: 1171058 - RNA, 19 nt, Artificial Sequence
  Description of Artificial Sequence: Synthetic oligonucleotide
uugguuauaggagccagug

SEQ ID NO: 1171059 - RNA, 19 nt, Artificial Sequence
  Description of Artificial Sequence: Synthetic oligonucleotide
uugaccucgucuaggaaac

SEQ ID NO: 1171060 - RNA, 19 nt, Artificial Sequence
  Description of Artificial Sequence: Synthetic oligonucleotide
uugaauuuugggagcaguc

SEQ ID NO: 1171061 - RNA, 19 nt, Artificial Sequence
  Description of Artificial Sequence: Synthetic oligonucleotide
uaagucaggaaccggcuuc

SEQ ID NO: 1171062 - RNA, 19 nt, Artificial Sequence
  Description of Artificial Sequence: Synthetic oligonucleotide
agaguguuguuaauuuuac

SEQ ID NO: 1171063 - RNA, 19 nt, Artificial Sequence
  Description of Artificial Sequence: Synthetic oligonucleotide
uucagaacaguacgguuaa

SEQ ID NO: 1171064 - RNA, 19 nt, Artificial Sequence
  Description of Artificial Sequence: Synthetic oligonucleotide
ugggagggcgcuuauagcu

SEQ ID NO: 1171065 - RNA, 19 nt, Artificial Sequence
  Description of Artificial Sequence: Synthetic oligonucleotide
cuucccagguucuagcaag

SEQ ID NO: 1171066 - RNA, 19 nt, Artificial Sequence
  Description of Artificial Sequence: Synthetic oligonucleotide
gacacggcugcccagaguc

SEQ ID NO: 1171067 - RNA, 19 nt, Artificial Sequence
  Description of Artificial Sequence: Synthetic oligonucleotide
ugcucuuaugcuaggggug

SEQ ID NO: 1171068 - RNA, 19 nt, Artificial Sequence
  Description of Artificial Sequence: Synthetic oligonucleotide
caugggagggcgcuuauag

SEQ ID NO: 1171069 - RNA, 19 nt, Artificial Sequence
  Description of Artificial Sequence: Synthetic oligonucleotide
ucgucuaggaaacccuuca

SEQ ID NO: 1171070 - RNA, 19 nt, Artificial Sequence
  Description of Artificial Sequence: Synthetic oligonucleotide
uuuacuugccagcaacuuu

SEQ ID NO: 1171071 - RNA, 19 nt, Artificial Sequence
  Description of Artificial Sequence: Synthetic oligonucleotide
uuucaaaaccuagugucac

SEQ ID NO: 1171072 - RNA, 19 nt, Artificial Sequence
  Description of Artificial Sequence: Synthetic oligonucleotide
caccacauauucuugggac

SEQ ID NO: 1171073 - RNA, 19 nt, Artificial Sequence
  Description of Artificial Sequence: Synthetic oligonucleotide
uugcucuuaugcuaggggu

SEQ ID NO: 1171074 - RNA, 19 nt, Artificial Sequence
  Description of Artificial Sequence: Synthetic oligonucleotide
aauuucaugggagggcgcu

SEQ ID NO: 1171075 - RNA, 19 nt, Artificial Sequence
  Description of Artificial Sequence: Synthetic oligonucleotide
ugccuuuagauuucugcca

SEQ ID NO: 1171076 - RNA, 19 nt, Artificial Sequence
  Description of Artificial Sequence: Synthetic oligonucleotide
uugacaagggcauuucuuu

SEQ ID NO: 1171077 - RNA, 19 nt, Artificial Sequence
  Description of Artificial Sequence: Synthetic oligonucleotide
gacuucacugcuugagugc

SEQ ID NO: 1171078 - RNA, 19 nt, Artificial Sequence
  Description of Artificial Sequence: Synthetic oligonucleotide
acaugaaccaaaaguuuuc

SEQ ID NO: 1171079 - RNA, 19 nt, Artificial Sequence
  Description of Artificial Sequence: Synthetic oligonucleotide
uugcaagcccugaagaaaa

SEQ ID NO: 1171080 - RNA, 19 nt, Artificial Sequence
  Description of Artificial Sequence: Synthetic oligonucleotide
uuggcuuacuuaugggaug

SEQ ID NO: 1171081 - RNA, 19 nt, Artificial Sequence
  Description of Artificial Sequence: Synthetic oligonucleotide
ugcucaagauuuguuuagg

SEQ ID NO: 1171082 - RNA, 19 nt, Artificial Sequence
  Description of Artificial Sequence: Synthetic oligonucleotide
uuuccuccgauccucuacu

SEQ ID NO: 1171083 - RNA, 19 nt, Artificial Sequence
  Description of Artificial Sequence: Synthetic oligonucleotide
auuucaggccaucuugaca

SEQ ID NO: 1171084 - RNA, 19 nt, Artificial Sequence
  Description of Artificial Sequence: Synthetic oligonucleotide
aagauguuaccguuuuauu

SEQ ID NO: 1171085 - RNA, 19 nt, Artificial Sequence
  Description of Artificial Sequence: Synthetic oligonucleotide
ggagugauaagcuucaugu

SEQ ID NO: 1171086 - RNA, 19 nt, Artificial Sequence
  Description of Artificial Sequence: Synthetic oligonucleotide
uuuucagccuccggaaugc

SEQ ID NO: 1171087 - RNA, 19 nt, Artificial Sequence
  Description of Artificial Sequence: Synthetic oligonucleotide
uuaggaaauacacccucuu

SEQ ID NO: 1171088 - RNA, 19 nt, Artificial Sequence
  Description of Artificial Sequence: Synthetic oligonucleotide
uugguuggaagauguuacc

SEQ ID NO: 1171089 - RNA, 19 nt, Artificial Sequence
  Description of Artificial Sequence: Synthetic oligonucleotide
cuaggaaacccuucaaaga

SEQ ID NO: 1171090 - RNA, 19 nt, Artificial Sequence
  Description of Artificial Sequence: Synthetic oligonucleotide
uucaaaaccuagugucaca

SEQ ID NO: 1171091 - RNA, 19 nt, Artificial Sequence
  Description of Artificial Sequence: Synthetic oligonucleotide
uauuugcucuuaugcuagg

SEQ ID NO: 1171092 - RNA, 19 nt, Artificial Sequence
  Description of Artificial Sequence: Synthetic oligonucleotide
gaucuugcggaauguucag

SEQ ID NO: 1171093 - RNA, 19 nt, Artificial Sequence
  Description of Artificial Sequence: Synthetic oligonucleotide
gugagccucagacacuccg

SEQ ID NO: 1171094 - RNA, 19 nt, Artificial Sequence
  Description of Artificial Sequence: Synthetic oligonucleotide
auuacuuccucagaugcaa

SEQ ID NO: 1171095 - RNA, 19 nt, Artificial Sequence
  Description of Artificial Sequence: Synthetic oligonucleotide
augggagggcgcuuauagc

SEQ ID NO: 1171096 - RNA, 19 nt, Artificial Sequence
  Description of Artificial Sequence: Synthetic oligonucleotide
uacuuaugggauguaaguc

SEQ ID NO: 1171097 - RNA, 19 nt, Artificial Sequence
  Description of Artificial Sequence: Synthetic oligonucleotide
augcauuacuuccucagau

SEQ ID NO: 1171098 - RNA, 19 nt, Artificial Sequence
  Description of Artificial Sequence: Synthetic oligonucleotide
uuuucuugugggacauaca

SEQ ID NO: 1171099 - RNA, 19 nt, Artificial Sequence
  Description of Artificial Sequence: Synthetic oligonucleotide
aacacguggaugagucugg

SEQ ID NO: 1171100 - RNA, 19 nt, Artificial Sequence
  Description of Artificial Sequence: Synthetic oligonucleotide
gaucuguaguuugauacca

SEQ ID NO: 1171101 - RNA, 19 nt, Artificial Sequence
  Description of Artificial Sequence: Synthetic oligonucleotide
acaacguuauguuccugca

SEQ ID NO: 1171102 - RNA, 19 nt, Artificial Sequence
  Description of Artificial Sequence: Synthetic oligonucleotide
uacuuccucagaugcaaga

SEQ ID NO: 1171103 - RNA, 19 nt, Artificial Sequence
  Description of Artificial Sequence: Synthetic oligonucleotide
cagguaaagcuucauuuuc

SEQ ID NO: 1171104 - RNA, 19 nt, Artificial Sequence
  Description of Artificial Sequence: Synthetic oligonucleotide
ugcgacuucacugcuugag

SEQ ID NO: 1171105 - RNA, 19 nt, Artificial Sequence
  Description of Artificial Sequence: Synthetic oligonucleotide
auacaaucugagaguaaac

SEQ ID NO: 1171106 - RNA, 19 nt, Artificial Sequence
  Description of Artificial Sequence: Synthetic oligonucleotide
uuacuuccucagaugcaag

SEQ ID NO: 1171107 - RNA, 19 nt, Artificial Sequence
  Description of Artificial Sequence: Synthetic oligonucleotide
guugaccucgucuaggaaa

SEQ ID NO: 1171108 - RNA, 19 nt, Artificial Sequence
  Description of Artificial Sequence: Synthetic oligonucleotide
uugauaccaggguuauccc

SEQ ID NO: 1171109 - RNA, 19 nt, Artificial Sequence
  Description of Artificial Sequence: Synthetic oligonucleotide
uggaagauguuaccguuuu

SEQ ID NO: 1171110 - RNA, 19 nt, Artificial Sequence
  Description of Artificial Sequence: Synthetic oligonucleotide
gcucaauccuggcugagcg

SEQ ID NO: 1171111 - RNA, 19 nt, Artificial Sequence
  Description of Artificial Sequence: Synthetic oligonucleotide
cuugugguugcugugccag

SEQ ID NO: 1171112 - RNA, 19 nt, Artificial Sequence
  Description of Artificial Sequence: Synthetic oligonucleotide
acguggaugagucuggcua

SEQ ID NO: 1171113 - RNA, 19 nt, Artificial Sequence
  Description of Artificial Sequence: Synthetic oligonucleotide
accacauauucuugggacu

SEQ ID NO: 1171114 - RNA, 19 nt, Artificial Sequence
  Description of Artificial Sequence: Synthetic oligonucleotide
guauagagcaaaacacaug

SEQ ID NO: 1171115 - RNA, 19 nt, Artificial Sequence
  Description of Artificial Sequence: Synthetic oligonucleotide
aagagucucucuucugcau

SEQ ID NO: 1171116 - RNA, 19 nt, Artificial Sequence
  Description of Artificial Sequence: Synthetic oligonucleotide
cauacaaucugagaguaaa

SEQ ID NO: 1171117 - RNA, 19 nt, Artificial Sequence
  Description of Artificial Sequence: Synthetic oligonucleotide
uccgucagaguguuguuaa

SEQ ID NO: 1171118 - RNA, 19 nt, Artificial Sequence
  Description of Artificial Sequence: Synthetic oligonucleotide
accguuuuauuguucugga

SEQ ID NO: 1171119 - RNA, 19 nt, Artificial Sequence
  Description of Artificial Sequence: Synthetic oligonucleotide
cauggugucucagugaaca

SEQ ID NO: 1171120 - RNA, 19 nt, Artificial Sequence
  Description of Artificial Sequence: Synthetic oligonucleotide
ucuggguagcgggucaccg

SEQ ID NO: 1171121 - RNA, 19 nt, Artificial Sequence
  Description of Artificial Sequence: Synthetic oligonucleotide
guuaccguuuuauuguucu

SEQ ID NO: 1171122 - RNA, 19 nt, Artificial Sequence
  Description of Artificial Sequence: Synthetic oligonucleotide
uuauagcuuuugccuuuag

SEQ ID NO: 1171123 - RNA, 19 nt, Artificial Sequence
  Description of Artificial Sequence: Synthetic oligonucleotide
gagugauaagcuucauguc

SEQ ID NO: 1171124 - RNA, 19 nt, Artificial Sequence
  Description of Artificial Sequence: Synthetic oligonucleotide
gcaacuuugcuuugcagac

SEQ ID NO: 1171125 - RNA, 19 nt, Artificial Sequence
  Description of Artificial Sequence: Synthetic oligonucleotide
uggguagcgggucaccgcu

SEQ ID NO: 1171126 - RNA, 19 nt, Artificial Sequence
  Description of Artificial Sequence: Synthetic oligonucleotide
uuaccguuuuauuguucug

SEQ ID NO: 1171127 - RNA, 19 nt, Artificial Sequence
  Description of Artificial Sequence: Synthetic oligonucleotide
uguuucuaacaaacuguuu

SEQ ID NO: 1171128 - RNA, 19 nt, Artificial Sequence
  Description of Artificial Sequence: Synthetic oligonucleotide
uucaugucuugaacuucug

SEQ ID NO: 1171129 - RNA, 19 nt, Artificial Sequence
  Description of Artificial Sequence: Synthetic oligonucleotide
uguuaccguuuuauuguuc

SEQ ID NO: 1171130 - RNA, 19 nt, Artificial Sequence
  Description of Artificial Sequence: Synthetic oligonucleotide
aagacacggcugcccagag

SEQ ID NO: 1171131 - RNA, 19 nt, Artificial Sequence
  Description of Artificial Sequence: Synthetic oligonucleotide
uuaacacguggaugagucu

SEQ ID NO: 1171132 - RNA, 19 nt, Artificial Sequence
  Description of Artificial Sequence: Synthetic oligonucleotide
auuaggaaauacacccucu

SEQ ID NO: 1171133 - RNA, 19 nt, Artificial Sequence
  Description of Artificial Sequence: Synthetic oligonucleotide
ugcuaggggugcuuucugc

SEQ ID NO: 1171134 - RNA, 19 nt, Artificial Sequence
  Description of Artificial Sequence: Synthetic oligonucleotide
guuuccuccgauccucuac

SEQ ID NO: 1171135 - RNA, 19 nt, Artificial Sequence
  Description of Artificial Sequence: Synthetic oligonucleotide
agccacgacaacguuaugu

SEQ ID NO: 1171136 - RNA, 19 nt, Artificial Sequence
  Description of Artificial Sequence: Synthetic oligonucleotide
caacguuauguuccugcag

SEQ ID NO: 1171137 - RNA, 19 nt, Artificial Sequence
  Description of Artificial Sequence: Synthetic oligonucleotide
aucaugauucaaggauuuc

SEQ ID NO: 1171138 - RNA, 19 nt, Artificial Sequence
  Description of Artificial Sequence: Synthetic oligonucleotide
gaaacccuucaaagauugg

SEQ ID NO: 1171139 - RNA, 19 nt, Artificial Sequence
  Description of Artificial Sequence: Synthetic oligonucleotide
gcuuucaauuucaugggag

SEQ ID NO: 1171140 - RNA, 19 nt, Artificial Sequence
  Description of Artificial Sequence: Synthetic oligonucleotide
accaggguuaucccauucu

SEQ ID NO: 1171141 - RNA, 19 nt, Artificial Sequence
  Description of Artificial Sequence: Synthetic oligonucleotide
cuggacaggauguuaaaua

SEQ ID NO: 1171142 - RNA, 19 nt, Artificial Sequence
  Description of Artificial Sequence: Synthetic oligonucleotide
uguuuaggagccagacuuu

SEQ ID NO: 1171143 - RNA, 19 nt, Artificial Sequence
  Description of Artificial Sequence: Synthetic oligonucleotide
gaccucgucuaggaaaccc

SEQ ID NO: 1171144 - RNA, 19 nt, Artificial Sequence
  Description of Artificial Sequence: Synthetic oligonucleotide
acccuucaaagauugguuu

SEQ ID NO: 1171145 - RNA, 19 nt, Artificial Sequence
  Description of Artificial Sequence: Synthetic oligonucleotide
uggcuuacuuaugggaugu

SEQ ID NO: 1171146 - RNA, 19 nt, Artificial Sequence
  Description of Artificial Sequence: Synthetic oligonucleotide
uggggcgaucuguaguuug

SEQ ID NO: 1171147 - RNA, 19 nt, Artificial Sequence
  Description of Artificial Sequence: Synthetic oligonucleotide
cagguucuagcaagguuug

SEQ ID NO: 1171148 - RNA, 19 nt, Artificial Sequence
  Description of Artificial Sequence: Synthetic oligonucleotide
acgacaacguuauguuccu

SEQ ID NO: 1171149 - RNA, 19 nt, Artificial Sequence
  Description of Artificial Sequence: Synthetic oligonucleotide
cagucuuguucagaaacug

SEQ ID NO: 1171150 - RNA, 19 nt, Artificial Sequence
  Description of Artificial Sequence: Synthetic oligonucleotide
caguuaucugugguguugc

SEQ ID NO: 1171151 - RNA, 19 nt, Artificial Sequence
  Description of Artificial Sequence: Synthetic oligonucleotide
agaugugacauuaguucca

SEQ ID NO: 1171152 - RNA, 19 nt, Artificial Sequence
  Description of Artificial Sequence: Synthetic oligonucleotide
acguuauguuccugcagca

SEQ ID NO: 1171153 - RNA, 19 nt, Artificial Sequence
  Description of Artificial Sequence: Synthetic oligonucleotide
cuacaaucugcucccuuuc

SEQ ID NO: 1171154 - RNA, 19 nt, Artificial Sequence
  Description of Artificial Sequence: Synthetic oligonucleotide
agagaggugcugcgacuuc

SEQ ID NO: 1171155 - RNA, 19 nt, Artificial Sequence
  Description of Artificial Sequence: Synthetic oligonucleotide
acuggggcgaucuguaguu

SEQ ID NO: 1171156 - RNA, 19 nt, Artificial Sequence
  Description of Artificial Sequence: Synthetic oligonucleotide
uaggggugcuuucugcauc

SEQ ID NO: 1171157 - RNA, 19 nt, Artificial Sequence
  Description of Artificial Sequence: Synthetic oligonucleotide
gggauguaagucaggaacc

SEQ ID NO: 1171158 - RNA, 19 nt, Artificial Sequence
  Description of Artificial Sequence: Synthetic oligonucleotide
agggugggugcccucagca

SEQ ID NO: 1171159 - RNA, 19 nt, Artificial Sequence
  Description of Artificial Sequence: Synthetic oligonucleotide
cucaauccuggcugagcgc

SEQ ID NO: 1171160 - RNA, 19 nt, Artificial Sequence
  Description of Artificial Sequence: Synthetic oligonucleotide
aggugccuuuacuugccag

SEQ ID NO: 1171161 - RNA, 19 nt, Artificial Sequence
  Description of Artificial Sequence: Synthetic oligonucleotide
cggaagacaaaauacucug

SEQ ID NO: 1171162 - RNA, 19 nt, Artificial Sequence
  Description of Artificial Sequence: Synthetic oligonucleotide
auuggugccgccccauuuu

SEQ ID NO: 1171163 - RNA, 19 nt, Artificial Sequence
  Description of Artificial Sequence: Synthetic oligonucleotide
cauuacuuccucagaugca

SEQ ID NO: 1171164 - RNA, 19 nt, Artificial Sequence
  Description of Artificial Sequence: Synthetic oligonucleotide
gguuauaggagccaguguu

SEQ ID NO: 1171165 - RNA, 19 nt, Artificial Sequence
  Description of Artificial Sequence: Synthetic oligonucleotide
uguugaccucgucuaggaa

SEQ ID NO: 1171166 - RNA, 19 nt, Artificial Sequence
  Description of Artificial Sequence: Synthetic oligonucleotide
uuguuagcucugucuuuca

SEQ ID NO: 1171167 - RNA, 19 nt, Artificial Sequence
  Description of Artificial Sequence: Synthetic oligonucleotide
cuucaugucuugaacuucu

SEQ ID NO: 1171168 - RNA, 19 nt, Artificial Sequence
  Description of Artificial Sequence: Synthetic oligonucleotide
ugcaagcccugaagaaaac

SEQ ID NO: 1171169 - RNA, 19 nt, Artificial Sequence
  Description of Artificial Sequence: Synthetic oligonucleotide
uccauuccuacuugugguu

SEQ ID NO: 1171170 - RNA, 19 nt, Artificial Sequence
  Description of Artificial Sequence: Synthetic oligonucleotide
uuucugggguuuugguuau

SEQ ID NO: 1171171 - RNA, 19 nt, Artificial Sequence
  Description of Artificial Sequence: Synthetic oligonucleotide
aguuaucugugguguugcu

SEQ ID NO: 1171172 - RNA, 19 nt, Artificial Sequence
  Description of Artificial Sequence: Synthetic oligonucleotide
gcugcgacuucacugcuug

SEQ ID NO: 1171173 - RNA, 19 nt, Artificial Sequence
  Description of Artificial Sequence: Synthetic oligonucleotide
cagacccagaacuuggaaa

SEQ ID NO: 1171174 - RNA, 19 nt, Artificial Sequence
  Description of Artificial Sequence: Synthetic oligonucleotide
uucaggccaucuugacaag

SEQ ID NO: 1171175 - RNA, 19 nt, Artificial Sequence
  Description of Artificial Sequence: Synthetic oligonucleotide
gaagccacgacaacguuau

SEQ ID NO: 1171176 - RNA, 19 nt, Artificial Sequence
  Description of Artificial Sequence: Synthetic oligonucleotide
uccuccgauccucuacuuc

SEQ ID NO: 1171177 - RNA, 19 nt, Artificial Sequence
  Description of Artificial Sequence: Synthetic oligonucleotide
agcgggucaccgcuugcuc

SEQ ID NO: 1171178 - RNA, 19 nt, Artificial Sequence
  Description of Artificial Sequence: Synthetic oligonucleotide
gggagugauaagcuucaug

SEQ ID NO: 1171179 - RNA, 19 nt, Artificial Sequence
  Description of Artificial Sequence: Synthetic oligonucleotide
cucgucuaggaaacccuuc

SEQ ID NO: 1171180 - RNA, 19 nt, Artificial Sequence
  Description of Artificial Sequence: Synthetic oligonucleotide
acaagggcauuucuuucuu

SEQ ID NO: 1171181 - RNA, 19 nt, Artificial Sequence
  Description of Artificial Sequence: Synthetic oligonucleotide
auguuaccguuuuauuguu

SEQ ID NO: 1171182 - RNA, 19 nt, Artificial Sequence
  Description of Artificial Sequence: Synthetic oligonucleotide
gaagacacggcugcccaga

SEQ ID NO: 1171183 - RNA, 19 nt, Artificial Sequence
  Description of Artificial Sequence: Synthetic oligonucleotide
acaguacgguuaacugagc

SEQ ID NO: 1171184 - RNA, 19 nt, Artificial Sequence
  Description of Artificial Sequence: Synthetic oligonucleotide
guucuugcauuggugccgc

SEQ ID NO: 1171185 - RNA, 19 nt, Artificial Sequence
  Description of Artificial Sequence: Synthetic oligonucleotide
gcucauuaagagaagccac

SEQ ID NO: 1171186 - RNA, 19 nt, Artificial Sequence
  Description of Artificial Sequence: Synthetic oligonucleotide
uuuggcgcacauucucuuu

SEQ ID NO: 1171187 - RNA, 19 nt, Artificial Sequence
  Description of Artificial Sequence: Synthetic oligonucleotide
ucauggugucucagugaac

SEQ ID NO: 1171188 - RNA, 19 nt, Artificial Sequence
  Description of Artificial Sequence: Synthetic oligonucleotide
gccuuuacuugccagcaac

SEQ ID NO: 1171189 - RNA, 19 nt, Artificial Sequence
  Description of Artificial Sequence: Synthetic oligonucleotide
gauaccaggguuaucccau

SEQ ID NO: 1171190 - RNA, 19 nt, Artificial Sequence
  Description of Artificial Sequence: Synthetic oligonucleotide
cuggguagcgggucaccgc

SEQ ID NO: 1171191 - RNA, 19 nt, Artificial Sequence
  Description of Artificial Sequence: Synthetic oligonucleotide
augggauguaagucaggaa

SEQ ID NO: 1171192 - RNA, 19 nt, Artificial Sequence
  Description of Artificial Sequence: Synthetic oligonucleotide
uuucaugggagggcgcuua

SEQ ID NO: 1171193 - RNA, 19 nt, Artificial Sequence
  Description of Artificial Sequence: Synthetic oligonucleotide
ugggacuggggcgaucugu

SEQ ID NO: 1171194 - RNA, 19 nt, Artificial Sequence
  Description of Artificial Sequence: Synthetic oligonucleotide
cuuucuugcaagcccugaa

SEQ ID NO: 1171195 - RNA, 19 nt, Artificial Sequence
  Description of Artificial Sequence: Synthetic oligonucleotide
acgguuaacugagcuuuug

SEQ ID NO: 1171196 - RNA, 19 nt, Artificial Sequence
  Description of Artificial Sequence: Synthetic oligonucleotide
ucacgggagugauaagcuu

SEQ ID NO: 1171197 - RNA, 19 nt, Artificial Sequence
  Description of Artificial Sequence: Synthetic oligonucleotide
uggugucucagugaacauu

SEQ ID NO: 1171198 - RNA, 19 nt, Artificial Sequence
  Description of Artificial Sequence: Synthetic oligonucleotide
uagagaggugcugcgacuu

SEQ ID NO: 1171199 - RNA, 19 nt, Artificial Sequence
  Description of Artificial Sequence: Synthetic oligonucleotide
ccucacgggagugauaagc

SEQ ID NO: 1171200 - RNA, 19 nt, Artificial Sequence
  Description of Artificial Sequence: Synthetic oligonucleotide
uggcgcacauucucuuugu

SEQ ID NO: 1171201 - RNA, 19 nt, Artificial Sequence
  Description of Artificial Sequence: Synthetic oligonucleotide
agugcugauuuguguguuu

SEQ ID NO: 1171202 - RNA, 19 nt, Artificial Sequence
  Description of Artificial Sequence: Synthetic oligonucleotide
cuagcaagguuuggcgcac

SEQ ID NO: 1171203 - RNA, 19 nt, Artificial Sequence
  Description of Artificial Sequence: Synthetic oligonucleotide
gcucaagauuuguuuagga

SEQ ID NO: 1171204 - RNA, 19 nt, Artificial Sequence
  Description of Artificial Sequence: Synthetic oligonucleotide
cuugugggacauacaaucu

SEQ ID NO: 1171205 - RNA, 19 nt, Artificial Sequence
  Description of Artificial Sequence: Synthetic oligonucleotide
cuccgauccucuacuucug

SEQ ID NO: 1171206 - RNA, 19 nt, Artificial Sequence
  Description of Artificial Sequence: Synthetic oligonucleotide
ugcaguuaucugugguguu

SEQ ID NO: 1171207 - RNA, 19 nt, Artificial Sequence
  Description of Artificial Sequence: Synthetic oligonucleotide
agaagccacgacaacguua

SEQ ID NO: 1171208 - RNA, 19 nt, Artificial Sequence
  Description of Artificial Sequence: Synthetic oligonucleotide
uacaguccaauagcaucaa

SEQ ID NO: 1171209 - RNA, 19 nt, Artificial Sequence
  Description of Artificial Sequence: Synthetic oligonucleotide
guacgguuaacugagcuuu

SEQ ID NO: 1171210 - RNA, 19 nt, Artificial Sequence
  Description of Artificial Sequence: Synthetic oligonucleotide
uacgguuaacugagcuuuu

SEQ ID NO: 1171211 - RNA, 19 nt, Artificial Sequence
  Description of Artificial Sequence: Synthetic oligonucleotide
agcaagguuuggcgcacau

SEQ ID NO: 1171212 - RNA, 19 nt, Artificial Sequence
  Description of Artificial Sequence: Synthetic oligonucleotide
agugagccucagacacucc

SEQ ID NO: 1171213 - RNA, 19 nt, Artificial Sequence
  Description of Artificial Sequence: Synthetic oligonucleotide
cucacgggagugauaagcu

SEQ ID NO: 1171214 - RNA, 19 nt, Artificial Sequence
  Description of Artificial Sequence: Synthetic oligonucleotide
accucgucuaggaaacccu

SEQ ID NO: 1171215 - RNA, 19 nt, Artificial Sequence
  Description of Artificial Sequence: Synthetic oligonucleotide
uucaugggagggcgcuuau

SEQ ID NO: 1171216 - RNA, 19 nt, Artificial Sequence
  Description of Artificial Sequence: Synthetic oligonucleotide
uuuugggagcagucuuguu

SEQ ID NO: 1171217 - RNA, 19 nt, Artificial Sequence
  Description of Artificial Sequence: Synthetic oligonucleotide
gcaagcccugaagaaaacc

SEQ ID NO: 1171218 - RNA, 19 nt, Artificial Sequence
  Description of Artificial Sequence: Synthetic oligonucleotide
ucuuaugcuaggggugcuu

SEQ ID NO: 1171219 - RNA, 19 nt, Artificial Sequence
  Description of Artificial Sequence: Synthetic oligonucleotide
gguagcgggucaccgcuug

SEQ ID NO: 1171220 - RNA, 19 nt, Artificial Sequence
  Description of Artificial Sequence: Synthetic oligonucleotide
caugaaccaaaaguuuucu

SEQ ID NO: 1171221 - RNA, 19 nt, Artificial Sequence
  Description of Artificial Sequence: Synthetic oligonucleotide
aagccacgacaacguuaug

SEQ ID NO: 1171222 - RNA, 19 nt, Artificial Sequence
  Description of Artificial Sequence: Synthetic oligonucleotide
cggaaugcuggacaggaug

SEQ ID NO: 1171223 - RNA, 19 nt, Artificial Sequence
  Description of Artificial Sequence: Synthetic oligonucleotide
uagcgggucaccgcuugcu

SEQ ID NO: 1171224 - RNA, 19 nt, Artificial Sequence
  Description of Artificial Sequence: Synthetic oligonucleotide
cuuucagaacaguacgguu

SEQ ID NO: 1171225 - RNA, 19 nt, Artificial Sequence
  Description of Artificial Sequence: Synthetic oligonucleotide
aggaaacccuucaaagauu

SEQ ID NO: 1171226 - RNA, 19 nt, Artificial Sequence
  Description of Artificial Sequence: Synthetic oligonucleotide
ugagcgccucacgggagug

SEQ ID NO: 1171227 - RNA, 19 nt, Artificial Sequence
  Description of Artificial Sequence: Synthetic oligonucleotide
gguguugcuacaaucugcu

SEQ ID NO: 1171228 - RNA, 19 nt, Artificial Sequence
  Description of Artificial Sequence: Synthetic oligonucleotide
agacacggcugcccagagu

SEQ ID NO: 1171229 - RNA, 19 nt, Artificial Sequence
  Description of Artificial Sequence: Synthetic oligonucleotide
ugaccucgucuaggaaacc

SEQ ID NO: 1171230 - RNA, 19 nt, Artificial Sequence
  Description of Artificial Sequence: Synthetic oligonucleotide
guagcgggucaccgcuugc

SEQ ID NO: 1171231 - RNA, 19 nt, Artificial Sequence
  Description of Artificial Sequence: Synthetic oligonucleotide
caguacgguuaacugagcu

SEQ ID NO: 1171232 - RNA, 19 nt, Artificial Sequence
  Description of Artificial Sequence: Synthetic oligonucleotide
acauacaaucugagaguaa

SEQ ID NO: 1171233 - RNA, 19 nt, Artificial Sequence
  Description of Artificial Sequence: Synthetic oligonucleotide
auccucuacuucugucuuu

SEQ ID NO: 1171234 - RNA, 19 nt, Artificial Sequence
  Description of Artificial Sequence: Synthetic oligonucleotide
ugcugcgacuucacugcuu

SEQ ID NO: 1171235 - RNA, 19 nt, Artificial Sequence
  Description of Artificial Sequence: Synthetic oligonucleotide
guagagaggugcugcgacu

SEQ ID NO: 1171236 - RNA, 19 nt, Artificial Sequence
  Description of Artificial Sequence: Synthetic oligonucleotide
cgguuaacugagcuuuugc

SEQ ID NO: 1171237 - RNA, 19 nt, Artificial Sequence
  Description of Artificial Sequence: Synthetic oligonucleotide
uucuugcauuggugccgcc

SEQ ID NO: 1171238 - RNA, 19 nt, Artificial Sequence
  Description of Artificial Sequence: Synthetic oligonucleotide
gcuuuugguuggaagaugu

SEQ ID NO: 1171239 - RNA, 19 nt, Artificial Sequence
  Description of Artificial Sequence: Synthetic oligonucleotide
ggggcuccauuccuacuug

SEQ ID NO: 1171240 - RNA, 19 nt, Artificial Sequence
  Description of Artificial Sequence: Synthetic oligonucleotide
gcuuacuuaugggauguaa

SEQ ID NO: 1171241 - RNA, 19 nt, Artificial Sequence
  Description of Artificial Sequence: Synthetic oligonucleotide
ggacuggggcgaucuguag

SEQ ID NO: 1171242 - RNA, 19 nt, Artificial Sequence
  Description of Artificial Sequence: Synthetic oligonucleotide
ccagguucuagcaagguuu

SEQ ID NO: 1171243 - RNA, 19 nt, Artificial Sequence
  Description of Artificial Sequence: Synthetic oligonucleotide
acacggcugcccagagucg

SEQ ID NO: 1171244 - RNA, 19 nt, Artificial Sequence
  Description of Artificial Sequence: Synthetic oligonucleotide
guuauaggagccaguguuu

SEQ ID NO: 1171245 - RNA, 19 nt, Artificial Sequence
  Description of Artificial Sequence: Synthetic oligonucleotide
ggaaugcuggacaggaugu

SEQ ID NO: 1171246 - RNA, 19 nt, Artificial Sequence
  Description of Artificial Sequence: Synthetic oligonucleotide
uuccuccgauccucuacuu

SEQ ID NO: 1171247 - RNA, 19 nt, Artificial Sequence
  Description of Artificial Sequence: Synthetic oligonucleotide
guaagucaggaaccggcuu

SEQ ID NO: 1171248 - RNA, 19 nt, Artificial Sequence
  Description of Artificial Sequence: Synthetic oligonucleotide
ccauucuucugcaguuauc

SEQ ID NO: 1171249 - RNA, 19 nt, Artificial Sequence
  Description of Artificial Sequence: Synthetic oligonucleotide
ccacgacaacguuauguuc

SEQ ID NO: 1171250 - RNA, 19 nt, Artificial Sequence
  Description of Artificial Sequence: Synthetic oligonucleotide
cuguagagaggugcugcga

SEQ ID NO: 1171251 - RNA, 19 nt, Artificial Sequence
  Description of Artificial Sequence: Synthetic oligonucleotide
auuucaugggagggcgcuu

SEQ ID NO: 1171252 - RNA, 19 nt, Artificial Sequence
  Description of Artificial Sequence: Synthetic oligonucleotide
ucaugggagggcgcuuaua

SEQ ID NO: 1171253 - RNA, 19 nt, Artificial Sequence
  Description of Artificial Sequence: Synthetic oligonucleotide
aaccggcuucccagguucu

SEQ ID NO: 1171254 - RNA, 19 nt, Artificial Sequence
  Description of Artificial Sequence: Synthetic oligonucleotide
ccggaagacaaaauacucu

SEQ ID NO: 1171255 - RNA, 19 nt, Artificial Sequence
  Description of Artificial Sequence: Synthetic oligonucleotide
guuuggcgcacauucucuu

SEQ ID NO: 1171256 - RNA, 19 nt, Artificial Sequence
  Description of Artificial Sequence: Synthetic oligonucleotide
uagcaagguuuggcgcaca

SEQ ID NO: 1171257 - RNA, 19 nt, Artificial Sequence
  Description of Artificial Sequence: Synthetic oligonucleotide
ccaguguuuggcuuacuua

SEQ ID NO: 1171258 - RNA, 19 nt, Artificial Sequence
  Description of Artificial Sequence: Synthetic oligonucleotide
guuuaggagccagacuuuu

SEQ ID NO: 1171259 - RNA, 19 nt, Artificial Sequence
  Description of Artificial Sequence: Synthetic oligonucleotide
agcgccucacgggagugau

SEQ ID NO: 1171260 - RNA, 19 nt, Artificial Sequence
  Description of Artificial Sequence: Synthetic oligonucleotide
cuuuacuugccagcaacuu

SEQ ID NO: 1171261 - RNA, 19 nt, Artificial Sequence
  Description of Artificial Sequence: Synthetic oligonucleotide
gccuuuagauuucugccau

SEQ ID NO: 1171262 - RNA, 19 nt, Artificial Sequence
  Description of Artificial Sequence: Synthetic oligonucleotide
gacacuccgucagaguguu

SEQ ID NO: 1171263 - RNA, 19 nt, Artificial Sequence
  Description of Artificial Sequence: Synthetic oligonucleotide
ccuccgauccucuacuucu

SEQ ID NO: 1171264 - RNA, 19 nt, Artificial Sequence
  Description of Artificial Sequence: Synthetic oligonucleotide
ccgauccucuacuucuguc

SEQ ID NO: 1171265 - RNA, 19 nt, Artificial Sequence
  Description of Artificial Sequence: Synthetic oligonucleotide
ggcgaucuguaguuugaua

SEQ ID NO: 1171266 - RNA, 19 nt, Artificial Sequence
  Description of Artificial Sequence: Synthetic oligonucleotide
ggaagauguuaccguuuua

SEQ ID NO: 1171267 - RNA, 19 nt, Artificial Sequence
  Description of Artificial Sequence: Synthetic oligonucleotide
gccacgacaacguuauguu

SEQ ID NO: 1171268 - RNA, 19 nt, Artificial Sequence
  Description of Artificial Sequence: Synthetic oligonucleotide
ggucaccgcuugcucaauc

SEQ ID NO: 1171269 - RNA, 19 nt, Artificial Sequence
  Description of Artificial Sequence: Synthetic oligonucleotide
cuuuugguuggaagauguu

SEQ ID NO: 1171270 - RNA, 19 nt, Artificial Sequence
  Description of Artificial Sequence: Synthetic oligonucleotide
ggggcgaucuguaguuuga

SEQ ID NO: 1171271 - RNA, 19 nt, Artificial Sequence
  Description of Artificial Sequence: Synthetic oligonucleotide
gguuuggcgcacauucucu

SEQ ID NO: 1171272 - RNA, 19 nt, Artificial Sequence
  Description of Artificial Sequence: Synthetic oligonucleotide
accuagugucacagguaaa

SEQ ID NO: 1171273 - RNA, 19 nt, Artificial Sequence
  Description of Artificial Sequence: Synthetic oligonucleotide
cuuaugcuaggggugcuuu

SEQ ID NO: 1171274 - RNA, 19 nt, Artificial Sequence
  Description of Artificial Sequence: Synthetic oligonucleotide
gcgacuucacugcuugagu

SEQ ID NO: 1171275 - RNA, 19 nt, Artificial Sequence
  Description of Artificial Sequence: Synthetic oligonucleotide
gcggaauguucagaaucuc

SEQ ID NO: 1171276 - RNA, 19 nt, Artificial Sequence
  Description of Artificial Sequence: Synthetic oligonucleotide
ccuuuacuugccagcaacu

SEQ ID NO: 1171277 - RNA, 19 nt, Artificial Sequence
  Description of Artificial Sequence: Synthetic oligonucleotide
cugcgacuucacugcuuga

SEQ ID NO: 1171278 - RNA, 19 nt, Artificial Sequence
  Description of Artificial Sequence: Synthetic oligonucleotide
cauuggugccgccccauuu

SEQ ID NO: 1171279 - RNA, 19 nt, Artificial Sequence
  Description of Artificial Sequence: Synthetic oligonucleotide
gagcgccucacgggaguga

SEQ ID NO: 1171280 - RNA, 19 nt, Artificial Sequence
  Description of Artificial Sequence: Synthetic oligonucleotide
cugagcgccucacgggagu

SEQ ID NO: 1171281 - RNA, 19 nt, Artificial Sequence
  Description of Artificial Sequence: Synthetic oligonucleotide
cccgaggugacagccucug

SEQ ID NO: 1171282 - RNA, 19 nt, Artificial Sequence
  Description of Artificial Sequence: Synthetic oligonucleotide
gccucacgggagugauaag

SEQ ID NO: 1171283 - RNA, 19 nt, Artificial Sequence
  Description of Artificial Sequence: Synthetic oligonucleotide
caauccuggcugagcgccu

SEQ ID NO: 1171284 - RNA, 19 nt, Artificial Sequence
  Description of Artificial Sequence: Synthetic oligonucleotide
gggacuggggcgaucugua

SEQ ID NO: 1171285 - RNA, 19 nt, Artificial Sequence
  Description of Artificial Sequence: Synthetic oligonucleotide
ggagggcgcuuauagcuuu

SEQ ID NO: 1171286 - RNA, 19 nt, Artificial Sequence
  Description of Artificial Sequence: Synthetic oligonucleotide
accggcuucccagguucua

SEQ ID NO: 1171287 - RNA, 19 nt, Artificial Sequence
  Description of Artificial Sequence: Synthetic oligonucleotide
cacggcugcccagagucgu

SEQ ID NO: 1171288 - RNA, 19 nt, Artificial Sequence
  Description of Artificial Sequence: Synthetic oligonucleotide
ggcuagcacuuggggcucc

SEQ ID NO: 1171289 - RNA, 19 nt, Artificial Sequence
  Description of Artificial Sequence: Synthetic oligonucleotide
acacuccgucagaguguug

SEQ ID NO: 1171290 - RNA, 19 nt, Artificial Sequence
  Description of Artificial Sequence: Synthetic oligonucleotide
cgccucacgggagugauaa

SEQ ID NO: 1171291 - RNA, 19 nt, Artificial Sequence
  Description of Artificial Sequence: Synthetic oligonucleotide
gggcuccauuccuacuugu

SEQ ID NO: 1171292 - RNA, 19 nt, Artificial Sequence
  Description of Artificial Sequence: Synthetic oligonucleotide
ggaaccggcuucccagguu

SEQ ID NO: 1171293 - RNA, 19 nt, Artificial Sequence
  Description of Artificial Sequence: Synthetic oligonucleotide
gcuagcacuuggggcucca

SEQ ID NO: 1171294 - RNA, 19 nt, Artificial Sequence
  Description of Artificial Sequence: Synthetic oligonucleotide
ccguuuuauuguucuggau

SEQ ID NO: 1171295 - RNA, 19 nt, Artificial Sequence
  Description of Artificial Sequence: Synthetic oligonucleotide
gagggcgcuuauagcuuuu

SEQ ID NO: 1171296 - RNA, 19 nt, Artificial Sequence
  Description of Artificial Sequence: Synthetic oligonucleotide
gggugggugcccucagcau

SEQ ID NO: 1171297 - RNA, 19 nt, Artificial Sequence
  Description of Artificial Sequence: Synthetic oligonucleotide
cacccucuucagugagccu

SEQ ID NO: 1171298 - RNA, 19 nt, Artificial Sequence
  Description of Artificial Sequence: Synthetic oligonucleotide
ggcuuacuuaugggaugua

SEQ ID NO: 1171299 - RNA, 19 nt, Artificial Sequence
  Description of Artificial Sequence: Synthetic oligonucleotide
ccucgucuaggaaacccuu

SEQ ID NO: 1171300 - RNA, 19 nt, Artificial Sequence
  Description of Artificial Sequence: Synthetic oligonucleotide
cgacaacguuauguuccug

SEQ ID NO: 1171301 - RNA, 19 nt, Artificial Sequence
  Description of Artificial Sequence: Synthetic oligonucleotide
gggcgaucuguaguuugau

SEQ ID NO: 1171302 - RNA, 19 nt, Artificial Sequence
  Description of Artificial Sequence: Synthetic oligonucleotide
gcaagguuuggcgcacauu

SEQ ID NO: 1171303 - RNA, 19 nt, Artificial Sequence
  Description of Artificial Sequence: Synthetic oligonucleotide
cuagcacuuggggcuccau

SEQ ID NO: 1171304 - RNA, 19 nt, Artificial Sequence
  Description of Artificial Sequence: Synthetic oligonucleotide
cuggggcgaucuguaguuu

SEQ ID NO: 1171305 - RNA, 19 nt, Artificial Sequence
  Description of Artificial Sequence: Synthetic oligonucleotide
cguuauguuccugcagcau

SEQ ID NO: 1171306 - RNA, 19 nt, Artificial Sequence
  Description of Artificial Sequence: Synthetic oligonucleotide
ccgucagaguguuguuaau

SEQ ID NO: 1171307 - RNA, 19 nt, Artificial Sequence
  Description of Artificial Sequence: Synthetic oligonucleotide
ccggaaugcuggacaggau

SEQ ID NO: 1171308 - RNA, 19 nt, Artificial Sequence
  Description of Artificial Sequence: Synthetic oligonucleotide
ccgaggugacagccucugu

SEQ ID NO: 1171309 - RNA, 19 nt, Artificial Sequence
  Description of Artificial Sequence: Synthetic oligonucleotide
gggucaccgcuugcucaau

SEQ ID NO: 1171310 - RNA, 19 nt, Artificial Sequence
  Description of Artificial Sequence: Synthetic oligonucleotide
gcgccucacgggagugaua

SEQ ID NO: 1171311 - RNA, 19 nt, Artificial Sequence
  Description of Artificial Sequence: Synthetic oligonucleotide
aaagacaccguccuggucg

SEQ ID NO: 1171312 - RNA, 19 nt, Artificial Sequence
  Description of Artificial Sequence: Synthetic oligonucleotide
gaacauugcucuuucaucg

SEQ ID NO: 1171313 - RNA, 19 nt, Artificial Sequence
  Description of Artificial Sequence: Synthetic oligonucleotide
ugugcauucgaaaaugugc

SEQ ID NO: 1171314 - RNA, 19 nt, Artificial Sequence
  Description of Artificial Sequence: Synthetic oligonucleotide
aauaauggaacggaaacca

SEQ ID NO: 1171315 - RNA, 19 nt, Artificial Sequence
  Description of Artificial Sequence: Synthetic oligonucleotide
uguaaggugacgagcaggg

SEQ ID NO: 1171316 - RNA, 19 nt, Artificial Sequence
  Description of Artificial Sequence: Synthetic oligonucleotide
uguuuccaugcuuugagcg

SEQ ID NO: 1171317 - RNA, 19 nt, Artificial Sequence
  Description of Artificial Sequence: Synthetic oligonucleotide
gaaaccacuaaugagagca

SEQ ID NO: 1171318 - RNA, 19 nt, Artificial Sequence
  Description of Artificial Sequence: Synthetic oligonucleotide
aacggaaaccacuaaugag

SEQ ID NO: 1171319 - RNA, 19 nt, Artificial Sequence
  Description of Artificial Sequence: Synthetic oligonucleotide
uaauucucaugaauguagg

SEQ ID NO: 1171320 - RNA, 19 nt, Artificial Sequence
  Description of Artificial Sequence: Synthetic oligonucleotide
uaccugaguuuucagaacg

SEQ ID NO: 1171321 - RNA, 19 nt, Artificial Sequence
  Description of Artificial Sequence: Synthetic oligonucleotide
uuucccacaaauucaaaga

SEQ ID NO: 1171322 - RNA, 19 nt, Artificial Sequence
  Description of Artificial Sequence: Synthetic oligonucleotide
gacacucagagccaguagg

SEQ ID NO: 1171323 - RNA, 19 nt, Artificial Sequence
  Description of Artificial Sequence: Synthetic oligonucleotide
cuuaaagacaccguccugg

SEQ ID NO: 1171324 - RNA, 19 nt, Artificial Sequence
  Description of Artificial Sequence: Synthetic oligonucleotide
aaacuccuuaaagacaccg

SEQ ID NO: 1171325 - RNA, 19 nt, Artificial Sequence
  Description of Artificial Sequence: Synthetic oligonucleotide
aagaggacgggcuuugcag

SEQ ID NO: 1171326 - RNA, 19 nt, Artificial Sequence
  Description of Artificial Sequence: Synthetic oligonucleotide
gacacuuccacacagcgga

SEQ ID NO: 1171327 - RNA, 19 nt, Artificial Sequence
  Description of Artificial Sequence: Synthetic oligonucleotide
gaaaaugugccaucagaug

SEQ ID NO: 1171328 - RNA, 19 nt, Artificial Sequence
  Description of Artificial Sequence: Synthetic oligonucleotide
ucgaaaaugugccaucaga

SEQ ID NO: 1171329 - RNA, 19 nt, Artificial Sequence
  Description of Artificial Sequence: Synthetic oligonucleotide
aacauugcucuuucaucgg

SEQ ID NO: 1171330 - RNA, 19 nt, Artificial Sequence
  Description of Artificial Sequence: Synthetic oligonucleotide
uaauggaacggaaaccacu

SEQ ID NO: 1171331 - RNA, 19 nt, Artificial Sequence
  Description of Artificial Sequence: Synthetic oligonucleotide
uguagcuaauuuuauuuuc

SEQ ID NO: 1171332 - RNA, 19 nt, Artificial Sequence
  Description of Artificial Sequence: Synthetic oligonucleotide
uccaucauagcgcuugaug

SEQ ID NO: 1171333 - RNA, 19 nt, Artificial Sequence
  Description of Artificial Sequence: Synthetic oligonucleotide
guaggaaagacccugaacu

SEQ ID NO: 1171334 - RNA, 19 nt, Artificial Sequence
  Description of Artificial Sequence: Synthetic oligonucleotide
auagaagauacugugguga

SEQ ID NO: 1171335 - RNA, 19 nt, Artificial Sequence
  Description of Artificial Sequence: Synthetic oligonucleotide
caggcuuaauaauggaacg

SEQ ID NO: 1171336 - RNA, 19 nt, Artificial Sequence
  Description of Artificial Sequence: Synthetic oligonucleotide
ugaauguaggaugugggug

SEQ ID NO: 1171337 - RNA, 19 nt, Artificial Sequence
  Description of Artificial Sequence: Synthetic oligonucleotide
uccacggagcuauagaaga

SEQ ID NO: 1171338 - RNA, 19 nt, Artificial Sequence
  Description of Artificial Sequence: Synthetic oligonucleotide
uucuuuaaaucuuccagau

SEQ ID NO: 1171339 - RNA, 19 nt, Artificial Sequence
  Description of Artificial Sequence: Synthetic oligonucleotide
uauagaagauacuguggug

SEQ ID NO: 1171340 - RNA, 19 nt, Artificial Sequence
  Description of Artificial Sequence: Synthetic oligonucleotide
ucucaugaauguaggaugu

SEQ ID NO: 1171341 - RNA, 19 nt, Artificial Sequence
  Description of Artificial Sequence: Synthetic oligonucleotide
uugucuugaacagauugag

SEQ ID NO: 1171342 - RNA, 19 nt, Artificial Sequence
  Description of Artificial Sequence: Synthetic oligonucleotide
uccuuaaagacaccguccu

SEQ ID NO: 1171343 - RNA, 19 nt, Artificial Sequence
  Description of Artificial Sequence: Synthetic oligonucleotide
aagacccugaacugugcuc

SEQ ID NO: 1171344 - RNA, 19 nt, Artificial Sequence
  Description of Artificial Sequence: Synthetic oligonucleotide
aaacuucaggaacauugcu

SEQ ID NO: 1171345 - RNA, 19 nt, Artificial Sequence
  Description of Artificial Sequence: Synthetic oligonucleotide
ucggaggacacuuuucuug

SEQ ID NO: 1171346 - RNA, 19 nt, Artificial Sequence
  Description of Artificial Sequence: Synthetic oligonucleotide
ucggaagccagaauauccc

SEQ ID NO: 1171347 - RNA, 19 nt, Artificial Sequence
  Description of Artificial Sequence: Synthetic oligonucleotide
cagaauaucccagagccag

SEQ ID NO: 1171348 - RNA, 19 nt, Artificial Sequence
  Description of Artificial Sequence: Synthetic oligonucleotide
ucaaagccuguguucaugc

SEQ ID NO: 1171349 - RNA, 19 nt, Artificial Sequence
  Description of Artificial Sequence: Synthetic oligonucleotide
uguaggaaagacccugaac

SEQ ID NO: 1171350 - RNA, 19 nt, Artificial Sequence
  Description of Artificial Sequence: Synthetic oligonucleotide
agcgcuguagcccuaagcu

SEQ ID NO: 1171351 - RNA, 19 nt, Artificial Sequence
  Description of Artificial Sequence: Synthetic oligonucleotide
ucaucgggugugaagucgg

SEQ ID NO: 1171352 - RNA, 19 nt, Artificial Sequence
  Description of Artificial Sequence: Synthetic oligonucleotide
ucuuucaucgggugugaag

SEQ ID NO: 1171353 - RNA, 19 nt, Artificial Sequence
  Description of Artificial Sequence: Synthetic oligonucleotide
uucuggguacuccagaaau

SEQ ID NO: 1171354 - RNA, 19 nt, Artificial Sequence
  Description of Artificial Sequence: Synthetic oligonucleotide
gaagucggaagccagaaua

SEQ ID NO: 1171355 - RNA, 19 nt, Artificial Sequence
  Description of Artificial Sequence: Synthetic oligonucleotide
ugauugccugggaagaggc

SEQ ID NO: 1171356 - RNA, 19 nt, Artificial Sequence
  Description of Artificial Sequence: Synthetic oligonucleotide
ggagcuauagaagauacug

SEQ ID NO: 1171357 - RNA, 19 nt, Artificial Sequence
  Description of Artificial Sequence: Synthetic oligonucleotide
gcuaggagagcucaaagcc

SEQ ID NO: 1171358 - RNA, 19 nt, Artificial Sequence
  Description of Artificial Sequence: Synthetic oligonucleotide
gauguagcuaauuuuauuu

SEQ ID NO: 1171359 - RNA, 19 nt, Artificial Sequence
  Description of Artificial Sequence: Synthetic oligonucleotide
cauagcgcaguuucucucg

SEQ ID NO: 1171360 - RNA, 19 nt, Artificial Sequence
  Description of Artificial Sequence: Synthetic oligonucleotide
agcgaugucuccaucauag

SEQ ID NO: 1171361 - RNA, 19 nt, Artificial Sequence
  Description of Artificial Sequence: Synthetic oligonucleotide
ugcauagaggcuuggcgag

SEQ ID NO: 1171362 - RNA, 19 nt, Artificial Sequence
  Description of Artificial Sequence: Synthetic oligonucleotide
agguaauucucaugaaugu

SEQ ID NO: 1171363 - RNA, 19 nt, Artificial Sequence
  Description of Artificial Sequence: Synthetic oligonucleotide
acaccguccuggucgaugc

SEQ ID NO: 1171364 - RNA, 19 nt, Artificial Sequence
  Description of Artificial Sequence: Synthetic oligonucleotide
ucuaagcuaggacaccagu

SEQ ID NO: 1171365 - RNA, 19 nt, Artificial Sequence
  Description of Artificial Sequence: Synthetic oligonucleotide
ucgggugugaagucggaag

SEQ ID NO: 1171366 - RNA, 19 nt, Artificial Sequence
  Description of Artificial Sequence: Synthetic oligonucleotide
uguggcucccaugaaagcc

SEQ ID NO: 1171367 - RNA, 19 nt, Artificial Sequence
  Description of Artificial Sequence: Synthetic oligonucleotide
aguuucucuucuaagcuag

SEQ ID NO: 1171368 - RNA, 19 nt, Artificial Sequence
  Description of Artificial Sequence: Synthetic oligonucleotide
gaacagauugagugcuggg

SEQ ID NO: 1171369 - RNA, 19 nt, Artificial Sequence
  Description of Artificial Sequence: Synthetic oligonucleotide
ugacgagcagggcagacac

SEQ ID NO: 1171370 - RNA, 19 nt, Artificial Sequence
  Description of Artificial Sequence: Synthetic oligonucleotide
uaggcgaauccuaggagug

SEQ ID NO: 1171371 - RNA, 19 nt, Artificial Sequence
  Description of Artificial Sequence: Synthetic oligonucleotide
agacccugaacugugcucg

SEQ ID NO: 1171372 - RNA, 19 nt, Artificial Sequence
  Description of Artificial Sequence: Synthetic oligonucleotide
uguguguacucagagggca

SEQ ID NO: 1171373 - RNA, 19 nt, Artificial Sequence
  Description of Artificial Sequence: Synthetic oligonucleotide
cacgagcuggguuugauug

SEQ ID NO: 1171374 - RNA, 19 nt, Artificial Sequence
  Description of Artificial Sequence: Synthetic oligonucleotide
acggaaaccacuaaugaga

SEQ ID NO: 1171375 - RNA, 19 nt, Artificial Sequence
  Description of Artificial Sequence: Synthetic oligonucleotide
acuccugugcaagaggacg

SEQ ID NO: 1171376 - RNA, 19 nt, Artificial Sequence
  Description of Artificial Sequence: Synthetic oligonucleotide
aggacaccaguacccaggc

SEQ ID NO: 1171377 - RNA, 19 nt, Artificial Sequence
  Description of Artificial Sequence: Synthetic oligonucleotide
uucaucgggugugaagucg

SEQ ID NO: 1171378 - RNA, 19 nt, Artificial Sequence
  Description of Artificial Sequence: Synthetic oligonucleotide
ugaaagccuccauaguaca

SEQ ID NO: 1171379 - RNA, 19 nt, Artificial Sequence
  Description of Artificial Sequence: Synthetic oligonucleotide
uccggaaccaguucauggc

SEQ ID NO: 1171380 - RNA, 19 nt, Artificial Sequence
  Description of Artificial Sequence: Synthetic oligonucleotide
agaugagacgcugaagcuc

SEQ ID NO: 1171381 - RNA, 19 nt, Artificial Sequence
  Description of Artificial Sequence: Synthetic oligonucleotide
uacucagagggcaaaggaa

SEQ ID NO: 1171382 - RNA, 19 nt, Artificial Sequence
  Description of Artificial Sequence: Synthetic oligonucleotide
caugcuuugagcgcuguag

SEQ ID NO: 1171383 - RNA, 19 nt, Artificial Sequence
  Description of Artificial Sequence: Synthetic oligonucleotide
gacucuguggcucccauga

SEQ ID NO: 1171384 - RNA, 19 nt, Artificial Sequence
  Description of Artificial Sequence: Synthetic oligonucleotide
gugcauucgaaaaugugcc

SEQ ID NO: 1171385 - RNA, 19 nt, Artificial Sequence
  Description of Artificial Sequence: Synthetic oligonucleotide
acuaaugagagcagcuguc

SEQ ID NO: 1171386 - RNA, 19 nt, Artificial Sequence
  Description of Artificial Sequence: Synthetic oligonucleotide
uugauuugcgugugcauuc

SEQ ID NO: 1171387 - RNA, 19 nt, Artificial Sequence
  Description of Artificial Sequence: Synthetic oligonucleotide
aggcuuaauaauggaacgg

SEQ ID NO: 1171388 - RNA, 19 nt, Artificial Sequence
  Description of Artificial Sequence: Synthetic oligonucleotide
uccagauccaucucagcgu

SEQ ID NO: 1171389 - RNA, 19 nt, Artificial Sequence
  Description of Artificial Sequence: Synthetic oligonucleotide
gguguuuccaugcuuugag

SEQ ID NO: 1171390 - RNA, 19 nt, Artificial Sequence
  Description of Artificial Sequence: Synthetic oligonucleotide
cuccggaaccaguucaugg

SEQ ID NO: 1171391 - RNA, 19 nt, Artificial Sequence
  Description of Artificial Sequence: Synthetic oligonucleotide
aacacccucuugaugaucu

SEQ ID NO: 1171392 - RNA, 19 nt, Artificial Sequence
  Description of Artificial Sequence: Synthetic oligonucleotide
cucugcaaucacuaggcug

SEQ ID NO: 1171393 - RNA, 19 nt, Artificial Sequence
  Description of Artificial Sequence: Synthetic oligonucleotide
ugaacugugcucggcagcc

SEQ ID NO: 1171394 - RNA, 19 nt, Artificial Sequence
  Description of Artificial Sequence: Synthetic oligonucleotide
augcccaagcaucuggcuc

SEQ ID NO: 1171395 - RNA, 19 nt, Artificial Sequence
  Description of Artificial Sequence: Synthetic oligonucleotide
uuaaagacaccguccuggu

SEQ ID NO: 1171396 - RNA, 19 nt, Artificial Sequence
  Description of Artificial Sequence: Synthetic oligonucleotide
gguuugauugccugggaag

SEQ ID NO: 1171397 - RNA, 19 nt, Artificial Sequence
  Description of Artificial Sequence: Synthetic oligonucleotide
auugagugcugggucaaac

SEQ ID NO: 1171398 - RNA, 19 nt, Artificial Sequence
  Description of Artificial Sequence: Synthetic oligonucleotide
auugcucuuucaucgggug

SEQ ID NO: 1171399 - RNA, 19 nt, Artificial Sequence
  Description of Artificial Sequence: Synthetic oligonucleotide
acgagcuggguuugauugc

SEQ ID NO: 1171400 - RNA, 19 nt, Artificial Sequence
  Description of Artificial Sequence: Synthetic oligonucleotide
uuugcgugugcauucgaaa

SEQ ID NO: 1171401 - RNA, 19 nt, Artificial Sequence
  Description of Artificial Sequence: Synthetic oligonucleotide
agugaugggagcucaucca

SEQ ID NO: 1171402 - RNA, 19 nt, Artificial Sequence
  Description of Artificial Sequence: Synthetic oligonucleotide
uuugauuugcgugugcauu

SEQ ID NO: 1171403 - RNA, 19 nt, Artificial Sequence
  Description of Artificial Sequence: Synthetic oligonucleotide
uuuucccagcaucuuuccc

SEQ ID NO: 1171404 - RNA, 19 nt, Artificial Sequence
  Description of Artificial Sequence: Synthetic oligonucleotide
aauggaacggaaaccacua

SEQ ID NO: 1171405 - RNA, 19 nt, Artificial Sequence
  Description of Artificial Sequence: Synthetic oligonucleotide
uuggcgaggccuuaccuga

SEQ ID NO: 1171406 - RNA, 19 nt, Artificial Sequence
  Description of Artificial Sequence: Synthetic oligonucleotide
ugauuugcgugugcauucg

SEQ ID NO: 1171407 - RNA, 19 nt, Artificial Sequence
  Description of Artificial Sequence: Synthetic oligonucleotide
ucagaacggaaggaggagc

SEQ ID NO: 1171408 - RNA, 19 nt, Artificial Sequence
  Description of Artificial Sequence: Synthetic oligonucleotide
gugaugcccaagcaucugg

SEQ ID NO: 1171409 - RNA, 19 nt, Artificial Sequence
  Description of Artificial Sequence: Synthetic oligonucleotide
agacgcugaagcucagggg

SEQ ID NO: 1171410 - RNA, 19 nt, Artificial Sequence
  Description of Artificial Sequence: Synthetic oligonucleotide
auaauggaacggaaaccac

SEQ ID NO: 1171411 - RNA, 19 nt, Artificial Sequence
  Description of Artificial Sequence: Synthetic oligonucleotide
gaagaaguaggcagacgcc

SEQ ID NO: 1171412 - RNA, 19 nt, Artificial Sequence
  Description of Artificial Sequence: Synthetic oligonucleotide
acggagcuauagaagauac

SEQ ID NO: 1171413 - RNA, 19 nt, Artificial Sequence
  Description of Artificial Sequence: Synthetic oligonucleotide
aauguaggaugugggugag

SEQ ID NO: 1171414 - RNA, 19 nt, Artificial Sequence
  Description of Artificial Sequence: Synthetic oligonucleotide
gaaauggggaagcucucca

SEQ ID NO: 1171415 - RNA, 19 nt, Artificial Sequence
  Description of Artificial Sequence: Synthetic oligonucleotide
cuauagaagauacuguggu

SEQ ID NO: 1171416 - RNA, 19 nt, Artificial Sequence
  Description of Artificial Sequence: Synthetic oligonucleotide
agggguagagccucucauc

SEQ ID NO: 1171417 - RNA, 19 nt, Artificial Sequence
  Description of Artificial Sequence: Synthetic oligonucleotide
augacgucuucaucguaag

SEQ ID NO: 1171418 - RNA, 19 nt, Artificial Sequence
  Description of Artificial Sequence: Synthetic oligonucleotide
uugcgugugcauucgaaaa

SEQ ID NO: 1171419 - RNA, 19 nt, Artificial Sequence
  Description of Artificial Sequence: Synthetic oligonucleotide
agguaggcgaauccuagga

SEQ ID NO: 1171420 - RNA, 19 nt, Artificial Sequence
  Description of Artificial Sequence: Synthetic oligonucleotide
uucagaacggaaggaggag

SEQ ID NO: 1171421 - RNA, 19 nt, Artificial Sequence
  Description of Artificial Sequence: Synthetic oligonucleotide
caugaaagccuccauagua

SEQ ID NO: 1171422 - RNA, 19 nt, Artificial Sequence
  Description of Artificial Sequence: Synthetic oligonucleotide
augucuccaucauagcgcu

SEQ ID NO: 1171423 - RNA, 19 nt, Artificial Sequence
  Description of Artificial Sequence: Synthetic oligonucleotide
guagcccuaagcuggcucc

SEQ ID NO: 1171424 - RNA, 19 nt, Artificial Sequence
  Description of Artificial Sequence: Synthetic oligonucleotide
auguagcuaauuuuauuuu

SEQ ID NO: 1171425 - RNA, 19 nt, Artificial Sequence
  Description of Artificial Sequence: Synthetic oligonucleotide
gcuauagaagauacugugg

SEQ ID NO: 1171426 - RNA, 19 nt, Artificial Sequence
  Description of Artificial Sequence: Synthetic oligonucleotide
auagcgcaguuucucucgg

SEQ ID NO: 1171427 - RNA, 19 nt, Artificial Sequence
  Description of Artificial Sequence: Synthetic oligonucleotide
uaagcuggcuccacagagu

SEQ ID NO: 1171428 - RNA, 19 nt, Artificial Sequence
  Description of Artificial Sequence: Synthetic oligonucleotide
uuuugauuugcgugugcau

SEQ ID NO: 1171429 - RNA, 19 nt, Artificial Sequence
  Description of Artificial Sequence: Synthetic oligonucleotide
uugaacagauugagugcug

SEQ ID NO: 1171430 - RNA, 19 nt, Artificial Sequence
  Description of Artificial Sequence: Synthetic oligonucleotide
ugcauucgaaaaugugcca

SEQ ID NO: 1171431 - RNA, 19 nt, Artificial Sequence
  Description of Artificial Sequence: Synthetic oligonucleotide
gacgcugaagcucaggggu

SEQ ID NO: 1171432 - RNA, 19 nt, Artificial Sequence
  Description of Artificial Sequence: Synthetic oligonucleotide
uccgagucuagugauggga

SEQ ID NO: 1171433 - RNA, 19 nt, Artificial Sequence
  Description of Artificial Sequence: Synthetic oligonucleotide
cuuggcgaggccuuaccug

SEQ ID NO: 1171434 - RNA, 19 nt, Artificial Sequence
  Description of Artificial Sequence: Synthetic oligonucleotide
uguagcccuaagcuggcuc

SEQ ID NO: 1171435 - RNA, 19 nt, Artificial Sequence
  Description of Artificial Sequence: Synthetic oligonucleotide
cauucgaaaaugugccauc

SEQ ID NO: 1171436 - RNA, 19 nt, Artificial Sequence
  Description of Artificial Sequence: Synthetic oligonucleotide
ugcgugugcauucgaaaau

SEQ ID NO: 1171437 - RNA, 19 nt, Artificial Sequence
  Description of Artificial Sequence: Synthetic oligonucleotide
uagaagauacuguggugau

SEQ ID NO: 1171438 - RNA, 19 nt, Artificial Sequence
  Description of Artificial Sequence: Synthetic oligonucleotide
uggucauccgacacuucca

SEQ ID NO: 1171439 - RNA, 19 nt, Artificial Sequence
  Description of Artificial Sequence: Synthetic oligonucleotide
aaacacccucuugaugauc

SEQ ID NO: 1171440 - RNA, 19 nt, Artificial Sequence
  Description of Artificial Sequence: Synthetic oligonucleotide
aaaccacuaaugagagcag

SEQ ID NO: 1171441 - RNA, 19 nt, Artificial Sequence
  Description of Artificial Sequence: Synthetic oligonucleotide
ggaacggaaaccacuaaug

SEQ ID NO: 1171442 - RNA, 19 nt, Artificial Sequence
  Description of Artificial Sequence: Synthetic oligonucleotide
ucagcgaugucuccaucau

SEQ ID NO: 1171443 - RNA, 19 nt, Artificial Sequence
  Description of Artificial Sequence: Synthetic oligonucleotide
agaggacgggcuuugcagu

SEQ ID NO: 1171444 - RNA, 19 nt, Artificial Sequence
  Description of Artificial Sequence: Synthetic oligonucleotide
aagacaccguccuggucga

SEQ ID NO: 1171445 - RNA, 19 nt, Artificial Sequence
  Description of Artificial Sequence: Synthetic oligonucleotide
guaagacagugucagccca

SEQ ID NO: 1171446 - RNA, 19 nt, Artificial Sequence
  Description of Artificial Sequence: Synthetic oligonucleotide
ugcuguaggcucuuguguu

SEQ ID NO: 1171447 - RNA, 19 nt, Artificial Sequence
  Description of Artificial Sequence: Synthetic oligonucleotide
uccgacacuuccacacagc

SEQ ID NO: 1171448 - RNA, 19 nt, Artificial Sequence
  Description of Artificial Sequence: Synthetic oligonucleotide
accacgauccccucauaga

SEQ ID NO: 1171449 - RNA, 19 nt, Artificial Sequence
  Description of Artificial Sequence: Synthetic oligonucleotide
uuuucccuccggaaccagu

SEQ ID NO: 1171450 - RNA, 19 nt, Artificial Sequence
  Description of Artificial Sequence: Synthetic oligonucleotide
uagcgcuugauggagguaa

SEQ ID NO: 1171451 - RNA, 19 nt, Artificial Sequence
  Description of Artificial Sequence: Synthetic oligonucleotide
gggucaaacacccucuuga

SEQ ID NO: 1171452 - RNA, 19 nt, Artificial Sequence
  Description of Artificial Sequence: Synthetic oligonucleotide
agucggaagccagaauauc

SEQ ID NO: 1171453 - RNA, 19 nt, Artificial Sequence
  Description of Artificial Sequence: Synthetic oligonucleotide
uuucccuccggaaccaguu

SEQ ID NO: 1171454 - RNA, 19 nt, Artificial Sequence
  Description of Artificial Sequence: Synthetic oligonucleotide
aggaaagacccugaacugu

SEQ ID NO: 1171455 - RNA, 19 nt, Artificial Sequence
  Description of Artificial Sequence: Synthetic oligonucleotide
aguaggcagacgcccaccu

SEQ ID NO: 1171456 - RNA, 19 nt, Artificial Sequence
  Description of Artificial Sequence: Synthetic oligonucleotide
ggcuaggagagcucaaagc

SEQ ID NO: 1171457 - RNA, 19 nt, Artificial Sequence
  Description of Artificial Sequence: Synthetic oligonucleotide
uaguacacggugugcuucu

SEQ ID NO: 1171458 - RNA, 19 nt, Artificial Sequence
  Description of Artificial Sequence: Synthetic oligonucleotide
uugcucuuucaucgggugu

SEQ ID NO: 1171459 - RNA, 19 nt, Artificial Sequence
  Description of Artificial Sequence: Synthetic oligonucleotide
acggugugcuucuuuaaau

SEQ ID NO: 1171460 - RNA, 19 nt, Artificial Sequence
  Description of Artificial Sequence: Synthetic oligonucleotide
cagacgcccaccuggcucc

SEQ ID NO: 1171461 - RNA, 19 nt, Artificial Sequence
  Description of Artificial Sequence: Synthetic oligonucleotide
guaggaugugggugagggg

SEQ ID NO: 1171462 - RNA, 19 nt, Artificial Sequence
  Description of Artificial Sequence: Synthetic oligonucleotide
gaacggaaggaggagcuca

SEQ ID NO: 1171463 - RNA, 19 nt, Artificial Sequence
  Description of Artificial Sequence: Synthetic oligonucleotide
cugaacugugcucggcagc

SEQ ID NO: 1171464 - RNA, 19 nt, Artificial Sequence
  Description of Artificial Sequence: Synthetic oligonucleotide
caccacgauccccucauag

SEQ ID NO: 1171465 - RNA, 19 nt, Artificial Sequence
  Description of Artificial Sequence: Synthetic oligonucleotide
cauccacggagcuauagaa

SEQ ID NO: 1171466 - RNA, 19 nt, Artificial Sequence
  Description of Artificial Sequence: Synthetic oligonucleotide
gguaggcgaauccuaggag

SEQ ID NO: 1171467 - RNA, 19 nt, Artificial Sequence
  Description of Artificial Sequence: Synthetic oligonucleotide
cuaagcuaggacaccagua

SEQ ID NO: 1171468 - RNA, 19 nt, Artificial Sequence
  Description of Artificial Sequence: Synthetic oligonucleotide
ggugcuguaggcucuugug

SEQ ID NO: 1171469 - RNA, 19 nt, Artificial Sequence
  Description of Artificial Sequence: Synthetic oligonucleotide
gaaagccuccauaguacac

SEQ ID NO: 1171470 - RNA, 19 nt, Artificial Sequence
  Description of Artificial Sequence: Synthetic oligonucleotide
gagcgcuguagcccuaagc

SEQ ID NO: 1171471 - RNA, 19 nt, Artificial Sequence
  Description of Artificial Sequence: Synthetic oligonucleotide
cuggucgaugccagcuucg

SEQ ID NO: 1171472 - RNA, 19 nt, Artificial Sequence
  Description of Artificial Sequence: Synthetic oligonucleotide
uaaagacaccguccugguc

SEQ ID NO: 1171473 - RNA, 19 nt, Artificial Sequence
  Description of Artificial Sequence: Synthetic oligonucleotide
uccugugcaagaggacggg

SEQ ID NO: 1171474 - RNA, 19 nt, Artificial Sequence
  Description of Artificial Sequence: Synthetic oligonucleotide
cuuucaucgggugugaagu

SEQ ID NO: 1171475 - RNA, 19 nt, Artificial Sequence
  Description of Artificial Sequence: Synthetic oligonucleotide
uuucaucgggugugaaguc

SEQ ID NO: 1171476 - RNA, 19 nt, Artificial Sequence
  Description of Artificial Sequence: Synthetic oligonucleotide
aagggcacguccaccacga

SEQ ID NO: 1171477 - RNA, 19 nt, Artificial Sequence
  Description of Artificial Sequence: Synthetic oligonucleotide
ugaagucggaagccagaau

SEQ ID NO: 1171478 - RNA, 19 nt, Artificial Sequence
  Description of Artificial Sequence: Synthetic oligonucleotide
guaggcgaauccuaggagu

SEQ ID NO: 1171479 - RNA, 19 nt, Artificial Sequence
  Description of Artificial Sequence: Synthetic oligonucleotide
cuucuaagcuaggacacca

SEQ ID NO: 1171480 - RNA, 19 nt, Artificial Sequence
  Description of Artificial Sequence: Synthetic oligonucleotide
agccaguagguucugggua

SEQ ID NO: 1171481 - RNA, 19 nt, Artificial Sequence
  Description of Artificial Sequence: Synthetic oligonucleotide
ucucucggaggacacuuuu

SEQ ID NO: 1171482 - RNA, 19 nt, Artificial Sequence
  Description of Artificial Sequence: Synthetic oligonucleotide
ggaaagacccugaacugug

SEQ ID NO: 1171483 - RNA, 19 nt, Artificial Sequence
  Description of Artificial Sequence: Synthetic oligonucleotide
ccacucaggcuuaauaaug

SEQ ID NO: 1171484 - RNA, 19 nt, Artificial Sequence
  Description of Artificial Sequence: Synthetic oligonucleotide
gaaacuccuuaaagacacc

SEQ ID NO: 1171485 - RNA, 19 nt, Artificial Sequence
  Description of Artificial Sequence: Synthetic oligonucleotide
cgcuguagcccuaagcugg

SEQ ID NO: 1171486 - RNA, 19 nt, Artificial Sequence
  Description of Artificial Sequence: Synthetic oligonucleotide
uggguuugauugccuggga

SEQ ID NO: 1171487 - RNA, 19 nt, Artificial Sequence
  Description of Artificial Sequence: Synthetic oligonucleotide
agaacggaaggaggagcuc

SEQ ID NO: 1171488 - RNA, 19 nt, Artificial Sequence
  Description of Artificial Sequence: Synthetic oligonucleotide
auccacggagcuauagaag

SEQ ID NO: 1171489 - RNA, 19 nt, Artificial Sequence
  Description of Artificial Sequence: Synthetic oligonucleotide
ggcuuaauaauggaacgga

SEQ ID NO: 1171490 - RNA, 19 nt, Artificial Sequence
  Description of Artificial Sequence: Synthetic oligonucleotide
cuugaacagauugagugcu

SEQ ID NO: 1171491 - RNA, 19 nt, Artificial Sequence
  Description of Artificial Sequence: Synthetic oligonucleotide
uagagccucucaucuccgc

SEQ ID NO: 1171492 - RNA, 19 nt, Artificial Sequence
  Description of Artificial Sequence: Synthetic oligonucleotide
gacccugaacugugcucgg

SEQ ID NO: 1171493 - RNA, 19 nt, Artificial Sequence
  Description of Artificial Sequence: Synthetic oligonucleotide
caggggcuaacagcaaggg

SEQ ID NO: 1171494 - RNA, 19 nt, Artificial Sequence
  Description of Artificial Sequence: Synthetic oligonucleotide
cuguggcucccaugaaagc

SEQ ID NO: 1171495 - RNA, 19 nt, Artificial Sequence
  Description of Artificial Sequence: Synthetic oligonucleotide
ggcgaauccuaggaguggg

SEQ ID NO: 1171496 - RNA, 19 nt, Artificial Sequence
  Description of Artificial Sequence: Synthetic oligonucleotide
ugacucuguggcucccaug

SEQ ID NO: 1171497 - RNA, 19 nt, Artificial Sequence
  Description of Artificial Sequence: Synthetic oligonucleotide
gauugccugggaagaggcc

SEQ ID NO: 1171498 - RNA, 19 nt, Artificial Sequence
  Description of Artificial Sequence: Synthetic oligonucleotide
aggggcuaacagcaagggu

SEQ ID NO: 1171499 - RNA, 19 nt, Artificial Sequence
  Description of Artificial Sequence: Synthetic oligonucleotide
gacaccguccuggucgaug

SEQ ID NO: 1171500 - RNA, 19 nt, Artificial Sequence
  Description of Artificial Sequence: Synthetic oligonucleotide
aggcgaauccuaggagugg

SEQ ID NO: 1171501 - RNA, 19 nt, Artificial Sequence
  Description of Artificial Sequence: Synthetic oligonucleotide
guagagccucucaucuccg

SEQ ID NO: 1171502 - RNA, 19 nt, Artificial Sequence
  Description of Artificial Sequence: Synthetic oligonucleotide
cuagugaugggagcucauc

SEQ ID NO: 1171503 - RNA, 19 nt, Artificial Sequence
  Description of Artificial Sequence: Synthetic oligonucleotide
aucacuaggcugggcuagg

SEQ ID NO: 1171504 - RNA, 19 nt, Artificial Sequence
  Description of Artificial Sequence: Synthetic oligonucleotide
ugagcgcuguagcccuaag

SEQ ID NO: 1171505 - RNA, 19 nt, Artificial Sequence
  Description of Artificial Sequence: Synthetic oligonucleotide
gcuuugagcgcuguagccc

SEQ ID NO: 1171506 - RNA, 19 nt, Artificial Sequence
  Description of Artificial Sequence: Synthetic oligonucleotide
ccacgauccccucauagac

SEQ ID NO: 1171507 - RNA, 19 nt, Artificial Sequence
  Description of Artificial Sequence: Synthetic oligonucleotide
uuccaugcuuugagcgcug

SEQ ID NO: 1171508 - RNA, 19 nt, Artificial Sequence
  Description of Artificial Sequence: Synthetic oligonucleotide
acacucagagccaguaggu

SEQ ID NO: 1171509 - RNA, 19 nt, Artificial Sequence
  Description of Artificial Sequence: Synthetic oligonucleotide
cagagaugagacgcugaag

SEQ ID NO: 1171510 - RNA, 19 nt, Artificial Sequence
  Description of Artificial Sequence: Synthetic oligonucleotide
gauuugcgugugcauucga

SEQ ID NO: 1171511 - RNA, 19 nt, Artificial Sequence
  Description of Artificial Sequence: Synthetic oligonucleotide
ggucauccgacacuuccac

SEQ ID NO: 1171512 - RNA, 19 nt, Artificial Sequence
  Description of Artificial Sequence: Synthetic oligonucleotide
ugccgugcauagaggcuug

SEQ ID NO: 1171513 - RNA, 19 nt, Artificial Sequence
  Description of Artificial Sequence: Synthetic oligonucleotide
cuccgagucuagugauggg

SEQ ID NO: 1171514 - RNA, 19 nt, Artificial Sequence
  Description of Artificial Sequence: Synthetic oligonucleotide
acacccucuugaugaucuc

SEQ ID NO: 1171515 - RNA, 19 nt, Artificial Sequence
  Description of Artificial Sequence: Synthetic oligonucleotide
cugguugucuugaacagau

SEQ ID NO: 1171516 - RNA, 19 nt, Artificial Sequence
  Description of Artificial Sequence: Synthetic oligonucleotide
gcuugagguaggcgaaucc

SEQ ID NO: 1171517 - RNA, 19 nt, Artificial Sequence
  Description of Artificial Sequence: Synthetic oligonucleotide
agcccaaggucagcgaugu

SEQ ID NO: 1171518 - RNA, 19 nt, Artificial Sequence
  Description of Artificial Sequence: Synthetic oligonucleotide
cucaugaauguaggaugug

SEQ ID NO: 1171519 - RNA, 19 nt, Artificial Sequence
  Description of Artificial Sequence: Synthetic oligonucleotide
cacacagcggauggagaag

SEQ ID NO: 1171520 - RNA, 19 nt, Artificial Sequence
  Description of Artificial Sequence: Synthetic oligonucleotide
auggaacggaaaccacuaa

SEQ ID NO: 1171521 - RNA, 19 nt, Artificial Sequence
  Description of Artificial Sequence: Synthetic oligonucleotide
gagcuauagaagauacugu

SEQ ID NO: 1171522 - RNA, 19 nt, Artificial Sequence
  Description of Artificial Sequence: Synthetic oligonucleotide
cggaaaccacuaaugagag

SEQ ID NO: 1171523 - RNA, 19 nt, Artificial Sequence
  Description of Artificial Sequence: Synthetic oligonucleotide
ugggcuaggagagcucaaa

SEQ ID NO: 1171524 - RNA, 19 nt, Artificial Sequence
  Description of Artificial Sequence: Synthetic oligonucleotide
gggcuaggagagcucaaag

SEQ ID NO: 1171525 - RNA, 19 nt, Artificial Sequence
  Description of Artificial Sequence: Synthetic oligonucleotide
ccgagucuagugaugggag

SEQ ID NO: 1171526 - RNA, 19 nt, Artificial Sequence
  Description of Artificial Sequence: Synthetic oligonucleotide
caagaggacgggcuuugca

SEQ ID NO: 1171527 - RNA, 19 nt, Artificial Sequence
  Description of Artificial Sequence: Synthetic oligonucleotide
aggucagcgaugucuccau

SEQ ID NO: 1171528 - RNA, 19 nt, Artificial Sequence
  Description of Artificial Sequence: Synthetic oligonucleotide
cuuugagcgcuguagcccu

SEQ ID NO: 1171529 - RNA, 19 nt, Artificial Sequence
  Description of Artificial Sequence: Synthetic oligonucleotide
cacgauccccucauagaca

SEQ ID NO: 1171530 - RNA, 19 nt, Artificial Sequence
  Description of Artificial Sequence: Synthetic oligonucleotide
ugcaaucacuaggcugggc

SEQ ID NO: 1171531 - RNA, 19 nt, Artificial Sequence
  Description of Artificial Sequence: Synthetic oligonucleotide
aaagcacugcccagaugau

SEQ ID NO: 1171532 - RNA, 19 nt, Artificial Sequence
  Description of Artificial Sequence: Synthetic oligonucleotide
caaagggcacguccaccac

SEQ ID NO: 1171533 - RNA, 19 nt, Artificial Sequence
  Description of Artificial Sequence: Synthetic oligonucleotide
guaggcagacgcccaccug

SEQ ID NO: 1171534 - RNA, 19 nt, Artificial Sequence
  Description of Artificial Sequence: Synthetic oligonucleotide
gaugcccaagcaucuggcu

SEQ ID NO: 1171535 - RNA, 19 nt, Artificial Sequence
  Description of Artificial Sequence: Synthetic oligonucleotide
uccuggucgaugccagcuu

SEQ ID NO: 1171536 - RNA, 19 nt, Artificial Sequence
  Description of Artificial Sequence: Synthetic oligonucleotide
gugaagucggaagccagaa

SEQ ID NO: 1171537 - RNA, 19 nt, Artificial Sequence
  Description of Artificial Sequence: Synthetic oligonucleotide
agaaagccucacagaacca

SEQ ID NO: 1171538 - RNA, 19 nt, Artificial Sequence
  Description of Artificial Sequence: Synthetic oligonucleotide
cacuuccacacagcggaug

SEQ ID NO: 1171539 - RNA, 19 nt, Artificial Sequence
  Description of Artificial Sequence: Synthetic oligonucleotide
ccuuaccugaguuuucaga

SEQ ID NO: 1171540 - RNA, 19 nt, Artificial Sequence
  Description of Artificial Sequence: Synthetic oligonucleotide
gucuagugaugggagcuca

SEQ ID NO: 1171541 - RNA, 19 nt, Artificial Sequence
  Description of Artificial Sequence: Synthetic oligonucleotide
caaucacuaggcugggcua

SEQ ID NO: 1171542 - RNA, 19 nt, Artificial Sequence
  Description of Artificial Sequence: Synthetic oligonucleotide
cauagcgcuugauggaggu

SEQ ID NO: 1171543 - RNA, 19 nt, Artificial Sequence
  Description of Artificial Sequence: Synthetic oligonucleotide
cuugagguaggcgaauccu

SEQ ID NO: 1171544 - RNA, 19 nt, Artificial Sequence
  Description of Artificial Sequence: Synthetic oligonucleotide
cuaaugagagcagcugucu

SEQ ID NO: 1171545 - RNA, 19 nt, Artificial Sequence
  Description of Artificial Sequence: Synthetic oligonucleotide
gucauccgacacuuccaca

SEQ ID NO: 1171546 - RNA, 19 nt, Artificial Sequence
  Description of Artificial Sequence: Synthetic oligonucleotide
cugaagcucagggguggag

SEQ ID NO: 1171547 - RNA, 19 nt, Artificial Sequence
  Description of Artificial Sequence: Synthetic oligonucleotide
gaugacucuguggcuccca

SEQ ID NO: 1171548 - RNA, 19 nt, Artificial Sequence
  Description of Artificial Sequence: Synthetic oligonucleotide
cugcaaucacuaggcuggg

SEQ ID NO: 1171549 - RNA, 19 nt, Artificial Sequence
  Description of Artificial Sequence: Synthetic oligonucleotide
gcuugcggauaguaaagaa

SEQ ID NO: 1171550 - RNA, 19 nt, Artificial Sequence
  Description of Artificial Sequence: Synthetic oligonucleotide
gcuuaauaauggaacggaa

SEQ ID NO: 1171551 - RNA, 19 nt, Artificial Sequence
  Description of Artificial Sequence: Synthetic oligonucleotide
gggugugaagucggaagcc

SEQ ID NO: 1171552 - RNA, 19 nt, Artificial Sequence
  Description of Artificial Sequence: Synthetic oligonucleotide
cauccgacacuuccacaca

SEQ ID NO: 1171553 - RNA, 19 nt, Artificial Sequence
  Description of Artificial Sequence: Synthetic oligonucleotide
gaggccuuaccugaguuuu

SEQ ID NO: 1171554 - RNA, 19 nt, Artificial Sequence
  Description of Artificial Sequence: Synthetic oligonucleotide
gggguagagccucucaucu

SEQ ID NO: 1171555 - RNA, 19 nt, Artificial Sequence
  Description of Artificial Sequence: Synthetic oligonucleotide
cagauccaucucagcguug

SEQ ID NO: 1171556 - RNA, 19 nt, Artificial Sequence
  Description of Artificial Sequence: Synthetic oligonucleotide
gccaucagauggauguagc

SEQ ID NO: 1171557 - RNA, 19 nt, Artificial Sequence
  Description of Artificial Sequence: Synthetic oligonucleotide
ccacuaaugagagcagcug

SEQ ID NO: 1171558 - RNA, 19 nt, Artificial Sequence
  Description of Artificial Sequence: Synthetic oligonucleotide
uuugagcgcuguagcccua

SEQ ID NO: 1171559 - RNA, 19 nt, Artificial Sequence
  Description of Artificial Sequence: Synthetic oligonucleotide
cuguaggaaagacccugaa

SEQ ID NO: 1171560 - RNA, 19 nt, Artificial Sequence
  Description of Artificial Sequence: Synthetic oligonucleotide
guuuucccuccggaaccag

SEQ ID NO: 1171561 - RNA, 19 nt, Artificial Sequence
  Description of Artificial Sequence: Synthetic oligonucleotide
gcgcuguagcccuaagcug

SEQ ID NO: 1171562 - RNA, 19 nt, Artificial Sequence
  Description of Artificial Sequence: Synthetic oligonucleotide
gccgcugugggcaggguag

SEQ ID NO: 1171563 - RNA, 19 nt, Artificial Sequence
  Description of Artificial Sequence: Synthetic oligonucleotide
gcagacgcccaccuggcuc

SEQ ID NO: 1171564 - RNA, 19 nt, Artificial Sequence
  Description of Artificial Sequence: Synthetic oligonucleotide
aggccuuaccugaguuuuc

SEQ ID NO: 1171565 - RNA, 19 nt, Artificial Sequence
  Description of Artificial Sequence: Synthetic oligonucleotide
ccgcugguugucuugaaca

SEQ ID NO: 1171566 - RNA, 19 nt, Artificial Sequence
  Description of Artificial Sequence: Synthetic oligonucleotide
cgggugugaagucggaagc

SEQ ID NO: 1171567 - RNA, 19 nt, Artificial Sequence
  Description of Artificial Sequence: Synthetic oligonucleotide
ggacgggcuuugcaguccc

SEQ ID NO: 1171568 - RNA, 19 nt, Artificial Sequence
  Description of Artificial Sequence: Synthetic oligonucleotide
uugagcgcuguagcccuaa

SEQ ID NO: 1171569 - RNA, 19 nt, Artificial Sequence
  Description of Artificial Sequence: Synthetic oligonucleotide
gaggagggaccaggacucc

SEQ ID NO: 1171570 - RNA, 19 nt, Artificial Sequence
  Description of Artificial Sequence: Synthetic oligonucleotide
ggaugugggugagggguag

SEQ ID NO: 1171571 - RNA, 19 nt, Artificial Sequence
  Description of Artificial Sequence: Synthetic oligonucleotide
gcgaugucuccaucauagc

SEQ ID NO: 1171572 - RNA, 19 nt, Artificial Sequence
  Description of Artificial Sequence: Synthetic oligonucleotide
cgagucuagugaugggagc

SEQ ID NO: 1171573 - RNA, 19 nt, Artificial Sequence
  Description of Artificial Sequence: Synthetic oligonucleotide
gggcuaacagcaaggguuc

SEQ ID NO: 1171574 - RNA, 19 nt, Artificial Sequence
  Description of Artificial Sequence: Synthetic oligonucleotide
gccuuaccugaguuuucag

SEQ ID NO: 1171575 - RNA, 19 nt, Artificial Sequence
  Description of Artificial Sequence: Synthetic oligonucleotide
aucgggugugaagucggaa

SEQ ID NO: 1171576 - RNA, 19 nt, Artificial Sequence
  Description of Artificial Sequence: Synthetic oligonucleotide
ggcuuggcgaggccuuacc

SEQ ID NO: 1171577 - RNA, 19 nt, Artificial Sequence
  Description of Artificial Sequence: Synthetic oligonucleotide
gcuaggacaccaguaccca

SEQ ID NO: 1171578 - RNA, 19 nt, Artificial Sequence
  Description of Artificial Sequence: Synthetic oligonucleotide
cccgcuugcggauaguaaa

SEQ ID NO: 1171579 - RNA, 19 nt, Artificial Sequence
  Description of Artificial Sequence: Synthetic oligonucleotide
ggccuuaccugaguuuuca

SEQ ID NO: 1171580 - RNA, 19 nt, Artificial Sequence
  Description of Artificial Sequence: Synthetic oligonucleotide
gcgaauccuaggagugggg

SEQ ID NO: 1171581 - RNA, 19 nt, Artificial Sequence
  Description of Artificial Sequence: Synthetic oligonucleotide
cauaguacacggugugcuu

SEQ ID NO: 1171582 - RNA, 19 nt, Artificial Sequence
  Description of Artificial Sequence: Synthetic oligonucleotide
ugucuccaucauagcgcuu

SEQ ID NO: 1171583 - RNA, 19 nt, Artificial Sequence
  Description of Artificial Sequence: Synthetic oligonucleotide
ggguagagccucucaucuc

SEQ ID NO: 1171584 - RNA, 19 nt, Artificial Sequence
  Description of Artificial Sequence: Synthetic oligonucleotide
caucgggugugaagucgga

SEQ ID NO: 1171585 - RNA, 19 nt, Artificial Sequence
  Description of Artificial Sequence: Synthetic oligonucleotide
gagcagcuggucacaaacu

SEQ ID NO: 1171586 - RNA, 19 nt, Artificial Sequence
  Description of Artificial Sequence: Synthetic oligonucleotide
cucggcagccucccuggca

SEQ ID NO: 1171587 - RNA, 19 nt, Artificial Sequence
  Description of Artificial Sequence: Synthetic oligonucleotide
ccagaauaucccagagcca

SEQ ID NO: 1171588 - RNA, 19 nt, Artificial Sequence
  Description of Artificial Sequence: Synthetic oligonucleotide
ccaucucagcguugucccc

SEQ ID NO: 1171589 - RNA, 19 nt, Artificial Sequence
  Description of Artificial Sequence: Synthetic oligonucleotide
caccguccuggucgaugcc

SEQ ID NO: 1171590 - RNA, 19 nt, Artificial Sequence
  Description of Artificial Sequence: Synthetic oligonucleotide
ccguccuggucgaugccag

SEQ ID NO: 1171591 - RNA, 19 nt, Artificial Sequence
  Description of Artificial Sequence: Synthetic oligonucleotide
ggauaguaaagaagccccu

SEQ ID NO: 1171592 - RNA, 19 nt, Artificial Sequence
  Description of Artificial Sequence: Synthetic oligonucleotide
ccugaguuuucagaacgga

SEQ ID NO: 1171593 - RNA, 19 nt, Artificial Sequence
  Description of Artificial Sequence: Synthetic oligonucleotide
ggcucccgcuugcggauag

SEQ ID NO: 1171594 - RNA, 19 nt, Artificial Sequence
  Description of Artificial Sequence: Synthetic oligonucleotide
ugggugcuguaggcucuug

SEQ ID NO: 1171595 - RNA, 19 nt, Artificial Sequence
  Description of Artificial Sequence: Synthetic oligonucleotide
ccuggcucccgcuugcgga

SEQ ID NO: 1171596 - RNA, 19 nt, Artificial Sequence
  Description of Artificial Sequence: Synthetic oligonucleotide
guccuggucgaugccagcu

SEQ ID NO: 1171597 - RNA, 19 nt, Artificial Sequence
  Description of Artificial Sequence: Synthetic oligonucleotide
aggcuugagguaggcgaau

SEQ ID NO: 1171598 - RNA, 19 nt, Artificial Sequence
  Description of Artificial Sequence: Synthetic oligonucleotide
gacgcccaccuggcucccg

SEQ ID NO: 1171599 - RNA, 19 nt, Artificial Sequence
  Description of Artificial Sequence: Synthetic oligonucleotide
ggaagguguuuccaugcuu

SEQ ID NO: 1171600 - RNA, 19 nt, Artificial Sequence
  Description of Artificial Sequence: Synthetic oligonucleotide
cugggcuaggagagcucaa

SEQ ID NO: 1171601 - RNA, 19 nt, Artificial Sequence
  Description of Artificial Sequence: Synthetic oligonucleotide
gcugggucaaacacccucu

SEQ ID NO: 1171602 - RNA, 19 nt, Artificial Sequence
  Description of Artificial Sequence: Synthetic oligonucleotide
cagcgaugucuccaucaua

SEQ ID NO: 1171603 - RNA, 19 nt, Artificial Sequence
  Description of Artificial Sequence: Synthetic oligonucleotide
uggcacgagcuggguuuga

SEQ ID NO: 1171604 - RNA, 19 nt, Artificial Sequence
  Description of Artificial Sequence: Synthetic oligonucleotide
ucccuggcacgagcugggu

SEQ ID NO: 1171605 - RNA, 19 nt, Artificial Sequence
  Description of Artificial Sequence: Synthetic oligonucleotide
acacuuccacacagcggau

SEQ ID NO: 1171606 - RNA, 19 nt, Artificial Sequence
  Description of Artificial Sequence: Synthetic oligonucleotide
guacacggugugcuucuuu

SEQ ID NO: 1171607 - RNA, 19 nt, Artificial Sequence
  Description of Artificial Sequence: Synthetic oligonucleotide
ccgugcauagaggcuuggc

SEQ ID NO: 1171608 - RNA, 19 nt, Artificial Sequence
  Description of Artificial Sequence: Synthetic oligonucleotide
cggaagccagaauauccca

SEQ ID NO: 1171609 - RNA, 19 nt, Artificial Sequence
  Description of Artificial Sequence: Synthetic oligonucleotide
gccgugcauagaggcuugg

SEQ ID NO: 1171610 - RNA, 19 nt, Artificial Sequence
  Description of Artificial Sequence: Synthetic oligonucleotide
cucccgcuugcggauagua

SEQ ID NO: 1171611 - RNA, 19 nt, Artificial Sequence
  Description of Artificial Sequence: Synthetic oligonucleotide
gcacguccaccacgauccc

SEQ ID NO: 1171612 - RNA, 19 nt, Artificial Sequence
  Description of Artificial Sequence: Synthetic oligonucleotide
ccaugaaagccuccauagu

SEQ ID NO: 1171613 - RNA, 19 nt, Artificial Sequence
  Description of Artificial Sequence: Synthetic oligonucleotide
cuggcucccgcuugcggau

SEQ ID NO: 1171614 - RNA, 19 nt, Artificial Sequence
  Description of Artificial Sequence: Synthetic oligonucleotide
cugggucaaacacccucuu

SEQ ID NO: 1171615 - RNA, 19 nt, Artificial Sequence
  Description of Artificial Sequence: Synthetic oligonucleotide
ccagauccaucucagcguu

SEQ ID NO: 1171616 - RNA, 19 nt, Artificial Sequence
  Description of Artificial Sequence: Synthetic oligonucleotide
cacucagagccaguagguu

SEQ ID NO: 1171617 - RNA, 19 nt, Artificial Sequence
  Description of Artificial Sequence: Synthetic oligonucleotide
ggcagacaagcugacccau

SEQ ID NO: 1171618 - RNA, 19 nt, Artificial Sequence
  Description of Artificial Sequence: Synthetic oligonucleotide
ggcgaggccuuaccugagu

SEQ ID NO: 1171619 - RNA, 19 nt, Artificial Sequence
  Description of Artificial Sequence: Synthetic oligonucleotide
caucuccgcugguugucuu

SEQ ID NO: 1171620 - RNA, 19 nt, Artificial Sequence
  Description of Artificial Sequence: Synthetic oligonucleotide
agacaccguccuggucgau

SEQ ID NO: 1171621 - RNA, 19 nt, Artificial Sequence
  Description of Artificial Sequence: Synthetic oligonucleotide
gcacgagcuggguuugauu

SEQ ID NO: 1171622 - RNA, 19 nt, Artificial Sequence
  Description of Artificial Sequence: Synthetic oligonucleotide
ccaugacgucuucaucgua

SEQ ID NO: 1171623 - RNA, 19 nt, Artificial Sequence
  Description of Artificial Sequence: Synthetic oligonucleotide
cuguagcccuaagcuggcu

SEQ ID NO: 1171624 - RNA, 19 nt, Artificial Sequence
  Description of Artificial Sequence: Synthetic oligonucleotide
ggcacgagcuggguuugau

SEQ ID NO: 1171625 - RNA, 19 nt, Artificial Sequence
  Description of Artificial Sequence: Synthetic oligonucleotide
cggagcuauagaagauacu

SEQ ID NO: 1171626 - RNA, 19 nt, Artificial Sequence
  Description of Artificial Sequence: Synthetic oligonucleotide
gcccaaggucagcgauguc

SEQ ID NO: 1171627 - RNA, 19 nt, Artificial Sequence
  Description of Artificial Sequence: Synthetic oligonucleotide
gcucauccacggagcuaua

SEQ ID NO: 1171628 - RNA, 19 nt, Artificial Sequence
  Description of Artificial Sequence: Synthetic oligonucleotide
ccaccacgauccccucaua

SEQ ID NO: 1171629 - RNA, 19 nt, Artificial Sequence
  Description of Artificial Sequence: Synthetic oligonucleotide
cccuggcacgagcuggguu

SEQ ID NO: 1171630 - RNA, 19 nt, Artificial Sequence
  Description of Artificial Sequence: Synthetic oligonucleotide
gcucccgcuugcggauagu

SEQ ID NO: 1171631 - RNA, 19 nt, Artificial Sequence
  Description of Artificial Sequence: Synthetic oligonucleotide
cgcccaccuggcucccgcu

SEQ ID NO: 1171632 - RNA, 19 nt, Artificial Sequence
  Description of Artificial Sequence: Synthetic oligonucleotide
acuaguugcauuuucaucc

SEQ ID NO: 1171633 - RNA, 19 nt, Artificial Sequence
  Description of Artificial Sequence: Synthetic oligonucleotide
cacaauauaaaauuggagg

SEQ ID NO: 1171634 - RNA, 19 nt, Artificial Sequence
  Description of Artificial Sequence: Synthetic oligonucleotide
aaaacguuacuuuccuucc

SEQ ID NO: 1171635 - RNA, 19 nt, Artificial Sequence
  Description of Artificial Sequence: Synthetic oligonucleotide
auaaaauuggaggugaugg

SEQ ID NO: 1171636 - RNA, 19 nt, Artificial Sequence
  Description of Artificial Sequence: Synthetic oligonucleotide
uugacuaaccccaacagcc

SEQ ID NO: 1171637 - RNA, 19 nt, Artificial Sequence
  Description of Artificial Sequence: Synthetic oligonucleotide
aaugccguggcuaacaagg

SEQ ID NO: 1171638 - RNA, 19 nt, Artificial Sequence
  Description of Artificial Sequence: Synthetic oligonucleotide
acaauauaaaauuggaggu

SEQ ID NO: 1171639 - RNA, 19 nt, Artificial Sequence
  Description of Artificial Sequence: Synthetic oligonucleotide
aauaggauucauccccugg

SEQ ID NO: 1171640 - RNA, 19 nt, Artificial Sequence
  Description of Artificial Sequence: Synthetic oligonucleotide
aacuuugaaccccaagauc

SEQ ID NO: 1171641 - RNA, 19 nt, Artificial Sequence
  Description of Artificial Sequence: Synthetic oligonucleotide
auaggauucauccccuggc

SEQ ID NO: 1171642 - RNA, 19 nt, Artificial Sequence
  Description of Artificial Sequence: Synthetic oligonucleotide
agauaaggcauccugaacu

SEQ ID NO: 1171643 - RNA, 19 nt, Artificial Sequence
  Description of Artificial Sequence: Synthetic oligonucleotide
uuuaaaauguugagugcag

SEQ ID NO: 1171644 - RNA, 19 nt, Artificial Sequence
  Description of Artificial Sequence: Synthetic oligonucleotide
guugguccaacucagacag

SEQ ID NO: 1171645 - RNA, 19 nt, Artificial Sequence
  Description of Artificial Sequence: Synthetic oligonucleotide
ucuucuuaacuacugcugc

SEQ ID NO: 1171646 - RNA, 19 nt, Artificial Sequence
  Description of Artificial Sequence: Synthetic oligonucleotide
ugauucuggguuuuacucg

SEQ ID NO: 1171647 - RNA, 19 nt, Artificial Sequence
  Description of Artificial Sequence: Synthetic oligonucleotide
ugaugagagacacacacuc

SEQ ID NO: 1171648 - RNA, 19 nt, Artificial Sequence
  Description of Artificial Sequence: Synthetic oligonucleotide
ucuguagcuuacauguggg

SEQ ID NO: 1171649 - RNA, 19 nt, Artificial Sequence
  Description of Artificial Sequence: Synthetic oligonucleotide
aguauuuucaguauauaug

SEQ ID NO: 1171650 - RNA, 19 nt, Artificial Sequence
  Description of Artificial Sequence: Synthetic oligonucleotide
ucuugugcgagguccaugg

SEQ ID NO: 1171651 - RNA, 19 nt, Artificial Sequence
  Description of Artificial Sequence: Synthetic oligonucleotide
uuguauucaaccuggaauc

SEQ ID NO: 1171652 - RNA, 19 nt, Artificial Sequence
  Description of Artificial Sequence: Synthetic oligonucleotide
gauuuguagccagaaaagg

SEQ ID NO: 1171653 - RNA, 19 nt, Artificial Sequence
  Description of Artificial Sequence: Synthetic oligonucleotide
aaguaucugaaugagccag

SEQ ID NO: 1171654 - RNA, 19 nt, Artificial Sequence
  Description of Artificial Sequence: Synthetic oligonucleotide
guuaccguggccuuggcag

SEQ ID NO: 1171655 - RNA, 19 nt, Artificial Sequence
  Description of Artificial Sequence: Synthetic oligonucleotide
aaacuccccgacugaaacc

SEQ ID NO: 1171656 - RNA, 19 nt, Artificial Sequence
  Description of Artificial Sequence: Synthetic oligonucleotide
ugagaauuggccaugcuuu

SEQ ID NO: 1171657 - RNA, 19 nt, Artificial Sequence
  Description of Artificial Sequence: Synthetic oligonucleotide
aaacguuacuuuccuuccg

SEQ ID NO: 1171658 - RNA, 19 nt, Artificial Sequence
  Description of Artificial Sequence: Synthetic oligonucleotide
uuucaguauauauguuggg

SEQ ID NO: 1171659 - RNA, 19 nt, Artificial Sequence
  Description of Artificial Sequence: Synthetic oligonucleotide
agcaguucagcacaaccgg

SEQ ID NO: 1171660 - RNA, 19 nt, Artificial Sequence
  Description of Artificial Sequence: Synthetic oligonucleotide
agauguuacucuuuaaaau

SEQ ID NO: 1171661 - RNA, 19 nt, Artificial Sequence
  Description of Artificial Sequence: Synthetic oligonucleotide
aacucucgagcuaucaugg

SEQ ID NO: 1171662 - RNA, 19 nt, Artificial Sequence
  Description of Artificial Sequence: Synthetic oligonucleotide
uuagccaccauaucucggc

SEQ ID NO: 1171663 - RNA, 19 nt, Artificial Sequence
  Description of Artificial Sequence: Synthetic oligonucleotide
ucaguauauauguugggau

SEQ ID NO: 1171664 - RNA, 19 nt, Artificial Sequence
  Description of Artificial Sequence: Synthetic oligonucleotide
aaagguaguacagcugcuc

SEQ ID NO: 1171665 - RNA, 19 nt, Artificial Sequence
  Description of Artificial Sequence: Synthetic oligonucleotide
uccucuuuaugacuaguug

SEQ ID NO: 1171666 - RNA, 19 nt, Artificial Sequence
  Description of Artificial Sequence: Synthetic oligonucleotide
ucuuagccaccauaucucg

SEQ ID NO: 1171667 - RNA, 19 nt, Artificial Sequence
  Description of Artificial Sequence: Synthetic oligonucleotide
gucuguagcuuacaugugg

SEQ ID NO: 1171668 - RNA, 19 nt, Artificial Sequence
  Description of Artificial Sequence: Synthetic oligonucleotide
agagauguuacucuuuaaa

SEQ ID NO: 1171669 - RNA, 19 nt, Artificial Sequence
  Description of Artificial Sequence: Synthetic oligonucleotide
uugauucuggguuuuacuc

SEQ ID NO: 1171670 - RNA, 19 nt, Artificial Sequence
  Description of Artificial Sequence: Synthetic oligonucleotide
ucugcuaauaggauucauc

SEQ ID NO: 1171671 - RNA, 19 nt, Artificial Sequence
  Description of Artificial Sequence: Synthetic oligonucleotide
uauucaaccuggaaucccu

SEQ ID NO: 1171672 - RNA, 19 nt, Artificial Sequence
  Description of Artificial Sequence: Synthetic oligonucleotide
aaauggucucggcuguggg

SEQ ID NO: 1171673 - RNA, 19 nt, Artificial Sequence
  Description of Artificial Sequence: Synthetic oligonucleotide
ugagccagucugcuaauag

SEQ ID NO: 1171674 - RNA, 19 nt, Artificial Sequence
  Description of Artificial Sequence: Synthetic oligonucleotide
uauaaaauuggaggugaug

SEQ ID NO: 1171675 - RNA, 19 nt, Artificial Sequence
  Description of Artificial Sequence: Synthetic oligonucleotide
uucacaggcaaauuccgcu

SEQ ID NO: 1171676 - RNA, 19 nt, Artificial Sequence
  Description of Artificial Sequence: Synthetic oligonucleotide
uuacucgcuccacagcagg

SEQ ID NO: 1171677 - RNA, 19 nt, Artificial Sequence
  Description of Artificial Sequence: Synthetic oligonucleotide
cuagcaguucagcacaacc

SEQ ID NO: 1171678 - RNA, 19 nt, Artificial Sequence
  Description of Artificial Sequence: Synthetic oligonucleotide
aacguuacuuuccuuccgu

SEQ ID NO: 1171679 - RNA, 19 nt, Artificial Sequence
  Description of Artificial Sequence: Synthetic oligonucleotide
ugaaugagccagcaugaga

SEQ ID NO: 1171680 - RNA, 19 nt, Artificial Sequence
  Description of Artificial Sequence: Synthetic oligonucleotide
uguccugaagagauguuac

SEQ ID NO: 1171681 - RNA, 19 nt, Artificial Sequence
  Description of Artificial Sequence: Synthetic oligonucleotide
uucuuagccaccauaucuc

SEQ ID NO: 1171682 - RNA, 19 nt, Artificial Sequence
  Description of Artificial Sequence: Synthetic oligonucleotide
uguuacucuuuaaaauggu

SEQ ID NO: 1171683 - RNA, 19 nt, Artificial Sequence
  Description of Artificial Sequence: Synthetic oligonucleotide
aaaauggucucggcugugg

SEQ ID NO: 1171684 - RNA, 19 nt, Artificial Sequence
  Description of Artificial Sequence: Synthetic oligonucleotide
uaucagaaauuccaaguuu

SEQ ID NO: 1171685 - RNA, 19 nt, Artificial Sequence
  Description of Artificial Sequence: Synthetic oligonucleotide
cacucuaaggccucucugg

SEQ ID NO: 1171686 - RNA, 19 nt, Artificial Sequence
  Description of Artificial Sequence: Synthetic oligonucleotide
gucuuuguauucaaccugg

SEQ ID NO: 1171687 - RNA, 19 nt, Artificial Sequence
  Description of Artificial Sequence: Synthetic oligonucleotide
gaaugagccagcaugagaa

SEQ ID NO: 1171688 - RNA, 19 nt, Artificial Sequence
  Description of Artificial Sequence: Synthetic oligonucleotide
uuuuagcugagucgguugu

SEQ ID NO: 1171689 - RNA, 19 nt, Artificial Sequence
  Description of Artificial Sequence: Synthetic oligonucleotide
ucuaaggccucucuggcau

SEQ ID NO: 1171690 - RNA, 19 nt, Artificial Sequence
  Description of Artificial Sequence: Synthetic oligonucleotide
ugugcgagguccauggggu

SEQ ID NO: 1171691 - RNA, 19 nt, Artificial Sequence
  Description of Artificial Sequence: Synthetic oligonucleotide
ugcucagagggucuugugc

SEQ ID NO: 1171692 - RNA, 19 nt, Artificial Sequence
  Description of Artificial Sequence: Synthetic oligonucleotide
uguugguccaacucagaca

SEQ ID NO: 1171693 - RNA, 19 nt, Artificial Sequence
  Description of Artificial Sequence: Synthetic oligonucleotide
guagcuuacaugugggcug

SEQ ID NO: 1171694 - RNA, 19 nt, Artificial Sequence
  Description of Artificial Sequence: Synthetic oligonucleotide
cuugccgcauucuucuugg

SEQ ID NO: 1171695 - RNA, 19 nt, Artificial Sequence
  Description of Artificial Sequence: Synthetic oligonucleotide
caauauaaaauuggaggug

SEQ ID NO: 1171696 - RNA, 19 nt, Artificial Sequence
  Description of Artificial Sequence: Synthetic oligonucleotide
cacacgcugacacuggucc

SEQ ID NO: 1171697 - RNA, 19 nt, Artificial Sequence
  Description of Artificial Sequence: Synthetic oligonucleotide
uuauaaugauuuguagcca

SEQ ID NO: 1171698 - RNA, 19 nt, Artificial Sequence
  Description of Artificial Sequence: Synthetic oligonucleotide
uguagcuuacaugugggcu

SEQ ID NO: 1171699 - RNA, 19 nt, Artificial Sequence
  Description of Artificial Sequence: Synthetic oligonucleotide
cuuuaccugcaucacaaac

SEQ ID NO: 1171700 - RNA, 19 nt, Artificial Sequence
  Description of Artificial Sequence: Synthetic oligonucleotide
ggugcuuuuagcuccgggg

SEQ ID NO: 1171701 - RNA, 19 nt, Artificial Sequence
  Description of Artificial Sequence: Synthetic oligonucleotide
guuaucagaaauuccaagu

SEQ ID NO: 1171702 - RNA, 19 nt, Artificial Sequence
  Description of Artificial Sequence: Synthetic oligonucleotide
uuaacuacugcugccacau

SEQ ID NO: 1171703 - RNA, 19 nt, Artificial Sequence
  Description of Artificial Sequence: Synthetic oligonucleotide
aucucaaacacuuggcuua

SEQ ID NO: 1171704 - RNA, 19 nt, Artificial Sequence
  Description of Artificial Sequence: Synthetic oligonucleotide
ucuuuaaaauggucucggc

SEQ ID NO: 1171705 - RNA, 19 nt, Artificial Sequence
  Description of Artificial Sequence: Synthetic oligonucleotide
ugucacuagcaguucagca

SEQ ID NO: 1171706 - RNA, 19 nt, Artificial Sequence
  Description of Artificial Sequence: Synthetic oligonucleotide
gaauuggccaugcuuucug

SEQ ID NO: 1171707 - RNA, 19 nt, Artificial Sequence
  Description of Artificial Sequence: Synthetic oligonucleotide
cagucugcuaauaggauuc

SEQ ID NO: 1171708 - RNA, 19 nt, Artificial Sequence
  Description of Artificial Sequence: Synthetic oligonucleotide
caucucugugcucuguugg

SEQ ID NO: 1171709 - RNA, 19 nt, Artificial Sequence
  Description of Artificial Sequence: Synthetic oligonucleotide
uucggagcugcccugguga

SEQ ID NO: 1171710 - RNA, 19 nt, Artificial Sequence
  Description of Artificial Sequence: Synthetic oligonucleotide
uuuacucgcuccacagcag

SEQ ID NO: 1171711 - RNA, 19 nt, Artificial Sequence
  Description of Artificial Sequence: Synthetic oligonucleotide
ugauuugagugcuggcuug

SEQ ID NO: 1171712 - RNA, 19 nt, Artificial Sequence
  Description of Artificial Sequence: Synthetic oligonucleotide
ugggauuuauaaugauuug

SEQ ID NO: 1171713 - RNA, 19 nt, Artificial Sequence
  Description of Artificial Sequence: Synthetic oligonucleotide
ucuuaguagcuguuuauuu

SEQ ID NO: 1171714 - RNA, 19 nt, Artificial Sequence
  Description of Artificial Sequence: Synthetic oligonucleotide
caacucucgagcuaucaug

SEQ ID NO: 1171715 - RNA, 19 nt, Artificial Sequence
  Description of Artificial Sequence: Synthetic oligonucleotide
ugaggagcguguacucugg

SEQ ID NO: 1171716 - RNA, 19 nt, Artificial Sequence
  Description of Artificial Sequence: Synthetic oligonucleotide
uuguagccagaaaagguuc

SEQ ID NO: 1171717 - RNA, 19 nt, Artificial Sequence
  Description of Artificial Sequence: Synthetic oligonucleotide
uguauucaaccuggaaucc

SEQ ID NO: 1171718 - RNA, 19 nt, Artificial Sequence
  Description of Artificial Sequence: Synthetic oligonucleotide
aaccuuuaccugcaucaca

SEQ ID NO: 1171719 - RNA, 19 nt, Artificial Sequence
  Description of Artificial Sequence: Synthetic oligonucleotide
uuucuuaguagcuguuuau

SEQ ID NO: 1171720 - RNA, 19 nt, Artificial Sequence
  Description of Artificial Sequence: Synthetic oligonucleotide
ggaguuaucagaaauucca

SEQ ID NO: 1171721 - RNA, 19 nt, Artificial Sequence
  Description of Artificial Sequence: Synthetic oligonucleotide
uucuuaacuacugcugcca

SEQ ID NO: 1171722 - RNA, 19 nt, Artificial Sequence
  Description of Artificial Sequence: Synthetic oligonucleotide
ccucuuuaugacuaguugc

SEQ ID NO: 1171723 - RNA, 19 nt, Artificial Sequence
  Description of Artificial Sequence: Synthetic oligonucleotide
uaaggcauccugaacucau

SEQ ID NO: 1171724 - RNA, 19 nt, Artificial Sequence
  Description of Artificial Sequence: Synthetic oligonucleotide
ucuuaacuacugcugccac

SEQ ID NO: 1171725 - RNA, 19 nt, Artificial Sequence
  Description of Artificial Sequence: Synthetic oligonucleotide
auugguacccgcuccuucu

SEQ ID NO: 1171726 - RNA, 19 nt, Artificial Sequence
  Description of Artificial Sequence: Synthetic oligonucleotide
caaacacuuggcuuauuuc

SEQ ID NO: 1171727 - RNA, 19 nt, Artificial Sequence
  Description of Artificial Sequence: Synthetic oligonucleotide
cuuagccaccauaucucgg

SEQ ID NO: 1171728 - RNA, 19 nt, Artificial Sequence
  Description of Artificial Sequence: Synthetic oligonucleotide
aacucagacagcaacuuua

SEQ ID NO: 1171729 - RNA, 19 nt, Artificial Sequence
  Description of Artificial Sequence: Synthetic oligonucleotide
cauaucgugacaggacucc

SEQ ID NO: 1171730 - RNA, 19 nt, Artificial Sequence
  Description of Artificial Sequence: Synthetic oligonucleotide
uuugaaccccaagaucucc

SEQ ID NO: 1171731 - RNA, 19 nt, Artificial Sequence
  Description of Artificial Sequence: Synthetic oligonucleotide
gauuugagugcuggcuugg

SEQ ID NO: 1171732 - RNA, 19 nt, Artificial Sequence
  Description of Artificial Sequence: Synthetic oligonucleotide
gugcuuuuagcuccggggc

SEQ ID NO: 1171733 - RNA, 19 nt, Artificial Sequence
  Description of Artificial Sequence: Synthetic oligonucleotide
agccaccauaucucggccc

SEQ ID NO: 1171734 - RNA, 19 nt, Artificial Sequence
  Description of Artificial Sequence: Synthetic oligonucleotide
uaaugauuuguagccagaa

SEQ ID NO: 1171735 - RNA, 19 nt, Artificial Sequence
  Description of Artificial Sequence: Synthetic oligonucleotide
ugugguucccaaccuuuac

SEQ ID NO: 1171736 - RNA, 19 nt, Artificial Sequence
  Description of Artificial Sequence: Synthetic oligonucleotide
cacacacucguucuuguug

SEQ ID NO: 1171737 - RNA, 19 nt, Artificial Sequence
  Description of Artificial Sequence: Synthetic oligonucleotide
ugacuaaccccaacagccu

SEQ ID NO: 1171738 - RNA, 19 nt, Artificial Sequence
  Description of Artificial Sequence: Synthetic oligonucleotide
uucagcacaaccggggcca

SEQ ID NO: 1171739 - RNA, 19 nt, Artificial Sequence
  Description of Artificial Sequence: Synthetic oligonucleotide
uucucaguauuuucaguau

SEQ ID NO: 1171740 - RNA, 19 nt, Artificial Sequence
  Description of Artificial Sequence: Synthetic oligonucleotide
guccaaaguaucugaauga

SEQ ID NO: 1171741 - RNA, 19 nt, Artificial Sequence
  Description of Artificial Sequence: Synthetic oligonucleotide
gcucagagggucuugugcg

SEQ ID NO: 1171742 - RNA, 19 nt, Artificial Sequence
  Description of Artificial Sequence: Synthetic oligonucleotide
ugggguacguguccugaag

SEQ ID NO: 1171743 - RNA, 19 nt, Artificial Sequence
  Description of Artificial Sequence: Synthetic oligonucleotide
uuaccguggccuuggcagg

SEQ ID NO: 1171744 - RNA, 19 nt, Artificial Sequence
  Description of Artificial Sequence: Synthetic oligonucleotide
aaccggggccaccaccugg

SEQ ID NO: 1171745 - RNA, 19 nt, Artificial Sequence
  Description of Artificial Sequence: Synthetic oligonucleotide
ggugaaaucuuuggugugg

SEQ ID NO: 1171746 - RNA, 19 nt, Artificial Sequence
  Description of Artificial Sequence: Synthetic oligonucleotide
gaaaucuuugguguggugu

SEQ ID NO: 1171747 - RNA, 19 nt, Artificial Sequence
  Description of Artificial Sequence: Synthetic oligonucleotide
uggugaaaucuuuggugug

SEQ ID NO: 1171748 - RNA, 19 nt, Artificial Sequence
  Description of Artificial Sequence: Synthetic oligonucleotide
cuguugguccaacucagac

SEQ ID NO: 1171749 - RNA, 19 nt, Artificial Sequence
  Description of Artificial Sequence: Synthetic oligonucleotide
uggugcuuuuagcuccggg

SEQ ID NO: 1171750 - RNA, 19 nt, Artificial Sequence
  Description of Artificial Sequence: Synthetic oligonucleotide
acaacaacucucgagcuau

SEQ ID NO: 1171751 - RNA, 19 nt, Artificial Sequence
  Description of Artificial Sequence: Synthetic oligonucleotide
aacaacucucgagcuauca

SEQ ID NO: 1171752 - RNA, 19 nt, Artificial Sequence
  Description of Artificial Sequence: Synthetic oligonucleotide
auccccuggccauaauccg

SEQ ID NO: 1171753 - RNA, 19 nt, Artificial Sequence
  Description of Artificial Sequence: Synthetic oligonucleotide
caucacaaacucccugcgg

SEQ ID NO: 1171754 - RNA, 19 nt, Artificial Sequence
  Description of Artificial Sequence: Synthetic oligonucleotide
ucuucauguggggugggcc

SEQ ID NO: 1171755 - RNA, 19 nt, Artificial Sequence
  Description of Artificial Sequence: Synthetic oligonucleotide
gacuaaccccaacagccug

SEQ ID NO: 1171756 - RNA, 19 nt, Artificial Sequence
  Description of Artificial Sequence: Synthetic oligonucleotide
cauaucucggcccacugga

SEQ ID NO: 1171757 - RNA, 19 nt, Artificial Sequence
  Description of Artificial Sequence: Synthetic oligonucleotide
guuuuacucgcuccacagc

SEQ ID NO: 1171758 - RNA, 19 nt, Artificial Sequence
  Description of Artificial Sequence: Synthetic oligonucleotide
uguggggugggccacucuc

SEQ ID NO: 1171759 - RNA, 19 nt, Artificial Sequence
  Description of Artificial Sequence: Synthetic oligonucleotide
aucgugacaggacuccaca

SEQ ID NO: 1171760 - RNA, 19 nt, Artificial Sequence
  Description of Artificial Sequence: Synthetic oligonucleotide
uacaacaacucucgagcua

SEQ ID NO: 1171761 - RNA, 19 nt, Artificial Sequence
  Description of Artificial Sequence: Synthetic oligonucleotide
aaugagccagcaugagaau

SEQ ID NO: 1171762 - RNA, 19 nt, Artificial Sequence
  Description of Artificial Sequence: Synthetic oligonucleotide
uaucgugacaggacuccac

SEQ ID NO: 1171763 - RNA, 19 nt, Artificial Sequence
  Description of Artificial Sequence: Synthetic oligonucleotide
ugucuguagcuuacaugug

SEQ ID NO: 1171764 - RNA, 19 nt, Artificial Sequence
  Description of Artificial Sequence: Synthetic oligonucleotide
uguugggauuuauaaugau

SEQ ID NO: 1171765 - RNA, 19 nt, Artificial Sequence
  Description of Artificial Sequence: Synthetic oligonucleotide
cucccugcggcguggaagg

SEQ ID NO: 1171766 - RNA, 19 nt, Artificial Sequence
  Description of Artificial Sequence: Synthetic oligonucleotide
acacuuggcuuauuucuga

SEQ ID NO: 1171767 - RNA, 19 nt, Artificial Sequence
  Description of Artificial Sequence: Synthetic oligonucleotide
ucuucugauuugagugcug

SEQ ID NO: 1171768 - RNA, 19 nt, Artificial Sequence
  Description of Artificial Sequence: Synthetic oligonucleotide
ugguguccuugacuaaccc

SEQ ID NO: 1171769 - RNA, 19 nt, Artificial Sequence
  Description of Artificial Sequence: Synthetic oligonucleotide
uggggaacuuugaacccca

SEQ ID NO: 1171770 - RNA, 19 nt, Artificial Sequence
  Description of Artificial Sequence: Synthetic oligonucleotide
agccauaucgugacaggac

SEQ ID NO: 1171771 - RNA, 19 nt, Artificial Sequence
  Description of Artificial Sequence: Synthetic oligonucleotide
uccccgacugaaacccugg

SEQ ID NO: 1171772 - RNA, 19 nt, Artificial Sequence
  Description of Artificial Sequence: Synthetic oligonucleotide
acguuacuuuccuuccguc

SEQ ID NO: 1171773 - RNA, 19 nt, Artificial Sequence
  Description of Artificial Sequence: Synthetic oligonucleotide
agcauugucacuagcaguu

SEQ ID NO: 1171774 - RNA, 19 nt, Artificial Sequence
  Description of Artificial Sequence: Synthetic oligonucleotide
caaauuccgcuucagugca

SEQ ID NO: 1171775 - RNA, 19 nt, Artificial Sequence
  Description of Artificial Sequence: Synthetic oligonucleotide
auuugagugcuggcuuggc

SEQ ID NO: 1171776 - RNA, 19 nt, Artificial Sequence
  Description of Artificial Sequence: Synthetic oligonucleotide
gagcguguacucuggcucc

SEQ ID NO: 1171777 - RNA, 19 nt, Artificial Sequence
  Description of Artificial Sequence: Synthetic oligonucleotide
guauucaaccuggaauccc

SEQ ID NO: 1171778 - RNA, 19 nt, Artificial Sequence
  Description of Artificial Sequence: Synthetic oligonucleotide
uuucugauuuauugagguu

SEQ ID NO: 1171779 - RNA, 19 nt, Artificial Sequence
  Description of Artificial Sequence: Synthetic oligonucleotide
cuguagcuuacaugugggc

SEQ ID NO: 1171780 - RNA, 19 nt, Artificial Sequence
  Description of Artificial Sequence: Synthetic oligonucleotide
uggcuuauuucugauuuau

SEQ ID NO: 1171781 - RNA, 19 nt, Artificial Sequence
  Description of Artificial Sequence: Synthetic oligonucleotide
cuuugaaccccaagaucuc

SEQ ID NO: 1171782 - RNA, 19 nt, Artificial Sequence
  Description of Artificial Sequence: Synthetic oligonucleotide
augacuaguugcauuuuca

SEQ ID NO: 1171783 - RNA, 19 nt, Artificial Sequence
  Description of Artificial Sequence: Synthetic oligonucleotide
ucggugaggagcguguacu

SEQ ID NO: 1171784 - RNA, 19 nt, Artificial Sequence
  Description of Artificial Sequence: Synthetic oligonucleotide
uucuuaguagcuguuuauu

SEQ ID NO: 1171785 - RNA, 19 nt, Artificial Sequence
  Description of Artificial Sequence: Synthetic oligonucleotide
aauuccgcuucagugcaau

SEQ ID NO: 1171786 - RNA, 19 nt, Artificial Sequence
  Description of Artificial Sequence: Synthetic oligonucleotide
acaacucucgagcuaucau

SEQ ID NO: 1171787 - RNA, 19 nt, Artificial Sequence
  Description of Artificial Sequence: Synthetic oligonucleotide
uugucacuagcaguucagc

SEQ ID NO: 1171788 - RNA, 19 nt, Artificial Sequence
  Description of Artificial Sequence: Synthetic oligonucleotide
gagccagcaugagaauugg

SEQ ID NO: 1171789 - RNA, 19 nt, Artificial Sequence
  Description of Artificial Sequence: Synthetic oligonucleotide
gaucccggcuggcagcugc

SEQ ID NO: 1171790 - RNA, 19 nt, Artificial Sequence
  Description of Artificial Sequence: Synthetic oligonucleotide
cagauaaggcauccugaac

SEQ ID NO: 1171791 - RNA, 19 nt, Artificial Sequence
  Description of Artificial Sequence: Synthetic oligonucleotide
acugaaacccuggucacaa

SEQ ID NO: 1171792 - RNA, 19 nt, Artificial Sequence
  Description of Artificial Sequence: Synthetic oligonucleotide
gccagcaugagaauuggcc

SEQ ID NO: 1171793 - RNA, 19 nt, Artificial Sequence
  Description of Artificial Sequence: Synthetic oligonucleotide
auguugggauuuauaauga

SEQ ID NO: 1171794 - RNA, 19 nt, Artificial Sequence
  Description of Artificial Sequence: Synthetic oligonucleotide
uucuggguuuuacucgcuc

SEQ ID NO: 1171795 - RNA, 19 nt, Artificial Sequence
  Description of Artificial Sequence: Synthetic oligonucleotide
accuuuaccugcaucacaa

SEQ ID NO: 1171796 - RNA, 19 nt, Artificial Sequence
  Description of Artificial Sequence: Synthetic oligonucleotide
uacguguccugaagagaug

SEQ ID NO: 1171797 - RNA, 19 nt, Artificial Sequence
  Description of Artificial Sequence: Synthetic oligonucleotide
acuggggucuucucuucug

SEQ ID NO: 1171798 - RNA, 19 nt, Artificial Sequence
  Description of Artificial Sequence: Synthetic oligonucleotide
ucaaagcaguucucaguau

SEQ ID NO: 1171799 - RNA, 19 nt, Artificial Sequence
  Description of Artificial Sequence: Synthetic oligonucleotide
acaaacucccugcggcgug

SEQ ID NO: 1171800 - RNA, 19 nt, Artificial Sequence
  Description of Artificial Sequence: Synthetic oligonucleotide
auaaugauuuguagccaga

SEQ ID NO: 1171801 - RNA, 19 nt, Artificial Sequence
  Description of Artificial Sequence: Synthetic oligonucleotide
cuuaacuacugcugccaca

SEQ ID NO: 1171802 - RNA, 19 nt, Artificial Sequence
  Description of Artificial Sequence: Synthetic oligonucleotide
gagucgguuguguggggug

SEQ ID NO: 1171803 - RNA, 19 nt, Artificial Sequence
  Description of Artificial Sequence: Synthetic oligonucleotide
cuggggaacuuugaacccc

SEQ ID NO: 1171804 - RNA, 19 nt, Artificial Sequence
  Description of Artificial Sequence: Synthetic oligonucleotide
ggugugguguccuugacua

SEQ ID NO: 1171805 - RNA, 19 nt, Artificial Sequence
  Description of Artificial Sequence: Synthetic oligonucleotide
guggcuaacaagggguggc

SEQ ID NO: 1171806 - RNA, 19 nt, Artificial Sequence
  Description of Artificial Sequence: Synthetic oligonucleotide
agucgguuguguggggugg

SEQ ID NO: 1171807 - RNA, 19 nt, Artificial Sequence
  Description of Artificial Sequence: Synthetic oligonucleotide
cuggaaagguaguacagcu

SEQ ID NO: 1171808 - RNA, 19 nt, Artificial Sequence
  Description of Artificial Sequence: Synthetic oligonucleotide
uugguacccgcuccuucug

SEQ ID NO: 1171809 - RNA, 19 nt, Artificial Sequence
  Description of Artificial Sequence: Synthetic oligonucleotide
uaaaauggucucggcugug

SEQ ID NO: 1171810 - RNA, 19 nt, Artificial Sequence
  Description of Artificial Sequence: Synthetic oligonucleotide
aggcaaauuccgcuucagu

SEQ ID NO: 1171811 - RNA, 19 nt, Artificial Sequence
  Description of Artificial Sequence: Synthetic oligonucleotide
uggggugggccacucuccc

SEQ ID NO: 1171812 - RNA, 19 nt, Artificial Sequence
  Description of Artificial Sequence: Synthetic oligonucleotide
cuaacaagggguggcugug

SEQ ID NO: 1171813 - RNA, 19 nt, Artificial Sequence
  Description of Artificial Sequence: Synthetic oligonucleotide
cagcauugcgcuuggccac

SEQ ID NO: 1171814 - RNA, 19 nt, Artificial Sequence
  Description of Artificial Sequence: Synthetic oligonucleotide
caaugccguggcuaacaag

SEQ ID NO: 1171815 - RNA, 19 nt, Artificial Sequence
  Description of Artificial Sequence: Synthetic oligonucleotide
aggagcguguacucuggcu

SEQ ID NO: 1171816 - RNA, 19 nt, Artificial Sequence
  Description of Artificial Sequence: Synthetic oligonucleotide
agcaugagaauuggccaug

SEQ ID NO: 1171817 - RNA, 19 nt, Artificial Sequence
  Description of Artificial Sequence: Synthetic oligonucleotide
acuggaguuaucagaaauu

SEQ ID NO: 1171818 - RNA, 19 nt, Artificial Sequence
  Description of Artificial Sequence: Synthetic oligonucleotide
ggguacguguccugaagag

SEQ ID NO: 1171819 - RNA, 19 nt, Artificial Sequence
  Description of Artificial Sequence: Synthetic oligonucleotide
aguuaccguggccuuggca

SEQ ID NO: 1171820 - RNA, 19 nt, Artificial Sequence
  Description of Artificial Sequence: Synthetic oligonucleotide
gcguggaaggccucgcucg

SEQ ID NO: 1171821 - RNA, 19 nt, Artificial Sequence
  Description of Artificial Sequence: Synthetic oligonucleotide
ugguacccgcuccuucugc

SEQ ID NO: 1171822 - RNA, 19 nt, Artificial Sequence
  Description of Artificial Sequence: Synthetic oligonucleotide
acucccugcggcguggaag

SEQ ID NO: 1171823 - RNA, 19 nt, Artificial Sequence
  Description of Artificial Sequence: Synthetic oligonucleotide
gcauccugaacucauccuc

SEQ ID NO: 1171824 - RNA, 19 nt, Artificial Sequence
  Description of Artificial Sequence: Synthetic oligonucleotide
ccgacugaaacccugguca

SEQ ID NO: 1171825 - RNA, 19 nt, Artificial Sequence
  Description of Artificial Sequence: Synthetic oligonucleotide
ugcgccuggggaacuuuga

SEQ ID NO: 1171826 - RNA, 19 nt, Artificial Sequence
  Description of Artificial Sequence: Synthetic oligonucleotide
cacaggcaaauuccgcuuc

SEQ ID NO: 1171827 - RNA, 19 nt, Artificial Sequence
  Description of Artificial Sequence: Synthetic oligonucleotide
ccguacaacaacucucgag

SEQ ID NO: 1171828 - RNA, 19 nt, Artificial Sequence
  Description of Artificial Sequence: Synthetic oligonucleotide
ugagucgguuguguggggu

SEQ ID NO: 1171829 - RNA, 19 nt, Artificial Sequence
  Description of Artificial Sequence: Synthetic oligonucleotide
uggucacaaaguucuucau

SEQ ID NO: 1171830 - RNA, 19 nt, Artificial Sequence
  Description of Artificial Sequence: Synthetic oligonucleotide
cugaaugagccagcaugag

SEQ ID NO: 1171831 - RNA, 19 nt, Artificial Sequence
  Description of Artificial Sequence: Synthetic oligonucleotide
cacaaccggggccaccacc

SEQ ID NO: 1171832 - RNA, 19 nt, Artificial Sequence
  Description of Artificial Sequence: Synthetic oligonucleotide
cuggguuuuacucgcucca

SEQ ID NO: 1171833 - RNA, 19 nt, Artificial Sequence
  Description of Artificial Sequence: Synthetic oligonucleotide
cuucuuauugguacccgcu

SEQ ID NO: 1171834 - RNA, 19 nt, Artificial Sequence
  Description of Artificial Sequence: Synthetic oligonucleotide
cagggcuguccaaaguauc

SEQ ID NO: 1171835 - RNA, 19 nt, Artificial Sequence
  Description of Artificial Sequence: Synthetic oligonucleotide
gcucuguugguccaacuca

SEQ ID NO: 1171836 - RNA, 19 nt, Artificial Sequence
  Description of Artificial Sequence: Synthetic oligonucleotide
cuccggggccacucuaagg

SEQ ID NO: 1171837 - RNA, 19 nt, Artificial Sequence
  Description of Artificial Sequence: Synthetic oligonucleotide
acaaccggggccaccaccu

SEQ ID NO: 1171838 - RNA, 19 nt, Artificial Sequence
  Description of Artificial Sequence: Synthetic oligonucleotide
cacauucuuagccaccaua

SEQ ID NO: 1171839 - RNA, 19 nt, Artificial Sequence
  Description of Artificial Sequence: Synthetic oligonucleotide
aucucggcccacuggaguu

SEQ ID NO: 1171840 - RNA, 19 nt, Artificial Sequence
  Description of Artificial Sequence: Synthetic oligonucleotide
gaaacccuggucacaaagu

SEQ ID NO: 1171841 - RNA, 19 nt, Artificial Sequence
  Description of Artificial Sequence: Synthetic oligonucleotide
guacccgcuccuucugcag

SEQ ID NO: 1171842 - RNA, 19 nt, Artificial Sequence
  Description of Artificial Sequence: Synthetic oligonucleotide
gaggagcguguacucuggc

SEQ ID NO: 1171843 - RNA, 19 nt, Artificial Sequence
  Description of Artificial Sequence: Synthetic oligonucleotide
uggguuuuacucgcuccac

SEQ ID NO: 1171844 - RNA, 19 nt, Artificial Sequence
  Description of Artificial Sequence: Synthetic oligonucleotide
uuaugacuaguugcauuuu

SEQ ID NO: 1171845 - RNA, 19 nt, Artificial Sequence
  Description of Artificial Sequence: Synthetic oligonucleotide
ccagcaugagaauuggcca

SEQ ID NO: 1171846 - RNA, 19 nt, Artificial Sequence
  Description of Artificial Sequence: Synthetic oligonucleotide
caaacucccugcggcgugg

SEQ ID NO: 1171847 - RNA, 19 nt, Artificial Sequence
  Description of Artificial Sequence: Synthetic oligonucleotide
guacaacaacucucgagcu

SEQ ID NO: 1171848 - RNA, 19 nt, Artificial Sequence
  Description of Artificial Sequence: Synthetic oligonucleotide
auaucgugacaggacucca

SEQ ID NO: 1171849 - RNA, 19 nt, Artificial Sequence
  Description of Artificial Sequence: Synthetic oligonucleotide
aggagcaguugaugagaga

SEQ ID NO: 1171850 - RNA, 19 nt, Artificial Sequence
  Description of Artificial Sequence: Synthetic oligonucleotide
gcaguuaccguggccuugg

SEQ ID NO: 1171851 - RNA, 19 nt, Artificial Sequence
  Description of Artificial Sequence: Synthetic oligonucleotide
cuggccauaauccggggcu

SEQ ID NO: 1171852 - RNA, 19 nt, Artificial Sequence
  Description of Artificial Sequence: Synthetic oligonucleotide
cagcauguucucagcagca

SEQ ID NO: 1171853 - RNA, 19 nt, Artificial Sequence
  Description of Artificial Sequence: Synthetic oligonucleotide
guacguguccugaagagau

SEQ ID NO: 1171854 - RNA, 19 nt, Artificial Sequence
  Description of Artificial Sequence: Synthetic oligonucleotide
ccauaucucggcccacugg

SEQ ID NO: 1171855 - RNA, 19 nt, Artificial Sequence
  Description of Artificial Sequence: Synthetic oligonucleotide
auaucucggcccacuggag

SEQ ID NO: 1171856 - RNA, 19 nt, Artificial Sequence
  Description of Artificial Sequence: Synthetic oligonucleotide
cuacaaacuccccgacuga

SEQ ID NO: 1171857 - RNA, 19 nt, Artificial Sequence
  Description of Artificial Sequence: Synthetic oligonucleotide
cuuauugguacccgcuccu

SEQ ID NO: 1171858 - RNA, 19 nt, Artificial Sequence
  Description of Artificial Sequence: Synthetic oligonucleotide
uggcuaacaagggguggcu

SEQ ID NO: 1171859 - RNA, 19 nt, Artificial Sequence
  Description of Artificial Sequence: Synthetic oligonucleotide
guugggauuuauaaugauu

SEQ ID NO: 1171860 - RNA, 19 nt, Artificial Sequence
  Description of Artificial Sequence: Synthetic oligonucleotide
uggccauaauccggggcug

SEQ ID NO: 1171861 - RNA, 19 nt, Artificial Sequence
  Description of Artificial Sequence: Synthetic oligonucleotide
guauauauguugggauuua

SEQ ID NO: 1171862 - RNA, 19 nt, Artificial Sequence
  Description of Artificial Sequence: Synthetic oligonucleotide
caggcaaauuccgcuucag

SEQ ID NO: 1171863 - RNA, 19 nt, Artificial Sequence
  Description of Artificial Sequence: Synthetic oligonucleotide
agucugcuaauaggauuca

SEQ ID NO: 1171864 - RNA, 19 nt, Artificial Sequence
  Description of Artificial Sequence: Synthetic oligonucleotide
uuauugguacccgcuccuu

SEQ ID NO: 1171865 - RNA, 19 nt, Artificial Sequence
  Description of Artificial Sequence: Synthetic oligonucleotide
auccucuuuaugacuaguu

SEQ ID NO: 1171866 - RNA, 19 nt, Artificial Sequence
  Description of Artificial Sequence: Synthetic oligonucleotide
caaagcaguucucaguauu

SEQ ID NO: 1171867 - RNA, 19 nt, Artificial Sequence
  Description of Artificial Sequence: Synthetic oligonucleotide
agcaccucccacacgcuga

SEQ ID NO: 1171868 - RNA, 19 nt, Artificial Sequence
  Description of Artificial Sequence: Synthetic oligonucleotide
ccucaaaauucacaggcaa

SEQ ID NO: 1171869 - RNA, 19 nt, Artificial Sequence
  Description of Artificial Sequence: Synthetic oligonucleotide
guccuugacuaaccccaac

SEQ ID NO: 1171870 - RNA, 19 nt, Artificial Sequence
  Description of Artificial Sequence: Synthetic oligonucleotide
ggguuuuacucgcuccaca

SEQ ID NO: 1171871 - RNA, 19 nt, Artificial Sequence
  Description of Artificial Sequence: Synthetic oligonucleotide
gccauaucgugacaggacu

SEQ ID NO: 1171872 - RNA, 19 nt, Artificial Sequence
  Description of Artificial Sequence: Synthetic oligonucleotide
cagccauaucgugacagga

SEQ ID NO: 1171873 - RNA, 19 nt, Artificial Sequence
  Description of Artificial Sequence: Synthetic oligonucleotide
cugcgccuggggaacuuug

SEQ ID NO: 1171874 - RNA, 19 nt, Artificial Sequence
  Description of Artificial Sequence: Synthetic oligonucleotide
gaaagguaguacagcugcu

SEQ ID NO: 1171875 - RNA, 19 nt, Artificial Sequence
  Description of Artificial Sequence: Synthetic oligonucleotide
gggguacguguccugaaga

SEQ ID NO: 1171876 - RNA, 19 nt, Artificial Sequence
  Description of Artificial Sequence: Synthetic oligonucleotide
ucggagcugcccuggugaa

SEQ ID NO: 1171877 - RNA, 19 nt, Artificial Sequence
  Description of Artificial Sequence: Synthetic oligonucleotide
ccauaucgugacaggacuc

SEQ ID NO: 1171878 - RNA, 19 nt, Artificial Sequence
  Description of Artificial Sequence: Synthetic oligonucleotide
caacaacucucgagcuauc

SEQ ID NO: 1171879 - RNA, 19 nt, Artificial Sequence
  Description of Artificial Sequence: Synthetic oligonucleotide
gucuugugcgagguccaug

SEQ ID NO: 1171880 - RNA, 19 nt, Artificial Sequence
  Description of Artificial Sequence: Synthetic oligonucleotide
gccaccauaucucggccca

SEQ ID NO: 1171881 - RNA, 19 nt, Artificial Sequence
  Description of Artificial Sequence: Synthetic oligonucleotide
aaauuccgcuucagugcaa

SEQ ID NO: 1171882 - RNA, 19 nt, Artificial Sequence
  Description of Artificial Sequence: Synthetic oligonucleotide
uuccuuccgucuccugguu

SEQ ID NO: 1171883 - RNA, 19 nt, Artificial Sequence
  Description of Artificial Sequence: Synthetic oligonucleotide
gauucauccccuggccaua

SEQ ID NO: 1171884 - RNA, 19 nt, Artificial Sequence
  Description of Artificial Sequence: Synthetic oligonucleotide
ucgcucggugaggagcgug

SEQ ID NO: 1171885 - RNA, 19 nt, Artificial Sequence
  Description of Artificial Sequence: Synthetic oligonucleotide
gcuaacaagggguggcugu

SEQ ID NO: 1171886 - RNA, 19 nt, Artificial Sequence
  Description of Artificial Sequence: Synthetic oligonucleotide
uugccgcauucuucuugga

SEQ ID NO: 1171887 - RNA, 19 nt, Artificial Sequence
  Description of Artificial Sequence: Synthetic oligonucleotide
ccuugccgcauucuucuug

SEQ ID NO: 1171888 - RNA, 19 nt, Artificial Sequence
  Description of Artificial Sequence: Synthetic oligonucleotide
ucgagcuaucauggcaguu

SEQ ID NO: 1171889 - RNA, 19 nt, Artificial Sequence
  Description of Artificial Sequence: Synthetic oligonucleotide
agcuuacaugugggcugac

SEQ ID NO: 1171890 - RNA, 19 nt, Artificial Sequence
  Description of Artificial Sequence: Synthetic oligonucleotide
gcgagguccaugggguacg

SEQ ID NO: 1171891 - RNA, 19 nt, Artificial Sequence
  Description of Artificial Sequence: Synthetic oligonucleotide
auucuggguuuuacucgcu

SEQ ID NO: 1171892 - RNA, 19 nt, Artificial Sequence
  Description of Artificial Sequence: Synthetic oligonucleotide
ggcguggaaggccucgcuc

SEQ ID NO: 1171893 - RNA, 19 nt, Artificial Sequence
  Description of Artificial Sequence: Synthetic oligonucleotide
cuggcuuggcaggcugcgc

SEQ ID NO: 1171894 - RNA, 19 nt, Artificial Sequence
  Description of Artificial Sequence: Synthetic oligonucleotide
ggggugggccacucucccg

SEQ ID NO: 1171895 - RNA, 19 nt, Artificial Sequence
  Description of Artificial Sequence: Synthetic oligonucleotide
ggcuaacaagggguggcug

SEQ ID NO: 1171896 - RNA, 19 nt, Artificial Sequence
  Description of Artificial Sequence: Synthetic oligonucleotide
gccucgcucggugaggagc

SEQ ID NO: 1171897 - RNA, 19 nt, Artificial Sequence
  Description of Artificial Sequence: Synthetic oligonucleotide
ucgguugugugggguggaa

SEQ ID NO: 1171898 - RNA, 19 nt, Artificial Sequence
  Description of Artificial Sequence: Synthetic oligonucleotide
caggguucggagcugcccu

SEQ ID NO: 1171899 - RNA, 19 nt, Artificial Sequence
  Description of Artificial Sequence: Synthetic oligonucleotide
ccguggcuaacaaggggug

SEQ ID NO: 1171900 - RNA, 19 nt, Artificial Sequence
  Description of Artificial Sequence: Synthetic oligonucleotide
cuggugcuuuuagcuccgg

SEQ ID NO: 1171901 - RNA, 19 nt, Artificial Sequence
  Description of Artificial Sequence: Synthetic oligonucleotide
ugccaaugccguggcuaac

SEQ ID NO: 1171902 - RNA, 19 nt, Artificial Sequence
  Description of Artificial Sequence: Synthetic oligonucleotide
gcuccggggccacucuaag

SEQ ID NO: 1171903 - RNA, 19 nt, Artificial Sequence
  Description of Artificial Sequence: Synthetic oligonucleotide
cccgacugaaacccugguc

SEQ ID NO: 1171904 - RNA, 19 nt, Artificial Sequence
  Description of Artificial Sequence: Synthetic oligonucleotide
cauguggggugggccacuc

SEQ ID NO: 1171905 - RNA, 19 nt, Artificial Sequence
  Description of Artificial Sequence: Synthetic oligonucleotide
ggggcugucuguagcuuac

SEQ ID NO: 1171906 - RNA, 19 nt, Artificial Sequence
  Description of Artificial Sequence: Synthetic oligonucleotide
cuggaaucccugggcucug

SEQ ID NO: 1171907 - RNA, 19 nt, Artificial Sequence
  Description of Artificial Sequence: Synthetic oligonucleotide
gugugguguccuugacuaa

SEQ ID NO: 1171908 - RNA, 19 nt, Artificial Sequence
  Description of Artificial Sequence: Synthetic oligonucleotide
caaccggggccaccaccug

SEQ ID NO: 1171909 - RNA, 19 nt, Artificial Sequence
  Description of Artificial Sequence: Synthetic oligonucleotide
cguggaaggccucgcucgg

SEQ ID NO: 1171910 - RNA, 19 nt, Artificial Sequence
  Description of Artificial Sequence: Synthetic oligonucleotide
gccguggcuaacaaggggu

SEQ ID NO: 1171911 - RNA, 19 nt, Artificial Sequence
  Description of Artificial Sequence: Synthetic oligonucleotide
gugugguucccaaccuuua

SEQ ID NO: 1171912 - RNA, 19 nt, Artificial Sequence
  Description of Artificial Sequence: Synthetic oligonucleotide
cauccucuuuaugacuagu

SEQ ID NO: 1171913 - RNA, 19 nt, Artificial Sequence
  Description of Artificial Sequence: Synthetic oligonucleotide
cucgagcuaucauggcagu

SEQ ID NO: 1171914 - RNA, 19 nt, Artificial Sequence
  Description of Artificial Sequence: Synthetic oligonucleotide
agcaccgcccuugccgcau

SEQ ID NO: 1171915 - RNA, 19 nt, Artificial Sequence
  Description of Artificial Sequence: Synthetic oligonucleotide
agcuccggggccacucuaa

SEQ ID NO: 1171916 - RNA, 19 nt, Artificial Sequence
  Description of Artificial Sequence: Synthetic oligonucleotide
gucgguuguguggggugga

SEQ ID NO: 1171917 - RNA, 19 nt, Artificial Sequence
  Description of Artificial Sequence: Synthetic oligonucleotide
gugcagccauaucgugaca

SEQ ID NO: 1171918 - RNA, 19 nt, Artificial Sequence
  Description of Artificial Sequence: Synthetic oligonucleotide
cacaaacucccugcggcgu

SEQ ID NO: 1171919 - RNA, 19 nt, Artificial Sequence
  Description of Artificial Sequence: Synthetic oligonucleotide
ucccugcggcguggaaggc

SEQ ID NO: 1171920 - RNA, 19 nt, Artificial Sequence
  Description of Artificial Sequence: Synthetic oligonucleotide
ggugaggagcguguacucu

SEQ ID NO: 1171921 - RNA, 19 nt, Artificial Sequence
  Description of Artificial Sequence: Synthetic oligonucleotide
gcuggaucugagccagucu

SEQ ID NO: 1171922 - RNA, 19 nt, Artificial Sequence
  Description of Artificial Sequence: Synthetic oligonucleotide
ccagucugcuaauaggauu

SEQ ID NO: 1171923 - RNA, 19 nt, Artificial Sequence
  Description of Artificial Sequence: Synthetic oligonucleotide
cguuacuuuccuuccgucu

SEQ ID NO: 1171924 - RNA, 19 nt, Artificial Sequence
  Description of Artificial Sequence: Synthetic oligonucleotide
cgagcuaucauggcaguua

SEQ ID NO: 1171925 - RNA, 19 nt, Artificial Sequence
  Description of Artificial Sequence: Synthetic oligonucleotide
gugcgagguccauggggua

SEQ ID NO: 1171926 - RNA, 19 nt, Artificial Sequence
  Description of Artificial Sequence: Synthetic oligonucleotide
cuacugcugccacauucuu

SEQ ID NO: 1171927 - RNA, 19 nt, Artificial Sequence
  Description of Artificial Sequence: Synthetic oligonucleotide
gcgccuggggaacuuugaa

SEQ ID NO: 1171928 - RNA, 19 nt, Artificial Sequence
  Description of Artificial Sequence: Synthetic oligonucleotide
caccauaucucggcccacu

SEQ ID NO: 1171929 - RNA, 19 nt, Artificial Sequence
  Description of Artificial Sequence: Synthetic oligonucleotide
cugcccuggugaaaucuuu

SEQ ID NO: 1171930 - RNA, 19 nt, Artificial Sequence
  Description of Artificial Sequence: Synthetic oligonucleotide
caccgcccuugccgcauuc

SEQ ID NO: 1171931 - RNA, 19 nt, Artificial Sequence
  Description of Artificial Sequence: Synthetic oligonucleotide
cccugcggcguggaaggcc

SEQ ID NO: 1171932 - RNA, 19 nt, Artificial Sequence
  Description of Artificial Sequence: Synthetic oligonucleotide
ccaaugccguggcuaacaa

SEQ ID NO: 1171933 - RNA, 19 nt, Artificial Sequence
  Description of Artificial Sequence: Synthetic oligonucleotide
gcuuacaugugggcugacu

SEQ ID NO: 1171934 - RNA, 19 nt, Artificial Sequence
  Description of Artificial Sequence: Synthetic oligonucleotide
ggggccacucuaaggccuc

SEQ ID NO: 1171935 - RNA, 19 nt, Artificial Sequence
  Description of Artificial Sequence: Synthetic oligonucleotide
guacagcugcucagagggu

SEQ ID NO: 1171936 - RNA, 19 nt, Artificial Sequence
  Description of Artificial Sequence: Synthetic oligonucleotide
cugcggcguggaaggccuc

SEQ ID NO: 1171937 - RNA, 19 nt, Artificial Sequence
  Description of Artificial Sequence: Synthetic oligonucleotide
ggcuuauuucugauuuauu

SEQ ID NO: 1171938 - RNA, 19 nt, Artificial Sequence
  Description of Artificial Sequence: Synthetic oligonucleotide
ccgucuccugguuucuuua

SEQ ID NO: 1171939 - RNA, 19 nt, Artificial Sequence
  Description of Artificial Sequence: Synthetic oligonucleotide
gcggcguggaaggccucgc

SEQ ID NO: 1171940 - RNA, 19 nt, Artificial Sequence
  Description of Artificial Sequence: Synthetic oligonucleotide
cagcaccgcccuugccgca

SEQ ID NO: 1171941 - RNA, 19 nt, Artificial Sequence
  Description of Artificial Sequence: Synthetic oligonucleotide
ggccacucuaaggccucuc

SEQ ID NO: 1171942 - RNA, 19 nt, Artificial Sequence
  Description of Artificial Sequence: Synthetic oligonucleotide
cacacucguucuuguuguu

SEQ ID NO: 1171943 - RNA, 19 nt, Artificial Sequence
  Description of Artificial Sequence: Synthetic oligonucleotide
cagaggcggcagccuccuc

SEQ ID NO: 1171944 - RNA, 19 nt, Artificial Sequence
  Description of Artificial Sequence: Synthetic oligonucleotide
gccagucugcuaauaggau

SEQ ID NO: 1171945 - RNA, 19 nt, Artificial Sequence
  Description of Artificial Sequence: Synthetic oligonucleotide
ggccauaauccggggcugu

SEQ ID NO: 1171946 - RNA, 19 nt, Artificial Sequence
  Description of Artificial Sequence: Synthetic oligonucleotide
ggucuugugcgagguccau

SEQ ID NO: 1171947 - RNA, 19 nt, Artificial Sequence
  Description of Artificial Sequence: Synthetic oligonucleotide
cccacacgcugacacuggu

SEQ ID NO: 1171948 - RNA, 19 nt, Artificial Sequence
  Description of Artificial Sequence: Synthetic oligonucleotide
cauugcgcuuggccaccuu

SEQ ID NO: 1171949 - RNA, 19 nt, Artificial Sequence
  Description of Artificial Sequence: Synthetic oligonucleotide
cggggcugucuguagcuua

SEQ ID NO: 1171950 - RNA, 19 nt, Artificial Sequence
  Description of Artificial Sequence: Synthetic oligonucleotide
cgcucggugaggagcgugu

SEQ ID NO: 1171951 - RNA, 19 nt, Artificial Sequence
  Description of Artificial Sequence: Synthetic oligonucleotide
cccgggccaccucaaaauu

SEQ ID NO: 1171952 - RNA, 19 nt, Artificial Sequence
  Description of Artificial Sequence: Synthetic oligonucleotide
cucgcucggugaggagcgu

SEQ ID NO: 1171953 - RNA, 19 nt, Artificial Sequence
  Description of Artificial Sequence: Synthetic oligonucleotide
gcauugcgcuuggccaccu

SEQ ID NO: 1171954 - RNA, 19 nt, Artificial Sequence
  Description of Artificial Sequence: Synthetic oligonucleotide
ccccgacugaaacccuggu

SEQ ID NO: 1171955 - RNA, 19 nt, Artificial Sequence
  Description of Artificial Sequence: Synthetic oligonucleotide
gggccacucuaaggccucu

SEQ ID NO: 1171956 - RNA, 19 nt, Artificial Sequence
  Description of Artificial Sequence: Synthetic oligonucleotide
gcguguacucuggcuccuu

SEQ ID NO: 1171957 - RNA, 19 nt, Artificial Sequence
  Description of Artificial Sequence: Synthetic oligonucleotide
gcaccgcccuugccgcauu

SEQ ID NO: 1171958 - RNA, 19 nt, Artificial Sequence
  Description of Artificial Sequence: Synthetic oligonucleotide
cggcguggaaggccucgcu

SEQ ID NO: 1171959 - RNA, 19 nt, Artificial Sequence
  Description of Artificial Sequence: Synthetic oligonucleotide
ccggggcugucuguagcuu

SEQ ID NO: 1171960 - RNA, 19 nt, Artificial Sequence
  Description of Artificial Sequence: Synthetic oligonucleotide
aaauacauuaccuguaugg

SEQ ID NO: 1171961 - RNA, 19 nt, Artificial Sequence
  Description of Artificial Sequence: Synthetic oligonucleotide
aucuauguuauuuugaagc

SEQ ID NO: 1171962 - RNA, 19 nt, Artificial Sequence
  Description of Artificial Sequence: Synthetic oligonucleotide
acuacuaaauaacugaagc

SEQ ID NO: 1171963 - RNA, 19 nt, Artificial Sequence
  Description of Artificial Sequence: Synthetic oligonucleotide
gauuaaagaaacuaggcag

SEQ ID NO: 1171964 - RNA, 19 nt, Artificial Sequence
  Description of Artificial Sequence: Synthetic oligonucleotide
aauuauacugucuauucuc

SEQ ID NO: 1171965 - RNA, 19 nt, Artificial Sequence
  Description of Artificial Sequence: Synthetic oligonucleotide
acagguauaauucuugugc

SEQ ID NO: 1171966 - RNA, 19 nt, Artificial Sequence
  Description of Artificial Sequence: Synthetic oligonucleotide
aaaucuauguuucugacca

SEQ ID NO: 1171967 - RNA, 19 nt, Artificial Sequence
  Description of Artificial Sequence: Synthetic oligonucleotide
ugucuuucuaaguagaagg

SEQ ID NO: 1171968 - RNA, 19 nt, Artificial Sequence
  Description of Artificial Sequence: Synthetic oligonucleotide
uuuauuuucggagugaugc

SEQ ID NO: 1171969 - RNA, 19 nt, Artificial Sequence
  Description of Artificial Sequence: Synthetic oligonucleotide
gauacaaagauacacaauc

SEQ ID NO: 1171970 - RNA, 19 nt, Artificial Sequence
  Description of Artificial Sequence: Synthetic oligonucleotide
agaugaacacaauugauac

SEQ ID NO: 1171971 - RNA, 19 nt, Artificial Sequence
  Description of Artificial Sequence: Synthetic oligonucleotide
uuuugaagcacccaaaacu

SEQ ID NO: 1171972 - RNA, 19 nt, Artificial Sequence
  Description of Artificial Sequence: Synthetic oligonucleotide
aaauuaggcagauaaaaga

SEQ ID NO: 1171973 - RNA, 19 nt, Artificial Sequence
  Description of Artificial Sequence: Synthetic oligonucleotide
auuacucaaaauuaggcag

SEQ ID NO: 1171974 - RNA, 19 nt, Artificial Sequence
  Description of Artificial Sequence: Synthetic oligonucleotide
agaaaguaaauacugggag

SEQ ID NO: 1171975 - RNA, 19 nt, Artificial Sequence
  Description of Artificial Sequence: Synthetic oligonucleotide
uauauaauuauacugucua

SEQ ID NO: 1171976 - RNA, 19 nt, Artificial Sequence
  Description of Artificial Sequence: Synthetic oligonucleotide
aucagugauacaaagauac

SEQ ID NO: 1171977 - RNA, 19 nt, Artificial Sequence
  Description of Artificial Sequence: Synthetic oligonucleotide
agcaccaacaauuuauuac

SEQ ID NO: 1171978 - RNA, 19 nt, Artificial Sequence
  Description of Artificial Sequence: Synthetic oligonucleotide
aaccuucccauauaacugc

SEQ ID NO: 1171979 - RNA, 19 nt, Artificial Sequence
  Description of Artificial Sequence: Synthetic oligonucleotide
ucuucauacacauggcucg

SEQ ID NO: 1171980 - RNA, 19 nt, Artificial Sequence
  Description of Artificial Sequence: Synthetic oligonucleotide
ugagauguuagcaauacaa

SEQ ID NO: 1171981 - RNA, 19 nt, Artificial Sequence
  Description of Artificial Sequence: Synthetic oligonucleotide
aaacccauaaucuucaauu

SEQ ID NO: 1171982 - RNA, 19 nt, Artificial Sequence
  Description of Artificial Sequence: Synthetic oligonucleotide
aauugauacaaugaugaug

SEQ ID NO: 1171983 - RNA, 19 nt, Artificial Sequence
  Description of Artificial Sequence: Synthetic oligonucleotide
agauguuagcaauacaauc

SEQ ID NO: 1171984 - RNA, 19 nt, Artificial Sequence
  Description of Artificial Sequence: Synthetic oligonucleotide
auugauacaaugaugauga

SEQ ID NO: 1171985 - RNA, 19 nt, Artificial Sequence
  Description of Artificial Sequence: Synthetic oligonucleotide
ugauaaauacauuaccugu

SEQ ID NO: 1171986 - RNA, 19 nt, Artificial Sequence
  Description of Artificial Sequence: Synthetic oligonucleotide
uguuuuaucuaucaguaau

SEQ ID NO: 1171987 - RNA, 19 nt, Artificial Sequence
  Description of Artificial Sequence: Synthetic oligonucleotide
aaaugcuuccaccuuaaug

SEQ ID NO: 1171988 - RNA, 19 nt, Artificial Sequence
  Description of Artificial Sequence: Synthetic oligonucleotide
auggauugacuuuaucucc

SEQ ID NO: 1171989 - RNA, 19 nt, Artificial Sequence
  Description of Artificial Sequence: Synthetic oligonucleotide
caauuacucaaaauuaggc

SEQ ID NO: 1171990 - RNA, 19 nt, Artificial Sequence
  Description of Artificial Sequence: Synthetic oligonucleotide
cagguuguaagaauggugg

SEQ ID NO: 1171991 - RNA, 19 nt, Artificial Sequence
  Description of Artificial Sequence: Synthetic oligonucleotide
acuauuagucaacagaagu

SEQ ID NO: 1171992 - RNA, 19 nt, Artificial Sequence
  Description of Artificial Sequence: Synthetic oligonucleotide
aaaaugagauguuagcaau

SEQ ID NO: 1171993 - RNA, 19 nt, Artificial Sequence
  Description of Artificial Sequence: Synthetic oligonucleotide
agguaucuuagccagaauc

SEQ ID NO: 1171994 - RNA, 19 nt, Artificial Sequence
  Description of Artificial Sequence: Synthetic oligonucleotide
ugagcuagcaaaaugcuuc

SEQ ID NO: 1171995 - RNA, 19 nt, Artificial Sequence
  Description of Artificial Sequence: Synthetic oligonucleotide
agauuaaagaaacuaggca

SEQ ID NO: 1171996 - RNA, 19 nt, Artificial Sequence
  Description of Artificial Sequence: Synthetic oligonucleotide
ugugcuucuaaugagcuag

SEQ ID NO: 1171997 - RNA, 19 nt, Artificial Sequence
  Description of Artificial Sequence: Synthetic oligonucleotide
acaugagucacauggauug

SEQ ID NO: 1171998 - RNA, 19 nt, Artificial Sequence
  Description of Artificial Sequence: Synthetic oligonucleotide
aacugaaggcucgagagcg

SEQ ID NO: 1171999 - RNA, 19 nt, Artificial Sequence
  Description of Artificial Sequence: Synthetic oligonucleotide
uacauuaccuguaugggcu

SEQ ID NO: 1172000 - RNA, 19 nt, Artificial Sequence
  Description of Artificial Sequence: Synthetic oligonucleotide
aauaauauguaaaacccau

SEQ ID NO: 1172001 - RNA, 19 nt, Artificial Sequence
  Description of Artificial Sequence: Synthetic oligonucleotide
agagacuaaaaugagaugu

SEQ ID NO: 1172002 - RNA, 19 nt, Artificial Sequence
  Description of Artificial Sequence: Synthetic oligonucleotide
ugaaaguuacagaugaauc

SEQ ID NO: 1172003 - RNA, 19 nt, Artificial Sequence
  Description of Artificial Sequence: Synthetic oligonucleotide
uuugaagcacccaaaacuc

SEQ ID NO: 1172004 - RNA, 19 nt, Artificial Sequence
  Description of Artificial Sequence: Synthetic oligonucleotide
aaaguuacagaugaaucca

SEQ ID NO: 1172005 - RNA, 19 nt, Artificial Sequence
  Description of Artificial Sequence: Synthetic oligonucleotide
gauaguaagcuugauauuc

SEQ ID NO: 1172006 - RNA, 19 nt, Artificial Sequence
  Description of Artificial Sequence: Synthetic oligonucleotide
acauggauugacuuuaucu

SEQ ID NO: 1172007 - RNA, 19 nt, Artificial Sequence
  Description of Artificial Sequence: Synthetic oligonucleotide
ugugcagccaaaacacucg

SEQ ID NO: 1172008 - RNA, 19 nt, Artificial Sequence
  Description of Artificial Sequence: Synthetic oligonucleotide
uguaaugaaacaaguaauu

SEQ ID NO: 1172009 - RNA, 19 nt, Artificial Sequence
  Description of Artificial Sequence: Synthetic oligonucleotide
augcaauuacaucuagggc

SEQ ID NO: 1172010 - RNA, 19 nt, Artificial Sequence
  Description of Artificial Sequence: Synthetic oligonucleotide
cuuucuaaguagaagguuc

SEQ ID NO: 1172011 - RNA, 19 nt, Artificial Sequence
  Description of Artificial Sequence: Synthetic oligonucleotide
ucuauguuauuuugaagca

SEQ ID NO: 1172012 - RNA, 19 nt, Artificial Sequence
  Description of Artificial Sequence: Synthetic oligonucleotide
uuaucuauguuauuuugaa

SEQ ID NO: 1172013 - RNA, 19 nt, Artificial Sequence
  Description of Artificial Sequence: Synthetic oligonucleotide
aaaccagagguauuugucu

SEQ ID NO: 1172014 - RNA, 19 nt, Artificial Sequence
  Description of Artificial Sequence: Synthetic oligonucleotide
uucuuugauaaaccagagg

SEQ ID NO: 1172015 - RNA, 19 nt, Artificial Sequence
  Description of Artificial Sequence: Synthetic oligonucleotide
aaacaaguaauugccaugu

SEQ ID NO: 1172016 - RNA, 19 nt, Artificial Sequence
  Description of Artificial Sequence: Synthetic oligonucleotide
gaagguucuaacuuuaaaa

SEQ ID NO: 1172017 - RNA, 19 nt, Artificial Sequence
  Description of Artificial Sequence: Synthetic oligonucleotide
uauuacaauucccaaaauu

SEQ ID NO: 1172018 - RNA, 19 nt, Artificial Sequence
  Description of Artificial Sequence: Synthetic oligonucleotide
aaccagagguauuugucuc

SEQ ID NO: 1172019 - RNA, 19 nt, Artificial Sequence
  Description of Artificial Sequence: Synthetic oligonucleotide
ucuaucaguaauuccaauc

SEQ ID NO: 1172020 - RNA, 19 nt, Artificial Sequence
  Description of Artificial Sequence: Synthetic oligonucleotide
uaauuauacugucuauucu

SEQ ID NO: 1172021 - RNA, 19 nt, Artificial Sequence
  Description of Artificial Sequence: Synthetic oligonucleotide
gaaacaaguaauugccaug

SEQ ID NO: 1172022 - RNA, 19 nt, Artificial Sequence
  Description of Artificial Sequence: Synthetic oligonucleotide
auacugucuauucucguuc

SEQ ID NO: 1172023 - RNA, 19 nt, Artificial Sequence
  Description of Artificial Sequence: Synthetic oligonucleotide
guaauuccaaucuuucacc

SEQ ID NO: 1172024 - RNA, 19 nt, Artificial Sequence
  Description of Artificial Sequence: Synthetic oligonucleotide
aaguagaagguucuaacuu

SEQ ID NO: 1172025 - RNA, 19 nt, Artificial Sequence
  Description of Artificial Sequence: Synthetic oligonucleotide
ucuugugcuucuaaugagc

SEQ ID NO: 1172026 - RNA, 19 nt, Artificial Sequence
  Description of Artificial Sequence: Synthetic oligonucleotide
cauggauugacuuuaucuc

SEQ ID NO: 1172027 - RNA, 19 nt, Artificial Sequence
  Description of Artificial Sequence: Synthetic oligonucleotide
aaauaauauguaaaaccca

SEQ ID NO: 1172028 - RNA, 19 nt, Artificial Sequence
  Description of Artificial Sequence: Synthetic oligonucleotide
gauauaagcagcaccaaca

SEQ ID NO: 1172029 - RNA, 19 nt, Artificial Sequence
  Description of Artificial Sequence: Synthetic oligonucleotide
uuacucaaaauuaggcaga

SEQ ID NO: 1172030 - RNA, 19 nt, Artificial Sequence
  Description of Artificial Sequence: Synthetic oligonucleotide
ugugcuugagucuccauca

SEQ ID NO: 1172031 - RNA, 19 nt, Artificial Sequence
  Description of Artificial Sequence: Synthetic oligonucleotide
aguaaguuaguuuauuauu

SEQ ID NO: 1172032 - RNA, 19 nt, Artificial Sequence
  Description of Artificial Sequence: Synthetic oligonucleotide
ugucuauucucguucaugu

SEQ ID NO: 1172033 - RNA, 19 nt, Artificial Sequence
  Description of Artificial Sequence: Synthetic oligonucleotide
uuaggcagauaaaagaauu

SEQ ID NO: 1172034 - RNA, 19 nt, Artificial Sequence
  Description of Artificial Sequence: Synthetic oligonucleotide
guaagcuugauauucuuca

SEQ ID NO: 1172035 - RNA, 19 nt, Artificial Sequence
  Description of Artificial Sequence: Synthetic oligonucleotide
acaaguaauugccauguga

SEQ ID NO: 1172036 - RNA, 19 nt, Artificial Sequence
  Description of Artificial Sequence: Synthetic oligonucleotide
ucuauucucguucauguuu

SEQ ID NO: 1172037 - RNA, 19 nt, Artificial Sequence
  Description of Artificial Sequence: Synthetic oligonucleotide
aauggugguuuccaccuug

SEQ ID NO: 1172038 - RNA, 19 nt, Artificial Sequence
  Description of Artificial Sequence: Synthetic oligonucleotide
aagcacccaaaacucuccc

SEQ ID NO: 1172039 - RNA, 19 nt, Artificial Sequence
  Description of Artificial Sequence: Synthetic oligonucleotide
aauuuugcccagaagaaaa

SEQ ID NO: 1172040 - RNA, 19 nt, Artificial Sequence
  Description of Artificial Sequence: Synthetic oligonucleotide
aaaccuucccauauaacug

SEQ ID NO: 1172041 - RNA, 19 nt, Artificial Sequence
  Description of Artificial Sequence: Synthetic oligonucleotide
gacuaaaaugagauguuag

SEQ ID NO: 1172042 - RNA, 19 nt, Artificial Sequence
  Description of Artificial Sequence: Synthetic oligonucleotide
uuuucagauagccacccaa

SEQ ID NO: 1172043 - RNA, 19 nt, Artificial Sequence
  Description of Artificial Sequence: Synthetic oligonucleotide
aagagacuaaaaugagaug

SEQ ID NO: 1172044 - RNA, 19 nt, Artificial Sequence
  Description of Artificial Sequence: Synthetic oligonucleotide
aaaagagacuaaaaugaga

SEQ ID NO: 1172045 - RNA, 19 nt, Artificial Sequence
  Description of Artificial Sequence: Synthetic oligonucleotide
uaaaccagagguauuuguc

SEQ ID NO: 1172046 - RNA, 19 nt, Artificial Sequence
  Description of Artificial Sequence: Synthetic oligonucleotide
auuauacugucuauucucg

SEQ ID NO: 1172047 - RNA, 19 nt, Artificial Sequence
  Description of Artificial Sequence: Synthetic oligonucleotide
ucaaacuauuagucaacag

SEQ ID NO: 1172048 - RNA, 19 nt, Artificial Sequence
  Description of Artificial Sequence: Synthetic oligonucleotide
cuaaugagcuagcaaaaug

SEQ ID NO: 1172049 - RNA, 19 nt, Artificial Sequence
  Description of Artificial Sequence: Synthetic oligonucleotide
caaucuuucaccacguuga

SEQ ID NO: 1172050 - RNA, 19 nt, Artificial Sequence
  Description of Artificial Sequence: Synthetic oligonucleotide
cacaauugauacaaugaug

SEQ ID NO: 1172051 - RNA, 19 nt, Artificial Sequence
  Description of Artificial Sequence: Synthetic oligonucleotide
agugaugcuucaguugugc

SEQ ID NO: 1172052 - RNA, 19 nt, Artificial Sequence
  Description of Artificial Sequence: Synthetic oligonucleotide
acaauucccaaaauuaucu

SEQ ID NO: 1172053 - RNA, 19 nt, Artificial Sequence
  Description of Artificial Sequence: Synthetic oligonucleotide
agaggugacacaaugauau

SEQ ID NO: 1172054 - RNA, 19 nt, Artificial Sequence
  Description of Artificial Sequence: Synthetic oligonucleotide
aacuacuaaauaacugaag

SEQ ID NO: 1172055 - RNA, 19 nt, Artificial Sequence
  Description of Artificial Sequence: Synthetic oligonucleotide
ucugucuugcccuuuauuu

SEQ ID NO: 1172056 - RNA, 19 nt, Artificial Sequence
  Description of Artificial Sequence: Synthetic oligonucleotide
cagaaguuaaauccaaauc

SEQ ID NO: 1172057 - RNA, 19 nt, Artificial Sequence
  Description of Artificial Sequence: Synthetic oligonucleotide
ugguaguuuugaaaguuac

SEQ ID NO: 1172058 - RNA, 19 nt, Artificial Sequence
  Description of Artificial Sequence: Synthetic oligonucleotide
uaguuuugaaaguuacaga

SEQ ID NO: 1172059 - RNA, 19 nt, Artificial Sequence
  Description of Artificial Sequence: Synthetic oligonucleotide
aaauacugggaggacaggu

SEQ ID NO: 1172060 - RNA, 19 nt, Artificial Sequence
  Description of Artificial Sequence: Synthetic oligonucleotide
gauguuagcaauacaaucu

SEQ ID NO: 1172061 - RNA, 19 nt, Artificial Sequence
  Description of Artificial Sequence: Synthetic oligonucleotide
acuaaauaacugaagccag

SEQ ID NO: 1172062 - RNA, 19 nt, Artificial Sequence
  Description of Artificial Sequence: Synthetic oligonucleotide
ucguucauguuuuacaauu

SEQ ID NO: 1172063 - RNA, 19 nt, Artificial Sequence
  Description of Artificial Sequence: Synthetic oligonucleotide
cagauagccacccaacuac

SEQ ID NO: 1172064 - RNA, 19 nt, Artificial Sequence
  Description of Artificial Sequence: Synthetic oligonucleotide
agcgcucaaaaucaucauc

SEQ ID NO: 1172065 - RNA, 19 nt, Artificial Sequence
  Description of Artificial Sequence: Synthetic oligonucleotide
guuaagauauuuuguauua

SEQ ID NO: 1172066 - RNA, 19 nt, Artificial Sequence
  Description of Artificial Sequence: Synthetic oligonucleotide
uugagcaaccaaaucuaug

SEQ ID NO: 1172067 - RNA, 19 nt, Artificial Sequence
  Description of Artificial Sequence: Synthetic oligonucleotide
ucgagcaagauuucugcug

SEQ ID NO: 1172068 - RNA, 19 nt, Artificial Sequence
  Description of Artificial Sequence: Synthetic oligonucleotide
aaguuacagaugaauccac

SEQ ID NO: 1172069 - RNA, 19 nt, Artificial Sequence
  Description of Artificial Sequence: Synthetic oligonucleotide
agagaggugacacaaugau

SEQ ID NO: 1172070 - RNA, 19 nt, Artificial Sequence
  Description of Artificial Sequence: Synthetic oligonucleotide
cagacagguuguaagaaug

SEQ ID NO: 1172071 - RNA, 19 nt, Artificial Sequence
  Description of Artificial Sequence: Synthetic oligonucleotide
ucauacacauggcucgagc

SEQ ID NO: 1172072 - RNA, 19 nt, Artificial Sequence
  Description of Artificial Sequence: Synthetic oligonucleotide
uugaaccguaaguaguuug

SEQ ID NO: 1172073 - RNA, 19 nt, Artificial Sequence
  Description of Artificial Sequence: Synthetic oligonucleotide
ugaguaaguuaguuuauua

SEQ ID NO: 1172074 - RNA, 19 nt, Artificial Sequence
  Description of Artificial Sequence: Synthetic oligonucleotide
cauucagauuuucuuauuc

SEQ ID NO: 1172075 - RNA, 19 nt, Artificial Sequence
  Description of Artificial Sequence: Synthetic oligonucleotide
uucuaaugagcuagcaaaa

SEQ ID NO: 1172076 - RNA, 19 nt, Artificial Sequence
  Description of Artificial Sequence: Synthetic oligonucleotide
aggaaguuuccuccacacc

SEQ ID NO: 1172077 - RNA, 19 nt, Artificial Sequence
  Description of Artificial Sequence: Synthetic oligonucleotide
cacccaacuacuaaauaac

SEQ ID NO: 1172078 - RNA, 19 nt, Artificial Sequence
  Description of Artificial Sequence: Synthetic oligonucleotide
aaguaaauacugggaggac

SEQ ID NO: 1172079 - RNA, 19 nt, Artificial Sequence
  Description of Artificial Sequence: Synthetic oligonucleotide
uggauugacuuuaucuccu

SEQ ID NO: 1172080 - RNA, 19 nt, Artificial Sequence
  Description of Artificial Sequence: Synthetic oligonucleotide
cuaaaaugagauguuagca

SEQ ID NO: 1172081 - RNA, 19 nt, Artificial Sequence
  Description of Artificial Sequence: Synthetic oligonucleotide
uucucaaaauuuugcccag

SEQ ID NO: 1172082 - RNA, 19 nt, Artificial Sequence
  Description of Artificial Sequence: Synthetic oligonucleotide
accguaaguaguuuggaau

SEQ ID NO: 1172083 - RNA, 19 nt, Artificial Sequence
  Description of Artificial Sequence: Synthetic oligonucleotide
ucuacaguaaauguauguu

SEQ ID NO: 1172084 - RNA, 19 nt, Artificial Sequence
  Description of Artificial Sequence: Synthetic oligonucleotide
caaaacacucgagaacucg

SEQ ID NO: 1172085 - RNA, 19 nt, Artificial Sequence
  Description of Artificial Sequence: Synthetic oligonucleotide
gacagguauaauucuugug

SEQ ID NO: 1172086 - RNA, 19 nt, Artificial Sequence
  Description of Artificial Sequence: Synthetic oligonucleotide
cagugauacaaagauacac

SEQ ID NO: 1172087 - RNA, 19 nt, Artificial Sequence
  Description of Artificial Sequence: Synthetic oligonucleotide
uguaaccccaccacagaga

SEQ ID NO: 1172088 - RNA, 19 nt, Artificial Sequence
  Description of Artificial Sequence: Synthetic oligonucleotide
ugauacaaagauacacaau

SEQ ID NO: 1172089 - RNA, 19 nt, Artificial Sequence
  Description of Artificial Sequence: Synthetic oligonucleotide
cauauggaagugcagucug

SEQ ID NO: 1172090 - RNA, 19 nt, Artificial Sequence
  Description of Artificial Sequence: Synthetic oligonucleotide
auauaauuauacugucuau

SEQ ID NO: 1172091 - RNA, 19 nt, Artificial Sequence
  Description of Artificial Sequence: Synthetic oligonucleotide
aguaaauacugggaggaca

SEQ ID NO: 1172092 - RNA, 19 nt, Artificial Sequence
  Description of Artificial Sequence: Synthetic oligonucleotide
aggugacacaaugauauag

SEQ ID NO: 1172093 - RNA, 19 nt, Artificial Sequence
  Description of Artificial Sequence: Synthetic oligonucleotide
uguuagcaauacaaucugu

SEQ ID NO: 1172094 - RNA, 19 nt, Artificial Sequence
  Description of Artificial Sequence: Synthetic oligonucleotide
aguaauugccaugugagua

SEQ ID NO: 1172095 - RNA, 19 nt, Artificial Sequence
  Description of Artificial Sequence: Synthetic oligonucleotide
ugucuugcccuuuauuuuc

SEQ ID NO: 1172096 - RNA, 19 nt, Artificial Sequence
  Description of Artificial Sequence: Synthetic oligonucleotide
agagguauuugucuccccu

SEQ ID NO: 1172097 - RNA, 19 nt, Artificial Sequence
  Description of Artificial Sequence: Synthetic oligonucleotide
ggaaguuuccuccacacca

SEQ ID NO: 1172098 - RNA, 19 nt, Artificial Sequence
  Description of Artificial Sequence: Synthetic oligonucleotide
ugauaaaccagagguauuu

SEQ ID NO: 1172099 - RNA, 19 nt, Artificial Sequence
  Description of Artificial Sequence: Synthetic oligonucleotide
uaauucuugugcuucuaau

SEQ ID NO: 1172100 - RNA, 19 nt, Artificial Sequence
  Description of Artificial Sequence: Synthetic oligonucleotide
uugugcuugagucuccauc

SEQ ID NO: 1172101 - RNA, 19 nt, Artificial Sequence
  Description of Artificial Sequence: Synthetic oligonucleotide
uguaugggcuccuggauau

SEQ ID NO: 1172102 - RNA, 19 nt, Artificial Sequence
  Description of Artificial Sequence: Synthetic oligonucleotide
ucagauagccacccaacua

SEQ ID NO: 1172103 - RNA, 19 nt, Artificial Sequence
  Description of Artificial Sequence: Synthetic oligonucleotide
aacaaguaauugccaugug

SEQ ID NO: 1172104 - RNA, 19 nt, Artificial Sequence
  Description of Artificial Sequence: Synthetic oligonucleotide
uucggagugaugcuucagu

SEQ ID NO: 1172105 - RNA, 19 nt, Artificial Sequence
  Description of Artificial Sequence: Synthetic oligonucleotide
aguaagcuugauauucuuc

SEQ ID NO: 1172106 - RNA, 19 nt, Artificial Sequence
  Description of Artificial Sequence: Synthetic oligonucleotide
uuauuuucggagugaugcu

SEQ ID NO: 1172107 - RNA, 19 nt, Artificial Sequence
  Description of Artificial Sequence: Synthetic oligonucleotide
guuagcaauacaaucuguc

SEQ ID NO: 1172108 - RNA, 19 nt, Artificial Sequence
  Description of Artificial Sequence: Synthetic oligonucleotide
gacuuuaucuccuuucacu

SEQ ID NO: 1172109 - RNA, 19 nt, Artificial Sequence
  Description of Artificial Sequence: Synthetic oligonucleotide
aaccguaaguaguuuggaa

SEQ ID NO: 1172110 - RNA, 19 nt, Artificial Sequence
  Description of Artificial Sequence: Synthetic oligonucleotide
gugugaacauacaaaauuc

SEQ ID NO: 1172111 - RNA, 19 nt, Artificial Sequence
  Description of Artificial Sequence: Synthetic oligonucleotide
uuugaaaguuacagaugaa

SEQ ID NO: 1172112 - RNA, 19 nt, Artificial Sequence
  Description of Artificial Sequence: Synthetic oligonucleotide
ugugaguaaguuaguuuau

SEQ ID NO: 1172113 - RNA, 19 nt, Artificial Sequence
  Description of Artificial Sequence: Synthetic oligonucleotide
aauuuuacugaggcucacu

SEQ ID NO: 1172114 - RNA, 19 nt, Artificial Sequence
  Description of Artificial Sequence: Synthetic oligonucleotide
uguuauuuugaagcaccca

SEQ ID NO: 1172115 - RNA, 19 nt, Artificial Sequence
  Description of Artificial Sequence: Synthetic oligonucleotide
uuauacugucuauucucgu

SEQ ID NO: 1172116 - RNA, 19 nt, Artificial Sequence
  Description of Artificial Sequence: Synthetic oligonucleotide
gaaguuaaauccaaauccu

SEQ ID NO: 1172117 - RNA, 19 nt, Artificial Sequence
  Description of Artificial Sequence: Synthetic oligonucleotide
ugcucuugaaccguaagua

SEQ ID NO: 1172118 - RNA, 19 nt, Artificial Sequence
  Description of Artificial Sequence: Synthetic oligonucleotide
uguuucugaccaugauucc

SEQ ID NO: 1172119 - RNA, 19 nt, Artificial Sequence
  Description of Artificial Sequence: Synthetic oligonucleotide
uuaagauauuuuguauuau

SEQ ID NO: 1172120 - RNA, 19 nt, Artificial Sequence
  Description of Artificial Sequence: Synthetic oligonucleotide
caaagauacacaauccugu

SEQ ID NO: 1172121 - RNA, 19 nt, Artificial Sequence
  Description of Artificial Sequence: Synthetic oligonucleotide
ugauauagaugaacacaau

SEQ ID NO: 1172122 - RNA, 19 nt, Artificial Sequence
  Description of Artificial Sequence: Synthetic oligonucleotide
uuauuacaauucccaaaau

SEQ ID NO: 1172123 - RNA, 19 nt, Artificial Sequence
  Description of Artificial Sequence: Synthetic oligonucleotide
uacaaucugucucccaaua

SEQ ID NO: 1172124 - RNA, 19 nt, Artificial Sequence
  Description of Artificial Sequence: Synthetic oligonucleotide
uaggcagauaaaagaauuu

SEQ ID NO: 1172125 - RNA, 19 nt, Artificial Sequence
  Description of Artificial Sequence: Synthetic oligonucleotide
agaagguucuaacuuuaaa

SEQ ID NO: 1172126 - RNA, 19 nt, Artificial Sequence
  Description of Artificial Sequence: Synthetic oligonucleotide
  modified_base (9)..(9): a, c, u, g, unknown or other
aagcuuugnguaguuaaaa

SEQ ID NO: 1172127 - RNA, 19 nt, Artificial Sequence
  Description of Artificial Sequence: Synthetic oligonucleotide
cuauguuauuuugaagcac

SEQ ID NO: 1172128 - RNA, 19 nt, Artificial Sequence
  Description of Artificial Sequence: Synthetic oligonucleotide
ugcccuuuauuuucggagu

SEQ ID NO: 1172129 - RNA, 19 nt, Artificial Sequence
  Description of Artificial Sequence: Synthetic oligonucleotide
gauaaaccagagguauuug

SEQ ID NO: 1172130 - RNA, 19 nt, Artificial Sequence
  Description of Artificial Sequence: Synthetic oligonucleotide
acacaauccugucuuggca

SEQ ID NO: 1172131 - RNA, 19 nt, Artificial Sequence
  Description of Artificial Sequence: Synthetic oligonucleotide
cuaaauaacugaagccaga

SEQ ID NO: 1172132 - RNA, 19 nt, Artificial Sequence
  Description of Artificial Sequence: Synthetic oligonucleotide
uaccuguaugggcuccugg

SEQ ID NO: 1172133 - RNA, 19 nt, Artificial Sequence
  Description of Artificial Sequence: Synthetic oligonucleotide
agacagguuguaagaaugg

SEQ ID NO: 1172134 - RNA, 19 nt, Artificial Sequence
  Description of Artificial Sequence: Synthetic oligonucleotide
uacugucuauucucguuca

SEQ ID NO: 1172135 - RNA, 19 nt, Artificial Sequence
  Description of Artificial Sequence: Synthetic oligonucleotide
gaguaaguuaguuuauuau

SEQ ID NO: 1172136 - RNA, 19 nt, Artificial Sequence
  Description of Artificial Sequence: Synthetic oligonucleotide
acauuaccuguaugggcuc

SEQ ID NO: 1172137 - RNA, 19 nt, Artificial Sequence
  Description of Artificial Sequence: Synthetic oligonucleotide
ucuaaugagcuagcaaaau

SEQ ID NO: 1172138 - RNA, 19 nt, Artificial Sequence
  Description of Artificial Sequence: Synthetic oligonucleotide
aaugucuuucuaaguagaa

SEQ ID NO: 1172139 - RNA, 19 nt, Artificial Sequence
  Description of Artificial Sequence: Synthetic oligonucleotide
auagccacccaacuacuaa

SEQ ID NO: 1172140 - RNA, 19 nt, Artificial Sequence
  Description of Artificial Sequence: Synthetic oligonucleotide
aucuauguuucugaccaug

SEQ ID NO: 1172141 - RNA, 19 nt, Artificial Sequence
  Description of Artificial Sequence: Synthetic oligonucleotide
guaucuuagccagaaucug

SEQ ID NO: 1172142 - RNA, 19 nt, Artificial Sequence
  Description of Artificial Sequence: Synthetic oligonucleotide
gaagcacccaaaacucucc

SEQ ID NO: 1172143 - RNA, 19 nt, Artificial Sequence
  Description of Artificial Sequence: Synthetic oligonucleotide
caggaaguuuccuccacac

SEQ ID NO: 1172144 - RNA, 19 nt, Artificial Sequence
  Description of Artificial Sequence: Synthetic oligonucleotide
accaacaauuuauuacaau

SEQ ID NO: 1172145 - RNA, 19 nt, Artificial Sequence
  Description of Artificial Sequence: Synthetic oligonucleotide
uacuuucugagaguaguaa

SEQ ID NO: 1172146 - RNA, 19 nt, Artificial Sequence
  Description of Artificial Sequence: Synthetic oligonucleotide
uacccucuguuacauauuu

SEQ ID NO: 1172147 - RNA, 19 nt, Artificial Sequence
  Description of Artificial Sequence: Synthetic oligonucleotide
gguauaauucuugugcuuc

SEQ ID NO: 1172148 - RNA, 19 nt, Artificial Sequence
  Description of Artificial Sequence: Synthetic oligonucleotide
cauacacauggcucgagca

SEQ ID NO: 1172149 - RNA, 19 nt, Artificial Sequence
  Description of Artificial Sequence: Synthetic oligonucleotide
augcuucaguugugcagcc

SEQ ID NO: 1172150 - RNA, 19 nt, Artificial Sequence
  Description of Artificial Sequence: Synthetic oligonucleotide
gaagguaucuuagccagaa

SEQ ID NO: 1172151 - RNA, 19 nt, Artificial Sequence
  Description of Artificial Sequence: Synthetic oligonucleotide
ucgagaacucgcuauucau

SEQ ID NO: 1172152 - RNA, 19 nt, Artificial Sequence
  Description of Artificial Sequence: Synthetic oligonucleotide
aaacacucgagaacucgcu

SEQ ID NO: 1172153 - RNA, 19 nt, Artificial Sequence
  Description of Artificial Sequence: Synthetic oligonucleotide
auuacaucuagggcaaaau

SEQ ID NO: 1172154 - RNA, 19 nt, Artificial Sequence
  Description of Artificial Sequence: Synthetic oligonucleotide
uuuucggagugaugcuuca

SEQ ID NO: 1172155 - RNA, 19 nt, Artificial Sequence
  Description of Artificial Sequence: Synthetic oligonucleotide
auaguaagcuugauauucu

SEQ ID NO: 1172156 - RNA, 19 nt, Artificial Sequence
  Description of Artificial Sequence: Synthetic oligonucleotide
aacacucgagaacucgcua

SEQ ID NO: 1172157 - RNA, 19 nt, Artificial Sequence
  Description of Artificial Sequence: Synthetic oligonucleotide
auugccaugugaguaaguu

SEQ ID NO: 1172158 - RNA, 19 nt, Artificial Sequence
  Description of Artificial Sequence: Synthetic oligonucleotide
uugauaaaccagagguauu

SEQ ID NO: 1172159 - RNA, 19 nt, Artificial Sequence
  Description of Artificial Sequence: Synthetic oligonucleotide
ugauaguaagcuugauauu

SEQ ID NO: 1172160 - RNA, 19 nt, Artificial Sequence
  Description of Artificial Sequence: Synthetic oligonucleotide
cauggcucgagcaagauuu

SEQ ID NO: 1172161 - RNA, 19 nt, Artificial Sequence
  Description of Artificial Sequence: Synthetic oligonucleotide
ggauauaagcagcaccaac

SEQ ID NO: 1172162 - RNA, 19 nt, Artificial Sequence
  Description of Artificial Sequence: Synthetic oligonucleotide
agccagaguagaugaagca

SEQ ID NO: 1172163 - RNA, 19 nt, Artificial Sequence
  Description of Artificial Sequence: Synthetic oligonucleotide
accuguaugggcuccugga

SEQ ID NO: 1172164 - RNA, 19 nt, Artificial Sequence
  Description of Artificial Sequence: Synthetic oligonucleotide
acaauuuuacugaggcuca

SEQ ID NO: 1172165 - RNA, 19 nt, Artificial Sequence
  Description of Artificial Sequence: Synthetic oligonucleotide
agucacauggauugacuuu

SEQ ID NO: 1172166 - RNA, 19 nt, Artificial Sequence
  Description of Artificial Sequence: Synthetic oligonucleotide
agaaaacugaaggcucgag

SEQ ID NO: 1172167 - RNA, 19 nt, Artificial Sequence
  Description of Artificial Sequence: Synthetic oligonucleotide
auuaggcagauaaaagaau

SEQ ID NO: 1172168 - RNA, 19 nt, Artificial Sequence
  Description of Artificial Sequence: Synthetic oligonucleotide
ucccauauaacugcauuuu

SEQ ID NO: 1172169 - RNA, 19 nt, Artificial Sequence
  Description of Artificial Sequence: Synthetic oligonucleotide
uauuuucggagugaugcuu

SEQ ID NO: 1172170 - RNA, 19 nt, Artificial Sequence
  Description of Artificial Sequence: Synthetic oligonucleotide
acacucgagaacucgcuau

SEQ ID NO: 1172171 - RNA, 19 nt, Artificial Sequence
  Description of Artificial Sequence: Synthetic oligonucleotide
aaucuauguuucugaccau

SEQ ID NO: 1172172 - RNA, 19 nt, Artificial Sequence
  Description of Artificial Sequence: Synthetic oligonucleotide
ugaacacaauugauacaau

SEQ ID NO: 1172173 - RNA, 19 nt, Artificial Sequence
  Description of Artificial Sequence: Synthetic oligonucleotide
aauacugggaggacaggua

SEQ ID NO: 1172174 - RNA, 19 nt, Artificial Sequence
  Description of Artificial Sequence: Synthetic oligonucleotide
cauuuugugaggcuaaaau

SEQ ID NO: 1172175 - RNA, 19 nt, Artificial Sequence
  Description of Artificial Sequence: Synthetic oligonucleotide
gcucuugaaccguaaguag

SEQ ID NO: 1172176 - RNA, 19 nt, Artificial Sequence
  Description of Artificial Sequence: Synthetic oligonucleotide
agguuguaagaaugguggu

SEQ ID NO: 1172177 - RNA, 19 nt, Artificial Sequence
  Description of Artificial Sequence: Synthetic oligonucleotide
uagccacccaacuacuaaa

SEQ ID NO: 1172178 - RNA, 19 nt, Artificial Sequence
  Description of Artificial Sequence: Synthetic oligonucleotide
gcuagcaaaaugcuuccac

SEQ ID NO: 1172179 - RNA, 19 nt, Artificial Sequence
  Description of Artificial Sequence: Synthetic oligonucleotide
agauguaaugaaacaagua

SEQ ID NO: 1172180 - RNA, 19 nt, Artificial Sequence
  Description of Artificial Sequence: Synthetic oligonucleotide
augaugauaguaagcuuga

SEQ ID NO: 1172181 - RNA, 19 nt, Artificial Sequence
  Description of Artificial Sequence: Synthetic oligonucleotide
aggcagauacuuucugaga

SEQ ID NO: 1172182 - RNA, 19 nt, Artificial Sequence
  Description of Artificial Sequence: Synthetic oligonucleotide
augaaacaaguaauugcca

SEQ ID NO: 1172183 - RNA, 19 nt, Artificial Sequence
  Description of Artificial Sequence: Synthetic oligonucleotide
aggcagauaaaagaauuua

SEQ ID NO: 1172184 - RNA, 19 nt, Artificial Sequence
  Description of Artificial Sequence: Synthetic oligonucleotide
uuguaagaauggugguuuc

SEQ ID NO: 1172185 - RNA, 19 nt, Artificial Sequence
  Description of Artificial Sequence: Synthetic oligonucleotide
ugaagccagaguagaugaa

SEQ ID NO: 1172186 - RNA, 19 nt, Artificial Sequence
  Description of Artificial Sequence: Synthetic oligonucleotide
aguuacagaugaauccaca

SEQ ID NO: 1172187 - RNA, 19 nt, Artificial Sequence
  Description of Artificial Sequence: Synthetic oligonucleotide
aaucaucaucagugauaca

SEQ ID NO: 1172188 - RNA, 19 nt, Artificial Sequence
  Description of Artificial Sequence: Synthetic oligonucleotide
cugucuauucucguucaug

SEQ ID NO: 1172189 - RNA, 19 nt, Artificial Sequence
  Description of Artificial Sequence: Synthetic oligonucleotide
ugcuuccaccuuaaugaaa

SEQ ID NO: 1172190 - RNA, 19 nt, Artificial Sequence
  Description of Artificial Sequence: Synthetic oligonucleotide
ccauaaucuucaauuuaag

SEQ ID NO: 1172191 - RNA, 19 nt, Artificial Sequence
  Description of Artificial Sequence: Synthetic oligonucleotide
uacucaaaauuaggcagau

SEQ ID NO: 1172192 - RNA, 19 nt, Artificial Sequence
  Description of Artificial Sequence: Synthetic oligonucleotide
cucaaaauuuugcccagaa

SEQ ID NO: 1172193 - RNA, 19 nt, Artificial Sequence
  Description of Artificial Sequence: Synthetic oligonucleotide
ggugguuuccaccuuggca

SEQ ID NO: 1172194 - RNA, 19 nt, Artificial Sequence
  Description of Artificial Sequence: Synthetic oligonucleotide
auguauguuaagauauuuu

SEQ ID NO: 1172195 - RNA, 19 nt, Artificial Sequence
  Description of Artificial Sequence: Synthetic oligonucleotide
agacuaaaaugagauguua

SEQ ID NO: 1172196 - RNA, 19 nt, Artificial Sequence
  Description of Artificial Sequence: Synthetic oligonucleotide
agguauaauucuugugcuu

SEQ ID NO: 1172197 - RNA, 19 nt, Artificial Sequence
  Description of Artificial Sequence: Synthetic oligonucleotide
ccaaucuuucaccacguug

SEQ ID NO: 1172198 - RNA, 19 nt, Artificial Sequence
  Description of Artificial Sequence: Synthetic oligonucleotide
cagauguaaugaaacaagu

SEQ ID NO: 1172199 - RNA, 19 nt, Artificial Sequence
  Description of Artificial Sequence: Synthetic oligonucleotide
aagguaucuuagccagaau

SEQ ID NO: 1172200 - RNA, 19 nt, Artificial Sequence
  Description of Artificial Sequence: Synthetic oligonucleotide
ccaaaucuauguuucugac

SEQ ID NO: 1172201 - RNA, 19 nt, Artificial Sequence
  Description of Artificial Sequence: Synthetic oligonucleotide
ugcuucuaaugagcuagca

SEQ ID NO: 1172202 - RNA, 19 nt, Artificial Sequence
  Description of Artificial Sequence: Synthetic oligonucleotide
auaauauguaaaacccaua

SEQ ID NO: 1172203 - RNA, 19 nt, Artificial Sequence
  Description of Artificial Sequence: Synthetic oligonucleotide
cgcuauucauggcauaugg

SEQ ID NO: 1172204 - RNA, 19 nt, Artificial Sequence
  Description of Artificial Sequence: Synthetic oligonucleotide
gugaggcuaaaaugcuuac

SEQ ID NO: 1172205 - RNA, 19 nt, Artificial Sequence
  Description of Artificial Sequence: Synthetic oligonucleotide
gaaggcucgagagcgcuca

SEQ ID NO: 1172206 - RNA, 19 nt, Artificial Sequence
  Description of Artificial Sequence: Synthetic oligonucleotide
uuucggagugaugcuucag

SEQ ID NO: 1172207 - RNA, 19 nt, Artificial Sequence
  Description of Artificial Sequence: Synthetic oligonucleotide
aacucgcuauucauggcau

SEQ ID NO: 1172208 - RNA, 19 nt, Artificial Sequence
  Description of Artificial Sequence: Synthetic oligonucleotide
ccguaaguaguuuggaauc

SEQ ID NO: 1172209 - RNA, 19 nt, Artificial Sequence
  Description of Artificial Sequence: Synthetic oligonucleotide
ucugugcucuugaaccgua

SEQ ID NO: 1172210 - RNA, 19 nt, Artificial Sequence
  Description of Artificial Sequence: Synthetic oligonucleotide
ccaaaacucucccauaaca

SEQ ID NO: 1172211 - RNA, 19 nt, Artificial Sequence
  Description of Artificial Sequence: Synthetic oligonucleotide
ggcauauggaagugcaguc

SEQ ID NO: 1172212 - RNA, 19 nt, Artificial Sequence
  Description of Artificial Sequence: Synthetic oligonucleotide
cagccaaaacacucgagaa

SEQ ID NO: 1172213 - RNA, 19 nt, Artificial Sequence
  Description of Artificial Sequence: Synthetic oligonucleotide
acccaacuacuaaauaacu

SEQ ID NO: 1172214 - RNA, 19 nt, Artificial Sequence
  Description of Artificial Sequence: Synthetic oligonucleotide
gaaccguaaguaguuugga

SEQ ID NO: 1172215 - RNA, 19 nt, Artificial Sequence
  Description of Artificial Sequence: Synthetic oligonucleotide
ucgcuauucauggcauaug

SEQ ID NO: 1172216 - RNA, 19 nt, Artificial Sequence
  Description of Artificial Sequence: Synthetic oligonucleotide
cucgagaacucgcuauuca

SEQ ID NO: 1172217 - RNA, 19 nt, Artificial Sequence
  Description of Artificial Sequence: Synthetic oligonucleotide
cagguauaauucuugugcu

SEQ ID NO: 1172218 - RNA, 19 nt, Artificial Sequence
  Description of Artificial Sequence: Synthetic oligonucleotide
ucacauggauugacuuuau

SEQ ID NO: 1172219 - RNA, 19 nt, Artificial Sequence
  Description of Artificial Sequence: Synthetic oligonucleotide
gcgcucaaaaucaucauca

SEQ ID NO: 1172220 - RNA, 19 nt, Artificial Sequence
  Description of Artificial Sequence: Synthetic oligonucleotide
gguaucuuagccagaaucu

SEQ ID NO: 1172221 - RNA, 19 nt, Artificial Sequence
  Description of Artificial Sequence: Synthetic oligonucleotide
aucugucucccaauaauuu

SEQ ID NO: 1172222 - RNA, 19 nt, Artificial Sequence
  Description of Artificial Sequence: Synthetic oligonucleotide
gcuugagucuccaucacuc

SEQ ID NO: 1172223 - RNA, 19 nt, Artificial Sequence
  Description of Artificial Sequence: Synthetic oligonucleotide
aggcauguuuggcaaggau

SEQ ID NO: 1172224 - RNA, 19 nt, Artificial Sequence
  Description of Artificial Sequence: Synthetic oligonucleotide
ugcauuuugugaggcuaaa

SEQ ID NO: 1172225 - RNA, 19 nt, Artificial Sequence
  Description of Artificial Sequence: Synthetic oligonucleotide
cacauggauugacuuuauc

SEQ ID NO: 1172226 - RNA, 19 nt, Artificial Sequence
  Description of Artificial Sequence: Synthetic oligonucleotide
cuguuuuaucuaucaguaa

SEQ ID NO: 1172227 - RNA, 19 nt, Artificial Sequence
  Description of Artificial Sequence: Synthetic oligonucleotide
caauuuuacugaggcucac

SEQ ID NO: 1172228 - RNA, 19 nt, Artificial Sequence
  Description of Artificial Sequence: Synthetic oligonucleotide
guugacuucugacuguauu

SEQ ID NO: 1172229 - RNA, 19 nt, Artificial Sequence
  Description of Artificial Sequence: Synthetic oligonucleotide
uugauacaaugaugaugau

SEQ ID NO: 1172230 - RNA, 19 nt, Artificial Sequence
  Description of Artificial Sequence: Synthetic oligonucleotide
cagauacuuucugagagua

SEQ ID NO: 1172231 - RNA, 19 nt, Artificial Sequence
  Description of Artificial Sequence: Synthetic oligonucleotide
ugaugauaguaagcuugau

SEQ ID NO: 1172232 - RNA, 19 nt, Artificial Sequence
  Description of Artificial Sequence: Synthetic oligonucleotide
cacuugugcuugagucucc

SEQ ID NO: 1172233 - RNA, 19 nt, Artificial Sequence
  Description of Artificial Sequence: Synthetic oligonucleotide
acauggcucgagcaagauu

SEQ ID NO: 1172234 - RNA, 19 nt, Artificial Sequence
  Description of Artificial Sequence: Synthetic oligonucleotide
ccacccaacuacuaaauaa

SEQ ID NO: 1172235 - RNA, 19 nt, Artificial Sequence
  Description of Artificial Sequence: Synthetic oligonucleotide
caccaacaauuuauuacaa

SEQ ID NO: 1172236 - RNA, 19 nt, Artificial Sequence
  Description of Artificial Sequence: Synthetic oligonucleotide
cuuucacacccuugguuaa

SEQ ID NO: 1172237 - RNA, 19 nt, Artificial Sequence
  Description of Artificial Sequence: Synthetic oligonucleotide
ugguuuccaccuuggcaaa

SEQ ID NO: 1172238 - RNA, 19 nt, Artificial Sequence
  Description of Artificial Sequence: Synthetic oligonucleotide
auuaccuguaugggcuccu

SEQ ID NO: 1172239 - RNA, 19 nt, Artificial Sequence
  Description of Artificial Sequence: Synthetic oligonucleotide
caucacucugucuugcccu

SEQ ID NO: 1172240 - RNA, 19 nt, Artificial Sequence
  Description of Artificial Sequence: Synthetic oligonucleotide
gagagcgcucaaaaucauc

SEQ ID NO: 1172241 - RNA, 19 nt, Artificial Sequence
  Description of Artificial Sequence: Synthetic oligonucleotide
acccuugguuaauaacuuu

SEQ ID NO: 1172242 - RNA, 19 nt, Artificial Sequence
  Description of Artificial Sequence: Synthetic oligonucleotide
cuauucucguucauguuuu

SEQ ID NO: 1172243 - RNA, 19 nt, Artificial Sequence
  Description of Artificial Sequence: Synthetic oligonucleotide
ggccauguaaccccaccac

SEQ ID NO: 1172244 - RNA, 19 nt, Artificial Sequence
  Description of Artificial Sequence: Synthetic oligonucleotide
guuuuagcagacagguugu

SEQ ID NO: 1172245 - RNA, 19 nt, Artificial Sequence
  Description of Artificial Sequence: Synthetic oligonucleotide
gcaauuacaucuagggcaa

SEQ ID NO: 1172246 - RNA, 19 nt, Artificial Sequence
  Description of Artificial Sequence: Synthetic oligonucleotide
gcccuuuauuuucggagug

SEQ ID NO: 1172247 - RNA, 19 nt, Artificial Sequence
  Description of Artificial Sequence: Synthetic oligonucleotide
gagaggugacacaaugaua

SEQ ID NO: 1172248 - RNA, 19 nt, Artificial Sequence
  Description of Artificial Sequence: Synthetic oligonucleotide
augagcuagcaaaaugcuu

SEQ ID NO: 1172249 - RNA, 19 nt, Artificial Sequence
  Description of Artificial Sequence: Synthetic oligonucleotide
gugcucuugaaccguaagu

SEQ ID NO: 1172250 - RNA, 19 nt, Artificial Sequence
  Description of Artificial Sequence: Synthetic oligonucleotide
agcaagauuucugcuggua

SEQ ID NO: 1172251 - RNA, 19 nt, Artificial Sequence
  Description of Artificial Sequence: Synthetic oligonucleotide
auacuuucugagaguagua

SEQ ID NO: 1172252 - RNA, 19 nt, Artificial Sequence
  Description of Artificial Sequence: Synthetic oligonucleotide
uggcucgagcaagauuucu

SEQ ID NO: 1172253 - RNA, 19 nt, Artificial Sequence
  Description of Artificial Sequence: Synthetic oligonucleotide
gcaauacaaucugucuccc

SEQ ID NO: 1172254 - RNA, 19 nt, Artificial Sequence
  Description of Artificial Sequence: Synthetic oligonucleotide
agaguagaugaagcagcau

SEQ ID NO: 1172255 - RNA, 19 nt, Artificial Sequence
  Description of Artificial Sequence: Synthetic oligonucleotide
ucuccccuacccucuguua

SEQ ID NO: 1172256 - RNA, 19 nt, Artificial Sequence
  Description of Artificial Sequence: Synthetic oligonucleotide
gagacuaaaaugagauguu

SEQ ID NO: 1172257 - RNA, 19 nt, Artificial Sequence
  Description of Artificial Sequence: Synthetic oligonucleotide
gugcuugagucuccaucac

SEQ ID NO: 1172258 - RNA, 19 nt, Artificial Sequence
  Description of Artificial Sequence: Synthetic oligonucleotide
ugcuucaguugugcagcca

SEQ ID NO: 1172259 - RNA, 19 nt, Artificial Sequence
  Description of Artificial Sequence: Synthetic oligonucleotide
auggcucgagcaagauuuc

SEQ ID NO: 1172260 - RNA, 19 nt, Artificial Sequence
  Description of Artificial Sequence: Synthetic oligonucleotide
cuucccauauaacugcauu

SEQ ID NO: 1172261 - RNA, 19 nt, Artificial Sequence
  Description of Artificial Sequence: Synthetic oligonucleotide
agaagguaucuuagccaga

SEQ ID NO: 1172262 - RNA, 19 nt, Artificial Sequence
  Description of Artificial Sequence: Synthetic oligonucleotide
cuugagucuccaucacucu

SEQ ID NO: 1172263 - RNA, 19 nt, Artificial Sequence
  Description of Artificial Sequence: Synthetic oligonucleotide
ggaggacagguauaauucu

SEQ ID NO: 1172264 - RNA, 19 nt, Artificial Sequence
  Description of Artificial Sequence: Synthetic oligonucleotide
acucgcuauucauggcaua

SEQ ID NO: 1172265 - RNA, 19 nt, Artificial Sequence
  Description of Artificial Sequence: Synthetic oligonucleotide
ggcucgagagcgcucaaaa

SEQ ID NO: 1172266 - RNA, 19 nt, Artificial Sequence
  Description of Artificial Sequence: Synthetic oligonucleotide
gugcuucuaaugagcuagc

SEQ ID NO: 1172267 - RNA, 19 nt, Artificial Sequence
  Description of Artificial Sequence: Synthetic oligonucleotide
ggacagguauaauucuugu

SEQ ID NO: 1172268 - RNA, 19 nt, Artificial Sequence
  Description of Artificial Sequence: Synthetic oligonucleotide
accuucccauauaacugca

SEQ ID NO: 1172269 - RNA, 19 nt, Artificial Sequence
  Description of Artificial Sequence: Synthetic oligonucleotide
aaggcucgagagcgcucaa

SEQ ID NO: 1172270 - RNA, 19 nt, Artificial Sequence
  Description of Artificial Sequence: Synthetic oligonucleotide
ccaaaacacucgagaacuc

SEQ ID NO: 1172271 - RNA, 19 nt, Artificial Sequence
  Description of Artificial Sequence: Synthetic oligonucleotide
  modified_base (12)..(12): a, c, u, g, unknown or other
caaaagcuuugnguaguua

SEQ ID NO: 1172272 - RNA, 19 nt, Artificial Sequence
  Description of Artificial Sequence: Synthetic oligonucleotide
acucaaaauuaggcagaua

SEQ ID NO: 1172273 - RNA, 19 nt, Artificial Sequence
  Description of Artificial Sequence: Synthetic oligonucleotide
cguugagcaaccaaaucua

SEQ ID NO: 1172274 - RNA, 19 nt, Artificial Sequence
  Description of Artificial Sequence: Synthetic oligonucleotide
ggaguugacuucugacugu

SEQ ID NO: 1172275 - RNA, 19 nt, Artificial Sequence
  Description of Artificial Sequence: Synthetic oligonucleotide
cucguucauguuuuacaau

SEQ ID NO: 1172276 - RNA, 19 nt, Artificial Sequence
  Description of Artificial Sequence: Synthetic oligonucleotide
cugucuuggcagauguaau

SEQ ID NO: 1172277 - RNA, 19 nt, Artificial Sequence
  Description of Artificial Sequence: Synthetic oligonucleotide
gugaguaaguuaguuuauu

SEQ ID NO: 1172278 - RNA, 19 nt, Artificial Sequence
  Description of Artificial Sequence: Synthetic oligonucleotide
ccuacccucuguuacauau

SEQ ID NO: 1172279 - RNA, 19 nt, Artificial Sequence
  Description of Artificial Sequence: Synthetic oligonucleotide
cucgcuauucauggcauau

SEQ ID NO: 1172280 - RNA, 19 nt, Artificial Sequence
  Description of Artificial Sequence: Synthetic oligonucleotide
caccacguugagcaaccaa

SEQ ID NO: 1172281 - RNA, 19 nt, Artificial Sequence
  Description of Artificial Sequence: Synthetic oligonucleotide
gcauauggaagugcagucu

SEQ ID NO: 1172282 - RNA, 19 nt, Artificial Sequence
  Description of Artificial Sequence: Synthetic oligonucleotide
caggcauguuuggcaagga

SEQ ID NO: 1172283 - RNA, 19 nt, Artificial Sequence
  Description of Artificial Sequence: Synthetic oligonucleotide
cuugaaccguaaguaguuu

SEQ ID NO: 1172284 - RNA, 19 nt, Artificial Sequence
  Description of Artificial Sequence: Synthetic oligonucleotide
cacucgagaacucgcuauu

SEQ ID NO: 1172285 - RNA, 19 nt, Artificial Sequence
  Description of Artificial Sequence: Synthetic oligonucleotide
gguuuccaccuuggcaaaa

SEQ ID NO: 1172286 - RNA, 19 nt, Artificial Sequence
  Description of Artificial Sequence: Synthetic oligonucleotide
ccuuucacuuucacacccu

SEQ ID NO: 1172287 - RNA, 19 nt, Artificial Sequence
  Description of Artificial Sequence: Synthetic oligonucleotide
caauccugucuuggcagau

SEQ ID NO: 1172288 - RNA, 19 nt, Artificial Sequence
  Description of Artificial Sequence: Synthetic oligonucleotide
guaugggcuccuggauaua

SEQ ID NO: 1172289 - RNA, 19 nt, Artificial Sequence
  Description of Artificial Sequence: Synthetic oligonucleotide
  modified_base (13)..(13): a, c, u, g, unknown or other
gcaaaagcuuugnguaguu

SEQ ID NO: 1172290 - RNA, 19 nt, Artificial Sequence
  Description of Artificial Sequence: Synthetic oligonucleotide
cacauggcucgagcaagau

SEQ ID NO: 1172291 - RNA, 19 nt, Artificial Sequence
  Description of Artificial Sequence: Synthetic oligonucleotide
cccuacccucuguuacaua

SEQ ID NO: 1172292 - RNA, 19 nt, Artificial Sequence
  Description of Artificial Sequence: Synthetic oligonucleotide
ccccuacccucuguuacau

SEQ ID NO: 1172293 - RNA, 19 nt, Artificial Sequence
  Description of Artificial Sequence: Synthetic oligonucleotide
aguuuuaggacucuggugg

SEQ ID NO: 1172294 - RNA, 19 nt, Artificial Sequence
  Description of Artificial Sequence: Synthetic oligonucleotide
uauaggucuacucaggugc

SEQ ID NO: 1172295 - RNA, 19 nt, Artificial Sequence
  Description of Artificial Sequence: Synthetic oligonucleotide
auaauuagagaucugaagu

SEQ ID NO: 1172296 - RNA, 19 nt, Artificial Sequence
  Description of Artificial Sequence: Synthetic oligonucleotide
cuucauuugauaauuagag

SEQ ID NO: 1172297 - RNA, 19 nt, Artificial Sequence
  Description of Artificial Sequence: Synthetic oligonucleotide
gauaauuagagaucugaag

SEQ ID NO: 1172298 - RNA, 19 nt, Artificial Sequence
  Description of Artificial Sequence: Synthetic oligonucleotide
cuuacaguuaagauggacc

SEQ ID NO: 1172299 - RNA, 19 nt, Artificial Sequence
  Description of Artificial Sequence: Synthetic oligonucleotide
uguagguucaaauggcugg

SEQ ID NO: 1172300 - RNA, 19 nt, Artificial Sequence
  Description of Artificial Sequence: Synthetic oligonucleotide
uguaauuaggcccaccuac

SEQ ID NO: 1172301 - RNA, 19 nt, Artificial Sequence
  Description of Artificial Sequence: Synthetic oligonucleotide
uuugagaggaccagugugg

SEQ ID NO: 1172302 - RNA, 19 nt, Artificial Sequence
  Description of Artificial Sequence: Synthetic oligonucleotide
gaaaggaagucuucaacgg

SEQ ID NO: 1172303 - RNA, 19 nt, Artificial Sequence
  Description of Artificial Sequence: Synthetic oligonucleotide
uuugauucaacugugugug

SEQ ID NO: 1172304 - RNA, 19 nt, Artificial Sequence
  Description of Artificial Sequence: Synthetic oligonucleotide
uaauuagagaucugaagug

SEQ ID NO: 1172305 - RNA, 19 nt, Artificial Sequence
  Description of Artificial Sequence: Synthetic oligonucleotide
ucuaugacaggauggaggc

SEQ ID NO: 1172306 - RNA, 19 nt, Artificial Sequence
  Description of Artificial Sequence: Synthetic oligonucleotide
uccaucuaugacaggaugg

SEQ ID NO: 1172307 - RNA, 19 nt, Artificial Sequence
  Description of Artificial Sequence: Synthetic oligonucleotide
uuacaguuaagauggacca

SEQ ID NO: 1172308 - RNA, 19 nt, Artificial Sequence
  Description of Artificial Sequence: Synthetic oligonucleotide
ucauuuauugacagcagcu

SEQ ID NO: 1172309 - RNA, 19 nt, Artificial Sequence
  Description of Artificial Sequence: Synthetic oligonucleotide
agagucuucaguccaugcc

SEQ ID NO: 1172310 - RNA, 19 nt, Artificial Sequence
  Description of Artificial Sequence: Synthetic oligonucleotide
uuuugauucaacugugugu

SEQ ID NO: 1172311 - RNA, 19 nt, Artificial Sequence
  Description of Artificial Sequence: Synthetic oligonucleotide
gacucaaacacuuuuggca

SEQ ID NO: 1172312 - RNA, 19 nt, Artificial Sequence
  Description of Artificial Sequence: Synthetic oligonucleotide
aaucuuuuagagcgagcgg

SEQ ID NO: 1172313 - RNA, 19 nt, Artificial Sequence
  Description of Artificial Sequence: Synthetic oligonucleotide
aaaauugagggcuugccuu

SEQ ID NO: 1172314 - RNA, 19 nt, Artificial Sequence
  Description of Artificial Sequence: Synthetic oligonucleotide
uuuagagcgagcgggaagg

SEQ ID NO: 1172315 - RNA, 19 nt, Artificial Sequence
  Description of Artificial Sequence: Synthetic oligonucleotide
uuuauugacagcagcuuac

SEQ ID NO: 1172316 - RNA, 19 nt, Artificial Sequence
  Description of Artificial Sequence: Synthetic oligonucleotide
caaucuuuuagagcgagcg

SEQ ID NO: 1172317 - RNA, 19 nt, Artificial Sequence
  Description of Artificial Sequence: Synthetic oligonucleotide
aagucuucaacggacucac

SEQ ID NO: 1172318 - RNA, 19 nt, Artificial Sequence
  Description of Artificial Sequence: Synthetic oligonucleotide
aaucccauuggguauuuga

SEQ ID NO: 1172319 - RNA, 19 nt, Artificial Sequence
  Description of Artificial Sequence: Synthetic oligonucleotide
aauuagagaucugaaguga

SEQ ID NO: 1172320 - RNA, 19 nt, Artificial Sequence
  Description of Artificial Sequence: Synthetic oligonucleotide
aucuuuuagagcgagcggg

SEQ ID NO: 1172321 - RNA, 19 nt, Artificial Sequence
  Description of Artificial Sequence: Synthetic oligonucleotide
auuugagaggaccagugug

SEQ ID NO: 1172322 - RNA, 19 nt, Artificial Sequence
  Description of Artificial Sequence: Synthetic oligonucleotide
cuuacauuguguuuucuuc

SEQ ID NO: 1172323 - RNA, 19 nt, Artificial Sequence
  Description of Artificial Sequence: Synthetic oligonucleotide
augcccuuuucauacacac

SEQ ID NO: 1172324 - RNA, 19 nt, Artificial Sequence
  Description of Artificial Sequence: Synthetic oligonucleotide
cugggugucauuuauugac

SEQ ID NO: 1172325 - RNA, 19 nt, Artificial Sequence
  Description of Artificial Sequence: Synthetic oligonucleotide
uuaagauggaccacuuccu

SEQ ID NO: 1172326 - RNA, 19 nt, Artificial Sequence
  Description of Artificial Sequence: Synthetic oligonucleotide
ugauaauuagagaucugaa

SEQ ID NO: 1172327 - RNA, 19 nt, Artificial Sequence
  Description of Artificial Sequence: Synthetic oligonucleotide
augggcagagucuucaguc

SEQ ID NO: 1172328 - RNA, 19 nt, Artificial Sequence
  Description of Artificial Sequence: Synthetic oligonucleotide
gagucuucaguccaugccc

SEQ ID NO: 1172329 - RNA, 19 nt, Artificial Sequence
  Description of Artificial Sequence: Synthetic oligonucleotide
ggccuuacaguuaagaugg

SEQ ID NO: 1172330 - RNA, 19 nt, Artificial Sequence
  Description of Artificial Sequence: Synthetic oligonucleotide
cauuugauaauuagagauc

SEQ ID NO: 1172331 - RNA, 19 nt, Artificial Sequence
  Description of Artificial Sequence: Synthetic oligonucleotide
auuaggcccaccuaccuug

SEQ ID NO: 1172332 - RNA, 19 nt, Artificial Sequence
  Description of Artificial Sequence: Synthetic oligonucleotide
uuuuagagcgagcgggaag

SEQ ID NO: 1172333 - RNA, 19 nt, Artificial Sequence
  Description of Artificial Sequence: Synthetic oligonucleotide
agcuucauuugauaauuag

SEQ ID NO: 1172334 - RNA, 19 nt, Artificial Sequence
  Description of Artificial Sequence: Synthetic oligonucleotide
ucaacggacucacaucuca

SEQ ID NO: 1172335 - RNA, 19 nt, Artificial Sequence
  Description of Artificial Sequence: Synthetic oligonucleotide
acuuuuggcagccauaauu

SEQ ID NO: 1172336 - RNA, 19 nt, Artificial Sequence
  Description of Artificial Sequence: Synthetic oligonucleotide
agaucugaagugauuuugc

SEQ ID NO: 1172337 - RNA, 19 nt, Artificial Sequence
  Description of Artificial Sequence: Synthetic oligonucleotide
cuuucuucugccaauuguc

SEQ ID NO: 1172338 - RNA, 19 nt, Artificial Sequence
  Description of Artificial Sequence: Synthetic oligonucleotide
uggaaaggaagucuucaac

SEQ ID NO: 1172339 - RNA, 19 nt, Artificial Sequence
  Description of Artificial Sequence: Synthetic oligonucleotide
ugucauuuauugacagcag

SEQ ID NO: 1172340 - RNA, 19 nt, Artificial Sequence
  Description of Artificial Sequence: Synthetic oligonucleotide
gucauuuauugacagcagc

SEQ ID NO: 1172341 - RNA, 19 nt, Artificial Sequence
  Description of Artificial Sequence: Synthetic oligonucleotide
agaaguggaacaacaaaag

SEQ ID NO: 1172342 - RNA, 19 nt, Artificial Sequence
  Description of Artificial Sequence: Synthetic oligonucleotide
uuggguauuugagaggacc

SEQ ID NO: 1172343 - RNA, 19 nt, Artificial Sequence
  Description of Artificial Sequence: Synthetic oligonucleotide
ugugccacuguccucaaau

SEQ ID NO: 1172344 - RNA, 19 nt, Artificial Sequence
  Description of Artificial Sequence: Synthetic oligonucleotide
uuugauaauuagagaucug

SEQ ID NO: 1172345 - RNA, 19 nt, Artificial Sequence
  Description of Artificial Sequence: Synthetic oligonucleotide
uguguagguucaaauggcu

SEQ ID NO: 1172346 - RNA, 19 nt, Artificial Sequence
  Description of Artificial Sequence: Synthetic oligonucleotide
ugauucaacugugugugcc

SEQ ID NO: 1172347 - RNA, 19 nt, Artificial Sequence
  Description of Artificial Sequence: Synthetic oligonucleotide
ucguacuauuccaagucca

SEQ ID NO: 1172348 - RNA, 19 nt, Artificial Sequence
  Description of Artificial Sequence: Synthetic oligonucleotide
uuccaucuaugacaggaug

SEQ ID NO: 1172349 - RNA, 19 nt, Artificial Sequence
  Description of Artificial Sequence: Synthetic oligonucleotide
uucuucugccaauugucag

SEQ ID NO: 1172350 - RNA, 19 nt, Artificial Sequence
  Description of Artificial Sequence: Synthetic oligonucleotide
uauuugagaggaccagugu

SEQ ID NO: 1172351 - RNA, 19 nt, Artificial Sequence
  Description of Artificial Sequence: Synthetic oligonucleotide
acggacucacaucucaguc

SEQ ID NO: 1172352 - RNA, 19 nt, Artificial Sequence
  Description of Artificial Sequence: Synthetic oligonucleotide
auugacagcagcuuacauu

SEQ ID NO: 1172353 - RNA, 19 nt, Artificial Sequence
  Description of Artificial Sequence: Synthetic oligonucleotide
agauggaccacuuccucug

SEQ ID NO: 1172354 - RNA, 19 nt, Artificial Sequence
  Description of Artificial Sequence: Synthetic oligonucleotide
cuguguagguucaaauggc

SEQ ID NO: 1172355 - RNA, 19 nt, Artificial Sequence
  Description of Artificial Sequence: Synthetic oligonucleotide
gagaucugaagugauuuug

SEQ ID NO: 1172356 - RNA, 19 nt, Artificial Sequence
  Description of Artificial Sequence: Synthetic oligonucleotide
uggguauuugagaggacca

SEQ ID NO: 1172357 - RNA, 19 nt, Artificial Sequence
  Description of Artificial Sequence: Synthetic oligonucleotide
ucuucugccaauugucagu

SEQ ID NO: 1172358 - RNA, 19 nt, Artificial Sequence
  Description of Artificial Sequence: Synthetic oligonucleotide
auuguguuuucuucccuug

SEQ ID NO: 1172359 - RNA, 19 nt, Artificial Sequence
  Description of Artificial Sequence: Synthetic oligonucleotide
gugucauuuauugacagca

SEQ ID NO: 1172360 - RNA, 19 nt, Artificial Sequence
  Description of Artificial Sequence: Synthetic oligonucleotide
ucuuuuagagcgagcggga

SEQ ID NO: 1172361 - RNA, 19 nt, Artificial Sequence
  Description of Artificial Sequence: Synthetic oligonucleotide
gucuguguagguucaaaug

SEQ ID NO: 1172362 - RNA, 19 nt, Artificial Sequence
  Description of Artificial Sequence: Synthetic oligonucleotide
auuuauugacagcagcuua

SEQ ID NO: 1172363 - RNA, 19 nt, Artificial Sequence
  Description of Artificial Sequence: Synthetic oligonucleotide
gucugggugucauuuauug

SEQ ID NO: 1172364 - RNA, 19 nt, Artificial Sequence
  Description of Artificial Sequence: Synthetic oligonucleotide
uaauuaggcccaccuaccu

SEQ ID NO: 1172365 - RNA, 19 nt, Artificial Sequence
  Description of Artificial Sequence: Synthetic oligonucleotide
aggccucucguacuauucc

SEQ ID NO: 1172366 - RNA, 19 nt, Artificial Sequence
  Description of Artificial Sequence: Synthetic oligonucleotide
aggcuauaggucuacucag

SEQ ID NO: 1172367 - RNA, 19 nt, Artificial Sequence
  Description of Artificial Sequence: Synthetic oligonucleotide
caauugucagugccuaggg

SEQ ID NO: 1172368 - RNA, 19 nt, Artificial Sequence
  Description of Artificial Sequence: Synthetic oligonucleotide
aaacacuuuuggcagccau

SEQ ID NO: 1172369 - RNA, 19 nt, Artificial Sequence
  Description of Artificial Sequence: Synthetic oligonucleotide
cagaaguggaacaacaaaa

SEQ ID NO: 1172370 - RNA, 19 nt, Artificial Sequence
  Description of Artificial Sequence: Synthetic oligonucleotide
guuuuaggacucugguggg

SEQ ID NO: 1172371 - RNA, 19 nt, Artificial Sequence
  Description of Artificial Sequence: Synthetic oligonucleotide
acaguuaagauggaccacu

SEQ ID NO: 1172372 - RNA, 19 nt, Artificial Sequence
  Description of Artificial Sequence: Synthetic oligonucleotide
aggguggaaggccagaagu

SEQ ID NO: 1172373 - RNA, 19 nt, Artificial Sequence
  Description of Artificial Sequence: Synthetic oligonucleotide
uaccuugaugggcagaguc

SEQ ID NO: 1172374 - RNA, 19 nt, Artificial Sequence
  Description of Artificial Sequence: Synthetic oligonucleotide
agugccuaggguggaaggc

SEQ ID NO: 1172375 - RNA, 19 nt, Artificial Sequence
  Description of Artificial Sequence: Synthetic oligonucleotide
cucguacuauuccaagucc

SEQ ID NO: 1172376 - RNA, 19 nt, Artificial Sequence
  Description of Artificial Sequence: Synthetic oligonucleotide
ucuucaacggacucacauc

SEQ ID NO: 1172377 - RNA, 19 nt, Artificial Sequence
  Description of Artificial Sequence: Synthetic oligonucleotide
aacggacucacaucucagu

SEQ ID NO: 1172378 - RNA, 19 nt, Artificial Sequence
  Description of Artificial Sequence: Synthetic oligonucleotide
ugggugucauuuauugaca

SEQ ID NO: 1172379 - RNA, 19 nt, Artificial Sequence
  Description of Artificial Sequence: Synthetic oligonucleotide
ugccacuguccucaaaucu

SEQ ID NO: 1172380 - RNA, 19 nt, Artificial Sequence
  Description of Artificial Sequence: Synthetic oligonucleotide
uuuuaggacucuggugggg

SEQ ID NO: 1172381 - RNA, 19 nt, Artificial Sequence
  Description of Artificial Sequence: Synthetic oligonucleotide
guauuugagaggaccagug

SEQ ID NO: 1172382 - RNA, 19 nt, Artificial Sequence
  Description of Artificial Sequence: Synthetic oligonucleotide
uugagaggaccaguguggg

SEQ ID NO: 1172383 - RNA, 19 nt, Artificial Sequence
  Description of Artificial Sequence: Synthetic oligonucleotide
uagagaucugaagugauuu

SEQ ID NO: 1172384 - RNA, 19 nt, Artificial Sequence
  Description of Artificial Sequence: Synthetic oligonucleotide
cuauaggucuacucaggug

SEQ ID NO: 1172385 - RNA, 19 nt, Artificial Sequence
  Description of Artificial Sequence: Synthetic oligonucleotide
acaaaagcuucauuugaua

SEQ ID NO: 1172386 - RNA, 19 nt, Artificial Sequence
  Description of Artificial Sequence: Synthetic oligonucleotide
ccuggcaacugcuaaagcc

SEQ ID NO: 1172387 - RNA, 19 nt, Artificial Sequence
  Description of Artificial Sequence: Synthetic oligonucleotide
ggcccaccuaccuugaugg

SEQ ID NO: 1172388 - RNA, 19 nt, Artificial Sequence
  Description of Artificial Sequence: Synthetic oligonucleotide
aguggaaaggaagucuuca

SEQ ID NO: 1172389 - RNA, 19 nt, Artificial Sequence
  Description of Artificial Sequence: Synthetic oligonucleotide
aauuaggcccaccuaccuu

SEQ ID NO: 1172390 - RNA, 19 nt, Artificial Sequence
  Description of Artificial Sequence: Synthetic oligonucleotide
ugucuguguagguucaaau

SEQ ID NO: 1172391 - RNA, 19 nt, Artificial Sequence
  Description of Artificial Sequence: Synthetic oligonucleotide
uuagagaucugaagugauu

SEQ ID NO: 1172392 - RNA, 19 nt, Artificial Sequence
  Description of Artificial Sequence: Synthetic oligonucleotide
ucugggugucauuuauuga

SEQ ID NO: 1172393 - RNA, 19 nt, Artificial Sequence
  Description of Artificial Sequence: Synthetic oligonucleotide
ucgagagcgcgagagcugg

SEQ ID NO: 1172394 - RNA, 19 nt, Artificial Sequence
  Description of Artificial Sequence: Synthetic oligonucleotide
cucacaucucaguccaggc

SEQ ID NO: 1172395 - RNA, 19 nt, Artificial Sequence
  Description of Artificial Sequence: Synthetic oligonucleotide
caguuuuaggacucuggug

SEQ ID NO: 1172396 - RNA, 19 nt, Artificial Sequence
  Description of Artificial Sequence: Synthetic oligonucleotide
uuauugacagcagcuuaca

SEQ ID NO: 1172397 - RNA, 19 nt, Artificial Sequence
  Description of Artificial Sequence: Synthetic oligonucleotide
guaauuaggcccaccuacc

SEQ ID NO: 1172398 - RNA, 19 nt, Artificial Sequence
  Description of Artificial Sequence: Synthetic oligonucleotide
cccauuggguauuugagag

SEQ ID NO: 1172399 - RNA, 19 nt, Artificial Sequence
  Description of Artificial Sequence: Synthetic oligonucleotide
auaggucuacucaggugcc

SEQ ID NO: 1172400 - RNA, 19 nt, Artificial Sequence
  Description of Artificial Sequence: Synthetic oligonucleotide
cauuggguauuugagagga

SEQ ID NO: 1172401 - RNA, 19 nt, Artificial Sequence
  Description of Artificial Sequence: Synthetic oligonucleotide
ugagaggaccagugugggg

SEQ ID NO: 1172402 - RNA, 19 nt, Artificial Sequence
  Description of Artificial Sequence: Synthetic oligonucleotide
cuggucacaguuaacggga

SEQ ID NO: 1172403 - RNA, 19 nt, Artificial Sequence
  Description of Artificial Sequence: Synthetic oligonucleotide
agcgcgagagcugguaagc

SEQ ID NO: 1172404 - RNA, 19 nt, Artificial Sequence
  Description of Artificial Sequence: Synthetic oligonucleotide
gauggaccacuuccucugg

SEQ ID NO: 1172405 - RNA, 19 nt, Artificial Sequence
  Description of Artificial Sequence: Synthetic oligonucleotide
gaaugggccuuacaguuaa

SEQ ID NO: 1172406 - RNA, 19 nt, Artificial Sequence
  Description of Artificial Sequence: Synthetic oligonucleotide
aggaaggccucacugggga

SEQ ID NO: 1172407 - RNA, 19 nt, Artificial Sequence
  Description of Artificial Sequence: Synthetic oligonucleotide
ucuacucaggugccagcug

SEQ ID NO: 1172408 - RNA, 19 nt, Artificial Sequence
  Description of Artificial Sequence: Synthetic oligonucleotide
ugggccuuacaguuaagau

SEQ ID NO: 1172409 - RNA, 19 nt, Artificial Sequence
  Description of Artificial Sequence: Synthetic oligonucleotide
gggcaguguaauuaggccc

SEQ ID NO: 1172410 - RNA, 19 nt, Artificial Sequence
  Description of Artificial Sequence: Synthetic oligonucleotide
ugcccuuuucauacacacc

SEQ ID NO: 1172411 - RNA, 19 nt, Artificial Sequence
  Description of Artificial Sequence: Synthetic oligonucleotide
aucccauuggguauuugag

SEQ ID NO: 1172412 - RNA, 19 nt, Artificial Sequence
  Description of Artificial Sequence: Synthetic oligonucleotide
agugcccugccuuucuucu

SEQ ID NO: 1172413 - RNA, 19 nt, Artificial Sequence
  Description of Artificial Sequence: Synthetic oligonucleotide
uugauucaacugugugugc

SEQ ID NO: 1172414 - RNA, 19 nt, Artificial Sequence
  Description of Artificial Sequence: Synthetic oligonucleotide
cuugauugcuuccuucgga

SEQ ID NO: 1172415 - RNA, 19 nt, Artificial Sequence
  Description of Artificial Sequence: Synthetic oligonucleotide
gguggaaggccagaagugg

SEQ ID NO: 1172416 - RNA, 19 nt, Artificial Sequence
  Description of Artificial Sequence: Synthetic oligonucleotide
aguuaacgggaaugggccu

SEQ ID NO: 1172417 - RNA, 19 nt, Artificial Sequence
  Description of Artificial Sequence: Synthetic oligonucleotide
cuucugccaauugucagug

SEQ ID NO: 1172418 - RNA, 19 nt, Artificial Sequence
  Description of Artificial Sequence: Synthetic oligonucleotide
ggacucaaacacuuuuggc

SEQ ID NO: 1172419 - RNA, 19 nt, Artificial Sequence
  Description of Artificial Sequence: Synthetic oligonucleotide
uuccgcuggucacaguuaa

SEQ ID NO: 1172420 - RNA, 19 nt, Artificial Sequence
  Description of Artificial Sequence: Synthetic oligonucleotide
cagagucuucaguccaugc

SEQ ID NO: 1172421 - RNA, 19 nt, Artificial Sequence
  Description of Artificial Sequence: Synthetic oligonucleotide
ggaagggcaaucuuuuaga

SEQ ID NO: 1172422 - RNA, 19 nt, Artificial Sequence
  Description of Artificial Sequence: Synthetic oligonucleotide
ccuuuucauacacaccugc

SEQ ID NO: 1172423 - RNA, 19 nt, Artificial Sequence
  Description of Artificial Sequence: Synthetic oligonucleotide
cuucaacggacucacaucu

SEQ ID NO: 1172424 - RNA, 19 nt, Artificial Sequence
  Description of Artificial Sequence: Synthetic oligonucleotide
caacggacucacaucucag

SEQ ID NO: 1172425 - RNA, 19 nt, Artificial Sequence
  Description of Artificial Sequence: Synthetic oligonucleotide
ggugucauuuauugacagc

SEQ ID NO: 1172426 - RNA, 19 nt, Artificial Sequence
  Description of Artificial Sequence: Synthetic oligonucleotide
auuagagaucugaagugau

SEQ ID NO: 1172427 - RNA, 19 nt, Artificial Sequence
  Description of Artificial Sequence: Synthetic oligonucleotide
uacaguuaagauggaccac

SEQ ID NO: 1172428 - RNA, 19 nt, Artificial Sequence
  Description of Artificial Sequence: Synthetic oligonucleotide
gagcgcgagagcugguaag

SEQ ID NO: 1172429 - RNA, 19 nt, Artificial Sequence
  Description of Artificial Sequence: Synthetic oligonucleotide
ugccuaggguggaaggcca

SEQ ID NO: 1172430 - RNA, 19 nt, Artificial Sequence
  Description of Artificial Sequence: Synthetic oligonucleotide
aacgggaaugggccuuaca

SEQ ID NO: 1172431 - RNA, 19 nt, Artificial Sequence
  Description of Artificial Sequence: Synthetic oligonucleotide
ucagugccuaggguggaag

SEQ ID NO: 1172432 - RNA, 19 nt, Artificial Sequence
  Description of Artificial Sequence: Synthetic oligonucleotide
ggggcaguguaauuaggcc

SEQ ID NO: 1172433 - RNA, 19 nt, Artificial Sequence
  Description of Artificial Sequence: Synthetic oligonucleotide
acauguccuuggcaggugu

SEQ ID NO: 1172434 - RNA, 19 nt, Artificial Sequence
  Description of Artificial Sequence: Synthetic oligonucleotide
guguagguucaaauggcug

SEQ ID NO: 1172435 - RNA, 19 nt, Artificial Sequence
  Description of Artificial Sequence: Synthetic oligonucleotide
uccuggcaacugcuaaagc

SEQ ID NO: 1172436 - RNA, 19 nt, Artificial Sequence
  Description of Artificial Sequence: Synthetic oligonucleotide
ugggaaggaagggcaaucu

SEQ ID NO: 1172437 - RNA, 19 nt, Artificial Sequence
  Description of Artificial Sequence: Synthetic oligonucleotide
caguccaggccucucguac

SEQ ID NO: 1172438 - RNA, 19 nt, Artificial Sequence
  Description of Artificial Sequence: Synthetic oligonucleotide
ucacgccugaccuccacau

SEQ ID NO: 1172439 - RNA, 19 nt, Artificial Sequence
  Description of Artificial Sequence: Synthetic oligonucleotide
aggcccaccuaccuugaug

SEQ ID NO: 1172440 - RNA, 19 nt, Artificial Sequence
  Description of Artificial Sequence: Synthetic oligonucleotide
ccaauugucagugccuagg

SEQ ID NO: 1172441 - RNA, 19 nt, Artificial Sequence
  Description of Artificial Sequence: Synthetic oligonucleotide
ggacucacaucucagucca

SEQ ID NO: 1172442 - RNA, 19 nt, Artificial Sequence
  Description of Artificial Sequence: Synthetic oligonucleotide
caucuaugacaggauggag

SEQ ID NO: 1172443 - RNA, 19 nt, Artificial Sequence
  Description of Artificial Sequence: Synthetic oligonucleotide
cagccaucacacacagugc

SEQ ID NO: 1172444 - RNA, 19 nt, Artificial Sequence
  Description of Artificial Sequence: Synthetic oligonucleotide
aggucugggugucauuuau

SEQ ID NO: 1172445 - RNA, 19 nt, Artificial Sequence
  Description of Artificial Sequence: Synthetic oligonucleotide
aguccaugcccuuuucaua

SEQ ID NO: 1172446 - RNA, 19 nt, Artificial Sequence
  Description of Artificial Sequence: Synthetic oligonucleotide
gcuucauuugauaauuaga

SEQ ID NO: 1172447 - RNA, 19 nt, Artificial Sequence
  Description of Artificial Sequence: Synthetic oligonucleotide
uuaggcccaccuaccuuga

SEQ ID NO: 1172448 - RNA, 19 nt, Artificial Sequence
  Description of Artificial Sequence: Synthetic oligonucleotide
uucaacggacucacaucuc

SEQ ID NO: 1172449 - RNA, 19 nt, Artificial Sequence
  Description of Artificial Sequence: Synthetic oligonucleotide
cuaccagccaucacacaca

SEQ ID NO: 1172450 - RNA, 19 nt, Artificial Sequence
  Description of Artificial Sequence: Synthetic oligonucleotide
aacacuuuuggcagccaua

SEQ ID NO: 1172451 - RNA, 19 nt, Artificial Sequence
  Description of Artificial Sequence: Synthetic oligonucleotide
augggccuuacaguuaaga

SEQ ID NO: 1172452 - RNA, 19 nt, Artificial Sequence
  Description of Artificial Sequence: Synthetic oligonucleotide
aguccaggccucucguacu

SEQ ID NO: 1172453 - RNA, 19 nt, Artificial Sequence
  Description of Artificial Sequence: Synthetic oligonucleotide
aggucuacucaggugccag

SEQ ID NO: 1172454 - RNA, 19 nt, Artificial Sequence
  Description of Artificial Sequence: Synthetic oligonucleotide
caauccuucaagcuggaau

SEQ ID NO: 1172455 - RNA, 19 nt, Artificial Sequence
  Description of Artificial Sequence: Synthetic oligonucleotide
uuucacgccugaccuccac

SEQ ID NO: 1172456 - RNA, 19 nt, Artificial Sequence
  Description of Artificial Sequence: Synthetic oligonucleotide
gcccuuuucauacacaccu

SEQ ID NO: 1172457 - RNA, 19 nt, Artificial Sequence
  Description of Artificial Sequence: Synthetic oligonucleotide
acagcccuugggaaggaag

SEQ ID NO: 1172458 - RNA, 19 nt, Artificial Sequence
  Description of Artificial Sequence: Synthetic oligonucleotide
auuggguauuugagaggac

SEQ ID NO: 1172459 - RNA, 19 nt, Artificial Sequence
  Description of Artificial Sequence: Synthetic oligonucleotide
cacaucucaguccaggccu

SEQ ID NO: 1172460 - RNA, 19 nt, Artificial Sequence
  Description of Artificial Sequence: Synthetic oligonucleotide
ugagucccuucccuaccac

SEQ ID NO: 1172461 - RNA, 19 nt, Artificial Sequence
  Description of Artificial Sequence: Synthetic oligonucleotide
ggcaaucuuuuagagcgag

SEQ ID NO: 1172462 - RNA, 19 nt, Artificial Sequence
  Description of Artificial Sequence: Synthetic oligonucleotide
guagguucaaauggcugga

SEQ ID NO: 1172463 - RNA, 19 nt, Artificial Sequence
  Description of Artificial Sequence: Synthetic oligonucleotide
cauguccuuggcaggugug

SEQ ID NO: 1172464 - RNA, 19 nt, Artificial Sequence
  Description of Artificial Sequence: Synthetic oligonucleotide
cgagcgggaaggcagaugc

SEQ ID NO: 1172465 - RNA, 19 nt, Artificial Sequence
  Description of Artificial Sequence: Synthetic oligonucleotide
gcggcuuccagcuugcgca

SEQ ID NO: 1172466 - RNA, 19 nt, Artificial Sequence
  Description of Artificial Sequence: Synthetic oligonucleotide
guggaaaggaagucuucaa

SEQ ID NO: 1172467 - RNA, 19 nt, Artificial Sequence
  Description of Artificial Sequence: Synthetic oligonucleotide
uucaguccaugcccuuuuc

SEQ ID NO: 1172468 - RNA, 19 nt, Artificial Sequence
  Description of Artificial Sequence: Synthetic oligonucleotide
gcuuucacgccugaccucc

SEQ ID NO: 1172469 - RNA, 19 nt, Artificial Sequence
  Description of Artificial Sequence: Synthetic oligonucleotide
ugccaauugucagugccua

SEQ ID NO: 1172470 - RNA, 19 nt, Artificial Sequence
  Description of Artificial Sequence: Synthetic oligonucleotide
gucuucaacggacucacau

SEQ ID NO: 1172471 - RNA, 19 nt, Artificial Sequence
  Description of Artificial Sequence: Synthetic oligonucleotide
uccaugcccuuuucauaca

SEQ ID NO: 1172472 - RNA, 19 nt, Artificial Sequence
  Description of Artificial Sequence: Synthetic oligonucleotide
guacuauuccaaguccauc

SEQ ID NO: 1172473 - RNA, 19 nt, Artificial Sequence
  Description of Artificial Sequence: Synthetic oligonucleotide
caggccucucguacuauuc

SEQ ID NO: 1172474 - RNA, 19 nt, Artificial Sequence
  Description of Artificial Sequence: Synthetic oligonucleotide
gugccuaggguggaaggcc

SEQ ID NO: 1172475 - RNA, 19 nt, Artificial Sequence
  Description of Artificial Sequence: Synthetic oligonucleotide
accuugaugggcagagucu

SEQ ID NO: 1172476 - RNA, 19 nt, Artificial Sequence
  Description of Artificial Sequence: Synthetic oligonucleotide
ggauggaggcuauaggucu

SEQ ID NO: 1172477 - RNA, 19 nt, Artificial Sequence
  Description of Artificial Sequence: Synthetic oligonucleotide
uuagagcgagcgggaaggc

SEQ ID NO: 1172478 - RNA, 19 nt, Artificial Sequence
  Description of Artificial Sequence: Synthetic oligonucleotide
ccuugauugcuuccuucgg

SEQ ID NO: 1172479 - RNA, 19 nt, Artificial Sequence
  Description of Artificial Sequence: Synthetic oligonucleotide
agagcgcgagagcugguaa

SEQ ID NO: 1172480 - RNA, 19 nt, Artificial Sequence
  Description of Artificial Sequence: Synthetic oligonucleotide
cagcuuacauuguguuuuc

SEQ ID NO: 1172481 - RNA, 19 nt, Artificial Sequence
  Description of Artificial Sequence: Synthetic oligonucleotide
acaucucaguccaggccuc

SEQ ID NO: 1172482 - RNA, 19 nt, Artificial Sequence
  Description of Artificial Sequence: Synthetic oligonucleotide
aauugagggcuugccuuuu

SEQ ID NO: 1172483 - RNA, 19 nt, Artificial Sequence
  Description of Artificial Sequence: Synthetic oligonucleotide
aaugggccuuacaguuaag

SEQ ID NO: 1172484 - RNA, 19 nt, Artificial Sequence
  Description of Artificial Sequence: Synthetic oligonucleotide
gugcuaccagccaucacac

SEQ ID NO: 1172485 - RNA, 19 nt, Artificial Sequence
  Description of Artificial Sequence: Synthetic oligonucleotide
agucccuucccuaccacaa

SEQ ID NO: 1172486 - RNA, 19 nt, Artificial Sequence
  Description of Artificial Sequence: Synthetic oligonucleotide
uuaacgggaaugggccuua

SEQ ID NO: 1172487 - RNA, 19 nt, Artificial Sequence
  Description of Artificial Sequence: Synthetic oligonucleotide
cccgcuuucacgccugacc

SEQ ID NO: 1172488 - RNA, 19 nt, Artificial Sequence
  Description of Artificial Sequence: Synthetic oligonucleotide
uugcuuccuucggagcacc

SEQ ID NO: 1172489 - RNA, 19 nt, Artificial Sequence
  Description of Artificial Sequence: Synthetic oligonucleotide
ucggcggcuuccagcuugc

SEQ ID NO: 1172490 - RNA, 19 nt, Artificial Sequence
  Description of Artificial Sequence: Synthetic oligonucleotide
guguaauuaggcccaccua

SEQ ID NO: 1172491 - RNA, 19 nt, Artificial Sequence
  Description of Artificial Sequence: Synthetic oligonucleotide
uaggucuacucaggugcca

SEQ ID NO: 1172492 - RNA, 19 nt, Artificial Sequence
  Description of Artificial Sequence: Synthetic oligonucleotide
ugcuaccagccaucacaca

SEQ ID NO: 1172493 - RNA, 19 nt, Artificial Sequence
  Description of Artificial Sequence: Synthetic oligonucleotide
acacagugcccugccuuuc

SEQ ID NO: 1172494 - RNA, 19 nt, Artificial Sequence
  Description of Artificial Sequence: Synthetic oligonucleotide
gcagaugcacauguccuug

SEQ ID NO: 1172495 - RNA, 19 nt, Artificial Sequence
  Description of Artificial Sequence: Synthetic oligonucleotide
ucaguccaggccucucgua

SEQ ID NO: 1172496 - RNA, 19 nt, Artificial Sequence
  Description of Artificial Sequence: Synthetic oligonucleotide
uagguucaaauggcuggaa

SEQ ID NO: 1172497 - RNA, 19 nt, Artificial Sequence
  Description of Artificial Sequence: Synthetic oligonucleotide
cuacucaggugccagcugu

SEQ ID NO: 1172498 - RNA, 19 nt, Artificial Sequence
  Description of Artificial Sequence: Synthetic oligonucleotide
ggaugcaauccuucaagcu

SEQ ID NO: 1172499 - RNA, 19 nt, Artificial Sequence
  Description of Artificial Sequence: Synthetic oligonucleotide
gaaucccauuggguauuug

SEQ ID NO: 1172500 - RNA, 19 nt, Artificial Sequence
  Description of Artificial Sequence: Synthetic oligonucleotide
cggacucacaucucagucc

SEQ ID NO: 1172501 - RNA, 19 nt, Artificial Sequence
  Description of Artificial Sequence: Synthetic oligonucleotide
caguguaauuaggcccacc

SEQ ID NO: 1172502 - RNA, 19 nt, Artificial Sequence
  Description of Artificial Sequence: Synthetic oligonucleotide
ccuuacaguuaagauggac

SEQ ID NO: 1172503 - RNA, 19 nt, Artificial Sequence
  Description of Artificial Sequence: Synthetic oligonucleotide
cagugcccugccuuucuuc

SEQ ID NO: 1172504 - RNA, 19 nt, Artificial Sequence
  Description of Artificial Sequence: Synthetic oligonucleotide
agcuuacauuguguuuucu

SEQ ID NO: 1172505 - RNA, 19 nt, Artificial Sequence
  Description of Artificial Sequence: Synthetic oligonucleotide
caccacgccuccuggcaac

SEQ ID NO: 1172506 - RNA, 19 nt, Artificial Sequence
  Description of Artificial Sequence: Synthetic oligonucleotide
ggucuacucaggugccagc

SEQ ID NO: 1172507 - RNA, 19 nt, Artificial Sequence
  Description of Artificial Sequence: Synthetic oligonucleotide
cuucggagcaccggcccac

SEQ ID NO: 1172508 - RNA, 19 nt, Artificial Sequence
  Description of Artificial Sequence: Synthetic oligonucleotide
ccagaaguggaacaacaaa

SEQ ID NO: 1172509 - RNA, 19 nt, Artificial Sequence
  Description of Artificial Sequence: Synthetic oligonucleotide
ccaccuaccuugaugggca

SEQ ID NO: 1172510 - RNA, 19 nt, Artificial Sequence
  Description of Artificial Sequence: Synthetic oligonucleotide
gcuauaggucuacucaggu

SEQ ID NO: 1172511 - RNA, 19 nt, Artificial Sequence
  Description of Artificial Sequence: Synthetic oligonucleotide
gauggaggcuauaggucua

SEQ ID NO: 1172512 - RNA, 19 nt, Artificial Sequence
  Description of Artificial Sequence: Synthetic oligonucleotide
gccaauugucagugccuag

SEQ ID NO: 1172513 - RNA, 19 nt, Artificial Sequence
  Description of Artificial Sequence: Synthetic oligonucleotide
cauuguguuuucuucccuu

SEQ ID NO: 1172514 - RNA, 19 nt, Artificial Sequence
  Description of Artificial Sequence: Synthetic oligonucleotide
guguggggaguggaaagga

SEQ ID NO: 1172515 - RNA, 19 nt, Artificial Sequence
  Description of Artificial Sequence: Synthetic oligonucleotide
ggaaggccagaaguggaac

SEQ ID NO: 1172516 - RNA, 19 nt, Artificial Sequence
  Description of Artificial Sequence: Synthetic oligonucleotide
cuggaaucccauuggguau

SEQ ID NO: 1172517 - RNA, 19 nt, Artificial Sequence
  Description of Artificial Sequence: Synthetic oligonucleotide
cauuuauugacagcagcuu

SEQ ID NO: 1172518 - RNA, 19 nt, Artificial Sequence
  Description of Artificial Sequence: Synthetic oligonucleotide
cgcuggucacaguuaacgg

SEQ ID NO: 1172519 - RNA, 19 nt, Artificial Sequence
  Description of Artificial Sequence: Synthetic oligonucleotide
ggcggcuuccagcuugcgc

SEQ ID NO: 1172520 - RNA, 19 nt, Artificial Sequence
  Description of Artificial Sequence: Synthetic oligonucleotide
cccaccuaccuugaugggc

SEQ ID NO: 1172521 - RNA, 19 nt, Artificial Sequence
  Description of Artificial Sequence: Synthetic oligonucleotide
cuuuuagagcgagcgggaa

SEQ ID NO: 1172522 - RNA, 19 nt, Artificial Sequence
  Description of Artificial Sequence: Synthetic oligonucleotide
gacucacaucucaguccag

SEQ ID NO: 1172523 - RNA, 19 nt, Artificial Sequence
  Description of Artificial Sequence: Synthetic oligonucleotide
gaccaguguggggagugga

SEQ ID NO: 1172524 - RNA, 19 nt, Artificial Sequence
  Description of Artificial Sequence: Synthetic oligonucleotide
cacgccugaccuccacaug

SEQ ID NO: 1172525 - RNA, 19 nt, Artificial Sequence
  Description of Artificial Sequence: Synthetic oligonucleotide
gcagcuuacauuguguuuu

SEQ ID NO: 1172526 - RNA, 19 nt, Artificial Sequence
  Description of Artificial Sequence: Synthetic oligonucleotide
caguccaugcccuuuucau

SEQ ID NO: 1172527 - RNA, 19 nt, Artificial Sequence
  Description of Artificial Sequence: Synthetic oligonucleotide
gguauuugagaggaccagu

SEQ ID NO: 1172528 - RNA, 19 nt, Artificial Sequence
  Description of Artificial Sequence: Synthetic oligonucleotide
cugcuuccgcuggucacag

SEQ ID NO: 1172529 - RNA, 19 nt, Artificial Sequence
  Description of Artificial Sequence: Synthetic oligonucleotide
cugccaauugucagugccu

SEQ ID NO: 1172530 - RNA, 19 nt, Artificial Sequence
  Description of Artificial Sequence: Synthetic oligonucleotide
cuucaagcuggaaucccau

SEQ ID NO: 1172531 - RNA, 19 nt, Artificial Sequence
  Description of Artificial Sequence: Synthetic oligonucleotide
cugugcuaccagccaucac

SEQ ID NO: 1172532 - RNA, 19 nt, Artificial Sequence
  Description of Artificial Sequence: Synthetic oligonucleotide
acagugcccugccuuucuu

SEQ ID NO: 1172533 - RNA, 19 nt, Artificial Sequence
  Description of Artificial Sequence: Synthetic oligonucleotide
gucuacucaggugccagcu

SEQ ID NO: 1172534 - RNA, 19 nt, Artificial Sequence
  Description of Artificial Sequence: Synthetic oligonucleotide
acccgcuuucacgccugac

SEQ ID NO: 1172535 - RNA, 19 nt, Artificial Sequence
  Description of Artificial Sequence: Synthetic oligonucleotide
gugucuguguagguucaaa

SEQ ID NO: 1172536 - RNA, 19 nt, Artificial Sequence
  Description of Artificial Sequence: Synthetic oligonucleotide
gcuuacauuguguuuucuu

SEQ ID NO: 1172537 - RNA, 19 nt, Artificial Sequence
  Description of Artificial Sequence: Synthetic oligonucleotide
cuuccgcuggucacaguua

SEQ ID NO: 1172538 - RNA, 19 nt, Artificial Sequence
  Description of Artificial Sequence: Synthetic oligonucleotide
ccuucccuaccacaauguc

SEQ ID NO: 1172539 - RNA, 19 nt, Artificial Sequence
  Description of Artificial Sequence: Synthetic oligonucleotide
uaacgggaaugggccuuac

SEQ ID NO: 1172540 - RNA, 19 nt, Artificial Sequence
  Description of Artificial Sequence: Synthetic oligonucleotide
uucggagcaccggcccaca

SEQ ID NO: 1172541 - RNA, 19 nt, Artificial Sequence
  Description of Artificial Sequence: Synthetic oligonucleotide
uaggcccaccuaccuugau

SEQ ID NO: 1172542 - RNA, 19 nt, Artificial Sequence
  Description of Artificial Sequence: Synthetic oligonucleotide
ccucaaaucuuccaucuau

SEQ ID NO: 1172543 - RNA, 19 nt, Artificial Sequence
  Description of Artificial Sequence: Synthetic oligonucleotide
ccaguuuuaggacucuggu

SEQ ID NO: 1172544 - RNA, 19 nt, Artificial Sequence
  Description of Artificial Sequence: Synthetic oligonucleotide
ggggaguggaaaggaaguc

SEQ ID NO: 1172545 - RNA, 19 nt, Artificial Sequence
  Description of Artificial Sequence: Synthetic oligonucleotide
ggaccaguguggggagugg

SEQ ID NO: 1172546 - RNA, 19 nt, Artificial Sequence
  Description of Artificial Sequence: Synthetic oligonucleotide
gagagcgcgagagcuggua

SEQ ID NO: 1172547 - RNA, 19 nt, Artificial Sequence
  Description of Artificial Sequence: Synthetic oligonucleotide
accggcccacagcccuugg

SEQ ID NO: 1172548 - RNA, 19 nt, Artificial Sequence
  Description of Artificial Sequence: Synthetic oligonucleotide
accuaccuugaugggcaga

SEQ ID NO: 1172549 - RNA, 19 nt, Artificial Sequence
  Description of Artificial Sequence: Synthetic oligonucleotide
guuaacgggaaugggccuu

SEQ ID NO: 1172550 - RNA, 19 nt, Artificial Sequence
  Description of Artificial Sequence: Synthetic oligonucleotide
cuuucacgccugaccucca

SEQ ID NO: 1172551 - RNA, 19 nt, Artificial Sequence
  Description of Artificial Sequence: Synthetic oligonucleotide
gagcgagcgggaaggcaga

SEQ ID NO: 1172552 - RNA, 19 nt, Artificial Sequence
  Description of Artificial Sequence: Synthetic oligonucleotide
agccccggcaggaugcaau

SEQ ID NO: 1172553 - RNA, 19 nt, Artificial Sequence
  Description of Artificial Sequence: Synthetic oligonucleotide
cucaguccaggccucucgu

SEQ ID NO: 1172554 - RNA, 19 nt, Artificial Sequence
  Description of Artificial Sequence: Synthetic oligonucleotide
ugacaggauggaggcuaua

SEQ ID NO: 1172555 - RNA, 19 nt, Artificial Sequence
  Description of Artificial Sequence: Synthetic oligonucleotide
uccaggccucucguacuau

SEQ ID NO: 1172556 - RNA, 19 nt, Artificial Sequence
  Description of Artificial Sequence: Synthetic oligonucleotide
ggaguggaaaggaagucuu

SEQ ID NO: 1172557 - RNA, 19 nt, Artificial Sequence
  Description of Artificial Sequence: Synthetic oligonucleotide
cugaagugauuuugcuuuu

SEQ ID NO: 1172558 - RNA, 19 nt, Artificial Sequence
  Description of Artificial Sequence: Synthetic oligonucleotide
cacacagugcccugccuuu

SEQ ID NO: 1172559 - RNA, 19 nt, Artificial Sequence
  Description of Artificial Sequence: Synthetic oligonucleotide
ggaaugggccuuacaguua

SEQ ID NO: 1172560 - RNA, 19 nt, Artificial Sequence
  Description of Artificial Sequence: Synthetic oligonucleotide
ugcugagccccggcaggau

SEQ ID NO: 1172561 - RNA, 19 nt, Artificial Sequence
  Description of Artificial Sequence: Synthetic oligonucleotide
ggcagaugcacauguccuu

SEQ ID NO: 1172562 - RNA, 19 nt, Artificial Sequence
  Description of Artificial Sequence: Synthetic oligonucleotide
cacagugcccugccuuucu

SEQ ID NO: 1172563 - RNA, 19 nt, Artificial Sequence
  Description of Artificial Sequence: Synthetic oligonucleotide
gcgggaaggcagaugcaca

SEQ ID NO: 1172564 - RNA, 19 nt, Artificial Sequence
  Description of Artificial Sequence: Synthetic oligonucleotide
gucagugccuaggguggaa

SEQ ID NO: 1172565 - RNA, 19 nt, Artificial Sequence
  Description of Artificial Sequence: Synthetic oligonucleotide
agcgagcgggaaggcagau

SEQ ID NO: 1172566 - RNA, 19 nt, Artificial Sequence
  Description of Artificial Sequence: Synthetic oligonucleotide
cuaugacaggauggaggcu

SEQ ID NO: 1172567 - RNA, 19 nt, Artificial Sequence
  Description of Artificial Sequence: Synthetic oligonucleotide
cggagcaccggcccacagc

SEQ ID NO: 1172568 - RNA, 19 nt, Artificial Sequence
  Description of Artificial Sequence: Synthetic oligonucleotide
ccggcccacagcccuuggg

SEQ ID NO: 1172569 - RNA, 19 nt, Artificial Sequence
  Description of Artificial Sequence: Synthetic oligonucleotide
gccccggcaggaugcaauc

SEQ ID NO: 1172570 - RNA, 19 nt, Artificial Sequence
  Description of Artificial Sequence: Synthetic oligonucleotide
gccucucguacuauuccaa

SEQ ID NO: 1172571 - RNA, 19 nt, Artificial Sequence
  Description of Artificial Sequence: Synthetic oligonucleotide
ccgcuuucacgccugaccu

SEQ ID NO: 1172572 - RNA, 19 nt, Artificial Sequence
  Description of Artificial Sequence: Synthetic oligonucleotide
caccggcccacagcccuug

SEQ ID NO: 1172573 - RNA, 19 nt, Artificial Sequence
  Description of Artificial Sequence: Synthetic oligonucleotide
gcacauguccuuggcaggu

SEQ ID NO: 1172574 - RNA, 19 nt, Artificial Sequence
  Description of Artificial Sequence: Synthetic oligonucleotide
gggcaaucuuuuagagcga

SEQ ID NO: 1172575 - RNA, 19 nt, Artificial Sequence
  Description of Artificial Sequence: Synthetic oligonucleotide
gccacuguccucaaaucuu

SEQ ID NO: 1172576 - RNA, 19 nt, Artificial Sequence
  Description of Artificial Sequence: Synthetic oligonucleotide
ccaguguggggaguggaaa

SEQ ID NO: 1172577 - RNA, 19 nt, Artificial Sequence
  Description of Artificial Sequence: Synthetic oligonucleotide
ggcccuccccagcuguguc

SEQ ID NO: 1172578 - RNA, 19 nt, Artificial Sequence
  Description of Artificial Sequence: Synthetic oligonucleotide
caacugugugugccacugu

SEQ ID NO: 1172579 - RNA, 19 nt, Artificial Sequence
  Description of Artificial Sequence: Synthetic oligonucleotide
gcgagcgggaaggcagaug

SEQ ID NO: 1172580 - RNA, 19 nt, Artificial Sequence
  Description of Artificial Sequence: Synthetic oligonucleotide
cguacuauuccaaguccau

SEQ ID NO: 1172581 - RNA, 19 nt, Artificial Sequence
  Description of Artificial Sequence: Synthetic oligonucleotide
ccuucggagcaccggccca

SEQ ID NO: 1172582 - RNA, 19 nt, Artificial Sequence
  Description of Artificial Sequence: Synthetic oligonucleotide
gcgcgagagcugguaagca

SEQ ID NO: 1172583 - RNA, 19 nt, Artificial Sequence
  Description of Artificial Sequence: Synthetic oligonucleotide
cuaccuugaugggcagagu

SEQ ID NO: 1172584 - RNA, 19 nt, Artificial Sequence
  Description of Artificial Sequence: Synthetic oligonucleotide
cgcgagagcugguaagcaa

SEQ ID NO: 1172585 - RNA, 19 nt, Artificial Sequence
  Description of Artificial Sequence: Synthetic oligonucleotide
cgcuuucacgccugaccuc

SEQ ID NO: 1172586 - RNA, 19 nt, Artificial Sequence
  Description of Artificial Sequence: Synthetic oligonucleotide
ccuaggguggaaggccaga

SEQ ID NO: 1172587 - RNA, 19 nt, Artificial Sequence
  Description of Artificial Sequence: Synthetic oligonucleotide
cccggcaggaugcaauccu

SEQ ID NO: 1172588 - RNA, 19 nt, Artificial Sequence
  Description of Artificial Sequence: Synthetic oligonucleotide
gcaauccuucaagcuggaa

SEQ ID NO: 1172589 - RNA, 19 nt, Artificial Sequence
  Description of Artificial Sequence: Synthetic oligonucleotide
caucucaguccaggccucu

SEQ ID NO: 1172590 - RNA, 19 nt, Artificial Sequence
  Description of Artificial Sequence: Synthetic oligonucleotide
ggucugggugucauuuauu

SEQ ID NO: 1172591 - RNA, 19 nt, Artificial Sequence
  Description of Artificial Sequence: Synthetic oligonucleotide
cgccuccuggcaacugcua

SEQ ID NO: 1172592 - RNA, 19 nt, Artificial Sequence
  Description of Artificial Sequence: Synthetic oligonucleotide
cggcggcuuccagcuugcg

SEQ ID NO: 1172593 - RNA, 19 nt, Artificial Sequence
  Description of Artificial Sequence: Synthetic oligonucleotide
cgagagcgcgagagcuggu

SEQ ID NO: 1172594 - RNA, 19 nt, Artificial Sequence
  Description of Artificial Sequence: Synthetic oligonucleotide
aacaccaugaaacaugcac

SEQ ID NO: 1172595 - RNA, 19 nt, Artificial Sequence
  Description of Artificial Sequence: Synthetic oligonucleotide
acuacuaacaccaugaaac

SEQ ID NO: 1172596 - RNA, 19 nt, Artificial Sequence
  Description of Artificial Sequence: Synthetic oligonucleotide
ugcauuucaaauagaagcg

SEQ ID NO: 1172597 - RNA, 19 nt, Artificial Sequence
  Description of Artificial Sequence: Synthetic oligonucleotide
uuauacucggccaucagcc

SEQ ID NO: 1172598 - RNA, 19 nt, Artificial Sequence
  Description of Artificial Sequence: Synthetic oligonucleotide
accacauguauauacacgg

SEQ ID NO: 1172599 - RNA, 19 nt, Artificial Sequence
  Description of Artificial Sequence: Synthetic oligonucleotide
ucuguuauugcuugugggg

SEQ ID NO: 1172600 - RNA, 19 nt, Artificial Sequence
  Description of Artificial Sequence: Synthetic oligonucleotide
uuuaaauguaaccuguuua

SEQ ID NO: 1172601 - RNA, 19 nt, Artificial Sequence
  Description of Artificial Sequence: Synthetic oligonucleotide
ugagauuugcugcacaccc

SEQ ID NO: 1172602 - RNA, 19 nt, Artificial Sequence
  Description of Artificial Sequence: Synthetic oligonucleotide
ucaagggguagucaagugg

SEQ ID NO: 1172603 - RNA, 19 nt, Artificial Sequence
  Description of Artificial Sequence: Synthetic oligonucleotide
aagaagcucagaaugcccc

SEQ ID NO: 1172604 - RNA, 19 nt, Artificial Sequence
  Description of Artificial Sequence: Synthetic oligonucleotide
guugggauggaacaucucg

SEQ ID NO: 1172605 - RNA, 19 nt, Artificial Sequence
  Description of Artificial Sequence: Synthetic oligonucleotide
uguacgaucugcuuggcga

SEQ ID NO: 1172606 - RNA, 19 nt, Artificial Sequence
  Description of Artificial Sequence: Synthetic oligonucleotide
cauguauauacacggaacc

SEQ ID NO: 1172607 - RNA, 19 nt, Artificial Sequence
  Description of Artificial Sequence: Synthetic oligonucleotide
augaaacaugcacagcgcc

SEQ ID NO: 1172608 - RNA, 19 nt, Artificial Sequence
  Description of Artificial Sequence: Synthetic oligonucleotide
aggauucaggguuaauugc

SEQ ID NO: 1172609 - RNA, 19 nt, Artificial Sequence
  Description of Artificial Sequence: Synthetic oligonucleotide
aacaauaggugcuguagcu

SEQ ID NO: 1172610 - RNA, 19 nt, Artificial Sequence
  Description of Artificial Sequence: Synthetic oligonucleotide
ucugcugagcaccuagugg

SEQ ID NO: 1172611 - RNA, 19 nt, Artificial Sequence
  Description of Artificial Sequence: Synthetic oligonucleotide
uuuuguagaacugcucacg

SEQ ID NO: 1172612 - RNA, 19 nt, Artificial Sequence
  Description of Artificial Sequence: Synthetic oligonucleotide
uaguguaccaggaacucag

SEQ ID NO: 1172613 - RNA, 19 nt, Artificial Sequence
  Description of Artificial Sequence: Synthetic oligonucleotide
aauugcuuauacucggcca

SEQ ID NO: 1172614 - RNA, 19 nt, Artificial Sequence
  Description of Artificial Sequence: Synthetic oligonucleotide
uguauauacacggaacccc

SEQ ID NO: 1172615 - RNA, 19 nt, Artificial Sequence
  Description of Artificial Sequence: Synthetic oligonucleotide
gaggauucaggguuaauug

SEQ ID NO: 1172616 - RNA, 19 nt, Artificial Sequence
  Description of Artificial Sequence: Synthetic oligonucleotide
uccagucaugauuucaggg

SEQ ID NO: 1172617 - RNA, 19 nt, Artificial Sequence
  Description of Artificial Sequence: Synthetic oligonucleotide
uucaaauagaagcggacuc

SEQ ID NO: 1172618 - RNA, 19 nt, Artificial Sequence
  Description of Artificial Sequence: Synthetic oligonucleotide
cucacguuuaaauguaacc

SEQ ID NO: 1172619 - RNA, 19 nt, Artificial Sequence
  Description of Artificial Sequence: Synthetic oligonucleotide
ugauccuagagcuaagccu

SEQ ID NO: 1172620 - RNA, 19 nt, Artificial Sequence
  Description of Artificial Sequence: Synthetic oligonucleotide
uuacaaaacauccccugga

SEQ ID NO: 1172621 - RNA, 19 nt, Artificial Sequence
  Description of Artificial Sequence: Synthetic oligonucleotide
uuggcgauuuuguagaacu

SEQ ID NO: 1172622 - RNA, 19 nt, Artificial Sequence
  Description of Artificial Sequence: Synthetic oligonucleotide
agagguagugaggacagcc

SEQ ID NO: 1172623 - RNA, 19 nt, Artificial Sequence
  Description of Artificial Sequence: Synthetic oligonucleotide
guaccaggaacucagacac

SEQ ID NO: 1172624 - RNA, 19 nt, Artificial Sequence
  Description of Artificial Sequence: Synthetic oligonucleotide
agcaccuaguggcagauuc

SEQ ID NO: 1172625 - RNA, 19 nt, Artificial Sequence
  Description of Artificial Sequence: Synthetic oligonucleotide
uaauugcuuauacucggcc

SEQ ID NO: 1172626 - RNA, 19 nt, Artificial Sequence
  Description of Artificial Sequence: Synthetic oligonucleotide
agcacuguugcucagugug

SEQ ID NO: 1172627 - RNA, 19 nt, Artificial Sequence
  Description of Artificial Sequence: Synthetic oligonucleotide
uguaccaggaacucagaca

SEQ ID NO: 1172628 - RNA, 19 nt, Artificial Sequence
  Description of Artificial Sequence: Synthetic oligonucleotide
caaacucaaagcaaguguc

SEQ ID NO: 1172629 - RNA, 19 nt, Artificial Sequence
  Description of Artificial Sequence: Synthetic oligonucleotide
gaaagguccccacagguac

SEQ ID NO: 1172630 - RNA, 19 nt, Artificial Sequence
  Description of Artificial Sequence: Synthetic oligonucleotide
gauccuagagcuaagccug

SEQ ID NO: 1172631 - RNA, 19 nt, Artificial Sequence
  Description of Artificial Sequence: Synthetic oligonucleotide
aaaagcgaaccuugugcag

SEQ ID NO: 1172632 - RNA, 19 nt, Artificial Sequence
  Description of Artificial Sequence: Synthetic oligonucleotide
cuagagcuaagccuggugc

SEQ ID NO: 1172633 - RNA, 19 nt, Artificial Sequence
  Description of Artificial Sequence: Synthetic oligonucleotide
acuuacaaaacauccccug

SEQ ID NO: 1172634 - RNA, 19 nt, Artificial Sequence
  Description of Artificial Sequence: Synthetic oligonucleotide
auagauguugggauggaac

SEQ ID NO: 1172635 - RNA, 19 nt, Artificial Sequence
  Description of Artificial Sequence: Synthetic oligonucleotide
uuaauugcuuauacucggc

SEQ ID NO: 1172636 - RNA, 19 nt, Artificial Sequence
  Description of Artificial Sequence: Synthetic oligonucleotide
auaggcgauccccagcccc

SEQ ID NO: 1172637 - RNA, 19 nt, Artificial Sequence
  Description of Artificial Sequence: Synthetic oligonucleotide
ugaacccacuuacaaaaca

SEQ ID NO: 1172638 - RNA, 19 nt, Artificial Sequence
  Description of Artificial Sequence: Synthetic oligonucleotide
acauguauauacacggaac

SEQ ID NO: 1172639 - RNA, 19 nt, Artificial Sequence
  Description of Artificial Sequence: Synthetic oligonucleotide
gaacaauaggugcuguagc

SEQ ID NO: 1172640 - RNA, 19 nt, Artificial Sequence
  Description of Artificial Sequence: Synthetic oligonucleotide
uugauccuagagcuaagcc

SEQ ID NO: 1172641 - RNA, 19 nt, Artificial Sequence
  Description of Artificial Sequence: Synthetic oligonucleotide
ggaaaagcgaaccuugugc

SEQ ID NO: 1172642 - RNA, 19 nt, Artificial Sequence
  Description of Artificial Sequence: Synthetic oligonucleotide
cacacuagagcccuggcag

SEQ ID NO: 1172643 - RNA, 19 nt, Artificial Sequence
  Description of Artificial Sequence: Synthetic oligonucleotide
gaaaagcgaaccuugugca

SEQ ID NO: 1172644 - RNA, 19 nt, Artificial Sequence
  Description of Artificial Sequence: Synthetic oligonucleotide
auuucaaauagaagcggac

SEQ ID NO: 1172645 - RNA, 19 nt, Artificial Sequence
  Description of Artificial Sequence: Synthetic oligonucleotide
cuuauacucggccaucagc

SEQ ID NO: 1172646 - RNA, 19 nt, Artificial Sequence
  Description of Artificial Sequence: Synthetic oligonucleotide
aauagaagcggacucccuu

SEQ ID NO: 1172647 - RNA, 19 nt, Artificial Sequence
  Description of Artificial Sequence: Synthetic oligonucleotide
ugaaacaugcacagcgcca

SEQ ID NO: 1172648 - RNA, 19 nt, Artificial Sequence
  Description of Artificial Sequence: Synthetic oligonucleotide
uuucaaauagaagcggacu

SEQ ID NO: 1172649 - RNA, 19 nt, Artificial Sequence
  Description of Artificial Sequence: Synthetic oligonucleotide
cacguuuaaauguaaccug

SEQ ID NO: 1172650 - RNA, 19 nt, Artificial Sequence
  Description of Artificial Sequence: Synthetic oligonucleotide
aacuacuaacaccaugaaa

SEQ ID NO: 1172651 - RNA, 19 nt, Artificial Sequence
  Description of Artificial Sequence: Synthetic oligonucleotide
acuaacaccaugaaacaug

SEQ ID NO: 1172652 - RNA, 19 nt, Artificial Sequence
  Description of Artificial Sequence: Synthetic oligonucleotide
ugcuuggcgauuuuguaga

SEQ ID NO: 1172653 - RNA, 19 nt, Artificial Sequence
  Description of Artificial Sequence: Synthetic oligonucleotide
ucuaguccaauaugugccc

SEQ ID NO: 1172654 - RNA, 19 nt, Artificial Sequence
  Description of Artificial Sequence: Synthetic oligonucleotide
cauugaagaucuguuauug

SEQ ID NO: 1172655 - RNA, 19 nt, Artificial Sequence
  Description of Artificial Sequence: Synthetic oligonucleotide
uuugcagcccagcagcugu

SEQ ID NO: 1172656 - RNA, 19 nt, Artificial Sequence
  Description of Artificial Sequence: Synthetic oligonucleotide
gguuaauugcuuauacucg

SEQ ID NO: 1172657 - RNA, 19 nt, Artificial Sequence
  Description of Artificial Sequence: Synthetic oligonucleotide
uccaauaugugccccucug

SEQ ID NO: 1172658 - RNA, 19 nt, Artificial Sequence
  Description of Artificial Sequence: Synthetic oligonucleotide
acugcucacggucaucccg

SEQ ID NO: 1172659 - RNA, 19 nt, Artificial Sequence
  Description of Artificial Sequence: Synthetic oligonucleotide
ggguuaauugcuuauacuc

SEQ ID NO: 1172660 - RNA, 19 nt, Artificial Sequence
  Description of Artificial Sequence: Synthetic oligonucleotide
gucuaguccaauaugugcc

SEQ ID NO: 1172661 - RNA, 19 nt, Artificial Sequence
  Description of Artificial Sequence: Synthetic oligonucleotide
uguaagugcaaagugucaa

SEQ ID NO: 1172662 - RNA, 19 nt, Artificial Sequence
  Description of Artificial Sequence: Synthetic oligonucleotide
auaugugccccucugcuga

SEQ ID NO: 1172663 - RNA, 19 nt, Artificial Sequence
  Description of Artificial Sequence: Synthetic oligonucleotide
aagaacaauuugauccuag

SEQ ID NO: 1172664 - RNA, 19 nt, Artificial Sequence
  Description of Artificial Sequence: Synthetic oligonucleotide
aaagcgaaccuugugcagu

SEQ ID NO: 1172665 - RNA, 19 nt, Artificial Sequence
  Description of Artificial Sequence: Synthetic oligonucleotide
cucggcacugcucucauag

SEQ ID NO: 1172666 - RNA, 19 nt, Artificial Sequence
  Description of Artificial Sequence: Synthetic oligonucleotide
agaacaauuugauccuaga

SEQ ID NO: 1172667 - RNA, 19 nt, Artificial Sequence
  Description of Artificial Sequence: Synthetic oligonucleotide
auugcuuauacucggccau

SEQ ID NO: 1172668 - RNA, 19 nt, Artificial Sequence
  Description of Artificial Sequence: Synthetic oligonucleotide
aacccacuuacaaaacauc

SEQ ID NO: 1172669 - RNA, 19 nt, Artificial Sequence
  Description of Artificial Sequence: Synthetic oligonucleotide
uuugauccuagagcuaagc

SEQ ID NO: 1172670 - RNA, 19 nt, Artificial Sequence
  Description of Artificial Sequence: Synthetic oligonucleotide
gaugagcuacacuuuaaaa

SEQ ID NO: 1172671 - RNA, 19 nt, Artificial Sequence
  Description of Artificial Sequence: Synthetic oligonucleotide
auccacauucgcuccacuc

SEQ ID NO: 1172672 - RNA, 19 nt, Artificial Sequence
  Description of Artificial Sequence: Synthetic oligonucleotide
ucgucuaguccaauaugug

SEQ ID NO: 1172673 - RNA, 19 nt, Artificial Sequence
  Description of Artificial Sequence: Synthetic oligonucleotide
cauuucaaauagaagcgga

SEQ ID NO: 1172674 - RNA, 19 nt, Artificial Sequence
  Description of Artificial Sequence: Synthetic oligonucleotide
uggccuguaccacagccgc

SEQ ID NO: 1172675 - RNA, 19 nt, Artificial Sequence
  Description of Artificial Sequence: Synthetic oligonucleotide
auacucggccaucagccuc

SEQ ID NO: 1172676 - RNA, 19 nt, Artificial Sequence
  Description of Artificial Sequence: Synthetic oligonucleotide
ccagucaugauuucagggg

SEQ ID NO: 1172677 - RNA, 19 nt, Artificial Sequence
  Description of Artificial Sequence: Synthetic oligonucleotide
augcucaccaccgaaagca

SEQ ID NO: 1172678 - RNA, 19 nt, Artificial Sequence
  Description of Artificial Sequence: Synthetic oligonucleotide
augugggcgaggaaaagcg

SEQ ID NO: 1172679 - RNA, 19 nt, Artificial Sequence
  Description of Artificial Sequence: Synthetic oligonucleotide
gaaggaacaauaggugcug

SEQ ID NO: 1172680 - RNA, 19 nt, Artificial Sequence
  Description of Artificial Sequence: Synthetic oligonucleotide
cagaaggagcagcauaggc

SEQ ID NO: 1172681 - RNA, 19 nt, Artificial Sequence
  Description of Artificial Sequence: Synthetic oligonucleotide
aucaaugccucccauucaa

SEQ ID NO: 1172682 - RNA, 19 nt, Artificial Sequence
  Description of Artificial Sequence: Synthetic oligonucleotide
uguugcucaaugugguacu

SEQ ID NO: 1172683 - RNA, 19 nt, Artificial Sequence
  Description of Artificial Sequence: Synthetic oligonucleotide
aggguuaauugcuuauacu

SEQ ID NO: 1172684 - RNA, 19 nt, Artificial Sequence
  Description of Artificial Sequence: Synthetic oligonucleotide
aagcgaaccuugugcagug

SEQ ID NO: 1172685 - RNA, 19 nt, Artificial Sequence
  Description of Artificial Sequence: Synthetic oligonucleotide
uagagcuaagccuggugca

SEQ ID NO: 1172686 - RNA, 19 nt, Artificial Sequence
  Description of Artificial Sequence: Synthetic oligonucleotide
aggaaaagcgaaccuugug

SEQ ID NO: 1172687 - RNA, 19 nt, Artificial Sequence
  Description of Artificial Sequence: Synthetic oligonucleotide
uaggaacugagaggcaggg

SEQ ID NO: 1172688 - RNA, 19 nt, Artificial Sequence
  Description of Artificial Sequence: Synthetic oligonucleotide
ggaacuacuaacaccauga

SEQ ID NO: 1172689 - RNA, 19 nt, Artificial Sequence
  Description of Artificial Sequence: Synthetic oligonucleotide
ucucaugaacccacuuaca

SEQ ID NO: 1172690 - RNA, 19 nt, Artificial Sequence
  Description of Artificial Sequence: Synthetic oligonucleotide
agaugagcuacacuuuaaa

SEQ ID NO: 1172691 - RNA, 19 nt, Artificial Sequence
  Description of Artificial Sequence: Synthetic oligonucleotide
ggaacaauaggugcuguag

SEQ ID NO: 1172692 - RNA, 19 nt, Artificial Sequence
  Description of Artificial Sequence: Synthetic oligonucleotide
ugcucucauagcccauggg

SEQ ID NO: 1172693 - RNA, 19 nt, Artificial Sequence
  Description of Artificial Sequence: Synthetic oligonucleotide
agguagugaggacagccug

SEQ ID NO: 1172694 - RNA, 19 nt, Artificial Sequence
  Description of Artificial Sequence: Synthetic oligonucleotide
uguuauugcuugugggguc

SEQ ID NO: 1172695 - RNA, 19 nt, Artificial Sequence
  Description of Artificial Sequence: Synthetic oligonucleotide
uggacccucccugagacgc

SEQ ID NO: 1172696 - RNA, 19 nt, Artificial Sequence
  Description of Artificial Sequence: Synthetic oligonucleotide
uguagcuccgcaguugccu

SEQ ID NO: 1172697 - RNA, 19 nt, Artificial Sequence
  Description of Artificial Sequence: Synthetic oligonucleotide
gaugcagacucucccguca

SEQ ID NO: 1172698 - RNA, 19 nt, Artificial Sequence
  Description of Artificial Sequence: Synthetic oligonucleotide
cacagcaagccucugucac

SEQ ID NO: 1172699 - RNA, 19 nt, Artificial Sequence
  Description of Artificial Sequence: Synthetic oligonucleotide
gucguuauuccagucauga

SEQ ID NO: 1172700 - RNA, 19 nt, Artificial Sequence
  Description of Artificial Sequence: Synthetic oligonucleotide
ggcacuguugcucaaugug

SEQ ID NO: 1172701 - RNA, 19 nt, Artificial Sequence
  Description of Artificial Sequence: Synthetic oligonucleotide
aagcggacucccuugggaa

SEQ ID NO: 1172702 - RNA, 19 nt, Artificial Sequence
  Description of Artificial Sequence: Synthetic oligonucleotide
acaaaacauccccuggaaa

SEQ ID NO: 1172703 - RNA, 19 nt, Artificial Sequence
  Description of Artificial Sequence: Synthetic oligonucleotide
acguuuaaauguaaccugu

SEQ ID NO: 1172704 - RNA, 19 nt, Artificial Sequence
  Description of Artificial Sequence: Synthetic oligonucleotide
agaugcagacucucccguc

SEQ ID NO: 1172705 - RNA, 19 nt, Artificial Sequence
  Description of Artificial Sequence: Synthetic oligonucleotide
ggcagauuccccuccaacc

SEQ ID NO: 1172706 - RNA, 19 nt, Artificial Sequence
  Description of Artificial Sequence: Synthetic oligonucleotide
caugugggcgaggaaaagc

SEQ ID NO: 1172707 - RNA, 19 nt, Artificial Sequence
  Description of Artificial Sequence: Synthetic oligonucleotide
guugguguuggcacggcag

SEQ ID NO: 1172708 - RNA, 19 nt, Artificial Sequence
  Description of Artificial Sequence: Synthetic oligonucleotide
cucacggucaucccgccac

SEQ ID NO: 1172709 - RNA, 19 nt, Artificial Sequence
  Description of Artificial Sequence: Synthetic oligonucleotide
ucuaguguaccaggaacuc

SEQ ID NO: 1172710 - RNA, 19 nt, Artificial Sequence
  Description of Artificial Sequence: Synthetic oligonucleotide
gagcugaggaccccguggc

SEQ ID NO: 1172711 - RNA, 19 nt, Artificial Sequence
  Description of Artificial Sequence: Synthetic oligonucleotide
aacucaaagcaagugucuu

SEQ ID NO: 1172712 - RNA, 19 nt, Artificial Sequence
  Description of Artificial Sequence: Synthetic oligonucleotide
cuguugcucaaugugguac

SEQ ID NO: 1172713 - RNA, 19 nt, Artificial Sequence
  Description of Artificial Sequence: Synthetic oligonucleotide
cuggccuguaccacagccg

SEQ ID NO: 1172714 - RNA, 19 nt, Artificial Sequence
  Description of Artificial Sequence: Synthetic oligonucleotide
cucgacgcucugcacaggg

SEQ ID NO: 1172715 - RNA, 19 nt, Artificial Sequence
  Description of Artificial Sequence: Synthetic oligonucleotide
aaagggcuacggugacuuc

SEQ ID NO: 1172716 - RNA, 19 nt, Artificial Sequence
  Description of Artificial Sequence: Synthetic oligonucleotide
uggcgauuuuguagaacug

SEQ ID NO: 1172717 - RNA, 19 nt, Artificial Sequence
  Description of Artificial Sequence: Synthetic oligonucleotide
gcauuucaaauagaagcgg

SEQ ID NO: 1172718 - RNA, 19 nt, Artificial Sequence
  Description of Artificial Sequence: Synthetic oligonucleotide
uggugcaaccacauguaua

SEQ ID NO: 1172719 - RNA, 19 nt, Artificial Sequence
  Description of Artificial Sequence: Synthetic oligonucleotide
ugucguuauuccagucaug

SEQ ID NO: 1172720 - RNA, 19 nt, Artificial Sequence
  Description of Artificial Sequence: Synthetic oligonucleotide
acuagagcccuggcagucc

SEQ ID NO: 1172721 - RNA, 19 nt, Artificial Sequence
  Description of Artificial Sequence: Synthetic oligonucleotide
gucgggguggaaaggaagg

SEQ ID NO: 1172722 - RNA, 19 nt, Artificial Sequence
  Description of Artificial Sequence: Synthetic oligonucleotide
ugcucaccaccgaaagcag

SEQ ID NO: 1172723 - RNA, 19 nt, Artificial Sequence
  Description of Artificial Sequence: Synthetic oligonucleotide
agcucgucuaguccaauau

SEQ ID NO: 1172724 - RNA, 19 nt, Artificial Sequence
  Description of Artificial Sequence: Synthetic oligonucleotide
ugcacagggcuccaccgcu

SEQ ID NO: 1172725 - RNA, 19 nt, Artificial Sequence
  Description of Artificial Sequence: Synthetic oligonucleotide
uguugguguuggcacggca

SEQ ID NO: 1172726 - RNA, 19 nt, Artificial Sequence
  Description of Artificial Sequence: Synthetic oligonucleotide
accaccgaaagcaggaucu

SEQ ID NO: 1172727 - RNA, 19 nt, Artificial Sequence
  Description of Artificial Sequence: Synthetic oligonucleotide
gaagcggacucccuuggga

SEQ ID NO: 1172728 - RNA, 19 nt, Artificial Sequence
  Description of Artificial Sequence: Synthetic oligonucleotide
uauacucggccaucagccu

SEQ ID NO: 1172729 - RNA, 19 nt, Artificial Sequence
  Description of Artificial Sequence: Synthetic oligonucleotide
ucaccaugccaaaggcagc

SEQ ID NO: 1172730 - RNA, 19 nt, Artificial Sequence
  Description of Artificial Sequence: Synthetic oligonucleotide
uagcccaugggaucaucgc

SEQ ID NO: 1172731 - RNA, 19 nt, Artificial Sequence
  Description of Artificial Sequence: Synthetic oligonucleotide
agaagcggacucccuuggg

SEQ ID NO: 1172732 - RNA, 19 nt, Artificial Sequence
  Description of Artificial Sequence: Synthetic oligonucleotide
caugcucaccaccgaaagc

SEQ ID NO: 1172733 - RNA, 19 nt, Artificial Sequence
  Description of Artificial Sequence: Synthetic oligonucleotide
ccuggaaagggcuacggug

SEQ ID NO: 1172734 - RNA, 19 nt, Artificial Sequence
  Description of Artificial Sequence: Synthetic oligonucleotide
uacuaacaccaugaaacau

SEQ ID NO: 1172735 - RNA, 19 nt, Artificial Sequence
  Description of Artificial Sequence: Synthetic oligonucleotide
cacgggugugaccucagag

SEQ ID NO: 1172736 - RNA, 19 nt, Artificial Sequence
  Description of Artificial Sequence: Synthetic oligonucleotide
gcuacggugacuucuguga

SEQ ID NO: 1172737 - RNA, 19 nt, Artificial Sequence
  Description of Artificial Sequence: Synthetic oligonucleotide
acugacaugugggcgagga

SEQ ID NO: 1172738 - RNA, 19 nt, Artificial Sequence
  Description of Artificial Sequence: Synthetic oligonucleotide
ugcuuauacucggccauca

SEQ ID NO: 1172739 - RNA, 19 nt, Artificial Sequence
  Description of Artificial Sequence: Synthetic oligonucleotide
cccacuuacaaaacauccc

SEQ ID NO: 1172740 - RNA, 19 nt, Artificial Sequence
  Description of Artificial Sequence: Synthetic oligonucleotide
auagaaacucacguuuaaa

SEQ ID NO: 1172741 - RNA, 19 nt, Artificial Sequence
  Description of Artificial Sequence: Synthetic oligonucleotide
gacucaagggguagucaag

SEQ ID NO: 1172742 - RNA, 19 nt, Artificial Sequence
  Description of Artificial Sequence: Synthetic oligonucleotide
agcugucguuauuccaguc

SEQ ID NO: 1172743 - RNA, 19 nt, Artificial Sequence
  Description of Artificial Sequence: Synthetic oligonucleotide
aguccaauaugugccccuc

SEQ ID NO: 1172744 - RNA, 19 nt, Artificial Sequence
  Description of Artificial Sequence: Synthetic oligonucleotide
gaucaaugccucccauuca

SEQ ID NO: 1172745 - RNA, 19 nt, Artificial Sequence
  Description of Artificial Sequence: Synthetic oligonucleotide
gcauaggcgauccccagcc

SEQ ID NO: 1172746 - RNA, 19 nt, Artificial Sequence
  Description of Artificial Sequence: Synthetic oligonucleotide
ggcgauuuuguagaacugc

SEQ ID NO: 1172747 - RNA, 19 nt, Artificial Sequence
  Description of Artificial Sequence: Synthetic oligonucleotide
acucaagggguagucaagu

SEQ ID NO: 1172748 - RNA, 19 nt, Artificial Sequence
  Description of Artificial Sequence: Synthetic oligonucleotide
cucgucuaguccaauaugu

SEQ ID NO: 1172749 - RNA, 19 nt, Artificial Sequence
  Description of Artificial Sequence: Synthetic oligonucleotide
gagauuugcugcacacccc

SEQ ID NO: 1172750 - RNA, 19 nt, Artificial Sequence
  Description of Artificial Sequence: Synthetic oligonucleotide
gcucuaguguaccaggaac

SEQ ID NO: 1172751 - RNA, 19 nt, Artificial Sequence
  Description of Artificial Sequence: Synthetic oligonucleotide
cuguacgaucugcuuggcg

SEQ ID NO: 1172752 - RNA, 19 nt, Artificial Sequence
  Description of Artificial Sequence: Synthetic oligonucleotide
uggcacggcagcacuguug

SEQ ID NO: 1172753 - RNA, 19 nt, Artificial Sequence
  Description of Artificial Sequence: Synthetic oligonucleotide
gacucccuugggaaggaag

SEQ ID NO: 1172754 - RNA, 19 nt, Artificial Sequence
  Description of Artificial Sequence: Synthetic oligonucleotide
cucaagggguagucaagug

SEQ ID NO: 1172755 - RNA, 19 nt, Artificial Sequence
  Description of Artificial Sequence: Synthetic oligonucleotide
guaagugcaaagugucaaa

SEQ ID NO: 1172756 - RNA, 19 nt, Artificial Sequence
  Description of Artificial Sequence: Synthetic oligonucleotide
cuucucgacgcucugcaca

SEQ ID NO: 1172757 - RNA, 19 nt, Artificial Sequence
  Description of Artificial Sequence: Synthetic oligonucleotide
agacucucccgucaggaua

SEQ ID NO: 1172758 - RNA, 19 nt, Artificial Sequence
  Description of Artificial Sequence: Synthetic oligonucleotide
agccacugacaugugggcg

SEQ ID NO: 1172759 - RNA, 19 nt, Artificial Sequence
  Description of Artificial Sequence: Synthetic oligonucleotide
gaacuacuaacaccaugaa

SEQ ID NO: 1172760 - RNA, 19 nt, Artificial Sequence
  Description of Artificial Sequence: Synthetic oligonucleotide
agucaugauuucaggggag

SEQ ID NO: 1172761 - RNA, 19 nt, Artificial Sequence
  Description of Artificial Sequence: Synthetic oligonucleotide
gcagcugucguuauuccag

SEQ ID NO: 1172762 - RNA, 19 nt, Artificial Sequence
  Description of Artificial Sequence: Synthetic oligonucleotide
cuagagcccuggcaguccc

SEQ ID NO: 1172763 - RNA, 19 nt, Artificial Sequence
  Description of Artificial Sequence: Synthetic oligonucleotide
gggaacuacuaacaccaug

SEQ ID NO: 1172764 - RNA, 19 nt, Artificial Sequence
  Description of Artificial Sequence: Synthetic oligonucleotide
ggcacggcagcacuguugc

SEQ ID NO: 1172765 - RNA, 19 nt, Artificial Sequence
  Description of Artificial Sequence: Synthetic oligonucleotide
gcucucauagcccauggga

SEQ ID NO: 1172766 - RNA, 19 nt, Artificial Sequence
  Description of Artificial Sequence: Synthetic oligonucleotide
ggugugaccucagagcccc

SEQ ID NO: 1172767 - RNA, 19 nt, Artificial Sequence
  Description of Artificial Sequence: Synthetic oligonucleotide
agcggacucccuugggaag

SEQ ID NO: 1172768 - RNA, 19 nt, Artificial Sequence
  Description of Artificial Sequence: Synthetic oligonucleotide
ucaggguuaauugcuuaua

SEQ ID NO: 1172769 - RNA, 19 nt, Artificial Sequence
  Description of Artificial Sequence: Synthetic oligonucleotide
gagacccacacuagagccc

SEQ ID NO: 1172770 - RNA, 19 nt, Artificial Sequence
  Description of Artificial Sequence: Synthetic oligonucleotide
guagcuccgcaguugccug

SEQ ID NO: 1172771 - RNA, 19 nt, Artificial Sequence
  Description of Artificial Sequence: Synthetic oligonucleotide
agguacccaacuggagccc

SEQ ID NO: 1172772 - RNA, 19 nt, Artificial Sequence
  Description of Artificial Sequence: Synthetic oligonucleotide
ggagagguagugaggacag

SEQ ID NO: 1172773 - RNA, 19 nt, Artificial Sequence
  Description of Artificial Sequence: Synthetic oligonucleotide
guuuaaauguaaccuguuu

SEQ ID NO: 1172774 - RNA, 19 nt, Artificial Sequence
  Description of Artificial Sequence: Synthetic oligonucleotide
ugcuguagcuccgcaguug

SEQ ID NO: 1172775 - RNA, 19 nt, Artificial Sequence
  Description of Artificial Sequence: Synthetic oligonucleotide
cgucuaguccaauaugugc

SEQ ID NO: 1172776 - RNA, 19 nt, Artificial Sequence
  Description of Artificial Sequence: Synthetic oligonucleotide
ugcacaccccacagaugag

SEQ ID NO: 1172777 - RNA, 19 nt, Artificial Sequence
  Description of Artificial Sequence: Synthetic oligonucleotide
cucccgucaggauagaugu

SEQ ID NO: 1172778 - RNA, 19 nt, Artificial Sequence
  Description of Artificial Sequence: Synthetic oligonucleotide
uaugugccccucugcugag

SEQ ID NO: 1172779 - RNA, 19 nt, Artificial Sequence
  Description of Artificial Sequence: Synthetic oligonucleotide
acggucaucccgccacauc

SEQ ID NO: 1172780 - RNA, 19 nt, Artificial Sequence
  Description of Artificial Sequence: Synthetic oligonucleotide
cccugggacaccuaggaac

SEQ ID NO: 1172781 - RNA, 19 nt, Artificial Sequence
  Description of Artificial Sequence: Synthetic oligonucleotide
gcaugcucaccaccgaaag

SEQ ID NO: 1172782 - RNA, 19 nt, Artificial Sequence
  Description of Artificial Sequence: Synthetic oligonucleotide
auccccuggaaagggcuac

SEQ ID NO: 1172783 - RNA, 19 nt, Artificial Sequence
  Description of Artificial Sequence: Synthetic oligonucleotide
gagcugggaacuacuaaca

SEQ ID NO: 1172784 - RNA, 19 nt, Artificial Sequence
  Description of Artificial Sequence: Synthetic oligonucleotide
aucgccuggggcaugcaag

SEQ ID NO: 1172785 - RNA, 19 nt, Artificial Sequence
  Description of Artificial Sequence: Synthetic oligonucleotide
accuaguggcagauucccc

SEQ ID NO: 1172786 - RNA, 19 nt, Artificial Sequence
  Description of Artificial Sequence: Synthetic oligonucleotide
ucucgcaggugaaucucau

SEQ ID NO: 1172787 - RNA, 19 nt, Artificial Sequence
  Description of Artificial Sequence: Synthetic oligonucleotide
aucucaucuugggaggacu

SEQ ID NO: 1172788 - RNA, 19 nt, Artificial Sequence
  Description of Artificial Sequence: Synthetic oligonucleotide
gcuguagcuccgcaguugc

SEQ ID NO: 1172789 - RNA, 19 nt, Artificial Sequence
  Description of Artificial Sequence: Synthetic oligonucleotide
ucguuauuccagucaugau

SEQ ID NO: 1172790 - RNA, 19 nt, Artificial Sequence
  Description of Artificial Sequence: Synthetic oligonucleotide
acugcucucauagcccaug

SEQ ID NO: 1172791 - RNA, 19 nt, Artificial Sequence
  Description of Artificial Sequence: Synthetic oligonucleotide
ucgacgcucugcacagggc

SEQ ID NO: 1172792 - RNA, 19 nt, Artificial Sequence
  Description of Artificial Sequence: Synthetic oligonucleotide
caaaggcagccuaggcuug

SEQ ID NO: 1172793 - RNA, 19 nt, Artificial Sequence
  Description of Artificial Sequence: Synthetic oligonucleotide
cucuaguguaccaggaacu

SEQ ID NO: 1172794 - RNA, 19 nt, Artificial Sequence
  Description of Artificial Sequence: Synthetic oligonucleotide
aggaacaauaggugcugua

SEQ ID NO: 1172795 - RNA, 19 nt, Artificial Sequence
  Description of Artificial Sequence: Synthetic oligonucleotide
augacagaggcagguccuc

SEQ ID NO: 1172796 - RNA, 19 nt, Artificial Sequence
  Description of Artificial Sequence: Synthetic oligonucleotide
aaccuugugcagugagauu

SEQ ID NO: 1172797 - RNA, 19 nt, Artificial Sequence
  Description of Artificial Sequence: Synthetic oligonucleotide
cuuggcgauuuuguagaac

SEQ ID NO: 1172798 - RNA, 19 nt, Artificial Sequence
  Description of Artificial Sequence: Synthetic oligonucleotide
gauagauguugggauggaa

SEQ ID NO: 1172799 - RNA, 19 nt, Artificial Sequence
  Description of Artificial Sequence: Synthetic oligonucleotide
cacagggcuccaccgcucg

SEQ ID NO: 1172800 - RNA, 19 nt, Artificial Sequence
  Description of Artificial Sequence: Synthetic oligonucleotide
ccuaggaacugagaggcag

SEQ ID NO: 1172801 - RNA, 19 nt, Artificial Sequence
  Description of Artificial Sequence: Synthetic oligonucleotide
gaaccuugugcagugagau

SEQ ID NO: 1172802 - RNA, 19 nt, Artificial Sequence
  Description of Artificial Sequence: Synthetic oligonucleotide
auugcuuguggggucugcu

SEQ ID NO: 1172803 - RNA, 19 nt, Artificial Sequence
  Description of Artificial Sequence: Synthetic oligonucleotide
cgagacccacacuagagcc

SEQ ID NO: 1172804 - RNA, 19 nt, Artificial Sequence
  Description of Artificial Sequence: Synthetic oligonucleotide
uauugcuuguggggucugc

SEQ ID NO: 1172805 - RNA, 19 nt, Artificial Sequence
  Description of Artificial Sequence: Synthetic oligonucleotide
ucuucucgacgcucugcac

SEQ ID NO: 1172806 - RNA, 19 nt, Artificial Sequence
  Description of Artificial Sequence: Synthetic oligonucleotide
cagagacuucuguacgauc

SEQ ID NO: 1172807 - RNA, 19 nt, Artificial Sequence
  Description of Artificial Sequence: Synthetic oligonucleotide
gcugucguuauuccaguca

SEQ ID NO: 1172808 - RNA, 19 nt, Artificial Sequence
  Description of Artificial Sequence: Synthetic oligonucleotide
ugcucgggcacuguugcuc

SEQ ID NO: 1172809 - RNA, 19 nt, Artificial Sequence
  Description of Artificial Sequence: Synthetic oligonucleotide
gcaagugucuucagggccc

SEQ ID NO: 1172810 - RNA, 19 nt, Artificial Sequence
  Description of Artificial Sequence: Synthetic oligonucleotide
ucggcacugcucucauagc

SEQ ID NO: 1172811 - RNA, 19 nt, Artificial Sequence
  Description of Artificial Sequence: Synthetic oligonucleotide
gacaugugggcgaggaaaa

SEQ ID NO: 1172812 - RNA, 19 nt, Artificial Sequence
  Description of Artificial Sequence: Synthetic oligonucleotide
uccagcucgucuaguccaa

SEQ ID NO: 1172813 - RNA, 19 nt, Artificial Sequence
  Description of Artificial Sequence: Synthetic oligonucleotide
aggcgagacccacacuaga

SEQ ID NO: 1172814 - RNA, 19 nt, Artificial Sequence
  Description of Artificial Sequence: Synthetic oligonucleotide
ccaauaugugccccucugc

SEQ ID NO: 1172815 - RNA, 19 nt, Artificial Sequence
  Description of Artificial Sequence: Synthetic oligonucleotide
aggaccccguggcugggag

SEQ ID NO: 1172816 - RNA, 19 nt, Artificial Sequence
  Description of Artificial Sequence: Synthetic oligonucleotide
gcucgucuaguccaauaug

SEQ ID NO: 1172817 - RNA, 19 nt, Artificial Sequence
  Description of Artificial Sequence: Synthetic oligonucleotide
cuugagacccuccaccccu

SEQ ID NO: 1172818 - RNA, 19 nt, Artificial Sequence
  Description of Artificial Sequence: Synthetic oligonucleotide
gcgagacccacacuagagc

SEQ ID NO: 1172819 - RNA, 19 nt, Artificial Sequence
  Description of Artificial Sequence: Synthetic oligonucleotide
auaccgcggaaccugcguu

SEQ ID NO: 1172820 - RNA, 19 nt, Artificial Sequence
  Description of Artificial Sequence: Synthetic oligonucleotide
cauaggcgauccccagccc

SEQ ID NO: 1172821 - RNA, 19 nt, Artificial Sequence
  Description of Artificial Sequence: Synthetic oligonucleotide
ggcgagacccacacuagag

SEQ ID NO: 1172822 - RNA, 19 nt, Artificial Sequence
  Description of Artificial Sequence: Synthetic oligonucleotide
ucuguacgaucugcuuggc

SEQ ID NO: 1172823 - RNA, 19 nt, Artificial Sequence
  Description of Artificial Sequence: Synthetic oligonucleotide
uaccgcggaaccugcguuc

SEQ ID NO: 1172824 - RNA, 19 nt, Artificial Sequence
  Description of Artificial Sequence: Synthetic oligonucleotide
ugagcaccuaguggcagau

SEQ ID NO: 1172825 - RNA, 19 nt, Artificial Sequence
  Description of Artificial Sequence: Synthetic oligonucleotide
ggacucaagggguagucaa

SEQ ID NO: 1172826 - RNA, 19 nt, Artificial Sequence
  Description of Artificial Sequence: Synthetic oligonucleotide
cuaguguaccaggaacuca

SEQ ID NO: 1172827 - RNA, 19 nt, Artificial Sequence
  Description of Artificial Sequence: Synthetic oligonucleotide
agcgccagccacugacaug

SEQ ID NO: 1172828 - RNA, 19 nt, Artificial Sequence
  Description of Artificial Sequence: Synthetic oligonucleotide
caucucgcaggugaaucuc

SEQ ID NO: 1172829 - RNA, 19 nt, Artificial Sequence
  Description of Artificial Sequence: Synthetic oligonucleotide
uacccaacuggagccccag

SEQ ID NO: 1172830 - RNA, 19 nt, Artificial Sequence
  Description of Artificial Sequence: Synthetic oligonucleotide
caccaccgaaagcaggauc

SEQ ID NO: 1172831 - RNA, 19 nt, Artificial Sequence
  Description of Artificial Sequence: Synthetic oligonucleotide
caugcaagauggagaugca

SEQ ID NO: 1172832 - RNA, 19 nt, Artificial Sequence
  Description of Artificial Sequence: Synthetic oligonucleotide
ccgucaggauagauguugg

SEQ ID NO: 1172833 - RNA, 19 nt, Artificial Sequence
  Description of Artificial Sequence: Synthetic oligonucleotide
gcuuauacucggccaucag

SEQ ID NO: 1172834 - RNA, 19 nt, Artificial Sequence
  Description of Artificial Sequence: Synthetic oligonucleotide
uugcuuauacucggccauc

SEQ ID NO: 1172835 - RNA, 19 nt, Artificial Sequence
  Description of Artificial Sequence: Synthetic oligonucleotide
ugggaacuacuaacaccau

SEQ ID NO: 1172836 - RNA, 19 nt, Artificial Sequence
  Description of Artificial Sequence: Synthetic oligonucleotide
gcaaccacauguauauaca

SEQ ID NO: 1172837 - RNA, 19 nt, Artificial Sequence
  Description of Artificial Sequence: Synthetic oligonucleotide
cuguagcuccgcaguugcc

SEQ ID NO: 1172838 - RNA, 19 nt, Artificial Sequence
  Description of Artificial Sequence: Synthetic oligonucleotide
cagaugagcuacacuuuaa

SEQ ID NO: 1172839 - RNA, 19 nt, Artificial Sequence
  Description of Artificial Sequence: Synthetic oligonucleotide
cucgcaggugaaucucauc

SEQ ID NO: 1172840 - RNA, 19 nt, Artificial Sequence
  Description of Artificial Sequence: Synthetic oligonucleotide
gauuugcugcacaccccac

SEQ ID NO: 1172841 - RNA, 19 nt, Artificial Sequence
  Description of Artificial Sequence: Synthetic oligonucleotide
ggcuacggugacuucugug

SEQ ID NO: 1172842 - RNA, 19 nt, Artificial Sequence
  Description of Artificial Sequence: Synthetic oligonucleotide
agggguagucaagugggaa

SEQ ID NO: 1172843 - RNA, 19 nt, Artificial Sequence
  Description of Artificial Sequence: Synthetic oligonucleotide
cacuguugcucaauguggu

SEQ ID NO: 1172844 - RNA, 19 nt, Artificial Sequence
  Description of Artificial Sequence: Synthetic oligonucleotide
cuggacccucccugagacg

SEQ ID NO: 1172845 - RNA, 19 nt, Artificial Sequence
  Description of Artificial Sequence: Synthetic oligonucleotide
acucaggauggcaggaaaa

SEQ ID NO: 1172846 - RNA, 19 nt, Artificial Sequence
  Description of Artificial Sequence: Synthetic oligonucleotide
gcuuguaagugcaaagugu

SEQ ID NO: 1172847 - RNA, 19 nt, Artificial Sequence
  Description of Artificial Sequence: Synthetic oligonucleotide
cuguuauugcuuguggggu

SEQ ID NO: 1172848 - RNA, 19 nt, Artificial Sequence
  Description of Artificial Sequence: Synthetic oligonucleotide
gggguagucaagugggaaa

SEQ ID NO: 1172849 - RNA, 19 nt, Artificial Sequence
  Description of Artificial Sequence: Synthetic oligonucleotide
gugcacacgggugugaccu

SEQ ID NO: 1172850 - RNA, 19 nt, Artificial Sequence
  Description of Artificial Sequence: Synthetic oligonucleotide
uucgcuccacucucaucau

SEQ ID NO: 1172851 - RNA, 19 nt, Artificial Sequence
  Description of Artificial Sequence: Synthetic oligonucleotide
gagagguagugaggacagc

SEQ ID NO: 1172852 - RNA, 19 nt, Artificial Sequence
  Description of Artificial Sequence: Synthetic oligonucleotide
ggauucaggguuaauugcu

SEQ ID NO: 1172853 - RNA, 19 nt, Artificial Sequence
  Description of Artificial Sequence: Synthetic oligonucleotide
agccuggugcaaccacaug

SEQ ID NO: 1172854 - RNA, 19 nt, Artificial Sequence
  Description of Artificial Sequence: Synthetic oligonucleotide
cacauucgcuccacucuca

SEQ ID NO: 1172855 - RNA, 19 nt, Artificial Sequence
  Description of Artificial Sequence: Synthetic oligonucleotide
ccuagagcuaagccuggug

SEQ ID NO: 1172856 - RNA, 19 nt, Artificial Sequence
  Description of Artificial Sequence: Synthetic oligonucleotide
gagguagugaggacagccu

SEQ ID NO: 1172857 - RNA, 19 nt, Artificial Sequence
  Description of Artificial Sequence: Synthetic oligonucleotide
cccgccauaccgcggaacc

SEQ ID NO: 1172858 - RNA, 19 nt, Artificial Sequence
  Description of Artificial Sequence: Synthetic oligonucleotide
gagcccuuugcagcccagc

SEQ ID NO: 1172859 - RNA, 19 nt, Artificial Sequence
  Description of Artificial Sequence: Synthetic oligonucleotide
gcucaccaccgaaagcagg

SEQ ID NO: 1172860 - RNA, 19 nt, Artificial Sequence
  Description of Artificial Sequence: Synthetic oligonucleotide
gcggacucccuugggaagg

SEQ ID NO: 1172861 - RNA, 19 nt, Artificial Sequence
  Description of Artificial Sequence: Synthetic oligonucleotide
accgcucggcacugcucuc

SEQ ID NO: 1172862 - RNA, 19 nt, Artificial Sequence
  Description of Artificial Sequence: Synthetic oligonucleotide
ccacauucgcuccacucuc

SEQ ID NO: 1172863 - RNA, 19 nt, Artificial Sequence
  Description of Artificial Sequence: Synthetic oligonucleotide
gguacccaacuggagcccc

SEQ ID NO: 1172864 - RNA, 19 nt, Artificial Sequence
  Description of Artificial Sequence: Synthetic oligonucleotide
gagcugccugucggggugg

SEQ ID NO: 1172865 - RNA, 19 nt, Artificial Sequence
  Description of Artificial Sequence: Synthetic oligonucleotide
ugcacacagcaagccucug

SEQ ID NO: 1172866 - RNA, 19 nt, Artificial Sequence
  Description of Artificial Sequence: Synthetic oligonucleotide
cgucaggauagauguuggg

SEQ ID NO: 1172867 - RNA, 19 nt, Artificial Sequence
  Description of Artificial Sequence: Synthetic oligonucleotide
guacgaucugcuuggcgau

SEQ ID NO: 1172868 - RNA, 19 nt, Artificial Sequence
  Description of Artificial Sequence: Synthetic oligonucleotide
accgcggaaccugcguuca

SEQ ID NO: 1172869 - RNA, 19 nt, Artificial Sequence
  Description of Artificial Sequence: Synthetic oligonucleotide
gaggagcccuuugcagccc

SEQ ID NO: 1172870 - RNA, 19 nt, Artificial Sequence
  Description of Artificial Sequence: Synthetic oligonucleotide
ccaggcgagacccacacua

SEQ ID NO: 1172871 - RNA, 19 nt, Artificial Sequence
  Description of Artificial Sequence: Synthetic oligonucleotide
ggaggauucaggguuaauu

SEQ ID NO: 1172872 - RNA, 19 nt, Artificial Sequence
  Description of Artificial Sequence: Synthetic oligonucleotide
gggaggacucaagggguag

SEQ ID NO: 1172873 - RNA, 19 nt, Artificial Sequence
  Description of Artificial Sequence: Synthetic oligonucleotide
ucauggggccugccacaau

SEQ ID NO: 1172874 - RNA, 19 nt, Artificial Sequence
  Description of Artificial Sequence: Synthetic oligonucleotide
gcaccuaguggcagauucc

SEQ ID NO: 1172875 - RNA, 19 nt, Artificial Sequence
  Description of Artificial Sequence: Synthetic oligonucleotide
cuccaacccugacagugaa

SEQ ID NO: 1172876 - RNA, 19 nt, Artificial Sequence
  Description of Artificial Sequence: Synthetic oligonucleotide
caacccugacagugaagaa

SEQ ID NO: 1172877 - RNA, 19 nt, Artificial Sequence
  Description of Artificial Sequence: Synthetic oligonucleotide
ccgaaagcaggaucuucuc

SEQ ID NO: 1172878 - RNA, 19 nt, Artificial Sequence
  Description of Artificial Sequence: Synthetic oligonucleotide
cauaccgcggaaccugcgu

SEQ ID NO: 1172879 - RNA, 19 nt, Artificial Sequence
  Description of Artificial Sequence: Synthetic oligonucleotide
gcggaaccugcguucagca

SEQ ID NO: 1172880 - RNA, 19 nt, Artificial Sequence
  Description of Artificial Sequence: Synthetic oligonucleotide
ccuaguggcagauuccccu

SEQ ID NO: 1172881 - RNA, 19 nt, Artificial Sequence
  Description of Artificial Sequence: Synthetic oligonucleotide
ccacagguacccaacugga

SEQ ID NO: 1172882 - RNA, 19 nt, Artificial Sequence
  Description of Artificial Sequence: Synthetic oligonucleotide
cuucagcgccguccccgcc

SEQ ID NO: 1172883 - RNA, 19 nt, Artificial Sequence
  Description of Artificial Sequence: Synthetic oligonucleotide
acagcgccagccacugaca

SEQ ID NO: 1172884 - RNA, 19 nt, Artificial Sequence
  Description of Artificial Sequence: Synthetic oligonucleotide
ucgggcacuguugcucaau

SEQ ID NO: 1172885 - RNA, 19 nt, Artificial Sequence
  Description of Artificial Sequence: Synthetic oligonucleotide
ucccgucaggauagauguu

SEQ ID NO: 1172886 - RNA, 19 nt, Artificial Sequence
  Description of Artificial Sequence: Synthetic oligonucleotide
cauggggccugccacaauu

SEQ ID NO: 1172887 - RNA, 19 nt, Artificial Sequence
  Description of Artificial Sequence: Synthetic oligonucleotide
uggaggauucaggguuaau

SEQ ID NO: 1172888 - RNA, 19 nt, Artificial Sequence
  Description of Artificial Sequence: Synthetic oligonucleotide
ccaaaggcagccuaggcuu

SEQ ID NO: 1172889 - RNA, 19 nt, Artificial Sequence
  Description of Artificial Sequence: Synthetic oligonucleotide
gcgauuuuguagaacugcu

SEQ ID NO: 1172890 - RNA, 19 nt, Artificial Sequence
  Description of Artificial Sequence: Synthetic oligonucleotide
ccauaccgcggaaccugcg

SEQ ID NO: 1172891 - RNA, 19 nt, Artificial Sequence
  Description of Artificial Sequence: Synthetic oligonucleotide
cugccugucgggguggaaa

SEQ ID NO: 1172892 - RNA, 19 nt, Artificial Sequence
  Description of Artificial Sequence: Synthetic oligonucleotide
guuggcacggcagcacugu

SEQ ID NO: 1172893 - RNA, 19 nt, Artificial Sequence
  Description of Artificial Sequence: Synthetic oligonucleotide
cguuauuccagucaugauu

SEQ ID NO: 1172894 - RNA, 19 nt, Artificial Sequence
  Description of Artificial Sequence: Synthetic oligonucleotide
ggaaagguccccacaggua

SEQ ID NO: 1172895 - RNA, 19 nt, Artificial Sequence
  Description of Artificial Sequence: Synthetic oligonucleotide
gccuaggcuuguaagugca

SEQ ID NO: 1172896 - RNA, 19 nt, Artificial Sequence
  Description of Artificial Sequence: Synthetic oligonucleotide
ccaugggaucaucgccugg

SEQ ID NO: 1172897 - RNA, 19 nt, Artificial Sequence
  Description of Artificial Sequence: Synthetic oligonucleotide
cccaugggaucaucgccug

SEQ ID NO: 1172898 - RNA, 19 nt, Artificial Sequence
  Description of Artificial Sequence: Synthetic oligonucleotide
gggacaacaggcccacgcu

SEQ ID NO: 1172899 - RNA, 19 nt, Artificial Sequence
  Description of Artificial Sequence: Synthetic oligonucleotide
ggcgaggaaaagcgaaccu

SEQ ID NO: 1172900 - RNA, 19 nt, Artificial Sequence
  Description of Artificial Sequence: Synthetic oligonucleotide
agcgaaccuugugcaguga

SEQ ID NO: 1172901 - RNA, 19 nt, Artificial Sequence
  Description of Artificial Sequence: Synthetic oligonucleotide
ccaugaucaaugccuccca

SEQ ID NO: 1172902 - RNA, 19 nt, Artificial Sequence
  Description of Artificial Sequence: Synthetic oligonucleotide
cagcucgucuaguccaaua

SEQ ID NO: 1172903 - RNA, 19 nt, Artificial Sequence
  Description of Artificial Sequence: Synthetic oligonucleotide
cuacggugacuucugugau

SEQ ID NO: 1172904 - RNA, 19 nt, Artificial Sequence
  Description of Artificial Sequence: Synthetic oligonucleotide
cacugacaugugggcgagg

SEQ ID NO: 1172905 - RNA, 19 nt, Artificial Sequence
  Description of Artificial Sequence: Synthetic oligonucleotide
cugacaugugggcgaggaa

SEQ ID NO: 1172906 - RNA, 19 nt, Artificial Sequence
  Description of Artificial Sequence: Synthetic oligonucleotide
gccgcuuuccagcucgucu

SEQ ID NO: 1172907 - RNA, 19 nt, Artificial Sequence
  Description of Artificial Sequence: Synthetic oligonucleotide
gcucagugugcacacgggu

SEQ ID NO: 1172908 - RNA, 19 nt, Artificial Sequence
  Description of Artificial Sequence: Synthetic oligonucleotide
ccccacagguacccaacug

SEQ ID NO: 1172909 - RNA, 19 nt, Artificial Sequence
  Description of Artificial Sequence: Synthetic oligonucleotide
cagcugucguuauuccagu

SEQ ID NO: 1172910 - RNA, 19 nt, Artificial Sequence
  Description of Artificial Sequence: Synthetic oligonucleotide
guacccaacuggagcccca

SEQ ID NO: 1172911 - RNA, 19 nt, Artificial Sequence
  Description of Artificial Sequence: Synthetic oligonucleotide
gcauccacauucgcuccac

SEQ ID NO: 1172912 - RNA, 19 nt, Artificial Sequence
  Description of Artificial Sequence: Synthetic oligonucleotide
gccauaccgcggaaccugc

SEQ ID NO: 1172913 - RNA, 19 nt, Artificial Sequence
  Description of Artificial Sequence: Synthetic oligonucleotide
gccugucgggguggaaagg

SEQ ID NO: 1172914 - RNA, 19 nt, Artificial Sequence
  Description of Artificial Sequence: Synthetic oligonucleotide
ggcuccaccgcucggcacu

SEQ ID NO: 1172915 - RNA, 19 nt, Artificial Sequence
  Description of Artificial Sequence: Synthetic oligonucleotide
ggcagucccaccugcucua

SEQ ID NO: 1172916 - RNA, 19 nt, Artificial Sequence
  Description of Artificial Sequence: Synthetic oligonucleotide
ccccuggaaagggcuacgg

SEQ ID NO: 1172917 - RNA, 19 nt, Artificial Sequence
  Description of Artificial Sequence: Synthetic oligonucleotide
cuggugcaaccacauguau

SEQ ID NO: 1172918 - RNA, 19 nt, Artificial Sequence
  Description of Artificial Sequence: Synthetic oligonucleotide
aggcgauccccagccccug

SEQ ID NO: 1172919 - RNA, 19 nt, Artificial Sequence
  Description of Artificial Sequence: Synthetic oligonucleotide
ccacugacaugugggcgag

SEQ ID NO: 1172920 - RNA, 19 nt, Artificial Sequence
  Description of Artificial Sequence: Synthetic oligonucleotide
accccacagaugagcuaca

SEQ ID NO: 1172921 - RNA, 19 nt, Artificial Sequence
  Description of Artificial Sequence: Synthetic oligonucleotide
gccuggacccucccugaga

SEQ ID NO: 1172922 - RNA, 19 nt, Artificial Sequence
  Description of Artificial Sequence: Synthetic oligonucleotide
cgggcacuguugcucaaug

SEQ ID NO: 1172923 - RNA, 19 nt, Artificial Sequence
  Description of Artificial Sequence: Synthetic oligonucleotide
ccgcuuuccagcucgucua

SEQ ID NO: 1172924 - RNA, 19 nt, Artificial Sequence
  Description of Artificial Sequence: Synthetic oligonucleotide
gcccaugggaucaucgccu

SEQ ID NO: 1172925 - RNA, 19 nt, Artificial Sequence
  Description of Artificial Sequence: Synthetic oligonucleotide
ccagagcugggaacuacua

SEQ ID NO: 1172926 - RNA, 19 nt, Artificial Sequence
  Description of Artificial Sequence: Synthetic oligonucleotide
cgcggaaccugcguucagc

SEQ ID NO: 1172927 - RNA, 19 nt, Artificial Sequence
  Description of Artificial Sequence: Synthetic oligonucleotide
gggcacuguugcucaaugu

SEQ ID NO: 1172928 - RNA, 19 nt, Artificial Sequence
  Description of Artificial Sequence: Synthetic oligonucleotide
gcgaggaaaagcgaaccuu

SEQ ID NO: 1172929 - RNA, 19 nt, Artificial Sequence
  Description of Artificial Sequence: Synthetic oligonucleotide
gugcaaccacauguauaua

SEQ ID NO: 1172930 - RNA, 19 nt, Artificial Sequence
  Description of Artificial Sequence: Synthetic oligonucleotide
gcaguccuggugacccaug

SEQ ID NO: 1172931 - RNA, 19 nt, Artificial Sequence
  Description of Artificial Sequence: Synthetic oligonucleotide
gcucacggucaucccgcca

SEQ ID NO: 1172932 - RNA, 19 nt, Artificial Sequence
  Description of Artificial Sequence: Synthetic oligonucleotide
ccaugccaaaggcagccua

SEQ ID NO: 1172933 - RNA, 19 nt, Artificial Sequence
  Description of Artificial Sequence: Synthetic oligonucleotide
ccuaggcuuguaagugcaa

SEQ ID NO: 1172934 - RNA, 19 nt, Artificial Sequence
  Description of Artificial Sequence: Synthetic oligonucleotide
cucgggcacuguugcucaa

SEQ ID NO: 1172935 - RNA, 19 nt, Artificial Sequence
  Description of Artificial Sequence: Synthetic oligonucleotide
cuccaccgcucggcacugc

SEQ ID NO: 1172936 - RNA, 19 nt, Artificial Sequence
  Description of Artificial Sequence: Synthetic oligonucleotide
cagcccagcagcugucguu

SEQ ID NO: 1172937 - RNA, 19 nt, Artificial Sequence
  Description of Artificial Sequence: Synthetic oligonucleotide
cagcgccagccacugacau

SEQ ID NO: 1172938 - RNA, 19 nt, Artificial Sequence
  Description of Artificial Sequence: Synthetic oligonucleotide
gcuccaccgcucggcacug

SEQ ID NO: 1172939 - RNA, 19 nt, Artificial Sequence
  Description of Artificial Sequence: Synthetic oligonucleotide
cguuuaaauguaaccuguu

SEQ ID NO: 1172940 - RNA, 19 nt, Artificial Sequence
  Description of Artificial Sequence: Synthetic oligonucleotide
cccacagaugagcuacacu

SEQ ID NO: 1172941 - RNA, 19 nt, Artificial Sequence
  Description of Artificial Sequence: Synthetic oligonucleotide
cguccccgccauaccgcgg

SEQ ID NO: 1172942 - RNA, 19 nt, Artificial Sequence
  Description of Artificial Sequence: Synthetic oligonucleotide
cugcucgggcacuguugcu

SEQ ID NO: 1172943 - RNA, 19 nt, Artificial Sequence
  Description of Artificial Sequence: Synthetic oligonucleotide
ggacccucccugagacgca

SEQ ID NO: 1172944 - RNA, 19 nt, Artificial Sequence
  Description of Artificial Sequence: Synthetic oligonucleotide
cagucccaccugcucuagu

SEQ ID NO: 1172945 - RNA, 19 nt, Artificial Sequence
  Description of Artificial Sequence: Synthetic oligonucleotide
gcagcccagcagcugucgu

SEQ ID NO: 1172946 - RNA, 19 nt, Artificial Sequence
  Description of Artificial Sequence: Synthetic oligonucleotide
ccgcggaaccugcguucag

SEQ ID NO: 1172947 - RNA, 19 nt, Artificial Sequence
  Description of Artificial Sequence: Synthetic oligonucleotide
cccuggaaagggcuacggu

SEQ ID NO: 1172948 - RNA, 19 nt, Artificial Sequence
  Description of Artificial Sequence: Synthetic oligonucleotide
cucucccgucaggauagau

SEQ ID NO: 1172949 - RNA, 19 nt, Artificial Sequence
  Description of Artificial Sequence: Synthetic oligonucleotide
gggcuacggugacuucugu

SEQ ID NO: 1172950 - RNA, 19 nt, Artificial Sequence
  Description of Artificial Sequence: Synthetic oligonucleotide
ggacucccuugggaaggaa

SEQ ID NO: 1172951 - RNA, 19 nt, Artificial Sequence
  Description of Artificial Sequence: Synthetic oligonucleotide
ccccgccauaccgcggaac

SEQ ID NO: 1172952 - RNA, 19 nt, Artificial Sequence
  Description of Artificial Sequence: Synthetic oligonucleotide
cacggucaucccgccacau

SEQ ID NO: 1172953 - RNA, 19 nt, Artificial Sequence
  Description of Artificial Sequence: Synthetic oligonucleotide
ccgcucggcacugcucuca

SEQ ID NO: 1172954 - RNA, 19 nt, Artificial Sequence
  Description of Artificial Sequence: Synthetic oligonucleotide
gcacggcagcacuguugcu

SEQ ID NO: 1172955 - RNA, 19 nt, Artificial Sequence
  Description of Artificial Sequence: Synthetic oligonucleotide
gccccagagcugggaacua

SEQ ID NO: 1172956 - RNA, 19 nt, Artificial Sequence
  Description of Artificial Sequence: Synthetic oligonucleotide
cgcaguugccuguguuggu

SEQ ID NO: 1172957 - RNA, 19 nt, Artificial Sequence
  Description of Artificial Sequence: Synthetic oligonucleotide
ccgccauaccgcggaaccu

SEQ ID NO: 1172958 - RNA, 19 nt, Artificial Sequence
  Description of Artificial Sequence: Synthetic oligonucleotide
ccaccgaaagcaggaucuu

SEQ ID NO: 1172959 - RNA, 19 nt, Artificial Sequence
  Description of Artificial Sequence: Synthetic oligonucleotide
ccagcucgucuaguccaau

SEQ ID NO: 1172960 - RNA, 19 nt, Artificial Sequence
  Description of Artificial Sequence: Synthetic oligonucleotide
cagcgccguccccgccaua

SEQ ID NO: 1172961 - RNA, 19 nt, Artificial Sequence
  Description of Artificial Sequence: Synthetic oligonucleotide
cgcucggcacugcucucau

SEQ ID NO: 1172962 - RNA, 19 nt, Artificial Sequence
  Description of Artificial Sequence: Synthetic oligonucleotide
uuaaucuuuaacaacaacc

SEQ ID NO: 1172963 - RNA, 19 nt, Artificial Sequence
  Description of Artificial Sequence: Synthetic oligonucleotide
uuaacaacaacccauuaag

SEQ ID NO: 1172964 - RNA, 19 nt, Artificial Sequence
  Description of Artificial Sequence: Synthetic oligonucleotide
uuaaccaccgcaaacaaag

SEQ ID NO: 1172965 - RNA, 19 nt, Artificial Sequence
  Description of Artificial Sequence: Synthetic oligonucleotide
uaaucuuuaacaacaaccc

SEQ ID NO: 1172966 - RNA, 19 nt, Artificial Sequence
  Description of Artificial Sequence: Synthetic oligonucleotide
uaagauaggaauuaccugc

SEQ ID NO: 1172967 - RNA, 19 nt, Artificial Sequence
  Description of Artificial Sequence: Synthetic oligonucleotide
aaccguuugaaaugaaagc

SEQ ID NO: 1172968 - RNA, 19 nt, Artificial Sequence
  Description of Artificial Sequence: Synthetic oligonucleotide
uguuuuacgguuacaaggg

SEQ ID NO: 1172969 - RNA, 19 nt, Artificial Sequence
  Description of Artificial Sequence: Synthetic oligonucleotide
gaauauaggagauaaacca

SEQ ID NO: 1172970 - RNA, 19 nt, Artificial Sequence
  Description of Artificial Sequence: Synthetic oligonucleotide
auguuuuacgguuacaagg

SEQ ID NO: 1172971 - RNA, 19 nt, Artificial Sequence
  Description of Artificial Sequence: Synthetic oligonucleotide
uuaauacugcauuuaauag

SEQ ID NO: 1172972 - RNA, 19 nt, Artificial Sequence
  Description of Artificial Sequence: Synthetic oligonucleotide
uuuaauacugcauuuaaua

SEQ ID NO: 1172973 - RNA, 19 nt, Artificial Sequence
  Description of Artificial Sequence: Synthetic oligonucleotide
cauaaauccagcuccaggg

SEQ ID NO: 1172974 - RNA, 19 nt, Artificial Sequence
  Description of Artificial Sequence: Synthetic oligonucleotide
uuugguagauucuugguag

SEQ ID NO: 1172975 - RNA, 19 nt, Artificial Sequence
  Description of Artificial Sequence: Synthetic oligonucleotide
caaagaauacuuauucucg

SEQ ID NO: 1172976 - RNA, 19 nt, Artificial Sequence
  Description of Artificial Sequence: Synthetic oligonucleotide
uuuuggaggaauauaggag

SEQ ID NO: 1172977 - RNA, 19 nt, Artificial Sequence
  Description of Artificial Sequence: Synthetic oligonucleotide
aggaauauaggagauaaac

SEQ ID NO: 1172978 - RNA, 19 nt, Artificial Sequence
  Description of Artificial Sequence: Synthetic oligonucleotide
augauuggucaauugaagc

SEQ ID NO: 1172979 - RNA, 19 nt, Artificial Sequence
  Description of Artificial Sequence: Synthetic oligonucleotide
gacugcuuagacuagagcc

SEQ ID NO: 1172980 - RNA, 19 nt, Artificial Sequence
  Description of Artificial Sequence: Synthetic oligonucleotide
acugguaacuucuucauag

SEQ ID NO: 1172981 - RNA, 19 nt, Artificial Sequence
  Description of Artificial Sequence: Synthetic oligonucleotide
aauacugcauuuaauagca

SEQ ID NO: 1172982 - RNA, 19 nt, Artificial Sequence
  Description of Artificial Sequence: Synthetic oligonucleotide
aacaaucgcaaagagguuc

SEQ ID NO: 1172983 - RNA, 19 nt, Artificial Sequence
  Description of Artificial Sequence: Synthetic oligonucleotide
aaauguguaacuguuacau

SEQ ID NO: 1172984 - RNA, 19 nt, Artificial Sequence
  Description of Artificial Sequence: Synthetic oligonucleotide
auaggaauuaccugcaugu

SEQ ID NO: 1172985 - RNA, 19 nt, Artificial Sequence
  Description of Artificial Sequence: Synthetic oligonucleotide
uuagacuagagccucuuug

SEQ ID NO: 1172986 - RNA, 19 nt, Artificial Sequence
  Description of Artificial Sequence: Synthetic oligonucleotide
uuaagauaggaauuaccug

SEQ ID NO: 1172987 - RNA, 19 nt, Artificial Sequence
  Description of Artificial Sequence: Synthetic oligonucleotide
uuucacuagcccauguggg

SEQ ID NO: 1172988 - RNA, 19 nt, Artificial Sequence
  Description of Artificial Sequence: Synthetic oligonucleotide
agcugaaacacccauggag

SEQ ID NO: 1172989 - RNA, 19 nt, Artificial Sequence
  Description of Artificial Sequence: Synthetic oligonucleotide
ugcuugacgccauaaaucc

SEQ ID NO: 1172990 - RNA, 19 nt, Artificial Sequence
  Description of Artificial Sequence: Synthetic oligonucleotide
uuuauaucauuuaaucuuu

SEQ ID NO: 1172991 - RNA, 19 nt, Artificial Sequence
  Description of Artificial Sequence: Synthetic oligonucleotide
aaucuuuaacaacaaccca

SEQ ID NO: 1172992 - RNA, 19 nt, Artificial Sequence
  Description of Artificial Sequence: Synthetic oligonucleotide
agaauacuuauucucguug

SEQ ID NO: 1172993 - RNA, 19 nt, Artificial Sequence
  Description of Artificial Sequence: Synthetic oligonucleotide
uuugaaaugaaagcaggca

SEQ ID NO: 1172994 - RNA, 19 nt, Artificial Sequence
  Description of Artificial Sequence: Synthetic oligonucleotide
cauuaagauaggaauuacc

SEQ ID NO: 1172995 - RNA, 19 nt, Artificial Sequence
  Description of Artificial Sequence: Synthetic oligonucleotide
aucgcaaagagguucacug

SEQ ID NO: 1172996 - RNA, 19 nt, Artificial Sequence
  Description of Artificial Sequence: Synthetic oligonucleotide
ucuauagugguggagacac

SEQ ID NO: 1172997 - RNA, 19 nt, Artificial Sequence
  Description of Artificial Sequence: Synthetic oligonucleotide
gaugcaguuacagugguug

SEQ ID NO: 1172998 - RNA, 19 nt, Artificial Sequence
  Description of Artificial Sequence: Synthetic oligonucleotide
ugauuggucaauugaagcu

SEQ ID NO: 1172999 - RNA, 19 nt, Artificial Sequence
  Description of Artificial Sequence: Synthetic oligonucleotide
gauguuuuacgguuacaag

SEQ ID NO: 1173000 - RNA, 19 nt, Artificial Sequence
  Description of Artificial Sequence: Synthetic oligonucleotide
uuaucuuacagcauuucua

SEQ ID NO: 1173001 - RNA, 19 nt, Artificial Sequence
  Description of Artificial Sequence: Synthetic oligonucleotide
uuuacgguuacaagggcac

SEQ ID NO: 1173002 - RNA, 19 nt, Artificial Sequence
  Description of Artificial Sequence: Synthetic oligonucleotide
uucguaagcaguccgugag

SEQ ID NO: 1173003 - RNA, 19 nt, Artificial Sequence
  Description of Artificial Sequence: Synthetic oligonucleotide
ggagaaagauguuuuacgg

SEQ ID NO: 1173004 - RNA, 19 nt, Artificial Sequence
  Description of Artificial Sequence: Synthetic oligonucleotide
uuuuacgguuacaagggca

SEQ ID NO: 1173005 - RNA, 19 nt, Artificial Sequence
  Description of Artificial Sequence: Synthetic oligonucleotide
agacuaaugucccagcaug

SEQ ID NO: 1173006 - RNA, 19 nt, Artificial Sequence
  Description of Artificial Sequence: Synthetic oligonucleotide
ugauuaaccaccgcaaaca

SEQ ID NO: 1173007 - RNA, 19 nt, Artificial Sequence
  Description of Artificial Sequence: Synthetic oligonucleotide
cuugacgccauaaauccag

SEQ ID NO: 1173008 - RNA, 19 nt, Artificial Sequence
  Description of Artificial Sequence: Synthetic oligonucleotide
caaguccagacuaaugucc

SEQ ID NO: 1173009 - RNA, 19 nt, Artificial Sequence
  Description of Artificial Sequence: Synthetic oligonucleotide
uuugcuugacgccauaaau

SEQ ID NO: 1173010 - RNA, 19 nt, Artificial Sequence
  Description of Artificial Sequence: Synthetic oligonucleotide
agaaagauguuuuacgguu

SEQ ID NO: 1173011 - RNA, 19 nt, Artificial Sequence
  Description of Artificial Sequence: Synthetic oligonucleotide
uaaaccuucguaagcaguc

SEQ ID NO: 1173012 - RNA, 19 nt, Artificial Sequence
  Description of Artificial Sequence: Synthetic oligonucleotide
uguauguagugaucuugcg

SEQ ID NO: 1173013 - RNA, 19 nt, Artificial Sequence
  Description of Artificial Sequence: Synthetic oligonucleotide
aaggaaauguauguaguga

SEQ ID NO: 1173014 - RNA, 19 nt, Artificial Sequence
  Description of Artificial Sequence: Synthetic oligonucleotide
aauuaccugcauguuacag

SEQ ID NO: 1173015 - RNA, 19 nt, Artificial Sequence
  Description of Artificial Sequence: Synthetic oligonucleotide
aaaccuucguaagcagucc

SEQ ID NO: 1173016 - RNA, 19 nt, Artificial Sequence
  Description of Artificial Sequence: Synthetic oligonucleotide
ucguuguucccacuauugg

SEQ ID NO: 1173017 - RNA, 19 nt, Artificial Sequence
  Description of Artificial Sequence: Synthetic oligonucleotide
agacuagagccucuuugcc

SEQ ID NO: 1173018 - RNA, 19 nt, Artificial Sequence
  Description of Artificial Sequence: Synthetic oligonucleotide
aaccuucguaagcaguccg

SEQ ID NO: 1173019 - RNA, 19 nt, Artificial Sequence
  Description of Artificial Sequence: Synthetic oligonucleotide
auucauucgggucucuuug

SEQ ID NO: 1173020 - RNA, 19 nt, Artificial Sequence
  Description of Artificial Sequence: Synthetic oligonucleotide
agugguugggauugcuggc

SEQ ID NO: 1173021 - RNA, 19 nt, Artificial Sequence
  Description of Artificial Sequence: Synthetic oligonucleotide
gauuggucaauugaagcug

SEQ ID NO: 1173022 - RNA, 19 nt, Artificial Sequence
  Description of Artificial Sequence: Synthetic oligonucleotide
uguuacagaugagaaaaca

SEQ ID NO: 1173023 - RNA, 19 nt, Artificial Sequence
  Description of Artificial Sequence: Synthetic oligonucleotide
uuguaaaccuucguaagca

SEQ ID NO: 1173024 - RNA, 19 nt, Artificial Sequence
  Description of Artificial Sequence: Synthetic oligonucleotide
ggucaauugaagcugaaac

SEQ ID NO: 1173025 - RNA, 19 nt, Artificial Sequence
  Description of Artificial Sequence: Synthetic oligonucleotide
gaugacggcaucaucacac

SEQ ID NO: 1173026 - RNA, 19 nt, Artificial Sequence
  Description of Artificial Sequence: Synthetic oligonucleotide
acaacaacccauuaagaua

SEQ ID NO: 1173027 - RNA, 19 nt, Artificial Sequence
  Description of Artificial Sequence: Synthetic oligonucleotide
aaauacaaagaaacuggca

SEQ ID NO: 1173028 - RNA, 19 nt, Artificial Sequence
  Description of Artificial Sequence: Synthetic oligonucleotide
auuaccugcauguuacaga

SEQ ID NO: 1173029 - RNA, 19 nt, Artificial Sequence
  Description of Artificial Sequence: Synthetic oligonucleotide
uaacaacaacccauuaaga

SEQ ID NO: 1173030 - RNA, 19 nt, Artificial Sequence
  Description of Artificial Sequence: Synthetic oligonucleotide
guuacagugguugggauug

SEQ ID NO: 1173031 - RNA, 19 nt, Artificial Sequence
  Description of Artificial Sequence: Synthetic oligonucleotide
agccccuuauuucuucucc

SEQ ID NO: 1173032 - RNA, 19 nt, Artificial Sequence
  Description of Artificial Sequence: Synthetic oligonucleotide
aucuuacagcauuucuagc

SEQ ID NO: 1173033 - RNA, 19 nt, Artificial Sequence
  Description of Artificial Sequence: Synthetic oligonucleotide
uguuaacugcuuaucuuac

SEQ ID NO: 1173034 - RNA, 19 nt, Artificial Sequence
  Description of Artificial Sequence: Synthetic oligonucleotide
uugcuugacgccauaaauc

SEQ ID NO: 1173035 - RNA, 19 nt, Artificial Sequence
  Description of Artificial Sequence: Synthetic oligonucleotide
acuagagccucuuugcccu

SEQ ID NO: 1173036 - RNA, 19 nt, Artificial Sequence
  Description of Artificial Sequence: Synthetic oligonucleotide
cagugguugggauugcugg

SEQ ID NO: 1173037 - RNA, 19 nt, Artificial Sequence
  Description of Artificial Sequence: Synthetic oligonucleotide
auucgggucucuuugcuug

SEQ ID NO: 1173038 - RNA, 19 nt, Artificial Sequence
  Description of Artificial Sequence: Synthetic oligonucleotide
accguuugaaaugaaagca

SEQ ID NO: 1173039 - RNA, 19 nt, Artificial Sequence
  Description of Artificial Sequence: Synthetic oligonucleotide
aggaaauguauguagugau

SEQ ID NO: 1173040 - RNA, 19 nt, Artificial Sequence
  Description of Artificial Sequence: Synthetic oligonucleotide
uguggcuuuccccauucgc

SEQ ID NO: 1173041 - RNA, 19 nt, Artificial Sequence
  Description of Artificial Sequence: Synthetic oligonucleotide
gauuugcucacacacacua

SEQ ID NO: 1173042 - RNA, 19 nt, Artificial Sequence
  Description of Artificial Sequence: Synthetic oligonucleotide
ucaaugagcuaucccugcc

SEQ ID NO: 1173043 - RNA, 19 nt, Artificial Sequence
  Description of Artificial Sequence: Synthetic oligonucleotide
gacuagagccucuuugccc

SEQ ID NO: 1173044 - RNA, 19 nt, Artificial Sequence
  Description of Artificial Sequence: Synthetic oligonucleotide
gacaggugacgucugacug

SEQ ID NO: 1173045 - RNA, 19 nt, Artificial Sequence
  Description of Artificial Sequence: Synthetic oligonucleotide
aauacuuauucucguuguu

SEQ ID NO: 1173046 - RNA, 19 nt, Artificial Sequence
  Description of Artificial Sequence: Synthetic oligonucleotide
uuacaugauuggucaauug

SEQ ID NO: 1173047 - RNA, 19 nt, Artificial Sequence
  Description of Artificial Sequence: Synthetic oligonucleotide
uguggugccgaaugaagcu

SEQ ID NO: 1173048 - RNA, 19 nt, Artificial Sequence
  Description of Artificial Sequence: Synthetic oligonucleotide
uucacuagcccaugugggc

SEQ ID NO: 1173049 - RNA, 19 nt, Artificial Sequence
  Description of Artificial Sequence: Synthetic oligonucleotide
gaaauguauguagugaucu

SEQ ID NO: 1173050 - RNA, 19 nt, Artificial Sequence
  Description of Artificial Sequence: Synthetic oligonucleotide
auaggagauaaaccagugu

SEQ ID NO: 1173051 - RNA, 19 nt, Artificial Sequence
  Description of Artificial Sequence: Synthetic oligonucleotide
uguguaacuguuacaugau

SEQ ID NO: 1173052 - RNA, 19 nt, Artificial Sequence
  Description of Artificial Sequence: Synthetic oligonucleotide
aaccaccgcaaacaaagaa

SEQ ID NO: 1173053 - RNA, 19 nt, Artificial Sequence
  Description of Artificial Sequence: Synthetic oligonucleotide
ucguaagcaguccgugagg

SEQ ID NO: 1173054 - RNA, 19 nt, Artificial Sequence
  Description of Artificial Sequence: Synthetic oligonucleotide
agaugagaaaacaaucgca

SEQ ID NO: 1173055 - RNA, 19 nt, Artificial Sequence
  Description of Artificial Sequence: Synthetic oligonucleotide
uggugauuaaccaccgcaa

SEQ ID NO: 1173056 - RNA, 19 nt, Artificial Sequence
  Description of Artificial Sequence: Synthetic oligonucleotide
gguaguaaugccugggaug

SEQ ID NO: 1173057 - RNA, 19 nt, Artificial Sequence
  Description of Artificial Sequence: Synthetic oligonucleotide
uuugacuuugacacauuuu

SEQ ID NO: 1173058 - RNA, 19 nt, Artificial Sequence
  Description of Artificial Sequence: Synthetic oligonucleotide
gacgccauaaauccagcuc

SEQ ID NO: 1173059 - RNA, 19 nt, Artificial Sequence
  Description of Artificial Sequence: Synthetic oligonucleotide
agauguuuuacgguuacaa

SEQ ID NO: 1173060 - RNA, 19 nt, Artificial Sequence
  Description of Artificial Sequence: Synthetic oligonucleotide
acuaaugucccagcauggg

SEQ ID NO: 1173061 - RNA, 19 nt, Artificial Sequence
  Description of Artificial Sequence: Synthetic oligonucleotide
gucuaugaugcaguuacag

SEQ ID NO: 1173062 - RNA, 19 nt, Artificial Sequence
  Description of Artificial Sequence: Synthetic oligonucleotide
gacuaaugucccagcaugg

SEQ ID NO: 1173063 - RNA, 19 nt, Artificial Sequence
  Description of Artificial Sequence: Synthetic oligonucleotide
gugauuaaccaccgcaaac

SEQ ID NO: 1173064 - RNA, 19 nt, Artificial Sequence
  Description of Artificial Sequence: Synthetic oligonucleotide
aagauaggaauuaccugca

SEQ ID NO: 1173065 - RNA, 19 nt, Artificial Sequence
  Description of Artificial Sequence: Synthetic oligonucleotide
ggaauuaccugcauguuac

SEQ ID NO: 1173066 - RNA, 19 nt, Artificial Sequence
  Description of Artificial Sequence: Synthetic oligonucleotide
accgcaaacaaagaauacu

SEQ ID NO: 1173067 - RNA, 19 nt, Artificial Sequence
  Description of Artificial Sequence: Synthetic oligonucleotide
uccccauucgcgcugcucu

SEQ ID NO: 1173068 - RNA, 19 nt, Artificial Sequence
  Description of Artificial Sequence: Synthetic oligonucleotide
gaauacuuauucucguugu

SEQ ID NO: 1173069 - RNA, 19 nt, Artificial Sequence
  Description of Artificial Sequence: Synthetic oligonucleotide
uugguagauucuugguagc

SEQ ID NO: 1173070 - RNA, 19 nt, Artificial Sequence
  Description of Artificial Sequence: Synthetic oligonucleotide
ugcucacacacacuacacu

SEQ ID NO: 1173071 - RNA, 19 nt, Artificial Sequence
  Description of Artificial Sequence: Synthetic oligonucleotide
ggugacgucugacugcagg

SEQ ID NO: 1173072 - RNA, 19 nt, Artificial Sequence
  Description of Artificial Sequence: Synthetic oligonucleotide
ucauucgggucucuuugcu

SEQ ID NO: 1173073 - RNA, 19 nt, Artificial Sequence
  Description of Artificial Sequence: Synthetic oligonucleotide
aaccagugucacaauuuuc

SEQ ID NO: 1173074 - RNA, 19 nt, Artificial Sequence
  Description of Artificial Sequence: Synthetic oligonucleotide
uaagcaguccgugagggua

SEQ ID NO: 1173075 - RNA, 19 nt, Artificial Sequence
  Description of Artificial Sequence: Synthetic oligonucleotide
aggaauuaccugcauguua

SEQ ID NO: 1173076 - RNA, 19 nt, Artificial Sequence
  Description of Artificial Sequence: Synthetic oligonucleotide
guuuuacgguuacaagggc

SEQ ID NO: 1173077 - RNA, 19 nt, Artificial Sequence
  Description of Artificial Sequence: Synthetic oligonucleotide
uugcucacacacacuacac

SEQ ID NO: 1173078 - RNA, 19 nt, Artificial Sequence
  Description of Artificial Sequence: Synthetic oligonucleotide
cuugagcucagccccgcgg

SEQ ID NO: 1173079 - RNA, 19 nt, Artificial Sequence
  Description of Artificial Sequence: Synthetic oligonucleotide
ugaucuugcgccucuguuu

SEQ ID NO: 1173080 - RNA, 19 nt, Artificial Sequence
  Description of Artificial Sequence: Synthetic oligonucleotide
aaucgcaaagagguucacu

SEQ ID NO: 1173081 - RNA, 19 nt, Artificial Sequence
  Description of Artificial Sequence: Synthetic oligonucleotide
cuucucuacuuuuggagca

SEQ ID NO: 1173082 - RNA, 19 nt, Artificial Sequence
  Description of Artificial Sequence: Synthetic oligonucleotide
ucauagugagcuguuuggu

SEQ ID NO: 1173083 - RNA, 19 nt, Artificial Sequence
  Description of Artificial Sequence: Synthetic oligonucleotide
ugauuugcucacacacacu

SEQ ID NO: 1173084 - RNA, 19 nt, Artificial Sequence
  Description of Artificial Sequence: Synthetic oligonucleotide
acugcuuagacuagagccu

SEQ ID NO: 1173085 - RNA, 19 nt, Artificial Sequence
  Description of Artificial Sequence: Synthetic oligonucleotide
gugacgucugacugcaggc

SEQ ID NO: 1173086 - RNA, 19 nt, Artificial Sequence
  Description of Artificial Sequence: Synthetic oligonucleotide
gagaaagauguuuuacggu

SEQ ID NO: 1173087 - RNA, 19 nt, Artificial Sequence
  Description of Artificial Sequence: Synthetic oligonucleotide
acggcaucaucacacuuga

SEQ ID NO: 1173088 - RNA, 19 nt, Artificial Sequence
  Description of Artificial Sequence: Synthetic oligonucleotide
acaugauuggucaauugaa

SEQ ID NO: 1173089 - RNA, 19 nt, Artificial Sequence
  Description of Artificial Sequence: Synthetic oligonucleotide
cguuugaaaugaaagcagg

SEQ ID NO: 1173090 - RNA, 19 nt, Artificial Sequence
  Description of Artificial Sequence: Synthetic oligonucleotide
cacaucuuaauacuggccu

SEQ ID NO: 1173091 - RNA, 19 nt, Artificial Sequence
  Description of Artificial Sequence: Synthetic oligonucleotide
uuucuagccuucucuacuu

SEQ ID NO: 1173092 - RNA, 19 nt, Artificial Sequence
  Description of Artificial Sequence: Synthetic oligonucleotide
uccagacuaaugucccagc

SEQ ID NO: 1173093 - RNA, 19 nt, Artificial Sequence
  Description of Artificial Sequence: Synthetic oligonucleotide
uugacgccauaaauccagc

SEQ ID NO: 1173094 - RNA, 19 nt, Artificial Sequence
  Description of Artificial Sequence: Synthetic oligonucleotide
aacugguaacuucuucaua

SEQ ID NO: 1173095 - RNA, 19 nt, Artificial Sequence
  Description of Artificial Sequence: Synthetic oligonucleotide
ucccacuauugguuggcag

SEQ ID NO: 1173096 - RNA, 19 nt, Artificial Sequence
  Description of Artificial Sequence: Synthetic oligonucleotide
ucgcaaagagguucacuga

SEQ ID NO: 1173097 - RNA, 19 nt, Artificial Sequence
  Description of Artificial Sequence: Synthetic oligonucleotide
auguuacagaugagaaaac

SEQ ID NO: 1173098 - RNA, 19 nt, Artificial Sequence
  Description of Artificial Sequence: Synthetic oligonucleotide
uggcaacuacuacacuuga

SEQ ID NO: 1173099 - RNA, 19 nt, Artificial Sequence
  Description of Artificial Sequence: Synthetic oligonucleotide
aggagauaaaccaguguca

SEQ ID NO: 1173100 - RNA, 19 nt, Artificial Sequence
  Description of Artificial Sequence: Synthetic oligonucleotide
ccuucucuacuuuuggagc

SEQ ID NO: 1173101 - RNA, 19 nt, Artificial Sequence
  Description of Artificial Sequence: Synthetic oligonucleotide
guuaacugcuuaucuuaca

SEQ ID NO: 1173102 - RNA, 19 nt, Artificial Sequence
  Description of Artificial Sequence: Synthetic oligonucleotide
ccuuguaaaccuucguaag

SEQ ID NO: 1173103 - RNA, 19 nt, Artificial Sequence
  Description of Artificial Sequence: Synthetic oligonucleotide
gguaacuucuucauaguga

SEQ ID NO: 1173104 - RNA, 19 nt, Artificial Sequence
  Description of Artificial Sequence: Synthetic oligonucleotide
cugggauguggcuuucccc

SEQ ID NO: 1173105 - RNA, 19 nt, Artificial Sequence
  Description of Artificial Sequence: Synthetic oligonucleotide
cacccauggagaaagaugu

SEQ ID NO: 1173106 - RNA, 19 nt, Artificial Sequence
  Description of Artificial Sequence: Synthetic oligonucleotide
uaaccaccgcaaacaaaga

SEQ ID NO: 1173107 - RNA, 19 nt, Artificial Sequence
  Description of Artificial Sequence: Synthetic oligonucleotide
acauuccugccauuuaauu

SEQ ID NO: 1173108 - RNA, 19 nt, Artificial Sequence
  Description of Artificial Sequence: Synthetic oligonucleotide
ccagcuugagcucagcccc

SEQ ID NO: 1173109 - RNA, 19 nt, Artificial Sequence
  Description of Artificial Sequence: Synthetic oligonucleotide
uagugagcuguuugguaga

SEQ ID NO: 1173110 - RNA, 19 nt, Artificial Sequence
  Description of Artificial Sequence: Synthetic oligonucleotide
gugaugacggcaucaucac

SEQ ID NO: 1173111 - RNA, 19 nt, Artificial Sequence
  Description of Artificial Sequence: Synthetic oligonucleotide
ugcuuaucuuacagcauuu

SEQ ID NO: 1173112 - RNA, 19 nt, Artificial Sequence
  Description of Artificial Sequence: Synthetic oligonucleotide
gacucauaggccagaagga

SEQ ID NO: 1173113 - RNA, 19 nt, Artificial Sequence
  Description of Artificial Sequence: Synthetic oligonucleotide
ccauaaauccagcuccagg

SEQ ID NO: 1173114 - RNA, 19 nt, Artificial Sequence
  Description of Artificial Sequence: Synthetic oligonucleotide
uacgguuacaagggcacac

SEQ ID NO: 1173115 - RNA, 19 nt, Artificial Sequence
  Description of Artificial Sequence: Synthetic oligonucleotide
cucggguucgggaucuggc

SEQ ID NO: 1173116 - RNA, 19 nt, Artificial Sequence
  Description of Artificial Sequence: Synthetic oligonucleotide
ucacuagcccaugugggcu

SEQ ID NO: 1173117 - RNA, 19 nt, Artificial Sequence
  Description of Artificial Sequence: Synthetic oligonucleotide
ccguuugaaaugaaagcag

SEQ ID NO: 1173118 - RNA, 19 nt, Artificial Sequence
  Description of Artificial Sequence: Synthetic oligonucleotide
ucaccuuugcagugggauc

SEQ ID NO: 1173119 - RNA, 19 nt, Artificial Sequence
  Description of Artificial Sequence: Synthetic oligonucleotide
caccugugaagauuugguc

SEQ ID NO: 1173120 - RNA, 19 nt, Artificial Sequence
  Description of Artificial Sequence: Synthetic oligonucleotide
cuuggugauuaaccaccgc

SEQ ID NO: 1173121 - RNA, 19 nt, Artificial Sequence
  Description of Artificial Sequence: Synthetic oligonucleotide
guaguaaugccugggaugu

SEQ ID NO: 1173122 - RNA, 19 nt, Artificial Sequence
  Description of Artificial Sequence: Synthetic oligonucleotide
ugaaacacccauggagaaa

SEQ ID NO: 1173123 - RNA, 19 nt, Artificial Sequence
  Description of Artificial Sequence: Synthetic oligonucleotide
acacuuucccacacaaucu

SEQ ID NO: 1173124 - RNA, 19 nt, Artificial Sequence
  Description of Artificial Sequence: Synthetic oligonucleotide
acaaucgcaaagagguuca

SEQ ID NO: 1173125 - RNA, 19 nt, Artificial Sequence
  Description of Artificial Sequence: Synthetic oligonucleotide
uccuuguuaacugcuuauc

SEQ ID NO: 1173126 - RNA, 19 nt, Artificial Sequence
  Description of Artificial Sequence: Synthetic oligonucleotide
uucucguuguucccacuau

SEQ ID NO: 1173127 - RNA, 19 nt, Artificial Sequence
  Description of Artificial Sequence: Synthetic oligonucleotide
aagauguuuuacgguuaca

SEQ ID NO: 1173128 - RNA, 19 nt, Artificial Sequence
  Description of Artificial Sequence: Synthetic oligonucleotide
acugauuugcucacacaca

SEQ ID NO: 1173129 - RNA, 19 nt, Artificial Sequence
  Description of Artificial Sequence: Synthetic oligonucleotide
auuggucaauugaagcuga

SEQ ID NO: 1173130 - RNA, 19 nt, Artificial Sequence
  Description of Artificial Sequence: Synthetic oligonucleotide
caccgcaaacaaagaauac

SEQ ID NO: 1173131 - RNA, 19 nt, Artificial Sequence
  Description of Artificial Sequence: Synthetic oligonucleotide
cccacuauugguuggcagc

SEQ ID NO: 1173132 - RNA, 19 nt, Artificial Sequence
  Description of Artificial Sequence: Synthetic oligonucleotide
uccuccgcggucuccaccu

SEQ ID NO: 1173133 - RNA, 19 nt, Artificial Sequence
  Description of Artificial Sequence: Synthetic oligonucleotide
uauugguuggcagcugcaa

SEQ ID NO: 1173134 - RNA, 19 nt, Artificial Sequence
  Description of Artificial Sequence: Synthetic oligonucleotide
ucucguuguucccacuauu

SEQ ID NO: 1173135 - RNA, 19 nt, Artificial Sequence
  Description of Artificial Sequence: Synthetic oligonucleotide
ucggguucgggaucuggcu

SEQ ID NO: 1173136 - RNA, 19 nt, Artificial Sequence
  Description of Artificial Sequence: Synthetic oligonucleotide
gaaagauguuuuacgguua

SEQ ID NO: 1173137 - RNA, 19 nt, Artificial Sequence
  Description of Artificial Sequence: Synthetic oligonucleotide
ggcaaguccagacuaaugu

SEQ ID NO: 1173138 - RNA, 19 nt, Artificial Sequence
  Description of Artificial Sequence: Synthetic oligonucleotide
gaauuaccugcauguuaca

SEQ ID NO: 1173139 - RNA, 19 nt, Artificial Sequence
  Description of Artificial Sequence: Synthetic oligonucleotide
auguagugaucuugcgccu

SEQ ID NO: 1173140 - RNA, 19 nt, Artificial Sequence
  Description of Artificial Sequence: Synthetic oligonucleotide
ggguucgggaucuggcucg

SEQ ID NO: 1173141 - RNA, 19 nt, Artificial Sequence
  Description of Artificial Sequence: Synthetic oligonucleotide
uugacaggugacgucugac

SEQ ID NO: 1173142 - RNA, 19 nt, Artificial Sequence
  Description of Artificial Sequence: Synthetic oligonucleotide
uuugcccuccccuucuauu

SEQ ID NO: 1173143 - RNA, 19 nt, Artificial Sequence
  Description of Artificial Sequence: Synthetic oligonucleotide
aggccuguccuuguuaacu

SEQ ID NO: 1173144 - RNA, 19 nt, Artificial Sequence
  Description of Artificial Sequence: Synthetic oligonucleotide
uggccuuguaaaccuucgu

SEQ ID NO: 1173145 - RNA, 19 nt, Artificial Sequence
  Description of Artificial Sequence: Synthetic oligonucleotide
cuuuuccucccacaaaugu

SEQ ID NO: 1173146 - RNA, 19 nt, Artificial Sequence
  Description of Artificial Sequence: Synthetic oligonucleotide
ggaugugcaagagccaggc

SEQ ID NO: 1173147 - RNA, 19 nt, Artificial Sequence
  Description of Artificial Sequence: Synthetic oligonucleotide
ugcuuagacuagagccucu

SEQ ID NO: 1173148 - RNA, 19 nt, Artificial Sequence
  Description of Artificial Sequence: Synthetic oligonucleotide
uguagugaucuugcgccuc

SEQ ID NO: 1173149 - RNA, 19 nt, Artificial Sequence
  Description of Artificial Sequence: Synthetic oligonucleotide
uauucucguuguucccacu

SEQ ID NO: 1173150 - RNA, 19 nt, Artificial Sequence
  Description of Artificial Sequence: Synthetic oligonucleotide
cugcuccccuuccacaagc

SEQ ID NO: 1173151 - RNA, 19 nt, Artificial Sequence
  Description of Artificial Sequence: Synthetic oligonucleotide
ugguagcuuuggcaacuac

SEQ ID NO: 1173152 - RNA, 19 nt, Artificial Sequence
  Description of Artificial Sequence: Synthetic oligonucleotide
cuuguuaacugcuuaucuu

SEQ ID NO: 1173153 - RNA, 19 nt, Artificial Sequence
  Description of Artificial Sequence: Synthetic oligonucleotide
guaaugccugggauguggc

SEQ ID NO: 1173154 - RNA, 19 nt, Artificial Sequence
  Description of Artificial Sequence: Synthetic oligonucleotide
uuacgguuacaagggcaca

SEQ ID NO: 1173155 - RNA, 19 nt, Artificial Sequence
  Description of Artificial Sequence: Synthetic oligonucleotide
cauggagaaagauguuuua

SEQ ID NO: 1173156 - RNA, 19 nt, Artificial Sequence
  Description of Artificial Sequence: Synthetic oligonucleotide
agcuugagcucagccccgc

SEQ ID NO: 1173157 - RNA, 19 nt, Artificial Sequence
  Description of Artificial Sequence: Synthetic oligonucleotide
acccauuaagauaggaauu

SEQ ID NO: 1173158 - RNA, 19 nt, Artificial Sequence
  Description of Artificial Sequence: Synthetic oligonucleotide
auuaaccaccgcaaacaaa

SEQ ID NO: 1173159 - RNA, 19 nt, Artificial Sequence
  Description of Artificial Sequence: Synthetic oligonucleotide
cugcuuagacuagagccuc

SEQ ID NO: 1173160 - RNA, 19 nt, Artificial Sequence
  Description of Artificial Sequence: Synthetic oligonucleotide
ggaaauguauguagugauc

SEQ ID NO: 1173161 - RNA, 19 nt, Artificial Sequence
  Description of Artificial Sequence: Synthetic oligonucleotide
cuauugguuggcagcugca

SEQ ID NO: 1173162 - RNA, 19 nt, Artificial Sequence
  Description of Artificial Sequence: Synthetic oligonucleotide
uucuagccuucucuacuuu

SEQ ID NO: 1173163 - RNA, 19 nt, Artificial Sequence
  Description of Artificial Sequence: Synthetic oligonucleotide
gcaggcuugacaggugacg

SEQ ID NO: 1173164 - RNA, 19 nt, Artificial Sequence
  Description of Artificial Sequence: Synthetic oligonucleotide
auguacacaaugggcuaca

SEQ ID NO: 1173165 - RNA, 19 nt, Artificial Sequence
  Description of Artificial Sequence: Synthetic oligonucleotide
ggugguguccaccuuccca

SEQ ID NO: 1173166 - RNA, 19 nt, Artificial Sequence
  Description of Artificial Sequence: Synthetic oligonucleotide
uagcccaugugggcuaucu

SEQ ID NO: 1173167 - RNA, 19 nt, Artificial Sequence
  Description of Artificial Sequence: Synthetic oligonucleotide
cagcuugagcucagccccg

SEQ ID NO: 1173168 - RNA, 19 nt, Artificial Sequence
  Description of Artificial Sequence: Synthetic oligonucleotide
ugcaagagccaggcaaguc

SEQ ID NO: 1173169 - RNA, 19 nt, Artificial Sequence
  Description of Artificial Sequence: Synthetic oligonucleotide
ggugauuaaccaccgcaaa

SEQ ID NO: 1173170 - RNA, 19 nt, Artificial Sequence
  Description of Artificial Sequence: Synthetic oligonucleotide
uaggaauuaccugcauguu

SEQ ID NO: 1173171 - RNA, 19 nt, Artificial Sequence
  Description of Artificial Sequence: Synthetic oligonucleotide
acgguuacaagggcacaca

SEQ ID NO: 1173172 - RNA, 19 nt, Artificial Sequence
  Description of Artificial Sequence: Synthetic oligonucleotide
gcauguuacagaugagaaa

SEQ ID NO: 1173173 - RNA, 19 nt, Artificial Sequence
  Description of Artificial Sequence: Synthetic oligonucleotide
cacuggucccuguggugcc

SEQ ID NO: 1173174 - RNA, 19 nt, Artificial Sequence
  Description of Artificial Sequence: Synthetic oligonucleotide
ggccuguccuuguuaacug

SEQ ID NO: 1173175 - RNA, 19 nt, Artificial Sequence
  Description of Artificial Sequence: Synthetic oligonucleotide
guaaaccuucguaagcagu

SEQ ID NO: 1173176 - RNA, 19 nt, Artificial Sequence
  Description of Artificial Sequence: Synthetic oligonucleotide
aggcaaguccagacuaaug

SEQ ID NO: 1173177 - RNA, 19 nt, Artificial Sequence
  Description of Artificial Sequence: Synthetic oligonucleotide
gaggccuguccuuguuaac

SEQ ID NO: 1173178 - RNA, 19 nt, Artificial Sequence
  Description of Artificial Sequence: Synthetic oligonucleotide
cuuuccccauucgcgcugc

SEQ ID NO: 1173179 - RNA, 19 nt, Artificial Sequence
  Description of Artificial Sequence: Synthetic oligonucleotide
uuacagugguugggauugc

SEQ ID NO: 1173180 - RNA, 19 nt, Artificial Sequence
  Description of Artificial Sequence: Synthetic oligonucleotide
aagguuccuuggugauuaa

SEQ ID NO: 1173181 - RNA, 19 nt, Artificial Sequence
  Description of Artificial Sequence: Synthetic oligonucleotide
caggggaaaggaaauguau

SEQ ID NO: 1173182 - RNA, 19 nt, Artificial Sequence
  Description of Artificial Sequence: Synthetic oligonucleotide
uucccacuauugguuggca

SEQ ID NO: 1173183 - RNA, 19 nt, Artificial Sequence
  Description of Artificial Sequence: Synthetic oligonucleotide
cuaucccugccuccuccac

SEQ ID NO: 1173184 - RNA, 19 nt, Artificial Sequence
  Description of Artificial Sequence: Synthetic oligonucleotide
ccauuaagauaggaauuac

SEQ ID NO: 1173185 - RNA, 19 nt, Artificial Sequence
  Description of Artificial Sequence: Synthetic oligonucleotide
gucuauagugguggagaca

SEQ ID NO: 1173186 - RNA, 19 nt, Artificial Sequence
  Description of Artificial Sequence: Synthetic oligonucleotide
caaugggcuacauuuuaau

SEQ ID NO: 1173187 - RNA, 19 nt, Artificial Sequence
  Description of Artificial Sequence: Synthetic oligonucleotide
agugagcuguuugguagau

SEQ ID NO: 1173188 - RNA, 19 nt, Artificial Sequence
  Description of Artificial Sequence: Synthetic oligonucleotide
uaguaaugccugggaugug

SEQ ID NO: 1173189 - RNA, 19 nt, Artificial Sequence
  Description of Artificial Sequence: Synthetic oligonucleotide
cugcauuuaauagcacaaa

SEQ ID NO: 1173190 - RNA, 19 nt, Artificial Sequence
  Description of Artificial Sequence: Synthetic oligonucleotide
accuucguaagcaguccgu

SEQ ID NO: 1173191 - RNA, 19 nt, Artificial Sequence
  Description of Artificial Sequence: Synthetic oligonucleotide
ugcccuccccuucuauuuu

SEQ ID NO: 1173192 - RNA, 19 nt, Artificial Sequence
  Description of Artificial Sequence: Synthetic oligonucleotide
agaaacuggcaaagguguu

SEQ ID NO: 1173193 - RNA, 19 nt, Artificial Sequence
  Description of Artificial Sequence: Synthetic oligonucleotide
auagugguggagacaccau

SEQ ID NO: 1173194 - RNA, 19 nt, Artificial Sequence
  Description of Artificial Sequence: Synthetic oligonucleotide
gcuuaucuuacagcauuuc

SEQ ID NO: 1173195 - RNA, 19 nt, Artificial Sequence
  Description of Artificial Sequence: Synthetic oligonucleotide
caaucgcaaagagguucac

SEQ ID NO: 1173196 - RNA, 19 nt, Artificial Sequence
  Description of Artificial Sequence: Synthetic oligonucleotide
cauucauucgggucucuuu

SEQ ID NO: 1173197 - RNA, 19 nt, Artificial Sequence
  Description of Artificial Sequence: Synthetic oligonucleotide
cccauuaagauaggaauua

SEQ ID NO: 1173198 - RNA, 19 nt, Artificial Sequence
  Description of Artificial Sequence: Synthetic oligonucleotide
ccgugaggguaguaaugcc

SEQ ID NO: 1173199 - RNA, 19 nt, Artificial Sequence
  Description of Artificial Sequence: Synthetic oligonucleotide
gccauaaauccagcuccag

SEQ ID NO: 1173200 - RNA, 19 nt, Artificial Sequence
  Description of Artificial Sequence: Synthetic oligonucleotide
ccuucguaagcaguccgug

SEQ ID NO: 1173201 - RNA, 19 nt, Artificial Sequence
  Description of Artificial Sequence: Synthetic oligonucleotide
caguccgugaggguaguaa

SEQ ID NO: 1173202 - RNA, 19 nt, Artificial Sequence
  Description of Artificial Sequence: Synthetic oligonucleotide
gaucgggcucaggcucggg

SEQ ID NO: 1173203 - RNA, 19 nt, Artificial Sequence
  Description of Artificial Sequence: Synthetic oligonucleotide
guaagcaguccgugagggu

SEQ ID NO: 1173204 - RNA, 19 nt, Artificial Sequence
  Description of Artificial Sequence: Synthetic oligonucleotide
gcuugagcucagccccgcg

SEQ ID NO: 1173205 - RNA, 19 nt, Artificial Sequence
  Description of Artificial Sequence: Synthetic oligonucleotide
gcggcccggauccuccgcg

SEQ ID NO: 1173206 - RNA, 19 nt, Artificial Sequence
  Description of Artificial Sequence: Synthetic oligonucleotide
cucccacaaauguguaacu

SEQ ID NO: 1173207 - RNA, 19 nt, Artificial Sequence
  Description of Artificial Sequence: Synthetic oligonucleotide
cuccgcggucuccaccuuc

SEQ ID NO: 1173208 - RNA, 19 nt, Artificial Sequence
  Description of Artificial Sequence: Synthetic oligonucleotide
ccgcaaacaaagaauacuu

SEQ ID NO: 1173209 - RNA, 19 nt, Artificial Sequence
  Description of Artificial Sequence: Synthetic oligonucleotide
caggcuugacaggugacgu

SEQ ID NO: 1173210 - RNA, 19 nt, Artificial Sequence
  Description of Artificial Sequence: Synthetic oligonucleotide
ggguaguaaugccugggau

SEQ ID NO: 1173211 - RNA, 19 nt, Artificial Sequence
  Description of Artificial Sequence: Synthetic oligonucleotide
acuagcccaugugggcuau

SEQ ID NO: 1173212 - RNA, 19 nt, Artificial Sequence
  Description of Artificial Sequence: Synthetic oligonucleotide
gcucggguucgggaucugg

SEQ ID NO: 1173213 - RNA, 19 nt, Artificial Sequence
  Description of Artificial Sequence: Synthetic oligonucleotide
ggaucuggcucgggcucgg

SEQ ID NO: 1173214 - RNA, 19 nt, Artificial Sequence
  Description of Artificial Sequence: Synthetic oligonucleotide
gcuugacgccauaaaucca

SEQ ID NO: 1173215 - RNA, 19 nt, Artificial Sequence
  Description of Artificial Sequence: Synthetic oligonucleotide
cuuagacuagagccucuuu

SEQ ID NO: 1173216 - RNA, 19 nt, Artificial Sequence
  Description of Artificial Sequence: Synthetic oligonucleotide
cauucgggucucuuugcuu

SEQ ID NO: 1173217 - RNA, 19 nt, Artificial Sequence
  Description of Artificial Sequence: Synthetic oligonucleotide
gcccaugugggcuaucuuu

SEQ ID NO: 1173218 - RNA, 19 nt, Artificial Sequence
  Description of Artificial Sequence: Synthetic oligonucleotide
gcuugacaggugacgucug

SEQ ID NO: 1173219 - RNA, 19 nt, Artificial Sequence
  Description of Artificial Sequence: Synthetic oligonucleotide
ggucuaugaugcaguuaca

SEQ ID NO: 1173220 - RNA, 19 nt, Artificial Sequence
  Description of Artificial Sequence: Synthetic oligonucleotide
cgggucucuuugcuugacg

SEQ ID NO: 1173221 - RNA, 19 nt, Artificial Sequence
  Description of Artificial Sequence: Synthetic oligonucleotide
cguuguucccacuauuggu

SEQ ID NO: 1173222 - RNA, 19 nt, Artificial Sequence
  Description of Artificial Sequence: Synthetic oligonucleotide
cgugaggguaguaaugccu

SEQ ID NO: 1173223 - RNA, 19 nt, Artificial Sequence
  Description of Artificial Sequence: Synthetic oligonucleotide
gccccuuauuucuucuccu

SEQ ID NO: 1173224 - RNA, 19 nt, Artificial Sequence
  Description of Artificial Sequence: Synthetic oligonucleotide
cugcaacuguccauucauu

SEQ ID NO: 1173225 - RNA, 19 nt, Artificial Sequence
  Description of Artificial Sequence: Synthetic oligonucleotide
cacaagccccuuauuucuu

SEQ ID NO: 1173226 - RNA, 19 nt, Artificial Sequence
  Description of Artificial Sequence: Synthetic oligonucleotide
cggguucgggaucuggcuc

SEQ ID NO: 1173227 - RNA, 19 nt, Artificial Sequence
  Description of Artificial Sequence: Synthetic oligonucleotide
caggcaaguccagacuaau

SEQ ID NO: 1173228 - RNA, 19 nt, Artificial Sequence
  Description of Artificial Sequence: Synthetic oligonucleotide
cgccauaaauccagcucca

SEQ ID NO: 1173229 - RNA, 19 nt, Artificial Sequence
  Description of Artificial Sequence: Synthetic oligonucleotide
ggcaacuacuacacuugau

SEQ ID NO: 1173230 - RNA, 19 nt, Artificial Sequence
  Description of Artificial Sequence: Synthetic oligonucleotide
gggauccggcucgggcccg

SEQ ID NO: 1173231 - RNA, 19 nt, Artificial Sequence
  Description of Artificial Sequence: Synthetic oligonucleotide
cccaugugggcuaucuuuu

SEQ ID NO: 1173232 - RNA, 19 nt, Artificial Sequence
  Description of Artificial Sequence: Synthetic oligonucleotide
gucccagcaugggucuaua

SEQ ID NO: 1173233 - RNA, 19 nt, Artificial Sequence
  Description of Artificial Sequence: Synthetic oligonucleotide
gcuuagacuagagccucuu

SEQ ID NO: 1173234 - RNA, 19 nt, Artificial Sequence
  Description of Artificial Sequence: Synthetic oligonucleotide
gcgccucuguuuggcugag

SEQ ID NO: 1173235 - RNA, 19 nt, Artificial Sequence
  Description of Artificial Sequence: Synthetic oligonucleotide
cuuccccacccagaacauu

SEQ ID NO: 1173236 - RNA, 19 nt, Artificial Sequence
  Description of Artificial Sequence: Synthetic oligonucleotide
ggcccggauccuccgcggu

SEQ ID NO: 1173237 - RNA, 19 nt, Artificial Sequence
  Description of Artificial Sequence: Synthetic oligonucleotide
cggauccuccgcggucucc

SEQ ID NO: 1173238 - RNA, 19 nt, Artificial Sequence
  Description of Artificial Sequence: Synthetic oligonucleotide
ccgucuccaccuucucggu

SEQ ID NO: 1173239 - RNA, 19 nt, Artificial Sequence
  Description of Artificial Sequence: Synthetic oligonucleotide
cgccucuguuuggcugagu

SEQ ID NO: 1173240 - RNA, 19 nt, Artificial Sequence
  Description of Artificial Sequence: Synthetic oligonucleotide
uauaacaugacucaugaca

SEQ ID NO: 1173241 - RNA, 19 nt, Artificial Sequence
  Description of Artificial Sequence: Synthetic oligonucleotide
uaaucuaccacaaacaccu

SEQ ID NO: 1173242 - RNA, 19 nt, Artificial Sequence
  Description of Artificial Sequence: Synthetic oligonucleotide
uaaacuauugaaaggauga

SEQ ID NO: 1173243 - RNA, 19 nt, Artificial Sequence
  Description of Artificial Sequence: Synthetic oligonucleotide
aaauccuuagcuucaacuc

SEQ ID NO: 1173244 - RNA, 19 nt, Artificial Sequence
  Description of Artificial Sequence: Synthetic oligonucleotide
ugaagaauaguagaaaucc

SEQ ID NO: 1173245 - RNA, 19 nt, Artificial Sequence
  Description of Artificial Sequence: Synthetic oligonucleotide
uaauuaacaccacaucugg

SEQ ID NO: 1173246 - RNA, 19 nt, Artificial Sequence
  Description of Artificial Sequence: Synthetic oligonucleotide
aguuggccaaaucaaaucc

SEQ ID NO: 1173247 - RNA, 19 nt, Artificial Sequence
  Description of Artificial Sequence: Synthetic oligonucleotide
auaucugcaacuuguaggg

SEQ ID NO: 1173248 - RNA, 19 nt, Artificial Sequence
  Description of Artificial Sequence: Synthetic oligonucleotide
gauagcaccauucaucacc

SEQ ID NO: 1173249 - RNA, 19 nt, Artificial Sequence
  Description of Artificial Sequence: Synthetic oligonucleotide
uuuaaauuacaguuggcca

SEQ ID NO: 1173250 - RNA, 19 nt, Artificial Sequence
  Description of Artificial Sequence: Synthetic oligonucleotide
auuacaguuggccaaauca

SEQ ID NO: 1173251 - RNA, 19 nt, Artificial Sequence
  Description of Artificial Sequence: Synthetic oligonucleotide
ucgaauacaaauacaaauc

SEQ ID NO: 1173252 - RNA, 19 nt, Artificial Sequence
  Description of Artificial Sequence: Synthetic oligonucleotide
guuacuauggaugucuugg

SEQ ID NO: 1173253 - RNA, 19 nt, Artificial Sequence
  Description of Artificial Sequence: Synthetic oligonucleotide
uuaucuguauucauuucag

SEQ ID NO: 1173254 - RNA, 19 nt, Artificial Sequence
  Description of Artificial Sequence: Synthetic oligonucleotide
acuauugaaaggaugacuc

SEQ ID NO: 1173255 - RNA, 19 nt, Artificial Sequence
  Description of Artificial Sequence: Synthetic oligonucleotide
aacuuuacuucucaaacaa

SEQ ID NO: 1173256 - RNA, 19 nt, Artificial Sequence
  Description of Artificial Sequence: Synthetic oligonucleotide
uacucgaauacaaauacaa

SEQ ID NO: 1173257 - RNA, 19 nt, Artificial Sequence
  Description of Artificial Sequence: Synthetic oligonucleotide
ucauauaacuccaucguuc

SEQ ID NO: 1173258 - RNA, 19 nt, Artificial Sequence
  Description of Artificial Sequence: Synthetic oligonucleotide
aaggauagcaccauucauc

SEQ ID NO: 1173259 - RNA, 19 nt, Artificial Sequence
  Description of Artificial Sequence: Synthetic oligonucleotide
uuugacacuguuuugcaga

SEQ ID NO: 1173260 - RNA, 19 nt, Artificial Sequence
  Description of Artificial Sequence: Synthetic oligonucleotide
uugauauugccuuucguca

SEQ ID NO: 1173261 - RNA, 19 nt, Artificial Sequence
  Description of Artificial Sequence: Synthetic oligonucleotide
cugucauauaacuccaucg

SEQ ID NO: 1173262 - RNA, 19 nt, Artificial Sequence
  Description of Artificial Sequence: Synthetic oligonucleotide
uggauucuaaagcacacug

SEQ ID NO: 1173263 - RNA, 19 nt, Artificial Sequence
  Description of Artificial Sequence: Synthetic oligonucleotide
ugaacaacauaaucuacca

SEQ ID NO: 1173264 - RNA, 19 nt, Artificial Sequence
  Description of Artificial Sequence: Synthetic oligonucleotide
uaugcgaacagcauauaac

SEQ ID NO: 1173265 - RNA, 19 nt, Artificial Sequence
  Description of Artificial Sequence: Synthetic oligonucleotide
caggauuugggcuaauugg

SEQ ID NO: 1173266 - RNA, 19 nt, Artificial Sequence
  Description of Artificial Sequence: Synthetic oligonucleotide
caagucguaccuuaggugc

SEQ ID NO: 1173267 - RNA, 19 nt, Artificial Sequence
  Description of Artificial Sequence: Synthetic oligonucleotide
guuacucgaauacaaauac

SEQ ID NO: 1173268 - RNA, 19 nt, Artificial Sequence
  Description of Artificial Sequence: Synthetic oligonucleotide
aauccuuagcuucaacucu

SEQ ID NO: 1173269 - RNA, 19 nt, Artificial Sequence
  Description of Artificial Sequence: Synthetic oligonucleotide
aacaagucguaccuuaggu

SEQ ID NO: 1173270 - RNA, 19 nt, Artificial Sequence
  Description of Artificial Sequence: Synthetic oligonucleotide
uuuugcagaaagaaaugga

SEQ ID NO: 1173271 - RNA, 19 nt, Artificial Sequence
  Description of Artificial Sequence: Synthetic oligonucleotide
caaacaagccacacaaacg

SEQ ID NO: 1173272 - RNA, 19 nt, Artificial Sequence
  Description of Artificial Sequence: Synthetic oligonucleotide
ugucauauaacuccaucgu

SEQ ID NO: 1173273 - RNA, 19 nt, Artificial Sequence
  Description of Artificial Sequence: Synthetic oligonucleotide
ucucuauaaauguugacau

SEQ ID NO: 1173274 - RNA, 19 nt, Artificial Sequence
  Description of Artificial Sequence: Synthetic oligonucleotide
ucuacagggaacuguaccc

SEQ ID NO: 1173275 - RNA, 19 nt, Artificial Sequence
  Description of Artificial Sequence: Synthetic oligonucleotide
aacguuuucuugugcagag

SEQ ID NO: 1173276 - RNA, 19 nt, Artificial Sequence
  Description of Artificial Sequence: Synthetic oligonucleotide
cuugauauugccuuucguc

SEQ ID NO: 1173277 - RNA, 19 nt, Artificial Sequence
  Description of Artificial Sequence: Synthetic oligonucleotide
cauauuuccaagacucugc

SEQ ID NO: 1173278 - RNA, 19 nt, Artificial Sequence
  Description of Artificial Sequence: Synthetic oligonucleotide
agaaauaugaaggucuuca

SEQ ID NO: 1173279 - RNA, 19 nt, Artificial Sequence
  Description of Artificial Sequence: Synthetic oligonucleotide
ugcauauuggaacaauuuc

SEQ ID NO: 1173280 - RNA, 19 nt, Artificial Sequence
  Description of Artificial Sequence: Synthetic oligonucleotide
uauguguuacuauggaugu

SEQ ID NO: 1173281 - RNA, 19 nt, Artificial Sequence
  Description of Artificial Sequence: Synthetic oligonucleotide
auauuucagaaucaauugu

SEQ ID NO: 1173282 - RNA, 19 nt, Artificial Sequence
  Description of Artificial Sequence: Synthetic oligonucleotide
ucugaugcauuccauauuu

SEQ ID NO: 1173283 - RNA, 19 nt, Artificial Sequence
  Description of Artificial Sequence: Synthetic oligonucleotide
aaccgauucugucauauaa

SEQ ID NO: 1173284 - RNA, 19 nt, Artificial Sequence
  Description of Artificial Sequence: Synthetic oligonucleotide
uugaaucacagccuuccag

SEQ ID NO: 1173285 - RNA, 19 nt, Artificial Sequence
  Description of Artificial Sequence: Synthetic oligonucleotide
agccacacaaacguuaggc

SEQ ID NO: 1173286 - RNA, 19 nt, Artificial Sequence
  Description of Artificial Sequence: Synthetic oligonucleotide
guauguguuacuauggaug

SEQ ID NO: 1173287 - RNA, 19 nt, Artificial Sequence
  Description of Artificial Sequence: Synthetic oligonucleotide
agaucccugacuaugcugc

SEQ ID NO: 1173288 - RNA, 19 nt, Artificial Sequence
  Description of Artificial Sequence: Synthetic oligonucleotide
gaugucccaagugaguucg

SEQ ID NO: 1173289 - RNA, 19 nt, Artificial Sequence
  Description of Artificial Sequence: Synthetic oligonucleotide
augcgaacagcauauaaca

SEQ ID NO: 1173290 - RNA, 19 nt, Artificial Sequence
  Description of Artificial Sequence: Synthetic oligonucleotide
ugcaucaacaagucguacc

SEQ ID NO: 1173291 - RNA, 19 nt, Artificial Sequence
  Description of Artificial Sequence: Synthetic oligonucleotide
cuucaagcuguuuaggaug

SEQ ID NO: 1173292 - RNA, 19 nt, Artificial Sequence
  Description of Artificial Sequence: Synthetic oligonucleotide
gaaagaaauggagaccugc

SEQ ID NO: 1173293 - RNA, 19 nt, Artificial Sequence
  Description of Artificial Sequence: Synthetic oligonucleotide
aacuauugaaaggaugacu

SEQ ID NO: 1173294 - RNA, 19 nt, Artificial Sequence
  Description of Artificial Sequence: Synthetic oligonucleotide
auuugggcuaauuggaaca

SEQ ID NO: 1173295 - RNA, 19 nt, Artificial Sequence
  Description of Artificial Sequence: Synthetic oligonucleotide
ucaaguuuaaggccaaauu

SEQ ID NO: 1173296 - RNA, 19 nt, Artificial Sequence
  Description of Artificial Sequence: Synthetic oligonucleotide
uaauuggaacaccacacuc

SEQ ID NO: 1173297 - RNA, 19 nt, Artificial Sequence
  Description of Artificial Sequence: Synthetic oligonucleotide
uuacaguuggccaaaucaa

SEQ ID NO: 1173298 - RNA, 19 nt, Artificial Sequence
  Description of Artificial Sequence: Synthetic oligonucleotide
cauaaagcaagaagcuccc

SEQ ID NO: 1173299 - RNA, 19 nt, Artificial Sequence
  Description of Artificial Sequence: Synthetic oligonucleotide
uuaacaccacaucuggaac

SEQ ID NO: 1173300 - RNA, 19 nt, Artificial Sequence
  Description of Artificial Sequence: Synthetic oligonucleotide
uuacuauggaugucuuggg

SEQ ID NO: 1173301 - RNA, 19 nt, Artificial Sequence
  Description of Artificial Sequence: Synthetic oligonucleotide
auaguagaacguuuucuug

SEQ ID NO: 1173302 - RNA, 19 nt, Artificial Sequence
  Description of Artificial Sequence: Synthetic oligonucleotide
aacucuauggcaaucucca

SEQ ID NO: 1173303 - RNA, 19 nt, Artificial Sequence
  Description of Artificial Sequence: Synthetic oligonucleotide
uuuggaacaccuuggcuga

SEQ ID NO: 1173304 - RNA, 19 nt, Artificial Sequence
  Description of Artificial Sequence: Synthetic oligonucleotide
aggauagcaccauucauca

SEQ ID NO: 1173305 - RNA, 19 nt, Artificial Sequence
  Description of Artificial Sequence: Synthetic oligonucleotide
uguuuaggauggcauaaac

SEQ ID NO: 1173306 - RNA, 19 nt, Artificial Sequence
  Description of Artificial Sequence: Synthetic oligonucleotide
gauucuaaagcacacugua

SEQ ID NO: 1173307 - RNA, 19 nt, Artificial Sequence
  Description of Artificial Sequence: Synthetic oligonucleotide
acuuguaggguauuugggu

SEQ ID NO: 1173308 - RNA, 19 nt, Artificial Sequence
  Description of Artificial Sequence: Synthetic oligonucleotide
aacguuaggcaggauuugg

SEQ ID NO: 1173309 - RNA, 19 nt, Artificial Sequence
  Description of Artificial Sequence: Synthetic oligonucleotide
ugucuugggagaucaaucu

SEQ ID NO: 1173310 - RNA, 19 nt, Artificial Sequence
  Description of Artificial Sequence: Synthetic oligonucleotide
ucauauuuccaagacucug

SEQ ID NO: 1173311 - RNA, 19 nt, Artificial Sequence
  Description of Artificial Sequence: Synthetic oligonucleotide
ggcauaaacuauugaaagg

SEQ ID NO: 1173312 - RNA, 19 nt, Artificial Sequence
  Description of Artificial Sequence: Synthetic oligonucleotide
ugauacgaaguguauucug

SEQ ID NO: 1173313 - RNA, 19 nt, Artificial Sequence
  Description of Artificial Sequence: Synthetic oligonucleotide
aacaccacaucuggaacuc

SEQ ID NO: 1173314 - RNA, 19 nt, Artificial Sequence
  Description of Artificial Sequence: Synthetic oligonucleotide
ucauugaugcaccuucuuc

SEQ ID NO: 1173315 - RNA, 19 nt, Artificial Sequence
  Description of Artificial Sequence: Synthetic oligonucleotide
uuguaauuguauguguuac

SEQ ID NO: 1173316 - RNA, 19 nt, Artificial Sequence
  Description of Artificial Sequence: Synthetic oligonucleotide
gauuugggcuaauuggaac

SEQ ID NO: 1173317 - RNA, 19 nt, Artificial Sequence
  Description of Artificial Sequence: Synthetic oligonucleotide
uguaauuguauguguuacu

SEQ ID NO: 1173318 - RNA, 19 nt, Artificial Sequence
  Description of Artificial Sequence: Synthetic oligonucleotide
ucugucauauaacuccauc

SEQ ID NO: 1173319 - RNA, 19 nt, Artificial Sequence
  Description of Artificial Sequence: Synthetic oligonucleotide
uaguuacucgaauacaaau

SEQ ID NO: 1173320 - RNA, 19 nt, Artificial Sequence
  Description of Artificial Sequence: Synthetic oligonucleotide
uuccugaggucacagauau

SEQ ID NO: 1173321 - RNA, 19 nt, Artificial Sequence
  Description of Artificial Sequence: Synthetic oligonucleotide
gacuaauucgaggugcucc

SEQ ID NO: 1173322 - RNA, 19 nt, Artificial Sequence
  Description of Artificial Sequence: Synthetic oligonucleotide
uuacucgaauacaaauaca

SEQ ID NO: 1173323 - RNA, 19 nt, Artificial Sequence
  Description of Artificial Sequence: Synthetic oligonucleotide
uuaggauggcauaaacuau

SEQ ID NO: 1173324 - RNA, 19 nt, Artificial Sequence
  Description of Artificial Sequence: Synthetic oligonucleotide
uguaucuacagggaacugu

SEQ ID NO: 1173325 - RNA, 19 nt, Artificial Sequence
  Description of Artificial Sequence: Synthetic oligonucleotide
acaagucguaccuuaggug

SEQ ID NO: 1173326 - RNA, 19 nt, Artificial Sequence
  Description of Artificial Sequence: Synthetic oligonucleotide
agaacguuuucuugugcag

SEQ ID NO: 1173327 - RNA, 19 nt, Artificial Sequence
  Description of Artificial Sequence: Synthetic oligonucleotide
ucuucaagcuguuuaggau

SEQ ID NO: 1173328 - RNA, 19 nt, Artificial Sequence
  Description of Artificial Sequence: Synthetic oligonucleotide
ucgaggugcuccuucauca

SEQ ID NO: 1173329 - RNA, 19 nt, Artificial Sequence
  Description of Artificial Sequence: Synthetic oligonucleotide
cauugaugcaccuucuuca

SEQ ID NO: 1173330 - RNA, 19 nt, Artificial Sequence
  Description of Artificial Sequence: Synthetic oligonucleotide
uguauguguuacuauggau

SEQ ID NO: 1173331 - RNA, 19 nt, Artificial Sequence
  Description of Artificial Sequence: Synthetic oligonucleotide
gguggaaucucuauaaaug

SEQ ID NO: 1173332 - RNA, 19 nt, Artificial Sequence
  Description of Artificial Sequence: Synthetic oligonucleotide
aaauggagaccugcuuugg

SEQ ID NO: 1173333 - RNA, 19 nt, Artificial Sequence
  Description of Artificial Sequence: Synthetic oligonucleotide
uacuauggaugucuuggga

SEQ ID NO: 1173334 - RNA, 19 nt, Artificial Sequence
  Description of Artificial Sequence: Synthetic oligonucleotide
acuaauucgaggugcuccu

SEQ ID NO: 1173335 - RNA, 19 nt, Artificial Sequence
  Description of Artificial Sequence: Synthetic oligonucleotide
ugcuuuguaucuacaggga

SEQ ID NO: 1173336 - RNA, 19 nt, Artificial Sequence
  Description of Artificial Sequence: Synthetic oligonucleotide
uacuguuuaucuguauuca

SEQ ID NO: 1173337 - RNA, 19 nt, Artificial Sequence
  Description of Artificial Sequence: Synthetic oligonucleotide
gauacgaaguguauucuga

SEQ ID NO: 1173338 - RNA, 19 nt, Artificial Sequence
  Description of Artificial Sequence: Synthetic oligonucleotide
uaggauggcauaaacuauu

SEQ ID NO: 1173339 - RNA, 19 nt, Artificial Sequence
  Description of Artificial Sequence: Synthetic oligonucleotide
agauaguagaacguuuucu

SEQ ID NO: 1173340 - RNA, 19 nt, Artificial Sequence
  Description of Artificial Sequence: Synthetic oligonucleotide
uuggaauggggcucagucc

SEQ ID NO: 1173341 - RNA, 19 nt, Artificial Sequence
  Description of Artificial Sequence: Synthetic oligonucleotide
gcauauuggaacaauuucc

SEQ ID NO: 1173342 - RNA, 19 nt, Artificial Sequence
  Description of Artificial Sequence: Synthetic oligonucleotide
ugagaaauaugaaggucuu

SEQ ID NO: 1173343 - RNA, 19 nt, Artificial Sequence
  Description of Artificial Sequence: Synthetic oligonucleotide
acuaugcugcauuccauca

SEQ ID NO: 1173344 - RNA, 19 nt, Artificial Sequence
  Description of Artificial Sequence: Synthetic oligonucleotide
agauggauggcacuaguua

SEQ ID NO: 1173345 - RNA, 19 nt, Artificial Sequence
  Description of Artificial Sequence: Synthetic oligonucleotide
auagcucuucuuaauuaac

SEQ ID NO: 1173346 - RNA, 19 nt, Artificial Sequence
  Description of Artificial Sequence: Synthetic oligonucleotide
aauaucuuugacacuguuu

SEQ ID NO: 1173347 - RNA, 19 nt, Artificial Sequence
  Description of Artificial Sequence: Synthetic oligonucleotide
aauuuaacuuuaagccucu

SEQ ID NO: 1173348 - RNA, 19 nt, Artificial Sequence
  Description of Artificial Sequence: Synthetic oligonucleotide
augaaucucuuugauacga

SEQ ID NO: 1173349 - RNA, 19 nt, Artificial Sequence
  Description of Artificial Sequence: Synthetic oligonucleotide
ucugcaacuuguaggguau

SEQ ID NO: 1173350 - RNA, 19 nt, Artificial Sequence
  Description of Artificial Sequence: Synthetic oligonucleotide
ccuuucgucaucuguaucc

SEQ ID NO: 1173351 - RNA, 19 nt, Artificial Sequence
  Description of Artificial Sequence: Synthetic oligonucleotide
cucugcgccaauuuuggug

SEQ ID NO: 1173352 - RNA, 19 nt, Artificial Sequence
  Description of Artificial Sequence: Synthetic oligonucleotide
ucuuugauacgaaguguau

SEQ ID NO: 1173353 - RNA, 19 nt, Artificial Sequence
  Description of Artificial Sequence: Synthetic oligonucleotide
auaugcgaacagcauauaa

SEQ ID NO: 1173354 - RNA, 19 nt, Artificial Sequence
  Description of Artificial Sequence: Synthetic oligonucleotide
ucacagauaugcgaacagc

SEQ ID NO: 1173355 - RNA, 19 nt, Artificial Sequence
  Description of Artificial Sequence: Synthetic oligonucleotide
cucgaauacaaauacaaau

SEQ ID NO: 1173356 - RNA, 19 nt, Artificial Sequence
  Description of Artificial Sequence: Synthetic oligonucleotide
cacagauaugcgaacagca

SEQ ID NO: 1173357 - RNA, 19 nt, Artificial Sequence
  Description of Artificial Sequence: Synthetic oligonucleotide
aaagaugucccaagugagu

SEQ ID NO: 1173358 - RNA, 19 nt, Artificial Sequence
  Description of Artificial Sequence: Synthetic oligonucleotide
aguucauuuuguugacaug

SEQ ID NO: 1173359 - RNA, 19 nt, Artificial Sequence
  Description of Artificial Sequence: Synthetic oligonucleotide
ggcaucuugagaaauauga

SEQ ID NO: 1173360 - RNA, 19 nt, Artificial Sequence
  Description of Artificial Sequence: Synthetic oligonucleotide
augucuugggagaucaauc

SEQ ID NO: 1173361 - RNA, 19 nt, Artificial Sequence
  Description of Artificial Sequence: Synthetic oligonucleotide
uggaaucucuauaaauguu

SEQ ID NO: 1173362 - RNA, 19 nt, Artificial Sequence
  Description of Artificial Sequence: Synthetic oligonucleotide
aagaugucccaagugaguu

SEQ ID NO: 1173363 - RNA, 19 nt, Artificial Sequence
  Description of Artificial Sequence: Synthetic oligonucleotide
gacgguggaaucucuauaa

SEQ ID NO: 1173364 - RNA, 19 nt, Artificial Sequence
  Description of Artificial Sequence: Synthetic oligonucleotide
cauuguccuugcauauugg

SEQ ID NO: 1173365 - RNA, 19 nt, Artificial Sequence
  Description of Artificial Sequence: Synthetic oligonucleotide
gaaucaauuguuccagaua

SEQ ID NO: 1173366 - RNA, 19 nt, Artificial Sequence
  Description of Artificial Sequence: Synthetic oligonucleotide
accgauucugucauauaac

SEQ ID NO: 1173367 - RNA, 19 nt, Artificial Sequence
  Description of Artificial Sequence: Synthetic oligonucleotide
uggaacucuaucugaguuc

SEQ ID NO: 1173368 - RNA, 19 nt, Artificial Sequence
  Description of Artificial Sequence: Synthetic oligonucleotide
aauuaacaccacaucugga

SEQ ID NO: 1173369 - RNA, 19 nt, Artificial Sequence
  Description of Artificial Sequence: Synthetic oligonucleotide
aggguauuugggucuauga

SEQ ID NO: 1173370 - RNA, 19 nt, Artificial Sequence
  Description of Artificial Sequence: Synthetic oligonucleotide
ucucuuugauacgaagugu

SEQ ID NO: 1173371 - RNA, 19 nt, Artificial Sequence
  Description of Artificial Sequence: Synthetic oligonucleotide
uaauucgaggugcuccuuc

SEQ ID NO: 1173372 - RNA, 19 nt, Artificial Sequence
  Description of Artificial Sequence: Synthetic oligonucleotide
agcauguuguuuugaagaa

SEQ ID NO: 1173373 - RNA, 19 nt, Artificial Sequence
  Description of Artificial Sequence: Synthetic oligonucleotide
agauaugcgaacagcauau

SEQ ID NO: 1173374 - RNA, 19 nt, Artificial Sequence
  Description of Artificial Sequence: Synthetic oligonucleotide
acucuaucugaguucauuu

SEQ ID NO: 1173375 - RNA, 19 nt, Artificial Sequence
  Description of Artificial Sequence: Synthetic oligonucleotide
ucggccagacuaauucgag

SEQ ID NO: 1173376 - RNA, 19 nt, Artificial Sequence
  Description of Artificial Sequence: Synthetic oligonucleotide
gauauugccuuucgucauc

SEQ ID NO: 1173377 - RNA, 19 nt, Artificial Sequence
  Description of Artificial Sequence: Synthetic oligonucleotide
gcucauauuuccaagacuc

SEQ ID NO: 1173378 - RNA, 19 nt, Artificial Sequence
  Description of Artificial Sequence: Synthetic oligonucleotide
gccaauuuuggugacaggc

SEQ ID NO: 1173379 - RNA, 19 nt, Artificial Sequence
  Description of Artificial Sequence: Synthetic oligonucleotide
accuuaggugcuuuaauuu

SEQ ID NO: 1173380 - RNA, 19 nt, Artificial Sequence
  Description of Artificial Sequence: Synthetic oligonucleotide
uccagauaguagaacguuu

SEQ ID NO: 1173381 - RNA, 19 nt, Artificial Sequence
  Description of Artificial Sequence: Synthetic oligonucleotide
uuugggucuaugagaugga

SEQ ID NO: 1173382 - RNA, 19 nt, Artificial Sequence
  Description of Artificial Sequence: Synthetic oligonucleotide
caacuuuacuucucaaaca

SEQ ID NO: 1173383 - RNA, 19 nt, Artificial Sequence
  Description of Artificial Sequence: Synthetic oligonucleotide
aucaugaaucucuuugaua

SEQ ID NO: 1173384 - RNA, 19 nt, Artificial Sequence
  Description of Artificial Sequence: Synthetic oligonucleotide
aaacguuaggcaggauuug

SEQ ID NO: 1173385 - RNA, 19 nt, Artificial Sequence
  Description of Artificial Sequence: Synthetic oligonucleotide
gaauguguuuccaucaaua

SEQ ID NO: 1173386 - RNA, 19 nt, Artificial Sequence
  Description of Artificial Sequence: Synthetic oligonucleotide
ugcgaacagcauauaacau

SEQ ID NO: 1173387 - RNA, 19 nt, Artificial Sequence
  Description of Artificial Sequence: Synthetic oligonucleotide
guaauuguauguguuacua

SEQ ID NO: 1173388 - RNA, 19 nt, Artificial Sequence
  Description of Artificial Sequence: Synthetic oligonucleotide
aggauuugggcuaauugga

SEQ ID NO: 1173389 - RNA, 19 nt, Artificial Sequence
  Description of Artificial Sequence: Synthetic oligonucleotide
auacgaaguguauucugau

SEQ ID NO: 1173390 - RNA, 19 nt, Artificial Sequence
  Description of Artificial Sequence: Synthetic oligonucleotide
aacucuaucugaguucauu

SEQ ID NO: 1173391 - RNA, 19 nt, Artificial Sequence
  Description of Artificial Sequence: Synthetic oligonucleotide
uugauacgaaguguauucu

SEQ ID NO: 1173392 - RNA, 19 nt, Artificial Sequence
  Description of Artificial Sequence: Synthetic oligonucleotide
guagaacguuuucuugugc

SEQ ID NO: 1173393 - RNA, 19 nt, Artificial Sequence
  Description of Artificial Sequence: Synthetic oligonucleotide
cauagcucuucuuaauuaa

SEQ ID NO: 1173394 - RNA, 19 nt, Artificial Sequence
  Description of Artificial Sequence: Synthetic oligonucleotide
uccggggcugcgaucaacc

SEQ ID NO: 1173395 - RNA, 19 nt, Artificial Sequence
  Description of Artificial Sequence: Synthetic oligonucleotide
aguuacucgaauacaaaua

SEQ ID NO: 1173396 - RNA, 19 nt, Artificial Sequence
  Description of Artificial Sequence: Synthetic oligonucleotide
agaauguguuuccaucaau

SEQ ID NO: 1173397 - RNA, 19 nt, Artificial Sequence
  Description of Artificial Sequence: Synthetic oligonucleotide
cuuguaauuguauguguua

SEQ ID NO: 1173398 - RNA, 19 nt, Artificial Sequence
  Description of Artificial Sequence: Synthetic oligonucleotide
cugacuaugcugcauucca

SEQ ID NO: 1173399 - RNA, 19 nt, Artificial Sequence
  Description of Artificial Sequence: Synthetic oligonucleotide
acaacauaaucuaccacaa

SEQ ID NO: 1173400 - RNA, 19 nt, Artificial Sequence
  Description of Artificial Sequence: Synthetic oligonucleotide
guuucuacggcgcuggcgu

SEQ ID NO: 1173401 - RNA, 19 nt, Artificial Sequence
  Description of Artificial Sequence: Synthetic oligonucleotide
cauuugggacugaacaaca

SEQ ID NO: 1173402 - RNA, 19 nt, Artificial Sequence
  Description of Artificial Sequence: Synthetic oligonucleotide
uguugacauguucaucauu

SEQ ID NO: 1173403 - RNA, 19 nt, Artificial Sequence
  Description of Artificial Sequence: Synthetic oligonucleotide
uggcugaugucaacuuuac

SEQ ID NO: 1173404 - RNA, 19 nt, Artificial Sequence
  Description of Artificial Sequence: Synthetic oligonucleotide
gaugucaacuuuacuucuc

SEQ ID NO: 1173405 - RNA, 19 nt, Artificial Sequence
  Description of Artificial Sequence: Synthetic oligonucleotide
uaacaugacucaugacauc

SEQ ID NO: 1173406 - RNA, 19 nt, Artificial Sequence
  Description of Artificial Sequence: Synthetic oligonucleotide
uauuugggucuaugagaug

SEQ ID NO: 1173407 - RNA, 19 nt, Artificial Sequence
  Description of Artificial Sequence: Synthetic oligonucleotide
auguuguuuugaagaauag

SEQ ID NO: 1173408 - RNA, 19 nt, Artificial Sequence
  Description of Artificial Sequence: Synthetic oligonucleotide
gaacguuuucuugugcaga

SEQ ID NO: 1173409 - RNA, 19 nt, Artificial Sequence
  Description of Artificial Sequence: Synthetic oligonucleotide
cagauaguagaacguuuuc

SEQ ID NO: 1173410 - RNA, 19 nt, Artificial Sequence
  Description of Artificial Sequence: Synthetic oligonucleotide
uaucugaguucauuuuguu

SEQ ID NO: 1173411 - RNA, 19 nt, Artificial Sequence
  Description of Artificial Sequence: Synthetic oligonucleotide
gcacuaguuacucgaauac

SEQ ID NO: 1173412 - RNA, 19 nt, Artificial Sequence
  Description of Artificial Sequence: Synthetic oligonucleotide
agacucugcgccaauuuug

SEQ ID NO: 1173413 - RNA, 19 nt, Artificial Sequence
  Description of Artificial Sequence: Synthetic oligonucleotide
gcugaugucaacuuuacuu

SEQ ID NO: 1173414 - RNA, 19 nt, Artificial Sequence
  Description of Artificial Sequence: Synthetic oligonucleotide
acguuaggcaggauuuggg

SEQ ID NO: 1173415 - RNA, 19 nt, Artificial Sequence
  Description of Artificial Sequence: Synthetic oligonucleotide
agccugcaucaacaagucg

SEQ ID NO: 1173416 - RNA, 19 nt, Artificial Sequence
  Description of Artificial Sequence: Synthetic oligonucleotide
uaggguauuugggucuaug

SEQ ID NO: 1173417 - RNA, 19 nt, Artificial Sequence
  Description of Artificial Sequence: Synthetic oligonucleotide
caucuggaacucuaucuga

SEQ ID NO: 1173418 - RNA, 19 nt, Artificial Sequence
  Description of Artificial Sequence: Synthetic oligonucleotide
ggaacucuaucugaguuca

SEQ ID NO: 1173419 - RNA, 19 nt, Artificial Sequence
  Description of Artificial Sequence: Synthetic oligonucleotide
gcauauaacaugacucaug

SEQ ID NO: 1173420 - RNA, 19 nt, Artificial Sequence
  Description of Artificial Sequence: Synthetic oligonucleotide
ucccugacuaugcugcauu

SEQ ID NO: 1173421 - RNA, 19 nt, Artificial Sequence
  Description of Artificial Sequence: Synthetic oligonucleotide
aggauggcauaaacuauug

SEQ ID NO: 1173422 - RNA, 19 nt, Artificial Sequence
  Description of Artificial Sequence: Synthetic oligonucleotide
cuaccacaaacaccugcug

SEQ ID NO: 1173423 - RNA, 19 nt, Artificial Sequence
  Description of Artificial Sequence: Synthetic oligonucleotide
uuccaguuucuacggcgcu

SEQ ID NO: 1173424 - RNA, 19 nt, Artificial Sequence
  Description of Artificial Sequence: Synthetic oligonucleotide
aagucguaccuuaggugcu

SEQ ID NO: 1173425 - RNA, 19 nt, Artificial Sequence
  Description of Artificial Sequence: Synthetic oligonucleotide
cuaucugaguucauuuugu

SEQ ID NO: 1173426 - RNA, 19 nt, Artificial Sequence
  Description of Artificial Sequence: Synthetic oligonucleotide
ccagacuaauucgaggugc

SEQ ID NO: 1173427 - RNA, 19 nt, Artificial Sequence
  Description of Artificial Sequence: Synthetic oligonucleotide
cagauaugcgaacagcaua

SEQ ID NO: 1173428 - RNA, 19 nt, Artificial Sequence
  Description of Artificial Sequence: Synthetic oligonucleotide
caaacguuaggcaggauuu

SEQ ID NO: 1173429 - RNA, 19 nt, Artificial Sequence
  Description of Artificial Sequence: Synthetic oligonucleotide
guuuaggauggcauaaacu

SEQ ID NO: 1173430 - RNA, 19 nt, Artificial Sequence
  Description of Artificial Sequence: Synthetic oligonucleotide
uugggagaucaaucuuugu

SEQ ID NO: 1173431 - RNA, 19 nt, Artificial Sequence
  Description of Artificial Sequence: Synthetic oligonucleotide
agacuaauucgaggugcuc

SEQ ID NO: 1173432 - RNA, 19 nt, Artificial Sequence
  Description of Artificial Sequence: Synthetic oligonucleotide
cuggcguuugguacgguca

SEQ ID NO: 1173433 - RNA, 19 nt, Artificial Sequence
  Description of Artificial Sequence: Synthetic oligonucleotide
gaaggauagcaccauucau

SEQ ID NO: 1173434 - RNA, 19 nt, Artificial Sequence
  Description of Artificial Sequence: Synthetic oligonucleotide
acucacagcacaagaugug

SEQ ID NO: 1173435 - RNA, 19 nt, Artificial Sequence
  Description of Artificial Sequence: Synthetic oligonucleotide
acucgaauacaaauacaaa

SEQ ID NO: 1173436 - RNA, 19 nt, Artificial Sequence
  Description of Artificial Sequence: Synthetic oligonucleotide
acacaaacguuaggcagga

SEQ ID NO: 1173437 - RNA, 19 nt, Artificial Sequence
  Description of Artificial Sequence: Synthetic oligonucleotide
cuaauuggaacaccacacu

SEQ ID NO: 1173438 - RNA, 19 nt, Artificial Sequence
  Description of Artificial Sequence: Synthetic oligonucleotide
ugucccaagugaguucgac

SEQ ID NO: 1173439 - RNA, 19 nt, Artificial Sequence
  Description of Artificial Sequence: Synthetic oligonucleotide
uuguaucuacagggaacug

SEQ ID NO: 1173440 - RNA, 19 nt, Artificial Sequence
  Description of Artificial Sequence: Synthetic oligonucleotide
uccuuagcuucaacucuau

SEQ ID NO: 1173441 - RNA, 19 nt, Artificial Sequence
  Description of Artificial Sequence: Synthetic oligonucleotide
ugcugcauuccaucacaau

SEQ ID NO: 1173442 - RNA, 19 nt, Artificial Sequence
  Description of Artificial Sequence: Synthetic oligonucleotide
gucccaagugaguucgaca

SEQ ID NO: 1173443 - RNA, 19 nt, Artificial Sequence
  Description of Artificial Sequence: Synthetic oligonucleotide
uuucgucaucuguauccau

SEQ ID NO: 1173444 - RNA, 19 nt, Artificial Sequence
  Description of Artificial Sequence: Synthetic oligonucleotide
gcaacuuguaggguauuug

SEQ ID NO: 1173445 - RNA, 19 nt, Artificial Sequence
  Description of Artificial Sequence: Synthetic oligonucleotide
cuuucgucaucuguaucca

SEQ ID NO: 1173446 - RNA, 19 nt, Artificial Sequence
  Description of Artificial Sequence: Synthetic oligonucleotide
gaugucuugggagaucaau

SEQ ID NO: 1173447 - RNA, 19 nt, Artificial Sequence
  Description of Artificial Sequence: Synthetic oligonucleotide
gcguuugguacggucauag

SEQ ID NO: 1173448 - RNA, 19 nt, Artificial Sequence
  Description of Artificial Sequence: Synthetic oligonucleotide
cacuaguuacucgaauaca

SEQ ID NO: 1173449 - RNA, 19 nt, Artificial Sequence
  Description of Artificial Sequence: Synthetic oligonucleotide
auaaagcaagaagcucccu

SEQ ID NO: 1173450 - RNA, 19 nt, Artificial Sequence
  Description of Artificial Sequence: Synthetic oligonucleotide
uugggucuaugagauggau

SEQ ID NO: 1173451 - RNA, 19 nt, Artificial Sequence
  Description of Artificial Sequence: Synthetic oligonucleotide
cuguuuaucuguauucauu

SEQ ID NO: 1173452 - RNA, 19 nt, Artificial Sequence
  Description of Artificial Sequence: Synthetic oligonucleotide
uccugaggucacagauaug

SEQ ID NO: 1173453 - RNA, 19 nt, Artificial Sequence
  Description of Artificial Sequence: Synthetic oligonucleotide
ccaauuuuggugacaggca

SEQ ID NO: 1173454 - RNA, 19 nt, Artificial Sequence
  Description of Artificial Sequence: Synthetic oligonucleotide
gcacaagauguguccgggg

SEQ ID NO: 1173455 - RNA, 19 nt, Artificial Sequence
  Description of Artificial Sequence: Synthetic oligonucleotide
gucauauaacuccaucguu

SEQ ID NO: 1173456 - RNA, 19 nt, Artificial Sequence
  Description of Artificial Sequence: Synthetic oligonucleotide
ggccagacuaauucgaggu

SEQ ID NO: 1173457 - RNA, 19 nt, Artificial Sequence
  Description of Artificial Sequence: Synthetic oligonucleotide
gggcucaguccaaacaaag

SEQ ID NO: 1173458 - RNA, 19 nt, Artificial Sequence
  Description of Artificial Sequence: Synthetic oligonucleotide
ugcgccaauuuuggugaca

SEQ ID NO: 1173459 - RNA, 19 nt, Artificial Sequence
  Description of Artificial Sequence: Synthetic oligonucleotide
gcgccaauuuuggugacag

SEQ ID NO: 1173460 - RNA, 19 nt, Artificial Sequence
  Description of Artificial Sequence: Synthetic oligonucleotide
cucauauuuccaagacucu

SEQ ID NO: 1173461 - RNA, 19 nt, Artificial Sequence
  Description of Artificial Sequence: Synthetic oligonucleotide
agacaacauuguccuugca

SEQ ID NO: 1173462 - RNA, 19 nt, Artificial Sequence
  Description of Artificial Sequence: Synthetic oligonucleotide
gccagacuaauucgaggug

SEQ ID NO: 1173463 - RNA, 19 nt, Artificial Sequence
  Description of Artificial Sequence: Synthetic oligonucleotide
uacggucauagcucuucuu

SEQ ID NO: 1173464 - RNA, 19 nt, Artificial Sequence
  Description of Artificial Sequence: Synthetic oligonucleotide
ggauggcauaaacuauuga

SEQ ID NO: 1173465 - RNA, 19 nt, Artificial Sequence
  Description of Artificial Sequence: Synthetic oligonucleotide
ggucacagauaugcgaaca

SEQ ID NO: 1173466 - RNA, 19 nt, Artificial Sequence
  Description of Artificial Sequence: Synthetic oligonucleotide
guuccagauaguagaacgu

SEQ ID NO: 1173467 - RNA, 19 nt, Artificial Sequence
  Description of Artificial Sequence: Synthetic oligonucleotide
gcgaucaaccgauucuguc

SEQ ID NO: 1173468 - RNA, 19 nt, Artificial Sequence
  Description of Artificial Sequence: Synthetic oligonucleotide
cugcaucaacaagucguac

SEQ ID NO: 1173469 - RNA, 19 nt, Artificial Sequence
  Description of Artificial Sequence: Synthetic oligonucleotide
guguccggggcugcgauca

SEQ ID NO: 1173470 - RNA, 19 nt, Artificial Sequence
  Description of Artificial Sequence: Synthetic oligonucleotide
cgaucaaccgauucuguca

SEQ ID NO: 1173471 - RNA, 19 nt, Artificial Sequence
  Description of Artificial Sequence: Synthetic oligonucleotide
gcugcgaucaaccgauucu

SEQ ID NO: 1173472 - RNA, 19 nt, Artificial Sequence
  Description of Artificial Sequence: Synthetic oligonucleotide
gcauuccaucacaauaaac

SEQ ID NO: 1173473 - RNA, 19 nt, Artificial Sequence
  Description of Artificial Sequence: Synthetic oligonucleotide
guaccuuaggugcuuuaau

SEQ ID NO: 1173474 - RNA, 19 nt, Artificial Sequence
  Description of Artificial Sequence: Synthetic oligonucleotide
gauaugcgaacagcauaua

SEQ ID NO: 1173475 - RNA, 19 nt, Artificial Sequence
  Description of Artificial Sequence: Synthetic oligonucleotide
gaagcucccuggauucuaa

SEQ ID NO: 1173476 - RNA, 19 nt, Artificial Sequence
  Description of Artificial Sequence: Synthetic oligonucleotide
gauguguccggggcugcga

SEQ ID NO: 1173477 - RNA, 19 nt, Artificial Sequence
  Description of Artificial Sequence: Synthetic oligonucleotide
cagacuaauucgaggugcu

SEQ ID NO: 1173478 - RNA, 19 nt, Artificial Sequence
  Description of Artificial Sequence: Synthetic oligonucleotide
ucguaccuuaggugcuuua

SEQ ID NO: 1173479 - RNA, 19 nt, Artificial Sequence
  Description of Artificial Sequence: Synthetic oligonucleotide
cuuugauacgaaguguauu

SEQ ID NO: 1173480 - RNA, 19 nt, Artificial Sequence
  Description of Artificial Sequence: Synthetic oligonucleotide
acguuuucuugugcagagu

SEQ ID NO: 1173481 - RNA, 19 nt, Artificial Sequence
  Description of Artificial Sequence: Synthetic oligonucleotide
uacggcgcuggcguuuggu

SEQ ID NO: 1173482 - RNA, 19 nt, Artificial Sequence
  Description of Artificial Sequence: Synthetic oligonucleotide
agcaucucggccagacuaa

SEQ ID NO: 1173483 - RNA, 19 nt, Artificial Sequence
  Description of Artificial Sequence: Synthetic oligonucleotide
cccuggauucuaaagcaca

SEQ ID NO: 1173484 - RNA, 19 nt, Artificial Sequence
  Description of Artificial Sequence: Synthetic oligonucleotide
ggauagcaccauucaucac

SEQ ID NO: 1173485 - RNA, 19 nt, Artificial Sequence
  Description of Artificial Sequence: Synthetic oligonucleotide
ccgauucugucauauaacu

SEQ ID NO: 1173486 - RNA, 19 nt, Artificial Sequence
  Description of Artificial Sequence: Synthetic oligonucleotide
ggauuugggcuaauuggaa

SEQ ID NO: 1173487 - RNA, 19 nt, Artificial Sequence
  Description of Artificial Sequence: Synthetic oligonucleotide
uucuacggcgcuggcguuu

SEQ ID NO: 1173488 - RNA, 19 nt, Artificial Sequence
  Description of Artificial Sequence: Synthetic oligonucleotide
ccaagugaguucgacaaaa

SEQ ID NO: 1173489 - RNA, 19 nt, Artificial Sequence
  Description of Artificial Sequence: Synthetic oligonucleotide
uuucuacggcgcuggcguu

SEQ ID NO: 1173490 - RNA, 19 nt, Artificial Sequence
  Description of Artificial Sequence: Synthetic oligonucleotide
gcuggcguuugguacgguc

SEQ ID NO: 1173491 - RNA, 19 nt, Artificial Sequence
  Description of Artificial Sequence: Synthetic oligonucleotide
acacuguacccaagaugcu

SEQ ID NO: 1173492 - RNA, 19 nt, Artificial Sequence
  Description of Artificial Sequence: Synthetic oligonucleotide
auggcacuaguuacucgaa

SEQ ID NO: 1173493 - RNA, 19 nt, Artificial Sequence
  Description of Artificial Sequence: Synthetic oligonucleotide
cugcgccaauuuuggugac

SEQ ID NO: 1173494 - RNA, 19 nt, Artificial Sequence
  Description of Artificial Sequence: Synthetic oligonucleotide
aucaaccgauucugucaua

SEQ ID NO: 1173495 - RNA, 19 nt, Artificial Sequence
  Description of Artificial Sequence: Synthetic oligonucleotide
cggccagacuaauucgagg

SEQ ID NO: 1173496 - RNA, 19 nt, Artificial Sequence
  Description of Artificial Sequence: Synthetic oligonucleotide
ggacgguggaaucucuaua

SEQ ID NO: 1173497 - RNA, 19 nt, Artificial Sequence
  Description of Artificial Sequence: Synthetic oligonucleotide
ccuuagcuucaacucuaug

SEQ ID NO: 1173498 - RNA, 19 nt, Artificial Sequence
  Description of Artificial Sequence: Synthetic oligonucleotide
cagaaauccuuagcuucaa

SEQ ID NO: 1173499 - RNA, 19 nt, Artificial Sequence
  Description of Artificial Sequence: Synthetic oligonucleotide
caagacucugcgccaauuu

SEQ ID NO: 1173500 - RNA, 19 nt, Artificial Sequence
  Description of Artificial Sequence: Synthetic oligonucleotide
gggcuaauuggaacaccac

SEQ ID NO: 1173501 - RNA, 19 nt, Artificial Sequence
  Description of Artificial Sequence: Synthetic oligonucleotide
caaccgauucugucauaua

SEQ ID NO: 1173502 - RNA, 19 nt, Artificial Sequence
  Description of Artificial Sequence: Synthetic oligonucleotide
ccagauaguagaacguuuu

SEQ ID NO: 1173503 - RNA, 19 nt, Artificial Sequence
  Description of Artificial Sequence: Synthetic oligonucleotide
uguccggggcugcgaucaa

SEQ ID NO: 1173504 - RNA, 19 nt, Artificial Sequence
  Description of Artificial Sequence: Synthetic oligonucleotide
gaccugcuuuggaacaccu

SEQ ID NO: 1173505 - RNA, 19 nt, Artificial Sequence
  Description of Artificial Sequence: Synthetic oligonucleotide
cuacggcgcuggcguuugg

SEQ ID NO: 1173506 - RNA, 19 nt, Artificial Sequence
  Description of Artificial Sequence: Synthetic oligonucleotide
ccggggcugcgaucaaccg

SEQ ID NO: 1173507 - RNA, 19 nt, Artificial Sequence
  Description of Artificial Sequence: Synthetic oligonucleotide
ggggcugcgaucaaccgau

SEQ ID NO: 1173508 - RNA, 19 nt, Artificial Sequence
  Description of Artificial Sequence: Synthetic oligonucleotide
cuguacccaagaugcuggu

SEQ ID NO: 1173509 - RNA, 19 nt, Artificial Sequence
  Description of Artificial Sequence: Synthetic oligonucleotide
agggacgguggaaucucua

SEQ ID NO: 1173510 - RNA, 19 nt, Artificial Sequence
  Description of Artificial Sequence: Synthetic oligonucleotide
accugcuuuggaacaccuu

SEQ ID NO: 1173511 - RNA, 19 nt, Artificial Sequence
  Description of Artificial Sequence: Synthetic oligonucleotide
guccggggcugcgaucaac

SEQ ID NO: 1173512 - RNA, 19 nt, Artificial Sequence
  Description of Artificial Sequence: Synthetic oligonucleotide
gcgcuggcguuugguacgg

SEQ ID NO: 1173513 - RNA, 19 nt, Artificial Sequence
  Description of Artificial Sequence: Synthetic oligonucleotide
augucccaagugaguucga

SEQ ID NO: 1173514 - RNA, 19 nt, Artificial Sequence
  Description of Artificial Sequence: Synthetic oligonucleotide
caccauucaucaccucuuu

SEQ ID NO: 1173515 - RNA, 19 nt, Artificial Sequence
  Description of Artificial Sequence: Synthetic oligonucleotide
ccccgcacuucuuuucaga

SEQ ID NO: 1173516 - RNA, 19 nt, Artificial Sequence
  Description of Artificial Sequence: Synthetic oligonucleotide
guguuacuauggaugucuu

SEQ ID NO: 1173517 - RNA, 19 nt, Artificial Sequence
  Description of Artificial Sequence: Synthetic oligonucleotide
ccagaccaucaugaaucuc

SEQ ID NO: 1173518 - RNA, 19 nt, Artificial Sequence
  Description of Artificial Sequence: Synthetic oligonucleotide
cagggacgguggaaucucu

SEQ ID NO: 1173519 - RNA, 19 nt, Artificial Sequence
  Description of Artificial Sequence: Synthetic oligonucleotide
caucucggccagacuaauu

SEQ ID NO: 1173520 - RNA, 19 nt, Artificial Sequence
  Description of Artificial Sequence: Synthetic oligonucleotide
gaacucuaucugaguucau

SEQ ID NO: 1173521 - RNA, 19 nt, Artificial Sequence
  Description of Artificial Sequence: Synthetic oligonucleotide
caucaacaagucguaccuu

SEQ ID NO: 1173522 - RNA, 19 nt, Artificial Sequence
  Description of Artificial Sequence: Synthetic oligonucleotide
cccaagugaguucgacaaa

SEQ ID NO: 1173523 - RNA, 19 nt, Artificial Sequence
  Description of Artificial Sequence: Synthetic oligonucleotide
cuaauucgaggugcuccuu

SEQ ID NO: 1173524 - RNA, 19 nt, Artificial Sequence
  Description of Artificial Sequence: Synthetic oligonucleotide
ggaugucuugggagaucaa

SEQ ID NO: 1173525 - RNA, 19 nt, Artificial Sequence
  Description of Artificial Sequence: Synthetic oligonucleotide
cggggcugcgaucaaccga

SEQ ID NO: 1173526 - RNA, 19 nt, Artificial Sequence
  Description of Artificial Sequence: Synthetic oligonucleotide
gucguaccuuaggugcuuu

SEQ ID NO: 1173527 - RNA, 19 nt, Artificial Sequence
  Description of Artificial Sequence: Synthetic oligonucleotide
ggcaggauuugggcuaauu

SEQ ID NO: 1173528 - RNA, 19 nt, Artificial Sequence
  Description of Artificial Sequence: Synthetic oligonucleotide
ggcagacaacauuguccuu

SEQ ID NO: 1173529 - RNA, 19 nt, Artificial Sequence
  Description of Artificial Sequence: Synthetic oligonucleotide
cugcaacuuguaggguauu

SEQ ID NO: 1173530 - RNA, 19 nt, Artificial Sequence
  Description of Artificial Sequence: Synthetic oligonucleotide
cacaaacguuaggcaggau

SEQ ID NO: 1173531 - RNA, 19 nt, Artificial Sequence
  Description of Artificial Sequence: Synthetic oligonucleotide
cgcuggcguuugguacggu

SEQ ID NO: 1173532 - RNA, 19 nt, Artificial Sequence
  Description of Artificial Sequence: Synthetic oligonucleotide
aaaguaaugaaucuugggg

SEQ ID NO: 1173533 - RNA, 19 nt, Artificial Sequence
  Description of Artificial Sequence: Synthetic oligonucleotide
aauuugaaggccuggguac

SEQ ID NO: 1173534 - RNA, 19 nt, Artificial Sequence
  Description of Artificial Sequence: Synthetic oligonucleotide
uguuauuugucccaggaag

SEQ ID NO: 1173535 - RNA, 19 nt, Artificial Sequence
  Description of Artificial Sequence: Synthetic oligonucleotide
ugaaaugguacccuggagg

SEQ ID NO: 1173536 - RNA, 19 nt, Artificial Sequence
  Description of Artificial Sequence: Synthetic oligonucleotide
aacaccagcauguaacugg

SEQ ID NO: 1173537 - RNA, 19 nt, Artificial Sequence
  Description of Artificial Sequence: Synthetic oligonucleotide
gaugauacaagcaugcucc

SEQ ID NO: 1173538 - RNA, 19 nt, Artificial Sequence
  Description of Artificial Sequence: Synthetic oligonucleotide
aaggugguguuauuugucc

SEQ ID NO: 1173539 - RNA, 19 nt, Artificial Sequence
  Description of Artificial Sequence: Synthetic oligonucleotide
aaaccucuaacccucuuuc

SEQ ID NO: 1173540 - RNA, 19 nt, Artificial Sequence
  Description of Artificial Sequence: Synthetic oligonucleotide
uauagagauuuccugagca

SEQ ID NO: 1173541 - RNA, 19 nt, Artificial Sequence
  Description of Artificial Sequence: Synthetic oligonucleotide
gaaaugguacccuggaggg

SEQ ID NO: 1173542 - RNA, 19 nt, Artificial Sequence
  Description of Artificial Sequence: Synthetic oligonucleotide
agaguggucucccagauag

SEQ ID NO: 1173543 - RNA, 19 nt, Artificial Sequence
  Description of Artificial Sequence: Synthetic oligonucleotide
aaagccaccauuccacauc

SEQ ID NO: 1173544 - RNA, 19 nt, Artificial Sequence
  Description of Artificial Sequence: Synthetic oligonucleotide
ugagaaaagugucuggucu

SEQ ID NO: 1173545 - RNA, 19 nt, Artificial Sequence
  Description of Artificial Sequence: Synthetic oligonucleotide
uuaugcagguagaagaggc

SEQ ID NO: 1173546 - RNA, 19 nt, Artificial Sequence
  Description of Artificial Sequence: Synthetic oligonucleotide
aaagaaugaagaguggucu

SEQ ID NO: 1173547 - RNA, 19 nt, Artificial Sequence
  Description of Artificial Sequence: Synthetic oligonucleotide
ucaacaagaguguugacaa

SEQ ID NO: 1173548 - RNA, 19 nt, Artificial Sequence
  Description of Artificial Sequence: Synthetic oligonucleotide
augucuuuuggccagauga

SEQ ID NO: 1173549 - RNA, 19 nt, Artificial Sequence
  Description of Artificial Sequence: Synthetic oligonucleotide
guagcuagaauuugaaggc

SEQ ID NO: 1173550 - RNA, 19 nt, Artificial Sequence
  Description of Artificial Sequence: Synthetic oligonucleotide
agaugauacaagcaugcuc

SEQ ID NO: 1173551 - RNA, 19 nt, Artificial Sequence
  Description of Artificial Sequence: Synthetic oligonucleotide
aauccguguguguagaugu

SEQ ID NO: 1173552 - RNA, 19 nt, Artificial Sequence
  Description of Artificial Sequence: Synthetic oligonucleotide
ugccccaguagucaaagcg

SEQ ID NO: 1173553 - RNA, 19 nt, Artificial Sequence
  Description of Artificial Sequence: Synthetic oligonucleotide
uaagugcaugauuuggugg

SEQ ID NO: 1173554 - RNA, 19 nt, Artificial Sequence
  Description of Artificial Sequence: Synthetic oligonucleotide
gagaauggagcccacacug

SEQ ID NO: 1173555 - RNA, 19 nt, Artificial Sequence
  Description of Artificial Sequence: Synthetic oligonucleotide
uuguauagagauuuccuga

SEQ ID NO: 1173556 - RNA, 19 nt, Artificial Sequence
  Description of Artificial Sequence: Synthetic oligonucleotide
aguguaacccaucagggca

SEQ ID NO: 1173557 - RNA, 19 nt, Artificial Sequence
  Description of Artificial Sequence: Synthetic oligonucleotide
guuagacccagccugagcc

SEQ ID NO: 1173558 - RNA, 19 nt, Artificial Sequence
  Description of Artificial Sequence: Synthetic oligonucleotide
acauuguauagagauuucc

SEQ ID NO: 1173559 - RNA, 19 nt, Artificial Sequence
  Description of Artificial Sequence: Synthetic oligonucleotide
agcccaaagaaugauuucc

SEQ ID NO: 1173560 - RNA, 19 nt, Artificial Sequence
  Description of Artificial Sequence: Synthetic oligonucleotide
ucuuuuggccagaugauac

SEQ ID NO: 1173561 - RNA, 19 nt, Artificial Sequence
  Description of Artificial Sequence: Synthetic oligonucleotide
auuuggugggaguugcccc

SEQ ID NO: 1173562 - RNA, 19 nt, Artificial Sequence
  Description of Artificial Sequence: Synthetic oligonucleotide
agaagcuaguucaagaauc

SEQ ID NO: 1173563 - RNA, 19 nt, Artificial Sequence
  Description of Artificial Sequence: Synthetic oligonucleotide
agugucuggucucacugcc

SEQ ID NO: 1173564 - RNA, 19 nt, Artificial Sequence
  Description of Artificial Sequence: Synthetic oligonucleotide
aagugucuggucucacugc

SEQ ID NO: 1173565 - RNA, 19 nt, Artificial Sequence
  Description of Artificial Sequence: Synthetic oligonucleotide
acaauguguaccucccagc

SEQ ID NO: 1173566 - RNA, 19 nt, Artificial Sequence
  Description of Artificial Sequence: Synthetic oligonucleotide
agucaaagcggccgggucc

SEQ ID NO: 1173567 - RNA, 19 nt, Artificial Sequence
  Description of Artificial Sequence: Synthetic oligonucleotide
aggucaaccggucagacca

SEQ ID NO: 1173568 - RNA, 19 nt, Artificial Sequence
  Description of Artificial Sequence: Synthetic oligonucleotide
gaagcuaugggcaggcugg

SEQ ID NO: 1173569 - RNA, 19 nt, Artificial Sequence
  Description of Artificial Sequence: Synthetic oligonucleotide
aacgcucuggcagacgugc

SEQ ID NO: 1173570 - RNA, 19 nt, Artificial Sequence
  Description of Artificial Sequence: Synthetic oligonucleotide
uguguguagauguugccca

SEQ ID NO: 1173571 - RNA, 19 nt, Artificial Sequence
  Description of Artificial Sequence: Synthetic oligonucleotide
accuaacugacauggacuc

SEQ ID NO: 1173572 - RNA, 19 nt, Artificial Sequence
  Description of Artificial Sequence: Synthetic oligonucleotide
augauuuccuucuagccga

SEQ ID NO: 1173573 - RNA, 19 nt, Artificial Sequence
  Description of Artificial Sequence: Synthetic oligonucleotide
agccucagugcuuuuaaac

SEQ ID NO: 1173574 - RNA, 19 nt, Artificial Sequence
  Description of Artificial Sequence: Synthetic oligonucleotide
agacgugccacauucacca

SEQ ID NO: 1173575 - RNA, 19 nt, Artificial Sequence
  Description of Artificial Sequence: Synthetic oligonucleotide
uccacacauauccagggca

SEQ ID NO: 1173576 - RNA, 19 nt, Artificial Sequence
  Description of Artificial Sequence: Synthetic oligonucleotide
caagaagagguuaaucaac

SEQ ID NO: 1173577 - RNA, 19 nt, Artificial Sequence
  Description of Artificial Sequence: Synthetic oligonucleotide
cuaacugacauggacucgg

SEQ ID NO: 1173578 - RNA, 19 nt, Artificial Sequence
  Description of Artificial Sequence: Synthetic oligonucleotide
gcuuuuaaaccucuaaccc

SEQ ID NO: 1173579 - RNA, 19 nt, Artificial Sequence
  Description of Artificial Sequence: Synthetic oligonucleotide
uacccaacugaccccaggg

SEQ ID NO: 1173580 - RNA, 19 nt, Artificial Sequence
  Description of Artificial Sequence: Synthetic oligonucleotide
aagaagagguuaaucaaca

SEQ ID NO: 1173581 - RNA, 19 nt, Artificial Sequence
  Description of Artificial Sequence: Synthetic oligonucleotide
cuggaccuaacugacaugg

SEQ ID NO: 1173582 - RNA, 19 nt, Artificial Sequence
  Description of Artificial Sequence: Synthetic oligonucleotide
acaagaagagguuaaucaa

SEQ ID NO: 1173583 - RNA, 19 nt, Artificial Sequence
  Description of Artificial Sequence: Synthetic oligonucleotide
augauuuggugggaguugc

SEQ ID NO: 1173584 - RNA, 19 nt, Artificial Sequence
  Description of Artificial Sequence: Synthetic oligonucleotide
uccucuuaugucuuuuggc

SEQ ID NO: 1173585 - RNA, 19 nt, Artificial Sequence
  Description of Artificial Sequence: Synthetic oligonucleotide
ucauguggcaacauagcau

SEQ ID NO: 1173586 - RNA, 19 nt, Artificial Sequence
  Description of Artificial Sequence: Synthetic oligonucleotide
caauguguaccucccagcc

SEQ ID NO: 1173587 - RNA, 19 nt, Artificial Sequence
  Description of Artificial Sequence: Synthetic oligonucleotide
aggaaugguaaaauucugg

SEQ ID NO: 1173588 - RNA, 19 nt, Artificial Sequence
  Description of Artificial Sequence: Synthetic oligonucleotide
ugagagguuuggcaugcag

SEQ ID NO: 1173589 - RNA, 19 nt, Artificial Sequence
  Description of Artificial Sequence: Synthetic oligonucleotide
ugaguaagugcaugauuug

SEQ ID NO: 1173590 - RNA, 19 nt, Artificial Sequence
  Description of Artificial Sequence: Synthetic oligonucleotide
gaaagaaugaagagugguc

SEQ ID NO: 1173591 - RNA, 19 nt, Artificial Sequence
  Description of Artificial Sequence: Synthetic oligonucleotide
guaaacugaagcccaaaga

SEQ ID NO: 1173592 - RNA, 19 nt, Artificial Sequence
  Description of Artificial Sequence: Synthetic oligonucleotide
ugaggauucguuagaccca

SEQ ID NO: 1173593 - RNA, 19 nt, Artificial Sequence
  Description of Artificial Sequence: Synthetic oligonucleotide
aauguguaccucccagcca

SEQ ID NO: 1173594 - RNA, 19 nt, Artificial Sequence
  Description of Artificial Sequence: Synthetic oligonucleotide
ucaaccggucagaccaugg

SEQ ID NO: 1173595 - RNA, 19 nt, Artificial Sequence
  Description of Artificial Sequence: Synthetic oligonucleotide
ugacaaggcagacuccaca

SEQ ID NO: 1173596 - RNA, 19 nt, Artificial Sequence
  Description of Artificial Sequence: Synthetic oligonucleotide
accagcauguaacuggaga

SEQ ID NO: 1173597 - RNA, 19 nt, Artificial Sequence
  Description of Artificial Sequence: Synthetic oligonucleotide
gaauuugaaggccugggua

SEQ ID NO: 1173598 - RNA, 19 nt, Artificial Sequence
  Description of Artificial Sequence: Synthetic oligonucleotide
agacuccacacauauccag

SEQ ID NO: 1173599 - RNA, 19 nt, Artificial Sequence
  Description of Artificial Sequence: Synthetic oligonucleotide
acgugccacauucaccagc

SEQ ID NO: 1173600 - RNA, 19 nt, Artificial Sequence
  Description of Artificial Sequence: Synthetic oligonucleotide
aaccggucagaccauggca

SEQ ID NO: 1173601 - RNA, 19 nt, Artificial Sequence
  Description of Artificial Sequence: Synthetic oligonucleotide
cacaauguguaccucccag

SEQ ID NO: 1173602 - RNA, 19 nt, Artificial Sequence
  Description of Artificial Sequence: Synthetic oligonucleotide
aacauagcauuucuuccuu

SEQ ID NO: 1173603 - RNA, 19 nt, Artificial Sequence
  Description of Artificial Sequence: Synthetic oligonucleotide
uggacucggagccuccuag

SEQ ID NO: 1173604 - RNA, 19 nt, Artificial Sequence
  Description of Artificial Sequence: Synthetic oligonucleotide
uuacccaacugaccccagg

SEQ ID NO: 1173605 - RNA, 19 nt, Artificial Sequence
  Description of Artificial Sequence: Synthetic oligonucleotide
ugaugggcagggcucaaca

SEQ ID NO: 1173606 - RNA, 19 nt, Artificial Sequence
  Description of Artificial Sequence: Synthetic oligonucleotide
gauuuggugggaguugccc

SEQ ID NO: 1173607 - RNA, 19 nt, Artificial Sequence
  Description of Artificial Sequence: Synthetic oligonucleotide
ccucuuaugucuuuuggcc

SEQ ID NO: 1173608 - RNA, 19 nt, Artificial Sequence
  Description of Artificial Sequence: Synthetic oligonucleotide
agcuaguucaagaauccag

SEQ ID NO: 1173609 - RNA, 19 nt, Artificial Sequence
  Description of Artificial Sequence: Synthetic oligonucleotide
acccaacugaccccagggc

SEQ ID NO: 1173610 - RNA, 19 nt, Artificial Sequence
  Description of Artificial Sequence: Synthetic oligonucleotide
cauccuuacccaacugacc

SEQ ID NO: 1173611 - RNA, 19 nt, Artificial Sequence
  Description of Artificial Sequence: Synthetic oligonucleotide
uuugagccacggaaccucc

SEQ ID NO: 1173612 - RNA, 19 nt, Artificial Sequence
  Description of Artificial Sequence: Synthetic oligonucleotide
cagcucguuaugcagguag

SEQ ID NO: 1173613 - RNA, 19 nt, Artificial Sequence
  Description of Artificial Sequence: Synthetic oligonucleotide
uuuccuucuagccgacagu

SEQ ID NO: 1173614 - RNA, 19 nt, Artificial Sequence
  Description of Artificial Sequence: Synthetic oligonucleotide
uucguuagacccagccuga

SEQ ID NO: 1173615 - RNA, 19 nt, Artificial Sequence
  Description of Artificial Sequence: Synthetic oligonucleotide
ugaaggccuggguacaaga

SEQ ID NO: 1173616 - RNA, 19 nt, Artificial Sequence
  Description of Artificial Sequence: Synthetic oligonucleotide
acucggagccuccuagagg

SEQ ID NO: 1173617 - RNA, 19 nt, Artificial Sequence
  Description of Artificial Sequence: Synthetic oligonucleotide
uaauccguguguguagaug

SEQ ID NO: 1173618 - RNA, 19 nt, Artificial Sequence
  Description of Artificial Sequence: Synthetic oligonucleotide
ucagccuauuugaggauuc

SEQ ID NO: 1173619 - RNA, 19 nt, Artificial Sequence
  Description of Artificial Sequence: Synthetic oligonucleotide
gcagcuaggagacagcuca

SEQ ID NO: 1173620 - RNA, 19 nt, Artificial Sequence
  Description of Artificial Sequence: Synthetic oligonucleotide
aagguuguucauguggcaa

SEQ ID NO: 1173621 - RNA, 19 nt, Artificial Sequence
  Description of Artificial Sequence: Synthetic oligonucleotide
caggaaugguaaaauucug

SEQ ID NO: 1173622 - RNA, 19 nt, Artificial Sequence
  Description of Artificial Sequence: Synthetic oligonucleotide
uggccagaugauacaagca

SEQ ID NO: 1173623 - RNA, 19 nt, Artificial Sequence
  Description of Artificial Sequence: Synthetic oligonucleotide
ggauucguuagacccagcc

SEQ ID NO: 1173624 - RNA, 19 nt, Artificial Sequence
  Description of Artificial Sequence: Synthetic oligonucleotide
uguugacaaggcagacucc

SEQ ID NO: 1173625 - RNA, 19 nt, Artificial Sequence
  Description of Artificial Sequence: Synthetic oligonucleotide
uagcuagaauuugaaggcc

SEQ ID NO: 1173626 - RNA, 19 nt, Artificial Sequence
  Description of Artificial Sequence: Synthetic oligonucleotide
cucaacaagaguguugaca

SEQ ID NO: 1173627 - RNA, 19 nt, Artificial Sequence
  Description of Artificial Sequence: Synthetic oligonucleotide
accggucagaccauggcac

SEQ ID NO: 1173628 - RNA, 19 nt, Artificial Sequence
  Description of Artificial Sequence: Synthetic oligonucleotide
agcaggucagguacaacac

SEQ ID NO: 1173629 - RNA, 19 nt, Artificial Sequence
  Description of Artificial Sequence: Synthetic oligonucleotide
caaugcauccaugcgcagg

SEQ ID NO: 1173630 - RNA, 19 nt, Artificial Sequence
  Description of Artificial Sequence: Synthetic oligonucleotide
gccucagugcuuuuaaacc

SEQ ID NO: 1173631 - RNA, 19 nt, Artificial Sequence
  Description of Artificial Sequence: Synthetic oligonucleotide
uucuagccgacagugaaau

SEQ ID NO: 1173632 - RNA, 19 nt, Artificial Sequence
  Description of Artificial Sequence: Synthetic oligonucleotide
cugagaaaagugucugguc

SEQ ID NO: 1173633 - RNA, 19 nt, Artificial Sequence
  Description of Artificial Sequence: Synthetic oligonucleotide
gugccaaugcauccaugcg

SEQ ID NO: 1173634 - RNA, 19 nt, Artificial Sequence
  Description of Artificial Sequence: Synthetic oligonucleotide
ugcugagagguuuggcaug

SEQ ID NO: 1173635 - RNA, 19 nt, Artificial Sequence
  Description of Artificial Sequence: Synthetic oligonucleotide
guggccuaggaaaaguagc

SEQ ID NO: 1173636 - RNA, 19 nt, Artificial Sequence
  Description of Artificial Sequence: Synthetic oligonucleotide
guugacaaggcagacucca

SEQ ID NO: 1173637 - RNA, 19 nt, Artificial Sequence
  Description of Artificial Sequence: Synthetic oligonucleotide
ugacaggaaugguaaaauu

SEQ ID NO: 1173638 - RNA, 19 nt, Artificial Sequence
  Description of Artificial Sequence: Synthetic oligonucleotide
guucauguggcaacauagc

SEQ ID NO: 1173639 - RNA, 19 nt, Artificial Sequence
  Description of Artificial Sequence: Synthetic oligonucleotide
cagacgugccacauucacc

SEQ ID NO: 1173640 - RNA, 19 nt, Artificial Sequence
  Description of Artificial Sequence: Synthetic oligonucleotide
ugugccuguggccuaggaa

SEQ ID NO: 1173641 - RNA, 19 nt, Artificial Sequence
  Description of Artificial Sequence: Synthetic oligonucleotide
cauucaccagcccuccaag

SEQ ID NO: 1173642 - RNA, 19 nt, Artificial Sequence
  Description of Artificial Sequence: Synthetic oligonucleotide
caacgggaugcccuggacc

SEQ ID NO: 1173643 - RNA, 19 nt, Artificial Sequence
  Description of Artificial Sequence: Synthetic oligonucleotide
ugguguuauuugucccagg

SEQ ID NO: 1173644 - RNA, 19 nt, Artificial Sequence
  Description of Artificial Sequence: Synthetic oligonucleotide
gguguuauuugucccagga

SEQ ID NO: 1173645 - RNA, 19 nt, Artificial Sequence
  Description of Artificial Sequence: Synthetic oligonucleotide
gcaguguaacccaucaggg

SEQ ID NO: 1173646 - RNA, 19 nt, Artificial Sequence
  Description of Artificial Sequence: Synthetic oligonucleotide
uccaagcagugccaaugca

SEQ ID NO: 1173647 - RNA, 19 nt, Artificial Sequence
  Description of Artificial Sequence: Synthetic oligonucleotide
cucuuaugucuuuuggcca

SEQ ID NO: 1173648 - RNA, 19 nt, Artificial Sequence
  Description of Artificial Sequence: Synthetic oligonucleotide
aggcaggucaaccggucag

SEQ ID NO: 1173649 - RNA, 19 nt, Artificial Sequence
  Description of Artificial Sequence: Synthetic oligonucleotide
caguagucaaagcggccgg

SEQ ID NO: 1173650 - RNA, 19 nt, Artificial Sequence
  Description of Artificial Sequence: Synthetic oligonucleotide
uggcacaugaagaggugau

SEQ ID NO: 1173651 - RNA, 19 nt, Artificial Sequence
  Description of Artificial Sequence: Synthetic oligonucleotide
ugcccuaccuuugagccac

SEQ ID NO: 1173652 - RNA, 19 nt, Artificial Sequence
  Description of Artificial Sequence: Synthetic oligonucleotide
aggagccggguguacacag

SEQ ID NO: 1173653 - RNA, 19 nt, Artificial Sequence
  Description of Artificial Sequence: Synthetic oligonucleotide
uuagacccagccugagcca

SEQ ID NO: 1173654 - RNA, 19 nt, Artificial Sequence
  Description of Artificial Sequence: Synthetic oligonucleotide
ccugcccuaccuuugagcc

SEQ ID NO: 1173655 - RNA, 19 nt, Artificial Sequence
  Description of Artificial Sequence: Synthetic oligonucleotide
caugauuuggugggaguug

SEQ ID NO: 1173656 - RNA, 19 nt, Artificial Sequence
  Description of Artificial Sequence: Synthetic oligonucleotide
ucccagauaggaaguccca

SEQ ID NO: 1173657 - RNA, 19 nt, Artificial Sequence
  Description of Artificial Sequence: Synthetic oligonucleotide
ggaccuaacugacauggac

SEQ ID NO: 1173658 - RNA, 19 nt, Artificial Sequence
  Description of Artificial Sequence: Synthetic oligonucleotide
gaaggugguguuauuuguc

SEQ ID NO: 1173659 - RNA, 19 nt, Artificial Sequence
  Description of Artificial Sequence: Synthetic oligonucleotide
uugacaaggcagacuccac

SEQ ID NO: 1173660 - RNA, 19 nt, Artificial Sequence
  Description of Artificial Sequence: Synthetic oligonucleotide
aagcuaguucaagaaucca

SEQ ID NO: 1173661 - RNA, 19 nt, Artificial Sequence
  Description of Artificial Sequence: Synthetic oligonucleotide
gagagggguagcuagaauu

SEQ ID NO: 1173662 - RNA, 19 nt, Artificial Sequence
  Description of Artificial Sequence: Synthetic oligonucleotide
caggguaaacugaagccca

SEQ ID NO: 1173663 - RNA, 19 nt, Artificial Sequence
  Description of Artificial Sequence: Synthetic oligonucleotide
ggaagcuaugggcaggcug

SEQ ID NO: 1173664 - RNA, 19 nt, Artificial Sequence
  Description of Artificial Sequence: Synthetic oligonucleotide
aguguugacaaggcagacu

SEQ ID NO: 1173665 - RNA, 19 nt, Artificial Sequence
  Description of Artificial Sequence: Synthetic oligonucleotide
cacauuguauagagauuuc

SEQ ID NO: 1173666 - RNA, 19 nt, Artificial Sequence
  Description of Artificial Sequence: Synthetic oligonucleotide
uaggcaggucaaccgguca

SEQ ID NO: 1173667 - RNA, 19 nt, Artificial Sequence
  Description of Artificial Sequence: Synthetic oligonucleotide
guacaagaagagguuaauc

SEQ ID NO: 1173668 - RNA, 19 nt, Artificial Sequence
  Description of Artificial Sequence: Synthetic oligonucleotide
uaacugacauggacucgga

SEQ ID NO: 1173669 - RNA, 19 nt, Artificial Sequence
  Description of Artificial Sequence: Synthetic oligonucleotide
agcuagaauuugaaggccu

SEQ ID NO: 1173670 - RNA, 19 nt, Artificial Sequence
  Description of Artificial Sequence: Synthetic oligonucleotide
cacacugaguaagugcaug

SEQ ID NO: 1173671 - RNA, 19 nt, Artificial Sequence
  Description of Artificial Sequence: Synthetic oligonucleotide
gguuaaucaacaggaaaga

SEQ ID NO: 1173672 - RNA, 19 nt, Artificial Sequence
  Description of Artificial Sequence: Synthetic oligonucleotide
agcccuacuccacgggcuc

SEQ ID NO: 1173673 - RNA, 19 nt, Artificial Sequence
  Description of Artificial Sequence: Synthetic oligonucleotide
cuuuuggccagaugauaca

SEQ ID NO: 1173674 - RNA, 19 nt, Artificial Sequence
  Description of Artificial Sequence: Synthetic oligonucleotide
gcauguaacuggagaaugg

SEQ ID NO: 1173675 - RNA, 19 nt, Artificial Sequence
  Description of Artificial Sequence: Synthetic oligonucleotide
cuccacacauauccagggc

SEQ ID NO: 1173676 - RNA, 19 nt, Artificial Sequence
  Description of Artificial Sequence: Synthetic oligonucleotide
ugauacaagcaugcuccac

SEQ ID NO: 1173677 - RNA, 19 nt, Artificial Sequence
  Description of Artificial Sequence: Synthetic oligonucleotide
uaacccucuuuccuaccuc

SEQ ID NO: 1173678 - RNA, 19 nt, Artificial Sequence
  Description of Artificial Sequence: Synthetic oligonucleotide
augauacaagcaugcucca

SEQ ID NO: 1173679 - RNA, 19 nt, Artificial Sequence
  Description of Artificial Sequence: Synthetic oligonucleotide
uccuucuagccgacaguga

SEQ ID NO: 1173680 - RNA, 19 nt, Artificial Sequence
  Description of Artificial Sequence: Synthetic oligonucleotide
caacauagcauuucuuccu

SEQ ID NO: 1173681 - RNA, 19 nt, Artificial Sequence
  Description of Artificial Sequence: Synthetic oligonucleotide
ccaguagucaaagcggccg

SEQ ID NO: 1173682 - RNA, 19 nt, Artificial Sequence
  Description of Artificial Sequence: Synthetic oligonucleotide
ccacacaauguguaccucc

SEQ ID NO: 1173683 - RNA, 19 nt, Artificial Sequence
  Description of Artificial Sequence: Synthetic oligonucleotide
ugauuuccuucuagccgac

SEQ ID NO: 1173684 - RNA, 19 nt, Artificial Sequence
  Description of Artificial Sequence: Synthetic oligonucleotide
cugaggccugaauccaaag

SEQ ID NO: 1173685 - RNA, 19 nt, Artificial Sequence
  Description of Artificial Sequence: Synthetic oligonucleotide
guguaacccaucagggcag

SEQ ID NO: 1173686 - RNA, 19 nt, Artificial Sequence
  Description of Artificial Sequence: Synthetic oligonucleotide
uggaccuaacugacaugga

SEQ ID NO: 1173687 - RNA, 19 nt, Artificial Sequence
  Description of Artificial Sequence: Synthetic oligonucleotide
cucggagccuccuagaggu

SEQ ID NO: 1173688 - RNA, 19 nt, Artificial Sequence
  Description of Artificial Sequence: Synthetic oligonucleotide
ucuagccgacagugaaaug

SEQ ID NO: 1173689 - RNA, 19 nt, Artificial Sequence
  Description of Artificial Sequence: Synthetic oligonucleotide
ggucagguacaacaccagc

SEQ ID NO: 1173690 - RNA, 19 nt, Artificial Sequence
  Description of Artificial Sequence: Synthetic oligonucleotide
gagggguagcuagaauuug

SEQ ID NO: 1173691 - RNA, 19 nt, Artificial Sequence
  Description of Artificial Sequence: Synthetic oligonucleotide
cacaugaagaggugauaca

SEQ ID NO: 1173692 - RNA, 19 nt, Artificial Sequence
  Description of Artificial Sequence: Synthetic oligonucleotide
ggugguguuauuuguccca

SEQ ID NO: 1173693 - RNA, 19 nt, Artificial Sequence
  Description of Artificial Sequence: Synthetic oligonucleotide
gaaugacaggaaugguaaa

SEQ ID NO: 1173694 - RNA, 19 nt, Artificial Sequence
  Description of Artificial Sequence: Synthetic oligonucleotide
agggcuaauccgugugugu

SEQ ID NO: 1173695 - RNA, 19 nt, Artificial Sequence
  Description of Artificial Sequence: Synthetic oligonucleotide
gaccuaacugacauggacu

SEQ ID NO: 1173696 - RNA, 19 nt, Artificial Sequence
  Description of Artificial Sequence: Synthetic oligonucleotide
ccauccuuacccaacugac

SEQ ID NO: 1173697 - RNA, 19 nt, Artificial Sequence
  Description of Artificial Sequence: Synthetic oligonucleotide
ggcuaauccguguguguag

SEQ ID NO: 1173698 - RNA, 19 nt, Artificial Sequence
  Description of Artificial Sequence: Synthetic oligonucleotide
caggucaaccggucagacc

SEQ ID NO: 1173699 - RNA, 19 nt, Artificial Sequence
  Description of Artificial Sequence: Synthetic oligonucleotide
ugguaaaauucugguugcu

SEQ ID NO: 1173700 - RNA, 19 nt, Artificial Sequence
  Description of Artificial Sequence: Synthetic oligonucleotide
uccccaacgcucuggcaga

SEQ ID NO: 1173701 - RNA, 19 nt, Artificial Sequence
  Description of Artificial Sequence: Synthetic oligonucleotide
agcagugccaaugcaucca

SEQ ID NO: 1173702 - RNA, 19 nt, Artificial Sequence
  Description of Artificial Sequence: Synthetic oligonucleotide
gaaaagugucuggucucac

SEQ ID NO: 1173703 - RNA, 19 nt, Artificial Sequence
  Description of Artificial Sequence: Synthetic oligonucleotide
cuccuagaggucccugccc

SEQ ID NO: 1173704 - RNA, 19 nt, Artificial Sequence
  Description of Artificial Sequence: Synthetic oligonucleotide
aagaguggucucccagaua

SEQ ID NO: 1173705 - RNA, 19 nt, Artificial Sequence
  Description of Artificial Sequence: Synthetic oligonucleotide
ugauggcucuccagccggc

SEQ ID NO: 1173706 - RNA, 19 nt, Artificial Sequence
  Description of Artificial Sequence: Synthetic oligonucleotide
agaggugauacagcacaga

SEQ ID NO: 1173707 - RNA, 19 nt, Artificial Sequence
  Description of Artificial Sequence: Synthetic oligonucleotide
uggcagcuaggagacagcu

SEQ ID NO: 1173708 - RNA, 19 nt, Artificial Sequence
  Description of Artificial Sequence: Synthetic oligonucleotide
gucaaagcggccggguccc

SEQ ID NO: 1173709 - RNA, 19 nt, Artificial Sequence
  Description of Artificial Sequence: Synthetic oligonucleotide
ccagauaggaagucccaug

SEQ ID NO: 1173710 - RNA, 19 nt, Artificial Sequence
  Description of Artificial Sequence: Synthetic oligonucleotide
gugcaguguaacccaucag

SEQ ID NO: 1173711 - RNA, 19 nt, Artificial Sequence
  Description of Artificial Sequence: Synthetic oligonucleotide
agggguagcuagaauuuga

SEQ ID NO: 1173712 - RNA, 19 nt, Artificial Sequence
  Description of Artificial Sequence: Synthetic oligonucleotide
cagauaggaagucccaugu

SEQ ID NO: 1173713 - RNA, 19 nt, Artificial Sequence
  Description of Artificial Sequence: Synthetic oligonucleotide
agagggguagcuagaauuu

SEQ ID NO: 1173714 - RNA, 19 nt, Artificial Sequence
  Description of Artificial Sequence: Synthetic oligonucleotide
ugcaugcugacugcaggaa

SEQ ID NO: 1173715 - RNA, 19 nt, Artificial Sequence
  Description of Artificial Sequence: Synthetic oligonucleotide
cagccuauuugaggauucg

SEQ ID NO: 1173716 - RNA, 19 nt, Artificial Sequence
  Description of Artificial Sequence: Synthetic oligonucleotide
uggcaacauagcauuucuu

SEQ ID NO: 1173717 - RNA, 19 nt, Artificial Sequence
  Description of Artificial Sequence: Synthetic oligonucleotide
cuagaggucccugcccuac

SEQ ID NO: 1173718 - RNA, 19 nt, Artificial Sequence
  Description of Artificial Sequence: Synthetic oligonucleotide
agagguuaaucaacaggaa

SEQ ID NO: 1173719 - RNA, 19 nt, Artificial Sequence
  Description of Artificial Sequence: Synthetic oligonucleotide
ucccugcccuaccuuugag

SEQ ID NO: 1173720 - RNA, 19 nt, Artificial Sequence
  Description of Artificial Sequence: Synthetic oligonucleotide
guggcaacauagcauuucu

SEQ ID NO: 1173721 - RNA, 19 nt, Artificial Sequence
  Description of Artificial Sequence: Synthetic oligonucleotide
aguuggcagggagaggggu

SEQ ID NO: 1173722 - RNA, 19 nt, Artificial Sequence
  Description of Artificial Sequence: Synthetic oligonucleotide
acauagcauuucuuccuuu

SEQ ID NO: 1173723 - RNA, 19 nt, Artificial Sequence
  Description of Artificial Sequence: Synthetic oligonucleotide
gacgugccacauucaccag

SEQ ID NO: 1173724 - RNA, 19 nt, Artificial Sequence
  Description of Artificial Sequence: Synthetic oligonucleotide
cuuacccaacugaccccag

SEQ ID NO: 1173725 - RNA, 19 nt, Artificial Sequence
  Description of Artificial Sequence: Synthetic oligonucleotide
caagguuguucauguggca

SEQ ID NO: 1173726 - RNA, 19 nt, Artificial Sequence
  Description of Artificial Sequence: Synthetic oligonucleotide
aagcggccggguccccaac

SEQ ID NO: 1173727 - RNA, 19 nt, Artificial Sequence
  Description of Artificial Sequence: Synthetic oligonucleotide
ucguuagacccagccugag

SEQ ID NO: 1173728 - RNA, 19 nt, Artificial Sequence
  Description of Artificial Sequence: Synthetic oligonucleotide
gcagacgugccacauucac

SEQ ID NO: 1173729 - RNA, 19 nt, Artificial Sequence
  Description of Artificial Sequence: Synthetic oligonucleotide
agcggccggguccccaacg

SEQ ID NO: 1173730 - RNA, 19 nt, Artificial Sequence
  Description of Artificial Sequence: Synthetic oligonucleotide
agccuauuugaggauucgu

SEQ ID NO: 1173731 - RNA, 19 nt, Artificial Sequence
  Description of Artificial Sequence: Synthetic oligonucleotide
caacaccagcauguaacug

SEQ ID NO: 1173732 - RNA, 19 nt, Artificial Sequence
  Description of Artificial Sequence: Synthetic oligonucleotide
gauggcucuccagccggcc

SEQ ID NO: 1173733 - RNA, 19 nt, Artificial Sequence
  Description of Artificial Sequence: Synthetic oligonucleotide
ggggcagagaagcuaguuc

SEQ ID NO: 1173734 - RNA, 19 nt, Artificial Sequence
  Description of Artificial Sequence: Synthetic oligonucleotide
aggucagguacaacaccag

SEQ ID NO: 1173735 - RNA, 19 nt, Artificial Sequence
  Description of Artificial Sequence: Synthetic oligonucleotide
ccuauuugaggauucguua

SEQ ID NO: 1173736 - RNA, 19 nt, Artificial Sequence
  Description of Artificial Sequence: Synthetic oligonucleotide
uuaugucuuuuggccagau

SEQ ID NO: 1173737 - RNA, 19 nt, Artificial Sequence
  Description of Artificial Sequence: Synthetic oligonucleotide
uugccccaguagucaaagc

SEQ ID NO: 1173738 - RNA, 19 nt, Artificial Sequence
  Description of Artificial Sequence: Synthetic oligonucleotide
ccaccauuccacaucugug

SEQ ID NO: 1173739 - RNA, 19 nt, Artificial Sequence
  Description of Artificial Sequence: Synthetic oligonucleotide
cagggcuaauccgugugug

SEQ ID NO: 1173740 - RNA, 19 nt, Artificial Sequence
  Description of Artificial Sequence: Synthetic oligonucleotide
auccaugcgcagguagcag

SEQ ID NO: 1173741 - RNA, 19 nt, Artificial Sequence
  Description of Artificial Sequence: Synthetic oligonucleotide
cuucuagccgacagugaaa

SEQ ID NO: 1173742 - RNA, 19 nt, Artificial Sequence
  Description of Artificial Sequence: Synthetic oligonucleotide
caaaggcucgaagccuggc

SEQ ID NO: 1173743 - RNA, 19 nt, Artificial Sequence
  Description of Artificial Sequence: Synthetic oligonucleotide
gccgacagugaaaugguac

SEQ ID NO: 1173744 - RNA, 19 nt, Artificial Sequence
  Description of Artificial Sequence: Synthetic oligonucleotide
gcugagagguuuggcaugc

SEQ ID NO: 1173745 - RNA, 19 nt, Artificial Sequence
  Description of Artificial Sequence: Synthetic oligonucleotide
ggccuaggaaaaguagcag

SEQ ID NO: 1173746 - RNA, 19 nt, Artificial Sequence
  Description of Artificial Sequence: Synthetic oligonucleotide
aagcuaugggcaggcuggu

SEQ ID NO: 1173747 - RNA, 19 nt, Artificial Sequence
  Description of Artificial Sequence: Synthetic oligonucleotide
aaugaugggcagggcucaa

SEQ ID NO: 1173748 - RNA, 19 nt, Artificial Sequence
  Description of Artificial Sequence: Synthetic oligonucleotide
gccaaugcauccaugcgca

SEQ ID NO: 1173749 - RNA, 19 nt, Artificial Sequence
  Description of Artificial Sequence: Synthetic oligonucleotide
cacccaagguuguucaugu

SEQ ID NO: 1173750 - RNA, 19 nt, Artificial Sequence
  Description of Artificial Sequence: Synthetic oligonucleotide
acggaaccuccucagccua

SEQ ID NO: 1173751 - RNA, 19 nt, Artificial Sequence
  Description of Artificial Sequence: Synthetic oligonucleotide
ggccagaugauacaagcau

SEQ ID NO: 1173752 - RNA, 19 nt, Artificial Sequence
  Description of Artificial Sequence: Synthetic oligonucleotide
ccugacagugcaguguaac

SEQ ID NO: 1173753 - RNA, 19 nt, Artificial Sequence
  Description of Artificial Sequence: Synthetic oligonucleotide
aggauucguuagacccagc

SEQ ID NO: 1173754 - RNA, 19 nt, Artificial Sequence
  Description of Artificial Sequence: Synthetic oligonucleotide
ccggguguacacaggacug

SEQ ID NO: 1173755 - RNA, 19 nt, Artificial Sequence
  Description of Artificial Sequence: Synthetic oligonucleotide
agcucguuaugcagguaga

SEQ ID NO: 1173756 - RNA, 19 nt, Artificial Sequence
  Description of Artificial Sequence: Synthetic oligonucleotide
ccuccuagaggucccugcc

SEQ ID NO: 1173757 - RNA, 19 nt, Artificial Sequence
  Description of Artificial Sequence: Synthetic oligonucleotide
acugaggccugaauccaaa

SEQ ID NO: 1173758 - RNA, 19 nt, Artificial Sequence
  Description of Artificial Sequence: Synthetic oligonucleotide
cagugccaaugcauccaug

SEQ ID NO: 1173759 - RNA, 19 nt, Artificial Sequence
  Description of Artificial Sequence: Synthetic oligonucleotide
caacugaccccagggcaug

SEQ ID NO: 1173760 - RNA, 19 nt, Artificial Sequence
  Description of Artificial Sequence: Synthetic oligonucleotide
ccuaacugacauggacucg

SEQ ID NO: 1173761 - RNA, 19 nt, Artificial Sequence
  Description of Artificial Sequence: Synthetic oligonucleotide
ccuucuagccgacagugaa

SEQ ID NO: 1173762 - RNA, 19 nt, Artificial Sequence
  Description of Artificial Sequence: Synthetic oligonucleotide
uggagcccacacugaguaa

SEQ ID NO: 1173763 - RNA, 19 nt, Artificial Sequence
  Description of Artificial Sequence: Synthetic oligonucleotide
gucaaccggucagaccaug

SEQ ID NO: 1173764 - RNA, 19 nt, Artificial Sequence
  Description of Artificial Sequence: Synthetic oligonucleotide
cccaguagucaaagcggcc

SEQ ID NO: 1173765 - RNA, 19 nt, Artificial Sequence
  Description of Artificial Sequence: Synthetic oligonucleotide
acccucuuuccuaccucuc

SEQ ID NO: 1173766 - RNA, 19 nt, Artificial Sequence
  Description of Artificial Sequence: Synthetic oligonucleotide
gcacccaagguuguucaug

SEQ ID NO: 1173767 - RNA, 19 nt, Artificial Sequence
  Description of Artificial Sequence: Synthetic oligonucleotide
gccagagugcagugaauga

SEQ ID NO: 1173768 - RNA, 19 nt, Artificial Sequence
  Description of Artificial Sequence: Synthetic oligonucleotide
gccuccuagaggucccugc

SEQ ID NO: 1173769 - RNA, 19 nt, Artificial Sequence
  Description of Artificial Sequence: Synthetic oligonucleotide
cuuaugucuuuuggccaga

SEQ ID NO: 1173770 - RNA, 19 nt, Artificial Sequence
  Description of Artificial Sequence: Synthetic oligonucleotide
cuaccucuccccuggaaau

SEQ ID NO: 1173771 - RNA, 19 nt, Artificial Sequence
  Description of Artificial Sequence: Synthetic oligonucleotide
gguggcacaugaagaggug

SEQ ID NO: 1173772 - RNA, 19 nt, Artificial Sequence
  Description of Artificial Sequence: Synthetic oligonucleotide
caagcaugcuccacuuggu

SEQ ID NO: 1173773 - RNA, 19 nt, Artificial Sequence
  Description of Artificial Sequence: Synthetic oligonucleotide
cuggguacaagaagagguu

SEQ ID NO: 1173774 - RNA, 19 nt, Artificial Sequence
  Description of Artificial Sequence: Synthetic oligonucleotide
ggguacaagaagagguuaa

SEQ ID NO: 1173775 - RNA, 19 nt, Artificial Sequence
  Description of Artificial Sequence: Synthetic oligonucleotide
ccggccacaccugacagug

SEQ ID NO: 1173776 - RNA, 19 nt, Artificial Sequence
  Description of Artificial Sequence: Synthetic oligonucleotide
auggacucggagccuccua

SEQ ID NO: 1173777 - RNA, 19 nt, Artificial Sequence
  Description of Artificial Sequence: Synthetic oligonucleotide
cacggaaccuccucagccu

SEQ ID NO: 1173778 - RNA, 19 nt, Artificial Sequence
  Description of Artificial Sequence: Synthetic oligonucleotide
ccucagugcuuuuaaaccu

SEQ ID NO: 1173779 - RNA, 19 nt, Artificial Sequence
  Description of Artificial Sequence: Synthetic oligonucleotide
gucccugcccuaccuuuga

SEQ ID NO: 1173780 - RNA, 19 nt, Artificial Sequence
  Description of Artificial Sequence: Synthetic oligonucleotide
guacacaggacugccuccu

SEQ ID NO: 1173781 - RNA, 19 nt, Artificial Sequence
  Description of Artificial Sequence: Synthetic oligonucleotide
gggcacccaagguuguuca

SEQ ID NO: 1173782 - RNA, 19 nt, Artificial Sequence
  Description of Artificial Sequence: Synthetic oligonucleotide
ucggagccuccuagagguc

SEQ ID NO: 1173783 - RNA, 19 nt, Artificial Sequence
  Description of Artificial Sequence: Synthetic oligonucleotide
cagccggccacaccugaca

SEQ ID NO: 1173784 - RNA, 19 nt, Artificial Sequence
  Description of Artificial Sequence: Synthetic oligonucleotide
gggguagcuagaauuugaa

SEQ ID NO: 1173785 - RNA, 19 nt, Artificial Sequence
  Description of Artificial Sequence: Synthetic oligonucleotide
gccacggaaccuccucagc

SEQ ID NO: 1173786 - RNA, 19 nt, Artificial Sequence
  Description of Artificial Sequence: Synthetic oligonucleotide
guagucaaagcggccgggu

SEQ ID NO: 1173787 - RNA, 19 nt, Artificial Sequence
  Description of Artificial Sequence: Synthetic oligonucleotide
gguacaacaccagcaugua

SEQ ID NO: 1173788 - RNA, 19 nt, Artificial Sequence
  Description of Artificial Sequence: Synthetic oligonucleotide
ccuggaccuaacugacaug

SEQ ID NO: 1173789 - RNA, 19 nt, Artificial Sequence
  Description of Artificial Sequence: Synthetic oligonucleotide
cguuagacccagccugagc

SEQ ID NO: 1173790 - RNA, 19 nt, Artificial Sequence
  Description of Artificial Sequence: Synthetic oligonucleotide
gcccagcccuacuccacgg

SEQ ID NO: 1173791 - RNA, 19 nt, Artificial Sequence
  Description of Artificial Sequence: Synthetic oligonucleotide
ucaaagcggccgggucccc

SEQ ID NO: 1173792 - RNA, 19 nt, Artificial Sequence
  Description of Artificial Sequence: Synthetic oligonucleotide
ggucugcaagccagagugc

SEQ ID NO: 1173793 - RNA, 19 nt, Artificial Sequence
  Description of Artificial Sequence: Synthetic oligonucleotide
cagagauucucaggucaaa

SEQ ID NO: 1173794 - RNA, 19 nt, Artificial Sequence
  Description of Artificial Sequence: Synthetic oligonucleotide
ugccaaccaaaggcucgaa

SEQ ID NO: 1173795 - RNA, 19 nt, Artificial Sequence
  Description of Artificial Sequence: Synthetic oligonucleotide
gguacaagaagagguuaau

SEQ ID NO: 1173796 - RNA, 19 nt, Artificial Sequence
  Description of Artificial Sequence: Synthetic oligonucleotide
cucgaagccuggcacuggu

SEQ ID NO: 1173797 - RNA, 19 nt, Artificial Sequence
  Description of Artificial Sequence: Synthetic oligonucleotide
ccaaugcauccaugcgcag

SEQ ID NO: 1173798 - RNA, 19 nt, Artificial Sequence
  Description of Artificial Sequence: Synthetic oligonucleotide
cagaugauacaagcaugcu

SEQ ID NO: 1173799 - RNA, 19 nt, Artificial Sequence
  Description of Artificial Sequence: Synthetic oligonucleotide
ggacucggagccuccuaga

SEQ ID NO: 1173800 - RNA, 19 nt, Artificial Sequence
  Description of Artificial Sequence: Synthetic oligonucleotide
gcucaacaagaguguugac

SEQ ID NO: 1173801 - RNA, 19 nt, Artificial Sequence
  Description of Artificial Sequence: Synthetic oligonucleotide
aggaagcuaugggcaggcu

SEQ ID NO: 1173802 - RNA, 19 nt, Artificial Sequence
  Description of Artificial Sequence: Synthetic oligonucleotide
gcaggucaaccggucagac

SEQ ID NO: 1173803 - RNA, 19 nt, Artificial Sequence
  Description of Artificial Sequence: Synthetic oligonucleotide
cuccuugguggcacaugaa

SEQ ID NO: 1173804 - RNA, 19 nt, Artificial Sequence
  Description of Artificial Sequence: Synthetic oligonucleotide
ccuuacccaacugacccca

SEQ ID NO: 1173805 - RNA, 19 nt, Artificial Sequence
  Description of Artificial Sequence: Synthetic oligonucleotide
gggcuaauccgugugugua

SEQ ID NO: 1173806 - RNA, 19 nt, Artificial Sequence
  Description of Artificial Sequence: Synthetic oligonucleotide
cccagcccuacuccacggg

SEQ ID NO: 1173807 - RNA, 19 nt, Artificial Sequence
  Description of Artificial Sequence: Synthetic oligonucleotide
auguggcaacauagcauuu

SEQ ID NO: 1173808 - RNA, 19 nt, Artificial Sequence
  Description of Artificial Sequence: Synthetic oligonucleotide
ccaacgggaugcccuggac

SEQ ID NO: 1173809 - RNA, 19 nt, Artificial Sequence
  Description of Artificial Sequence: Synthetic oligonucleotide
ggcaggucaaccggucaga

SEQ ID NO: 1173810 - RNA, 19 nt, Artificial Sequence
  Description of Artificial Sequence: Synthetic oligonucleotide
cagcauguaacuggagaau

SEQ ID NO: 1173811 - RNA, 19 nt, Artificial Sequence
  Description of Artificial Sequence: Synthetic oligonucleotide
gcucguuaugcagguagaa

SEQ ID NO: 1173812 - RNA, 19 nt, Artificial Sequence
  Description of Artificial Sequence: Synthetic oligonucleotide
cugugccuguggccuagga

SEQ ID NO: 1173813 - RNA, 19 nt, Artificial Sequence
  Description of Artificial Sequence: Synthetic oligonucleotide
auccguguguguagauguu

SEQ ID NO: 1173814 - RNA, 19 nt, Artificial Sequence
  Description of Artificial Sequence: Synthetic oligonucleotide
ggcguggugggcagcccag

SEQ ID NO: 1173815 - RNA, 19 nt, Artificial Sequence
  Description of Artificial Sequence: Synthetic oligonucleotide
cggagccuccuagaggucc

SEQ ID NO: 1173816 - RNA, 19 nt, Artificial Sequence
  Description of Artificial Sequence: Synthetic oligonucleotide
gcggccggguccccaacgc

SEQ ID NO: 1173817 - RNA, 19 nt, Artificial Sequence
  Description of Artificial Sequence: Synthetic oligonucleotide
gccuauuugaggauucguu

SEQ ID NO: 1173818 - RNA, 19 nt, Artificial Sequence
  Description of Artificial Sequence: Synthetic oligonucleotide
cacugaguaagugcaugau

SEQ ID NO: 1173819 - RNA, 19 nt, Artificial Sequence
  Description of Artificial Sequence: Synthetic oligonucleotide
gguaggcaggucaaccggu

SEQ ID NO: 1173820 - RNA, 19 nt, Artificial Sequence
  Description of Artificial Sequence: Synthetic oligonucleotide
ggcacaugaagaggugaua

SEQ ID NO: 1173821 - RNA, 19 nt, Artificial Sequence
  Description of Artificial Sequence: Synthetic oligonucleotide
ggcagcuaggagacagcuc

SEQ ID NO: 1173822 - RNA, 19 nt, Artificial Sequence
  Description of Artificial Sequence: Synthetic oligonucleotide
cucagccuauuugaggauu

SEQ ID NO: 1173823 - RNA, 19 nt, Artificial Sequence
  Description of Artificial Sequence: Synthetic oligonucleotide
agccgacagugaaauggua

SEQ ID NO: 1173824 - RNA, 19 nt, Artificial Sequence
  Description of Artificial Sequence: Synthetic oligonucleotide
ccaacgcucuggcagacgu

SEQ ID NO: 1173825 - RNA, 19 nt, Artificial Sequence
  Description of Artificial Sequence: Synthetic oligonucleotide
caaagcggccgggucccca

SEQ ID NO: 1173826 - RNA, 19 nt, Artificial Sequence
  Description of Artificial Sequence: Synthetic oligonucleotide
gcaugauuuggugggaguu

SEQ ID NO: 1173827 - RNA, 19 nt, Artificial Sequence
  Description of Artificial Sequence: Synthetic oligonucleotide
agcuaugggcaggcugguu

SEQ ID NO: 1173828 - RNA, 19 nt, Artificial Sequence
  Description of Artificial Sequence: Synthetic oligonucleotide
acccaucagggcagcugga

SEQ ID NO: 1173829 - RNA, 19 nt, Artificial Sequence
  Description of Artificial Sequence: Synthetic oligonucleotide
ggcagacuccacacauauc

SEQ ID NO: 1173830 - RNA, 19 nt, Artificial Sequence
  Description of Artificial Sequence: Synthetic oligonucleotide
gcagggcuaauccgugugu

SEQ ID NO: 1173831 - RNA, 19 nt, Artificial Sequence
  Description of Artificial Sequence: Synthetic oligonucleotide
cggguguacacaggacugc

SEQ ID NO: 1173832 - RNA, 19 nt, Artificial Sequence
  Description of Artificial Sequence: Synthetic oligonucleotide
accugacagugcaguguaa

SEQ ID NO: 1173833 - RNA, 19 nt, Artificial Sequence
  Description of Artificial Sequence: Synthetic oligonucleotide
cccuaccuuugagccacgg

SEQ ID NO: 1173834 - RNA, 19 nt, Artificial Sequence
  Description of Artificial Sequence: Synthetic oligonucleotide
cccuggaccuaacugacau

SEQ ID NO: 1173835 - RNA, 19 nt, Artificial Sequence
  Description of Artificial Sequence: Synthetic oligonucleotide
ggcaaggagccggguguac

SEQ ID NO: 1173836 - RNA, 19 nt, Artificial Sequence
  Description of Artificial Sequence: Synthetic oligonucleotide
gggcagaaagauggccguc

SEQ ID NO: 1173837 - RNA, 19 nt, Artificial Sequence
  Description of Artificial Sequence: Synthetic oligonucleotide
cugagagguuuggcaugca

SEQ ID NO: 1173838 - RNA, 19 nt, Artificial Sequence
  Description of Artificial Sequence: Synthetic oligonucleotide
guaacccaucagggcagcu

SEQ ID NO: 1173839 - RNA, 19 nt, Artificial Sequence
  Description of Artificial Sequence: Synthetic oligonucleotide
cccaacgcucuggcagacg

SEQ ID NO: 1173840 - RNA, 19 nt, Artificial Sequence
  Description of Artificial Sequence: Synthetic oligonucleotide
ccagggucugcaagccaga

SEQ ID NO: 1173841 - RNA, 19 nt, Artificial Sequence
  Description of Artificial Sequence: Synthetic oligonucleotide
cauggacucggagccuccu

SEQ ID NO: 1173842 - RNA, 19 nt, Artificial Sequence
  Description of Artificial Sequence: Synthetic oligonucleotide
ggcuggaaccacacauugu

SEQ ID NO: 1173843 - RNA, 19 nt, Artificial Sequence
  Description of Artificial Sequence: Synthetic oligonucleotide
acgggaugcccuggaccua

SEQ ID NO: 1173844 - RNA, 19 nt, Artificial Sequence
  Description of Artificial Sequence: Synthetic oligonucleotide
cccaacgggaugcccugga

SEQ ID NO: 1173845 - RNA, 19 nt, Artificial Sequence
  Description of Artificial Sequence: Synthetic oligonucleotide
cuggcagacgugccacauu

SEQ ID NO: 1173846 - RNA, 19 nt, Artificial Sequence
  Description of Artificial Sequence: Synthetic oligonucleotide
ccccaacgggaugcccugg

SEQ ID NO: 1173847 - RNA, 19 nt, Artificial Sequence
  Description of Artificial Sequence: Synthetic oligonucleotide
cgcucuggcagacgugcca

SEQ ID NO: 1173848 - RNA, 19 nt, Artificial Sequence
  Description of Artificial Sequence: Synthetic oligonucleotide
ggcacccaagguuguucau

SEQ ID NO: 1173849 - RNA, 19 nt, Artificial Sequence
  Description of Artificial Sequence: Synthetic oligonucleotide
ccggucagaccauggcacu

SEQ ID NO: 1173850 - RNA, 19 nt, Artificial Sequence
  Description of Artificial Sequence: Synthetic oligonucleotide
gcccuaccuuugagccacg

SEQ ID NO: 1173851 - RNA, 19 nt, Artificial Sequence
  Description of Artificial Sequence: Synthetic oligonucleotide
ccccaacgcucuggcagac

SEQ ID NO: 1173852 - RNA, 19 nt, Artificial Sequence
  Description of Artificial Sequence: Synthetic oligonucleotide
cccagauaggaagucccau

SEQ ID NO: 1173853 - RNA, 19 nt, Artificial Sequence
  Description of Artificial Sequence: Synthetic oligonucleotide
caggcugguuuggcagcua

SEQ ID NO: 1173854 - RNA, 19 nt, Artificial Sequence
  Description of Artificial Sequence: Synthetic oligonucleotide
gccggguccccaacgcucu

SEQ ID NO: 1173855 - RNA, 19 nt, Artificial Sequence
  Description of Artificial Sequence: Synthetic oligonucleotide
gcguggugggcagcccaga

SEQ ID NO: 1173856 - RNA, 19 nt, Artificial Sequence
  Description of Artificial Sequence: Synthetic oligonucleotide
ccggguccccaacgcucug

SEQ ID NO: 1173857 - RNA, 19 nt, Artificial Sequence
  Description of Artificial Sequence: Synthetic oligonucleotide
ggucaaccggucagaccau

SEQ ID NO: 1173858 - RNA, 19 nt, Artificial Sequence
  Description of Artificial Sequence: Synthetic oligonucleotide
cggccggguccccaacgcu

SEQ ID NO: 1173859 - RNA, 19 nt, Artificial Sequence
  Description of Artificial Sequence: Synthetic oligonucleotide
auagaauuuccccuggagg

SEQ ID NO: 1173860 - RNA, 19 nt, Artificial Sequence
  Description of Artificial Sequence: Synthetic oligonucleotide
agugaggagagucaccgcc

SEQ ID NO: 1173861 - RNA, 19 nt, Artificial Sequence
  Description of Artificial Sequence: Synthetic oligonucleotide
uauagcgacgcucaaauuc

SEQ ID NO: 1173862 - RNA, 19 nt, Artificial Sequence
  Description of Artificial Sequence: Synthetic oligonucleotide
agguguauaauaccuugcc

SEQ ID NO: 1173863 - RNA, 19 nt, Artificial Sequence
  Description of Artificial Sequence: Synthetic oligonucleotide
ugugaagguaucuagcuga

SEQ ID NO: 1173864 - RNA, 19 nt, Artificial Sequence
  Description of Artificial Sequence: Synthetic oligonucleotide
uguauaaauaagaccucag

SEQ ID NO: 1173865 - RNA, 19 nt, Artificial Sequence
  Description of Artificial Sequence: Synthetic oligonucleotide
acuuacaaauaguggaagg

SEQ ID NO: 1173866 - RNA, 19 nt, Artificial Sequence
  Description of Artificial Sequence: Synthetic oligonucleotide
ugugauuagagcuguaccu

SEQ ID NO: 1173867 - RNA, 19 nt, Artificial Sequence
  Description of Artificial Sequence: Synthetic oligonucleotide
ugugcgugugauuagagcu

SEQ ID NO: 1173868 - RNA, 19 nt, Artificial Sequence
  Description of Artificial Sequence: Synthetic oligonucleotide
aucugccuaacauauguac

SEQ ID NO: 1173869 - RNA, 19 nt, Artificial Sequence
  Description of Artificial Sequence: Synthetic oligonucleotide
guuccgaugggccugaucc

SEQ ID NO: 1173870 - RNA, 19 nt, Artificial Sequence
  Description of Artificial Sequence: Synthetic oligonucleotide
uacaaauaguggaaggcug

SEQ ID NO: 1173871 - RNA, 19 nt, Artificial Sequence
  Description of Artificial Sequence: Synthetic oligonucleotide
gauagaauuuccccuggag

SEQ ID NO: 1173872 - RNA, 19 nt, Artificial Sequence
  Description of Artificial Sequence: Synthetic oligonucleotide
aagggugcuauagcgacgc

SEQ ID NO: 1173873 - RNA, 19 nt, Artificial Sequence
  Description of Artificial Sequence: Synthetic oligonucleotide
aauggcucggaauuugaca

SEQ ID NO: 1173874 - RNA, 19 nt, Artificial Sequence
  Description of Artificial Sequence: Synthetic oligonucleotide
uguauaauaccuugccucu

SEQ ID NO: 1173875 - RNA, 19 nt, Artificial Sequence
  Description of Artificial Sequence: Synthetic oligonucleotide
uauaauaccuugccucuug

SEQ ID NO: 1173876 - RNA, 19 nt, Artificial Sequence
  Description of Artificial Sequence: Synthetic oligonucleotide
uguuucucaaauggggugg

SEQ ID NO: 1173877 - RNA, 19 nt, Artificial Sequence
  Description of Artificial Sequence: Synthetic oligonucleotide
ugguuaaaguagcagcugc

SEQ ID NO: 1173878 - RNA, 19 nt, Artificial Sequence
  Description of Artificial Sequence: Synthetic oligonucleotide
uucgcguucaggcccagcg

SEQ ID NO: 1173879 - RNA, 19 nt, Artificial Sequence
  Description of Artificial Sequence: Synthetic oligonucleotide
aagguguauaauaccuugc

SEQ ID NO: 1173880 - RNA, 19 nt, Artificial Sequence
  Description of Artificial Sequence: Synthetic oligonucleotide
ugugugaagguaucuagcu

SEQ ID NO: 1173881 - RNA, 19 nt, Artificial Sequence
  Description of Artificial Sequence: Synthetic oligonucleotide
auagcgacgcucaaauucc

SEQ ID NO: 1173882 - RNA, 19 nt, Artificial Sequence
  Description of Artificial Sequence: Synthetic oligonucleotide
guguauaauaccuugccuc

SEQ ID NO: 1173883 - RNA, 19 nt, Artificial Sequence
  Description of Artificial Sequence: Synthetic oligonucleotide
aacuuacaaauaguggaag

SEQ ID NO: 1173884 - RNA, 19 nt, Artificial Sequence
  Description of Artificial Sequence: Synthetic oligonucleotide
ucucuaaagccaacgcuag

SEQ ID NO: 1173885 - RNA, 19 nt, Artificial Sequence
  Description of Artificial Sequence: Synthetic oligonucleotide
ugcauguaucugaacacag

SEQ ID NO: 1173886 - RNA, 19 nt, Artificial Sequence
  Description of Artificial Sequence: Synthetic oligonucleotide
agagcugauagaauuuccc

SEQ ID NO: 1173887 - RNA, 19 nt, Artificial Sequence
  Description of Artificial Sequence: Synthetic oligonucleotide
acuacuugcucugugcugg

SEQ ID NO: 1173888 - RNA, 19 nt, Artificial Sequence
  Description of Artificial Sequence: Synthetic oligonucleotide
aguguguagagcuuccuca

SEQ ID NO: 1173889 - RNA, 19 nt, Artificial Sequence
  Description of Artificial Sequence: Synthetic oligonucleotide
aguuuuagguucuguuccg

SEQ ID NO: 1173890 - RNA, 19 nt, Artificial Sequence
  Description of Artificial Sequence: Synthetic oligonucleotide
uccgguguauaaauaagac

SEQ ID NO: 1173891 - RNA, 19 nt, Artificial Sequence
  Description of Artificial Sequence: Synthetic oligonucleotide
acauauguacugcucuggg

SEQ ID NO: 1173892 - RNA, 19 nt, Artificial Sequence
  Description of Artificial Sequence: Synthetic oligonucleotide
uucucaauggcucggaauu

SEQ ID NO: 1173893 - RNA, 19 nt, Artificial Sequence
  Description of Artificial Sequence: Synthetic oligonucleotide
aauaagaccucagggaaau

SEQ ID NO: 1173894 - RNA, 19 nt, Artificial Sequence
  Description of Artificial Sequence: Synthetic oligonucleotide
agaugcauggauuucugga

SEQ ID NO: 1173895 - RNA, 19 nt, Artificial Sequence
  Description of Artificial Sequence: Synthetic oligonucleotide
ucugccuaacauauguacu

SEQ ID NO: 1173896 - RNA, 19 nt, Artificial Sequence
  Description of Artificial Sequence: Synthetic oligonucleotide
uuacaaauaguggaaggcu

SEQ ID NO: 1173897 - RNA, 19 nt, Artificial Sequence
  Description of Artificial Sequence: Synthetic oligonucleotide
gugacguucgcguucaggc

SEQ ID NO: 1173898 - RNA, 19 nt, Artificial Sequence
  Description of Artificial Sequence: Synthetic oligonucleotide
ugauuagagcuguaccugc

SEQ ID NO: 1173899 - RNA, 19 nt, Artificial Sequence
  Description of Artificial Sequence: Synthetic oligonucleotide
ucggaauuugacacugaag

SEQ ID NO: 1173900 - RNA, 19 nt, Artificial Sequence
  Description of Artificial Sequence: Synthetic oligonucleotide
gagcugauagaauuucccc

SEQ ID NO: 1173901 - RNA, 19 nt, Artificial Sequence
  Description of Artificial Sequence: Synthetic oligonucleotide
uucauugguagggauagca

SEQ ID NO: 1173902 - RNA, 19 nt, Artificial Sequence
  Description of Artificial Sequence: Synthetic oligonucleotide
uaagaccucagggaaauga

SEQ ID NO: 1173903 - RNA, 19 nt, Artificial Sequence
  Description of Artificial Sequence: Synthetic oligonucleotide
ucucaaaugggguggugcc

SEQ ID NO: 1173904 - RNA, 19 nt, Artificial Sequence
  Description of Artificial Sequence: Synthetic oligonucleotide
guaguuuuagguucuguuc

SEQ ID NO: 1173905 - RNA, 19 nt, Artificial Sequence
  Description of Artificial Sequence: Synthetic oligonucleotide
aucggaaggagugugacug

SEQ ID NO: 1173906 - RNA, 19 nt, Artificial Sequence
  Description of Artificial Sequence: Synthetic oligonucleotide
agcugauagaauuuccccu

SEQ ID NO: 1173907 - RNA, 19 nt, Artificial Sequence
  Description of Artificial Sequence: Synthetic oligonucleotide
cugccuaacauauguacug

SEQ ID NO: 1173908 - RNA, 19 nt, Artificial Sequence
  Description of Artificial Sequence: Synthetic oligonucleotide
aguaucgggugcucugggc

SEQ ID NO: 1173909 - RNA, 19 nt, Artificial Sequence
  Description of Artificial Sequence: Synthetic oligonucleotide
agcuccggcagccuggugg

SEQ ID NO: 1173910 - RNA, 19 nt, Artificial Sequence
  Description of Artificial Sequence: Synthetic oligonucleotide
ucggcuaguucccgaaggg

SEQ ID NO: 1173911 - RNA, 19 nt, Artificial Sequence
  Description of Artificial Sequence: Synthetic oligonucleotide
agaagcacgcucuggaccu

SEQ ID NO: 1173912 - RNA, 19 nt, Artificial Sequence
  Description of Artificial Sequence: Synthetic oligonucleotide
gagcuguacgcccggagcg

SEQ ID NO: 1173913 - RNA, 19 nt, Artificial Sequence
  Description of Artificial Sequence: Synthetic oligonucleotide
aaguaucgggugcucuggg

SEQ ID NO: 1173914 - RNA, 19 nt, Artificial Sequence
  Description of Artificial Sequence: Synthetic oligonucleotide
gaggcugucucaaaauaag

SEQ ID NO: 1173915 - RNA, 19 nt, Artificial Sequence
  Description of Artificial Sequence: Synthetic oligonucleotide
uucucaaaugggguggugc

SEQ ID NO: 1173916 - RNA, 19 nt, Artificial Sequence
  Description of Artificial Sequence: Synthetic oligonucleotide
cuagacugguggcacagcc

SEQ ID NO: 1173917 - RNA, 19 nt, Artificial Sequence
  Description of Artificial Sequence: Synthetic oligonucleotide
gacguucgcguucaggccc

SEQ ID NO: 1173918 - RNA, 19 nt, Artificial Sequence
  Description of Artificial Sequence: Synthetic oligonucleotide
aagaccucagggaaaugag

SEQ ID NO: 1173919 - RNA, 19 nt, Artificial Sequence
  Description of Artificial Sequence: Synthetic oligonucleotide
cagcaugucaggcuggagc

SEQ ID NO: 1173920 - RNA, 19 nt, Artificial Sequence
  Description of Artificial Sequence: Synthetic oligonucleotide
guagagcuuccucagguug

SEQ ID NO: 1173921 - RNA, 19 nt, Artificial Sequence
  Description of Artificial Sequence: Synthetic oligonucleotide
ugaacacagaugccaugcc

SEQ ID NO: 1173922 - RNA, 19 nt, Artificial Sequence
  Description of Artificial Sequence: Synthetic oligonucleotide
acggcaagcucgccuaggc

SEQ ID NO: 1173923 - RNA, 19 nt, Artificial Sequence
  Description of Artificial Sequence: Synthetic oligonucleotide
ucugugcgugugauuagag

SEQ ID NO: 1173924 - RNA, 19 nt, Artificial Sequence
  Description of Artificial Sequence: Synthetic oligonucleotide
cacaucgugcucugcaggg

SEQ ID NO: 1173925 - RNA, 19 nt, Artificial Sequence
  Description of Artificial Sequence: Synthetic oligonucleotide
ugaagcuagacuguaguuu

SEQ ID NO: 1173926 - RNA, 19 nt, Artificial Sequence
  Description of Artificial Sequence: Synthetic oligonucleotide
auugagcgagugcuggauc

SEQ ID NO: 1173927 - RNA, 19 nt, Artificial Sequence
  Description of Artificial Sequence: Synthetic oligonucleotide
uggugucgggcacugagca

SEQ ID NO: 1173928 - RNA, 19 nt, Artificial Sequence
  Description of Artificial Sequence: Synthetic oligonucleotide
ugggcuugaguccucaaua

SEQ ID NO: 1173929 - RNA, 19 nt, Artificial Sequence
  Description of Artificial Sequence: Synthetic oligonucleotide
ucauugguagggauagcaa

SEQ ID NO: 1173930 - RNA, 19 nt, Artificial Sequence
  Description of Artificial Sequence: Synthetic oligonucleotide
cagguugccagcuguggcg

SEQ ID NO: 1173931 - RNA, 19 nt, Artificial Sequence
  Description of Artificial Sequence: Synthetic oligonucleotide
uuuggugugugaagguauc

SEQ ID NO: 1173932 - RNA, 19 nt, Artificial Sequence
  Description of Artificial Sequence: Synthetic oligonucleotide
agggauagcaaagaacacu

SEQ ID NO: 1173933 - RNA, 19 nt, Artificial Sequence
  Description of Artificial Sequence: Synthetic oligonucleotide
cauugugcguaucuuccag

SEQ ID NO: 1173934 - RNA, 19 nt, Artificial Sequence
  Description of Artificial Sequence: Synthetic oligonucleotide
cucgccuaggcagaguugg

SEQ ID NO: 1173935 - RNA, 19 nt, Artificial Sequence
  Description of Artificial Sequence: Synthetic oligonucleotide
gcaugaaguuucucaaugg

SEQ ID NO: 1173936 - RNA, 19 nt, Artificial Sequence
  Description of Artificial Sequence: Synthetic oligonucleotide
uuucucaauggcucggaau

SEQ ID NO: 1173937 - RNA, 19 nt, Artificial Sequence
  Description of Artificial Sequence: Synthetic oligonucleotide
uugccucuuggguuguagg

SEQ ID NO: 1173938 - RNA, 19 nt, Artificial Sequence
  Description of Artificial Sequence: Synthetic oligonucleotide
gucggcuaguucccgaagg

SEQ ID NO: 1173939 - RNA, 19 nt, Artificial Sequence
  Description of Artificial Sequence: Synthetic oligonucleotide
ugcaagagccgaccuaccu

SEQ ID NO: 1173940 - RNA, 19 nt, Artificial Sequence
  Description of Artificial Sequence: Synthetic oligonucleotide
gcugauagaauuuccccug

SEQ ID NO: 1173941 - RNA, 19 nt, Artificial Sequence
  Description of Artificial Sequence: Synthetic oligonucleotide
gcuguggcggagcacaucg

SEQ ID NO: 1173942 - RNA, 19 nt, Artificial Sequence
  Description of Artificial Sequence: Synthetic oligonucleotide
aguacugggucugugcgug

SEQ ID NO: 1173943 - RNA, 19 nt, Artificial Sequence
  Description of Artificial Sequence: Synthetic oligonucleotide
aaauaguggaaggcugaga

SEQ ID NO: 1173944 - RNA, 19 nt, Artificial Sequence
  Description of Artificial Sequence: Synthetic oligonucleotide
uacuacuugcucugugcug

SEQ ID NO: 1173945 - RNA, 19 nt, Artificial Sequence
  Description of Artificial Sequence: Synthetic oligonucleotide
guacauugugcguaucuuc

SEQ ID NO: 1173946 - RNA, 19 nt, Artificial Sequence
  Description of Artificial Sequence: Synthetic oligonucleotide
uugugcguaucuuccagaa

SEQ ID NO: 1173947 - RNA, 19 nt, Artificial Sequence
  Description of Artificial Sequence: Synthetic oligonucleotide
ugagaggcugucucaaaau

SEQ ID NO: 1173948 - RNA, 19 nt, Artificial Sequence
  Description of Artificial Sequence: Synthetic oligonucleotide
uuuuagguucuguuccgau

SEQ ID NO: 1173949 - RNA, 19 nt, Artificial Sequence
  Description of Artificial Sequence: Synthetic oligonucleotide
uccgaugggccugaucccg

SEQ ID NO: 1173950 - RNA, 19 nt, Artificial Sequence
  Description of Artificial Sequence: Synthetic oligonucleotide
ugccuaacauauguacugc

SEQ ID NO: 1173951 - RNA, 19 nt, Artificial Sequence
  Description of Artificial Sequence: Synthetic oligonucleotide
agguccgguguauaaauaa

SEQ ID NO: 1173952 - RNA, 19 nt, Artificial Sequence
  Description of Artificial Sequence: Synthetic oligonucleotide
cuaacauauguacugcucu

SEQ ID NO: 1173953 - RNA, 19 nt, Artificial Sequence
  Description of Artificial Sequence: Synthetic oligonucleotide
cugugcgugugauuagagc

SEQ ID NO: 1173954 - RNA, 19 nt, Artificial Sequence
  Description of Artificial Sequence: Synthetic oligonucleotide
ugacguucgcguucaggcc

SEQ ID NO: 1173955 - RNA, 19 nt, Artificial Sequence
  Description of Artificial Sequence: Synthetic oligonucleotide
auugugcguaucuuccaga

SEQ ID NO: 1173956 - RNA, 19 nt, Artificial Sequence
  Description of Artificial Sequence: Synthetic oligonucleotide
uggaccacggcaagcucgc

SEQ ID NO: 1173957 - RNA, 19 nt, Artificial Sequence
  Description of Artificial Sequence: Synthetic oligonucleotide
agcuagacuguaguuuuag

SEQ ID NO: 1173958 - RNA, 19 nt, Artificial Sequence
  Description of Artificial Sequence: Synthetic oligonucleotide
cauugguagggauagcaaa

SEQ ID NO: 1173959 - RNA, 19 nt, Artificial Sequence
  Description of Artificial Sequence: Synthetic oligonucleotide
gaagcuagacuguaguuuu

SEQ ID NO: 1173960 - RNA, 19 nt, Artificial Sequence
  Description of Artificial Sequence: Synthetic oligonucleotide
ccaggaagguguauaauac

SEQ ID NO: 1173961 - RNA, 19 nt, Artificial Sequence
  Description of Artificial Sequence: Synthetic oligonucleotide
cucuaaagccaacgcuagg

SEQ ID NO: 1173962 - RNA, 19 nt, Artificial Sequence
  Description of Artificial Sequence: Synthetic oligonucleotide
ugaucucuaggcuccggaa

SEQ ID NO: 1173963 - RNA, 19 nt, Artificial Sequence
  Description of Artificial Sequence: Synthetic oligonucleotide
ucgcguucaggcccagcgg

SEQ ID NO: 1173964 - RNA, 19 nt, Artificial Sequence
  Description of Artificial Sequence: Synthetic oligonucleotide
uguacauugugcguaucuu

SEQ ID NO: 1173965 - RNA, 19 nt, Artificial Sequence
  Description of Artificial Sequence: Synthetic oligonucleotide
gaagggugcuauagcgacg

SEQ ID NO: 1173966 - RNA, 19 nt, Artificial Sequence
  Description of Artificial Sequence: Synthetic oligonucleotide
gaccuaccuccucagugag

SEQ ID NO: 1173967 - RNA, 19 nt, Artificial Sequence
  Description of Artificial Sequence: Synthetic oligonucleotide
ccgguguauaaauaagacc

SEQ ID NO: 1173968 - RNA, 19 nt, Artificial Sequence
  Description of Artificial Sequence: Synthetic oligonucleotide
uagacugguggcacagccu

SEQ ID NO: 1173969 - RNA, 19 nt, Artificial Sequence
  Description of Artificial Sequence: Synthetic oligonucleotide
uguagguccgguguauaaa

SEQ ID NO: 1173970 - RNA, 19 nt, Artificial Sequence
  Description of Artificial Sequence: Synthetic oligonucleotide
ucccgaagggugcuauagc

SEQ ID NO: 1173971 - RNA, 19 nt, Artificial Sequence
  Description of Artificial Sequence: Synthetic oligonucleotide
uccaucuaccaggaaggug

SEQ ID NO: 1173972 - RNA, 19 nt, Artificial Sequence
  Description of Artificial Sequence: Synthetic oligonucleotide
ugagcgagugcuggauccg

SEQ ID NO: 1173973 - RNA, 19 nt, Artificial Sequence
  Description of Artificial Sequence: Synthetic oligonucleotide
ugucggcuaguucccgaag

SEQ ID NO: 1173974 - RNA, 19 nt, Artificial Sequence
  Description of Artificial Sequence: Synthetic oligonucleotide
uuguagguccgguguauaa

SEQ ID NO: 1173975 - RNA, 19 nt, Artificial Sequence
  Description of Artificial Sequence: Synthetic oligonucleotide
cuugcuucccaggaugcug

SEQ ID NO: 1173976 - RNA, 19 nt, Artificial Sequence
  Description of Artificial Sequence: Synthetic oligonucleotide
ggaaguaucgggugcucug

SEQ ID NO: 1173977 - RNA, 19 nt, Artificial Sequence
  Description of Artificial Sequence: Synthetic oligonucleotide
gugugugaagguaucuagc

SEQ ID NO: 1173978 - RNA, 19 nt, Artificial Sequence
  Description of Artificial Sequence: Synthetic oligonucleotide
ugaucccgggugugggacg

SEQ ID NO: 1173979 - RNA, 19 nt, Artificial Sequence
  Description of Artificial Sequence: Synthetic oligonucleotide
uucuguuccgaugggccug

SEQ ID NO: 1173980 - RNA, 19 nt, Artificial Sequence
  Description of Artificial Sequence: Synthetic oligonucleotide
uggcggagcacaucgugcu

SEQ ID NO: 1173981 - RNA, 19 nt, Artificial Sequence
  Description of Artificial Sequence: Synthetic oligonucleotide
uaggcuccggaaguaucgg

SEQ ID NO: 1173982 - RNA, 19 nt, Artificial Sequence
  Description of Artificial Sequence: Synthetic oligonucleotide
cuaggauguggcggcaggg

SEQ ID NO: 1173983 - RNA, 19 nt, Artificial Sequence
  Description of Artificial Sequence: Synthetic oligonucleotide
ugcgugugauuagagcugu

SEQ ID NO: 1173984 - RNA, 19 nt, Artificial Sequence
  Description of Artificial Sequence: Synthetic oligonucleotide
ugugcguaucuuccagaau

SEQ ID NO: 1173985 - RNA, 19 nt, Artificial Sequence
  Description of Artificial Sequence: Synthetic oligonucleotide
ugucuagacugguggcaca

SEQ ID NO: 1173986 - RNA, 19 nt, Artificial Sequence
  Description of Artificial Sequence: Synthetic oligonucleotide
cgguguauaaauaagaccu

SEQ ID NO: 1173987 - RNA, 19 nt, Artificial Sequence
  Description of Artificial Sequence: Synthetic oligonucleotide
cuggugucgggcacugagc

SEQ ID NO: 1173988 - RNA, 19 nt, Artificial Sequence
  Description of Artificial Sequence: Synthetic oligonucleotide
acgcggaagggugacguuc

SEQ ID NO: 1173989 - RNA, 19 nt, Artificial Sequence
  Description of Artificial Sequence: Synthetic oligonucleotide
agagccgaccuaccuccuc

SEQ ID NO: 1173990 - RNA, 19 nt, Artificial Sequence
  Description of Artificial Sequence: Synthetic oligonucleotide
uuccgaugggccugauccc

SEQ ID NO: 1173991 - RNA, 19 nt, Artificial Sequence
  Description of Artificial Sequence: Synthetic oligonucleotide
ccuaacauauguacugcuc

SEQ ID NO: 1173992 - RNA, 19 nt, Artificial Sequence
  Description of Artificial Sequence: Synthetic oligonucleotide
ucgccuaggcagaguuggg

SEQ ID NO: 1173993 - RNA, 19 nt, Artificial Sequence
  Description of Artificial Sequence: Synthetic oligonucleotide
uacccgggguccaucuacc

SEQ ID NO: 1173994 - RNA, 19 nt, Artificial Sequence
  Description of Artificial Sequence: Synthetic oligonucleotide
agaggcugucucaaaauaa

SEQ ID NO: 1173995 - RNA, 19 nt, Artificial Sequence
  Description of Artificial Sequence: Synthetic oligonucleotide
gcgacgcucaaauuccucc

SEQ ID NO: 1173996 - RNA, 19 nt, Artificial Sequence
  Description of Artificial Sequence: Synthetic oligonucleotide
gucuagacugguggcacag

SEQ ID NO: 1173997 - RNA, 19 nt, Artificial Sequence
  Description of Artificial Sequence: Synthetic oligonucleotide
agagucaccgccaggugcu

SEQ ID NO: 1173998 - RNA, 19 nt, Artificial Sequence
  Description of Artificial Sequence: Synthetic oligonucleotide
ggugcuauagcgacgcuca

SEQ ID NO: 1173999 - RNA, 19 nt, Artificial Sequence
  Description of Artificial Sequence: Synthetic oligonucleotide
guacccgggguccaucuac

SEQ ID NO: 1174000 - RNA, 19 nt, Artificial Sequence
  Description of Artificial Sequence: Synthetic oligonucleotide
ggcuugaguccucaauaag

SEQ ID NO: 1174001 - RNA, 19 nt, Artificial Sequence
  Description of Artificial Sequence: Synthetic oligonucleotide
ggagcuguacgcccggagc

SEQ ID NO: 1174002 - RNA, 19 nt, Artificial Sequence
  Description of Artificial Sequence: Synthetic oligonucleotide
gcugugaucucuaggcucc

SEQ ID NO: 1174003 - RNA, 19 nt, Artificial Sequence
  Description of Artificial Sequence: Synthetic oligonucleotide
guccgguguauaaauaaga

SEQ ID NO: 1174004 - RNA, 19 nt, Artificial Sequence
  Description of Artificial Sequence: Synthetic oligonucleotide
cuacuugcucugugcuggg

SEQ ID NO: 1174005 - RNA, 19 nt, Artificial Sequence
  Description of Artificial Sequence: Synthetic oligonucleotide
cagaguugggcugcuggcc

SEQ ID NO: 1174006 - RNA, 19 nt, Artificial Sequence
  Description of Artificial Sequence: Synthetic oligonucleotide
cugucuagacugguggcac

SEQ ID NO: 1174007 - RNA, 19 nt, Artificial Sequence
  Description of Artificial Sequence: Synthetic oligonucleotide
uaucgggugcucugggcuc

SEQ ID NO: 1174008 - RNA, 19 nt, Artificial Sequence
  Description of Artificial Sequence: Synthetic oligonucleotide
uccggaaguaucgggugcu

SEQ ID NO: 1174009 - RNA, 19 nt, Artificial Sequence
  Description of Artificial Sequence: Synthetic oligonucleotide
agccagaugcggucguuga

SEQ ID NO: 1174010 - RNA, 19 nt, Artificial Sequence
  Description of Artificial Sequence: Synthetic oligonucleotide
ugcuauagcgacgcucaaa

SEQ ID NO: 1174011 - RNA, 19 nt, Artificial Sequence
  Description of Artificial Sequence: Synthetic oligonucleotide
gugaucucuaggcuccgga

SEQ ID NO: 1174012 - RNA, 19 nt, Artificial Sequence
  Description of Artificial Sequence: Synthetic oligonucleotide
cuugccucuuggguuguag

SEQ ID NO: 1174013 - RNA, 19 nt, Artificial Sequence
  Description of Artificial Sequence: Synthetic oligonucleotide
uagguccgguguauaaaua

SEQ ID NO: 1174014 - RNA, 19 nt, Artificial Sequence
  Description of Artificial Sequence: Synthetic oligonucleotide
uggcaucggaaggagugug

SEQ ID NO: 1174015 - RNA, 19 nt, Artificial Sequence
  Description of Artificial Sequence: Synthetic oligonucleotide
gguccgguguauaaauaag

SEQ ID NO: 1174016 - RNA, 19 nt, Artificial Sequence
  Description of Artificial Sequence: Synthetic oligonucleotide
aguaucugccuaacauaug

SEQ ID NO: 1174017 - RNA, 19 nt, Artificial Sequence
  Description of Artificial Sequence: Synthetic oligonucleotide
gcuaggauguggcggcagg

SEQ ID NO: 1174018 - RNA, 19 nt, Artificial Sequence
  Description of Artificial Sequence: Synthetic oligonucleotide
ccaucuaccaggaaggugu

SEQ ID NO: 1174019 - RNA, 19 nt, Artificial Sequence
  Description of Artificial Sequence: Synthetic oligonucleotide
uggugugugaagguaucua

SEQ ID NO: 1174020 - RNA, 19 nt, Artificial Sequence
  Description of Artificial Sequence: Synthetic oligonucleotide
agcucgccuaggcagaguu

SEQ ID NO: 1174021 - RNA, 19 nt, Artificial Sequence
  Description of Artificial Sequence: Synthetic oligonucleotide
cagcggagcggaaauccac

SEQ ID NO: 1174022 - RNA, 19 nt, Artificial Sequence
  Description of Artificial Sequence: Synthetic oligonucleotide
ucuagacugguggcacagc

SEQ ID NO: 1174023 - RNA, 19 nt, Artificial Sequence
  Description of Artificial Sequence: Synthetic oligonucleotide
uccccuggaggaacuuaca

SEQ ID NO: 1174024 - RNA, 19 nt, Artificial Sequence
  Description of Artificial Sequence: Synthetic oligonucleotide
cucggaauuugacacugaa

SEQ ID NO: 1174025 - RNA, 19 nt, Artificial Sequence
  Description of Artificial Sequence: Synthetic oligonucleotide
uccgggcuucuacuacuug

SEQ ID NO: 1174026 - RNA, 19 nt, Artificial Sequence
  Description of Artificial Sequence: Synthetic oligonucleotide
uguacgcccggagcgcugc

SEQ ID NO: 1174027 - RNA, 19 nt, Artificial Sequence
  Description of Artificial Sequence: Synthetic oligonucleotide
gugcgugugauuagagcug

SEQ ID NO: 1174028 - RNA, 19 nt, Artificial Sequence
  Description of Artificial Sequence: Synthetic oligonucleotide
gagcgagugcuggauccgg

SEQ ID NO: 1174029 - RNA, 19 nt, Artificial Sequence
  Description of Artificial Sequence: Synthetic oligonucleotide
uguuccgaugggccugauc

SEQ ID NO: 1174030 - RNA, 19 nt, Artificial Sequence
  Description of Artificial Sequence: Synthetic oligonucleotide
agaugcggucguugagcag

SEQ ID NO: 1174031 - RNA, 19 nt, Artificial Sequence
  Description of Artificial Sequence: Synthetic oligonucleotide
agcggaaauccaccuccca

SEQ ID NO: 1174032 - RNA, 19 nt, Artificial Sequence
  Description of Artificial Sequence: Synthetic oligonucleotide
ccgggcuucuacuacuugc

SEQ ID NO: 1174033 - RNA, 19 nt, Artificial Sequence
  Description of Artificial Sequence: Synthetic oligonucleotide
cagcugucggcuaguuccc

SEQ ID NO: 1174034 - RNA, 19 nt, Artificial Sequence
  Description of Artificial Sequence: Synthetic oligonucleotide
aagccaacgcuaggguccu

SEQ ID NO: 1174035 - RNA, 19 nt, Artificial Sequence
  Description of Artificial Sequence: Synthetic oligonucleotide
gguguauaaauaagaccuc

SEQ ID NO: 1174036 - RNA, 19 nt, Artificial Sequence
  Description of Artificial Sequence: Synthetic oligonucleotide
cagguggaaggcuugguua

SEQ ID NO: 1174037 - RNA, 19 nt, Artificial Sequence
  Description of Artificial Sequence: Synthetic oligonucleotide
guaucgggugcucugggcu

SEQ ID NO: 1174038 - RNA, 19 nt, Artificial Sequence
  Description of Artificial Sequence: Synthetic oligonucleotide
cagaugcggucguugagca

SEQ ID NO: 1174039 - RNA, 19 nt, Artificial Sequence
  Description of Artificial Sequence: Synthetic oligonucleotide
aggcugucucaaaauaaga

SEQ ID NO: 1174040 - RNA, 19 nt, Artificial Sequence
  Description of Artificial Sequence: Synthetic oligonucleotide
guagguccgguguauaaau

SEQ ID NO: 1174041 - RNA, 19 nt, Artificial Sequence
  Description of Artificial Sequence: Synthetic oligonucleotide
caccgccaggugcuuaucc

SEQ ID NO: 1174042 - RNA, 19 nt, Artificial Sequence
  Description of Artificial Sequence: Synthetic oligonucleotide
cuggugggagcuguacgcc

SEQ ID NO: 1174043 - RNA, 19 nt, Artificial Sequence
  Description of Artificial Sequence: Synthetic oligonucleotide
aucgggugcucugggcucg

SEQ ID NO: 1174044 - RNA, 19 nt, Artificial Sequence
  Description of Artificial Sequence: Synthetic oligonucleotide
gcuaguucccgaagggugc

SEQ ID NO: 1174045 - RNA, 19 nt, Artificial Sequence
  Description of Artificial Sequence: Synthetic oligonucleotide
gcuauagcgacgcucaaau

SEQ ID NO: 1174046 - RNA, 19 nt, Artificial Sequence
  Description of Artificial Sequence: Synthetic oligonucleotide
ucagcauugugagggccau

SEQ ID NO: 1174047 - RNA, 19 nt, Artificial Sequence
  Description of Artificial Sequence: Synthetic oligonucleotide
gaucccgggugugggacgc

SEQ ID NO: 1174048 - RNA, 19 nt, Artificial Sequence
  Description of Artificial Sequence: Synthetic oligonucleotide
gauccgggcuucuacuacu

SEQ ID NO: 1174049 - RNA, 19 nt, Artificial Sequence
  Description of Artificial Sequence: Synthetic oligonucleotide
gcggaaauccaccucccac

SEQ ID NO: 1174050 - RNA, 19 nt, Artificial Sequence
  Description of Artificial Sequence: Synthetic oligonucleotide
cgaagggugcuauagcgac

SEQ ID NO: 1174051 - RNA, 19 nt, Artificial Sequence
  Description of Artificial Sequence: Synthetic oligonucleotide
ucuguuccgaugggccuga

SEQ ID NO: 1174052 - RNA, 19 nt, Artificial Sequence
  Description of Artificial Sequence: Synthetic oligonucleotide
cagugugaguggagcuccg

SEQ ID NO: 1174053 - RNA, 19 nt, Artificial Sequence
  Description of Artificial Sequence: Synthetic oligonucleotide
cuuuggugugugaagguau

SEQ ID NO: 1174054 - RNA, 19 nt, Artificial Sequence
  Description of Artificial Sequence: Synthetic oligonucleotide
ggugacguucgcguucagg

SEQ ID NO: 1174055 - RNA, 19 nt, Artificial Sequence
  Description of Artificial Sequence: Synthetic oligonucleotide
cauauguacugcucugggu

SEQ ID NO: 1174056 - RNA, 19 nt, Artificial Sequence
  Description of Artificial Sequence: Synthetic oligonucleotide
cugcugucaggaaggcaug

SEQ ID NO: 1174057 - RNA, 19 nt, Artificial Sequence
  Description of Artificial Sequence: Synthetic oligonucleotide
cugcaagagccgaccuacc

SEQ ID NO: 1174058 - RNA, 19 nt, Artificial Sequence
  Description of Artificial Sequence: Synthetic oligonucleotide
ggcucggaauuugacacug

SEQ ID NO: 1174059 - RNA, 19 nt, Artificial Sequence
  Description of Artificial Sequence: Synthetic oligonucleotide
cugaucccgggugugggac

SEQ ID NO: 1174060 - RNA, 19 nt, Artificial Sequence
  Description of Artificial Sequence: Synthetic oligonucleotide
agcgacgcucaaauuccuc

SEQ ID NO: 1174061 - RNA, 19 nt, Artificial Sequence
  Description of Artificial Sequence: Synthetic oligonucleotide
gauuagagcuguaccugcu

SEQ ID NO: 1174062 - RNA, 19 nt, Artificial Sequence
  Description of Artificial Sequence: Synthetic oligonucleotide
gcaagagccgaccuaccuc

SEQ ID NO: 1174063 - RNA, 19 nt, Artificial Sequence
  Description of Artificial Sequence: Synthetic oligonucleotide
ccagaugcggucguugagc

SEQ ID NO: 1174064 - RNA, 19 nt, Artificial Sequence
  Description of Artificial Sequence: Synthetic oligonucleotide
cccaguacugggucugugc

SEQ ID NO: 1174065 - RNA, 19 nt, Artificial Sequence
  Description of Artificial Sequence: Synthetic oligonucleotide
cauaagggccgauccagcu

SEQ ID NO: 1174066 - RNA, 19 nt, Artificial Sequence
  Description of Artificial Sequence: Synthetic oligonucleotide
cuguacauugugcguaucu

SEQ ID NO: 1174067 - RNA, 19 nt, Artificial Sequence
  Description of Artificial Sequence: Synthetic oligonucleotide
ucgggccagaggacccucc

SEQ ID NO: 1174068 - RNA, 19 nt, Artificial Sequence
  Description of Artificial Sequence: Synthetic oligonucleotide
acgcccggagcgcugcgag

SEQ ID NO: 1174069 - RNA, 19 nt, Artificial Sequence
  Description of Artificial Sequence: Synthetic oligonucleotide
agggugacguucgcguuca

SEQ ID NO: 1174070 - RNA, 19 nt, Artificial Sequence
  Description of Artificial Sequence: Synthetic oligonucleotide
gcuccggaaguaucgggug

SEQ ID NO: 1174071 - RNA, 19 nt, Artificial Sequence
  Description of Artificial Sequence: Synthetic oligonucleotide
ccuggugagaggcugucuc

SEQ ID NO: 1174072 - RNA, 19 nt, Artificial Sequence
  Description of Artificial Sequence: Synthetic oligonucleotide
ccgaccuaccuccucagug

SEQ ID NO: 1174073 - RNA, 19 nt, Artificial Sequence
  Description of Artificial Sequence: Synthetic oligonucleotide
auaagaccucagggaaaug

SEQ ID NO: 1174074 - RNA, 19 nt, Artificial Sequence
  Description of Artificial Sequence: Synthetic oligonucleotide
uuuccccuggaggaacuua

SEQ ID NO: 1174075 - RNA, 19 nt, Artificial Sequence
  Description of Artificial Sequence: Synthetic oligonucleotide
uguacccgggguccaucua

SEQ ID NO: 1174076 - RNA, 19 nt, Artificial Sequence
  Description of Artificial Sequence: Synthetic oligonucleotide
ggauccgggcuucuacuac

SEQ ID NO: 1174077 - RNA, 19 nt, Artificial Sequence
  Description of Artificial Sequence: Synthetic oligonucleotide
gcugcgagccggcuccacg

SEQ ID NO: 1174078 - RNA, 19 nt, Artificial Sequence
  Description of Artificial Sequence: Synthetic oligonucleotide
ggucguugagcagccagug

SEQ ID NO: 1174079 - RNA, 19 nt, Artificial Sequence
  Description of Artificial Sequence: Synthetic oligonucleotide
aguucccgaagggugcuau

SEQ ID NO: 1174080 - RNA, 19 nt, Artificial Sequence
  Description of Artificial Sequence: Synthetic oligonucleotide
caagcucgccuaggcagag

SEQ ID NO: 1174081 - RNA, 19 nt, Artificial Sequence
  Description of Artificial Sequence: Synthetic oligonucleotide
cacggcaagcucgccuagg

SEQ ID NO: 1174082 - RNA, 19 nt, Artificial Sequence
  Description of Artificial Sequence: Synthetic oligonucleotide
agcugucggcuaguucccg

SEQ ID NO: 1174083 - RNA, 19 nt, Artificial Sequence
  Description of Artificial Sequence: Synthetic oligonucleotide
gggucugugcgugugauua

SEQ ID NO: 1174084 - RNA, 19 nt, Artificial Sequence
  Description of Artificial Sequence: Synthetic oligonucleotide
ugggacgcggaagggugac

SEQ ID NO: 1174085 - RNA, 19 nt, Artificial Sequence
  Description of Artificial Sequence: Synthetic oligonucleotide
gccagaugcggucguugag

SEQ ID NO: 1174086 - RNA, 19 nt, Artificial Sequence
  Description of Artificial Sequence: Synthetic oligonucleotide
cgagaccacucauccaccg

SEQ ID NO: 1174087 - RNA, 19 nt, Artificial Sequence
  Description of Artificial Sequence: Synthetic oligonucleotide
gcauguaucugaacacaga

SEQ ID NO: 1174088 - RNA, 19 nt, Artificial Sequence
  Description of Artificial Sequence: Synthetic oligonucleotide
cugcugcauguaucugaac

SEQ ID NO: 1174089 - RNA, 19 nt, Artificial Sequence
  Description of Artificial Sequence: Synthetic oligonucleotide
gcaucggaaggagugugac

SEQ ID NO: 1174090 - RNA, 19 nt, Artificial Sequence
  Description of Artificial Sequence: Synthetic oligonucleotide
cgugugauuagagcuguac

SEQ ID NO: 1174091 - RNA, 19 nt, Artificial Sequence
  Description of Artificial Sequence: Synthetic oligonucleotide
gaagcacgcucuggaccug

SEQ ID NO: 1174092 - RNA, 19 nt, Artificial Sequence
  Description of Artificial Sequence: Synthetic oligonucleotide
gcugucuagacugguggca

SEQ ID NO: 1174093 - RNA, 19 nt, Artificial Sequence
  Description of Artificial Sequence: Synthetic oligonucleotide
cugucggcuaguucccgaa

SEQ ID NO: 1174094 - RNA, 19 nt, Artificial Sequence
  Description of Artificial Sequence: Synthetic oligonucleotide
cgcggaagggugacguucg

SEQ ID NO: 1174095 - RNA, 19 nt, Artificial Sequence
  Description of Artificial Sequence: Synthetic oligonucleotide
cugaggagucuugcugauc

SEQ ID NO: 1174096 - RNA, 19 nt, Artificial Sequence
  Description of Artificial Sequence: Synthetic oligonucleotide
gccaacgcuaggguccucc

SEQ ID NO: 1174097 - RNA, 19 nt, Artificial Sequence
  Description of Artificial Sequence: Synthetic oligonucleotide
cuggauccgggcuucuacu

SEQ ID NO: 1174098 - RNA, 19 nt, Artificial Sequence
  Description of Artificial Sequence: Synthetic oligonucleotide
cuguacgcccggagcgcug

SEQ ID NO: 1174099 - RNA, 19 nt, Artificial Sequence
  Description of Artificial Sequence: Synthetic oligonucleotide
gccuccgcggccgagacca

SEQ ID NO: 1174100 - RNA, 19 nt, Artificial Sequence
  Description of Artificial Sequence: Synthetic oligonucleotide
gggugcuauagcgacgcuc

SEQ ID NO: 1174101 - RNA, 19 nt, Artificial Sequence
  Description of Artificial Sequence: Synthetic oligonucleotide
aagcucgccuaggcagagu

SEQ ID NO: 1174102 - RNA, 19 nt, Artificial Sequence
  Description of Artificial Sequence: Synthetic oligonucleotide
ccgagaccacucauccacc

SEQ ID NO: 1174103 - RNA, 19 nt, Artificial Sequence
  Description of Artificial Sequence: Synthetic oligonucleotide
ccaacgcuaggguccuccc

SEQ ID NO: 1174104 - RNA, 19 nt, Artificial Sequence
  Description of Artificial Sequence: Synthetic oligonucleotide
caucuaccaggaaggugua

SEQ ID NO: 1174105 - RNA, 19 nt, Artificial Sequence
  Description of Artificial Sequence: Synthetic oligonucleotide
aucuaccaggaagguguau

SEQ ID NO: 1174106 - RNA, 19 nt, Artificial Sequence
  Description of Artificial Sequence: Synthetic oligonucleotide
gccuaacauauguacugcu

SEQ ID NO: 1174107 - RNA, 19 nt, Artificial Sequence
  Description of Artificial Sequence: Synthetic oligonucleotide
gucguugagcagccagugu

SEQ ID NO: 1174108 - RNA, 19 nt, Artificial Sequence
  Description of Artificial Sequence: Synthetic oligonucleotide
agggugcuauagcgacgcu

SEQ ID NO: 1174109 - RNA, 19 nt, Artificial Sequence
  Description of Artificial Sequence: Synthetic oligonucleotide
ccgaugggccugaucccgg

SEQ ID NO: 1174110 - RNA, 19 nt, Artificial Sequence
  Description of Artificial Sequence: Synthetic oligonucleotide
ccgaagggugcuauagcga

SEQ ID NO: 1174111 - RNA, 19 nt, Artificial Sequence
  Description of Artificial Sequence: Synthetic oligonucleotide
ggccugaucccgggugugg

SEQ ID NO: 1174112 - RNA, 19 nt, Artificial Sequence
  Description of Artificial Sequence: Synthetic oligonucleotide
gccuaggcagaguugggcu

SEQ ID NO: 1174113 - RNA, 19 nt, Artificial Sequence
  Description of Artificial Sequence: Synthetic oligonucleotide
acuguccuugggacucaca

SEQ ID NO: 1174114 - RNA, 19 nt, Artificial Sequence
  Description of Artificial Sequence: Synthetic oligonucleotide
cccgggguccaucuaccag

SEQ ID NO: 1174115 - RNA, 19 nt, Artificial Sequence
  Description of Artificial Sequence: Synthetic oligonucleotide
acguucgcguucaggccca

SEQ ID NO: 1174116 - RNA, 19 nt, Artificial Sequence
  Description of Artificial Sequence: Synthetic oligonucleotide
gucaccgccaggugcuuau

SEQ ID NO: 1174117 - RNA, 19 nt, Artificial Sequence
  Description of Artificial Sequence: Synthetic oligonucleotide
ggcuaggauguggcggcag

SEQ ID NO: 1174118 - RNA, 19 nt, Artificial Sequence
  Description of Artificial Sequence: Synthetic oligonucleotide
caaaugggguggugccgaa

SEQ ID NO: 1174119 - RNA, 19 nt, Artificial Sequence
  Description of Artificial Sequence: Synthetic oligonucleotide
gggcuguacauugugcgua

SEQ ID NO: 1174120 - RNA, 19 nt, Artificial Sequence
  Description of Artificial Sequence: Synthetic oligonucleotide
cauugagcgagugcuggau

SEQ ID NO: 1174121 - RNA, 19 nt, Artificial Sequence
  Description of Artificial Sequence: Synthetic oligonucleotide
cgaccuaccuccucaguga

SEQ ID NO: 1174122 - RNA, 19 nt, Artificial Sequence
  Description of Artificial Sequence: Synthetic oligonucleotide
ggcaucggaaggaguguga

SEQ ID NO: 1174123 - RNA, 19 nt, Artificial Sequence
  Description of Artificial Sequence: Synthetic oligonucleotide
gccggcuccacgccuccgc

SEQ ID NO: 1174124 - RNA, 19 nt, Artificial Sequence
  Description of Artificial Sequence: Synthetic oligonucleotide
gugcuauagcgacgcucaa

SEQ ID NO: 1174125 - RNA, 19 nt, Artificial Sequence
  Description of Artificial Sequence: Synthetic oligonucleotide
ggaagguguauaauaccuu

SEQ ID NO: 1174126 - RNA, 19 nt, Artificial Sequence
  Description of Artificial Sequence: Synthetic oligonucleotide
ggguuguagguccggugua

SEQ ID NO: 1174127 - RNA, 19 nt, Artificial Sequence
  Description of Artificial Sequence: Synthetic oligonucleotide
cuauagcgacgcucaaauu

SEQ ID NO: 1174128 - RNA, 19 nt, Artificial Sequence
  Description of Artificial Sequence: Synthetic oligonucleotide
gugggacgcggaaggguga

SEQ ID NO: 1174129 - RNA, 19 nt, Artificial Sequence
  Description of Artificial Sequence: Synthetic oligonucleotide
ggcuccggaaguaucgggu

SEQ ID NO: 1174130 - RNA, 19 nt, Artificial Sequence
  Description of Artificial Sequence: Synthetic oligonucleotide
gggacgcggaagggugacg

SEQ ID NO: 1174131 - RNA, 19 nt, Artificial Sequence
  Description of Artificial Sequence: Synthetic oligonucleotide
ccggcuccacgccuccgcg

SEQ ID NO: 1174132 - RNA, 19 nt, Artificial Sequence
  Description of Artificial Sequence: Synthetic oligonucleotide
caacgcuaggguccucccu

SEQ ID NO: 1174133 - RNA, 19 nt, Artificial Sequence
  Description of Artificial Sequence: Synthetic oligonucleotide
ccagcggagcggaaaucca

SEQ ID NO: 1174134 - RNA, 19 nt, Artificial Sequence
  Description of Artificial Sequence: Synthetic oligonucleotide
ggcuguacauugugcguau

SEQ ID NO: 1174135 - RNA, 19 nt, Artificial Sequence
  Description of Artificial Sequence: Synthetic oligonucleotide
gcggaagggugacguucgc

SEQ ID NO: 1174136 - RNA, 19 nt, Artificial Sequence
  Description of Artificial Sequence: Synthetic oligonucleotide
guccaucuaccaggaaggu

SEQ ID NO: 1174137 - RNA, 19 nt, Artificial Sequence
  Description of Artificial Sequence: Synthetic oligonucleotide
ggacgcggaagggugacgu

SEQ ID NO: 1174138 - RNA, 19 nt, Artificial Sequence
  Description of Artificial Sequence: Synthetic oligonucleotide
cgccuaggcagaguugggc

SEQ ID NO: 1174139 - RNA, 19 nt, Artificial Sequence
  Description of Artificial Sequence: Synthetic oligonucleotide
cacagaugccaugccuugu

SEQ ID NO: 1174140 - RNA, 19 nt, Artificial Sequence
  Description of Artificial Sequence: Synthetic oligonucleotide
gcuguacauugugcguauc

SEQ ID NO: 1174141 - RNA, 19 nt, Artificial Sequence
  Description of Artificial Sequence: Synthetic oligonucleotide
cgcguucaggcccagcgga

SEQ ID NO: 1174142 - RNA, 19 nt, Artificial Sequence
  Description of Artificial Sequence: Synthetic oligonucleotide
gacgcggaagggugacguu

SEQ ID NO: 1174143 - RNA, 19 nt, Artificial Sequence
  Description of Artificial Sequence: Synthetic oligonucleotide
agccaacgcuaggguccuc

SEQ ID NO: 1174144 - RNA, 19 nt, Artificial Sequence
  Description of Artificial Sequence: Synthetic oligonucleotide
ccugaucccggguguggga

SEQ ID NO: 1174145 - RNA, 19 nt, Artificial Sequence
  Description of Artificial Sequence: Synthetic oligonucleotide
gcggagcacaucgugcucu

SEQ ID NO: 1174146 - RNA, 19 nt, Artificial Sequence
  Description of Artificial Sequence: Synthetic oligonucleotide
gcucggaauuugacacuga

SEQ ID NO: 1174147 - RNA, 19 nt, Artificial Sequence
  Description of Artificial Sequence: Synthetic oligonucleotide
cuguggcggagcacaucgu

SEQ ID NO: 1174148 - RNA, 19 nt, Artificial Sequence
  Description of Artificial Sequence: Synthetic oligonucleotide
gccgauccagcugucggcu

SEQ ID NO: 1174149 - RNA, 19 nt, Artificial Sequence
  Description of Artificial Sequence: Synthetic oligonucleotide
gcggugggccagccagaug

SEQ ID NO: 1174150 - RNA, 19 nt, Artificial Sequence
  Description of Artificial Sequence: Synthetic oligonucleotide
gggugacguucgcguucag

SEQ ID NO: 1174151 - RNA, 19 nt, Artificial Sequence
  Description of Artificial Sequence: Synthetic oligonucleotide
ggcccagcggagcggaaau

SEQ ID NO: 1174152 - RNA, 19 nt, Artificial Sequence
  Description of Artificial Sequence: Synthetic oligonucleotide
ccggaaguaucgggugcuc

SEQ ID NO: 1174153 - RNA, 19 nt, Artificial Sequence
  Description of Artificial Sequence: Synthetic oligonucleotide
cagcuguggcggagcacau

SEQ ID NO: 1174154 - RNA, 19 nt, Artificial Sequence
  Description of Artificial Sequence: Synthetic oligonucleotide
cgcccggagcgcugcgagc

SEQ ID NO: 1174155 - RNA, 19 nt, Artificial Sequence
  Description of Artificial Sequence: Synthetic oligonucleotide
gagucaccgccaggugcuu

SEQ ID NO: 1174156 - RNA, 19 nt, Artificial Sequence
  Description of Artificial Sequence: Synthetic oligonucleotide
cuccgcggccgagaccacu

SEQ ID NO: 1174157 - RNA, 19 nt, Artificial Sequence
  Description of Artificial Sequence: Synthetic oligonucleotide
ccgauccagcugucggcua

SEQ ID NO: 1174158 - RNA, 19 nt, Artificial Sequence
  Description of Artificial Sequence: Synthetic oligonucleotide
gcgugugauuagagcugua

SEQ ID NO: 1174159 - RNA, 19 nt, Artificial Sequence
  Description of Artificial Sequence: Synthetic oligonucleotide
ggagcgcugcgagccggcu

SEQ ID NO: 1174160 - RNA, 19 nt, Artificial Sequence
  Description of Artificial Sequence: Synthetic oligonucleotide
ggguggcacuccacuugcu

SEQ ID NO: 1174161 - RNA, 19 nt, Artificial Sequence
  Description of Artificial Sequence: Synthetic oligonucleotide
cggaaguaucgggugcucu

SEQ ID NO: 1174162 - RNA, 19 nt, Artificial Sequence
  Description of Artificial Sequence: Synthetic oligonucleotide
gcgcugcgagccggcucca

SEQ ID NO: 1174163 - RNA, 19 nt, Artificial Sequence
  Description of Artificial Sequence: Synthetic oligonucleotide
aauauguggauacacaucc

SEQ ID NO: 1174164 - RNA, 19 nt, Artificial Sequence
  Description of Artificial Sequence: Synthetic oligonucleotide
aaaacuaauguucucaggg

SEQ ID NO: 1174165 - RNA, 19 nt, Artificial Sequence
  Description of Artificial Sequence: Synthetic oligonucleotide
ugaauaacaauauaaagcc

SEQ ID NO: 1174166 - RNA, 19 nt, Artificial Sequence
  Description of Artificial Sequence: Synthetic oligonucleotide
uugaauaacaauauaaagc

SEQ ID NO: 1174167 - RNA, 19 nt, Artificial Sequence
  Description of Artificial Sequence: Synthetic oligonucleotide
ugagauauacaauuaaugg

SEQ ID NO: 1174168 - RNA, 19 nt, Artificial Sequence
  Description of Artificial Sequence: Synthetic oligonucleotide
aauuuguccaucuugagca

SEQ ID NO: 1174169 - RNA, 19 nt, Artificial Sequence
  Description of Artificial Sequence: Synthetic oligonucleotide
aaauauaugucucugaaaa

SEQ ID NO: 1174170 - RNA, 19 nt, Artificial Sequence
  Description of Artificial Sequence: Synthetic oligonucleotide
ucauacaauacacaguugg

SEQ ID NO: 1174171 - RNA, 19 nt, Artificial Sequence
  Description of Artificial Sequence: Synthetic oligonucleotide
auaauaacaguucucaguc

SEQ ID NO: 1174172 - RNA, 19 nt, Artificial Sequence
  Description of Artificial Sequence: Synthetic oligonucleotide
gagauauacaauuaauggg

SEQ ID NO: 1174173 - RNA, 19 nt, Artificial Sequence
  Description of Artificial Sequence: Synthetic oligonucleotide
aaaacgucaaucaagagug

SEQ ID NO: 1174174 - RNA, 19 nt, Artificial Sequence
  Description of Artificial Sequence: Synthetic oligonucleotide
aauuaauggggacugaaug

SEQ ID NO: 1174175 - RNA, 19 nt, Artificial Sequence
  Description of Artificial Sequence: Synthetic oligonucleotide
aaagucacguuugauagcc

SEQ ID NO: 1174176 - RNA, 19 nt, Artificial Sequence
  Description of Artificial Sequence: Synthetic oligonucleotide
auagucguaaggcaggucc

SEQ ID NO: 1174177 - RNA, 19 nt, Artificial Sequence
  Description of Artificial Sequence: Synthetic oligonucleotide
auugaauaacaauauaaag

SEQ ID NO: 1174178 - RNA, 19 nt, Artificial Sequence
  Description of Artificial Sequence: Synthetic oligonucleotide
cuuacaaugacagucauag

SEQ ID NO: 1174179 - RNA, 19 nt, Artificial Sequence
  Description of Artificial Sequence: Synthetic oligonucleotide
uuuauguccaucaaauaug

SEQ ID NO: 1174180 - RNA, 19 nt, Artificial Sequence
  Description of Artificial Sequence: Synthetic oligonucleotide
ucaacaaccaagcuauggg

SEQ ID NO: 1174181 - RNA, 19 nt, Artificial Sequence
  Description of Artificial Sequence: Synthetic oligonucleotide
uuaucauaauuuuaugucc

SEQ ID NO: 1174182 - RNA, 19 nt, Artificial Sequence
  Description of Artificial Sequence: Synthetic oligonucleotide
ucucaaaagauccaaaguc

SEQ ID NO: 1174183 - RNA, 19 nt, Artificial Sequence
  Description of Artificial Sequence: Synthetic oligonucleotide
auuaauggggacugaaugg

SEQ ID NO: 1174184 - RNA, 19 nt, Artificial Sequence
  Description of Artificial Sequence: Synthetic oligonucleotide
auagccuucagauaaucgg

SEQ ID NO: 1174185 - RNA, 19 nt, Artificial Sequence
  Description of Artificial Sequence: Synthetic oligonucleotide
uauugaauaacaauauaaa

SEQ ID NO: 1174186 - RNA, 19 nt, Artificial Sequence
  Description of Artificial Sequence: Synthetic oligonucleotide
aaaauggagugauugauau

SEQ ID NO: 1174187 - RNA, 19 nt, Artificial Sequence
  Description of Artificial Sequence: Synthetic oligonucleotide
aacaauauaaagccccucu

SEQ ID NO: 1174188 - RNA, 19 nt, Artificial Sequence
  Description of Artificial Sequence: Synthetic oligonucleotide
aauauaaagccccucuggu

SEQ ID NO: 1174189 - RNA, 19 nt, Artificial Sequence
  Description of Artificial Sequence: Synthetic oligonucleotide
aaagguaccacuuggccca

SEQ ID NO: 1174190 - RNA, 19 nt, Artificial Sequence
  Description of Artificial Sequence: Synthetic oligonucleotide
aaauguuacaagaaagcag

SEQ ID NO: 1174191 - RNA, 19 nt, Artificial Sequence
  Description of Artificial Sequence: Synthetic oligonucleotide
uaugauaaggcuuuacuuc

SEQ ID NO: 1174192 - RNA, 19 nt, Artificial Sequence
  Description of Artificial Sequence: Synthetic oligonucleotide
uacuguaaauucuugaaac

SEQ ID NO: 1174193 - RNA, 19 nt, Artificial Sequence
  Description of Artificial Sequence: Synthetic oligonucleotide
ucucugaaaacuaauguuc

SEQ ID NO: 1174194 - RNA, 19 nt, Artificial Sequence
  Description of Artificial Sequence: Synthetic oligonucleotide
uuugauagccuccagcaac

SEQ ID NO: 1174195 - RNA, 19 nt, Artificial Sequence
  Description of Artificial Sequence: Synthetic oligonucleotide
acuuaucauaauuuuaugu

SEQ ID NO: 1174196 - RNA, 19 nt, Artificial Sequence
  Description of Artificial Sequence: Synthetic oligonucleotide
aacuaauguucucagggug

SEQ ID NO: 1174197 - RNA, 19 nt, Artificial Sequence
  Description of Artificial Sequence: Synthetic oligonucleotide
agcaacaaggguuuaauga

SEQ ID NO: 1174198 - RNA, 19 nt, Artificial Sequence
  Description of Artificial Sequence: Synthetic oligonucleotide
uaaauguuacaagaaagca

SEQ ID NO: 1174199 - RNA, 19 nt, Artificial Sequence
  Description of Artificial Sequence: Synthetic oligonucleotide
auauacuguucucaaacag

SEQ ID NO: 1174200 - RNA, 19 nt, Artificial Sequence
  Description of Artificial Sequence: Synthetic oligonucleotide
aaggguuuaaugaaaacgu

SEQ ID NO: 1174201 - RNA, 19 nt, Artificial Sequence
  Description of Artificial Sequence: Synthetic oligonucleotide
gaaagguaccacuuggccc

SEQ ID NO: 1174202 - RNA, 19 nt, Artificial Sequence
  Description of Artificial Sequence: Synthetic oligonucleotide
uuccaaauagccuucagau

SEQ ID NO: 1174203 - RNA, 19 nt, Artificial Sequence
  Description of Artificial Sequence: Synthetic oligonucleotide
aagaacuuaucauaauuuu

SEQ ID NO: 1174204 - RNA, 19 nt, Artificial Sequence
  Description of Artificial Sequence: Synthetic oligonucleotide
uccuuauugaagccaagcc

SEQ ID NO: 1174205 - RNA, 19 nt, Artificial Sequence
  Description of Artificial Sequence: Synthetic oligonucleotide
caauauaaagccccucugg

SEQ ID NO: 1174206 - RNA, 19 nt, Artificial Sequence
  Description of Artificial Sequence: Synthetic oligonucleotide
aaucacacuccucucauaa

SEQ ID NO: 1174207 - RNA, 19 nt, Artificial Sequence
  Description of Artificial Sequence: Synthetic oligonucleotide
gagugauucacacagagua

SEQ ID NO: 1174208 - RNA, 19 nt, Artificial Sequence
  Description of Artificial Sequence: Synthetic oligonucleotide
aagcagucauaguuacugc

SEQ ID NO: 1174209 - RNA, 19 nt, Artificial Sequence
  Description of Artificial Sequence: Synthetic oligonucleotide
aaacuaauguucucagggu

SEQ ID NO: 1174210 - RNA, 19 nt, Artificial Sequence
  Description of Artificial Sequence: Synthetic oligonucleotide
ucugguuacuguaaauucu

SEQ ID NO: 1174211 - RNA, 19 nt, Artificial Sequence
  Description of Artificial Sequence: Synthetic oligonucleotide
aauaagaacuuaucauaau

SEQ ID NO: 1174212 - RNA, 19 nt, Artificial Sequence
  Description of Artificial Sequence: Synthetic oligonucleotide
auaagaacuuaucauaauu

SEQ ID NO: 1174213 - RNA, 19 nt, Artificial Sequence
  Description of Artificial Sequence: Synthetic oligonucleotide
ucaccuaauaguaaauuua

SEQ ID NO: 1174214 - RNA, 19 nt, Artificial Sequence
  Description of Artificial Sequence: Synthetic oligonucleotide
acuacaauuucuuuucuaa

SEQ ID NO: 1174215 - RNA, 19 nt, Artificial Sequence
  Description of Artificial Sequence: Synthetic oligonucleotide
aaauaagaacuuaucauaa

SEQ ID NO: 1174216 - RNA, 19 nt, Artificial Sequence
  Description of Artificial Sequence: Synthetic oligonucleotide
ucugagauauacaauuaau

SEQ ID NO: 1174217 - RNA, 19 nt, Artificial Sequence
  Description of Artificial Sequence: Synthetic oligonucleotide
auaguuacugcacuacucu

SEQ ID NO: 1174218 - RNA, 19 nt, Artificial Sequence
  Description of Artificial Sequence: Synthetic oligonucleotide
uggcauccuagcaacaagg

SEQ ID NO: 1174219 - RNA, 19 nt, Artificial Sequence
  Description of Artificial Sequence: Synthetic oligonucleotide
aggaauauuucugaugguc

SEQ ID NO: 1174220 - RNA, 19 nt, Artificial Sequence
  Description of Artificial Sequence: Synthetic oligonucleotide
uauauacuguucucaaaca

SEQ ID NO: 1174221 - RNA, 19 nt, Artificial Sequence
  Description of Artificial Sequence: Synthetic oligonucleotide
acagaguauauacuguucu

SEQ ID NO: 1174222 - RNA, 19 nt, Artificial Sequence
  Description of Artificial Sequence: Synthetic oligonucleotide
aacccauuugccucuacug

SEQ ID NO: 1174223 - RNA, 19 nt, Artificial Sequence
  Description of Artificial Sequence: Synthetic oligonucleotide
aauagccuucagauaaucg

SEQ ID NO: 1174224 - RNA, 19 nt, Artificial Sequence
  Description of Artificial Sequence: Synthetic oligonucleotide
aguggguccugauuagagc

SEQ ID NO: 1174225 - RNA, 19 nt, Artificial Sequence
  Description of Artificial Sequence: Synthetic oligonucleotide
acguuugauagccuccagc

SEQ ID NO: 1174226 - RNA, 19 nt, Artificial Sequence
  Description of Artificial Sequence: Synthetic oligonucleotide
augauaaggcuuuacuucu

SEQ ID NO: 1174227 - RNA, 19 nt, Artificial Sequence
  Description of Artificial Sequence: Synthetic oligonucleotide
caucgaaggccuaacauac

SEQ ID NO: 1174228 - RNA, 19 nt, Artificial Sequence
  Description of Artificial Sequence: Synthetic oligonucleotide
cuguaagcgacccugcucc

SEQ ID NO: 1174229 - RNA, 19 nt, Artificial Sequence
  Description of Artificial Sequence: Synthetic oligonucleotide
augaucugcgcguugaugu

SEQ ID NO: 1174230 - RNA, 19 nt, Artificial Sequence
  Description of Artificial Sequence: Synthetic oligonucleotide
gaagguaauaggcaugcuc

SEQ ID NO: 1174231 - RNA, 19 nt, Artificial Sequence
  Description of Artificial Sequence: Synthetic oligonucleotide
aauacggccguucgcucuc

SEQ ID NO: 1174232 - RNA, 19 nt, Artificial Sequence
  Description of Artificial Sequence: Synthetic oligonucleotide
uacuccauaugauaaggcu

SEQ ID NO: 1174233 - RNA, 19 nt, Artificial Sequence
  Description of Artificial Sequence: Synthetic oligonucleotide
uacaauacacaguugguuu

SEQ ID NO: 1174234 - RNA, 19 nt, Artificial Sequence
  Description of Artificial Sequence: Synthetic oligonucleotide
auaugauaaggcuuuacuu

SEQ ID NO: 1174235 - RNA, 19 nt, Artificial Sequence
  Description of Artificial Sequence: Synthetic oligonucleotide
aaauagccuucagauaauc

SEQ ID NO: 1174236 - RNA, 19 nt, Artificial Sequence
  Description of Artificial Sequence: Synthetic oligonucleotide
agucguaacaucucccuug

SEQ ID NO: 1174237 - RNA, 19 nt, Artificial Sequence
  Description of Artificial Sequence: Synthetic oligonucleotide
ugccuuacagaaaauccca

SEQ ID NO: 1174238 - RNA, 19 nt, Artificial Sequence
  Description of Artificial Sequence: Synthetic oligonucleotide
acaauauaaagccccucug

SEQ ID NO: 1174239 - RNA, 19 nt, Artificial Sequence
  Description of Artificial Sequence: Synthetic oligonucleotide
accauugaacuucagggca

SEQ ID NO: 1174240 - RNA, 19 nt, Artificial Sequence
  Description of Artificial Sequence: Synthetic oligonucleotide
cuaacugcaguagaacagg

SEQ ID NO: 1174241 - RNA, 19 nt, Artificial Sequence
  Description of Artificial Sequence: Synthetic oligonucleotide
uauaugucucugaaaacua

SEQ ID NO: 1174242 - RNA, 19 nt, Artificial Sequence
  Description of Artificial Sequence: Synthetic oligonucleotide
uucugagauauacaauuaa

SEQ ID NO: 1174243 - RNA, 19 nt, Artificial Sequence
  Description of Artificial Sequence: Synthetic oligonucleotide
ccaccauugaacuucaggg

SEQ ID NO: 1174244 - RNA, 19 nt, Artificial Sequence
  Description of Artificial Sequence: Synthetic oligonucleotide
cucaaaagauccaaaguca

SEQ ID NO: 1174245 - RNA, 19 nt, Artificial Sequence
  Description of Artificial Sequence: Synthetic oligonucleotide
acuacucuauacuacuaca

SEQ ID NO: 1174246 - RNA, 19 nt, Artificial Sequence
  Description of Artificial Sequence: Synthetic oligonucleotide
aacaggauuccagacucuc

SEQ ID NO: 1174247 - RNA, 19 nt, Artificial Sequence
  Description of Artificial Sequence: Synthetic oligonucleotide
ccaguacugagauagagcc

SEQ ID NO: 1174248 - RNA, 19 nt, Artificial Sequence
  Description of Artificial Sequence: Synthetic oligonucleotide
agucacguuugauagccuc

SEQ ID NO: 1174249 - RNA, 19 nt, Artificial Sequence
  Description of Artificial Sequence: Synthetic oligonucleotide
uuagggcucagguuugucc

SEQ ID NO: 1174250 - RNA, 19 nt, Artificial Sequence
  Description of Artificial Sequence: Synthetic oligonucleotide
ugucaccuugucauggaag

SEQ ID NO: 1174251 - RNA, 19 nt, Artificial Sequence
  Description of Artificial Sequence: Synthetic oligonucleotide
uguucucaaacagucaccu

SEQ ID NO: 1174252 - RNA, 19 nt, Artificial Sequence
  Description of Artificial Sequence: Synthetic oligonucleotide
aaacccauuugccucuacu

SEQ ID NO: 1174253 - RNA, 19 nt, Artificial Sequence
  Description of Artificial Sequence: Synthetic oligonucleotide
gagugauugauaugucccc

SEQ ID NO: 1174254 - RNA, 19 nt, Artificial Sequence
  Description of Artificial Sequence: Synthetic oligonucleotide
uacccuacugaucucacuc

SEQ ID NO: 1174255 - RNA, 19 nt, Artificial Sequence
  Description of Artificial Sequence: Synthetic oligonucleotide
ugauggucuuacaaugaca

SEQ ID NO: 1174256 - RNA, 19 nt, Artificial Sequence
  Description of Artificial Sequence: Synthetic oligonucleotide
agcaaucuguaagcgaccc

SEQ ID NO: 1174257 - RNA, 19 nt, Artificial Sequence
  Description of Artificial Sequence: Synthetic oligonucleotide
ucucauaauaacaguucuc

SEQ ID NO: 1174258 - RNA, 19 nt, Artificial Sequence
  Description of Artificial Sequence: Synthetic oligonucleotide
ugugcuuaugccgggagcc

SEQ ID NO: 1174259 - RNA, 19 nt, Artificial Sequence
  Description of Artificial Sequence: Synthetic oligonucleotide
aguugauuacauuccaaau

SEQ ID NO: 1174260 - RNA, 19 nt, Artificial Sequence
  Description of Artificial Sequence: Synthetic oligonucleotide
ccaaagucacguuugauag

SEQ ID NO: 1174261 - RNA, 19 nt, Artificial Sequence
  Description of Artificial Sequence: Synthetic oligonucleotide
aaucuguaagcgacccugc

SEQ ID NO: 1174262 - RNA, 19 nt, Artificial Sequence
  Description of Artificial Sequence: Synthetic oligonucleotide
ugaaaacgucaaucaagag

SEQ ID NO: 1174263 - RNA, 19 nt, Artificial Sequence
  Description of Artificial Sequence: Synthetic oligonucleotide
aaauauccaucgaaggccu

SEQ ID NO: 1174264 - RNA, 19 nt, Artificial Sequence
  Description of Artificial Sequence: Synthetic oligonucleotide
uuauugaagccaagccagc

SEQ ID NO: 1174265 - RNA, 19 nt, Artificial Sequence
  Description of Artificial Sequence: Synthetic oligonucleotide
agaguauauacuguucuca

SEQ ID NO: 1174266 - RNA, 19 nt, Artificial Sequence
  Description of Artificial Sequence: Synthetic oligonucleotide
ugagucguaacaucucccu

SEQ ID NO: 1174267 - RNA, 19 nt, Artificial Sequence
  Description of Artificial Sequence: Synthetic oligonucleotide
ucgaaggccuaacauacuc

SEQ ID NO: 1174268 - RNA, 19 nt, Artificial Sequence
  Description of Artificial Sequence: Synthetic oligonucleotide
acaaugacagucauagaug

SEQ ID NO: 1174269 - RNA, 19 nt, Artificial Sequence
  Description of Artificial Sequence: Synthetic oligonucleotide
gaaggccuaacauacucca

SEQ ID NO: 1174270 - RNA, 19 nt, Artificial Sequence
  Description of Artificial Sequence: Synthetic oligonucleotide
cucagaauacggccguucg

SEQ ID NO: 1174271 - RNA, 19 nt, Artificial Sequence
  Description of Artificial Sequence: Synthetic oligonucleotide
aacuacaauuucuuuucua

SEQ ID NO: 1174272 - RNA, 19 nt, Artificial Sequence
  Description of Artificial Sequence: Synthetic oligonucleotide
aguggccuaguccccaugg

SEQ ID NO: 1174273 - RNA, 19 nt, Artificial Sequence
  Description of Artificial Sequence: Synthetic oligonucleotide
cugaagguaauaggcaugc

SEQ ID NO: 1174274 - RNA, 19 nt, Artificial Sequence
  Description of Artificial Sequence: Synthetic oligonucleotide
auacuccauaugauaaggc

SEQ ID NO: 1174275 - RNA, 19 nt, Artificial Sequence
  Description of Artificial Sequence: Synthetic oligonucleotide
ucagaauacggccguucgc

SEQ ID NO: 1174276 - RNA, 19 nt, Artificial Sequence
  Description of Artificial Sequence: Synthetic oligonucleotide
ugugaaucuuucagugaca

SEQ ID NO: 1174277 - RNA, 19 nt, Artificial Sequence
  Description of Artificial Sequence: Synthetic oligonucleotide
uauugaagccaagccagcc

SEQ ID NO: 1174278 - RNA, 19 nt, Artificial Sequence
  Description of Artificial Sequence: Synthetic oligonucleotide
caaucuguaagcgacccug

SEQ ID NO: 1174279 - RNA, 19 nt, Artificial Sequence
  Description of Artificial Sequence: Synthetic oligonucleotide
gucguaacaucucccuugg

SEQ ID NO: 1174280 - RNA, 19 nt, Artificial Sequence
  Description of Artificial Sequence: Synthetic oligonucleotide
aggaacacaaucagaaaug

SEQ ID NO: 1174281 - RNA, 19 nt, Artificial Sequence
  Description of Artificial Sequence: Synthetic oligonucleotide
uucauacaauacacaguug

SEQ ID NO: 1174282 - RNA, 19 nt, Artificial Sequence
  Description of Artificial Sequence: Synthetic oligonucleotide
cauaauaacaguucucagu

SEQ ID NO: 1174283 - RNA, 19 nt, Artificial Sequence
  Description of Artificial Sequence: Synthetic oligonucleotide
uuccaguacugagauagag

SEQ ID NO: 1174284 - RNA, 19 nt, Artificial Sequence
  Description of Artificial Sequence: Synthetic oligonucleotide
ugaugugcggcuccagcgc

SEQ ID NO: 1174285 - RNA, 19 nt, Artificial Sequence
  Description of Artificial Sequence: Synthetic oligonucleotide
acgucgauccccaacagag

SEQ ID NO: 1174286 - RNA, 19 nt, Artificial Sequence
  Description of Artificial Sequence: Synthetic oligonucleotide
cagacucuccuacaggccc

SEQ ID NO: 1174287 - RNA, 19 nt, Artificial Sequence
  Description of Artificial Sequence: Synthetic oligonucleotide
gaugugcggcuccagcgcg

SEQ ID NO: 1174288 - RNA, 19 nt, Artificial Sequence
  Description of Artificial Sequence: Synthetic oligonucleotide
gaacuuaucauaauuuuau

SEQ ID NO: 1174289 - RNA, 19 nt, Artificial Sequence
  Description of Artificial Sequence: Synthetic oligonucleotide
ucuguaagcgacccugcuc

SEQ ID NO: 1174290 - RNA, 19 nt, Artificial Sequence
  Description of Artificial Sequence: Synthetic oligonucleotide
aaugcccaguggccuaguc

SEQ ID NO: 1174291 - RNA, 19 nt, Artificial Sequence
  Description of Artificial Sequence: Synthetic oligonucleotide
aguauauacuguucucaaa

SEQ ID NO: 1174292 - RNA, 19 nt, Artificial Sequence
  Description of Artificial Sequence: Synthetic oligonucleotide
uuggcccacaauauaguuc

SEQ ID NO: 1174293 - RNA, 19 nt, Artificial Sequence
  Description of Artificial Sequence: Synthetic oligonucleotide
gaguauauacuguucucaa

SEQ ID NO: 1174294 - RNA, 19 nt, Artificial Sequence
  Description of Artificial Sequence: Synthetic oligonucleotide
acaaucagaaaugcagugu

SEQ ID NO: 1174295 - RNA, 19 nt, Artificial Sequence
  Description of Artificial Sequence: Synthetic oligonucleotide
aaccugagucguaacaucu

SEQ ID NO: 1174296 - RNA, 19 nt, Artificial Sequence
  Description of Artificial Sequence: Synthetic oligonucleotide
cacuacucuauacuacuac

SEQ ID NO: 1174297 - RNA, 19 nt, Artificial Sequence
  Description of Artificial Sequence: Synthetic oligonucleotide
ccaucaaauauguggauac

SEQ ID NO: 1174298 - RNA, 19 nt, Artificial Sequence
  Description of Artificial Sequence: Synthetic oligonucleotide
gacugaauggcuucccaga

SEQ ID NO: 1174299 - RNA, 19 nt, Artificial Sequence
  Description of Artificial Sequence: Synthetic oligonucleotide
uaugccgggagcccgcggc

SEQ ID NO: 1174300 - RNA, 19 nt, Artificial Sequence
  Description of Artificial Sequence: Synthetic oligonucleotide
ggagugauugauauguccc

SEQ ID NO: 1174301 - RNA, 19 nt, Artificial Sequence
  Description of Artificial Sequence: Synthetic oligonucleotide
cacaacaugcugaggugcc

SEQ ID NO: 1174302 - RNA, 19 nt, Artificial Sequence
  Description of Artificial Sequence: Synthetic oligonucleotide
aucaagagugauucacaca

SEQ ID NO: 1174303 - RNA, 19 nt, Artificial Sequence
  Description of Artificial Sequence: Synthetic oligonucleotide
cuuuggguucuccaccacc

SEQ ID NO: 1174304 - RNA, 19 nt, Artificial Sequence
  Description of Artificial Sequence: Synthetic oligonucleotide
ugauacccuacugaucuca

SEQ ID NO: 1174305 - RNA, 19 nt, Artificial Sequence
  Description of Artificial Sequence: Synthetic oligonucleotide
ugcuccuuauugaagccaa

SEQ ID NO: 1174306 - RNA, 19 nt, Artificial Sequence
  Description of Artificial Sequence: Synthetic oligonucleotide
ccuaacauacuccauauga

SEQ ID NO: 1174307 - RNA, 19 nt, Artificial Sequence
  Description of Artificial Sequence: Synthetic oligonucleotide
ucagggugauacccuacug

SEQ ID NO: 1174308 - RNA, 19 nt, Artificial Sequence
  Description of Artificial Sequence: Synthetic oligonucleotide
caaagucacguuugauagc

SEQ ID NO: 1174309 - RNA, 19 nt, Artificial Sequence
  Description of Artificial Sequence: Synthetic oligonucleotide
uagcaacaaggguuuaaug

SEQ ID NO: 1174310 - RNA, 19 nt, Artificial Sequence
  Description of Artificial Sequence: Synthetic oligonucleotide
cugagucguaacaucuccc

SEQ ID NO: 1174311 - RNA, 19 nt, Artificial Sequence
  Description of Artificial Sequence: Synthetic oligonucleotide
agcaaccugagucguaaca

SEQ ID NO: 1174312 - RNA, 19 nt, Artificial Sequence
  Description of Artificial Sequence: Synthetic oligonucleotide
uauguccaucaaauaugug

SEQ ID NO: 1174313 - RNA, 19 nt, Artificial Sequence
  Description of Artificial Sequence: Synthetic oligonucleotide
cuucagauaaucgggucug

SEQ ID NO: 1174314 - RNA, 19 nt, Artificial Sequence
  Description of Artificial Sequence: Synthetic oligonucleotide
agaauacggccguucgcuc

SEQ ID NO: 1174315 - RNA, 19 nt, Artificial Sequence
  Description of Artificial Sequence: Synthetic oligonucleotide
caacagaggaauaaggccu

SEQ ID NO: 1174316 - RNA, 19 nt, Artificial Sequence
  Description of Artificial Sequence: Synthetic oligonucleotide
guugaugugcggcuccagc

SEQ ID NO: 1174317 - RNA, 19 nt, Artificial Sequence
  Description of Artificial Sequence: Synthetic oligonucleotide
aggguuuaaugaaaacguc

SEQ ID NO: 1174318 - RNA, 19 nt, Artificial Sequence
  Description of Artificial Sequence: Synthetic oligonucleotide
caagaaagcagucauaguu

SEQ ID NO: 1174319 - RNA, 19 nt, Artificial Sequence
  Description of Artificial Sequence: Synthetic oligonucleotide
aacgucaaucaagagugau

SEQ ID NO: 1174320 - RNA, 19 nt, Artificial Sequence
  Description of Artificial Sequence: Synthetic oligonucleotide
acaggauuccagacucucc

SEQ ID NO: 1174321 - RNA, 19 nt, Artificial Sequence
  Description of Artificial Sequence: Synthetic oligonucleotide
aucauaauuuuauguccau

SEQ ID NO: 1174322 - RNA, 19 nt, Artificial Sequence
  Description of Artificial Sequence: Synthetic oligonucleotide
caagcuauggggccugaug

SEQ ID NO: 1174323 - RNA, 19 nt, Artificial Sequence
  Description of Artificial Sequence: Synthetic oligonucleotide
acuaauguucucaggguga

SEQ ID NO: 1174324 - RNA, 19 nt, Artificial Sequence
  Description of Artificial Sequence: Synthetic oligonucleotide
acaagaaagcagucauagu

SEQ ID NO: 1174325 - RNA, 19 nt, Artificial Sequence
  Description of Artificial Sequence: Synthetic oligonucleotide
cacagaguauauacuguuc

SEQ ID NO: 1174326 - RNA, 19 nt, Artificial Sequence
  Description of Artificial Sequence: Synthetic oligonucleotide
auacaauacacaguugguu

SEQ ID NO: 1174327 - RNA, 19 nt, Artificial Sequence
  Description of Artificial Sequence: Synthetic oligonucleotide
cagaguauauacuguucuc

SEQ ID NO: 1174328 - RNA, 19 nt, Artificial Sequence
  Description of Artificial Sequence: Synthetic oligonucleotide
uugccucuacugagaaagg

SEQ ID NO: 1174329 - RNA, 19 nt, Artificial Sequence
  Description of Artificial Sequence: Synthetic oligonucleotide
uuacugcacuacucuauac

SEQ ID NO: 1174330 - RNA, 19 nt, Artificial Sequence
  Description of Artificial Sequence: Synthetic oligonucleotide
agaacuuaucauaauuuua

SEQ ID NO: 1174331 - RNA, 19 nt, Artificial Sequence
  Description of Artificial Sequence: Synthetic oligonucleotide
auaaucgggucugacauuu

SEQ ID NO: 1174332 - RNA, 19 nt, Artificial Sequence
  Description of Artificial Sequence: Synthetic oligonucleotide
cugcacuacucuauacuac

SEQ ID NO: 1174333 - RNA, 19 nt, Artificial Sequence
  Description of Artificial Sequence: Synthetic oligonucleotide
acaauuaauggggacugaa

SEQ ID NO: 1174334 - RNA, 19 nt, Artificial Sequence
  Description of Artificial Sequence: Synthetic oligonucleotide
cuacucuauacuacuacaa

SEQ ID NO: 1174335 - RNA, 19 nt, Artificial Sequence
  Description of Artificial Sequence: Synthetic oligonucleotide
ugcuuaugccgggagcccg

SEQ ID NO: 1174336 - RNA, 19 nt, Artificial Sequence
  Description of Artificial Sequence: Synthetic oligonucleotide
cagauaaucgggucugaca

SEQ ID NO: 1174337 - RNA, 19 nt, Artificial Sequence
  Description of Artificial Sequence: Synthetic oligonucleotide
gucauaguuacugcacuac

SEQ ID NO: 1174338 - RNA, 19 nt, Artificial Sequence
  Description of Artificial Sequence: Synthetic oligonucleotide
aggccuaacauacuccaua

SEQ ID NO: 1174339 - RNA, 19 nt, Artificial Sequence
  Description of Artificial Sequence: Synthetic oligonucleotide
uuacaaugacagucauaga

SEQ ID NO: 1174340 - RNA, 19 nt, Artificial Sequence
  Description of Artificial Sequence: Synthetic oligonucleotide
ucagauaaucgggucugac

SEQ ID NO: 1174341 - RNA, 19 nt, Artificial Sequence
  Description of Artificial Sequence: Synthetic oligonucleotide
ugcaagcugugaaucuuuc

SEQ ID NO: 1174342 - RNA, 19 nt, Artificial Sequence
  Description of Artificial Sequence: Synthetic oligonucleotide
gguuuaaugaaaacgucaa

SEQ ID NO: 1174343 - RNA, 19 nt, Artificial Sequence
  Description of Artificial Sequence: Synthetic oligonucleotide
uauggggccugaugauuug

SEQ ID NO: 1174344 - RNA, 19 nt, Artificial Sequence
  Description of Artificial Sequence: Synthetic oligonucleotide
caaccugagucguaacauc

SEQ ID NO: 1174345 - RNA, 19 nt, Artificial Sequence
  Description of Artificial Sequence: Synthetic oligonucleotide
ggcaugcucccacacgucg

SEQ ID NO: 1174346 - RNA, 19 nt, Artificial Sequence
  Description of Artificial Sequence: Synthetic oligonucleotide
cacacgucgauccccaaca

SEQ ID NO: 1174347 - RNA, 19 nt, Artificial Sequence
  Description of Artificial Sequence: Synthetic oligonucleotide
uaacaauauaaagccccuc

SEQ ID NO: 1174348 - RNA, 19 nt, Artificial Sequence
  Description of Artificial Sequence: Synthetic oligonucleotide
uaguuacugcacuacucua

SEQ ID NO: 1174349 - RNA, 19 nt, Artificial Sequence
  Description of Artificial Sequence: Synthetic oligonucleotide
ggguuuaaugaaaacguca

SEQ ID NO: 1174350 - RNA, 19 nt, Artificial Sequence
  Description of Artificial Sequence: Synthetic oligonucleotide
agacucuccuacaggcccc

SEQ ID NO: 1174351 - RNA, 19 nt, Artificial Sequence
  Description of Artificial Sequence: Synthetic oligonucleotide
cacuuucauacaauacaca

SEQ ID NO: 1174352 - RNA, 19 nt, Artificial Sequence
  Description of Artificial Sequence: Synthetic oligonucleotide
aguuacugcacuacucuau

SEQ ID NO: 1174353 - RNA, 19 nt, Artificial Sequence
  Description of Artificial Sequence: Synthetic oligonucleotide
agacccuaauuuguccauc

SEQ ID NO: 1174354 - RNA, 19 nt, Artificial Sequence
  Description of Artificial Sequence: Synthetic oligonucleotide
aucuguaagcgacccugcu

SEQ ID NO: 1174355 - RNA, 19 nt, Artificial Sequence
  Description of Artificial Sequence: Synthetic oligonucleotide
ggacugaauggcuucccag

SEQ ID NO: 1174356 - RNA, 19 nt, Artificial Sequence
  Description of Artificial Sequence: Synthetic oligonucleotide
gucacguuugauagccucc

SEQ ID NO: 1174357 - RNA, 19 nt, Artificial Sequence
  Description of Artificial Sequence: Synthetic oligonucleotide
cucugccuuacagaaaauc

SEQ ID NO: 1174358 - RNA, 19 nt, Artificial Sequence
  Description of Artificial Sequence: Synthetic oligonucleotide
ccuuauugaagccaagcca

SEQ ID NO: 1174359 - RNA, 19 nt, Artificial Sequence
  Description of Artificial Sequence: Synthetic oligonucleotide
ugccucuacugagaaaggu

SEQ ID NO: 1174360 - RNA, 19 nt, Artificial Sequence
  Description of Artificial Sequence: Synthetic oligonucleotide
agagcaaccugagucguaa

SEQ ID NO: 1174361 - RNA, 19 nt, Artificial Sequence
  Description of Artificial Sequence: Synthetic oligonucleotide
gguuccuugcagugggucc

SEQ ID NO: 1174362 - RNA, 19 nt, Artificial Sequence
  Description of Artificial Sequence: Synthetic oligonucleotide
cuaacauacuccauaugau

SEQ ID NO: 1174363 - RNA, 19 nt, Artificial Sequence
  Description of Artificial Sequence: Synthetic oligonucleotide
cucucauaauaacaguucu

SEQ ID NO: 1174364 - RNA, 19 nt, Artificial Sequence
  Description of Artificial Sequence: Synthetic oligonucleotide
uucacguaggccgcguggu

SEQ ID NO: 1174365 - RNA, 19 nt, Artificial Sequence
  Description of Artificial Sequence: Synthetic oligonucleotide
agucaccuaauaguaaauu

SEQ ID NO: 1174366 - RNA, 19 nt, Artificial Sequence
  Description of Artificial Sequence: Synthetic oligonucleotide
uacaauuaauggggacuga

SEQ ID NO: 1174367 - RNA, 19 nt, Artificial Sequence
  Description of Artificial Sequence: Synthetic oligonucleotide
ucccacacgucgaucccca

SEQ ID NO: 1174368 - RNA, 19 nt, Artificial Sequence
  Description of Artificial Sequence: Synthetic oligonucleotide
cugugcuuaugccgggagc

SEQ ID NO: 1174369 - RNA, 19 nt, Artificial Sequence
  Description of Artificial Sequence: Synthetic oligonucleotide
caggaacacaaucagaaau

SEQ ID NO: 1174370 - RNA, 19 nt, Artificial Sequence
  Description of Artificial Sequence: Synthetic oligonucleotide
ccugagucguaacaucucc

SEQ ID NO: 1174371 - RNA, 19 nt, Artificial Sequence
  Description of Artificial Sequence: Synthetic oligonucleotide
auggucuuacaaugacagu

SEQ ID NO: 1174372 - RNA, 19 nt, Artificial Sequence
  Description of Artificial Sequence: Synthetic oligonucleotide
acccuacugaucucacuca

SEQ ID NO: 1174373 - RNA, 19 nt, Artificial Sequence
  Description of Artificial Sequence: Synthetic oligonucleotide
auacccuacugaucucacu

SEQ ID NO: 1174374 - RNA, 19 nt, Artificial Sequence
  Description of Artificial Sequence: Synthetic oligonucleotide
uauccaucgaaggccuaac

SEQ ID NO: 1174375 - RNA, 19 nt, Artificial Sequence
  Description of Artificial Sequence: Synthetic oligonucleotide
gauacccuacugaucucac

SEQ ID NO: 1174376 - RNA, 19 nt, Artificial Sequence
  Description of Artificial Sequence: Synthetic oligonucleotide
cagggugauacccuacuga

SEQ ID NO: 1174377 - RNA, 19 nt, Artificial Sequence
  Description of Artificial Sequence: Synthetic oligonucleotide
caagccgcccgacacaaca

SEQ ID NO: 1174378 - RNA, 19 nt, Artificial Sequence
  Description of Artificial Sequence: Synthetic oligonucleotide
uuaugccgggagcccgcgg

SEQ ID NO: 1174379 - RNA, 19 nt, Artificial Sequence
  Description of Artificial Sequence: Synthetic oligonucleotide
ucgauccccaacagaggaa

SEQ ID NO: 1174380 - RNA, 19 nt, Artificial Sequence
  Description of Artificial Sequence: Synthetic oligonucleotide
gucaccuaauaguaaauuu

SEQ ID NO: 1174381 - RNA, 19 nt, Artificial Sequence
  Description of Artificial Sequence: Synthetic oligonucleotide
auauccaucgaaggccuaa

SEQ ID NO: 1174382 - RNA, 19 nt, Artificial Sequence
  Description of Artificial Sequence: Synthetic oligonucleotide
ggccguucgcucucaagcg

SEQ ID NO: 1174383 - RNA, 19 nt, Artificial Sequence
  Description of Artificial Sequence: Synthetic oligonucleotide
acacgucgauccccaacag

SEQ ID NO: 1174384 - RNA, 19 nt, Artificial Sequence
  Description of Artificial Sequence: Synthetic oligonucleotide
ggcauccuagcaacaaggg

SEQ ID NO: 1174385 - RNA, 19 nt, Artificial Sequence
  Description of Artificial Sequence: Synthetic oligonucleotide
aucugcgcguugaugugcg

SEQ ID NO: 1174386 - RNA, 19 nt, Artificial Sequence
  Description of Artificial Sequence: Synthetic oligonucleotide
agugauucacacagaguau

SEQ ID NO: 1174387 - RNA, 19 nt, Artificial Sequence
  Description of Artificial Sequence: Synthetic oligonucleotide
ggcagacccuaauuugucc

SEQ ID NO: 1174388 - RNA, 19 nt, Artificial Sequence
  Description of Artificial Sequence: Synthetic oligonucleotide
gacccuaauuuguccaucu

SEQ ID NO: 1174389 - RNA, 19 nt, Artificial Sequence
  Description of Artificial Sequence: Synthetic oligonucleotide
aaccaagcuauggggccug

SEQ ID NO: 1174390 - RNA, 19 nt, Artificial Sequence
  Description of Artificial Sequence: Synthetic oligonucleotide
aggcagacccuaauuuguc

SEQ ID NO: 1174391 - RNA, 19 nt, Artificial Sequence
  Description of Artificial Sequence: Synthetic oligonucleotide
auggagugauugauauguc

SEQ ID NO: 1174392 - RNA, 19 nt, Artificial Sequence
  Description of Artificial Sequence: Synthetic oligonucleotide
ugaaucuuucagugacauu

SEQ ID NO: 1174393 - RNA, 19 nt, Artificial Sequence
  Description of Artificial Sequence: Synthetic oligonucleotide
guuugauagccuccagcaa

SEQ ID NO: 1174394 - RNA, 19 nt, Artificial Sequence
  Description of Artificial Sequence: Synthetic oligonucleotide
agaaugcccaguggccuag

SEQ ID NO: 1174395 - RNA, 19 nt, Artificial Sequence
  Description of Artificial Sequence: Synthetic oligonucleotide
uucagauaaucgggucuga

SEQ ID NO: 1174396 - RNA, 19 nt, Artificial Sequence
  Description of Artificial Sequence: Synthetic oligonucleotide
accugagucguaacaucuc

SEQ ID NO: 1174397 - RNA, 19 nt, Artificial Sequence
  Description of Artificial Sequence: Synthetic oligonucleotide
aaacgucaaucaagaguga

SEQ ID NO: 1174398 - RNA, 19 nt, Artificial Sequence
  Description of Artificial Sequence: Synthetic oligonucleotide
cgucaaucaagagugauuc

SEQ ID NO: 1174399 - RNA, 19 nt, Artificial Sequence
  Description of Artificial Sequence: Synthetic oligonucleotide
uggugcuugcuguggugca

SEQ ID NO: 1174400 - RNA, 19 nt, Artificial Sequence
  Description of Artificial Sequence: Synthetic oligonucleotide
cacguaggccgcguggugc

SEQ ID NO: 1174401 - RNA, 19 nt, Artificial Sequence
  Description of Artificial Sequence: Synthetic oligonucleotide
ucgguggcguucagguugu

SEQ ID NO: 1174402 - RNA, 19 nt, Artificial Sequence
  Description of Artificial Sequence: Synthetic oligonucleotide
gaauacggccguucgcucu

SEQ ID NO: 1174403 - RNA, 19 nt, Artificial Sequence
  Description of Artificial Sequence: Synthetic oligonucleotide
ucguaacaucucccuuggc

SEQ ID NO: 1174404 - RNA, 19 nt, Artificial Sequence
  Description of Artificial Sequence: Synthetic oligonucleotide
uguaagcgacccugcuccu

SEQ ID NO: 1174405 - RNA, 19 nt, Artificial Sequence
  Description of Artificial Sequence: Synthetic oligonucleotide
gagauagagcccaggaccu

SEQ ID NO: 1174406 - RNA, 19 nt, Artificial Sequence
  Description of Artificial Sequence: Synthetic oligonucleotide
auuugccucuacugagaaa

SEQ ID NO: 1174407 - RNA, 19 nt, Artificial Sequence
  Description of Artificial Sequence: Synthetic oligonucleotide
agcuauggggccugaugau

SEQ ID NO: 1174408 - RNA, 19 nt, Artificial Sequence
  Description of Artificial Sequence: Synthetic oligonucleotide
ugaagguaauaggcaugcu

SEQ ID NO: 1174409 - RNA, 19 nt, Artificial Sequence
  Description of Artificial Sequence: Synthetic oligonucleotide
acuuggcccacaauauagu

SEQ ID NO: 1174410 - RNA, 19 nt, Artificial Sequence
  Description of Artificial Sequence: Synthetic oligonucleotide
ugcaagccgcccgacacaa

SEQ ID NO: 1174411 - RNA, 19 nt, Artificial Sequence
  Description of Artificial Sequence: Synthetic oligonucleotide
gcagacccuaauuugucca

SEQ ID NO: 1174412 - RNA, 19 nt, Artificial Sequence
  Description of Artificial Sequence: Synthetic oligonucleotide
gcugcaagccgcccgacac

SEQ ID NO: 1174413 - RNA, 19 nt, Artificial Sequence
  Description of Artificial Sequence: Synthetic oligonucleotide
ucugcgcguugaugugcgg

SEQ ID NO: 1174414 - RNA, 19 nt, Artificial Sequence
  Description of Artificial Sequence: Synthetic oligonucleotide
cacacagaguauauacugu

SEQ ID NO: 1174415 - RNA, 19 nt, Artificial Sequence
  Description of Artificial Sequence: Synthetic oligonucleotide
cguuugauagccuccagca

SEQ ID NO: 1174416 - RNA, 19 nt, Artificial Sequence
  Description of Artificial Sequence: Synthetic oligonucleotide
cauuugccucuacugagaa

SEQ ID NO: 1174417 - RNA, 19 nt, Artificial Sequence
  Description of Artificial Sequence: Synthetic oligonucleotide
auauguggauacacaucca

SEQ ID NO: 1174418 - RNA, 19 nt, Artificial Sequence
  Description of Artificial Sequence: Synthetic oligonucleotide
caggaccuugcaaacuaca

SEQ ID NO: 1174419 - RNA, 19 nt, Artificial Sequence
  Description of Artificial Sequence: Synthetic oligonucleotide
caggauuccagacucuccu

SEQ ID NO: 1174420 - RNA, 19 nt, Artificial Sequence
  Description of Artificial Sequence: Synthetic oligonucleotide
acauuccaaauagccuuca

SEQ ID NO: 1174421 - RNA, 19 nt, Artificial Sequence
  Description of Artificial Sequence: Synthetic oligonucleotide
aggaccuugcaaacuacaa

SEQ ID NO: 1174422 - RNA, 19 nt, Artificial Sequence
  Description of Artificial Sequence: Synthetic oligonucleotide
cacguuugauagccuccag

SEQ ID NO: 1174423 - RNA, 19 nt, Artificial Sequence
  Description of Artificial Sequence: Synthetic oligonucleotide
cugcgcguugaugugcggc

SEQ ID NO: 1174424 - RNA, 19 nt, Artificial Sequence
  Description of Artificial Sequence: Synthetic oligonucleotide
ugguuccuugcaguggguc

SEQ ID NO: 1174425 - RNA, 19 nt, Artificial Sequence
  Description of Artificial Sequence: Synthetic oligonucleotide
cuuaugccgggagcccgcg

SEQ ID NO: 1174426 - RNA, 19 nt, Artificial Sequence
  Description of Artificial Sequence: Synthetic oligonucleotide
acguaggccgcguggugcu

SEQ ID NO: 1174427 - RNA, 19 nt, Artificial Sequence
  Description of Artificial Sequence: Synthetic oligonucleotide
acgucaaucaagagugauu

SEQ ID NO: 1174428 - RNA, 19 nt, Artificial Sequence
  Description of Artificial Sequence: Synthetic oligonucleotide
acggccguucgcucucaag

SEQ ID NO: 1174429 - RNA, 19 nt, Artificial Sequence
  Description of Artificial Sequence: Synthetic oligonucleotide
aaggccuaacauacuccau

SEQ ID NO: 1174430 - RNA, 19 nt, Artificial Sequence
  Description of Artificial Sequence: Synthetic oligonucleotide
ccguucgcucucaagcgcg

SEQ ID NO: 1174431 - RNA, 19 nt, Artificial Sequence
  Description of Artificial Sequence: Synthetic oligonucleotide
cagaauacggccguucgcu

SEQ ID NO: 1174432 - RNA, 19 nt, Artificial Sequence
  Description of Artificial Sequence: Synthetic oligonucleotide
caggcagacccuaauuugu

SEQ ID NO: 1174433 - RNA, 19 nt, Artificial Sequence
  Description of Artificial Sequence: Synthetic oligonucleotide
ccuuacagaaaaucccaga

SEQ ID NO: 1174434 - RNA, 19 nt, Artificial Sequence
  Description of Artificial Sequence: Synthetic oligonucleotide
guucgcucucaagcgcgcg

SEQ ID NO: 1174435 - RNA, 19 nt, Artificial Sequence
  Description of Artificial Sequence: Synthetic oligonucleotide
ggcguucagguuguucacg

SEQ ID NO: 1174436 - RNA, 19 nt, Artificial Sequence
  Description of Artificial Sequence: Synthetic oligonucleotide
cgaaggccuaacauacucc

SEQ ID NO: 1174437 - RNA, 19 nt, Artificial Sequence
  Description of Artificial Sequence: Synthetic oligonucleotide
ccagacucuccuacaggcc

SEQ ID NO: 1174438 - RNA, 19 nt, Artificial Sequence
  Description of Artificial Sequence: Synthetic oligonucleotide
gaagagcaaccugagucgu

SEQ ID NO: 1174439 - RNA, 19 nt, Artificial Sequence
  Description of Artificial Sequence: Synthetic oligonucleotide
aagucacguuugauagccu

SEQ ID NO: 1174440 - RNA, 19 nt, Artificial Sequence
  Description of Artificial Sequence: Synthetic oligonucleotide
cucccacacgucgaucccc

SEQ ID NO: 1174441 - RNA, 19 nt, Artificial Sequence
  Description of Artificial Sequence: Synthetic oligonucleotide
gccuuacagaaaaucccag

SEQ ID NO: 1174442 - RNA, 19 nt, Artificial Sequence
  Description of Artificial Sequence: Synthetic oligonucleotide
acccuaauuuguccaucuu

SEQ ID NO: 1174443 - RNA, 19 nt, Artificial Sequence
  Description of Artificial Sequence: Synthetic oligonucleotide
augugcggcuccagcgcgc

SEQ ID NO: 1174444 - RNA, 19 nt, Artificial Sequence
  Description of Artificial Sequence: Synthetic oligonucleotide
agcgcgccauagucguaag

SEQ ID NO: 1174445 - RNA, 19 nt, Artificial Sequence
  Description of Artificial Sequence: Synthetic oligonucleotide
cgcgccauagucguaaggc

SEQ ID NO: 1174446 - RNA, 19 nt, Artificial Sequence
  Description of Artificial Sequence: Synthetic oligonucleotide
uaggccgcguggugcuugc

SEQ ID NO: 1174447 - RNA, 19 nt, Artificial Sequence
  Description of Artificial Sequence: Synthetic oligonucleotide
uaaucgggucugacauuuu

SEQ ID NO: 1174448 - RNA, 19 nt, Artificial Sequence
  Description of Artificial Sequence: Synthetic oligonucleotide
gauaaucgggucugacauu

SEQ ID NO: 1174449 - RNA, 19 nt, Artificial Sequence
  Description of Artificial Sequence: Synthetic oligonucleotide
auccaaagucacguuugau

SEQ ID NO: 1174450 - RNA, 19 nt, Artificial Sequence
  Description of Artificial Sequence: Synthetic oligonucleotide
aauauccaucgaaggccua

SEQ ID NO: 1174451 - RNA, 19 nt, Artificial Sequence
  Description of Artificial Sequence: Synthetic oligonucleotide
aagcgacccugcuccuuau

SEQ ID NO: 1174452 - RNA, 19 nt, Artificial Sequence
  Description of Artificial Sequence: Synthetic oligonucleotide
ccaugguugccaucaucag

SEQ ID NO: 1174453 - RNA, 19 nt, Artificial Sequence
  Description of Artificial Sequence: Synthetic oligonucleotide
gugauacccuacugaucuc

SEQ ID NO: 1174454 - RNA, 19 nt, Artificial Sequence
  Description of Artificial Sequence: Synthetic oligonucleotide
gccuaacauacuccauaug

SEQ ID NO: 1174455 - RNA, 19 nt, Artificial Sequence
  Description of Artificial Sequence: Synthetic oligonucleotide
ugauagccuccagcaacuc

SEQ ID NO: 1174456 - RNA, 19 nt, Artificial Sequence
  Description of Artificial Sequence: Synthetic oligonucleotide
uaauguucucagggugaua

SEQ ID NO: 1174457 - RNA, 19 nt, Artificial Sequence
  Description of Artificial Sequence: Synthetic oligonucleotide
aucgaaggccuaacauacu

SEQ ID NO: 1174458 - RNA, 19 nt, Artificial Sequence
  Description of Artificial Sequence: Synthetic oligonucleotide
cacgucgauccccaacaga

SEQ ID NO: 1174459 - RNA, 19 nt, Artificial Sequence
  Description of Artificial Sequence: Synthetic oligonucleotide
ugcccacggccgcugcucu

SEQ ID NO: 1174460 - RNA, 19 nt, Artificial Sequence
  Description of Artificial Sequence: Synthetic oligonucleotide
cggccguucgcucucaagc

SEQ ID NO: 1174461 - RNA, 19 nt, Artificial Sequence
  Description of Artificial Sequence: Synthetic oligonucleotide
ugaggugcccacggccgcu

SEQ ID NO: 1174462 - RNA, 19 nt, Artificial Sequence
  Description of Artificial Sequence: Synthetic oligonucleotide
cuauggggccugaugauuu

SEQ ID NO: 1174463 - RNA, 19 nt, Artificial Sequence
  Description of Artificial Sequence: Synthetic oligonucleotide
cugcuccuuauugaagcca

SEQ ID NO: 1174464 - RNA, 19 nt, Artificial Sequence
  Description of Artificial Sequence: Synthetic oligonucleotide
gccguucgcucucaagcgc

SEQ ID NO: 1174465 - RNA, 19 nt, Artificial Sequence
  Description of Artificial Sequence: Synthetic oligonucleotide
guucucaaacagucaccua

SEQ ID NO: 1174466 - RNA, 19 nt, Artificial Sequence
  Description of Artificial Sequence: Synthetic oligonucleotide
cuuggcccacaauauaguu

SEQ ID NO: 1174467 - RNA, 19 nt, Artificial Sequence
  Description of Artificial Sequence: Synthetic oligonucleotide
gguccugauuagagcaggc

SEQ ID NO: 1174468 - RNA, 19 nt, Artificial Sequence
  Description of Artificial Sequence: Synthetic oligonucleotide
caaauagccuucagauaau

SEQ ID NO: 1174469 - RNA, 19 nt, Artificial Sequence
  Description of Artificial Sequence: Synthetic oligonucleotide
agucaacaaccaagcuaug

SEQ ID NO: 1174470 - RNA, 19 nt, Artificial Sequence
  Description of Artificial Sequence: Synthetic oligonucleotide
guaggccgcguggugcuug

SEQ ID NO: 1174471 - RNA, 19 nt, Artificial Sequence
  Description of Artificial Sequence: Synthetic oligonucleotide
aagccgcccgacacaacau

SEQ ID NO: 1174472 - RNA, 19 nt, Artificial Sequence
  Description of Artificial Sequence: Synthetic oligonucleotide
gagucguaacaucucccuu

SEQ ID NO: 1174473 - RNA, 19 nt, Artificial Sequence
  Description of Artificial Sequence: Synthetic oligonucleotide
gcgccauagucguaaggca

SEQ ID NO: 1174474 - RNA, 19 nt, Artificial Sequence
  Description of Artificial Sequence: Synthetic oligonucleotide
guuccaguacugagauaga

SEQ ID NO: 1174475 - RNA, 19 nt, Artificial Sequence
  Description of Artificial Sequence: Synthetic oligonucleotide
ggccuaacauacuccauau

SEQ ID NO: 1174476 - RNA, 19 nt, Artificial Sequence
  Description of Artificial Sequence: Synthetic oligonucleotide
cgucgauccccaacagagg

SEQ ID NO: 1174477 - RNA, 19 nt, Artificial Sequence
  Description of Artificial Sequence: Synthetic oligonucleotide
cuugcaagcugugaaucuu

SEQ ID NO: 1174478 - RNA, 19 nt, Artificial Sequence
  Description of Artificial Sequence: Synthetic oligonucleotide
cugcaagccgcccgacaca

SEQ ID NO: 1174479 - RNA, 19 nt, Artificial Sequence
  Description of Artificial Sequence: Synthetic oligonucleotide
agauagagcccaggaccuu

SEQ ID NO: 1174480 - RNA, 19 nt, Artificial Sequence
  Description of Artificial Sequence: Synthetic oligonucleotide
gcaguagaacaggauucca

SEQ ID NO: 1174481 - RNA, 19 nt, Artificial Sequence
  Description of Artificial Sequence: Synthetic oligonucleotide
ccacacgucgauccccaac

SEQ ID NO: 1174482 - RNA, 19 nt, Artificial Sequence
  Description of Artificial Sequence: Synthetic oligonucleotide
gaacaggauuccagacucu

SEQ ID NO: 1174483 - RNA, 19 nt, Artificial Sequence
  Description of Artificial Sequence: Synthetic oligonucleotide
gcgcgccauagucguaagg

SEQ ID NO: 1174484 - RNA, 19 nt, Artificial Sequence
  Description of Artificial Sequence: Synthetic oligonucleotide
gccgcugcucuccucagaa

SEQ ID NO: 1174485 - RNA, 19 nt, Artificial Sequence
  Description of Artificial Sequence: Synthetic oligonucleotide
gccgcccgacacaacaugc

SEQ ID NO: 1174486 - RNA, 19 nt, Artificial Sequence
  Description of Artificial Sequence: Synthetic oligonucleotide
cuccucagaauacggccgu

SEQ ID NO: 1174487 - RNA, 19 nt, Artificial Sequence
  Description of Artificial Sequence: Synthetic oligonucleotide
gcuuaugccgggagcccgc

SEQ ID NO: 1174488 - RNA, 19 nt, Artificial Sequence
  Description of Artificial Sequence: Synthetic oligonucleotide
uccuagcaacaaggguuua

SEQ ID NO: 1174489 - RNA, 19 nt, Artificial Sequence
  Description of Artificial Sequence: Synthetic oligonucleotide
cagacccuaauuuguccau

SEQ ID NO: 1174490 - RNA, 19 nt, Artificial Sequence
  Description of Artificial Sequence: Synthetic oligonucleotide
gcaaccugagucguaacau

SEQ ID NO: 1174491 - RNA, 19 nt, Artificial Sequence
  Description of Artificial Sequence: Synthetic oligonucleotide
ccaccuuuagggcucaggu

SEQ ID NO: 1174492 - RNA, 19 nt, Artificial Sequence
  Description of Artificial Sequence: Synthetic oligonucleotide
ggcgcugcaagccgcccga

SEQ ID NO: 1174493 - RNA, 19 nt, Artificial Sequence
  Description of Artificial Sequence: Synthetic oligonucleotide
ccucagaauacggccguuc

SEQ ID NO: 1174494 - RNA, 19 nt, Artificial Sequence
  Description of Artificial Sequence: Synthetic oligonucleotide
gcccgacacaacaugcuga

SEQ ID NO: 1174495 - RNA, 19 nt, Artificial Sequence
  Description of Artificial Sequence: Synthetic oligonucleotide
cagcgcgccauagucguaa

SEQ ID NO: 1174496 - RNA, 19 nt, Artificial Sequence
  Description of Artificial Sequence: Synthetic oligonucleotide
ccuacugaucucacucaaa

SEQ ID NO: 1174497 - RNA, 19 nt, Artificial Sequence
  Description of Artificial Sequence: Synthetic oligonucleotide
guggccuaguccccauggu

SEQ ID NO: 1174498 - RNA, 19 nt, Artificial Sequence
  Description of Artificial Sequence: Synthetic oligonucleotide
caccuuuagggcucagguu

SEQ ID NO: 1174499 - RNA, 19 nt, Artificial Sequence
  Description of Artificial Sequence: Synthetic oligonucleotide
cgcguugaugugcggcucc

SEQ ID NO: 1174500 - RNA, 19 nt, Artificial Sequence
  Description of Artificial Sequence: Synthetic oligonucleotide
auacggccguucgcucuca

SEQ ID NO: 1174501 - RNA, 19 nt, Artificial Sequence
  Description of Artificial Sequence: Synthetic oligonucleotide
ccuagcaacaaggguuuaa

SEQ ID NO: 1174502 - RNA, 19 nt, Artificial Sequence
  Description of Artificial Sequence: Synthetic oligonucleotide
cgcccgacacaacaugcug

SEQ ID NO: 1174503 - RNA, 19 nt, Artificial Sequence
  Description of Artificial Sequence: Synthetic oligonucleotide
cguggugcuugcuguggug

SEQ ID NO: 1174504 - RNA, 19 nt, Artificial Sequence
  Description of Artificial Sequence: Synthetic oligonucleotide
gcacuacucuauacuacua

SEQ ID NO: 1174505 - RNA, 19 nt, Artificial Sequence
  Description of Artificial Sequence: Synthetic oligonucleotide
guaagcgacccugcuccuu

SEQ ID NO: 1174506 - RNA, 19 nt, Artificial Sequence
  Description of Artificial Sequence: Synthetic oligonucleotide
gcuauggggccugaugauu

SEQ ID NO: 1174507 - RNA, 19 nt, Artificial Sequence
  Description of Artificial Sequence: Synthetic oligonucleotide
ccgcguggugcuugcugug

SEQ ID NO: 1174508 - RNA, 19 nt, Artificial Sequence
  Description of Artificial Sequence: Synthetic oligonucleotide
cguugaugugcggcuccag

SEQ ID NO: 1174509 - RNA, 19 nt, Artificial Sequence
  Description of Artificial Sequence: Synthetic oligonucleotide
ggccagccuccugccggcg

SEQ ID NO: 1174510 - RNA, 19 nt, Artificial Sequence
  Description of Artificial Sequence: Synthetic oligonucleotide
gcguggugcuugcuguggu

SEQ ID NO: 1174511 - RNA, 19 nt, Artificial Sequence
  Description of Artificial Sequence: Synthetic oligonucleotide
ccccaccauugaacuucag

SEQ ID NO: 1174512 - RNA, 19 nt, Artificial Sequence
  Description of Artificial Sequence: Synthetic oligonucleotide
gugguuccuugcagugggu

SEQ ID NO: 1174513 - RNA, 19 nt, Artificial Sequence
  Description of Artificial Sequence: Synthetic oligonucleotide
gccggcgcugcaagccgcc

SEQ ID NO: 1174514 - RNA, 19 nt, Artificial Sequence
  Description of Artificial Sequence: Synthetic oligonucleotide
gcgcguugaugugcggcuc

SEQ ID NO: 1174515 - RNA, 19 nt, Artificial Sequence
  Description of Artificial Sequence: Synthetic oligonucleotide
gcaagccgcccgacacaac

SEQ ID NO: 1174516 - RNA, 19 nt, Artificial Sequence
  Description of Artificial Sequence: Synthetic oligonucleotide
cgauccccaacagaggaau

SEQ ID NO: 1174517 - RNA, 19 nt, Artificial Sequence
  Description of Artificial Sequence: Synthetic oligonucleotide
ccgcccgacacaacaugcu

SEQ ID NO: 1174518 - RNA, 19 nt, Artificial Sequence
  Description of Artificial Sequence: Synthetic oligonucleotide
gguccgggaggcugugcuu

SEQ ID NO: 1174519 - RNA, 19 nt, Artificial Sequence
  Description of Artificial Sequence: Synthetic oligonucleotide
gcccacggccgcugcucuc

SEQ ID NO: 1174520 - RNA, 19 nt, Artificial Sequence
  Description of Artificial Sequence: Synthetic oligonucleotide
cgcugcaagccgcccgaca

SEQ ID NO: 1174521 - RNA, 19 nt, Artificial Sequence
  Description of Artificial Sequence: Synthetic oligonucleotide
cgggagcccgcggccgucg

SEQ ID NO: 1174522 - RNA, 19 nt, Artificial Sequence
  Description of Artificial Sequence: Synthetic oligonucleotide
gcgcugcaagccgcccgac

SEQ ID NO: 1174523 - RNA, 19 nt, Artificial Sequence
  Description of Artificial Sequence: Synthetic oligonucleotide
cccacacgucgauccccaa

SEQ ID NO: 1174524 - RNA, 19 nt, Artificial Sequence
  Description of Artificial Sequence: Synthetic oligonucleotide
gcggcuccagcgcgccaua

SEQ ID NO: 1174525 - RNA, 19 nt, Artificial Sequence
  Description of Artificial Sequence: Synthetic oligonucleotide
ccagcgcgccauagucgua

SEQ ID NO: 1174526 - RNA, 19 nt, Artificial Sequence
  Description of Artificial Sequence: Synthetic oligonucleotide
ccaagcuauggggccugau

SEQ ID NO: 1174527 - RNA, 19 nt, Artificial Sequence
  Description of Artificial Sequence: Synthetic oligonucleotide
cgucgccgccggggccagc

SEQ ID NO: 1174528 - RNA, 19 nt, Artificial Sequence
  Description of Artificial Sequence: Synthetic oligonucleotide
cguaggccgcguggugcuu

SEQ ID NO: 1174529 - RNA, 19 nt, Artificial Sequence
  Description of Artificial Sequence: Synthetic oligonucleotide
cgguggcguucagguuguu

SEQ ID NO: 1174530 - RNA, 19 nt, Artificial Sequence
  Description of Artificial Sequence: Synthetic oligonucleotide
acuguuucaaauuuggugc

SEQ ID NO: 1174531 - RNA, 19 nt, Artificial Sequence
  Description of Artificial Sequence: Synthetic oligonucleotide
uuugcaagggauaagauug

SEQ ID NO: 1174532 - RNA, 19 nt, Artificial Sequence
  Description of Artificial Sequence: Synthetic oligonucleotide
uugucuaugaaucaugcca

SEQ ID NO: 1174533 - RNA, 19 nt, Artificial Sequence
  Description of Artificial Sequence: Synthetic oligonucleotide
aacaccgagacgcuggagc

SEQ ID NO: 1174534 - RNA, 19 nt, Artificial Sequence
  Description of Artificial Sequence: Synthetic oligonucleotide
ucagcuucaaaguaauucc

SEQ ID NO: 1174535 - RNA, 19 nt, Artificial Sequence
  Description of Artificial Sequence: Synthetic oligonucleotide
agcuauuugauuuugggga

SEQ ID NO: 1174536 - RNA, 19 nt, Artificial Sequence
  Description of Artificial Sequence: Synthetic oligonucleotide
agcgucaucucacaggagc

SEQ ID NO: 1174537 - RNA, 19 nt, Artificial Sequence
  Description of Artificial Sequence: Synthetic oligonucleotide
uaggaauuacuuuuaauga

SEQ ID NO: 1174538 - RNA, 19 nt, Artificial Sequence
  Description of Artificial Sequence: Synthetic oligonucleotide
guucgaacagucuucaggg

SEQ ID NO: 1174539 - RNA, 19 nt, Artificial Sequence
  Description of Artificial Sequence: Synthetic oligonucleotide
aaggugaaagcucagcugu

SEQ ID NO: 1174540 - RNA, 19 nt, Artificial Sequence
  Description of Artificial Sequence: Synthetic oligonucleotide
agcggcagugcuuugagcc

SEQ ID NO: 1174541 - RNA, 19 nt, Artificial Sequence
  Description of Artificial Sequence: Synthetic oligonucleotide
aaacugugcucucaugaac

SEQ ID NO: 1174542 - RNA, 19 nt, Artificial Sequence
  Description of Artificial Sequence: Synthetic oligonucleotide
aacauguugcccugauagc

SEQ ID NO: 1174543 - RNA, 19 nt, Artificial Sequence
  Description of Artificial Sequence: Synthetic oligonucleotide
aaguaauucccaugggcuc

SEQ ID NO: 1174544 - RNA, 19 nt, Artificial Sequence
  Description of Artificial Sequence: Synthetic oligonucleotide
aggaauuacuuuuaaugag

SEQ ID NO: 1174545 - RNA, 19 nt, Artificial Sequence
  Description of Artificial Sequence: Synthetic oligonucleotide
ucuacugagugauugguca

SEQ ID NO: 1174546 - RNA, 19 nt, Artificial Sequence
  Description of Artificial Sequence: Synthetic oligonucleotide
cuuaguaaacccaggagac

SEQ ID NO: 1174547 - RNA, 19 nt, Artificial Sequence
  Description of Artificial Sequence: Synthetic oligonucleotide
acugguucaaugcagucuc

SEQ ID NO: 1174548 - RNA, 19 nt, Artificial Sequence
  Description of Artificial Sequence: Synthetic oligonucleotide
aauccugcagacuccuugg

SEQ ID NO: 1174549 - RNA, 19 nt, Artificial Sequence
  Description of Artificial Sequence: Synthetic oligonucleotide
cauucaacugguucaaugc

SEQ ID NO: 1174550 - RNA, 19 nt, Artificial Sequence
  Description of Artificial Sequence: Synthetic oligonucleotide
aaaguaauucccaugggcu

SEQ ID NO: 1174551 - RNA, 19 nt, Artificial Sequence
  Description of Artificial Sequence: Synthetic oligonucleotide
acaucuguagugcaggaag

SEQ ID NO: 1174552 - RNA, 19 nt, Artificial Sequence
  Description of Artificial Sequence: Synthetic oligonucleotide
uugaacugugcuuagccag

SEQ ID NO: 1174553 - RNA, 19 nt, Artificial Sequence
  Description of Artificial Sequence: Synthetic oligonucleotide
caaaguaauucccaugggc

SEQ ID NO: 1174554 - RNA, 19 nt, Artificial Sequence
  Description of Artificial Sequence: Synthetic oligonucleotide
uggagcuucacuuggagca

SEQ ID NO: 1174555 - RNA, 19 nt, Artificial Sequence
  Description of Artificial Sequence: Synthetic oligonucleotide
aaaauugaacugugcuuag

SEQ ID NO: 1174556 - RNA, 19 nt, Artificial Sequence
  Description of Artificial Sequence: Synthetic oligonucleotide
ugagaugaagugauacucc

SEQ ID NO: 1174557 - RNA, 19 nt, Artificial Sequence
  Description of Artificial Sequence: Synthetic oligonucleotide
ugucuaugaaucaugccac

SEQ ID NO: 1174558 - RNA, 19 nt, Artificial Sequence
  Description of Artificial Sequence: Synthetic oligonucleotide
ugagcgucaucucacagga

SEQ ID NO: 1174559 - RNA, 19 nt, Artificial Sequence
  Description of Artificial Sequence: Synthetic oligonucleotide
aaagcucagcuguucgaac

SEQ ID NO: 1174560 - RNA, 19 nt, Artificial Sequence
  Description of Artificial Sequence: Synthetic oligonucleotide
aaauugaacugugcuuagc

SEQ ID NO: 1174561 - RNA, 19 nt, Artificial Sequence
  Description of Artificial Sequence: Synthetic oligonucleotide
uaagcuuaguaaacccagg

SEQ ID NO: 1174562 - RNA, 19 nt, Artificial Sequence
  Description of Artificial Sequence: Synthetic oligonucleotide
ucaaugucaaggauggcaa

SEQ ID NO: 1174563 - RNA, 19 nt, Artificial Sequence
  Description of Artificial Sequence: Synthetic oligonucleotide
aaugcagggauccggacaa

SEQ ID NO: 1174564 - RNA, 19 nt, Artificial Sequence
  Description of Artificial Sequence: Synthetic oligonucleotide
gaaucaugccaccauggag

SEQ ID NO: 1174565 - RNA, 19 nt, Artificial Sequence
  Description of Artificial Sequence: Synthetic oligonucleotide
uucagcuucaaaguaauuc

SEQ ID NO: 1174566 - RNA, 19 nt, Artificial Sequence
  Description of Artificial Sequence: Synthetic oligonucleotide
aagcuuaguaaacccagga

SEQ ID NO: 1174567 - RNA, 19 nt, Artificial Sequence
  Description of Artificial Sequence: Synthetic oligonucleotide
uugagcgucaucucacagg

SEQ ID NO: 1174568 - RNA, 19 nt, Artificial Sequence
  Description of Artificial Sequence: Synthetic oligonucleotide
uggucaguagguucgauga

SEQ ID NO: 1174569 - RNA, 19 nt, Artificial Sequence
  Description of Artificial Sequence: Synthetic oligonucleotide
uccucuguugagaugaagu

SEQ ID NO: 1174570 - RNA, 19 nt, Artificial Sequence
  Description of Artificial Sequence: Synthetic oligonucleotide
aguuguacuuugcacagcu

SEQ ID NO: 1174571 - RNA, 19 nt, Artificial Sequence
  Description of Artificial Sequence: Synthetic oligonucleotide
uuaugaaucuggugcacug

SEQ ID NO: 1174572 - RNA, 19 nt, Artificial Sequence
  Description of Artificial Sequence: Synthetic oligonucleotide
uguauauggggcaggguac

SEQ ID NO: 1174573 - RNA, 19 nt, Artificial Sequence
  Description of Artificial Sequence: Synthetic oligonucleotide
agauacuugucuuuauacu

SEQ ID NO: 1174574 - RNA, 19 nt, Artificial Sequence
  Description of Artificial Sequence: Synthetic oligonucleotide
aaagagaggucaaaguagu

SEQ ID NO: 1174575 - RNA, 19 nt, Artificial Sequence
  Description of Artificial Sequence: Synthetic oligonucleotide
ucaacaccauuauucacca

SEQ ID NO: 1174576 - RNA, 19 nt, Artificial Sequence
  Description of Artificial Sequence: Synthetic oligonucleotide
uguugagaugaagugauac

SEQ ID NO: 1174577 - RNA, 19 nt, Artificial Sequence
  Description of Artificial Sequence: Synthetic oligonucleotide
aaacccgguaaccgcggcc

SEQ ID NO: 1174578 - RNA, 19 nt, Artificial Sequence
  Description of Artificial Sequence: Synthetic oligonucleotide
uugcccuuuagcaugggca

SEQ ID NO: 1174579 - RNA, 19 nt, Artificial Sequence
  Description of Artificial Sequence: Synthetic oligonucleotide
cagauacuugucuuuauac

SEQ ID NO: 1174580 - RNA, 19 nt, Artificial Sequence
  Description of Artificial Sequence: Synthetic oligonucleotide
uucuguaagcuuaguaaac

SEQ ID NO: 1174581 - RNA, 19 nt, Artificial Sequence
  Description of Artificial Sequence: Synthetic oligonucleotide
agugauuggucacauuugu

SEQ ID NO: 1174582 - RNA, 19 nt, Artificial Sequence
  Description of Artificial Sequence: Synthetic oligonucleotide
uuggugccaaacauguugc

SEQ ID NO: 1174583 - RNA, 19 nt, Artificial Sequence
  Description of Artificial Sequence: Synthetic oligonucleotide
ucuucgcucuuccuuggcg

SEQ ID NO: 1174584 - RNA, 19 nt, Artificial Sequence
  Description of Artificial Sequence: Synthetic oligonucleotide
ucucaugaacaucuguagu

SEQ ID NO: 1174585 - RNA, 19 nt, Artificial Sequence
  Description of Artificial Sequence: Synthetic oligonucleotide
uguaugagacgcacuuucc

SEQ ID NO: 1174586 - RNA, 19 nt, Artificial Sequence
  Description of Artificial Sequence: Synthetic oligonucleotide
uuuuguagcaagugcucca

SEQ ID NO: 1174587 - RNA, 19 nt, Artificial Sequence
  Description of Artificial Sequence: Synthetic oligonucleotide
cuguaagcuuaguaaaccc

SEQ ID NO: 1174588 - RNA, 19 nt, Artificial Sequence
  Description of Artificial Sequence: Synthetic oligonucleotide
agcuuaguaaacccaggag

SEQ ID NO: 1174589 - RNA, 19 nt, Artificial Sequence
  Description of Artificial Sequence: Synthetic oligonucleotide
guaagcuuaguaaacccag

SEQ ID NO: 1174590 - RNA, 19 nt, Artificial Sequence
  Description of Artificial Sequence: Synthetic oligonucleotide
cuuuccuugccucuugccc

SEQ ID NO: 1174591 - RNA, 19 nt, Artificial Sequence
  Description of Artificial Sequence: Synthetic oligonucleotide
aagacgacucugcugauua

SEQ ID NO: 1174592 - RNA, 19 nt, Artificial Sequence
  Description of Artificial Sequence: Synthetic oligonucleotide
aauauggcugcgaccuacc

SEQ ID NO: 1174593 - RNA, 19 nt, Artificial Sequence
  Description of Artificial Sequence: Synthetic oligonucleotide
gagggguuucucuagagca

SEQ ID NO: 1174594 - RNA, 19 nt, Artificial Sequence
  Description of Artificial Sequence: Synthetic oligonucleotide
gucgguugcgcuuuuguag

SEQ ID NO: 1174595 - RNA, 19 nt, Artificial Sequence
  Description of Artificial Sequence: Synthetic oligonucleotide
uggagcaguagacccauug

SEQ ID NO: 1174596 - RNA, 19 nt, Artificial Sequence
  Description of Artificial Sequence: Synthetic oligonucleotide
uugguauacauguccucag

SEQ ID NO: 1174597 - RNA, 19 nt, Artificial Sequence
  Description of Artificial Sequence: Synthetic oligonucleotide
guagugagcauacugacua

SEQ ID NO: 1174598 - RNA, 19 nt, Artificial Sequence
  Description of Artificial Sequence: Synthetic oligonucleotide
ugcuuaugaaucuggugca

SEQ ID NO: 1174599 - RNA, 19 nt, Artificial Sequence
  Description of Artificial Sequence: Synthetic oligonucleotide
uuuauugcuuuggaggggu

SEQ ID NO: 1174600 - RNA, 19 nt, Artificial Sequence
  Description of Artificial Sequence: Synthetic oligonucleotide
gaaucuggugcacuguuuc

SEQ ID NO: 1174601 - RNA, 19 nt, Artificial Sequence
  Description of Artificial Sequence: Synthetic oligonucleotide
uuuccuugccucuugcccu

SEQ ID NO: 1174602 - RNA, 19 nt, Artificial Sequence
  Description of Artificial Sequence: Synthetic oligonucleotide
cuugaaugcagggauccgg

SEQ ID NO: 1174603 - RNA, 19 nt, Artificial Sequence
  Description of Artificial Sequence: Synthetic oligonucleotide
ugagcauacugacuacgga

SEQ ID NO: 1174604 - RNA, 19 nt, Artificial Sequence
  Description of Artificial Sequence: Synthetic oligonucleotide
ucgaacagucuucaggguc

SEQ ID NO: 1174605 - RNA, 19 nt, Artificial Sequence
  Description of Artificial Sequence: Synthetic oligonucleotide
aucuggauaaugucuccag

SEQ ID NO: 1174606 - RNA, 19 nt, Artificial Sequence
  Description of Artificial Sequence: Synthetic oligonucleotide
uccgugaucuucucaaacu

SEQ ID NO: 1174607 - RNA, 19 nt, Artificial Sequence
  Description of Artificial Sequence: Synthetic oligonucleotide
agaauucuggccacaguac

SEQ ID NO: 1174608 - RNA, 19 nt, Artificial Sequence
  Description of Artificial Sequence: Synthetic oligonucleotide
ggucguguuguauaugggg

SEQ ID NO: 1174609 - RNA, 19 nt, Artificial Sequence
  Description of Artificial Sequence: Synthetic oligonucleotide
aagugauacuccuuuccau

SEQ ID NO: 1174610 - RNA, 19 nt, Artificial Sequence
  Description of Artificial Sequence: Synthetic oligonucleotide
accaaagagaggucaaagu

SEQ ID NO: 1174611 - RNA, 19 nt, Artificial Sequence
  Description of Artificial Sequence: Synthetic oligonucleotide
aacugugcucucaugaaca

SEQ ID NO: 1174612 - RNA, 19 nt, Artificial Sequence
  Description of Artificial Sequence: Synthetic oligonucleotide
cuguuucaaauuuggugcc

SEQ ID NO: 1174613 - RNA, 19 nt, Artificial Sequence
  Description of Artificial Sequence: Synthetic oligonucleotide
auugaacugugcuuagcca

SEQ ID NO: 1174614 - RNA, 19 nt, Artificial Sequence
  Description of Artificial Sequence: Synthetic oligonucleotide
ucuggauaaugucuccagu

SEQ ID NO: 1174615 - RNA, 19 nt, Artificial Sequence
  Description of Artificial Sequence: Synthetic oligonucleotide
agguucgaugaacacaaug

SEQ ID NO: 1174616 - RNA, 19 nt, Artificial Sequence
  Description of Artificial Sequence: Synthetic oligonucleotide
ugaacugugcuuagccaga

SEQ ID NO: 1174617 - RNA, 19 nt, Artificial Sequence
  Description of Artificial Sequence: Synthetic oligonucleotide
acugacuacggauggccuc

SEQ ID NO: 1174618 - RNA, 19 nt, Artificial Sequence
  Description of Artificial Sequence: Synthetic oligonucleotide
uucucuagagcaguuguac

SEQ ID NO: 1174619 - RNA, 19 nt, Artificial Sequence
  Description of Artificial Sequence: Synthetic oligonucleotide
aguuucaucaacaccauua

SEQ ID NO: 1174620 - RNA, 19 nt, Artificial Sequence
  Description of Artificial Sequence: Synthetic oligonucleotide
aaccgcaaacccgguaacc

SEQ ID NO: 1174621 - RNA, 19 nt, Artificial Sequence
  Description of Artificial Sequence: Synthetic oligonucleotide
auauggcugcgaccuaccc

SEQ ID NO: 1174622 - RNA, 19 nt, Artificial Sequence
  Description of Artificial Sequence: Synthetic oligonucleotide
agcuuggagcuucacuugg

SEQ ID NO: 1174623 - RNA, 19 nt, Artificial Sequence
  Description of Artificial Sequence: Synthetic oligonucleotide
cuucgcucuuccuuggcgg

SEQ ID NO: 1174624 - RNA, 19 nt, Artificial Sequence
  Description of Artificial Sequence: Synthetic oligonucleotide
augagacgcacuuuccuug

SEQ ID NO: 1174625 - RNA, 19 nt, Artificial Sequence
  Description of Artificial Sequence: Synthetic oligonucleotide
uucaaugcagucucagguc

SEQ ID NO: 1174626 - RNA, 19 nt, Artificial Sequence
  Description of Artificial Sequence: Synthetic oligonucleotide
ggaucaauccugcagacuc

SEQ ID NO: 1174627 - RNA, 19 nt, Artificial Sequence
  Description of Artificial Sequence: Synthetic oligonucleotide
cuuaauauggcugcgaccu

SEQ ID NO: 1174628 - RNA, 19 nt, Artificial Sequence
  Description of Artificial Sequence: Synthetic oligonucleotide
agagcaguuguacuuugca

SEQ ID NO: 1174629 - RNA, 19 nt, Artificial Sequence
  Description of Artificial Sequence: Synthetic oligonucleotide
gacaaggcggcggaggagg

SEQ ID NO: 1174630 - RNA, 19 nt, Artificial Sequence
  Description of Artificial Sequence: Synthetic oligonucleotide
agugagcauacugacuacg

SEQ ID NO: 1174631 - RNA, 19 nt, Artificial Sequence
  Description of Artificial Sequence: Synthetic oligonucleotide
ucuaugaaucaugccacca

SEQ ID NO: 1174632 - RNA, 19 nt, Artificial Sequence
  Description of Artificial Sequence: Synthetic oligonucleotide
aguagguucgaugaacaca

SEQ ID NO: 1174633 - RNA, 19 nt, Artificial Sequence
  Description of Artificial Sequence: Synthetic oligonucleotide
uauggggcaggguacacaa

SEQ ID NO: 1174634 - RNA, 19 nt, Artificial Sequence
  Description of Artificial Sequence: Synthetic oligonucleotide
cuguaugagacgcacuuuc

SEQ ID NO: 1174635 - RNA, 19 nt, Artificial Sequence
  Description of Artificial Sequence: Synthetic oligonucleotide
gcuuaguaaacccaggaga

SEQ ID NO: 1174636 - RNA, 19 nt, Artificial Sequence
  Description of Artificial Sequence: Synthetic oligonucleotide
cagacugagccacacuugc

SEQ ID NO: 1174637 - RNA, 19 nt, Artificial Sequence
  Description of Artificial Sequence: Synthetic oligonucleotide
uaaugagaucauuccuuug

SEQ ID NO: 1174638 - RNA, 19 nt, Artificial Sequence
  Description of Artificial Sequence: Synthetic oligonucleotide
uacacaaacuucucuggau

SEQ ID NO: 1174639 - RNA, 19 nt, Artificial Sequence
  Description of Artificial Sequence: Synthetic oligonucleotide
uuagccagauacuugucuu

SEQ ID NO: 1174640 - RNA, 19 nt, Artificial Sequence
  Description of Artificial Sequence: Synthetic oligonucleotide
cuugcaauuucuuaagagu

SEQ ID NO: 1174641 - RNA, 19 nt, Artificial Sequence
  Description of Artificial Sequence: Synthetic oligonucleotide
guagagguccgagagcgcg

SEQ ID NO: 1174642 - RNA, 19 nt, Artificial Sequence
  Description of Artificial Sequence: Synthetic oligonucleotide
ucguguuguauauggggca

SEQ ID NO: 1174643 - RNA, 19 nt, Artificial Sequence
  Description of Artificial Sequence: Synthetic oligonucleotide
agaacucauuggcagagau

SEQ ID NO: 1174644 - RNA, 19 nt, Artificial Sequence
  Description of Artificial Sequence: Synthetic oligonucleotide
agggauccggacaacuucc

SEQ ID NO: 1174645 - RNA, 19 nt, Artificial Sequence
  Description of Artificial Sequence: Synthetic oligonucleotide
aagggacuacagcuuggag

SEQ ID NO: 1174646 - RNA, 19 nt, Artificial Sequence
  Description of Artificial Sequence: Synthetic oligonucleotide
gcuccaaucagcaccaggg

SEQ ID NO: 1174647 - RNA, 19 nt, Artificial Sequence
  Description of Artificial Sequence: Synthetic oligonucleotide
uuggagcuucacuuggagc

SEQ ID NO: 1174648 - RNA, 19 nt, Artificial Sequence
  Description of Artificial Sequence: Synthetic oligonucleotide
uaugagacgcacuuuccuu

SEQ ID NO: 1174649 - RNA, 19 nt, Artificial Sequence
  Description of Artificial Sequence: Synthetic oligonucleotide
uaauauggcugcgaccuac

SEQ ID NO: 1174650 - RNA, 19 nt, Artificial Sequence
  Description of Artificial Sequence: Synthetic oligonucleotide
guagguucgaugaacacaa

SEQ ID NO: 1174651 - RNA, 19 nt, Artificial Sequence
  Description of Artificial Sequence: Synthetic oligonucleotide
uccuccgugaucuucucaa

SEQ ID NO: 1174652 - RNA, 19 nt, Artificial Sequence
  Description of Artificial Sequence: Synthetic oligonucleotide
ucucuagagcaguuguacu

SEQ ID NO: 1174653 - RNA, 19 nt, Artificial Sequence
  Description of Artificial Sequence: Synthetic oligonucleotide
uguacuuugcacagcuauu

SEQ ID NO: 1174654 - RNA, 19 nt, Artificial Sequence
  Description of Artificial Sequence: Synthetic oligonucleotide
ugagacgcacuuuccuugc

SEQ ID NO: 1174655 - RNA, 19 nt, Artificial Sequence
  Description of Artificial Sequence: Synthetic oligonucleotide
gguauacauguccucagug

SEQ ID NO: 1174656 - RNA, 19 nt, Artificial Sequence
  Description of Artificial Sequence: Synthetic oligonucleotide
accgcaaacccgguaaccg

SEQ ID NO: 1174657 - RNA, 19 nt, Artificial Sequence
  Description of Artificial Sequence: Synthetic oligonucleotide
uucaccaaagagaggucaa

SEQ ID NO: 1174658 - RNA, 19 nt, Artificial Sequence
  Description of Artificial Sequence: Synthetic oligonucleotide
caaagggacuacagcuugg

SEQ ID NO: 1174659 - RNA, 19 nt, Artificial Sequence
  Description of Artificial Sequence: Synthetic oligonucleotide
cuuugagcccgguaaccgc

SEQ ID NO: 1174660 - RNA, 19 nt, Artificial Sequence
  Description of Artificial Sequence: Synthetic oligonucleotide
aaagggacuacagcuugga

SEQ ID NO: 1174661 - RNA, 19 nt, Artificial Sequence
  Description of Artificial Sequence: Synthetic oligonucleotide
uuaguaaacccaggagaca

SEQ ID NO: 1174662 - RNA, 19 nt, Artificial Sequence
  Description of Artificial Sequence: Synthetic oligonucleotide
ugguauacauguccucagu

SEQ ID NO: 1174663 - RNA, 19 nt, Artificial Sequence
  Description of Artificial Sequence: Synthetic oligonucleotide
ucuuugcaagggauaagau

SEQ ID NO: 1174664 - RNA, 19 nt, Artificial Sequence
  Description of Artificial Sequence: Synthetic oligonucleotide
gguucgaugaacacaauga

SEQ ID NO: 1174665 - RNA, 19 nt, Artificial Sequence
  Description of Artificial Sequence: Synthetic oligonucleotide
uaaugucuccaguaacaaa

SEQ ID NO: 1174666 - RNA, 19 nt, Artificial Sequence
  Description of Artificial Sequence: Synthetic oligonucleotide
caucaacaccauuauucac

SEQ ID NO: 1174667 - RNA, 19 nt, Artificial Sequence
  Description of Artificial Sequence: Synthetic oligonucleotide
caccauggagaauucuggc

SEQ ID NO: 1174668 - RNA, 19 nt, Artificial Sequence
  Description of Artificial Sequence: Synthetic oligonucleotide
gugagcauacugacuacgg

SEQ ID NO: 1174669 - RNA, 19 nt, Artificial Sequence
  Description of Artificial Sequence: Synthetic oligonucleotide
guaaccgcaaacccgguaa

SEQ ID NO: 1174670 - RNA, 19 nt, Artificial Sequence
  Description of Artificial Sequence: Synthetic oligonucleotide
uagagguccgagagcgcgg

SEQ ID NO: 1174671 - RNA, 19 nt, Artificial Sequence
  Description of Artificial Sequence: Synthetic oligonucleotide
acaccauuauucaccaaag

SEQ ID NO: 1174672 - RNA, 19 nt, Artificial Sequence
  Description of Artificial Sequence: Synthetic oligonucleotide
gauucugucugagcagagc

SEQ ID NO: 1174673 - RNA, 19 nt, Artificial Sequence
  Description of Artificial Sequence: Synthetic oligonucleotide
guugcgcuuuuguagcaag

SEQ ID NO: 1174674 - RNA, 19 nt, Artificial Sequence
  Description of Artificial Sequence: Synthetic oligonucleotide
guaaccgcggccugcucgg

SEQ ID NO: 1174675 - RNA, 19 nt, Artificial Sequence
  Description of Artificial Sequence: Synthetic oligonucleotide
agcauacugacuacggaug

SEQ ID NO: 1174676 - RNA, 19 nt, Artificial Sequence
  Description of Artificial Sequence: Synthetic oligonucleotide
uccugcuuaugaaucuggu

SEQ ID NO: 1174677 - RNA, 19 nt, Artificial Sequence
  Description of Artificial Sequence: Synthetic oligonucleotide
gagugauuggucacauuug

SEQ ID NO: 1174678 - RNA, 19 nt, Artificial Sequence
  Description of Artificial Sequence: Synthetic oligonucleotide
aggaacaccgagacgcugg

SEQ ID NO: 1174679 - RNA, 19 nt, Artificial Sequence
  Description of Artificial Sequence: Synthetic oligonucleotide
gcggucguguuguauaugg

SEQ ID NO: 1174680 - RNA, 19 nt, Artificial Sequence
  Description of Artificial Sequence: Synthetic oligonucleotide
guaacaaacuucaguccug

SEQ ID NO: 1174681 - RNA, 19 nt, Artificial Sequence
  Description of Artificial Sequence: Synthetic oligonucleotide
gcauacugacuacggaugg

SEQ ID NO: 1174682 - RNA, 19 nt, Artificial Sequence
  Description of Artificial Sequence: Synthetic oligonucleotide
uguuucaaauuuggugcca

SEQ ID NO: 1174683 - RNA, 19 nt, Artificial Sequence
  Description of Artificial Sequence: Synthetic oligonucleotide
augucaaggauggcaaucu

SEQ ID NO: 1174684 - RNA, 19 nt, Artificial Sequence
  Description of Artificial Sequence: Synthetic oligonucleotide
uugcaagggauaagauugu

SEQ ID NO: 1174685 - RNA, 19 nt, Artificial Sequence
  Description of Artificial Sequence: Synthetic oligonucleotide
uaugaaucuggugcacugu

SEQ ID NO: 1174686 - RNA, 19 nt, Artificial Sequence
  Description of Artificial Sequence: Synthetic oligonucleotide
aagggauaagauuguccuu

SEQ ID NO: 1174687 - RNA, 19 nt, Artificial Sequence
  Description of Artificial Sequence: Synthetic oligonucleotide
gguaaccgcggccugcucg

SEQ ID NO: 1174688 - RNA, 19 nt, Artificial Sequence
  Description of Artificial Sequence: Synthetic oligonucleotide
ccuugucuaugaaucaugc

SEQ ID NO: 1174689 - RNA, 19 nt, Artificial Sequence
  Description of Artificial Sequence: Synthetic oligonucleotide
ugcgaccuaccccacuggc

SEQ ID NO: 1174690 - RNA, 19 nt, Artificial Sequence
  Description of Artificial Sequence: Synthetic oligonucleotide
gucuaugaaucaugccacc

SEQ ID NO: 1174691 - RNA, 19 nt, Artificial Sequence
  Description of Artificial Sequence: Synthetic oligonucleotide
uuggagcagacugagccac

SEQ ID NO: 1174692 - RNA, 19 nt, Artificial Sequence
  Description of Artificial Sequence: Synthetic oligonucleotide
cuucuucgcucuuccuugg

SEQ ID NO: 1174693 - RNA, 19 nt, Artificial Sequence
  Description of Artificial Sequence: Synthetic oligonucleotide
ucugcugauuaggaauuac

SEQ ID NO: 1174694 - RNA, 19 nt, Artificial Sequence
  Description of Artificial Sequence: Synthetic oligonucleotide
gacaacuuccucauaggaa

SEQ ID NO: 1174695 - RNA, 19 nt, Artificial Sequence
  Description of Artificial Sequence: Synthetic oligonucleotide
cuacugagugauuggucac

SEQ ID NO: 1174696 - RNA, 19 nt, Artificial Sequence
  Description of Artificial Sequence: Synthetic oligonucleotide
uacauguccucaguggcaa

SEQ ID NO: 1174697 - RNA, 19 nt, Artificial Sequence
  Description of Artificial Sequence: Synthetic oligonucleotide
agucucaggucgguugcgc

SEQ ID NO: 1174698 - RNA, 19 nt, Artificial Sequence
  Description of Artificial Sequence: Synthetic oligonucleotide
caccaaagagaggucaaag

SEQ ID NO: 1174699 - RNA, 19 nt, Artificial Sequence
  Description of Artificial Sequence: Synthetic oligonucleotide
gaacucauuggcagagaug

SEQ ID NO: 1174700 - RNA, 19 nt, Artificial Sequence
  Description of Artificial Sequence: Synthetic oligonucleotide
gugagagacaaggcggcgg

SEQ ID NO: 1174701 - RNA, 19 nt, Artificial Sequence
  Description of Artificial Sequence: Synthetic oligonucleotide
gucaguagguucgaugaac

SEQ ID NO: 1174702 - RNA, 19 nt, Artificial Sequence
  Description of Artificial Sequence: Synthetic oligonucleotide
ccugauagcugccaaacuc

SEQ ID NO: 1174703 - RNA, 19 nt, Artificial Sequence
  Description of Artificial Sequence: Synthetic oligonucleotide
aaacaacauccaacugguc

SEQ ID NO: 1174704 - RNA, 19 nt, Artificial Sequence
  Description of Artificial Sequence: Synthetic oligonucleotide
aacccgguaaccgcggccu

SEQ ID NO: 1174705 - RNA, 19 nt, Artificial Sequence
  Description of Artificial Sequence: Synthetic oligonucleotide
uaaccgcaaacccgguaac

SEQ ID NO: 1174706 - RNA, 19 nt, Artificial Sequence
  Description of Artificial Sequence: Synthetic oligonucleotide
cauaggaaacaacauccaa

SEQ ID NO: 1174707 - RNA, 19 nt, Artificial Sequence
  Description of Artificial Sequence: Synthetic oligonucleotide
uuggcggucguguuguaua

SEQ ID NO: 1174708 - RNA, 19 nt, Artificial Sequence
  Description of Artificial Sequence: Synthetic oligonucleotide
cuggauaaugucuccagua

SEQ ID NO: 1174709 - RNA, 19 nt, Artificial Sequence
  Description of Artificial Sequence: Synthetic oligonucleotide
guugagaugaagugauacu

SEQ ID NO: 1174710 - RNA, 19 nt, Artificial Sequence
  Description of Artificial Sequence: Synthetic oligonucleotide
cuccgugaucuucucaaac

SEQ ID NO: 1174711 - RNA, 19 nt, Artificial Sequence
  Description of Artificial Sequence: Synthetic oligonucleotide
uagucaaacugugcucuca

SEQ ID NO: 1174712 - RNA, 19 nt, Artificial Sequence
  Description of Artificial Sequence: Synthetic oligonucleotide
uacuccugguaggacagca

SEQ ID NO: 1174713 - RNA, 19 nt, Artificial Sequence
  Description of Artificial Sequence: Synthetic oligonucleotide
gaagggagccuugucuaug

SEQ ID NO: 1174714 - RNA, 19 nt, Artificial Sequence
  Description of Artificial Sequence: Synthetic oligonucleotide
ccgguaaccgcaaacccgg

SEQ ID NO: 1174715 - RNA, 19 nt, Artificial Sequence
  Description of Artificial Sequence: Synthetic oligonucleotide
gaucuggauaaugucucca

SEQ ID NO: 1174716 - RNA, 19 nt, Artificial Sequence
  Description of Artificial Sequence: Synthetic oligonucleotide
agacugagccacacuugcc

SEQ ID NO: 1174717 - RNA, 19 nt, Artificial Sequence
  Description of Artificial Sequence: Synthetic oligonucleotide
gagacaaggcggcggagga

SEQ ID NO: 1174718 - RNA, 19 nt, Artificial Sequence
  Description of Artificial Sequence: Synthetic oligonucleotide
acuugagcgucaucucaca

SEQ ID NO: 1174719 - RNA, 19 nt, Artificial Sequence
  Description of Artificial Sequence: Synthetic oligonucleotide
ggaggagccuuccacccgg

SEQ ID NO: 1174720 - RNA, 19 nt, Artificial Sequence
  Description of Artificial Sequence: Synthetic oligonucleotide
aguagugagcauacugacu

SEQ ID NO: 1174721 - RNA, 19 nt, Artificial Sequence
  Description of Artificial Sequence: Synthetic oligonucleotide
uugcgcuuuuguagcaagu

SEQ ID NO: 1174722 - RNA, 19 nt, Artificial Sequence
  Description of Artificial Sequence: Synthetic oligonucleotide
aaacuguaugagacgcacu

SEQ ID NO: 1174723 - RNA, 19 nt, Artificial Sequence
  Description of Artificial Sequence: Synthetic oligonucleotide
uuggucacauuugugccau

SEQ ID NO: 1174724 - RNA, 19 nt, Artificial Sequence
  Description of Artificial Sequence: Synthetic oligonucleotide
uucgcuggacuugagcguc

SEQ ID NO: 1174725 - RNA, 19 nt, Artificial Sequence
  Description of Artificial Sequence: Synthetic oligonucleotide
uuuugggaucauagucaaa

SEQ ID NO: 1174726 - RNA, 19 nt, Artificial Sequence
  Description of Artificial Sequence: Synthetic oligonucleotide
ccggacaacuuccucauag

SEQ ID NO: 1174727 - RNA, 19 nt, Artificial Sequence
  Description of Artificial Sequence: Synthetic oligonucleotide
cuugccucuugcccuuuag

SEQ ID NO: 1174728 - RNA, 19 nt, Artificial Sequence
  Description of Artificial Sequence: Synthetic oligonucleotide
caguagguucgaugaacac

SEQ ID NO: 1174729 - RNA, 19 nt, Artificial Sequence
  Description of Artificial Sequence: Synthetic oligonucleotide
uuaauauggcugcgaccua

SEQ ID NO: 1174730 - RNA, 19 nt, Artificial Sequence
  Description of Artificial Sequence: Synthetic oligonucleotide
cauuuccucuguugagaug

SEQ ID NO: 1174731 - RNA, 19 nt, Artificial Sequence
  Description of Artificial Sequence: Synthetic oligonucleotide
accgcggccugcucggagg

SEQ ID NO: 1174732 - RNA, 19 nt, Artificial Sequence
  Description of Artificial Sequence: Synthetic oligonucleotide
gugauuggucacauuugug

SEQ ID NO: 1174733 - RNA, 19 nt, Artificial Sequence
  Description of Artificial Sequence: Synthetic oligonucleotide
ggagggguuucucuagagc

SEQ ID NO: 1174734 - RNA, 19 nt, Artificial Sequence
  Description of Artificial Sequence: Synthetic oligonucleotide
aggucgguugcgcuuuugu

SEQ ID NO: 1174735 - RNA, 19 nt, Artificial Sequence
  Description of Artificial Sequence: Synthetic oligonucleotide
uucgcucuuccuuggcggu

SEQ ID NO: 1174736 - RNA, 19 nt, Artificial Sequence
  Description of Artificial Sequence: Synthetic oligonucleotide
agacgacucugcugauuag

SEQ ID NO: 1174737 - RNA, 19 nt, Artificial Sequence
  Description of Artificial Sequence: Synthetic oligonucleotide
gaggcgugagagacaaggc

SEQ ID NO: 1174738 - RNA, 19 nt, Artificial Sequence
  Description of Artificial Sequence: Synthetic oligonucleotide
cccgguaaccgcaaacccg

SEQ ID NO: 1174739 - RNA, 19 nt, Artificial Sequence
  Description of Artificial Sequence: Synthetic oligonucleotide
gcuuugagcccgguaaccg

SEQ ID NO: 1174740 - RNA, 19 nt, Artificial Sequence
  Description of Artificial Sequence: Synthetic oligonucleotide
uccgagagcgcggugcgca

SEQ ID NO: 1174741 - RNA, 19 nt, Artificial Sequence
  Description of Artificial Sequence: Synthetic oligonucleotide
ggacaacuuccucauagga

SEQ ID NO: 1174742 - RNA, 19 nt, Artificial Sequence
  Description of Artificial Sequence: Synthetic oligonucleotide
cagcuuggagcuucacuug

SEQ ID NO: 1174743 - RNA, 19 nt, Artificial Sequence
  Description of Artificial Sequence: Synthetic oligonucleotide
guaugagacgcacuuuccu

SEQ ID NO: 1174744 - RNA, 19 nt, Artificial Sequence
  Description of Artificial Sequence: Synthetic oligonucleotide
gacagguacccacuguggu

SEQ ID NO: 1174745 - RNA, 19 nt, Artificial Sequence
  Description of Artificial Sequence: Synthetic oligonucleotide
auacauguccucaguggca

SEQ ID NO: 1174746 - RNA, 19 nt, Artificial Sequence
  Description of Artificial Sequence: Synthetic oligonucleotide
uggggaggauggcauucca

SEQ ID NO: 1174747 - RNA, 19 nt, Artificial Sequence
  Description of Artificial Sequence: Synthetic oligonucleotide
uauugcuuuggagggguuu

SEQ ID NO: 1174748 - RNA, 19 nt, Artificial Sequence
  Description of Artificial Sequence: Synthetic oligonucleotide
gugaacugcaagccugguc

SEQ ID NO: 1174749 - RNA, 19 nt, Artificial Sequence
  Description of Artificial Sequence: Synthetic oligonucleotide
cuuagccagauacuugucu

SEQ ID NO: 1174750 - RNA, 19 nt, Artificial Sequence
  Description of Artificial Sequence: Synthetic oligonucleotide
uuccacccggcccugccac

SEQ ID NO: 1174751 - RNA, 19 nt, Artificial Sequence
  Description of Artificial Sequence: Synthetic oligonucleotide
ugcaagggauaagauuguc

SEQ ID NO: 1174752 - RNA, 19 nt, Artificial Sequence
  Description of Artificial Sequence: Synthetic oligonucleotide
cuuuggagggguuucucua

SEQ ID NO: 1174753 - RNA, 19 nt, Artificial Sequence
  Description of Artificial Sequence: Synthetic oligonucleotide
agcuucacuuggagcagac

SEQ ID NO: 1174754 - RNA, 19 nt, Artificial Sequence
  Description of Artificial Sequence: Synthetic oligonucleotide
uauauggggcaggguacac

SEQ ID NO: 1174755 - RNA, 19 nt, Artificial Sequence
  Description of Artificial Sequence: Synthetic oligonucleotide
gaccuaccccacuggcucc

SEQ ID NO: 1174756 - RNA, 19 nt, Artificial Sequence
  Description of Artificial Sequence: Synthetic oligonucleotide
ccauggagaauucuggcca

SEQ ID NO: 1174757 - RNA, 19 nt, Artificial Sequence
  Description of Artificial Sequence: Synthetic oligonucleotide
ucucaggucgguugcgcuu

SEQ ID NO: 1174758 - RNA, 19 nt, Artificial Sequence
  Description of Artificial Sequence: Synthetic oligonucleotide
gagcccgguaaccgcaaac

SEQ ID NO: 1174759 - RNA, 19 nt, Artificial Sequence
  Description of Artificial Sequence: Synthetic oligonucleotide
caugccaccauggagaauu

SEQ ID NO: 1174760 - RNA, 19 nt, Artificial Sequence
  Description of Artificial Sequence: Synthetic oligonucleotide
caccauuauucaccaaaga

SEQ ID NO: 1174761 - RNA, 19 nt, Artificial Sequence
  Description of Artificial Sequence: Synthetic oligonucleotide
gggaggauggcauuccaaa

SEQ ID NO: 1174762 - RNA, 19 nt, Artificial Sequence
  Description of Artificial Sequence: Synthetic oligonucleotide
gcugcgaccuaccccacug

SEQ ID NO: 1174763 - RNA, 19 nt, Artificial Sequence
  Description of Artificial Sequence: Synthetic oligonucleotide
guauauggggcaggguaca

SEQ ID NO: 1174764 - RNA, 19 nt, Artificial Sequence
  Description of Artificial Sequence: Synthetic oligonucleotide
ggagcggcagugcuuugag

SEQ ID NO: 1174765 - RNA, 19 nt, Artificial Sequence
  Description of Artificial Sequence: Synthetic oligonucleotide
caaacccgguaaccgcggc

SEQ ID NO: 1174766 - RNA, 19 nt, Artificial Sequence
  Description of Artificial Sequence: Synthetic oligonucleotide
gcuaccuggagcaguagac

SEQ ID NO: 1174767 - RNA, 19 nt, Artificial Sequence
  Description of Artificial Sequence: Synthetic oligonucleotide
gugcacuguuucaaauuug

SEQ ID NO: 1174768 - RNA, 19 nt, Artificial Sequence
  Description of Artificial Sequence: Synthetic oligonucleotide
ugcagacuccuuggaggag

SEQ ID NO: 1174769 - RNA, 19 nt, Artificial Sequence
  Description of Artificial Sequence: Synthetic oligonucleotide
ccgugaucuucucaaacug

SEQ ID NO: 1174770 - RNA, 19 nt, Artificial Sequence
  Description of Artificial Sequence: Synthetic oligonucleotide
cuucagucugagugcccug

SEQ ID NO: 1174771 - RNA, 19 nt, Artificial Sequence
  Description of Artificial Sequence: Synthetic oligonucleotide
acgcacuuuccuugccucu

SEQ ID NO: 1174772 - RNA, 19 nt, Artificial Sequence
  Description of Artificial Sequence: Synthetic oligonucleotide
cugacuacggauggccuca

SEQ ID NO: 1174773 - RNA, 19 nt, Artificial Sequence
  Description of Artificial Sequence: Synthetic oligonucleotide
uuauugcuuuggagggguu

SEQ ID NO: 1174774 - RNA, 19 nt, Artificial Sequence
  Description of Artificial Sequence: Synthetic oligonucleotide
gguccgagagcgcggugcg

SEQ ID NO: 1174775 - RNA, 19 nt, Artificial Sequence
  Description of Artificial Sequence: Synthetic oligonucleotide
cugcgaccuaccccacugg

SEQ ID NO: 1174776 - RNA, 19 nt, Artificial Sequence
  Description of Artificial Sequence: Synthetic oligonucleotide
uggcggucguguuguauau

SEQ ID NO: 1174777 - RNA, 19 nt, Artificial Sequence
  Description of Artificial Sequence: Synthetic oligonucleotide
uugagcccgguaaccgcaa

SEQ ID NO: 1174778 - RNA, 19 nt, Artificial Sequence
  Description of Artificial Sequence: Synthetic oligonucleotide
ucgccuucgcuggacuuga

SEQ ID NO: 1174779 - RNA, 19 nt, Artificial Sequence
  Description of Artificial Sequence: Synthetic oligonucleotide
cucgccuucgcuggacuug

SEQ ID NO: 1174780 - RNA, 19 nt, Artificial Sequence
  Description of Artificial Sequence: Synthetic oligonucleotide
cgcaaacccgguaaccgcg

SEQ ID NO: 1174781 - RNA, 19 nt, Artificial Sequence
  Description of Artificial Sequence: Synthetic oligonucleotide
cucuagagcaguuguacuu

SEQ ID NO: 1174782 - RNA, 19 nt, Artificial Sequence
  Description of Artificial Sequence: Synthetic oligonucleotide
agacaaggcggcggaggag

SEQ ID NO: 1174783 - RNA, 19 nt, Artificial Sequence
  Description of Artificial Sequence: Synthetic oligonucleotide
guacccacuguggugaacu

SEQ ID NO: 1174784 - RNA, 19 nt, Artificial Sequence
  Description of Artificial Sequence: Synthetic oligonucleotide
gagcgcggugcgcaugcug

SEQ ID NO: 1174785 - RNA, 19 nt, Artificial Sequence
  Description of Artificial Sequence: Synthetic oligonucleotide
agcgcggugcgcaugcugu

SEQ ID NO: 1174786 - RNA, 19 nt, Artificial Sequence
  Description of Artificial Sequence: Synthetic oligonucleotide
ucgcuggacuugagcguca

SEQ ID NO: 1174787 - RNA, 19 nt, Artificial Sequence
  Description of Artificial Sequence: Synthetic oligonucleotide
ggugcacuguuucaaauuu

SEQ ID NO: 1174788 - RNA, 19 nt, Artificial Sequence
  Description of Artificial Sequence: Synthetic oligonucleotide
ugacuacggauggccucag

SEQ ID NO: 1174789 - RNA, 19 nt, Artificial Sequence
  Description of Artificial Sequence: Synthetic oligonucleotide
ccacccucgccuucgcugg

SEQ ID NO: 1174790 - RNA, 19 nt, Artificial Sequence
  Description of Artificial Sequence: Synthetic oligonucleotide
gccuugucuaugaaucaug

SEQ ID NO: 1174791 - RNA, 19 nt, Artificial Sequence
  Description of Artificial Sequence: Synthetic oligonucleotide
cggacaacuuccucauagg

SEQ ID NO: 1174792 - RNA, 19 nt, Artificial Sequence
  Description of Artificial Sequence: Synthetic oligonucleotide
gcaagugcuccagguagag

SEQ ID NO: 1174793 - RNA, 19 nt, Artificial Sequence
  Description of Artificial Sequence: Synthetic oligonucleotide
uagguucgaugaacacaau

SEQ ID NO: 1174794 - RNA, 19 nt, Artificial Sequence
  Description of Artificial Sequence: Synthetic oligonucleotide
ggcaggguacacaaacuuc

SEQ ID NO: 1174795 - RNA, 19 nt, Artificial Sequence
  Description of Artificial Sequence: Synthetic oligonucleotide
gcgcaugcuguucccaccc

SEQ ID NO: 1174796 - RNA, 19 nt, Artificial Sequence
  Description of Artificial Sequence: Synthetic oligonucleotide
agccuggucaaaggcuucu

SEQ ID NO: 1174797 - RNA, 19 nt, Artificial Sequence
  Description of Artificial Sequence: Synthetic oligonucleotide
aucauuccuuugguuuccu

SEQ ID NO: 1174798 - RNA, 19 nt, Artificial Sequence
  Description of Artificial Sequence: Synthetic oligonucleotide
cagucucaggucgguugcg

SEQ ID NO: 1174799 - RNA, 19 nt, Artificial Sequence
  Description of Artificial Sequence: Synthetic oligonucleotide
gcccgguaaccgcaaaccc

SEQ ID NO: 1174800 - RNA, 19 nt, Artificial Sequence
  Description of Artificial Sequence: Synthetic oligonucleotide
caccgagacgcuggagcgg

SEQ ID NO: 1174801 - RNA, 19 nt, Artificial Sequence
  Description of Artificial Sequence: Synthetic oligonucleotide
caguccugccucuuugcaa

SEQ ID NO: 1174802 - RNA, 19 nt, Artificial Sequence
  Description of Artificial Sequence: Synthetic oligonucleotide
ccgcaaacccgguaaccgc

SEQ ID NO: 1174803 - RNA, 19 nt, Artificial Sequence
  Description of Artificial Sequence: Synthetic oligonucleotide
gcuuaugaaucuggugcac

SEQ ID NO: 1174804 - RNA, 19 nt, Artificial Sequence
  Description of Artificial Sequence: Synthetic oligonucleotide
cagguucuccaauucugua

SEQ ID NO: 1174805 - RNA, 19 nt, Artificial Sequence
  Description of Artificial Sequence: Synthetic oligonucleotide
gcaaacccgguaaccgcgg

SEQ ID NO: 1174806 - RNA, 19 nt, Artificial Sequence
  Description of Artificial Sequence: Synthetic oligonucleotide
uucccacccucgccuucgc

SEQ ID NO: 1174807 - RNA, 19 nt, Artificial Sequence
  Description of Artificial Sequence: Synthetic oligonucleotide
ggauucugucugagcagag

SEQ ID NO: 1174808 - RNA, 19 nt, Artificial Sequence
  Description of Artificial Sequence: Synthetic oligonucleotide
cuucgcuggacuugagcgu

SEQ ID NO: 1174809 - RNA, 19 nt, Artificial Sequence
  Description of Artificial Sequence: Synthetic oligonucleotide
cugguucaaugcagucuca

SEQ ID NO: 1174810 - RNA, 19 nt, Artificial Sequence
  Description of Artificial Sequence: Synthetic oligonucleotide
gcccugauagcugccaaac

SEQ ID NO: 1174811 - RNA, 19 nt, Artificial Sequence
  Description of Artificial Sequence: Synthetic oligonucleotide
acccucgccuucgcuggac

SEQ ID NO: 1174812 - RNA, 19 nt, Artificial Sequence
  Description of Artificial Sequence: Synthetic oligonucleotide
cgaccuaccccacuggcuc

SEQ ID NO: 1174813 - RNA, 19 nt, Artificial Sequence
  Description of Artificial Sequence: Synthetic oligonucleotide
ggauccggacaacuuccuc

SEQ ID NO: 1174814 - RNA, 19 nt, Artificial Sequence
  Description of Artificial Sequence: Synthetic oligonucleotide
ccuucugaagcuggucuac

SEQ ID NO: 1174815 - RNA, 19 nt, Artificial Sequence
  Description of Artificial Sequence: Synthetic oligonucleotide
gacuacggauggccucaga

SEQ ID NO: 1174816 - RNA, 19 nt, Artificial Sequence
  Description of Artificial Sequence: Synthetic oligonucleotide
caauugcugucaucuuugu

SEQ ID NO: 1174817 - RNA, 19 nt, Artificial Sequence
  Description of Artificial Sequence: Synthetic oligonucleotide
cuguugagaugaagugaua

SEQ ID NO: 1174818 - RNA, 19 nt, Artificial Sequence
  Description of Artificial Sequence: Synthetic oligonucleotide
guacuccugguaggacagc

SEQ ID NO: 1174819 - RNA, 19 nt, Artificial Sequence
  Description of Artificial Sequence: Synthetic oligonucleotide
ggucaguagguucgaugaa

SEQ ID NO: 1174820 - RNA, 19 nt, Artificial Sequence
  Description of Artificial Sequence: Synthetic oligonucleotide
gguaaccgcaaacccggua

SEQ ID NO: 1174821 - RNA, 19 nt, Artificial Sequence
  Description of Artificial Sequence: Synthetic oligonucleotide
ggucgguugcgcuuuugua

SEQ ID NO: 1174822 - RNA, 19 nt, Artificial Sequence
  Description of Artificial Sequence: Synthetic oligonucleotide
ggucuacugagugauuggu

SEQ ID NO: 1174823 - RNA, 19 nt, Artificial Sequence
  Description of Artificial Sequence: Synthetic oligonucleotide
acccgguaaccgcggccug

SEQ ID NO: 1174824 - RNA, 19 nt, Artificial Sequence
  Description of Artificial Sequence: Synthetic oligonucleotide
caacauccaacuggucaaa

SEQ ID NO: 1174825 - RNA, 19 nt, Artificial Sequence
  Description of Artificial Sequence: Synthetic oligonucleotide
cggucguguuguauauggg

SEQ ID NO: 1174826 - RNA, 19 nt, Artificial Sequence
  Description of Artificial Sequence: Synthetic oligonucleotide
ggcccugccaccaauugcu

SEQ ID NO: 1174827 - RNA, 19 nt, Artificial Sequence
  Description of Artificial Sequence: Synthetic oligonucleotide
cugccucuuugcaagggau

SEQ ID NO: 1174828 - RNA, 19 nt, Artificial Sequence
  Description of Artificial Sequence: Synthetic oligonucleotide
gccaccaauugcugucauc

SEQ ID NO: 1174829 - RNA, 19 nt, Artificial Sequence
  Description of Artificial Sequence: Synthetic oligonucleotide
ggagaauucuggccacagu

SEQ ID NO: 1174830 - RNA, 19 nt, Artificial Sequence
  Description of Artificial Sequence: Synthetic oligonucleotide
gguagagguccgagagcgc

SEQ ID NO: 1174831 - RNA, 19 nt, Artificial Sequence
  Description of Artificial Sequence: Synthetic oligonucleotide
uggcugcgaccuaccccac

SEQ ID NO: 1174832 - RNA, 19 nt, Artificial Sequence
  Description of Artificial Sequence: Synthetic oligonucleotide
ccacgugaagggagccuug

SEQ ID NO: 1174833 - RNA, 19 nt, Artificial Sequence
  Description of Artificial Sequence: Synthetic oligonucleotide
uaaccgcggccugcucgga

SEQ ID NO: 1174834 - RNA, 19 nt, Artificial Sequence
  Description of Artificial Sequence: Synthetic oligonucleotide
gguugcgcuuuuguagcaa

SEQ ID NO: 1174835 - RNA, 19 nt, Artificial Sequence
  Description of Artificial Sequence: Synthetic oligonucleotide
ggcggucguguuguauaug

SEQ ID NO: 1174836 - RNA, 19 nt, Artificial Sequence
  Description of Artificial Sequence: Synthetic oligonucleotide
caggucgguugcgcuuuug

SEQ ID NO: 1174837 - RNA, 19 nt, Artificial Sequence
  Description of Artificial Sequence: Synthetic oligonucleotide
cagugcuuugagcccggua

SEQ ID NO: 1174838 - RNA, 19 nt, Artificial Sequence
  Description of Artificial Sequence: Synthetic oligonucleotide
cggcagugcuuugagcccg

SEQ ID NO: 1174839 - RNA, 19 nt, Artificial Sequence
  Description of Artificial Sequence: Synthetic oligonucleotide
gggauaagauuguccuuuu

SEQ ID NO: 1174840 - RNA, 19 nt, Artificial Sequence
  Description of Artificial Sequence: Synthetic oligonucleotide
guccgagagcgcggugcgc

SEQ ID NO: 1174841 - RNA, 19 nt, Artificial Sequence
  Description of Artificial Sequence: Synthetic oligonucleotide
ccggcccugccaccaauug

SEQ ID NO: 1174842 - RNA, 19 nt, Artificial Sequence
  Description of Artificial Sequence: Synthetic oligonucleotide
cggcccugccaccaauugc

SEQ ID NO: 1174843 - RNA, 19 nt, Artificial Sequence
  Description of Artificial Sequence: Synthetic oligonucleotide
gccugcucggaggcgugag

SEQ ID NO: 1174844 - RNA, 19 nt, Artificial Sequence
  Description of Artificial Sequence: Synthetic oligonucleotide
gccaaacauguugcccuga

SEQ ID NO: 1174845 - RNA, 19 nt, Artificial Sequence
  Description of Artificial Sequence: Synthetic oligonucleotide
cucaggucgguugcgcuuu

SEQ ID NO: 1174846 - RNA, 19 nt, Artificial Sequence
  Description of Artificial Sequence: Synthetic oligonucleotide
cuuggcggucguguuguau

SEQ ID NO: 1174847 - RNA, 19 nt, Artificial Sequence
  Description of Artificial Sequence: Synthetic oligonucleotide
gccacaguacaugacuguu

SEQ ID NO: 1174848 - RNA, 19 nt, Artificial Sequence
  Description of Artificial Sequence: Synthetic oligonucleotide
gcuggagcggcagugcuuu

SEQ ID NO: 1174849 - RNA, 19 nt, Artificial Sequence
  Description of Artificial Sequence: Synthetic oligonucleotide
ccgcggccugcucggaggc

SEQ ID NO: 1174850 - RNA, 19 nt, Artificial Sequence
  Description of Artificial Sequence: Synthetic oligonucleotide
cacccucgccuucgcugga

SEQ ID NO: 1174851 - RNA, 19 nt, Artificial Sequence
  Description of Artificial Sequence: Synthetic oligonucleotide
gcgaccuaccccacuggcu

SEQ ID NO: 1174852 - RNA, 19 nt, Artificial Sequence
  Description of Artificial Sequence: Synthetic oligonucleotide
gggauccggacaacuuccu

SEQ ID NO: 1174853 - RNA, 19 nt, Artificial Sequence
  Description of Artificial Sequence: Synthetic oligonucleotide
cccugauagcugccaaacu

SEQ ID NO: 1174854 - RNA, 19 nt, Artificial Sequence
  Description of Artificial Sequence: Synthetic oligonucleotide
cgguugcgcuuuuguagca

SEQ ID NO: 1174855 - RNA, 19 nt, Artificial Sequence
  Description of Artificial Sequence: Synthetic oligonucleotide
cacccggcccugccaccaa

SEQ ID NO: 1174856 - RNA, 19 nt, Artificial Sequence
  Description of Artificial Sequence: Synthetic oligonucleotide
cgcggugcgcaugcuguuc

SEQ ID NO: 1174857 - RNA, 19 nt, Artificial Sequence
  Description of Artificial Sequence: Synthetic oligonucleotide
cccacgugaagggagccuu

SEQ ID NO: 1174858 - RNA, 19 nt, Artificial Sequence
  Description of Artificial Sequence: Synthetic oligonucleotide
cggaggcgugagagacaag

SEQ ID NO: 1174859 - RNA, 19 nt, Artificial Sequence
  Description of Artificial Sequence: Synthetic oligonucleotide
ccgagacgcuggagcggca

SEQ ID NO: 1174860 - RNA, 19 nt, Artificial Sequence
  Description of Artificial Sequence: Synthetic oligonucleotide
cgcggccugcucggaggcg

SEQ ID NO: 1174861 - RNA, 19 nt, Artificial Sequence
  Description of Artificial Sequence: Synthetic oligonucleotide
ccgguaaccgcggccugcu

SEQ ID NO: 1174862 - RNA, 19 nt, Artificial Sequence
  Description of Artificial Sequence: Synthetic oligonucleotide
cgguaaccgcggccugcuc

SEQ ID NO: 1174863 - RNA, 19 nt, Artificial Sequence
  Description of Artificial Sequence: Synthetic oligonucleotide
ccuuggcggucguguugua

SEQ ID NO: 1174864 - RNA, 19 nt, Artificial Sequence
  Description of Artificial Sequence: Synthetic oligonucleotide
ccccacgugaagggagccu

SEQ ID NO: 1174865 - RNA, 19 nt, Artificial Sequence
  Description of Artificial Sequence: Synthetic oligonucleotide
gcgcggugcgcaugcuguu

SEQ ID NO: 1174866 - RNA, 19 nt, Artificial Sequence
  Description of Artificial Sequence: Synthetic oligonucleotide
ccgagagcgcggugcgcau

SEQ ID NO: 1174867 - RNA, 19 nt, Artificial Sequence
  Description of Artificial Sequence: Synthetic oligonucleotide
cccggcccugccaccaauu

SEQ ID NO: 1174868 - RNA, 19 nt, Artificial Sequence
  Description of Artificial Sequence: Synthetic oligonucleotide
ucauuguuuaaccuucugg

SEQ ID NO: 1174869 - RNA, 19 nt, Artificial Sequence
  Description of Artificial Sequence: Synthetic oligonucleotide
ucagggaucuuucuaaccg

SEQ ID NO: 1174870 - RNA, 19 nt, Artificial Sequence
  Description of Artificial Sequence: Synthetic oligonucleotide
agauacaacugucacaggg

SEQ ID NO: 1174871 - RNA, 19 nt, Artificial Sequence
  Description of Artificial Sequence: Synthetic oligonucleotide
uuucuaaccgugaauuugg

SEQ ID NO: 1174872 - RNA, 19 nt, Artificial Sequence
  Description of Artificial Sequence: Synthetic oligonucleotide
gaauccaccaaucagcagc

SEQ ID NO: 1174873 - RNA, 19 nt, Artificial Sequence
  Description of Artificial Sequence: Synthetic oligonucleotide
uuuaugcucaucacgcugg

SEQ ID NO: 1174874 - RNA, 19 nt, Artificial Sequence
  Description of Artificial Sequence: Synthetic oligonucleotide
gaauuugugucucuuggcg

SEQ ID NO: 1174875 - RNA, 19 nt, Artificial Sequence
  Description of Artificial Sequence: Synthetic oligonucleotide
gauuuuaugcucaucacgc

SEQ ID NO: 1174876 - RNA, 19 nt, Artificial Sequence
  Description of Artificial Sequence: Synthetic oligonucleotide
uuugccauguauuagugcu

SEQ ID NO: 1174877 - RNA, 19 nt, Artificial Sequence
  Description of Artificial Sequence: Synthetic oligonucleotide
ucauucaugaguuggacgu

SEQ ID NO: 1174878 - RNA, 19 nt, Artificial Sequence
  Description of Artificial Sequence: Synthetic oligonucleotide
aaucgcaaccucuguaugg

SEQ ID NO: 1174879 - RNA, 19 nt, Artificial Sequence
  Description of Artificial Sequence: Synthetic oligonucleotide
ucguagaggacucugagga

SEQ ID NO: 1174880 - RNA, 19 nt, Artificial Sequence
  Description of Artificial Sequence: Synthetic oligonucleotide
cauucgauguccuuggcgg

SEQ ID NO: 1174881 - RNA, 19 nt, Artificial Sequence
  Description of Artificial Sequence: Synthetic oligonucleotide
aguagaaucugcugguaac

SEQ ID NO: 1174882 - RNA, 19 nt, Artificial Sequence
  Description of Artificial Sequence: Synthetic oligonucleotide
ucuuaucugccuuggaagg

SEQ ID NO: 1174883 - RNA, 19 nt, Artificial Sequence
  Description of Artificial Sequence: Synthetic oligonucleotide
uuaauuguccuguccacag

SEQ ID NO: 1174884 - RNA, 19 nt, Artificial Sequence
  Description of Artificial Sequence: Synthetic oligonucleotide
uauuguacguauuugcuuc

SEQ ID NO: 1174885 - RNA, 19 nt, Artificial Sequence
  Description of Artificial Sequence: Synthetic oligonucleotide
uguaauucuaauucucgcu

SEQ ID NO: 1174886 - RNA, 19 nt, Artificial Sequence
  Description of Artificial Sequence: Synthetic oligonucleotide
aguguguugaggugggagc

SEQ ID NO: 1174887 - RNA, 19 nt, Artificial Sequence
  Description of Artificial Sequence: Synthetic oligonucleotide
uugagaagcagucagggau

SEQ ID NO: 1174888 - RNA, 19 nt, Artificial Sequence
  Description of Artificial Sequence: Synthetic oligonucleotide
uguauuagugcuccucucc

SEQ ID NO: 1174889 - RNA, 19 nt, Artificial Sequence
  Description of Artificial Sequence: Synthetic oligonucleotide
ucucagauagugcagguac

SEQ ID NO: 1174890 - RNA, 19 nt, Artificial Sequence
  Description of Artificial Sequence: Synthetic oligonucleotide
ucuugagucgccaugcuga

SEQ ID NO: 1174891 - RNA, 19 nt, Artificial Sequence
  Description of Artificial Sequence: Synthetic oligonucleotide
ugaucuuuccaccuugccc

SEQ ID NO: 1174892 - RNA, 19 nt, Artificial Sequence
  Description of Artificial Sequence: Synthetic oligonucleotide
uacguauuugcuuccaugc

SEQ ID NO: 1174893 - RNA, 19 nt, Artificial Sequence
  Description of Artificial Sequence: Synthetic oligonucleotide
uuuuaugcucaucacgcug

SEQ ID NO: 1174894 - RNA, 19 nt, Artificial Sequence
  Description of Artificial Sequence: Synthetic oligonucleotide
aaggacgugauguaguuau

SEQ ID NO: 1174895 - RNA, 19 nt, Artificial Sequence
  Description of Artificial Sequence: Synthetic oligonucleotide
uacacagcgcuccugagcc

SEQ ID NO: 1174896 - RNA, 19 nt, Artificial Sequence
  Description of Artificial Sequence: Synthetic oligonucleotide
auuugugucucuuggcgcg

SEQ ID NO: 1174897 - RNA, 19 nt, Artificial Sequence
  Description of Artificial Sequence: Synthetic oligonucleotide
gaucuuuccaccuugccca

SEQ ID NO: 1174898 - RNA, 19 nt, Artificial Sequence
  Description of Artificial Sequence: Synthetic oligonucleotide
uccgcaauaaggcaugcug

SEQ ID NO: 1174899 - RNA, 19 nt, Artificial Sequence
  Description of Artificial Sequence: Synthetic oligonucleotide
uucauucaugaguuggacg

SEQ ID NO: 1174900 - RNA, 19 nt, Artificial Sequence
  Description of Artificial Sequence: Synthetic oligonucleotide
agccauaagacuuuauuca

SEQ ID NO: 1174901 - RNA, 19 nt, Artificial Sequence
  Description of Artificial Sequence: Synthetic oligonucleotide
cuggaauccaccaaucagc

SEQ ID NO: 1174902 - RNA, 19 nt, Artificial Sequence
  Description of Artificial Sequence: Synthetic oligonucleotide
ucuugagaagcagucaggg

SEQ ID NO: 1174903 - RNA, 19 nt, Artificial Sequence
  Description of Artificial Sequence: Synthetic oligonucleotide
uguauggcgaugacuaccc

SEQ ID NO: 1174904 - RNA, 19 nt, Artificial Sequence
  Description of Artificial Sequence: Synthetic oligonucleotide
uaguucagacuucaguucc

SEQ ID NO: 1174905 - RNA, 19 nt, Artificial Sequence
  Description of Artificial Sequence: Synthetic oligonucleotide
cauguugcggcucagcugc

SEQ ID NO: 1174906 - RNA, 19 nt, Artificial Sequence
  Description of Artificial Sequence: Synthetic oligonucleotide
uuuuguaagggugucguug

SEQ ID NO: 1174907 - RNA, 19 nt, Artificial Sequence
  Description of Artificial Sequence: Synthetic oligonucleotide
gaugacuacccucacagca

SEQ ID NO: 1174908 - RNA, 19 nt, Artificial Sequence
  Description of Artificial Sequence: Synthetic oligonucleotide
ugguauuguacguauuugc

SEQ ID NO: 1174909 - RNA, 19 nt, Artificial Sequence
  Description of Artificial Sequence: Synthetic oligonucleotide
uuguaauucuaauucucgc

SEQ ID NO: 1174910 - RNA, 19 nt, Artificial Sequence
  Description of Artificial Sequence: Synthetic oligonucleotide
uggauauauucugucaagg

SEQ ID NO: 1174911 - RNA, 19 nt, Artificial Sequence
  Description of Artificial Sequence: Synthetic oligonucleotide
aaucuuuaauuguccuguc

SEQ ID NO: 1174912 - RNA, 19 nt, Artificial Sequence
  Description of Artificial Sequence: Synthetic oligonucleotide
uuucguagaggacucugag

SEQ ID NO: 1174913 - RNA, 19 nt, Artificial Sequence
  Description of Artificial Sequence: Synthetic oligonucleotide
gagaaugcagcccuucugc

SEQ ID NO: 1174914 - RNA, 19 nt, Artificial Sequence
  Description of Artificial Sequence: Synthetic oligonucleotide
aauucuaauucucgcuccu

SEQ ID NO: 1174915 - RNA, 19 nt, Artificial Sequence
  Description of Artificial Sequence: Synthetic oligonucleotide
uguuuaaccuucugguggc

SEQ ID NO: 1174916 - RNA, 19 nt, Artificial Sequence
  Description of Artificial Sequence: Synthetic oligonucleotide
uuccaaaugauggauauau

SEQ ID NO: 1174917 - RNA, 19 nt, Artificial Sequence
  Description of Artificial Sequence: Synthetic oligonucleotide
uccuaaagcucucugcucu

SEQ ID NO: 1174918 - RNA, 19 nt, Artificial Sequence
  Description of Artificial Sequence: Synthetic oligonucleotide
uuaaccuucugguggcagg

SEQ ID NO: 1174919 - RNA, 19 nt, Artificial Sequence
  Description of Artificial Sequence: Synthetic oligonucleotide
ggcauuguaauucuaauuc

SEQ ID NO: 1174920 - RNA, 19 nt, Artificial Sequence
  Description of Artificial Sequence: Synthetic oligonucleotide
uuaaggaugacaccgccuu

SEQ ID NO: 1174921 - RNA, 19 nt, Artificial Sequence
  Description of Artificial Sequence: Synthetic oligonucleotide
cuggaucugaguuucguag

SEQ ID NO: 1174922 - RNA, 19 nt, Artificial Sequence
  Description of Artificial Sequence: Synthetic oligonucleotide
cauuguaauucuaauucuc

SEQ ID NO: 1174923 - RNA, 19 nt, Artificial Sequence
  Description of Artificial Sequence: Synthetic oligonucleotide
ucucuuggcgcgcacaggc

SEQ ID NO: 1174924 - RNA, 19 nt, Artificial Sequence
  Description of Artificial Sequence: Synthetic oligonucleotide
guauuagugcuccucuccg

SEQ ID NO: 1174925 - RNA, 19 nt, Artificial Sequence
  Description of Artificial Sequence: Synthetic oligonucleotide
gguaucaugacuccugcag

SEQ ID NO: 1174926 - RNA, 19 nt, Artificial Sequence
  Description of Artificial Sequence: Synthetic oligonucleotide
gagccauaagacuuuauuc

SEQ ID NO: 1174927 - RNA, 19 nt, Artificial Sequence
  Description of Artificial Sequence: Synthetic oligonucleotide
acauucgauguccuuggcg

SEQ ID NO: 1174928 - RNA, 19 nt, Artificial Sequence
  Description of Artificial Sequence: Synthetic oligonucleotide
ucuuuugguaaaugagagc

SEQ ID NO: 1174929 - RNA, 19 nt, Artificial Sequence
  Description of Artificial Sequence: Synthetic oligonucleotide
agagaaugcugucuccggg

SEQ ID NO: 1174930 - RNA, 19 nt, Artificial Sequence
  Description of Artificial Sequence: Synthetic oligonucleotide
ucgugaaaggacgugaugu

SEQ ID NO: 1174931 - RNA, 19 nt, Artificial Sequence
  Description of Artificial Sequence: Synthetic oligonucleotide
uggaauccaccaaucagca

SEQ ID NO: 1174932 - RNA, 19 nt, Artificial Sequence
  Description of Artificial Sequence: Synthetic oligonucleotide
uuaguucagacuucaguuc

SEQ ID NO: 1174933 - RNA, 19 nt, Artificial Sequence
  Description of Artificial Sequence: Synthetic oligonucleotide
ggaacuucgugaaaggacg

SEQ ID NO: 1174934 - RNA, 19 nt, Artificial Sequence
  Description of Artificial Sequence: Synthetic oligonucleotide
agugguacugcugccaagg

SEQ ID NO: 1174935 - RNA, 19 nt, Artificial Sequence
  Description of Artificial Sequence: Synthetic oligonucleotide
uucucguuugaugacgucc

SEQ ID NO: 1174936 - RNA, 19 nt, Artificial Sequence
  Description of Artificial Sequence: Synthetic oligonucleotide
agauagugcagguacaguu

SEQ ID NO: 1174937 - RNA, 19 nt, Artificial Sequence
  Description of Artificial Sequence: Synthetic oligonucleotide
ucucuuuccgcuucaacuc

SEQ ID NO: 1174938 - RNA, 19 nt, Artificial Sequence
  Description of Artificial Sequence: Synthetic oligonucleotide
ugucuagcguccuuggugu

SEQ ID NO: 1174939 - RNA, 19 nt, Artificial Sequence
  Description of Artificial Sequence: Synthetic oligonucleotide
uuccuuaggaaaaccauuu

SEQ ID NO: 1174940 - RNA, 19 nt, Artificial Sequence
  Description of Artificial Sequence: Synthetic oligonucleotide
aucgcaaccucuguauggc

SEQ ID NO: 1174941 - RNA, 19 nt, Artificial Sequence
  Description of Artificial Sequence: Synthetic oligonucleotide
uuuccuuaggaaaaccauu

SEQ ID NO: 1174942 - RNA, 19 nt, Artificial Sequence
  Description of Artificial Sequence: Synthetic oligonucleotide
cucgccauuucuuaaccag

SEQ ID NO: 1174943 - RNA, 19 nt, Artificial Sequence
  Description of Artificial Sequence: Synthetic oligonucleotide
cuuucuaaccgugaauuug

SEQ ID NO: 1174944 - RNA, 19 nt, Artificial Sequence
  Description of Artificial Sequence: Synthetic oligonucleotide
gacguccaaucuuuaauug

SEQ ID NO: 1174945 - RNA, 19 nt, Artificial Sequence
  Description of Artificial Sequence: Synthetic oligonucleotide
uguucagaguccuggaauc

SEQ ID NO: 1174946 - RNA, 19 nt, Artificial Sequence
  Description of Artificial Sequence: Synthetic oligonucleotide
uucugacagagaaugcugu

SEQ ID NO: 1174947 - RNA, 19 nt, Artificial Sequence
  Description of Artificial Sequence: Synthetic oligonucleotide
agucagggaucuuucuaac

SEQ ID NO: 1174948 - RNA, 19 nt, Artificial Sequence
  Description of Artificial Sequence: Synthetic oligonucleotide
uugaggugggagcacucgg

SEQ ID NO: 1174949 - RNA, 19 nt, Artificial Sequence
  Description of Artificial Sequence: Synthetic oligonucleotide
uugcuuugccuacugagaa

SEQ ID NO: 1174950 - RNA, 19 nt, Artificial Sequence
  Description of Artificial Sequence: Synthetic oligonucleotide
uugaugacguccaaucuuu

SEQ ID NO: 1174951 - RNA, 19 nt, Artificial Sequence
  Description of Artificial Sequence: Synthetic oligonucleotide
guaaaugagagcuuuccua

SEQ ID NO: 1174952 - RNA, 19 nt, Artificial Sequence
  Description of Artificial Sequence: Synthetic oligonucleotide
uccacuucucgccauuucu

SEQ ID NO: 1174953 - RNA, 19 nt, Artificial Sequence
  Description of Artificial Sequence: Synthetic oligonucleotide
uccaaucuuuaauuguccu

SEQ ID NO: 1174954 - RNA, 19 nt, Artificial Sequence
  Description of Artificial Sequence: Synthetic oligonucleotide
gaaugcuuaguucagacuu

SEQ ID NO: 1174955 - RNA, 19 nt, Artificial Sequence
  Description of Artificial Sequence: Synthetic oligonucleotide
acagagaaugcugucuccg

SEQ ID NO: 1174956 - RNA, 19 nt, Artificial Sequence
  Description of Artificial Sequence: Synthetic oligonucleotide
uuugguaaaugagagcuuu

SEQ ID NO: 1174957 - RNA, 19 nt, Artificial Sequence
  Description of Artificial Sequence: Synthetic oligonucleotide
ucugucaaggaauguucug

SEQ ID NO: 1174958 - RNA, 19 nt, Artificial Sequence
  Description of Artificial Sequence: Synthetic oligonucleotide
aaugcugucuccgggacau

SEQ ID NO: 1174959 - RNA, 19 nt, Artificial Sequence
  Description of Artificial Sequence: Synthetic oligonucleotide
ugccuuggaaggaaauacc

SEQ ID NO: 1174960 - RNA, 19 nt, Artificial Sequence
  Description of Artificial Sequence: Synthetic oligonucleotide
ugaguuucguagaggacuc

SEQ ID NO: 1174961 - RNA, 19 nt, Artificial Sequence
  Description of Artificial Sequence: Synthetic oligonucleotide
auucaugaguuggacgugg

SEQ ID NO: 1174962 - RNA, 19 nt, Artificial Sequence
  Description of Artificial Sequence: Synthetic oligonucleotide
ugcauguugcggcucagcu

SEQ ID NO: 1174963 - RNA, 19 nt, Artificial Sequence
  Description of Artificial Sequence: Synthetic oligonucleotide
aggaaccuucucuuuccgc

SEQ ID NO: 1174964 - RNA, 19 nt, Artificial Sequence
  Description of Artificial Sequence: Synthetic oligonucleotide
ucuuaaccagaaaucgcaa

SEQ ID NO: 1174965 - RNA, 19 nt, Artificial Sequence
  Description of Artificial Sequence: Synthetic oligonucleotide
ugcucucagauagugcagg

SEQ ID NO: 1174966 - RNA, 19 nt, Artificial Sequence
  Description of Artificial Sequence: Synthetic oligonucleotide
ugcggaacuucgugaaagg

SEQ ID NO: 1174967 - RNA, 19 nt, Artificial Sequence
  Description of Artificial Sequence: Synthetic oligonucleotide
auguauuagugcuccucuc

SEQ ID NO: 1174968 - RNA, 19 nt, Artificial Sequence
  Description of Artificial Sequence: Synthetic oligonucleotide
cucgguggcuccuaggggc

SEQ ID NO: 1174969 - RNA, 19 nt, Artificial Sequence
  Description of Artificial Sequence: Synthetic oligonucleotide
cuuagaggaggccggaaug

SEQ ID NO: 1174970 - RNA, 19 nt, Artificial Sequence
  Description of Artificial Sequence: Synthetic oligonucleotide
ugcuuaaggaugacaccgc

SEQ ID NO: 1174971 - RNA, 19 nt, Artificial Sequence
  Description of Artificial Sequence: Synthetic oligonucleotide
acacaguagcuguugccgg

SEQ ID NO: 1174972 - RNA, 19 nt, Artificial Sequence
  Description of Artificial Sequence: Synthetic oligonucleotide
uugguauuguacguauuug

SEQ ID NO: 1174973 - RNA, 19 nt, Artificial Sequence
  Description of Artificial Sequence: Synthetic oligonucleotide
gaagacuugcuuugccuac

SEQ ID NO: 1174974 - RNA, 19 nt, Artificial Sequence
  Description of Artificial Sequence: Synthetic oligonucleotide
ucgauuuuaugcucaucac

SEQ ID NO: 1174975 - RNA, 19 nt, Artificial Sequence
  Description of Artificial Sequence: Synthetic oligonucleotide
uucucuugagucgccaugc

SEQ ID NO: 1174976 - RNA, 19 nt, Artificial Sequence
  Description of Artificial Sequence: Synthetic oligonucleotide
auuuuaugcucaucacgcu

SEQ ID NO: 1174977 - RNA, 19 nt, Artificial Sequence
  Description of Artificial Sequence: Synthetic oligonucleotide
gugucuagcguccuuggug

SEQ ID NO: 1174978 - RNA, 19 nt, Artificial Sequence
  Description of Artificial Sequence: Synthetic oligonucleotide
ucuuagaggaggccggaau

SEQ ID NO: 1174979 - RNA, 19 nt, Artificial Sequence
  Description of Artificial Sequence: Synthetic oligonucleotide
aaccauuucuccucagaua

SEQ ID NO: 1174980 - RNA, 19 nt, Artificial Sequence
  Description of Artificial Sequence: Synthetic oligonucleotide
gcgaugacuacccucacag

SEQ ID NO: 1174981 - RNA, 19 nt, Artificial Sequence
  Description of Artificial Sequence: Synthetic oligonucleotide
uaaccagaaaucgcaaccu

SEQ ID NO: 1174982 - RNA, 19 nt, Artificial Sequence
  Description of Artificial Sequence: Synthetic oligonucleotide
uuguguaugugcagccucu

SEQ ID NO: 1174983 - RNA, 19 nt, Artificial Sequence
  Description of Artificial Sequence: Synthetic oligonucleotide
cucuguauggcgaugacua

SEQ ID NO: 1174984 - RNA, 19 nt, Artificial Sequence
  Description of Artificial Sequence: Synthetic oligonucleotide
gaagcuugugaggagcccc

SEQ ID NO: 1174985 - RNA, 19 nt, Artificial Sequence
  Description of Artificial Sequence: Synthetic oligonucleotide
uucgugaaaggacgugaug

SEQ ID NO: 1174986 - RNA, 19 nt, Artificial Sequence
  Description of Artificial Sequence: Synthetic oligonucleotide
augcucaucacgcuggcau

SEQ ID NO: 1174987 - RNA, 19 nt, Artificial Sequence
  Description of Artificial Sequence: Synthetic oligonucleotide
uggaucugaguuucguaga

SEQ ID NO: 1174988 - RNA, 19 nt, Artificial Sequence
  Description of Artificial Sequence: Synthetic oligonucleotide
ucucaccauuugcugaagc

SEQ ID NO: 1174989 - RNA, 19 nt, Artificial Sequence
  Description of Artificial Sequence: Synthetic oligonucleotide
uguaguugcugugugccac

SEQ ID NO: 1174990 - RNA, 19 nt, Artificial Sequence
  Description of Artificial Sequence: Synthetic oligonucleotide
uagaaucugcugguaaccc

SEQ ID NO: 1174991 - RNA, 19 nt, Artificial Sequence
  Description of Artificial Sequence: Synthetic oligonucleotide
uaucaugacuccugcagua

SEQ ID NO: 1174992 - RNA, 19 nt, Artificial Sequence
  Description of Artificial Sequence: Synthetic oligonucleotide
uuuaaccuucugguggcag

SEQ ID NO: 1174993 - RNA, 19 nt, Artificial Sequence
  Description of Artificial Sequence: Synthetic oligonucleotide
cacucgguggcuccuaggg

SEQ ID NO: 1174994 - RNA, 19 nt, Artificial Sequence
  Description of Artificial Sequence: Synthetic oligonucleotide
auucgauguccuuggcggg

SEQ ID NO: 1174995 - RNA, 19 nt, Artificial Sequence
  Description of Artificial Sequence: Synthetic oligonucleotide
acguccaaucuuuaauugu

SEQ ID NO: 1174996 - RNA, 19 nt, Artificial Sequence
  Description of Artificial Sequence: Synthetic oligonucleotide
uaucagugugucccagacc

SEQ ID NO: 1174997 - RNA, 19 nt, Artificial Sequence
  Description of Artificial Sequence: Synthetic oligonucleotide
augguccagauccaaagaa

SEQ ID NO: 1174998 - RNA, 19 nt, Artificial Sequence
  Description of Artificial Sequence: Synthetic oligonucleotide
uauggcgaugacuacccuc

SEQ ID NO: 1174999 - RNA, 19 nt, Artificial Sequence
  Description of Artificial Sequence: Synthetic oligonucleotide
gaugacaccgccuucucgu

SEQ ID NO: 1175000 - RNA, 19 nt, Artificial Sequence
  Description of Artificial Sequence: Synthetic oligonucleotide
ucgccauuucuuaaccaga

SEQ ID NO: 1175001 - RNA, 19 nt, Artificial Sequence
  Description of Artificial Sequence: Synthetic oligonucleotide
uauuagugcuccucuccga

SEQ ID NO: 1175002 - RNA, 19 nt, Artificial Sequence
  Description of Artificial Sequence: Synthetic oligonucleotide
ucugaguuucguagaggac

SEQ ID NO: 1175003 - RNA, 19 nt, Artificial Sequence
  Description of Artificial Sequence: Synthetic oligonucleotide
agaaaucgcaaccucugua

SEQ ID NO: 1175004 - RNA, 19 nt, Artificial Sequence
  Description of Artificial Sequence: Synthetic oligonucleotide
ucugcaugugguguuucag

SEQ ID NO: 1175005 - RNA, 19 nt, Artificial Sequence
  Description of Artificial Sequence: Synthetic oligonucleotide
uccccgaagacuugcuuug

SEQ ID NO: 1175006 - RNA, 19 nt, Artificial Sequence
  Description of Artificial Sequence: Synthetic oligonucleotide
cuguuguguaugugcagcc

SEQ ID NO: 1175007 - RNA, 19 nt, Artificial Sequence
  Description of Artificial Sequence: Synthetic oligonucleotide
aucccaucuugcuuccccg

SEQ ID NO: 1175008 - RNA, 19 nt, Artificial Sequence
  Description of Artificial Sequence: Synthetic oligonucleotide
cuccgauccacuucucgcc

SEQ ID NO: 1175009 - RNA, 19 nt, Artificial Sequence
  Description of Artificial Sequence: Synthetic oligonucleotide
gcugauggcuuuuguaagg

SEQ ID NO: 1175010 - RNA, 19 nt, Artificial Sequence
  Description of Artificial Sequence: Synthetic oligonucleotide
uuaugcucaucacgcuggc

SEQ ID NO: 1175011 - RNA, 19 nt, Artificial Sequence
  Description of Artificial Sequence: Synthetic oligonucleotide
cuuaguucagacuucaguu

SEQ ID NO: 1175012 - RNA, 19 nt, Artificial Sequence
  Description of Artificial Sequence: Synthetic oligonucleotide
ucuccgggacauucgaugu

SEQ ID NO: 1175013 - RNA, 19 nt, Artificial Sequence
  Description of Artificial Sequence: Synthetic oligonucleotide
gaggaaccaucccaucuug

SEQ ID NO: 1175014 - RNA, 19 nt, Artificial Sequence
  Description of Artificial Sequence: Synthetic oligonucleotide
aucuugguauuguacguau

SEQ ID NO: 1175015 - RNA, 19 nt, Artificial Sequence
  Description of Artificial Sequence: Synthetic oligonucleotide
ucuuugcuuggcagggaug

SEQ ID NO: 1175016 - RNA, 19 nt, Artificial Sequence
  Description of Artificial Sequence: Synthetic oligonucleotide
cuguauggcgaugacuacc

SEQ ID NO: 1175017 - RNA, 19 nt, Artificial Sequence
  Description of Artificial Sequence: Synthetic oligonucleotide
cuacacagcgcuccugagc

SEQ ID NO: 1175018 - RNA, 19 nt, Artificial Sequence
  Description of Artificial Sequence: Synthetic oligonucleotide
aaacccggcaagcgccauc

SEQ ID NO: 1175019 - RNA, 19 nt, Artificial Sequence
  Description of Artificial Sequence: Synthetic oligonucleotide
guagaggacucugaggaac

SEQ ID NO: 1175020 - RNA, 19 nt, Artificial Sequence
  Description of Artificial Sequence: Synthetic oligonucleotide
gaaaucgcaaccucuguau

SEQ ID NO: 1175021 - RNA, 19 nt, Artificial Sequence
  Description of Artificial Sequence: Synthetic oligonucleotide
gucuccgggacauucgaug

SEQ ID NO: 1175022 - RNA, 19 nt, Artificial Sequence
  Description of Artificial Sequence: Synthetic oligonucleotide
uuuugguaaaugagagcuu

SEQ ID NO: 1175023 - RNA, 19 nt, Artificial Sequence
  Description of Artificial Sequence: Synthetic oligonucleotide
ugacuacccucacagcagu

SEQ ID NO: 1175024 - RNA, 19 nt, Artificial Sequence
  Description of Artificial Sequence: Synthetic oligonucleotide
uccgggacauucgaugucc

SEQ ID NO: 1175025 - RNA, 19 nt, Artificial Sequence
  Description of Artificial Sequence: Synthetic oligonucleotide
guaagggugucguugucuc

SEQ ID NO: 1175026 - RNA, 19 nt, Artificial Sequence
  Description of Artificial Sequence: Synthetic oligonucleotide
aacuucgugaaaggacgug

SEQ ID NO: 1175027 - RNA, 19 nt, Artificial Sequence
  Description of Artificial Sequence: Synthetic oligonucleotide
ucaugacuccugcaguauc

SEQ ID NO: 1175028 - RNA, 19 nt, Artificial Sequence
  Description of Artificial Sequence: Synthetic oligonucleotide
ggauauauucugucaagga

SEQ ID NO: 1175029 - RNA, 19 nt, Artificial Sequence
  Description of Artificial Sequence: Synthetic oligonucleotide
gucagggaucuuucuaacc

SEQ ID NO: 1175030 - RNA, 19 nt, Artificial Sequence
  Description of Artificial Sequence: Synthetic oligonucleotide
cuugugaggagccccgcug

SEQ ID NO: 1175031 - RNA, 19 nt, Artificial Sequence
  Description of Artificial Sequence: Synthetic oligonucleotide
guuguguaugugcagccuc

SEQ ID NO: 1175032 - RNA, 19 nt, Artificial Sequence
  Description of Artificial Sequence: Synthetic oligonucleotide
uuggcgggagccuuugcca

SEQ ID NO: 1175033 - RNA, 19 nt, Artificial Sequence
  Description of Artificial Sequence: Synthetic oligonucleotide
ucuacacagcgcuccugag

SEQ ID NO: 1175034 - RNA, 19 nt, Artificial Sequence
  Description of Artificial Sequence: Synthetic oligonucleotide
aagcuugugaggagccccg

SEQ ID NO: 1175035 - RNA, 19 nt, Artificial Sequence
  Description of Artificial Sequence: Synthetic oligonucleotide
ggaucugaguuucguagag

SEQ ID NO: 1175036 - RNA, 19 nt, Artificial Sequence
  Description of Artificial Sequence: Synthetic oligonucleotide
uguacguauuugcuuccau

SEQ ID NO: 1175037 - RNA, 19 nt, Artificial Sequence
  Description of Artificial Sequence: Synthetic oligonucleotide
ucuuucuaaccgugaauuu

SEQ ID NO: 1175038 - RNA, 19 nt, Artificial Sequence
  Description of Artificial Sequence: Synthetic oligonucleotide
gaugacguccaaucuuuaa

SEQ ID NO: 1175039 - RNA, 19 nt, Artificial Sequence
  Description of Artificial Sequence: Synthetic oligonucleotide
uucaugaguuggacgugga

SEQ ID NO: 1175040 - RNA, 19 nt, Artificial Sequence
  Description of Artificial Sequence: Synthetic oligonucleotide
accgccuucucguuugaug

SEQ ID NO: 1175041 - RNA, 19 nt, Artificial Sequence
  Description of Artificial Sequence: Synthetic oligonucleotide
aggccggaaugcuuaguuc

SEQ ID NO: 1175042 - RNA, 19 nt, Artificial Sequence
  Description of Artificial Sequence: Synthetic oligonucleotide
aguuucguagaggacucug

SEQ ID NO: 1175043 - RNA, 19 nt, Artificial Sequence
  Description of Artificial Sequence: Synthetic oligonucleotide
aaccucuguauggcgauga

SEQ ID NO: 1175044 - RNA, 19 nt, Artificial Sequence
  Description of Artificial Sequence: Synthetic oligonucleotide
uccgauccacuucucgcca

SEQ ID NO: 1175045 - RNA, 19 nt, Artificial Sequence
  Description of Artificial Sequence: Synthetic oligonucleotide
gaguagaaucugcugguaa

SEQ ID NO: 1175046 - RNA, 19 nt, Artificial Sequence
  Description of Artificial Sequence: Synthetic oligonucleotide
ucucgccauuucuuaacca

SEQ ID NO: 1175047 - RNA, 19 nt, Artificial Sequence
  Description of Artificial Sequence: Synthetic oligonucleotide
ucuguauggcgaugacuac

SEQ ID NO: 1175048 - RNA, 19 nt, Artificial Sequence
  Description of Artificial Sequence: Synthetic oligonucleotide
uauuugcuuccaugcuuug

SEQ ID NO: 1175049 - RNA, 19 nt, Artificial Sequence
  Description of Artificial Sequence: Synthetic oligonucleotide
gaggcugugucuagcgucc

SEQ ID NO: 1175050 - RNA, 19 nt, Artificial Sequence
  Description of Artificial Sequence: Synthetic oligonucleotide
ugugucuagcguccuuggu

SEQ ID NO: 1175051 - RNA, 19 nt, Artificial Sequence
  Description of Artificial Sequence: Synthetic oligonucleotide
aagacuugcuuugccuacu

SEQ ID NO: 1175052 - RNA, 19 nt, Artificial Sequence
  Description of Artificial Sequence: Synthetic oligonucleotide
uucugcaugugguguuuca

SEQ ID NO: 1175053 - RNA, 19 nt, Artificial Sequence
  Description of Artificial Sequence: Synthetic oligonucleotide
caugcuuuguaguugcugu

SEQ ID NO: 1175054 - RNA, 19 nt, Artificial Sequence
  Description of Artificial Sequence: Synthetic oligonucleotide
gaucugaggcugugucuag

SEQ ID NO: 1175055 - RNA, 19 nt, Artificial Sequence
  Description of Artificial Sequence: Synthetic oligonucleotide
auccacuucucgccauuuc

SEQ ID NO: 1175056 - RNA, 19 nt, Artificial Sequence
  Description of Artificial Sequence: Synthetic oligonucleotide
cugugucuagcguccuugg

SEQ ID NO: 1175057 - RNA, 19 nt, Artificial Sequence
  Description of Artificial Sequence: Synthetic oligonucleotide
uuccuaaagcucucugcuc

SEQ ID NO: 1175058 - RNA, 19 nt, Artificial Sequence
  Description of Artificial Sequence: Synthetic oligonucleotide
ucgcaaccucuguauggcg

SEQ ID NO: 1175059 - RNA, 19 nt, Artificial Sequence
  Description of Artificial Sequence: Synthetic oligonucleotide
uguuguguaugugcagccu

SEQ ID NO: 1175060 - RNA, 19 nt, Artificial Sequence
  Description of Artificial Sequence: Synthetic oligonucleotide
uccaaaugauggauauauu

SEQ ID NO: 1175061 - RNA, 19 nt, Artificial Sequence
  Description of Artificial Sequence: Synthetic oligonucleotide
acaggguaagagccauaag

SEQ ID NO: 1175062 - RNA, 19 nt, Artificial Sequence
  Description of Artificial Sequence: Synthetic oligonucleotide
uuccccgaagacuugcuuu

SEQ ID NO: 1175063 - RNA, 19 nt, Artificial Sequence
  Description of Artificial Sequence: Synthetic oligonucleotide
aacccggcaagcgccaucu

SEQ ID NO: 1175064 - RNA, 19 nt, Artificial Sequence
  Description of Artificial Sequence: Synthetic oligonucleotide
cauggagagaguuuccugu

SEQ ID NO: 1175065 - RNA, 19 nt, Artificial Sequence
  Description of Artificial Sequence: Synthetic oligonucleotide
accucuguauggcgaugac

SEQ ID NO: 1175066 - RNA, 19 nt, Artificial Sequence
  Description of Artificial Sequence: Synthetic oligonucleotide
ugaagcuugugaggagccc

SEQ ID NO: 1175067 - RNA, 19 nt, Artificial Sequence
  Description of Artificial Sequence: Synthetic oligonucleotide
gucguugucucucagcagu

SEQ ID NO: 1175068 - RNA, 19 nt, Artificial Sequence
  Description of Artificial Sequence: Synthetic oligonucleotide
ccaaucuuuaauuguccug

SEQ ID NO: 1175069 - RNA, 19 nt, Artificial Sequence
  Description of Artificial Sequence: Synthetic oligonucleotide
ccaaagaacccaagcgggg

SEQ ID NO: 1175070 - RNA, 19 nt, Artificial Sequence
  Description of Artificial Sequence: Synthetic oligonucleotide
guugaucuuuccaccuugc

SEQ ID NO: 1175071 - RNA, 19 nt, Artificial Sequence
  Description of Artificial Sequence: Synthetic oligonucleotide
cucuugagucgccaugcug

SEQ ID NO: 1175072 - RNA, 19 nt, Artificial Sequence
  Description of Artificial Sequence: Synthetic oligonucleotide
gacauucgauguccuuggc

SEQ ID NO: 1175073 - RNA, 19 nt, Artificial Sequence
  Description of Artificial Sequence: Synthetic oligonucleotide
ucuugguauuguacguauu

SEQ ID NO: 1175074 - RNA, 19 nt, Artificial Sequence
  Description of Artificial Sequence: Synthetic oligonucleotide
ucugaggaaccaucccauc

SEQ ID NO: 1175075 - RNA, 19 nt, Artificial Sequence
  Description of Artificial Sequence: Synthetic oligonucleotide
aggggcugguaucaugacu

SEQ ID NO: 1175076 - RNA, 19 nt, Artificial Sequence
  Description of Artificial Sequence: Synthetic oligonucleotide
ucucuugagucgccaugcu

SEQ ID NO: 1175077 - RNA, 19 nt, Artificial Sequence
  Description of Artificial Sequence: Synthetic oligonucleotide
cuagcguccuugguguggc

SEQ ID NO: 1175078 - RNA, 19 nt, Artificial Sequence
  Description of Artificial Sequence: Synthetic oligonucleotide
gcuuaaggaugacaccgcc

SEQ ID NO: 1175079 - RNA, 19 nt, Artificial Sequence
  Description of Artificial Sequence: Synthetic oligonucleotide
cugaguuucguagaggacu

SEQ ID NO: 1175080 - RNA, 19 nt, Artificial Sequence
  Description of Artificial Sequence: Synthetic oligonucleotide
cauguauuagugcuccucu

SEQ ID NO: 1175081 - RNA, 19 nt, Artificial Sequence
  Description of Artificial Sequence: Synthetic oligonucleotide
uucgauguccuuggcggga

SEQ ID NO: 1175082 - RNA, 19 nt, Artificial Sequence
  Description of Artificial Sequence: Synthetic oligonucleotide
cagucagggaucuuucuaa

SEQ ID NO: 1175083 - RNA, 19 nt, Artificial Sequence
  Description of Artificial Sequence: Synthetic oligonucleotide
caucuugcuuccccgaaga

SEQ ID NO: 1175084 - RNA, 19 nt, Artificial Sequence
  Description of Artificial Sequence: Synthetic oligonucleotide
ugagcucuacacagcgcuc

SEQ ID NO: 1175085 - RNA, 19 nt, Artificial Sequence
  Description of Artificial Sequence: Synthetic oligonucleotide
uuagugcuccucuccgauc

SEQ ID NO: 1175086 - RNA, 19 nt, Artificial Sequence
  Description of Artificial Sequence: Synthetic oligonucleotide
ggacguggagcucugcagc

SEQ ID NO: 1175087 - RNA, 19 nt, Artificial Sequence
  Description of Artificial Sequence: Synthetic oligonucleotide
ccccagaugagcaaucaug

SEQ ID NO: 1175088 - RNA, 19 nt, Artificial Sequence
  Description of Artificial Sequence: Synthetic oligonucleotide
cuuuccuuaggaaaaccau

SEQ ID NO: 1175089 - RNA, 19 nt, Artificial Sequence
  Description of Artificial Sequence: Synthetic oligonucleotide
uuguacguauuugcuucca

SEQ ID NO: 1175090 - RNA, 19 nt, Artificial Sequence
  Description of Artificial Sequence: Synthetic oligonucleotide
uuugugucucuuggcgcgc

SEQ ID NO: 1175091 - RNA, 19 nt, Artificial Sequence
  Description of Artificial Sequence: Synthetic oligonucleotide
ggccggaaugcuuaguuca

SEQ ID NO: 1175092 - RNA, 19 nt, Artificial Sequence
  Description of Artificial Sequence: Synthetic oligonucleotide
ccuacugagaaugcagccc

SEQ ID NO: 1175093 - RNA, 19 nt, Artificial Sequence
  Description of Artificial Sequence: Synthetic oligonucleotide
ggaugacaccgccuucucg

SEQ ID NO: 1175094 - RNA, 19 nt, Artificial Sequence
  Description of Artificial Sequence: Synthetic oligonucleotide
aaaggacgugauguaguua

SEQ ID NO: 1175095 - RNA, 19 nt, Artificial Sequence
  Description of Artificial Sequence: Synthetic oligonucleotide
guaucaugacuccugcagu

SEQ ID NO: 1175096 - RNA, 19 nt, Artificial Sequence
  Description of Artificial Sequence: Synthetic oligonucleotide
caugguccagauccaaaga

SEQ ID NO: 1175097 - RNA, 19 nt, Artificial Sequence
  Description of Artificial Sequence: Synthetic oligonucleotide
auauucugucaaggaaugu

SEQ ID NO: 1175098 - RNA, 19 nt, Artificial Sequence
  Description of Artificial Sequence: Synthetic oligonucleotide
gaucuuucuaaccgugaau

SEQ ID NO: 1175099 - RNA, 19 nt, Artificial Sequence
  Description of Artificial Sequence: Synthetic oligonucleotide
ucgauguccuuggcgggag

SEQ ID NO: 1175100 - RNA, 19 nt, Artificial Sequence
  Description of Artificial Sequence: Synthetic oligonucleotide
gaaaggacgugauguaguu

SEQ ID NO: 1175101 - RNA, 19 nt, Artificial Sequence
  Description of Artificial Sequence: Synthetic oligonucleotide
gccuuggaaggaaauaccc

SEQ ID NO: 1175102 - RNA, 19 nt, Artificial Sequence
  Description of Artificial Sequence: Synthetic oligonucleotide
aaccgugaauuuggugaug

SEQ ID NO: 1175103 - RNA, 19 nt, Artificial Sequence
  Description of Artificial Sequence: Synthetic oligonucleotide
ccucagauacaacugucac

SEQ ID NO: 1175104 - RNA, 19 nt, Artificial Sequence
  Description of Artificial Sequence: Synthetic oligonucleotide
cugagcucuacacagcgcu

SEQ ID NO: 1175105 - RNA, 19 nt, Artificial Sequence
  Description of Artificial Sequence: Synthetic oligonucleotide
guauuguacguauuugcuu

SEQ ID NO: 1175106 - RNA, 19 nt, Artificial Sequence
  Description of Artificial Sequence: Synthetic oligonucleotide
gcugguaucaugacuccug

SEQ ID NO: 1175107 - RNA, 19 nt, Artificial Sequence
  Description of Artificial Sequence: Synthetic oligonucleotide
agaccauaccgugagcuuu

SEQ ID NO: 1175108 - RNA, 19 nt, Artificial Sequence
  Description of Artificial Sequence: Synthetic oligonucleotide
ugaugacguccaaucuuua

SEQ ID NO: 1175109 - RNA, 19 nt, Artificial Sequence
  Description of Artificial Sequence: Synthetic oligonucleotide
ugcucgauuuuaugcucau

SEQ ID NO: 1175110 - RNA, 19 nt, Artificial Sequence
  Description of Artificial Sequence: Synthetic oligonucleotide
ucccaucuugcuuccccga

SEQ ID NO: 1175111 - RNA, 19 nt, Artificial Sequence
  Description of Artificial Sequence: Synthetic oligonucleotide
agcuccgcuuucucuugag

SEQ ID NO: 1175112 - RNA, 19 nt, Artificial Sequence
  Description of Artificial Sequence: Synthetic oligonucleotide
cauaccgugagcuuuccuu

SEQ ID NO: 1175113 - RNA, 19 nt, Artificial Sequence
  Description of Artificial Sequence: Synthetic oligonucleotide
ggaucuuucuaaccgugaa

SEQ ID NO: 1175114 - RNA, 19 nt, Artificial Sequence
  Description of Artificial Sequence: Synthetic oligonucleotide
ggggaaacccggcaagcgc

SEQ ID NO: 1175115 - RNA, 19 nt, Artificial Sequence
  Description of Artificial Sequence: Synthetic oligonucleotide
acgcuggcauuguaauucu

SEQ ID NO: 1175116 - RNA, 19 nt, Artificial Sequence
  Description of Artificial Sequence: Synthetic oligonucleotide
gguaagagccauaagacuu

SEQ ID NO: 1175117 - RNA, 19 nt, Artificial Sequence
  Description of Artificial Sequence: Synthetic oligonucleotide
uaagagccauaagacuuua

SEQ ID NO: 1175118 - RNA, 19 nt, Artificial Sequence
  Description of Artificial Sequence: Synthetic oligonucleotide
cugcucgauuuuaugcuca

SEQ ID NO: 1175119 - RNA, 19 nt, Artificial Sequence
  Description of Artificial Sequence: Synthetic oligonucleotide
aguugcugugugccacucu

SEQ ID NO: 1175120 - RNA, 19 nt, Artificial Sequence
  Description of Artificial Sequence: Synthetic oligonucleotide
ucguuugaugacguccaau

SEQ ID NO: 1175121 - RNA, 19 nt, Artificial Sequence
  Description of Artificial Sequence: Synthetic oligonucleotide
cuuaucugccuuggaagga

SEQ ID NO: 1175122 - RNA, 19 nt, Artificial Sequence
  Description of Artificial Sequence: Synthetic oligonucleotide
agcuuccgcaauaaggcau

SEQ ID NO: 1175123 - RNA, 19 nt, Artificial Sequence
  Description of Artificial Sequence: Synthetic oligonucleotide
uccugagccugagacucca

SEQ ID NO: 1175124 - RNA, 19 nt, Artificial Sequence
  Description of Artificial Sequence: Synthetic oligonucleotide
uccaugcuuuguaguugcu

SEQ ID NO: 1175125 - RNA, 19 nt, Artificial Sequence
  Description of Artificial Sequence: Synthetic oligonucleotide
gaagcagucagggaucuuu

SEQ ID NO: 1175126 - RNA, 19 nt, Artificial Sequence
  Description of Artificial Sequence: Synthetic oligonucleotide
ccgucauuguccuugaaaa

SEQ ID NO: 1175127 - RNA, 19 nt, Artificial Sequence
  Description of Artificial Sequence: Synthetic oligonucleotide
ugcugaauuugugucucuu

SEQ ID NO: 1175128 - RNA, 19 nt, Artificial Sequence
  Description of Artificial Sequence: Synthetic oligonucleotide
cuuaaggaugacaccgccu

SEQ ID NO: 1175129 - RNA, 19 nt, Artificial Sequence
  Description of Artificial Sequence: Synthetic oligonucleotide
ugucuccgggacauucgau

SEQ ID NO: 1175130 - RNA, 19 nt, Artificial Sequence
  Description of Artificial Sequence: Synthetic oligonucleotide
agcucuacacagcgcuccu

SEQ ID NO: 1175131 - RNA, 19 nt, Artificial Sequence
  Description of Artificial Sequence: Synthetic oligonucleotide
ggaauccaccaaucagcag

SEQ ID NO: 1175132 - RNA, 19 nt, Artificial Sequence
  Description of Artificial Sequence: Synthetic oligonucleotide
gccuucucguuugaugacg

SEQ ID NO: 1175133 - RNA, 19 nt, Artificial Sequence
  Description of Artificial Sequence: Synthetic oligonucleotide
aggaggccggaaugcuuag

SEQ ID NO: 1175134 - RNA, 19 nt, Artificial Sequence
  Description of Artificial Sequence: Synthetic oligonucleotide
agugcggaacuucgugaaa

SEQ ID NO: 1175135 - RNA, 19 nt, Artificial Sequence
  Description of Artificial Sequence: Synthetic oligonucleotide
gaccauaccgugagcuuuc

SEQ ID NO: 1175136 - RNA, 19 nt, Artificial Sequence
  Description of Artificial Sequence: Synthetic oligonucleotide
ucguugucucucagcaguu

SEQ ID NO: 1175137 - RNA, 19 nt, Artificial Sequence
  Description of Artificial Sequence: Synthetic oligonucleotide
agccccgcugcacacagua

SEQ ID NO: 1175138 - RNA, 19 nt, Artificial Sequence
  Description of Artificial Sequence: Synthetic oligonucleotide
gguauuguacguauuugcu

SEQ ID NO: 1175139 - RNA, 19 nt, Artificial Sequence
  Description of Artificial Sequence: Synthetic oligonucleotide
ccggcaagcgccaucuccc

SEQ ID NO: 1175140 - RNA, 19 nt, Artificial Sequence
  Description of Artificial Sequence: Synthetic oligonucleotide
gcauguugcggcucagcug

SEQ ID NO: 1175141 - RNA, 19 nt, Artificial Sequence
  Description of Artificial Sequence: Synthetic oligonucleotide
ugcucaucacgcuggcauu

SEQ ID NO: 1175142 - RNA, 19 nt, Artificial Sequence
  Description of Artificial Sequence: Synthetic oligonucleotide
cugaggaaccaucccaucu

SEQ ID NO: 1175143 - RNA, 19 nt, Artificial Sequence
  Description of Artificial Sequence: Synthetic oligonucleotide
gcuuuccuuaggaaaacca

SEQ ID NO: 1175144 - RNA, 19 nt, Artificial Sequence
  Description of Artificial Sequence: Synthetic oligonucleotide
cuucucguuugaugacguc

SEQ ID NO: 1175145 - RNA, 19 nt, Artificial Sequence
  Description of Artificial Sequence: Synthetic oligonucleotide
agggugucguugucucuca

SEQ ID NO: 1175146 - RNA, 19 nt, Artificial Sequence
  Description of Artificial Sequence: Synthetic oligonucleotide
uugcuuccccgaagacuug

SEQ ID NO: 1175147 - RNA, 19 nt, Artificial Sequence
  Description of Artificial Sequence: Synthetic oligonucleotide
gacaugguccagauccaaa

SEQ ID NO: 1175148 - RNA, 19 nt, Artificial Sequence
  Description of Artificial Sequence: Synthetic oligonucleotide
cacagcgcuccugagccug

SEQ ID NO: 1175149 - RNA, 19 nt, Artificial Sequence
  Description of Artificial Sequence: Synthetic oligonucleotide
gcugugucuagcguccuug

SEQ ID NO: 1175150 - RNA, 19 nt, Artificial Sequence
  Description of Artificial Sequence: Synthetic oligonucleotide
uucuuagaggaggccggaa

SEQ ID NO: 1175151 - RNA, 19 nt, Artificial Sequence
  Description of Artificial Sequence: Synthetic oligonucleotide
ugacaccgccuucucguuu

SEQ ID NO: 1175152 - RNA, 19 nt, Artificial Sequence
  Description of Artificial Sequence: Synthetic oligonucleotide
uggcgggagccuuugccau

SEQ ID NO: 1175153 - RNA, 19 nt, Artificial Sequence
  Description of Artificial Sequence: Synthetic oligonucleotide
cagugcggaacuucgugaa

SEQ ID NO: 1175154 - RNA, 19 nt, Artificial Sequence
  Description of Artificial Sequence: Synthetic oligonucleotide
cggaaugcuuaguucagac

SEQ ID NO: 1175155 - RNA, 19 nt, Artificial Sequence
  Description of Artificial Sequence: Synthetic oligonucleotide
aagagccauaagacuuuau

SEQ ID NO: 1175156 - RNA, 19 nt, Artificial Sequence
  Description of Artificial Sequence: Synthetic oligonucleotide
gcagugcggaacuucguga

SEQ ID NO: 1175157 - RNA, 19 nt, Artificial Sequence
  Description of Artificial Sequence: Synthetic oligonucleotide
gucucuuggcgcgcacagg

SEQ ID NO: 1175158 - RNA, 19 nt, Artificial Sequence
  Description of Artificial Sequence: Synthetic oligonucleotide
gcuuccgcaauaaggcaug

SEQ ID NO: 1175159 - RNA, 19 nt, Artificial Sequence
  Description of Artificial Sequence: Synthetic oligonucleotide
gaggccggaaugcuuaguu

SEQ ID NO: 1175160 - RNA, 19 nt, Artificial Sequence
  Description of Artificial Sequence: Synthetic oligonucleotide
uguguaugugcagccucuu

SEQ ID NO: 1175161 - RNA, 19 nt, Artificial Sequence
  Description of Artificial Sequence: Synthetic oligonucleotide
cuucugguggcaggauuuc

SEQ ID NO: 1175162 - RNA, 19 nt, Artificial Sequence
  Description of Artificial Sequence: Synthetic oligonucleotide
ggaucuugagaagcaguca

SEQ ID NO: 1175163 - RNA, 19 nt, Artificial Sequence
  Description of Artificial Sequence: Synthetic oligonucleotide
ugaguuggacguggagcuc

SEQ ID NO: 1175164 - RNA, 19 nt, Artificial Sequence
  Description of Artificial Sequence: Synthetic oligonucleotide
cugucuccgggacauucga

SEQ ID NO: 1175165 - RNA, 19 nt, Artificial Sequence
  Description of Artificial Sequence: Synthetic oligonucleotide
uugugucucuuggcgcgca

SEQ ID NO: 1175166 - RNA, 19 nt, Artificial Sequence
  Description of Artificial Sequence: Synthetic oligonucleotide
uggcgaugacuacccucac

SEQ ID NO: 1175167 - RNA, 19 nt, Artificial Sequence
  Description of Artificial Sequence: Synthetic oligonucleotide
ggaaugcuuaguucagacu

SEQ ID NO: 1175168 - RNA, 19 nt, Artificial Sequence
  Description of Artificial Sequence: Synthetic oligonucleotide
cugcauguugcggcucagc

SEQ ID NO: 1175169 - RNA, 19 nt, Artificial Sequence
  Description of Artificial Sequence: Synthetic oligonucleotide
cuccgggacauucgauguc

SEQ ID NO: 1175170 - RNA, 19 nt, Artificial Sequence
  Description of Artificial Sequence: Synthetic oligonucleotide
caucuugguauuguacgua

SEQ ID NO: 1175171 - RNA, 19 nt, Artificial Sequence
  Description of Artificial Sequence: Synthetic oligonucleotide
uuggcgcgcacaggcuucc

SEQ ID NO: 1175172 - RNA, 19 nt, Artificial Sequence
  Description of Artificial Sequence: Synthetic oligonucleotide
ggaucugaggcugugucua

SEQ ID NO: 1175173 - RNA, 19 nt, Artificial Sequence
  Description of Artificial Sequence: Synthetic oligonucleotide
augacaccgccuucucguu

SEQ ID NO: 1175174 - RNA, 19 nt, Artificial Sequence
  Description of Artificial Sequence: Synthetic oligonucleotide
gcuccuaggggcugguauc

SEQ ID NO: 1175175 - RNA, 19 nt, Artificial Sequence
  Description of Artificial Sequence: Synthetic oligonucleotide
ccgccuucucguuugauga

SEQ ID NO: 1175176 - RNA, 19 nt, Artificial Sequence
  Description of Artificial Sequence: Synthetic oligonucleotide
gccauaagacuuuauucau

SEQ ID NO: 1175177 - RNA, 19 nt, Artificial Sequence
  Description of Artificial Sequence: Synthetic oligonucleotide
gcuuuuguaagggugucgu

SEQ ID NO: 1175178 - RNA, 19 nt, Artificial Sequence
  Description of Artificial Sequence: Synthetic oligonucleotide
cccggcaagcgccaucucc

SEQ ID NO: 1175179 - RNA, 19 nt, Artificial Sequence
  Description of Artificial Sequence: Synthetic oligonucleotide
ccgcaauaaggcaugcuga

SEQ ID NO: 1175180 - RNA, 19 nt, Artificial Sequence
  Description of Artificial Sequence: Synthetic oligonucleotide
gaacuucgugaaaggacgu

SEQ ID NO: 1175181 - RNA, 19 nt, Artificial Sequence
  Description of Artificial Sequence: Synthetic oligonucleotide
cccgaagacuugcuuugcc

SEQ ID NO: 1175182 - RNA, 19 nt, Artificial Sequence
  Description of Artificial Sequence: Synthetic oligonucleotide
ucgccaugcugauggcuuu

SEQ ID NO: 1175183 - RNA, 19 nt, Artificial Sequence
  Description of Artificial Sequence: Synthetic oligonucleotide
gucaaggaauguucuggau

SEQ ID NO: 1175184 - RNA, 19 nt, Artificial Sequence
  Description of Artificial Sequence: Synthetic oligonucleotide
guaagagccauaagacuuu

SEQ ID NO: 1175185 - RNA, 19 nt, Artificial Sequence
  Description of Artificial Sequence: Synthetic oligonucleotide
gggcugguaucaugacucc

SEQ ID NO: 1175186 - RNA, 19 nt, Artificial Sequence
  Description of Artificial Sequence: Synthetic oligonucleotide
aguuggacguggagcucug

SEQ ID NO: 1175187 - RNA, 19 nt, Artificial Sequence
  Description of Artificial Sequence: Synthetic oligonucleotide
ggcgaugacuacccucaca

SEQ ID NO: 1175188 - RNA, 19 nt, Artificial Sequence
  Description of Artificial Sequence: Synthetic oligonucleotide
gcacucgguggcuccuagg

SEQ ID NO: 1175189 - RNA, 19 nt, Artificial Sequence
  Description of Artificial Sequence: Synthetic oligonucleotide
gggcacgugccuucucggc

SEQ ID NO: 1175190 - RNA, 19 nt, Artificial Sequence
  Description of Artificial Sequence: Synthetic oligonucleotide
uagcguccuugguguggcc

SEQ ID NO: 1175191 - RNA, 19 nt, Artificial Sequence
  Description of Artificial Sequence: Synthetic oligonucleotide
gggaucuuucuaaccguga

SEQ ID NO: 1175192 - RNA, 19 nt, Artificial Sequence
  Description of Artificial Sequence: Synthetic oligonucleotide
caggauuucugaguagaau

SEQ ID NO: 1175193 - RNA, 19 nt, Artificial Sequence
  Description of Artificial Sequence: Synthetic oligonucleotide
acaccgccuucucguuuga

SEQ ID NO: 1175194 - RNA, 19 nt, Artificial Sequence
  Description of Artificial Sequence: Synthetic oligonucleotide
cucucagauagugcaggua

SEQ ID NO: 1175195 - RNA, 19 nt, Artificial Sequence
  Description of Artificial Sequence: Synthetic oligonucleotide
cuugagucgccaugcugau

SEQ ID NO: 1175196 - RNA, 19 nt, Artificial Sequence
  Description of Artificial Sequence: Synthetic oligonucleotide
uggcagggaugcucugguu

SEQ ID NO: 1175197 - RNA, 19 nt, Artificial Sequence
  Description of Artificial Sequence: Synthetic oligonucleotide
cuugcccagugguacugcu

SEQ ID NO: 1175198 - RNA, 19 nt, Artificial Sequence
  Description of Artificial Sequence: Synthetic oligonucleotide
gcggaacuucgugaaagga

SEQ ID NO: 1175199 - RNA, 19 nt, Artificial Sequence
  Description of Artificial Sequence: Synthetic oligonucleotide
acccggcaagcgccaucuc

SEQ ID NO: 1175200 - RNA, 19 nt, Artificial Sequence
  Description of Artificial Sequence: Synthetic oligonucleotide
caacugucacaggguaaga

SEQ ID NO: 1175201 - RNA, 19 nt, Artificial Sequence
  Description of Artificial Sequence: Synthetic oligonucleotide
ggagccuuugccauguauu

SEQ ID NO: 1175202 - RNA, 19 nt, Artificial Sequence
  Description of Artificial Sequence: Synthetic oligonucleotide
cuuuuguaagggugucguu

SEQ ID NO: 1175203 - RNA, 19 nt, Artificial Sequence
  Description of Artificial Sequence: Synthetic oligonucleotide
gugucccagaccauaccgu

SEQ ID NO: 1175204 - RNA, 19 nt, Artificial Sequence
  Description of Artificial Sequence: Synthetic oligonucleotide
gucgccaugcugauggcuu

SEQ ID NO: 1175205 - RNA, 19 nt, Artificial Sequence
  Description of Artificial Sequence: Synthetic oligonucleotide
cgaagacuugcuuugccua

SEQ ID NO: 1175206 - RNA, 19 nt, Artificial Sequence
  Description of Artificial Sequence: Synthetic oligonucleotide
cagauagugcagguacagu

SEQ ID NO: 1175207 - RNA, 19 nt, Artificial Sequence
  Description of Artificial Sequence: Synthetic oligonucleotide
gcaggauuucugaguagaa

SEQ ID NO: 1175208 - RNA, 19 nt, Artificial Sequence
  Description of Artificial Sequence: Synthetic oligonucleotide
guauggcgaugacuacccu

SEQ ID NO: 1175209 - RNA, 19 nt, Artificial Sequence
  Description of Artificial Sequence: Synthetic oligonucleotide
cagccgggacacaguccug

SEQ ID NO: 1175210 - RNA, 19 nt, Artificial Sequence
  Description of Artificial Sequence: Synthetic oligonucleotide
acgugccuucucggcuuuc

SEQ ID NO: 1175211 - RNA, 19 nt, Artificial Sequence
  Description of Artificial Sequence: Synthetic oligonucleotide
cgcaaccucuguauggcga

SEQ ID NO: 1175212 - RNA, 19 nt, Artificial Sequence
  Description of Artificial Sequence: Synthetic oligonucleotide
ggacgugauguaguuauuu

SEQ ID NO: 1175213 - RNA, 19 nt, Artificial Sequence
  Description of Artificial Sequence: Synthetic oligonucleotide
aggacgugauguaguuauu

SEQ ID NO: 1175214 - RNA, 19 nt, Artificial Sequence
  Description of Artificial Sequence: Synthetic oligonucleotide
gaguuucguagaggacucu

SEQ ID NO: 1175215 - RNA, 19 nt, Artificial Sequence
  Description of Artificial Sequence: Synthetic oligonucleotide
cagaccauaccgugagcuu

SEQ ID NO: 1175216 - RNA, 19 nt, Artificial Sequence
  Description of Artificial Sequence: Synthetic oligonucleotide
ccgaagacuugcuuugccu

SEQ ID NO: 1175217 - RNA, 19 nt, Artificial Sequence
  Description of Artificial Sequence: Synthetic oligonucleotide
ccauaagacuuuauucauu

SEQ ID NO: 1175218 - RNA, 19 nt, Artificial Sequence
  Description of Artificial Sequence: Synthetic oligonucleotide
cgugaaaggacgugaugua

SEQ ID NO: 1175219 - RNA, 19 nt, Artificial Sequence
  Description of Artificial Sequence: Synthetic oligonucleotide
gcucucagauagugcaggu

SEQ ID NO: 1175220 - RNA, 19 nt, Artificial Sequence
  Description of Artificial Sequence: Synthetic oligonucleotide
ccuucucguuugaugacgu

SEQ ID NO: 1175221 - RNA, 19 nt, Artificial Sequence
  Description of Artificial Sequence: Synthetic oligonucleotide
ccccgaagacuugcuuugc

SEQ ID NO: 1175222 - RNA, 19 nt, Artificial Sequence
  Description of Artificial Sequence: Synthetic oligonucleotide
gggagccuuugccauguau

SEQ ID NO: 1175223 - RNA, 19 nt, Artificial Sequence
  Description of Artificial Sequence: Synthetic oligonucleotide
cggcaagcgccaucucccc

SEQ ID NO: 1175224 - RNA, 19 nt, Artificial Sequence
  Description of Artificial Sequence: Synthetic oligonucleotide
ccugcauguugcggcucag

SEQ ID NO: 1175225 - RNA, 19 nt, Artificial Sequence
  Description of Artificial Sequence: Synthetic oligonucleotide
gaaacccggcaagcgccau

SEQ ID NO: 1175226 - RNA, 19 nt, Artificial Sequence
  Description of Artificial Sequence: Synthetic oligonucleotide
gagcacucgguggcuccua

SEQ ID NO: 1175227 - RNA, 19 nt, Artificial Sequence
  Description of Artificial Sequence: Synthetic oligonucleotide
ggcugguaucaugacuccu

SEQ ID NO: 1175228 - RNA, 19 nt, Artificial Sequence
  Description of Artificial Sequence: Synthetic oligonucleotide
ccggaaugcuuaguucaga

SEQ ID NO: 1175229 - RNA, 19 nt, Artificial Sequence
  Description of Artificial Sequence: Synthetic oligonucleotide
uggcuccuaggggcuggua

SEQ ID NO: 1175230 - RNA, 19 nt, Artificial Sequence
  Description of Artificial Sequence: Synthetic oligonucleotide
cagggaugcucugguuucu

SEQ ID NO: 1175231 - RNA, 19 nt, Artificial Sequence
  Description of Artificial Sequence: Synthetic oligonucleotide
ccgugaauuuggugaugaa

SEQ ID NO: 1175232 - RNA, 19 nt, Artificial Sequence
  Description of Artificial Sequence: Synthetic oligonucleotide
gccauguauuagugcuccu

SEQ ID NO: 1175233 - RNA, 19 nt, Artificial Sequence
  Description of Artificial Sequence: Synthetic oligonucleotide
ggaggccggaaugcuuagu

SEQ ID NO: 1175234 - RNA, 19 nt, Artificial Sequence
  Description of Artificial Sequence: Synthetic oligonucleotide
ggcugugucuagcguccuu

SEQ ID NO: 1175235 - RNA, 19 nt, Artificial Sequence
  Description of Artificial Sequence: Synthetic oligonucleotide
cacgugccuucucggcuuu

SEQ ID NO: 1175236 - RNA, 19 nt, Artificial Sequence
  Description of Artificial Sequence: Synthetic oligonucleotide
gcgcacaggcuuccugcau

SEQ ID NO: 1175237 - RNA, 19 nt, Artificial Sequence
  Description of Artificial Sequence: Synthetic oligonucleotide
cgcuggcauuguaauucua

SEQ ID NO: 1175238 - RNA, 19 nt, Artificial Sequence
  Description of Artificial Sequence: Synthetic oligonucleotide
caccgccuucucguuugau

SEQ ID NO: 1175239 - RNA, 19 nt, Artificial Sequence
  Description of Artificial Sequence: Synthetic oligonucleotide
aauaauguucuuuauuucc

SEQ ID NO: 1175240 - RNA, 19 nt, Artificial Sequence
  Description of Artificial Sequence: Synthetic oligonucleotide
aagauucugaauuagagcu

SEQ ID NO: 1175241 - RNA, 19 nt, Artificial Sequence
  Description of Artificial Sequence: Synthetic oligonucleotide
aaacuuaucguguugacug

SEQ ID NO: 1175242 - RNA, 19 nt, Artificial Sequence
  Description of Artificial Sequence: Synthetic oligonucleotide
gaguaauucaguuagauca

SEQ ID NO: 1175243 - RNA, 19 nt, Artificial Sequence
  Description of Artificial Sequence: Synthetic oligonucleotide
ucgaaugucauugagacgg

SEQ ID NO: 1175244 - RNA, 19 nt, Artificial Sequence
  Description of Artificial Sequence: Synthetic oligonucleotide
gaaauuucaggauaucacg

SEQ ID NO: 1175245 - RNA, 19 nt, Artificial Sequence
  Description of Artificial Sequence: Synthetic oligonucleotide
  modified_base (9)..(9): a, c, u, g, unknown or other
  modified_base (18)..(18): a, c, u, g, unknown or other
aauucuugnugucacgcnc

SEQ ID NO: 1175246 - RNA, 19 nt, Artificial Sequence
  Description of Artificial Sequence: Synthetic oligonucleotide
ugauauaauaaucauuucu

SEQ ID NO: 1175247 - RNA, 19 nt, Artificial Sequence
  Description of Artificial Sequence: Synthetic oligonucleotide
uuaaccuccaaaauaaugu

SEQ ID NO: 1175248 - RNA, 19 nt, Artificial Sequence
  Description of Artificial Sequence: Synthetic oligonucleotide
auaauaaguaacuuucuag

SEQ ID NO: 1175249 - RNA, 19 nt, Artificial Sequence
  Description of Artificial Sequence: Synthetic oligonucleotide
auuuuauaauuacuguggc

SEQ ID NO: 1175250 - RNA, 19 nt, Artificial Sequence
  Description of Artificial Sequence: Synthetic oligonucleotide
aauaucaagcucaucauuc

SEQ ID NO: 1175251 - RNA, 19 nt, Artificial Sequence
  Description of Artificial Sequence: Synthetic oligonucleotide
uuuauaauuacuguggccu

SEQ ID NO: 1175252 - RNA, 19 nt, Artificial Sequence
  Description of Artificial Sequence: Synthetic oligonucleotide
ucugaucuuacaaaggaag

SEQ ID NO: 1175253 - RNA, 19 nt, Artificial Sequence
  Description of Artificial Sequence: Synthetic oligonucleotide
uauuaggugagugagauca

SEQ ID NO: 1175254 - RNA, 19 nt, Artificial Sequence
  Description of Artificial Sequence: Synthetic oligonucleotide
ugcagaauggauaauaagu

SEQ ID NO: 1175255 - RNA, 19 nt, Artificial Sequence
  Description of Artificial Sequence: Synthetic oligonucleotide
ggaaguuugaucuugaagc

SEQ ID NO: 1175256 - RNA, 19 nt, Artificial Sequence
  Description of Artificial Sequence: Synthetic oligonucleotide
uuuuaguccagaacggagg

SEQ ID NO: 1175257 - RNA, 19 nt, Artificial Sequence
  Description of Artificial Sequence: Synthetic oligonucleotide
ucuaaaagucuauuaaagc

SEQ ID NO: 1175258 - RNA, 19 nt, Artificial Sequence
  Description of Artificial Sequence: Synthetic oligonucleotide
uggauaauaaguaacuuuc

SEQ ID NO: 1175259 - RNA, 19 nt, Artificial Sequence
  Description of Artificial Sequence: Synthetic oligonucleotide
aaugaauucgaaaaucaag

SEQ ID NO: 1175260 - RNA, 19 nt, Artificial Sequence
  Description of Artificial Sequence: Synthetic oligonucleotide
aucuauauuccuuugaccu

SEQ ID NO: 1175261 - RNA, 19 nt, Artificial Sequence
  Description of Artificial Sequence: Synthetic oligonucleotide
ucauuaaccuccaaaauaa

SEQ ID NO: 1175262 - RNA, 19 nt, Artificial Sequence
  Description of Artificial Sequence: Synthetic oligonucleotide
aacacuuucagcugaauau

SEQ ID NO: 1175263 - RNA, 19 nt, Artificial Sequence
  Description of Artificial Sequence: Synthetic oligonucleotide
uuucauauugcucucuggc

SEQ ID NO: 1175264 - RNA, 19 nt, Artificial Sequence
  Description of Artificial Sequence: Synthetic oligonucleotide
agaacggaggaauucauuc

SEQ ID NO: 1175265 - RNA, 19 nt, Artificial Sequence
  Description of Artificial Sequence: Synthetic oligonucleotide
acaagcaucuauuagguga

SEQ ID NO: 1175266 - RNA, 19 nt, Artificial Sequence
  Description of Artificial Sequence: Synthetic oligonucleotide
auucauaucguccauuuca

SEQ ID NO: 1175267 - RNA, 19 nt, Artificial Sequence
  Description of Artificial Sequence: Synthetic oligonucleotide
aguucauguaguuuccuac

SEQ ID NO: 1175268 - RNA, 19 nt, Artificial Sequence
  Description of Artificial Sequence: Synthetic oligonucleotide
guauauucugcucagggag

SEQ ID NO: 1175269 - RNA, 19 nt, Artificial Sequence
  Description of Artificial Sequence: Synthetic oligonucleotide
agauagacagguucugugc

SEQ ID NO: 1175270 - RNA, 19 nt, Artificial Sequence
  Description of Artificial Sequence: Synthetic oligonucleotide
ucuuuugcgaguuuugccc

SEQ ID NO: 1175271 - RNA, 19 nt, Artificial Sequence
  Description of Artificial Sequence: Synthetic oligonucleotide
uagagcuucacuuagcaac

SEQ ID NO: 1175272 - RNA, 19 nt, Artificial Sequence
  Description of Artificial Sequence: Synthetic oligonucleotide
uuugcuugcacuuuccaca

SEQ ID NO: 1175273 - RNA, 19 nt, Artificial Sequence
  Description of Artificial Sequence: Synthetic oligonucleotide
aaugucuaaucucugccug

SEQ ID NO: 1175274 - RNA, 19 nt, Artificial Sequence
  Description of Artificial Sequence: Synthetic oligonucleotide
  modified_base (2)..(2): a, c, u, g, unknown or other
  modified_base (11)..(11): a, c, u, g, unknown or other
gnugucacgcnccagauga

SEQ ID NO: 1175275 - RNA, 19 nt, Artificial Sequence
  Description of Artificial Sequence: Synthetic oligonucleotide
  modified_base (17)..(17): a, c, u, g, unknown or other
uuuugggaaauucuugnug

SEQ ID NO: 1175276 - RNA, 19 nt, Artificial Sequence
  Description of Artificial Sequence: Synthetic oligonucleotide
agaauggauaauaaguaac

SEQ ID NO: 1175277 - RNA, 19 nt, Artificial Sequence
  Description of Artificial Sequence: Synthetic oligonucleotide
guuauagagaagaugguag

SEQ ID NO: 1175278 - RNA, 19 nt, Artificial Sequence
  Description of Artificial Sequence: Synthetic oligonucleotide
uuuuauaauuacuguggcc

SEQ ID NO: 1175279 - RNA, 19 nt, Artificial Sequence
  Description of Artificial Sequence: Synthetic oligonucleotide
aagauagacagguucugug

SEQ ID NO: 1175280 - RNA, 19 nt, Artificial Sequence
  Description of Artificial Sequence: Synthetic oligonucleotide
  modified_base (10)..(10): a, c, u, g, unknown or other
  modified_base (19)..(19): a, c, u, g, unknown or other
aaauucuugnugucacgcn

SEQ ID NO: 1175281 - RNA, 19 nt, Artificial Sequence
  Description of Artificial Sequence: Synthetic oligonucleotide
ucugaugaguagaaagugc

SEQ ID NO: 1175282 - RNA, 19 nt, Artificial Sequence
  Description of Artificial Sequence: Synthetic oligonucleotide
uguuuugggauccaaaauu

SEQ ID NO: 1175283 - RNA, 19 nt, Artificial Sequence
  Description of Artificial Sequence: Synthetic oligonucleotide
gugggaguaauucaguuag

SEQ ID NO: 1175284 - RNA, 19 nt, Artificial Sequence
  Description of Artificial Sequence: Synthetic oligonucleotide
gaauuagagcuucacuuag

SEQ ID NO: 1175285 - RNA, 19 nt, Artificial Sequence
  Description of Artificial Sequence: Synthetic oligonucleotide
ugagccugaguucauguag

SEQ ID NO: 1175286 - RNA, 19 nt, Artificial Sequence
  Description of Artificial Sequence: Synthetic oligonucleotide
agaagauuauccaucacuc

SEQ ID NO: 1175287 - RNA, 19 nt, Artificial Sequence
  Description of Artificial Sequence: Synthetic oligonucleotide
aaacuguucuggcucacag

SEQ ID NO: 1175288 - RNA, 19 nt, Artificial Sequence
  Description of Artificial Sequence: Synthetic oligonucleotide
ucucuuaugguuuucuuuc

SEQ ID NO: 1175289 - RNA, 19 nt, Artificial Sequence
  Description of Artificial Sequence: Synthetic oligonucleotide
auaucaaugagcugcuucu

SEQ ID NO: 1175290 - RNA, 19 nt, Artificial Sequence
  Description of Artificial Sequence: Synthetic oligonucleotide
gaugaguagaaagugcugc

SEQ ID NO: 1175291 - RNA, 19 nt, Artificial Sequence
  Description of Artificial Sequence: Synthetic oligonucleotide
aauuagagcuucacuuagc

SEQ ID NO: 1175292 - RNA, 19 nt, Artificial Sequence
  Description of Artificial Sequence: Synthetic oligonucleotide
auauuguugugcauggucg

SEQ ID NO: 1175293 - RNA, 19 nt, Artificial Sequence
  Description of Artificial Sequence: Synthetic oligonucleotide
  modified_base (11)..(11): a, c, u, g, unknown or other
gaaauucuugnugucacgc

SEQ ID NO: 1175294 - RNA, 19 nt, Artificial Sequence
  Description of Artificial Sequence: Synthetic oligonucleotide
uucuuugaguauauucugc

SEQ ID NO: 1175295 - RNA, 19 nt, Artificial Sequence
  Description of Artificial Sequence: Synthetic oligonucleotide
uggccugauauaauaauca

SEQ ID NO: 1175296 - RNA, 19 nt, Artificial Sequence
  Description of Artificial Sequence: Synthetic oligonucleotide
uuauagagaagaugguaga

SEQ ID NO: 1175297 - RNA, 19 nt, Artificial Sequence
  Description of Artificial Sequence: Synthetic oligonucleotide
caugcgauaagaucccagg

SEQ ID NO: 1175298 - RNA, 19 nt, Artificial Sequence
  Description of Artificial Sequence: Synthetic oligonucleotide
uucaccauauuguugugca

SEQ ID NO: 1175299 - RNA, 19 nt, Artificial Sequence
  Description of Artificial Sequence: Synthetic oligonucleotide
uucagcucgaaugucauug

SEQ ID NO: 1175300 - RNA, 19 nt, Artificial Sequence
  Description of Artificial Sequence: Synthetic oligonucleotide
uucuuuauuuccucguaug

SEQ ID NO: 1175301 - RNA, 19 nt, Artificial Sequence
  Description of Artificial Sequence: Synthetic oligonucleotide
aacggaggaauucauuccu

SEQ ID NO: 1175302 - RNA, 19 nt, Artificial Sequence
  Description of Artificial Sequence: Synthetic oligonucleotide
cuaucugggaaacacacuc

SEQ ID NO: 1175303 - RNA, 19 nt, Artificial Sequence
  Description of Artificial Sequence: Synthetic oligonucleotide
cuuucuucggucucuaaug

SEQ ID NO: 1175304 - RNA, 19 nt, Artificial Sequence
  Description of Artificial Sequence: Synthetic oligonucleotide
ucuaaucucugccuguacu

SEQ ID NO: 1175305 - RNA, 19 nt, Artificial Sequence
  Description of Artificial Sequence: Synthetic oligonucleotide
uuuaguccagaacggagga

SEQ ID NO: 1175306 - RNA, 19 nt, Artificial Sequence
  Description of Artificial Sequence: Synthetic oligonucleotide
uuacaaaggaaguuugauc

SEQ ID NO: 1175307 - RNA, 19 nt, Artificial Sequence
  Description of Artificial Sequence: Synthetic oligonucleotide
ucuauggcuacuguguuug

SEQ ID NO: 1175308 - RNA, 19 nt, Artificial Sequence
  Description of Artificial Sequence: Synthetic oligonucleotide
cuuuuaguccagaacggag

SEQ ID NO: 1175309 - RNA, 19 nt, Artificial Sequence
  Description of Artificial Sequence: Synthetic oligonucleotide
gaauuugaguguuugagcu

SEQ ID NO: 1175310 - RNA, 19 nt, Artificial Sequence
  Description of Artificial Sequence: Synthetic oligonucleotide
uucaggaaauuucaggaua

SEQ ID NO: 1175311 - RNA, 19 nt, Artificial Sequence
  Description of Artificial Sequence: Synthetic oligonucleotide
uauuccuuugaccuaucac

SEQ ID NO: 1175312 - RNA, 19 nt, Artificial Sequence
  Description of Artificial Sequence: Synthetic oligonucleotide
ucuauuaggugagugagau

SEQ ID NO: 1175313 - RNA, 19 nt, Artificial Sequence
  Description of Artificial Sequence: Synthetic oligonucleotide
gagcauuucuuuuagucca

SEQ ID NO: 1175314 - RNA, 19 nt, Artificial Sequence
  Description of Artificial Sequence: Synthetic oligonucleotide
aaacacacuccucaauuau

SEQ ID NO: 1175315 - RNA, 19 nt, Artificial Sequence
  Description of Artificial Sequence: Synthetic oligonucleotide
gcaagaaaaugcaaaaggg

SEQ ID NO: 1175316 - RNA, 19 nt, Artificial Sequence
  Description of Artificial Sequence: Synthetic oligonucleotide
  modified_base (7)..(7): a, c, u, g, unknown or other
  modified_base (16)..(16): a, c, u, g, unknown or other
uucuugnugucacgcncca

SEQ ID NO: 1175317 - RNA, 19 nt, Artificial Sequence
  Description of Artificial Sequence: Synthetic oligonucleotide
uuauaauuacuguggccug

SEQ ID NO: 1175318 - RNA, 19 nt, Artificial Sequence
  Description of Artificial Sequence: Synthetic oligonucleotide
ucacaugcaagaguuacug

SEQ ID NO: 1175319 - RNA, 19 nt, Artificial Sequence
  Description of Artificial Sequence: Synthetic oligonucleotide
ucucuaaugcugcaccuga

SEQ ID NO: 1175320 - RNA, 19 nt, Artificial Sequence
  Description of Artificial Sequence: Synthetic oligonucleotide
caucuauauuccuuugacc

SEQ ID NO: 1175321 - RNA, 19 nt, Artificial Sequence
  Description of Artificial Sequence: Synthetic oligonucleotide
uauggcaugcgauaagauc

SEQ ID NO: 1175322 - RNA, 19 nt, Artificial Sequence
  Description of Artificial Sequence: Synthetic oligonucleotide
augcuugugagacgaggcc

SEQ ID NO: 1175323 - RNA, 19 nt, Artificial Sequence
  Description of Artificial Sequence: Synthetic oligonucleotide
auggauaauaaguaacuuu

SEQ ID NO: 1175324 - RNA, 19 nt, Artificial Sequence
  Description of Artificial Sequence: Synthetic oligonucleotide
caagcaucuauuaggugag

SEQ ID NO: 1175325 - RNA, 19 nt, Artificial Sequence
  Description of Artificial Sequence: Synthetic oligonucleotide
agaucaaugucuaaucucu

SEQ ID NO: 1175326 - RNA, 19 nt, Artificial Sequence
  Description of Artificial Sequence: Synthetic oligonucleotide
uguugugcauggucgacag

SEQ ID NO: 1175327 - RNA, 19 nt, Artificial Sequence
  Description of Artificial Sequence: Synthetic oligonucleotide
ugagcucaucacaacacca

SEQ ID NO: 1175328 - RNA, 19 nt, Artificial Sequence
  Description of Artificial Sequence: Synthetic oligonucleotide
gaacggaggaauucauucc

SEQ ID NO: 1175329 - RNA, 19 nt, Artificial Sequence
  Description of Artificial Sequence: Synthetic oligonucleotide
acgguguuguucuucacag

SEQ ID NO: 1175330 - RNA, 19 nt, Artificial Sequence
  Description of Artificial Sequence: Synthetic oligonucleotide
ugaauaucaagcucaucau

SEQ ID NO: 1175331 - RNA, 19 nt, Artificial Sequence
  Description of Artificial Sequence: Synthetic oligonucleotide
ugcgauaagaucccaggaa

SEQ ID NO: 1175332 - RNA, 19 nt, Artificial Sequence
  Description of Artificial Sequence: Synthetic oligonucleotide
aaccuccaaaauaauguuc

SEQ ID NO: 1175333 - RNA, 19 nt, Artificial Sequence
  Description of Artificial Sequence: Synthetic oligonucleotide
caucuauuaggugagugag

SEQ ID NO: 1175334 - RNA, 19 nt, Artificial Sequence
  Description of Artificial Sequence: Synthetic oligonucleotide
uuuugggauccaaaauucu

SEQ ID NO: 1175335 - RNA, 19 nt, Artificial Sequence
  Description of Artificial Sequence: Synthetic oligonucleotide
auuaaccuccaaaauaaug

SEQ ID NO: 1175336 - RNA, 19 nt, Artificial Sequence
  Description of Artificial Sequence: Synthetic oligonucleotide
  modified_base (5)..(5): a, c, u, g, unknown or other
  modified_base (14)..(14): a, c, u, g, unknown or other
cuugnugucacgcnccaga

SEQ ID NO: 1175337 - RNA, 19 nt, Artificial Sequence
  Description of Artificial Sequence: Synthetic oligonucleotide
  modified_base (14)..(14): a, c, u, g, unknown or other
ugggaaauucuugnuguca

SEQ ID NO: 1175338 - RNA, 19 nt, Artificial Sequence
  Description of Artificial Sequence: Synthetic oligonucleotide
  modified_base (8)..(8): a, c, u, g, unknown or other
  modified_base (17)..(17): a, c, u, g, unknown or other
auucuugnugucacgcncc

SEQ ID NO: 1175339 - RNA, 19 nt, Artificial Sequence
  Description of Artificial Sequence: Synthetic oligonucleotide
ugggauccaaaauucucag

SEQ ID NO: 1175340 - RNA, 19 nt, Artificial Sequence
  Description of Artificial Sequence: Synthetic oligonucleotide
cacuaucugggaaacacac

SEQ ID NO: 1175341 - RNA, 19 nt, Artificial Sequence
  Description of Artificial Sequence: Synthetic oligonucleotide
ugaugaguagaaagugcug

SEQ ID NO: 1175342 - RNA, 19 nt, Artificial Sequence
  Description of Artificial Sequence: Synthetic oligonucleotide
gaggccguaacauuuucac

SEQ ID NO: 1175343 - RNA, 19 nt, Artificial Sequence
  Description of Artificial Sequence: Synthetic oligonucleotide
ugccuguacuugaaguccg

SEQ ID NO: 1175344 - RNA, 19 nt, Artificial Sequence
  Description of Artificial Sequence: Synthetic oligonucleotide
ucauuccucaaaugaauuc

SEQ ID NO: 1175345 - RNA, 19 nt, Artificial Sequence
  Description of Artificial Sequence: Synthetic oligonucleotide
uauagagaagaugguagac

SEQ ID NO: 1175346 - RNA, 19 nt, Artificial Sequence
  Description of Artificial Sequence: Synthetic oligonucleotide
ugcuugugagacgaggccg

SEQ ID NO: 1175347 - RNA, 19 nt, Artificial Sequence
  Description of Artificial Sequence: Synthetic oligonucleotide
ugauuguagggcuuccaga

SEQ ID NO: 1175348 - RNA, 19 nt, Artificial Sequence
  Description of Artificial Sequence: Synthetic oligonucleotide
ugugagacgaggccguaac

SEQ ID NO: 1175349 - RNA, 19 nt, Artificial Sequence
  Description of Artificial Sequence: Synthetic oligonucleotide
agauuauccaucacuccgg

SEQ ID NO: 1175350 - RNA, 19 nt, Artificial Sequence
  Description of Artificial Sequence: Synthetic oligonucleotide
gaugcuugugagacgaggc

SEQ ID NO: 1175351 - RNA, 19 nt, Artificial Sequence
  Description of Artificial Sequence: Synthetic oligonucleotide
acugcagugcagcacuauc

SEQ ID NO: 1175352 - RNA, 19 nt, Artificial Sequence
  Description of Artificial Sequence: Synthetic oligonucleotide
uauuguugugcauggucga

SEQ ID NO: 1175353 - RNA, 19 nt, Artificial Sequence
  Description of Artificial Sequence: Synthetic oligonucleotide
agugagaucaaugucuaau

SEQ ID NO: 1175354 - RNA, 19 nt, Artificial Sequence
  Description of Artificial Sequence: Synthetic oligonucleotide
auagagaagaugguagacu

SEQ ID NO: 1175355 - RNA, 19 nt, Artificial Sequence
  Description of Artificial Sequence: Synthetic oligonucleotide
aacuuaucguguugacugu

SEQ ID NO: 1175356 - RNA, 19 nt, Artificial Sequence
  Description of Artificial Sequence: Synthetic oligonucleotide
aggaaauuucaggauauca

SEQ ID NO: 1175357 - RNA, 19 nt, Artificial Sequence
  Description of Artificial Sequence: Synthetic oligonucleotide
gauguuugacaagauucug

SEQ ID NO: 1175358 - RNA, 19 nt, Artificial Sequence
  Description of Artificial Sequence: Synthetic oligonucleotide
uauaauuacuguggccuga

SEQ ID NO: 1175359 - RNA, 19 nt, Artificial Sequence
  Description of Artificial Sequence: Synthetic oligonucleotide
gacggugggaguaauucag

SEQ ID NO: 1175360 - RNA, 19 nt, Artificial Sequence
  Description of Artificial Sequence: Synthetic oligonucleotide
uucacaugcaagaguuacu

SEQ ID NO: 1175361 - RNA, 19 nt, Artificial Sequence
  Description of Artificial Sequence: Synthetic oligonucleotide
  modified_base (7)..(7): a, c, u, g, unknown or other
ucacgcnccagaugaagaa

SEQ ID NO: 1175362 - RNA, 19 nt, Artificial Sequence
  Description of Artificial Sequence: Synthetic oligonucleotide
aguuuccuaccaaaagaac

SEQ ID NO: 1175363 - RNA, 19 nt, Artificial Sequence
  Description of Artificial Sequence: Synthetic oligonucleotide
aaguccgggguccaugcca

SEQ ID NO: 1175364 - RNA, 19 nt, Artificial Sequence
  Description of Artificial Sequence: Synthetic oligonucleotide
ugaaguauucucccagguu

SEQ ID NO: 1175365 - RNA, 19 nt, Artificial Sequence
  Description of Artificial Sequence: Synthetic oligonucleotide
ucuauauuccuuugaccua

SEQ ID NO: 1175366 - RNA, 19 nt, Artificial Sequence
  Description of Artificial Sequence: Synthetic oligonucleotide
ucucuuuugcgaguuuugc

SEQ ID NO: 1175367 - RNA, 19 nt, Artificial Sequence
  Description of Artificial Sequence: Synthetic oligonucleotide
ugaaguccgggguccaugc

SEQ ID NO: 1175368 - RNA, 19 nt, Artificial Sequence
  Description of Artificial Sequence: Synthetic oligonucleotide
gugagaucaaugucuaauc

SEQ ID NO: 1175369 - RNA, 19 nt, Artificial Sequence
  Description of Artificial Sequence: Synthetic oligonucleotide
aguguuugagcugaaacuu

SEQ ID NO: 1175370 - RNA, 19 nt, Artificial Sequence
  Description of Artificial Sequence: Synthetic oligonucleotide
aaagucuauuaaagcuuuc

SEQ ID NO: 1175371 - RNA, 19 nt, Artificial Sequence
  Description of Artificial Sequence: Synthetic oligonucleotide
auuacuguggccugauaua

SEQ ID NO: 1175372 - RNA, 19 nt, Artificial Sequence
  Description of Artificial Sequence: Synthetic oligonucleotide
ugccuuguuuacacaagca

SEQ ID NO: 1175373 - RNA, 19 nt, Artificial Sequence
  Description of Artificial Sequence: Synthetic oligonucleotide
augaaguauucucccaggu

SEQ ID NO: 1175374 - RNA, 19 nt, Artificial Sequence
  Description of Artificial Sequence: Synthetic oligonucleotide
ucauguaguuuccuaccaa

SEQ ID NO: 1175375 - RNA, 19 nt, Artificial Sequence
  Description of Artificial Sequence: Synthetic oligonucleotide
gaauggauaauaaguaacu

SEQ ID NO: 1175376 - RNA, 19 nt, Artificial Sequence
  Description of Artificial Sequence: Synthetic oligonucleotide
  modified_base (3)..(3): a, c, u, g, unknown or other
  modified_base (12)..(12): a, c, u, g, unknown or other
ugnugucacgcnccagaug

SEQ ID NO: 1175377 - RNA, 19 nt, Artificial Sequence
  Description of Artificial Sequence: Synthetic oligonucleotide
  modified_base (2)..(2): a, c, u, g, unknown or other
cnccagaugaagaauuuga

SEQ ID NO: 1175378 - RNA, 19 nt, Artificial Sequence
  Description of Artificial Sequence: Synthetic oligonucleotide
aucguguugacugucuucu

SEQ ID NO: 1175379 - RNA, 19 nt, Artificial Sequence
  Description of Artificial Sequence: Synthetic oligonucleotide
uccagaacggaggaauuca

SEQ ID NO: 1175380 - RNA, 19 nt, Artificial Sequence
  Description of Artificial Sequence: Synthetic oligonucleotide
  modified_base (4)..(4): a, c, u, g, unknown or other
  modified_base (13)..(13): a, c, u, g, unknown or other
uugnugucacgcnccagau

SEQ ID NO: 1175381 - RNA, 19 nt, Artificial Sequence
  Description of Artificial Sequence: Synthetic oligonucleotide
cugagcucaucacaacacc

SEQ ID NO: 1175382 - RNA, 19 nt, Artificial Sequence
  Description of Artificial Sequence: Synthetic oligonucleotide
ucacuuagcaacuguucau

SEQ ID NO: 1175383 - RNA, 19 nt, Artificial Sequence
  Description of Artificial Sequence: Synthetic oligonucleotide
cauaucguccauuucagcu

SEQ ID NO: 1175384 - RNA, 19 nt, Artificial Sequence
  Description of Artificial Sequence: Synthetic oligonucleotide
auuguugugcauggucgac

SEQ ID NO: 1175385 - RNA, 19 nt, Artificial Sequence
  Description of Artificial Sequence: Synthetic oligonucleotide
ucauaucguccauuucagc

SEQ ID NO: 1175386 - RNA, 19 nt, Artificial Sequence
  Description of Artificial Sequence: Synthetic oligonucleotide
gucuauuaaagcuuucacu

SEQ ID NO: 1175387 - RNA, 19 nt, Artificial Sequence
  Description of Artificial Sequence: Synthetic oligonucleotide
caucacaacaccaaacugu

SEQ ID NO: 1175388 - RNA, 19 nt, Artificial Sequence
  Description of Artificial Sequence: Synthetic oligonucleotide
uuacuguggccugauauaa

SEQ ID NO: 1175389 - RNA, 19 nt, Artificial Sequence
  Description of Artificial Sequence: Synthetic oligonucleotide
uaucuggauuccuuggaau

SEQ ID NO: 1175390 - RNA, 19 nt, Artificial Sequence
  Description of Artificial Sequence: Synthetic oligonucleotide
aaugcugcaccugauugua

SEQ ID NO: 1175391 - RNA, 19 nt, Artificial Sequence
  Description of Artificial Sequence: Synthetic oligonucleotide
uugugcauggucgacaguu

SEQ ID NO: 1175392 - RNA, 19 nt, Artificial Sequence
  Description of Artificial Sequence: Synthetic oligonucleotide
uuugaucugcugacuuugu

SEQ ID NO: 1175393 - RNA, 19 nt, Artificial Sequence
  Description of Artificial Sequence: Synthetic oligonucleotide
ucguauggcaugcgauaag

SEQ ID NO: 1175394 - RNA, 19 nt, Artificial Sequence
  Description of Artificial Sequence: Synthetic oligonucleotide
uggcaugcgauaagauccc

SEQ ID NO: 1175395 - RNA, 19 nt, Artificial Sequence
  Description of Artificial Sequence: Synthetic oligonucleotide
gaaacacacuccucaauua

SEQ ID NO: 1175396 - RNA, 19 nt, Artificial Sequence
  Description of Artificial Sequence: Synthetic oligonucleotide
  modified_base (9)..(9): a, c, u, g, unknown or other
ugucacgcnccagaugaag

SEQ ID NO: 1175397 - RNA, 19 nt, Artificial Sequence
  Description of Artificial Sequence: Synthetic oligonucleotide
uccacaaacuuaucguguu

SEQ ID NO: 1175398 - RNA, 19 nt, Artificial Sequence
  Description of Artificial Sequence: Synthetic oligonucleotide
caugcaagaguuacugaca

SEQ ID NO: 1175399 - RNA, 19 nt, Artificial Sequence
  Description of Artificial Sequence: Synthetic oligonucleotide
cacaacaccaaacuguucu

SEQ ID NO: 1175400 - RNA, 19 nt, Artificial Sequence
  Description of Artificial Sequence: Synthetic oligonucleotide
gcaucuauauuccuuugac

SEQ ID NO: 1175401 - RNA, 19 nt, Artificial Sequence
  Description of Artificial Sequence: Synthetic oligonucleotide
gggagcauuucuuuuaguc

SEQ ID NO: 1175402 - RNA, 19 nt, Artificial Sequence
  Description of Artificial Sequence: Synthetic oligonucleotide
ugcgaguuuugcccuccgg

SEQ ID NO: 1175403 - RNA, 19 nt, Artificial Sequence
  Description of Artificial Sequence: Synthetic oligonucleotide
uuagagcuucacuuagcaa

SEQ ID NO: 1175404 - RNA, 19 nt, Artificial Sequence
  Description of Artificial Sequence: Synthetic oligonucleotide
auucgcuuucuucggucuc

SEQ ID NO: 1175405 - RNA, 19 nt, Artificial Sequence
  Description of Artificial Sequence: Synthetic oligonucleotide
ccucaaaugaauucgaaaa

SEQ ID NO: 1175406 - RNA, 19 nt, Artificial Sequence
  Description of Artificial Sequence: Synthetic oligonucleotide
ugagacgaggccguaacau

SEQ ID NO: 1175407 - RNA, 19 nt, Artificial Sequence
  Description of Artificial Sequence: Synthetic oligonucleotide
cagaauggauaauaaguaa

SEQ ID NO: 1175408 - RNA, 19 nt, Artificial Sequence
  Description of Artificial Sequence: Synthetic oligonucleotide
guaacuuucuagcugcagu

SEQ ID NO: 1175409 - RNA, 19 nt, Artificial Sequence
  Description of Artificial Sequence: Synthetic oligonucleotide
auauuccuuugaccuauca

SEQ ID NO: 1175410 - RNA, 19 nt, Artificial Sequence
  Description of Artificial Sequence: Synthetic oligonucleotide
aucuggauuccuuggaauu

SEQ ID NO: 1175411 - RNA, 19 nt, Artificial Sequence
  Description of Artificial Sequence: Synthetic oligonucleotide
agcaucuauuaggugagug

SEQ ID NO: 1175412 - RNA, 19 nt, Artificial Sequence
  Description of Artificial Sequence: Synthetic oligonucleotide
auauugcucucuggcauuc

SEQ ID NO: 1175413 - RNA, 19 nt, Artificial Sequence
  Description of Artificial Sequence: Synthetic oligonucleotide
acuuaucguguugacuguc

SEQ ID NO: 1175414 - RNA, 19 nt, Artificial Sequence
  Description of Artificial Sequence: Synthetic oligonucleotide
cugccuguacuugaagucc

SEQ ID NO: 1175415 - RNA, 19 nt, Artificial Sequence
  Description of Artificial Sequence: Synthetic oligonucleotide
uaucguguugacugucuuc

SEQ ID NO: 1175416 - RNA, 19 nt, Artificial Sequence
  Description of Artificial Sequence: Synthetic oligonucleotide
cuaccaaaagaaccagcuc

SEQ ID NO: 1175417 - RNA, 19 nt, Artificial Sequence
  Description of Artificial Sequence: Synthetic oligonucleotide
uuguaucucugaucuuaca

SEQ ID NO: 1175418 - RNA, 19 nt, Artificial Sequence
  Description of Artificial Sequence: Synthetic oligonucleotide
uccucguauggcaugcgau

SEQ ID NO: 1175419 - RNA, 19 nt, Artificial Sequence
  Description of Artificial Sequence: Synthetic oligonucleotide
uuccucguauggcaugcga

SEQ ID NO: 1175420 - RNA, 19 nt, Artificial Sequence
  Description of Artificial Sequence: Synthetic oligonucleotide
cuuaagcugugcuaguucu

SEQ ID NO: 1175421 - RNA, 19 nt, Artificial Sequence
  Description of Artificial Sequence: Synthetic oligonucleotide
aguaauucaguuagaucau

SEQ ID NO: 1175422 - RNA, 19 nt, Artificial Sequence
  Description of Artificial Sequence: Synthetic oligonucleotide
  modified_base (15)..(15): a, c, u, g, unknown or other
uugggaaauucuugnuguc

SEQ ID NO: 1175423 - RNA, 19 nt, Artificial Sequence
  Description of Artificial Sequence: Synthetic oligonucleotide
agagaagaugguagacuuc

SEQ ID NO: 1175424 - RNA, 19 nt, Artificial Sequence
  Description of Artificial Sequence: Synthetic oligonucleotide
uuguugugcauggucgaca

SEQ ID NO: 1175425 - RNA, 19 nt, Artificial Sequence
  Description of Artificial Sequence: Synthetic oligonucleotide
ggaguaauucaguuagauc

SEQ ID NO: 1175426 - RNA, 19 nt, Artificial Sequence
  Description of Artificial Sequence: Synthetic oligonucleotide
cuuagcaacuguucauuaa

SEQ ID NO: 1175427 - RNA, 19 nt, Artificial Sequence
  Description of Artificial Sequence: Synthetic oligonucleotide
uuugcgaguuuugcccucc

SEQ ID NO: 1175428 - RNA, 19 nt, Artificial Sequence
  Description of Artificial Sequence: Synthetic oligonucleotide
acgaggccguaacauuuuc

SEQ ID NO: 1175429 - RNA, 19 nt, Artificial Sequence
  Description of Artificial Sequence: Synthetic oligonucleotide
acuuagcaacuguucauua

SEQ ID NO: 1175430 - RNA, 19 nt, Artificial Sequence
  Description of Artificial Sequence: Synthetic oligonucleotide
agcucaucacaacaccaaa

SEQ ID NO: 1175431 - RNA, 19 nt, Artificial Sequence
  Description of Artificial Sequence: Synthetic oligonucleotide
uuaggugagugagaucaau

SEQ ID NO: 1175432 - RNA, 19 nt, Artificial Sequence
  Description of Artificial Sequence: Synthetic oligonucleotide
ugggaguaauucaguuaga

SEQ ID NO: 1175433 - RNA, 19 nt, Artificial Sequence
  Description of Artificial Sequence: Synthetic oligonucleotide
uuaagcugugcuaguucuu

SEQ ID NO: 1175434 - RNA, 19 nt, Artificial Sequence
  Description of Artificial Sequence: Synthetic oligonucleotide
gaaugucauugagacggug

SEQ ID NO: 1175435 - RNA, 19 nt, Artificial Sequence
  Description of Artificial Sequence: Synthetic oligonucleotide
guacuugaaguccgggguc

SEQ ID NO: 1175436 - RNA, 19 nt, Artificial Sequence
  Description of Artificial Sequence: Synthetic oligonucleotide
uccuuugaccuaucacuuc

SEQ ID NO: 1175437 - RNA, 19 nt, Artificial Sequence
  Description of Artificial Sequence: Synthetic oligonucleotide
auuccucaaaugaauucga

SEQ ID NO: 1175438 - RNA, 19 nt, Artificial Sequence
  Description of Artificial Sequence: Synthetic oligonucleotide
uugaaguccgggguccaug

SEQ ID NO: 1175439 - RNA, 19 nt, Artificial Sequence
  Description of Artificial Sequence: Synthetic oligonucleotide
uauauuccuuugaccuauc

SEQ ID NO: 1175440 - RNA, 19 nt, Artificial Sequence
  Description of Artificial Sequence: Synthetic oligonucleotide
gcaucuauuaggugaguga

SEQ ID NO: 1175441 - RNA, 19 nt, Artificial Sequence
  Description of Artificial Sequence: Synthetic oligonucleotide
guggccugauauaauaauc

SEQ ID NO: 1175442 - RNA, 19 nt, Artificial Sequence
  Description of Artificial Sequence: Synthetic oligonucleotide
ugucauugagacgguggga

SEQ ID NO: 1175443 - RNA, 19 nt, Artificial Sequence
  Description of Artificial Sequence: Synthetic oligonucleotide
ggaugcuugugagacgagg

SEQ ID NO: 1175444 - RNA, 19 nt, Artificial Sequence
  Description of Artificial Sequence: Synthetic oligonucleotide
uggcuacuguguuuggguc

SEQ ID NO: 1175445 - RNA, 19 nt, Artificial Sequence
  Description of Artificial Sequence: Synthetic oligonucleotide
uugcgaguuuugcccuccg

SEQ ID NO: 1175446 - RNA, 19 nt, Artificial Sequence
  Description of Artificial Sequence: Synthetic oligonucleotide
ggauccaaaauucucaguu

SEQ ID NO: 1175447 - RNA, 19 nt, Artificial Sequence
  Description of Artificial Sequence: Synthetic oligonucleotide
ucuucacaugcaagaguua

SEQ ID NO: 1175448 - RNA, 19 nt, Artificial Sequence
  Description of Artificial Sequence: Synthetic oligonucleotide
cacugagcucaucacaaca

SEQ ID NO: 1175449 - RNA, 19 nt, Artificial Sequence
  Description of Artificial Sequence: Synthetic oligonucleotide
cauuucuuuuaguccagaa

SEQ ID NO: 1175450 - RNA, 19 nt, Artificial Sequence
  Description of Artificial Sequence: Synthetic oligonucleotide
  modified_base (13)..(13): a, c, u, g, unknown or other
gggaaauucuugnugucac

SEQ ID NO: 1175451 - RNA, 19 nt, Artificial Sequence
  Description of Artificial Sequence: Synthetic oligonucleotide
uuuugcgaguuuugcccuc

SEQ ID NO: 1175452 - RNA, 19 nt, Artificial Sequence
  Description of Artificial Sequence: Synthetic oligonucleotide
accugauuguagggcuucc

SEQ ID NO: 1175453 - RNA, 19 nt, Artificial Sequence
  Description of Artificial Sequence: Synthetic oligonucleotide
aggccguaacauuuucacu

SEQ ID NO: 1175454 - RNA, 19 nt, Artificial Sequence
  Description of Artificial Sequence: Synthetic oligonucleotide
cuauggcuacuguguuugg

SEQ ID NO: 1175455 - RNA, 19 nt, Artificial Sequence
  Description of Artificial Sequence: Synthetic oligonucleotide
auaauuacuguggccugau

SEQ ID NO: 1175456 - RNA, 19 nt, Artificial Sequence
  Description of Artificial Sequence: Synthetic oligonucleotide
guaauucaguuagaucauc

SEQ ID NO: 1175457 - RNA, 19 nt, Artificial Sequence
  Description of Artificial Sequence: Synthetic oligonucleotide
agcucgaaugucauugaga

SEQ ID NO: 1175458 - RNA, 19 nt, Artificial Sequence
  Description of Artificial Sequence: Synthetic oligonucleotide
  modified_base (6)..(6): a, c, u, g, unknown or other
  modified_base (15)..(15): a, c, u, g, unknown or other
ucuugnugucacgcnccag

SEQ ID NO: 1175459 - RNA, 19 nt, Artificial Sequence
  Description of Artificial Sequence: Synthetic oligonucleotide
ucacaacaccaaacuguuc

SEQ ID NO: 1175460 - RNA, 19 nt, Artificial Sequence
  Description of Artificial Sequence: Synthetic oligonucleotide
ugcccuccggcucuucucu

SEQ ID NO: 1175461 - RNA, 19 nt, Artificial Sequence
  Description of Artificial Sequence: Synthetic oligonucleotide
uucuuaagcugugcuaguu

SEQ ID NO: 1175462 - RNA, 19 nt, Artificial Sequence
  Description of Artificial Sequence: Synthetic oligonucleotide
auaagaucccaggaagaua

SEQ ID NO: 1175463 - RNA, 19 nt, Artificial Sequence
  Description of Artificial Sequence: Synthetic oligonucleotide
auguuauagagaagauggu

SEQ ID NO: 1175464 - RNA, 19 nt, Artificial Sequence
  Description of Artificial Sequence: Synthetic oligonucleotide
uugagccugaguucaugua

SEQ ID NO: 1175465 - RNA, 19 nt, Artificial Sequence
  Description of Artificial Sequence: Synthetic oligonucleotide
uuuccucguauggcaugcg

SEQ ID NO: 1175466 - RNA, 19 nt, Artificial Sequence
  Description of Artificial Sequence: Synthetic oligonucleotide
ugucuaaucucugccugua

SEQ ID NO: 1175467 - RNA, 19 nt, Artificial Sequence
  Description of Artificial Sequence: Synthetic oligonucleotide
gcgaguuuugcccuccggc

SEQ ID NO: 1175468 - RNA, 19 nt, Artificial Sequence
  Description of Artificial Sequence: Synthetic oligonucleotide
cuauuaggugagugagauc

SEQ ID NO: 1175469 - RNA, 19 nt, Artificial Sequence
  Description of Artificial Sequence: Synthetic oligonucleotide
gacaugaugcuugguuuga

SEQ ID NO: 1175470 - RNA, 19 nt, Artificial Sequence
  Description of Artificial Sequence: Synthetic oligonucleotide
cugaucuuacaaaggaagu

SEQ ID NO: 1175471 - RNA, 19 nt, Artificial Sequence
  Description of Artificial Sequence: Synthetic oligonucleotide
gaccuaucacuucuuugaa

SEQ ID NO: 1175472 - RNA, 19 nt, Artificial Sequence
  Description of Artificial Sequence: Synthetic oligonucleotide
cucaaaugaauucgaaaau

SEQ ID NO: 1175473 - RNA, 19 nt, Artificial Sequence
  Description of Artificial Sequence: Synthetic oligonucleotide
gaagaugguagacuucauu

SEQ ID NO: 1175474 - RNA, 19 nt, Artificial Sequence
  Description of Artificial Sequence: Synthetic oligonucleotide
gcugugcuaguucuuugag

SEQ ID NO: 1175475 - RNA, 19 nt, Artificial Sequence
  Description of Artificial Sequence: Synthetic oligonucleotide
uacuguggccugauauaau

SEQ ID NO: 1175476 - RNA, 19 nt, Artificial Sequence
  Description of Artificial Sequence: Synthetic oligonucleotide
gucucuaaugcugcaccug

SEQ ID NO: 1175477 - RNA, 19 nt, Artificial Sequence
  Description of Artificial Sequence: Synthetic oligonucleotide
cacgguguuguucuucaca

SEQ ID NO: 1175478 - RNA, 19 nt, Artificial Sequence
  Description of Artificial Sequence: Synthetic oligonucleotide
auuucagcucgaaugucau

SEQ ID NO: 1175479 - RNA, 19 nt, Artificial Sequence
  Description of Artificial Sequence: Synthetic oligonucleotide
ucaccauauuguugugcau

SEQ ID NO: 1175480 - RNA, 19 nt, Artificial Sequence
  Description of Artificial Sequence: Synthetic oligonucleotide
acuaucugggaaacacacu

SEQ ID NO: 1175481 - RNA, 19 nt, Artificial Sequence
  Description of Artificial Sequence: Synthetic oligonucleotide
gaaguccgggguccaugcc

SEQ ID NO: 1175482 - RNA, 19 nt, Artificial Sequence
  Description of Artificial Sequence: Synthetic oligonucleotide
uaauuacuguggccugaua

SEQ ID NO: 1175483 - RNA, 19 nt, Artificial Sequence
  Description of Artificial Sequence: Synthetic oligonucleotide
acggaggaauucauuccuc

SEQ ID NO: 1175484 - RNA, 19 nt, Artificial Sequence
  Description of Artificial Sequence: Synthetic oligonucleotide
aucuauuaggugagugaga

SEQ ID NO: 1175485 - RNA, 19 nt, Artificial Sequence
  Description of Artificial Sequence: Synthetic oligonucleotide
caaugucuaaucucugccu

SEQ ID NO: 1175486 - RNA, 19 nt, Artificial Sequence
  Description of Artificial Sequence: Synthetic oligonucleotide
ucggucucuaaugcugcac

SEQ ID NO: 1175487 - RNA, 19 nt, Artificial Sequence
  Description of Artificial Sequence: Synthetic oligonucleotide
gagcucaucacaacaccaa

SEQ ID NO: 1175488 - RNA, 19 nt, Artificial Sequence
  Description of Artificial Sequence: Synthetic oligonucleotide
gucuaaucucugccuguac

SEQ ID NO: 1175489 - RNA, 19 nt, Artificial Sequence
  Description of Artificial Sequence: Synthetic oligonucleotide
cagauuucagcaagaaaau

SEQ ID NO: 1175490 - RNA, 19 nt, Artificial Sequence
  Description of Artificial Sequence: Synthetic oligonucleotide
uugaguguuugagcugaaa

SEQ ID NO: 1175491 - RNA, 19 nt, Artificial Sequence
  Description of Artificial Sequence: Synthetic oligonucleotide
ugagacggugggaguaauu

SEQ ID NO: 1175492 - RNA, 19 nt, Artificial Sequence
  Description of Artificial Sequence: Synthetic oligonucleotide
auugagacggugggaguaa

SEQ ID NO: 1175493 - RNA, 19 nt, Artificial Sequence
  Description of Artificial Sequence: Synthetic oligonucleotide
cuuaucguguugacugucu

SEQ ID NO: 1175494 - RNA, 19 nt, Artificial Sequence
  Description of Artificial Sequence: Synthetic oligonucleotide
uuucagcucgaaugucauu

SEQ ID NO: 1175495 - RNA, 19 nt, Artificial Sequence
  Description of Artificial Sequence: Synthetic oligonucleotide
cacaugcaagaguuacuga

SEQ ID NO: 1175496 - RNA, 19 nt, Artificial Sequence
  Description of Artificial Sequence: Synthetic oligonucleotide
ccuaccaaaagaaccagcu

SEQ ID NO: 1175497 - RNA, 19 nt, Artificial Sequence
  Description of Artificial Sequence: Synthetic oligonucleotide
agacgaggccguaacauuu

SEQ ID NO: 1175498 - RNA, 19 nt, Artificial Sequence
  Description of Artificial Sequence: Synthetic oligonucleotide
cuauauuccuuugaccuau

SEQ ID NO: 1175499 - RNA, 19 nt, Artificial Sequence
  Description of Artificial Sequence: Synthetic oligonucleotide
cuauuaaagcuuucacuuu

SEQ ID NO: 1175500 - RNA, 19 nt, Artificial Sequence
  Description of Artificial Sequence: Synthetic oligonucleotide
  modified_base (8)..(8): a, c, u, g, unknown or other
gucacgcnccagaugaaga

SEQ ID NO: 1175501 - RNA, 19 nt, Artificial Sequence
  Description of Artificial Sequence: Synthetic oligonucleotide
cuguggccugauauaauaa

SEQ ID NO: 1175502 - RNA, 19 nt, Artificial Sequence
  Description of Artificial Sequence: Synthetic oligonucleotide
cuugagccugaguucaugu

SEQ ID NO: 1175503 - RNA, 19 nt, Artificial Sequence
  Description of Artificial Sequence: Synthetic oligonucleotide
cauucuuuguaaagcucgu

SEQ ID NO: 1175504 - RNA, 19 nt, Artificial Sequence
  Description of Artificial Sequence: Synthetic oligonucleotide
  modified_base (18)..(18): a, c, u, g, unknown or other
cuuuugggaaauucuugnu

SEQ ID NO: 1175505 - RNA, 19 nt, Artificial Sequence
  Description of Artificial Sequence: Synthetic oligonucleotide
cuuuugcgaguuuugcccu

SEQ ID NO: 1175506 - RNA, 19 nt, Artificial Sequence
  Description of Artificial Sequence: Synthetic oligonucleotide
gcucaucacaacaccaaac

SEQ ID NO: 1175507 - RNA, 19 nt, Artificial Sequence
  Description of Artificial Sequence: Synthetic oligonucleotide
ggauaucacgguguuguuc

SEQ ID NO: 1175508 - RNA, 19 nt, Artificial Sequence
  Description of Artificial Sequence: Synthetic oligonucleotide
cucugccuguacuugaagu

SEQ ID NO: 1175509 - RNA, 19 nt, Artificial Sequence
  Description of Artificial Sequence: Synthetic oligonucleotide
uggcgcucuagcuucucuu

SEQ ID NO: 1175510 - RNA, 19 nt, Artificial Sequence
  Description of Artificial Sequence: Synthetic oligonucleotide
caaacuuaucguguugacu

SEQ ID NO: 1175511 - RNA, 19 nt, Artificial Sequence
  Description of Artificial Sequence: Synthetic oligonucleotide
guccagaacggaggaauuc

SEQ ID NO: 1175512 - RNA, 19 nt, Artificial Sequence
  Description of Artificial Sequence: Synthetic oligonucleotide
uuauaucaaugagcugcuu

SEQ ID NO: 1175513 - RNA, 19 nt, Artificial Sequence
  Description of Artificial Sequence: Synthetic oligonucleotide
uauugcucucuggcauucu

SEQ ID NO: 1175514 - RNA, 19 nt, Artificial Sequence
  Description of Artificial Sequence: Synthetic oligonucleotide
  modified_base (5)..(5): a, c, u, g, unknown or other
acgcnccagaugaagaauu

SEQ ID NO: 1175515 - RNA, 19 nt, Artificial Sequence
  Description of Artificial Sequence: Synthetic oligonucleotide
gagugagaucaaugucuaa

SEQ ID NO: 1175516 - RNA, 19 nt, Artificial Sequence
  Description of Artificial Sequence: Synthetic oligonucleotide
cucguauggcaugcgauaa

SEQ ID NO: 1175517 - RNA, 19 nt, Artificial Sequence
  Description of Artificial Sequence: Synthetic oligonucleotide
  modified_base (3)..(3): a, c, u, g, unknown or other
gcnccagaugaagaauuug

SEQ ID NO: 1175518 - RNA, 19 nt, Artificial Sequence
  Description of Artificial Sequence: Synthetic oligonucleotide
uugugagacgaggccguaa

SEQ ID NO: 1175519 - RNA, 19 nt, Artificial Sequence
  Description of Artificial Sequence: Synthetic oligonucleotide
cauugagacggugggagua

SEQ ID NO: 1175520 - RNA, 19 nt, Artificial Sequence
  Description of Artificial Sequence: Synthetic oligonucleotide
gccguaacauuuucacuga

SEQ ID NO: 1175521 - RNA, 19 nt, Artificial Sequence
  Description of Artificial Sequence: Synthetic oligonucleotide
uucuggcgcucuagcuucu

SEQ ID NO: 1175522 - RNA, 19 nt, Artificial Sequence
  Description of Artificial Sequence: Synthetic oligonucleotide
gugagacgaggccguaaca

SEQ ID NO: 1175523 - RNA, 19 nt, Artificial Sequence
  Description of Artificial Sequence: Synthetic oligonucleotide
gcaugcgauaagaucccag

SEQ ID NO: 1175524 - RNA, 19 nt, Artificial Sequence
  Description of Artificial Sequence: Synthetic oligonucleotide
ucguccauuucagcucgaa

SEQ ID NO: 1175525 - RNA, 19 nt, Artificial Sequence
  Description of Artificial Sequence: Synthetic oligonucleotide
cuguuuugggauccaaaau

SEQ ID NO: 1175526 - RNA, 19 nt, Artificial Sequence
  Description of Artificial Sequence: Synthetic oligonucleotide
ggauaauaaguaacuuucu

SEQ ID NO: 1175527 - RNA, 19 nt, Artificial Sequence
  Description of Artificial Sequence: Synthetic oligonucleotide
acaugaugcuugguuugau

SEQ ID NO: 1175528 - RNA, 19 nt, Artificial Sequence
  Description of Artificial Sequence: Synthetic oligonucleotide
caccugauuguagggcuuc

SEQ ID NO: 1175529 - RNA, 19 nt, Artificial Sequence
  Description of Artificial Sequence: Synthetic oligonucleotide
gagccugaguucauguagu

SEQ ID NO: 1175530 - RNA, 19 nt, Artificial Sequence
  Description of Artificial Sequence: Synthetic oligonucleotide
gagacgaggccguaacauu

SEQ ID NO: 1175531 - RNA, 19 nt, Artificial Sequence
  Description of Artificial Sequence: Synthetic oligonucleotide
cugugcuaguucuuugagu

SEQ ID NO: 1175532 - RNA, 19 nt, Artificial Sequence
  Description of Artificial Sequence: Synthetic oligonucleotide
cauuaaccuccaaaauaau

SEQ ID NO: 1175533 - RNA, 19 nt, Artificial Sequence
  Description of Artificial Sequence: Synthetic oligonucleotide
auaucacgguguuguucuu

SEQ ID NO: 1175534 - RNA, 19 nt, Artificial Sequence
  Description of Artificial Sequence: Synthetic oligonucleotide
uugagacggugggaguaau

SEQ ID NO: 1175535 - RNA, 19 nt, Artificial Sequence
  Description of Artificial Sequence: Synthetic oligonucleotide
acggugggaguaauucagu

SEQ ID NO: 1175536 - RNA, 19 nt, Artificial Sequence
  Description of Artificial Sequence: Synthetic oligonucleotide
aucacccucuuuguuuaua

SEQ ID NO: 1175537 - RNA, 19 nt, Artificial Sequence
  Description of Artificial Sequence: Synthetic oligonucleotide
ucguguugacugucuucuu

SEQ ID NO: 1175538 - RNA, 19 nt, Artificial Sequence
  Description of Artificial Sequence: Synthetic oligonucleotide
guagaaagugcugcagaau

SEQ ID NO: 1175539 - RNA, 19 nt, Artificial Sequence
  Description of Artificial Sequence: Synthetic oligonucleotide
ccguaacauuuucacugag

SEQ ID NO: 1175540 - RNA, 19 nt, Artificial Sequence
  Description of Artificial Sequence: Synthetic oligonucleotide
cauauugcucucuggcauu

SEQ ID NO: 1175541 - RNA, 19 nt, Artificial Sequence
  Description of Artificial Sequence: Synthetic oligonucleotide
aguccagaacggaggaauu

SEQ ID NO: 1175542 - RNA, 19 nt, Artificial Sequence
  Description of Artificial Sequence: Synthetic oligonucleotide
gggaguaauucaguuagau

SEQ ID NO: 1175543 - RNA, 19 nt, Artificial Sequence
  Description of Artificial Sequence: Synthetic oligonucleotide
ggccugauauaauaaucau

SEQ ID NO: 1175544 - RNA, 19 nt, Artificial Sequence
  Description of Artificial Sequence: Synthetic oligonucleotide
gccuguacuugaaguccgg

SEQ ID NO: 1175545 - RNA, 19 nt, Artificial Sequence
  Description of Artificial Sequence: Synthetic oligonucleotide
ggucucuaaugcugcaccu

SEQ ID NO: 1175546 - RNA, 19 nt, Artificial Sequence
  Description of Artificial Sequence: Synthetic oligonucleotide
gggauccaaaauucucagu

SEQ ID NO: 1175547 - RNA, 19 nt, Artificial Sequence
  Description of Artificial Sequence: Synthetic oligonucleotide
guauggcaugcgauaagau

SEQ ID NO: 1175548 - RNA, 19 nt, Artificial Sequence
  Description of Artificial Sequence: Synthetic oligonucleotide
cagaacggaggaauucauu

SEQ ID NO: 1175549 - RNA, 19 nt, Artificial Sequence
  Description of Artificial Sequence: Synthetic oligonucleotide
gugcuaguucuuugaguau

SEQ ID NO: 1175550 - RNA, 19 nt, Artificial Sequence
  Description of Artificial Sequence: Synthetic oligonucleotide
ccucguauggcaugcgaua

SEQ ID NO: 1175551 - RNA, 19 nt, Artificial Sequence
  Description of Artificial Sequence: Synthetic oligonucleotide
guguuugagcugaaacuuu

SEQ ID NO: 1175552 - RNA, 19 nt, Artificial Sequence
  Description of Artificial Sequence: Synthetic oligonucleotide
cucuaaugcugcaccugau

SEQ ID NO: 1175553 - RNA, 19 nt, Artificial Sequence
  Description of Artificial Sequence: Synthetic oligonucleotide
ccgggguccaugccacugc

SEQ ID NO: 1175554 - RNA, 19 nt, Artificial Sequence
  Description of Artificial Sequence: Synthetic oligonucleotide
gccugauauaauaaucauu

SEQ ID NO: 1175555 - RNA, 19 nt, Artificial Sequence
  Description of Artificial Sequence: Synthetic oligonucleotide
gacgaggccguaacauuuu

SEQ ID NO: 1175556 - RNA, 19 nt, Artificial Sequence
  Description of Artificial Sequence: Synthetic oligonucleotide
guugugcauggucgacagu

SEQ ID NO: 1175557 - RNA, 19 nt, Artificial Sequence
  Description of Artificial Sequence: Synthetic oligonucleotide
gcuaguucuuugaguauau

SEQ ID NO: 1175558 - RNA, 19 nt, Artificial Sequence
  Description of Artificial Sequence: Synthetic oligonucleotide
  modified_base (6)..(6): a, c, u, g, unknown or other
cacgcnccagaugaagaau

SEQ ID NO: 1175559 - RNA, 19 nt, Artificial Sequence
  Description of Artificial Sequence: Synthetic oligonucleotide
ccaugccacugcagugcag

SEQ ID NO: 1175560 - RNA, 19 nt, Artificial Sequence
  Description of Artificial Sequence: Synthetic oligonucleotide
cagcacuaucugggaaaca

SEQ ID NO: 1175561 - RNA, 19 nt, Artificial Sequence
  Description of Artificial Sequence: Synthetic oligonucleotide
aucguccauuucagcucga

SEQ ID NO: 1175562 - RNA, 19 nt, Artificial Sequence
  Description of Artificial Sequence: Synthetic oligonucleotide
ggcaugcgauaagauccca

SEQ ID NO: 1175563 - RNA, 19 nt, Artificial Sequence
  Description of Artificial Sequence: Synthetic oligonucleotide
cgaggccguaacauuuuca

SEQ ID NO: 1175564 - RNA, 19 nt, Artificial Sequence
  Description of Artificial Sequence: Synthetic oligonucleotide
cuugugagacgaggccgua

SEQ ID NO: 1175565 - RNA, 19 nt, Artificial Sequence
  Description of Artificial Sequence: Synthetic oligonucleotide
ccugauuguagggcuucca

SEQ ID NO: 1175566 - RNA, 19 nt, Artificial Sequence
  Description of Artificial Sequence: Synthetic oligonucleotide
  modified_base (4)..(4): a, c, u, g, unknown or other
cgcnccagaugaagaauuu

SEQ ID NO: 1175567 - RNA, 19 nt, Artificial Sequence
  Description of Artificial Sequence: Synthetic oligonucleotide
gcaccugauuguagggcuu

SEQ ID NO: 1175568 - RNA, 19 nt, Artificial Sequence
  Description of Artificial Sequence: Synthetic oligonucleotide
cggugggaguaauucaguu

SEQ ID NO: 1175569 - RNA, 19 nt, Artificial Sequence
  Description of Artificial Sequence: Synthetic oligonucleotide
cguccauuucagcucgaau

SEQ ID NO: 1175570 - RNA, 19 nt, Artificial Sequence
  Description of Artificial Sequence: Synthetic oligonucleotide
ccggcucuucucuucuguu

SEQ ID NO: 1175571 - RNA, 19 nt, Artificial Sequence
  Description of Artificial Sequence: Synthetic oligonucleotide
cgcuuucuucggucucuaa

SEQ ID NO: 1175572 - RNA, 19 nt, Artificial Sequence
  Description of Artificial Sequence: Synthetic oligonucleotide
  modified_base (1)..(1): a, c, u, g, unknown or other
  modified_base (10)..(10): a, c, u, g, unknown or other
nugucacgcnccagaugaa

SEQ ID NO: 1175573 - RNA, 19 nt, Artificial Sequence
  Description of Artificial Sequence: Synthetic oligonucleotide
aauauaacaguauucauuc

SEQ ID NO: 1175574 - RNA, 19 nt, Artificial Sequence
  Description of Artificial Sequence: Synthetic oligonucleotide
aaaaccaacucccuaaacc

SEQ ID NO: 1175575 - RNA, 19 nt, Artificial Sequence
  Description of Artificial Sequence: Synthetic oligonucleotide
acaauauauaguuaagcgc

SEQ ID NO: 1175576 - RNA, 19 nt, Artificial Sequence
  Description of Artificial Sequence: Synthetic oligonucleotide
aacuugauagccuuuacuc

SEQ ID NO: 1175577 - RNA, 19 nt, Artificial Sequence
  Description of Artificial Sequence: Synthetic oligonucleotide
uguauauuuguugacaugg

SEQ ID NO: 1175578 - RNA, 19 nt, Artificial Sequence
  Description of Artificial Sequence: Synthetic oligonucleotide
ucuccugucagguagaagg

SEQ ID NO: 1175579 - RNA, 19 nt, Artificial Sequence
  Description of Artificial Sequence: Synthetic oligonucleotide
uauaguuaagcgcaaaagc

SEQ ID NO: 1175580 - RNA, 19 nt, Artificial Sequence
  Description of Artificial Sequence: Synthetic oligonucleotide
aacacauccguccaggguc

SEQ ID NO: 1175581 - RNA, 19 nt, Artificial Sequence
  Description of Artificial Sequence: Synthetic oligonucleotide
aggaaguugggguagaggc

SEQ ID NO: 1175582 - RNA, 19 nt, Artificial Sequence
  Description of Artificial Sequence: Synthetic oligonucleotide
uguguguucaagcaaaacc

SEQ ID NO: 1175583 - RNA, 19 nt, Artificial Sequence
  Description of Artificial Sequence: Synthetic oligonucleotide
uccacucacauucaggugg

SEQ ID NO: 1175584 - RNA, 19 nt, Artificial Sequence
  Description of Artificial Sequence: Synthetic oligonucleotide
ugugacagcaaguaugggg

SEQ ID NO: 1175585 - RNA, 19 nt, Artificial Sequence
  Description of Artificial Sequence: Synthetic oligonucleotide
uccaacugagacaugaugc

SEQ ID NO: 1175586 - RNA, 19 nt, Artificial Sequence
  Description of Artificial Sequence: Synthetic oligonucleotide
uucucacccaacuugauag

SEQ ID NO: 1175587 - RNA, 19 nt, Artificial Sequence
  Description of Artificial Sequence: Synthetic oligonucleotide
auagaaaagggucuagaag

SEQ ID NO: 1175588 - RNA, 19 nt, Artificial Sequence
  Description of Artificial Sequence: Synthetic oligonucleotide
uuugaaguucacaacgccc

SEQ ID NO: 1175589 - RNA, 19 nt, Artificial Sequence
  Description of Artificial Sequence: Synthetic oligonucleotide
cuugauagccuuuacucgg

SEQ ID NO: 1175590 - RNA, 19 nt, Artificial Sequence
  Description of Artificial Sequence: Synthetic oligonucleotide
aacugagacaugaugcugc

SEQ ID NO: 1175591 - RNA, 19 nt, Artificial Sequence
  Description of Artificial Sequence: Synthetic oligonucleotide
aguccuuuggcccugugac

SEQ ID NO: 1175592 - RNA, 19 nt, Artificial Sequence
  Description of Artificial Sequence: Synthetic oligonucleotide
aaacaguuugcauuaggcu

SEQ ID NO: 1175593 - RNA, 19 nt, Artificial Sequence
  Description of Artificial Sequence: Synthetic oligonucleotide
gucucuauggccuccaagg

SEQ ID NO: 1175594 - RNA, 19 nt, Artificial Sequence
  Description of Artificial Sequence: Synthetic oligonucleotide
guuugcauuaggcugauac

SEQ ID NO: 1175595 - RNA, 19 nt, Artificial Sequence
  Description of Artificial Sequence: Synthetic oligonucleotide
cuagcuuggugucugagcg

SEQ ID NO: 1175596 - RNA, 19 nt, Artificial Sequence
  Description of Artificial Sequence: Synthetic oligonucleotide
acuugauagccuuuacucg

SEQ ID NO: 1175597 - RNA, 19 nt, Artificial Sequence
  Description of Artificial Sequence: Synthetic oligonucleotide
uuaauugucuuacaguguu

SEQ ID NO: 1175598 - RNA, 19 nt, Artificial Sequence
  Description of Artificial Sequence: Synthetic oligonucleotide
uaggcugauaccauguuug

SEQ ID NO: 1175599 - RNA, 19 nt, Artificial Sequence
  Description of Artificial Sequence: Synthetic oligonucleotide
agaggcaucccugagacac

SEQ ID NO: 1175600 - RNA, 19 nt, Artificial Sequence
  Description of Artificial Sequence: Synthetic oligonucleotide
uauucuauauauucauaga

SEQ ID NO: 1175601 - RNA, 19 nt, Artificial Sequence
  Description of Artificial Sequence: Synthetic oligonucleotide
uccguaucuguuuuggcgg

SEQ ID NO: 1175602 - RNA, 19 nt, Artificial Sequence
  Description of Artificial Sequence: Synthetic oligonucleotide
ugucuuacaguguuugugc

SEQ ID NO: 1175603 - RNA, 19 nt, Artificial Sequence
  Description of Artificial Sequence: Synthetic oligonucleotide
gaaaacaguuugcauuagg

SEQ ID NO: 1175604 - RNA, 19 nt, Artificial Sequence
  Description of Artificial Sequence: Synthetic oligonucleotide
aaaagaagucgccugucca

SEQ ID NO: 1175605 - RNA, 19 nt, Artificial Sequence
  Description of Artificial Sequence: Synthetic oligonucleotide
gcuuuugaaguucacaacg

SEQ ID NO: 1175606 - RNA, 19 nt, Artificial Sequence
  Description of Artificial Sequence: Synthetic oligonucleotide
auagccuuuacucggaaca

SEQ ID NO: 1175607 - RNA, 19 nt, Artificial Sequence
  Description of Artificial Sequence: Synthetic oligonucleotide
auauaacaguauucauucc

SEQ ID NO: 1175608 - RNA, 19 nt, Artificial Sequence
  Description of Artificial Sequence: Synthetic oligonucleotide
uucacaacgcccuugggga

SEQ ID NO: 1175609 - RNA, 19 nt, Artificial Sequence
  Description of Artificial Sequence: Synthetic oligonucleotide
ugacauacguguauauuug

SEQ ID NO: 1175610 - RNA, 19 nt, Artificial Sequence
  Description of Artificial Sequence: Synthetic oligonucleotide
aaaggaacguguaggcacc

SEQ ID NO: 1175611 - RNA, 19 nt, Artificial Sequence
  Description of Artificial Sequence: Synthetic oligonucleotide
ugugggguguugaaggcgg

SEQ ID NO: 1175612 - RNA, 19 nt, Artificial Sequence
  Description of Artificial Sequence: Synthetic oligonucleotide
cauacguguauauuuguug

SEQ ID NO: 1175613 - RNA, 19 nt, Artificial Sequence
  Description of Artificial Sequence: Synthetic oligonucleotide
caaaugagucucuauggcc

SEQ ID NO: 1175614 - RNA, 19 nt, Artificial Sequence
  Description of Artificial Sequence: Synthetic oligonucleotide
uuuaauugucuuacagugu

SEQ ID NO: 1175615 - RNA, 19 nt, Artificial Sequence
  Description of Artificial Sequence: Synthetic oligonucleotide
auauaguuaagcgcaaaag

SEQ ID NO: 1175616 - RNA, 19 nt, Artificial Sequence
  Description of Artificial Sequence: Synthetic oligonucleotide
aaaugagucucuauggccu

SEQ ID NO: 1175617 - RNA, 19 nt, Artificial Sequence
  Description of Artificial Sequence: Synthetic oligonucleotide
cuugugauccagaacgccc

SEQ ID NO: 1175618 - RNA, 19 nt, Artificial Sequence
  Description of Artificial Sequence: Synthetic oligonucleotide
aguauggggacgcagaaau

SEQ ID NO: 1175619 - RNA, 19 nt, Artificial Sequence
  Description of Artificial Sequence: Synthetic oligonucleotide
guucacaacgcccuugggg

SEQ ID NO: 1175620 - RNA, 19 nt, Artificial Sequence
  Description of Artificial Sequence: Synthetic oligonucleotide
aaugauggucgcuccacug

SEQ ID NO: 1175621 - RNA, 19 nt, Artificial Sequence
  Description of Artificial Sequence: Synthetic oligonucleotide
aaugagucucuauggccuc

SEQ ID NO: 1175622 - RNA, 19 nt, Artificial Sequence
  Description of Artificial Sequence: Synthetic oligonucleotide
auaguuaagcgcaaaagca

SEQ ID NO: 1175623 - RNA, 19 nt, Artificial Sequence
  Description of Artificial Sequence: Synthetic oligonucleotide
auacguguauauuuguuga

SEQ ID NO: 1175624 - RNA, 19 nt, Artificial Sequence
  Description of Artificial Sequence: Synthetic oligonucleotide
aaaguagaggcaucccuga

SEQ ID NO: 1175625 - RNA, 19 nt, Artificial Sequence
  Description of Artificial Sequence: Synthetic oligonucleotide
auacgcaaaccuccagucc

SEQ ID NO: 1175626 - RNA, 19 nt, Artificial Sequence
  Description of Artificial Sequence: Synthetic oligonucleotide
ucgccuguccaacacaucc

SEQ ID NO: 1175627 - RNA, 19 nt, Artificial Sequence
  Description of Artificial Sequence: Synthetic oligonucleotide
cuccguaucuguuuuggcg

SEQ ID NO: 1175628 - RNA, 19 nt, Artificial Sequence
  Description of Artificial Sequence: Synthetic oligonucleotide
ugaaccagaaggccucagg

SEQ ID NO: 1175629 - RNA, 19 nt, Artificial Sequence
  Description of Artificial Sequence: Synthetic oligonucleotide
aaagagguucacaauauau

SEQ ID NO: 1175630 - RNA, 19 nt, Artificial Sequence
  Description of Artificial Sequence: Synthetic oligonucleotide
gagguuagaggguaucaag

SEQ ID NO: 1175631 - RNA, 19 nt, Artificial Sequence
  Description of Artificial Sequence: Synthetic oligonucleotide
uugcauuaggcugauacca

SEQ ID NO: 1175632 - RNA, 19 nt, Artificial Sequence
  Description of Artificial Sequence: Synthetic oligonucleotide
uguguguguguguucaagc

SEQ ID NO: 1175633 - RNA, 19 nt, Artificial Sequence
  Description of Artificial Sequence: Synthetic oligonucleotide
acauucaccaaaugagucu

SEQ ID NO: 1175634 - RNA, 19 nt, Artificial Sequence
  Description of Artificial Sequence: Synthetic oligonucleotide
uauauucuauauauucaua

SEQ ID NO: 1175635 - RNA, 19 nt, Artificial Sequence
  Description of Artificial Sequence: Synthetic oligonucleotide
uguuuuggcggacaucaac

SEQ ID NO: 1175636 - RNA, 19 nt, Artificial Sequence
  Description of Artificial Sequence: Synthetic oligonucleotide
aguuaagcgcaaaagcagg

SEQ ID NO: 1175637 - RNA, 19 nt, Artificial Sequence
  Description of Artificial Sequence: Synthetic oligonucleotide
aaagaagucgccuguccaa

SEQ ID NO: 1175638 - RNA, 19 nt, Artificial Sequence
  Description of Artificial Sequence: Synthetic oligonucleotide
uugugauccagaacgcccc

SEQ ID NO: 1175639 - RNA, 19 nt, Artificial Sequence
  Description of Artificial Sequence: Synthetic oligonucleotide
ucgccacucagcaauguag

SEQ ID NO: 1175640 - RNA, 19 nt, Artificial Sequence
  Description of Artificial Sequence: Synthetic oligonucleotide
aacucccuaaaccaagaaa

SEQ ID NO: 1175641 - RNA, 19 nt, Artificial Sequence
  Description of Artificial Sequence: Synthetic oligonucleotide
ugccagagaguucugugag

SEQ ID NO: 1175642 - RNA, 19 nt, Artificial Sequence
  Description of Artificial Sequence: Synthetic oligonucleotide
gauacgcaaaccuccaguc

SEQ ID NO: 1175643 - RNA, 19 nt, Artificial Sequence
  Description of Artificial Sequence: Synthetic oligonucleotide
aagaagucgccuguccaac

SEQ ID NO: 1175644 - RNA, 19 nt, Artificial Sequence
  Description of Artificial Sequence: Synthetic oligonucleotide
aguuggucagugguggugc

SEQ ID NO: 1175645 - RNA, 19 nt, Artificial Sequence
  Description of Artificial Sequence: Synthetic oligonucleotide
gaaguugaaccagaaggcc

SEQ ID NO: 1175646 - RNA, 19 nt, Artificial Sequence
  Description of Artificial Sequence: Synthetic oligonucleotide
agcaaaaccaacucccuaa

SEQ ID NO: 1175647 - RNA, 19 nt, Artificial Sequence
  Description of Artificial Sequence: Synthetic oligonucleotide
aaguccuccaacugagaca

SEQ ID NO: 1175648 - RNA, 19 nt, Artificial Sequence
  Description of Artificial Sequence: Synthetic oligonucleotide
auaacaguauucauuccag

SEQ ID NO: 1175649 - RNA, 19 nt, Artificial Sequence
  Description of Artificial Sequence: Synthetic oligonucleotide
cagaaaggaacguguaggc

SEQ ID NO: 1175650 - RNA, 19 nt, Artificial Sequence
  Description of Artificial Sequence: Synthetic oligonucleotide
guagaggcaucccugagac

SEQ ID NO: 1175651 - RNA, 19 nt, Artificial Sequence
  Description of Artificial Sequence: Synthetic oligonucleotide
cagagagcgggauaguggc

SEQ ID NO: 1175652 - RNA, 19 nt, Artificial Sequence
  Description of Artificial Sequence: Synthetic oligonucleotide
ucuauggccuccaaggcuu

SEQ ID NO: 1175653 - RNA, 19 nt, Artificial Sequence
  Description of Artificial Sequence: Synthetic oligonucleotide
acucggaacaccucuucuc

SEQ ID NO: 1175654 - RNA, 19 nt, Artificial Sequence
  Description of Artificial Sequence: Synthetic oligonucleotide
ucagcaauguaggucagac

SEQ ID NO: 1175655 - RNA, 19 nt, Artificial Sequence
  Description of Artificial Sequence: Synthetic oligonucleotide
ugauggucgcuccacugag

SEQ ID NO: 1175656 - RNA, 19 nt, Artificial Sequence
  Description of Artificial Sequence: Synthetic oligonucleotide
ucucggccgaaguugaacc

SEQ ID NO: 1175657 - RNA, 19 nt, Artificial Sequence
  Description of Artificial Sequence: Synthetic oligonucleotide
guuuuggcggacaucaacc

SEQ ID NO: 1175658 - RNA, 19 nt, Artificial Sequence
  Description of Artificial Sequence: Synthetic oligonucleotide
cauggaaagagguucacaa

SEQ ID NO: 1175659 - RNA, 19 nt, Artificial Sequence
  Description of Artificial Sequence: Synthetic oligonucleotide
agcucucgguaguaggccc

SEQ ID NO: 1175660 - RNA, 19 nt, Artificial Sequence
  Description of Artificial Sequence: Synthetic oligonucleotide
uaagcgcaaaagcagguua

SEQ ID NO: 1175661 - RNA, 19 nt, Artificial Sequence
  Description of Artificial Sequence: Synthetic oligonucleotide
ugagaacggucccggaucc

SEQ ID NO: 1175662 - RNA, 19 nt, Artificial Sequence
  Description of Artificial Sequence: Synthetic oligonucleotide
agcugucuugcacccaggc

SEQ ID NO: 1175663 - RNA, 19 nt, Artificial Sequence
  Description of Artificial Sequence: Synthetic oligonucleotide
aaguagaggcaucccugag

SEQ ID NO: 1175664 - RNA, 19 nt, Artificial Sequence
  Description of Artificial Sequence: Synthetic oligonucleotide
aucaagggaaucaaugaug

SEQ ID NO: 1175665 - RNA, 19 nt, Artificial Sequence
  Description of Artificial Sequence: Synthetic oligonucleotide
gacuugaucaaauauucau

SEQ ID NO: 1175666 - RNA, 19 nt, Artificial Sequence
  Description of Artificial Sequence: Synthetic oligonucleotide
uuuuggcggacaucaacca

SEQ ID NO: 1175667 - RNA, 19 nt, Artificial Sequence
  Description of Artificial Sequence: Synthetic oligonucleotide
agaccggcuugccagagag

SEQ ID NO: 1175668 - RNA, 19 nt, Artificial Sequence
  Description of Artificial Sequence: Synthetic oligonucleotide
aaguugaaccagaaggccu

SEQ ID NO: 1175669 - RNA, 19 nt, Artificial Sequence
  Description of Artificial Sequence: Synthetic oligonucleotide
ugacaggcaggucugccgc

SEQ ID NO: 1175670 - RNA, 19 nt, Artificial Sequence
  Description of Artificial Sequence: Synthetic oligonucleotide
gcggucauaggacucaugg

SEQ ID NO: 1175671 - RNA, 19 nt, Artificial Sequence
  Description of Artificial Sequence: Synthetic oligonucleotide
cucggaacaccucuucucc

SEQ ID NO: 1175672 - RNA, 19 nt, Artificial Sequence
  Description of Artificial Sequence: Synthetic oligonucleotide
aggaaaagaagucgccugu

SEQ ID NO: 1175673 - RNA, 19 nt, Artificial Sequence
  Description of Artificial Sequence: Synthetic oligonucleotide
aggagagacauucaccaaa

SEQ ID NO: 1175674 - RNA, 19 nt, Artificial Sequence
  Description of Artificial Sequence: Synthetic oligonucleotide
uguggugugugugugugug

SEQ ID NO: 1175675 - RNA, 19 nt, Artificial Sequence
  Description of Artificial Sequence: Synthetic oligonucleotide
aagagguucacaauauaua

SEQ ID NO: 1175676 - RNA, 19 nt, Artificial Sequence
  Description of Artificial Sequence: Synthetic oligonucleotide
guccgagugauugacaggc

SEQ ID NO: 1175677 - RNA, 19 nt, Artificial Sequence
  Description of Artificial Sequence: Synthetic oligonucleotide
ucccuaaaccaagaaagga

SEQ ID NO: 1175678 - RNA, 19 nt, Artificial Sequence
  Description of Artificial Sequence: Synthetic oligonucleotide
guucuggugaucugggcug

SEQ ID NO: 1175679 - RNA, 19 nt, Artificial Sequence
  Description of Artificial Sequence: Synthetic oligonucleotide
uccuccaacugagacauga

SEQ ID NO: 1175680 - RNA, 19 nt, Artificial Sequence
  Description of Artificial Sequence: Synthetic oligonucleotide
caaagaugcuucuccacuc

SEQ ID NO: 1175681 - RNA, 19 nt, Artificial Sequence
  Description of Artificial Sequence: Synthetic oligonucleotide
cauagguacauguagcucu

SEQ ID NO: 1175682 - RNA, 19 nt, Artificial Sequence
  Description of Artificial Sequence: Synthetic oligonucleotide
caaguccuccaacugagac

SEQ ID NO: 1175683 - RNA, 19 nt, Artificial Sequence
  Description of Artificial Sequence: Synthetic oligonucleotide
gacagcaaguauggggacg

SEQ ID NO: 1175684 - RNA, 19 nt, Artificial Sequence
  Description of Artificial Sequence: Synthetic oligonucleotide
cauguagcucuccaccacc

SEQ ID NO: 1175685 - RNA, 19 nt, Artificial Sequence
  Description of Artificial Sequence: Synthetic oligonucleotide
uguccgagugauugacagg

SEQ ID NO: 1175686 - RNA, 19 nt, Artificial Sequence
  Description of Artificial Sequence: Synthetic oligonucleotide
aauauauaguuaagcgcaa

SEQ ID NO: 1175687 - RNA, 19 nt, Artificial Sequence
  Description of Artificial Sequence: Synthetic oligonucleotide
gcucccaugagguuagagg

SEQ ID NO: 1175688 - RNA, 19 nt, Artificial Sequence
  Description of Artificial Sequence: Synthetic oligonucleotide
ucugagcggucauaggacu

SEQ ID NO: 1175689 - RNA, 19 nt, Artificial Sequence
  Description of Artificial Sequence: Synthetic oligonucleotide
gaggguaucaagggaauca

SEQ ID NO: 1175690 - RNA, 19 nt, Artificial Sequence
  Description of Artificial Sequence: Synthetic oligonucleotide
ugugugguguguguggugu

SEQ ID NO: 1175691 - RNA, 19 nt, Artificial Sequence
  Description of Artificial Sequence: Synthetic oligonucleotide
uacguguauauuuguugac

SEQ ID NO: 1175692 - RNA, 19 nt, Artificial Sequence
  Description of Artificial Sequence: Synthetic oligonucleotide
ugcaaagaccggcuugcca

SEQ ID NO: 1175693 - RNA, 19 nt, Artificial Sequence
  Description of Artificial Sequence: Synthetic oligonucleotide
ucuugugauccagaacgcc

SEQ ID NO: 1175694 - RNA, 19 nt, Artificial Sequence
  Description of Artificial Sequence: Synthetic oligonucleotide
cagguuauaagaaaacagu

SEQ ID NO: 1175695 - RNA, 19 nt, Artificial Sequence
  Description of Artificial Sequence: Synthetic oligonucleotide
uguguggugugugugugug

SEQ ID NO: 1175696 - RNA, 19 nt, Artificial Sequence
  Description of Artificial Sequence: Synthetic oligonucleotide
gugauugacaggcaggucu

SEQ ID NO: 1175697 - RNA, 19 nt, Artificial Sequence
  Description of Artificial Sequence: Synthetic oligonucleotide
aucuguccgagugauugac

SEQ ID NO: 1175698 - RNA, 19 nt, Artificial Sequence
  Description of Artificial Sequence: Synthetic oligonucleotide
uguuugugcaggugugugu

SEQ ID NO: 1175699 - RNA, 19 nt, Artificial Sequence
  Description of Artificial Sequence: Synthetic oligonucleotide
gauagccuuuacucggaac

SEQ ID NO: 1175700 - RNA, 19 nt, Artificial Sequence
  Description of Artificial Sequence: Synthetic oligonucleotide
agucucuauggccuccaag

SEQ ID NO: 1175701 - RNA, 19 nt, Artificial Sequence
  Description of Artificial Sequence: Synthetic oligonucleotide
guguguguggugugugugg

SEQ ID NO: 1175702 - RNA, 19 nt, Artificial Sequence
  Description of Artificial Sequence: Synthetic oligonucleotide
uggggacgcagaaauuccc

SEQ ID NO: 1175703 - RNA, 19 nt, Artificial Sequence
  Description of Artificial Sequence: Synthetic oligonucleotide
cauucaccaaaugagucuc

SEQ ID NO: 1175704 - RNA, 19 nt, Artificial Sequence
  Description of Artificial Sequence: Synthetic oligonucleotide
ggaucuguccgagugauug

SEQ ID NO: 1175705 - RNA, 19 nt, Artificial Sequence
  Description of Artificial Sequence: Synthetic oligonucleotide
agccuuuacucggaacacc

SEQ ID NO: 1175706 - RNA, 19 nt, Artificial Sequence
  Description of Artificial Sequence: Synthetic oligonucleotide
uggauacgcaaaccuccag

SEQ ID NO: 1175707 - RNA, 19 nt, Artificial Sequence
  Description of Artificial Sequence: Synthetic oligonucleotide
uccugucuccucacagagg

SEQ ID NO: 1175708 - RNA, 19 nt, Artificial Sequence
  Description of Artificial Sequence: Synthetic oligonucleotide
gaagucgccuguccaacac

SEQ ID NO: 1175709 - RNA, 19 nt, Artificial Sequence
  Description of Artificial Sequence: Synthetic oligonucleotide
uacucggaacaccucuucu

SEQ ID NO: 1175710 - RNA, 19 nt, Artificial Sequence
  Description of Artificial Sequence: Synthetic oligonucleotide
ugcauuaggcugauaccau

SEQ ID NO: 1175711 - RNA, 19 nt, Artificial Sequence
  Description of Artificial Sequence: Synthetic oligonucleotide
uccgauguagcggauguuc

SEQ ID NO: 1175712 - RNA, 19 nt, Artificial Sequence
  Description of Artificial Sequence: Synthetic oligonucleotide
agguuauaagaaaacaguu

SEQ ID NO: 1175713 - RNA, 19 nt, Artificial Sequence
  Description of Artificial Sequence: Synthetic oligonucleotide
agggucuagaagaaaauau

SEQ ID NO: 1175714 - RNA, 19 nt, Artificial Sequence
  Description of Artificial Sequence: Synthetic oligonucleotide
cucucgcucagcugugugg

SEQ ID NO: 1175715 - RNA, 19 nt, Artificial Sequence
  Description of Artificial Sequence: Synthetic oligonucleotide
acguguauauuuguugaca

SEQ ID NO: 1175716 - RNA, 19 nt, Artificial Sequence
  Description of Artificial Sequence: Synthetic oligonucleotide
cacgaugggccuucugucc

SEQ ID NO: 1175717 - RNA, 19 nt, Artificial Sequence
  Description of Artificial Sequence: Synthetic oligonucleotide
uuuuagccuccguaucugu

SEQ ID NO: 1175718 - RNA, 19 nt, Artificial Sequence
  Description of Artificial Sequence: Synthetic oligonucleotide
uguguguguucaagcaaaa

SEQ ID NO: 1175719 - RNA, 19 nt, Artificial Sequence
  Description of Artificial Sequence: Synthetic oligonucleotide
uuacucggaacaccucuuc

SEQ ID NO: 1175720 - RNA, 19 nt, Artificial Sequence
  Description of Artificial Sequence: Synthetic oligonucleotide
ugauaccauguuuguaaaa

SEQ ID NO: 1175721 - RNA, 19 nt, Artificial Sequence
  Description of Artificial Sequence: Synthetic oligonucleotide
cugagaacggucccggauc

SEQ ID NO: 1175722 - RNA, 19 nt, Artificial Sequence
  Description of Artificial Sequence: Synthetic oligonucleotide
uguguguggugugugugug

SEQ ID NO: 1175723 - RNA, 19 nt, Artificial Sequence
  Description of Artificial Sequence: Synthetic oligonucleotide
auagguacauguagcucuc

SEQ ID NO: 1175724 - RNA, 19 nt, Artificial Sequence
  Description of Artificial Sequence: Synthetic oligonucleotide
ccaaaugagucucuauggc

SEQ ID NO: 1175725 - RNA, 19 nt, Artificial Sequence
  Description of Artificial Sequence: Synthetic oligonucleotide
aacggucccggaucccaag

SEQ ID NO: 1175726 - RNA, 19 nt, Artificial Sequence
  Description of Artificial Sequence: Synthetic oligonucleotide
cgaaguugaaccagaaggc

SEQ ID NO: 1175727 - RNA, 19 nt, Artificial Sequence
  Description of Artificial Sequence: Synthetic oligonucleotide
uggcauguucuggugaucu

SEQ ID NO: 1175728 - RNA, 19 nt, Artificial Sequence
  Description of Artificial Sequence: Synthetic oligonucleotide
uggugugugugugugugug

SEQ ID NO: 1175729 - RNA, 19 nt, Artificial Sequence
  Description of Artificial Sequence: Synthetic oligonucleotide
uagcuuggugucugagcgg

SEQ ID NO: 1175730 - RNA, 19 nt, Artificial Sequence
  Description of Artificial Sequence: Synthetic oligonucleotide
uccagagagcgggauagug

SEQ ID NO: 1175731 - RNA, 19 nt, Artificial Sequence
  Description of Artificial Sequence: Synthetic oligonucleotide
aagucgccuguccaacaca

SEQ ID NO: 1175732 - RNA, 19 nt, Artificial Sequence
  Description of Artificial Sequence: Synthetic oligonucleotide
ugagguuagaggguaucaa

SEQ ID NO: 1175733 - RNA, 19 nt, Artificial Sequence
  Description of Artificial Sequence: Synthetic oligonucleotide
guguguguguguucaagca

SEQ ID NO: 1175734 - RNA, 19 nt, Artificial Sequence
  Description of Artificial Sequence: Synthetic oligonucleotide
uagaggguaucaagggaau

SEQ ID NO: 1175735 - RNA, 19 nt, Artificial Sequence
  Description of Artificial Sequence: Synthetic oligonucleotide
uuuagccuccguaucuguu

SEQ ID NO: 1175736 - RNA, 19 nt, Artificial Sequence
  Description of Artificial Sequence: Synthetic oligonucleotide
augagucucuauggccucc

SEQ ID NO: 1175737 - RNA, 19 nt, Artificial Sequence
  Description of Artificial Sequence: Synthetic oligonucleotide
aaagaccggcuugccagag

SEQ ID NO: 1175738 - RNA, 19 nt, Artificial Sequence
  Description of Artificial Sequence: Synthetic oligonucleotide
gaaagagguucacaauaua

SEQ ID NO: 1175739 - RNA, 19 nt, Artificial Sequence
  Description of Artificial Sequence: Synthetic oligonucleotide
acaacgcccuuggggaugc

SEQ ID NO: 1175740 - RNA, 19 nt, Artificial Sequence
  Description of Artificial Sequence: Synthetic oligonucleotide
gucccggaucccaagaaag

SEQ ID NO: 1175741 - RNA, 19 nt, Artificial Sequence
  Description of Artificial Sequence: Synthetic oligonucleotide
ucggccgaaguugaaccag

SEQ ID NO: 1175742 - RNA, 19 nt, Artificial Sequence
  Description of Artificial Sequence: Synthetic oligonucleotide
ucaccaaaugagucucuau

SEQ ID NO: 1175743 - RNA, 19 nt, Artificial Sequence
  Description of Artificial Sequence: Synthetic oligonucleotide
ugugugugguguguguggu

SEQ ID NO: 1175744 - RNA, 19 nt, Artificial Sequence
  Description of Artificial Sequence: Synthetic oligonucleotide
cugacauacguguauauuu

SEQ ID NO: 1175745 - RNA, 19 nt, Artificial Sequence
  Description of Artificial Sequence: Synthetic oligonucleotide
caguccuccgauguagcgg

SEQ ID NO: 1175746 - RNA, 19 nt, Artificial Sequence
  Description of Artificial Sequence: Synthetic oligonucleotide
agcaaguauggggacgcag

SEQ ID NO: 1175747 - RNA, 19 nt, Artificial Sequence
  Description of Artificial Sequence: Synthetic oligonucleotide
cagcaauguaggucagacc

SEQ ID NO: 1175748 - RNA, 19 nt, Artificial Sequence
  Description of Artificial Sequence: Synthetic oligonucleotide
cucauggcauguucuggug

SEQ ID NO: 1175749 - RNA, 19 nt, Artificial Sequence
  Description of Artificial Sequence: Synthetic oligonucleotide
ggucuagaagaaaauauaa

SEQ ID NO: 1175750 - RNA, 19 nt, Artificial Sequence
  Description of Artificial Sequence: Synthetic oligonucleotide
ugugugugugugugugugu

SEQ ID NO: 1175751 - RNA, 19 nt, Artificial Sequence
  Description of Artificial Sequence: Synthetic oligonucleotide
ugccgccauagguacaugu

SEQ ID NO: 1175752 - RNA, 19 nt, Artificial Sequence
  Description of Artificial Sequence: Synthetic oligonucleotide
ugagagcaguccuccgaug

SEQ ID NO: 1175753 - RNA, 19 nt, Artificial Sequence
  Description of Artificial Sequence: Synthetic oligonucleotide
agugauugacaggcagguc

SEQ ID NO: 1175754 - RNA, 19 nt, Artificial Sequence
  Description of Artificial Sequence: Synthetic oligonucleotide
gaaggcgggcagcaguuuc

SEQ ID NO: 1175755 - RNA, 19 nt, Artificial Sequence
  Description of Artificial Sequence: Synthetic oligonucleotide
cuuuacucggaacaccucu

SEQ ID NO: 1175756 - RNA, 19 nt, Artificial Sequence
  Description of Artificial Sequence: Synthetic oligonucleotide
augagguuagaggguauca

SEQ ID NO: 1175757 - RNA, 19 nt, Artificial Sequence
  Description of Artificial Sequence: Synthetic oligonucleotide
agaagucgccuguccaaca

SEQ ID NO: 1175758 - RNA, 19 nt, Artificial Sequence
  Description of Artificial Sequence: Synthetic oligonucleotide
ugauagccuuuacucggaa

SEQ ID NO: 1175759 - RNA, 19 nt, Artificial Sequence
  Description of Artificial Sequence: Synthetic oligonucleotide
uaggcaccggggaccacag

SEQ ID NO: 1175760 - RNA, 19 nt, Artificial Sequence
  Description of Artificial Sequence: Synthetic oligonucleotide
ugucagguagaaggcugag

SEQ ID NO: 1175761 - RNA, 19 nt, Artificial Sequence
  Description of Artificial Sequence: Synthetic oligonucleotide
uuaagcgcaaaagcagguu

SEQ ID NO: 1175762 - RNA, 19 nt, Artificial Sequence
  Description of Artificial Sequence: Synthetic oligonucleotide
gucuuacaguguuugugca

SEQ ID NO: 1175763 - RNA, 19 nt, Artificial Sequence
  Description of Artificial Sequence: Synthetic oligonucleotide
cacgcucccaugagguuag

SEQ ID NO: 1175764 - RNA, 19 nt, Artificial Sequence
  Description of Artificial Sequence: Synthetic oligonucleotide
gugugugugugugugugug

SEQ ID NO: 1175765 - RNA, 19 nt, Artificial Sequence
  Description of Artificial Sequence: Synthetic oligonucleotide
accgcuuuugaaguucaca

SEQ ID NO: 1175766 - RNA, 19 nt, Artificial Sequence
  Description of Artificial Sequence: Synthetic oligonucleotide
gacauacguguauauuugu

SEQ ID NO: 1175767 - RNA, 19 nt, Artificial Sequence
  Description of Artificial Sequence: Synthetic oligonucleotide
ugugguguguguggugugu

SEQ ID NO: 1175768 - RNA, 19 nt, Artificial Sequence
  Description of Artificial Sequence: Synthetic oligonucleotide
ugcagucaguuggucagug

SEQ ID NO: 1175769 - RNA, 19 nt, Artificial Sequence
  Description of Artificial Sequence: Synthetic oligonucleotide
guauauuuguugacaugga

SEQ ID NO: 1175770 - RNA, 19 nt, Artificial Sequence
  Description of Artificial Sequence: Synthetic oligonucleotide
ucggaacaccucuucuccu

SEQ ID NO: 1175771 - RNA, 19 nt, Artificial Sequence
  Description of Artificial Sequence: Synthetic oligonucleotide
gcggacaucaaccaggacu

SEQ ID NO: 1175772 - RNA, 19 nt, Artificial Sequence
  Description of Artificial Sequence: Synthetic oligonucleotide
gaucuguccgagugauuga

SEQ ID NO: 1175773 - RNA, 19 nt, Artificial Sequence
  Description of Artificial Sequence: Synthetic oligonucleotide
gagagcaguccuccgaugu

SEQ ID NO: 1175774 - RNA, 19 nt, Artificial Sequence
  Description of Artificial Sequence: Synthetic oligonucleotide
guguguguguguguucaag

SEQ ID NO: 1175775 - RNA, 19 nt, Artificial Sequence
  Description of Artificial Sequence: Synthetic oligonucleotide
uguguguguguguguguuc

SEQ ID NO: 1175776 - RNA, 19 nt, Artificial Sequence
  Description of Artificial Sequence: Synthetic oligonucleotide
aggcaucccugagacacgg

SEQ ID NO: 1175777 - RNA, 19 nt, Artificial Sequence
  Description of Artificial Sequence: Synthetic oligonucleotide
uagccuuuacucggaacac

SEQ ID NO: 1175778 - RNA, 19 nt, Artificial Sequence
  Description of Artificial Sequence: Synthetic oligonucleotide
aggcugauaccauguuugu

SEQ ID NO: 1175779 - RNA, 19 nt, Artificial Sequence
  Description of Artificial Sequence: Synthetic oligonucleotide
aagaccggcuugccagaga

SEQ ID NO: 1175780 - RNA, 19 nt, Artificial Sequence
  Description of Artificial Sequence: Synthetic oligonucleotide
cugugggguguugaaggcg

SEQ ID NO: 1175781 - RNA, 19 nt, Artificial Sequence
  Description of Artificial Sequence: Synthetic oligonucleotide
uccgagugauugacaggca

SEQ ID NO: 1175782 - RNA, 19 nt, Artificial Sequence
  Description of Artificial Sequence: Synthetic oligonucleotide
auaguggcuguguuuucuu

SEQ ID NO: 1175783 - RNA, 19 nt, Artificial Sequence
  Description of Artificial Sequence: Synthetic oligonucleotide
aguguuugugcaggugugu

SEQ ID NO: 1175784 - RNA, 19 nt, Artificial Sequence
  Description of Artificial Sequence: Synthetic oligonucleotide
gaggccgaagggcuuguca

SEQ ID NO: 1175785 - RNA, 19 nt, Artificial Sequence
  Description of Artificial Sequence: Synthetic oligonucleotide
cauuaggcugauaccaugu

SEQ ID NO: 1175786 - RNA, 19 nt, Artificial Sequence
  Description of Artificial Sequence: Synthetic oligonucleotide
uccugucagguagaaggcu

SEQ ID NO: 1175787 - RNA, 19 nt, Artificial Sequence
  Description of Artificial Sequence: Synthetic oligonucleotide
cauccguccagggucugcc

SEQ ID NO: 1175788 - RNA, 19 nt, Artificial Sequence
  Description of Artificial Sequence: Synthetic oligonucleotide
agaacggucccggauccca

SEQ ID NO: 1175789 - RNA, 19 nt, Artificial Sequence
  Description of Artificial Sequence: Synthetic oligonucleotide
guguguguguguguguuca

SEQ ID NO: 1175790 - RNA, 19 nt, Artificial Sequence
  Description of Artificial Sequence: Synthetic oligonucleotide
acauccguccagggucugc

SEQ ID NO: 1175791 - RNA, 19 nt, Artificial Sequence
  Description of Artificial Sequence: Synthetic oligonucleotide
ugguguguguggugugugu

SEQ ID NO: 1175792 - RNA, 19 nt, Artificial Sequence
  Description of Artificial Sequence: Synthetic oligonucleotide
gagugauugacaggcaggu

SEQ ID NO: 1175793 - RNA, 19 nt, Artificial Sequence
  Description of Artificial Sequence: Synthetic oligonucleotide
ccggaucccaagaaaguag

SEQ ID NO: 1175794 - RNA, 19 nt, Artificial Sequence
  Description of Artificial Sequence: Synthetic oligonucleotide
cugagcggucauaggacuc

SEQ ID NO: 1175795 - RNA, 19 nt, Artificial Sequence
  Description of Artificial Sequence: Synthetic oligonucleotide
cuucacgcucccaugaggu

SEQ ID NO: 1175796 - RNA, 19 nt, Artificial Sequence
  Description of Artificial Sequence: Synthetic oligonucleotide
acauacguguauauuuguu

SEQ ID NO: 1175797 - RNA, 19 nt, Artificial Sequence
  Description of Artificial Sequence: Synthetic oligonucleotide
aggguaucaagggaaucaa

SEQ ID NO: 1175798 - RNA, 19 nt, Artificial Sequence
  Description of Artificial Sequence: Synthetic oligonucleotide
accggcuugccagagaguu

SEQ ID NO: 1175799 - RNA, 19 nt, Artificial Sequence
  Description of Artificial Sequence: Synthetic oligonucleotide
cgagugauugacaggcagg

SEQ ID NO: 1175800 - RNA, 19 nt, Artificial Sequence
  Description of Artificial Sequence: Synthetic oligonucleotide
guagaggccgaagggcuug

SEQ ID NO: 1175801 - RNA, 19 nt, Artificial Sequence
  Description of Artificial Sequence: Synthetic oligonucleotide
agguguguguggugugugu

SEQ ID NO: 1175802 - RNA, 19 nt, Artificial Sequence
  Description of Artificial Sequence: Synthetic oligonucleotide
agggucugcccacgauggg

SEQ ID NO: 1175803 - RNA, 19 nt, Artificial Sequence
  Description of Artificial Sequence: Synthetic oligonucleotide
caccaagggcaaucaugcc

SEQ ID NO: 1175804 - RNA, 19 nt, Artificial Sequence
  Description of Artificial Sequence: Synthetic oligonucleotide
uggcccugugacagcaagu

SEQ ID NO: 1175805 - RNA, 19 nt, Artificial Sequence
  Description of Artificial Sequence: Synthetic oligonucleotide
gcaguccuccgauguagcg

SEQ ID NO: 1175806 - RNA, 19 nt, Artificial Sequence
  Description of Artificial Sequence: Synthetic oligonucleotide
cauucagguggaagcuguc

SEQ ID NO: 1175807 - RNA, 19 nt, Artificial Sequence
  Description of Artificial Sequence: Synthetic oligonucleotide
agaugcuucuccacucaca

SEQ ID NO: 1175808 - RNA, 19 nt, Artificial Sequence
  Description of Artificial Sequence: Synthetic oligonucleotide
caccggggaccacagcccg

SEQ ID NO: 1175809 - RNA, 19 nt, Artificial Sequence
  Description of Artificial Sequence: Synthetic oligonucleotide
cuaccgcuuuugaaguuca

SEQ ID NO: 1175810 - RNA, 19 nt, Artificial Sequence
  Description of Artificial Sequence: Synthetic oligonucleotide
cccuaaaccaagaaaggaa

SEQ ID NO: 1175811 - RNA, 19 nt, Artificial Sequence
  Description of Artificial Sequence: Synthetic oligonucleotide
uguguguguguguguucaa

SEQ ID NO: 1175812 - RNA, 19 nt, Artificial Sequence
  Description of Artificial Sequence: Synthetic oligonucleotide
gagacacgggugugcaguc

SEQ ID NO: 1175813 - RNA, 19 nt, Artificial Sequence
  Description of Artificial Sequence: Synthetic oligonucleotide
agagcgggauaguggcugu

SEQ ID NO: 1175814 - RNA, 19 nt, Artificial Sequence
  Description of Artificial Sequence: Synthetic oligonucleotide
ucggcaccaagggcaauca

SEQ ID NO: 1175815 - RNA, 19 nt, Artificial Sequence
  Description of Artificial Sequence: Synthetic oligonucleotide
caacuugauagccuuuacu

SEQ ID NO: 1175816 - RNA, 19 nt, Artificial Sequence
  Description of Artificial Sequence: Synthetic oligonucleotide
gcugucuugcacccaggcc

SEQ ID NO: 1175817 - RNA, 19 nt, Artificial Sequence
  Description of Artificial Sequence: Synthetic oligonucleotide
uccuccgauguagcggaug

SEQ ID NO: 1175818 - RNA, 19 nt, Artificial Sequence
  Description of Artificial Sequence: Synthetic oligonucleotide
cucucggccgaaguugaac

SEQ ID NO: 1175819 - RNA, 19 nt, Artificial Sequence
  Description of Artificial Sequence: Synthetic oligonucleotide
ggucugccgccauagguac

SEQ ID NO: 1175820 - RNA, 19 nt, Artificial Sequence
  Description of Artificial Sequence: Synthetic oligonucleotide
ccgagugauugacaggcag

SEQ ID NO: 1175821 - RNA, 19 nt, Artificial Sequence
  Description of Artificial Sequence: Synthetic oligonucleotide
ugggguguugaaggcgggc

SEQ ID NO: 1175822 - RNA, 19 nt, Artificial Sequence
  Description of Artificial Sequence: Synthetic oligonucleotide
guaucuguuuuggcggaca

SEQ ID NO: 1175823 - RNA, 19 nt, Artificial Sequence
  Description of Artificial Sequence: Synthetic oligonucleotide
agagcaguccuccgaugua

SEQ ID NO: 1175824 - RNA, 19 nt, Artificial Sequence
  Description of Artificial Sequence: Synthetic oligonucleotide
auggcauguucuggugauc

SEQ ID NO: 1175825 - RNA, 19 nt, Artificial Sequence
  Description of Artificial Sequence: Synthetic oligonucleotide
ccgccauagguacauguag

SEQ ID NO: 1175826 - RNA, 19 nt, Artificial Sequence
  Description of Artificial Sequence: Synthetic oligonucleotide
ucacaacgcccuuggggau

SEQ ID NO: 1175827 - RNA, 19 nt, Artificial Sequence
  Description of Artificial Sequence: Synthetic oligonucleotide
ccuucacgcucccaugagg

SEQ ID NO: 1175828 - RNA, 19 nt, Artificial Sequence
  Description of Artificial Sequence: Synthetic oligonucleotide
uaccgcuuuugaaguucac

SEQ ID NO: 1175829 - RNA, 19 nt, Artificial Sequence
  Description of Artificial Sequence: Synthetic oligonucleotide
gguguguguggugugugug

SEQ ID NO: 1175830 - RNA, 19 nt, Artificial Sequence
  Description of Artificial Sequence: Synthetic oligonucleotide
gggucuagaagaaaauaua

SEQ ID NO: 1175831 - RNA, 19 nt, Artificial Sequence
  Description of Artificial Sequence: Synthetic oligonucleotide
cgccauagguacauguagc

SEQ ID NO: 1175832 - RNA, 19 nt, Artificial Sequence
  Description of Artificial Sequence: Synthetic oligonucleotide
guggauacgcaaaccucca

SEQ ID NO: 1175833 - RNA, 19 nt, Artificial Sequence
  Description of Artificial Sequence: Synthetic oligonucleotide
guuaagcgcaaaagcaggu

SEQ ID NO: 1175834 - RNA, 19 nt, Artificial Sequence
  Description of Artificial Sequence: Synthetic oligonucleotide
agucgccuguccaacacau

SEQ ID NO: 1175835 - RNA, 19 nt, Artificial Sequence
  Description of Artificial Sequence: Synthetic oligonucleotide
cuuuggcccugugacagca

SEQ ID NO: 1175836 - RNA, 19 nt, Artificial Sequence
  Description of Artificial Sequence: Synthetic oligonucleotide
ggauacgcaaaccuccagu

SEQ ID NO: 1175837 - RNA, 19 nt, Artificial Sequence
  Description of Artificial Sequence: Synthetic oligonucleotide
uuuggcccugugacagcaa

SEQ ID NO: 1175838 - RNA, 19 nt, Artificial Sequence
  Description of Artificial Sequence: Synthetic oligonucleotide
guaggcaccggggaccaca

SEQ ID NO: 1175839 - RNA, 19 nt, Artificial Sequence
  Description of Artificial Sequence: Synthetic oligonucleotide
acggucccggaucccaaga

SEQ ID NO: 1175840 - RNA, 19 nt, Artificial Sequence
  Description of Artificial Sequence: Synthetic oligonucleotide
gcaaguauggggacgcaga

SEQ ID NO: 1175841 - RNA, 19 nt, Artificial Sequence
  Description of Artificial Sequence: Synthetic oligonucleotide
ccgcuuuugaaguucacaa

SEQ ID NO: 1175842 - RNA, 19 nt, Artificial Sequence
  Description of Artificial Sequence: Synthetic oligonucleotide
cucgcucagcuguguggcc

SEQ ID NO: 1175843 - RNA, 19 nt, Artificial Sequence
  Description of Artificial Sequence: Synthetic oligonucleotide
aggucugccgccauaggua

SEQ ID NO: 1175844 - RNA, 19 nt, Artificial Sequence
  Description of Artificial Sequence: Synthetic oligonucleotide
gugugugguguguguggug

SEQ ID NO: 1175845 - RNA, 19 nt, Artificial Sequence
  Description of Artificial Sequence: Synthetic oligonucleotide
uucacgcucccaugagguu

SEQ ID NO: 1175846 - RNA, 19 nt, Artificial Sequence
  Description of Artificial Sequence: Synthetic oligonucleotide
agcgggauaguggcugugu

SEQ ID NO: 1175847 - RNA, 19 nt, Artificial Sequence
  Description of Artificial Sequence: Synthetic oligonucleotide
gcaauguaggucagacccc

SEQ ID NO: 1175848 - RNA, 19 nt, Artificial Sequence
  Description of Artificial Sequence: Synthetic oligonucleotide
cacaacgcccuuggggaug

SEQ ID NO: 1175849 - RNA, 19 nt, Artificial Sequence
  Description of Artificial Sequence: Synthetic oligonucleotide
ggaaaagaagucgccuguc

SEQ ID NO: 1175850 - RNA, 19 nt, Artificial Sequence
  Description of Artificial Sequence: Synthetic oligonucleotide
gugugguguguguggugug

SEQ ID NO: 1175851 - RNA, 19 nt, Artificial Sequence
  Description of Artificial Sequence: Synthetic oligonucleotide
guccuuuggcccugugaca

SEQ ID NO: 1175852 - RNA, 19 nt, Artificial Sequence
  Description of Artificial Sequence: Synthetic oligonucleotide
cucggccgaaguugaacca

SEQ ID NO: 1175853 - RNA, 19 nt, Artificial Sequence
  Description of Artificial Sequence: Synthetic oligonucleotide
gugguguguguggugugug

SEQ ID NO: 1175854 - RNA, 19 nt, Artificial Sequence
  Description of Artificial Sequence: Synthetic oligonucleotide
aggcaccggggaccacagc

SEQ ID NO: 1175855 - RNA, 19 nt, Artificial Sequence
  Description of Artificial Sequence: Synthetic oligonucleotide
acacauccguccagggucu

SEQ ID NO: 1175856 - RNA, 19 nt, Artificial Sequence
  Description of Artificial Sequence: Synthetic oligonucleotide
gugcagggauccaaauuca

SEQ ID NO: 1175857 - RNA, 19 nt, Artificial Sequence
  Description of Artificial Sequence: Synthetic oligonucleotide
ggggacgcagaaauucccc

SEQ ID NO: 1175858 - RNA, 19 nt, Artificial Sequence
  Description of Artificial Sequence: Synthetic oligonucleotide
aggccgcaggauguaguag

SEQ ID NO: 1175859 - RNA, 19 nt, Artificial Sequence
  Description of Artificial Sequence: Synthetic oligonucleotide
gcuaccgcuuuugaaguuc

SEQ ID NO: 1175860 - RNA, 19 nt, Artificial Sequence
  Description of Artificial Sequence: Synthetic oligonucleotide
cagguguguguggugugug

SEQ ID NO: 1175861 - RNA, 19 nt, Artificial Sequence
  Description of Artificial Sequence: Synthetic oligonucleotide
agcuaccgcuuuugaaguu

SEQ ID NO: 1175862 - RNA, 19 nt, Artificial Sequence
  Description of Artificial Sequence: Synthetic oligonucleotide
cugcaaagaccggcuugcc

SEQ ID NO: 1175863 - RNA, 19 nt, Artificial Sequence
  Description of Artificial Sequence: Synthetic oligonucleotide
caacucccuaaaccaagaa

SEQ ID NO: 1175864 - RNA, 19 nt, Artificial Sequence
  Description of Artificial Sequence: Synthetic oligonucleotide
guugaaccagaaggccuca

SEQ ID NO: 1175865 - RNA, 19 nt, Artificial Sequence
  Description of Artificial Sequence: Synthetic oligonucleotide
ccacucagcaauguagguc

SEQ ID NO: 1175866 - RNA, 19 nt, Artificial Sequence
  Description of Artificial Sequence: Synthetic oligonucleotide
guguguguggugugugugu

SEQ ID NO: 1175867 - RNA, 19 nt, Artificial Sequence
  Description of Artificial Sequence: Synthetic oligonucleotide
gagaacggucccggauccc

SEQ ID NO: 1175868 - RNA, 19 nt, Artificial Sequence
  Description of Artificial Sequence: Synthetic oligonucleotide
cagcuaccgcuuuugaagu

SEQ ID NO: 1175869 - RNA, 19 nt, Artificial Sequence
  Description of Artificial Sequence: Synthetic oligonucleotide
agcgcaaaagcagguuaua

SEQ ID NO: 1175870 - RNA, 19 nt, Artificial Sequence
  Description of Artificial Sequence: Synthetic oligonucleotide
gucauaggacucauggcau

SEQ ID NO: 1175871 - RNA, 19 nt, Artificial Sequence
  Description of Artificial Sequence: Synthetic oligonucleotide
caggagagacauucaccaa

SEQ ID NO: 1175872 - RNA, 19 nt, Artificial Sequence
  Description of Artificial Sequence: Synthetic oligonucleotide
uggaucuguccgagugauu

SEQ ID NO: 1175873 - RNA, 19 nt, Artificial Sequence
  Description of Artificial Sequence: Synthetic oligonucleotide
cauaggacucauggcaugu

SEQ ID NO: 1175874 - RNA, 19 nt, Artificial Sequence
  Description of Artificial Sequence: Synthetic oligonucleotide
auaggacucauggcauguu

SEQ ID NO: 1175875 - RNA, 19 nt, Artificial Sequence
  Description of Artificial Sequence: Synthetic oligonucleotide
ccuccguaucuguuuuggc

SEQ ID NO: 1175876 - RNA, 19 nt, Artificial Sequence
  Description of Artificial Sequence: Synthetic oligonucleotide
caacacauccguccagggu

SEQ ID NO: 1175877 - RNA, 19 nt, Artificial Sequence
  Description of Artificial Sequence: Synthetic oligonucleotide
caggucugccgccauaggu

SEQ ID NO: 1175878 - RNA, 19 nt, Artificial Sequence
  Description of Artificial Sequence: Synthetic oligonucleotide
ucucgguaguaggcccucu

SEQ ID NO: 1175879 - RNA, 19 nt, Artificial Sequence
  Description of Artificial Sequence: Synthetic oligonucleotide
agacacgggugugcaguca

SEQ ID NO: 1175880 - RNA, 19 nt, Artificial Sequence
  Description of Artificial Sequence: Synthetic oligonucleotide
agagagcgggauaguggcu

SEQ ID NO: 1175881 - RNA, 19 nt, Artificial Sequence
  Description of Artificial Sequence: Synthetic oligonucleotide
agaggccgaagggcuuguc

SEQ ID NO: 1175882 - RNA, 19 nt, Artificial Sequence
  Description of Artificial Sequence: Synthetic oligonucleotide
ggauaguggcuguguuuuc

SEQ ID NO: 1175883 - RNA, 19 nt, Artificial Sequence
  Description of Artificial Sequence: Synthetic oligonucleotide
gagcgggauaguggcugug

SEQ ID NO: 1175884 - RNA, 19 nt, Artificial Sequence
  Description of Artificial Sequence: Synthetic oligonucleotide
ccuuuacucggaacaccuc

SEQ ID NO: 1175885 - RNA, 19 nt, Artificial Sequence
  Description of Artificial Sequence: Synthetic oligonucleotide
cucagcaauguaggucaga

SEQ ID NO: 1175886 - RNA, 19 nt, Artificial Sequence
  Description of Artificial Sequence: Synthetic oligonucleotide
uagaggccgaagggcuugu

SEQ ID NO: 1175887 - RNA, 19 nt, Artificial Sequence
  Description of Artificial Sequence: Synthetic oligonucleotide
cugagagcaguccuccgau

SEQ ID NO: 1175888 - RNA, 19 nt, Artificial Sequence
  Description of Artificial Sequence: Synthetic oligonucleotide
ggucccggaucccaagaaa

SEQ ID NO: 1175889 - RNA, 19 nt, Artificial Sequence
  Description of Artificial Sequence: Synthetic oligonucleotide
ggugucccaucuugugauc

SEQ ID NO: 1175890 - RNA, 19 nt, Artificial Sequence
  Description of Artificial Sequence: Synthetic oligonucleotide
cucgccacucagcaaugua

SEQ ID NO: 1175891 - RNA, 19 nt, Artificial Sequence
  Description of Artificial Sequence: Synthetic oligonucleotide
cucucgguaguaggcccuc

SEQ ID NO: 1175892 - RNA, 19 nt, Artificial Sequence
  Description of Artificial Sequence: Synthetic oligonucleotide
agcggucauaggacucaug

SEQ ID NO: 1175893 - RNA, 19 nt, Artificial Sequence
  Description of Artificial Sequence: Synthetic oligonucleotide
cuguuuuggcggacaucaa

SEQ ID NO: 1175894 - RNA, 19 nt, Artificial Sequence
  Description of Artificial Sequence: Synthetic oligonucleotide
gaacggucccggaucccaa

SEQ ID NO: 1175895 - RNA, 19 nt, Artificial Sequence
  Description of Artificial Sequence: Synthetic oligonucleotide
gccuuuacucggaacaccu

SEQ ID NO: 1175896 - RNA, 19 nt, Artificial Sequence
  Description of Artificial Sequence: Synthetic oligonucleotide
gcgcaaaagcagguuauaa

SEQ ID NO: 1175897 - RNA, 19 nt, Artificial Sequence
  Description of Artificial Sequence: Synthetic oligonucleotide
accggggaccacagcccgg

SEQ ID NO: 1175898 - RNA, 19 nt, Artificial Sequence
  Description of Artificial Sequence: Synthetic oligonucleotide
cugcccacgaugggccuuc

SEQ ID NO: 1175899 - RNA, 19 nt, Artificial Sequence
  Description of Artificial Sequence: Synthetic oligonucleotide
ccaggacuugaucaaauau

SEQ ID NO: 1175900 - RNA, 19 nt, Artificial Sequence
  Description of Artificial Sequence: Synthetic oligonucleotide
ccuuuggcccugugacagc

SEQ ID NO: 1175901 - RNA, 19 nt, Artificial Sequence
  Description of Artificial Sequence: Synthetic oligonucleotide
cuggaucuguccgagugau

SEQ ID NO: 1175902 - RNA, 19 nt, Artificial Sequence
  Description of Artificial Sequence: Synthetic oligonucleotide
guguguguguguguguguu

SEQ ID NO: 1175903 - RNA, 19 nt, Artificial Sequence
  Description of Artificial Sequence: Synthetic oligonucleotide
guguguggugugugugugu

SEQ ID NO: 1175904 - RNA, 19 nt, Artificial Sequence
  Description of Artificial Sequence: Synthetic oligonucleotide
cccgcagaaaggaacgugu

SEQ ID NO: 1175905 - RNA, 19 nt, Artificial Sequence
  Description of Artificial Sequence: Synthetic oligonucleotide
guggugugugugugugugu

SEQ ID NO: 1175906 - RNA, 19 nt, Artificial Sequence
  Description of Artificial Sequence: Synthetic oligonucleotide
acgcaaaccuccaguccuu

SEQ ID NO: 1175907 - RNA, 19 nt, Artificial Sequence
  Description of Artificial Sequence: Synthetic oligonucleotide
ggacaucaaccaggacuug

SEQ ID NO: 1175908 - RNA, 19 nt, Artificial Sequence
  Description of Artificial Sequence: Synthetic oligonucleotide
ggugugugugugugugugu

SEQ ID NO: 1175909 - RNA, 19 nt, Artificial Sequence
  Description of Artificial Sequence: Synthetic oligonucleotide
ggcaucccugagacacggg

SEQ ID NO: 1175910 - RNA, 19 nt, Artificial Sequence
  Description of Artificial Sequence: Synthetic oligonucleotide
uguaggcaccggggaccac

SEQ ID NO: 1175911 - RNA, 19 nt, Artificial Sequence
  Description of Artificial Sequence: Synthetic oligonucleotide
ggcugauaccauguuugua

SEQ ID NO: 1175912 - RNA, 19 nt, Artificial Sequence
  Description of Artificial Sequence: Synthetic oligonucleotide
ccugagacacgggugugca

SEQ ID NO: 1175913 - RNA, 19 nt, Artificial Sequence
  Description of Artificial Sequence: Synthetic oligonucleotide
guguggugugugugugugu

SEQ ID NO: 1175914 - RNA, 19 nt, Artificial Sequence
  Description of Artificial Sequence: Synthetic oligonucleotide
ccguaucuguuuuggcgga

SEQ ID NO: 1175915 - RNA, 19 nt, Artificial Sequence
  Description of Artificial Sequence: Synthetic oligonucleotide
gucgccuguccaacacauc

SEQ ID NO: 1175916 - RNA, 19 nt, Artificial Sequence
  Description of Artificial Sequence: Synthetic oligonucleotide
ccccgcagaaaggaacgug

SEQ ID NO: 1175917 - RNA, 19 nt, Artificial Sequence
  Description of Artificial Sequence: Synthetic oligonucleotide
cggacaucaaccaggacuu

SEQ ID NO: 1175918 - RNA, 19 nt, Artificial Sequence
  Description of Artificial Sequence: Synthetic oligonucleotide
cccaacuugauagccuuua

SEQ ID NO: 1175919 - RNA, 19 nt, Artificial Sequence
  Description of Artificial Sequence: Synthetic oligonucleotide
ccuccgauguagcggaugu

SEQ ID NO: 1175920 - RNA, 19 nt, Artificial Sequence
  Description of Artificial Sequence: Synthetic oligonucleotide
ccggcuugccagagaguuc

SEQ ID NO: 1175921 - RNA, 19 nt, Artificial Sequence
  Description of Artificial Sequence: Synthetic oligonucleotide
gccgccauagguacaugua

SEQ ID NO: 1175922 - RNA, 19 nt, Artificial Sequence
  Description of Artificial Sequence: Synthetic oligonucleotide
gucugccgccauagguaca

SEQ ID NO: 1175923 - RNA, 19 nt, Artificial Sequence
  Description of Artificial Sequence: Synthetic oligonucleotide
ggccgaaguugaaccagaa

SEQ ID NO: 1175924 - RNA, 19 nt, Artificial Sequence
  Description of Artificial Sequence: Synthetic oligonucleotide
cccggaucccaagaaagua

SEQ ID NO: 1175925 - RNA, 19 nt, Artificial Sequence
  Description of Artificial Sequence: Synthetic oligonucleotide
gguggugcccagccaugcu

SEQ ID NO: 1175926 - RNA, 19 nt, Artificial Sequence
  Description of Artificial Sequence: Synthetic oligonucleotide
cucgguaguaggcccucuu

SEQ ID NO: 1175927 - RNA, 19 nt, Artificial Sequence
  Description of Artificial Sequence: Synthetic oligonucleotide
cguaucuguuuuggcggac

SEQ ID NO: 1175928 - RNA, 19 nt, Artificial Sequence
  Description of Artificial Sequence: Synthetic oligonucleotide
ccgcagaaaggaacgugua

SEQ ID NO: 1175929 - RNA, 19 nt, Artificial Sequence
  Description of Artificial Sequence: Synthetic oligonucleotide
cacgggugugcagucaguu

SEQ ID NO: 1175930 - RNA, 19 nt, Artificial Sequence
  Description of Artificial Sequence: Synthetic oligonucleotide
gagcggucauaggacucau

SEQ ID NO: 1175931 - RNA, 19 nt, Artificial Sequence
  Description of Artificial Sequence: Synthetic oligonucleotide
gugcagucaguuggucagu

SEQ ID NO: 1175932 - RNA, 19 nt, Artificial Sequence
  Description of Artificial Sequence: Synthetic oligonucleotide
ccgaagggcuugucaaucu

SEQ ID NO: 1175933 - RNA, 19 nt, Artificial Sequence
  Description of Artificial Sequence: Synthetic oligonucleotide
gcagguguguguggugugu

SEQ ID NO: 1175934 - RNA, 19 nt, Artificial Sequence
  Description of Artificial Sequence: Synthetic oligonucleotide
ggguaucaagggaaucaau

SEQ ID NO: 1175935 - RNA, 19 nt, Artificial Sequence
  Description of Artificial Sequence: Synthetic oligonucleotide
ccccucgccacucagcaau

SEQ ID NO: 1175936 - RNA, 19 nt, Artificial Sequence
  Description of Artificial Sequence: Synthetic oligonucleotide
cgcucccaugagguuagag

SEQ ID NO: 1175937 - RNA, 19 nt, Artificial Sequence
  Description of Artificial Sequence: Synthetic oligonucleotide
gaccggcuugccagagagu

SEQ ID NO: 1175938 - RNA, 19 nt, Artificial Sequence
  Description of Artificial Sequence: Synthetic oligonucleotide
caacgcccuuggggaugcc

SEQ ID NO: 1175939 - RNA, 19 nt, Artificial Sequence
  Description of Artificial Sequence: Synthetic oligonucleotide
cagugccucugagaacggu

SEQ ID NO: 1175940 - RNA, 19 nt, Artificial Sequence
  Description of Artificial Sequence: Synthetic oligonucleotide
gcccuagcuuggugucuga

SEQ ID NO: 1175941 - RNA, 19 nt, Artificial Sequence
  Description of Artificial Sequence: Synthetic oligonucleotide
gcucucgguaguaggcccu

SEQ ID NO: 1175942 - RNA, 19 nt, Artificial Sequence
  Description of Artificial Sequence: Synthetic oligonucleotide
caguuugcauuaggcugau

SEQ ID NO: 1175943 - RNA, 19 nt, Artificial Sequence
  Description of Artificial Sequence: Synthetic oligonucleotide
gcgggauaguggcuguguu

SEQ ID NO: 1175944 - RNA, 19 nt, Artificial Sequence
  Description of Artificial Sequence: Synthetic oligonucleotide
gcccugugacagcaaguau

SEQ ID NO: 1175945 - RNA, 19 nt, Artificial Sequence
  Description of Artificial Sequence: Synthetic oligonucleotide
cccgcucacugggcugagg

SEQ ID NO: 1175946 - RNA, 19 nt, Artificial Sequence
  Description of Artificial Sequence: Synthetic oligonucleotide
acgcucccaugagguuaga

SEQ ID NO: 1175947 - RNA, 19 nt, Artificial Sequence
  Description of Artificial Sequence: Synthetic oligonucleotide
ccccagcuaccgcuuuuga

SEQ ID NO: 1175948 - RNA, 19 nt, Artificial Sequence
  Description of Artificial Sequence: Synthetic oligonucleotide
ccaugagguuagaggguau

SEQ ID NO: 1175949 - RNA, 19 nt, Artificial Sequence
  Description of Artificial Sequence: Synthetic oligonucleotide
cccagccaugcuggaucug

SEQ ID NO: 1175950 - RNA, 19 nt, Artificial Sequence
  Description of Artificial Sequence: Synthetic oligonucleotide
cgcucacugggcugaggaa

SEQ ID NO: 1175951 - RNA, 19 nt, Artificial Sequence
  Description of Artificial Sequence: Synthetic oligonucleotide
cuccgauguagcggauguu

SEQ ID NO: 1175952 - RNA, 19 nt, Artificial Sequence
  Description of Artificial Sequence: Synthetic oligonucleotide
guccuccgauguagcggau

SEQ ID NO: 1175953 - RNA, 19 nt, Artificial Sequence
  Description of Artificial Sequence: Synthetic oligonucleotide
ccucgccacucagcaaugu

SEQ ID NO: 1175954 - RNA, 19 nt, Artificial Sequence
  Description of Artificial Sequence: Synthetic oligonucleotide
ccucggcaccaagggcaau

SEQ ID NO: 1175955 - RNA, 19 nt, Artificial Sequence
  Description of Artificial Sequence: Synthetic oligonucleotide
aaugcauuggguugaaucc
